United States Patent Application Publication US 2026/0103690 A1 - sequence listing, part 20

SEQ ID NO: 85304 - protein, 330 aa, unidentified
MEIDQYIGIDLHKAFFQACAMTCSGERMWEGKYPRTSEGIAAWRARCSRTCAVAVEATTPTWSFVDQIISDVGSVCIVDTRKTKLKAGYAAKTDRLDARRLADALRRESVVSIYFPPPPIRELRELCRHRLMLTQLRTRVLQRVRALLLRQGLGDPPVRTLRSPAGQRWLDEVVLPPRAHEALRTLRLVERGISEPLAQVETDVRREADADPIVARLQTIRGVGPIVGLMLRAEIGDLARFPTPGHLASYAGLVPRVDRSASHSRYGRITKDGSPWLRWALGQIGLHALRRPDSVGRWGRKLALRKGRMVAQVALARLACADVMETWRQG

SEQ ID NO: 85305 - protein, 338 aa, unidentified
MEAYAGIDLHASNNYTAVIDGHDKRLYGKRQPNRLDVVLDALNPFKTELKGVVVESTFNWYWLVDGLMENGYKVHLANPSAIKQYEGLKHTDDKWDAFWLAHMLRLNILPEGYIYPKEERPVRDLMRRRLLFVKHRTSHILSLQSMITRNLGLQMACRGIKRLMEEDAESMFDSPYLVLAAKNNISTIQFLTKRIEVIEREIRPLINIREEFKSLLTIPGIGNILGFTIMLEVGQLSRFPKVGDYSSYCRCVKSEKLSNGKKKDKNNQKNGNKYLSWAYVEAANFIRRFCPKAERFYQRKMAKTGGIVATKALSNKVARASYYVMRDQVPFDEDKLFA

SEQ ID NO: 85306 - protein, 430 aa, unidentified
MAAVSIPIVDWLDKPQSFHFAQGYEDRFLWNTVVANDTRSDAYMIYLGIDVAKNSHVAAAMSSEGEVLLMPFSFANSADGFTLLREKLNNLPKLPLLVGLESTAHYGENLICFLCGNGYHVAMINPLQTAAIRKSAIRKTKTDKVDAFVIAKALMMEGYTELQQSDIQILKLKGLCKTRQNLILMRTRCKIQLGSFVDQLFPDLNRFFRSGLHINVSYTLLKAHPRPAEVGALHLTYLSNLLRKASRGKYKKEDAIRLRELARNSIGTDNPALALQIRQAVSQIELFSAQLKQVESEISTIMDSLDSPIMTVPGIGYLNGAMILSCIGNIQRFSSPAKLLAYAGLDPAVVQSGNFSAKSTRMSKRGNSMLRYALINASHNVVRNNETFAQYYNSKIAQGKSHYCALGHTAHKLIRVIFALLTNNIAFDLA

SEQ ID NO: 85307 - protein, 370 aa, unidentified
MKKNTKAREKGHSEVQDKIAGKLTVGIDLGDKVSRVCVLDQEGEIIEESSVKTTDGALQQRFAAMSSTRVAIEAGAHSPWVSRLLEGCGHEVLVANARKMRLIYENDRKCDRVDAESLARLARLDPKLLAPIHHRDASRQADLAVIRARAAVVAARTQLINAMRGMVKAMGGRLPSCSTKSFHLKVDSAIPESLRLALEPLLAEISSLTESIQSYDRQIEELAKTKYPETAVLRQVTGVGALTALSFVLTLEDPRRFSRSRDVGAYLGLRPKQRESGNSSPQLGITKAGDRDLRRLLVQSAHYILGPFGPDTDLRRWGLKLTERGGKNAKKRALVAAARKLAVLLHRLWVTGEVYEPLRQVSQKETVEAA

SEQ ID NO: 85308 - protein, 370 aa, unidentified
MEKPITYVGLDVHKESIEVGLADGGRGGEVRHYGRIAATPAAVAKLVARVGERGVRLVACYEAGPCGYGLHRQLSSLGVESTVVAPSLIPKKPGDRVKSDRRDCLSLARLHRAGELTAVWVPDPAHEAMRDLVRLRLAAQGGFTRARQHLQSFLLRHGLIYQGRTPWSRAHRLWLAGLRFAHPAQQIALEDMLHAIEAHQLRLRGLDGEILKLLPDWSMAPVVEAYQALRGVSQLSAIVLAAELGDLGRFTNPRQLMGYLGVTSSEHSSGKRRRQGAITKAGNAHARRVLVEGARSYRLPARIAKAKLACLEQQPKPVRDIAWKAQVRLCARYRTLAASRGNSNIAVVAVAREMAAFLWAIAKVTPPRLG

SEQ ID NO: 85309 - protein, 417 aa, unidentified
MKLMTEKSFTAFIGIDWADNKHDICIQAADNPRREFGRLPHQVDDIEQWAQSLHQRFPGPIAIAIELSKGPIVYALQKYDYFVIFPINPSTLAKYREAFQPSRAKDDPRDAELALELLLTHPERFQPLQPQSAEIRALTTLVEHRRTLVNERVRITNRLRNTLKQYYPQALEWFSRIDTLLFCDFIERWPTLTQAKRARRSTLEGFFNDRNARREDLLEMRTKAIKSAKPLTLDSAVILPNKLQAVVLIEMLRLLLGSIKKYDKEIAELASAHADYDLFSSLPGAGPSLAPRLLVAFGEQRDRFSSAADLQKYSGVAPVTERSGKKHWVHWRWQCPTFIRQTFVEWAAQTINKSYWAGEYYQQQRDKGCTHQAAVRSLAYKWIRILYRCWQTRTPYNESVYLKALERRGSPLLKTAA

SEQ ID NO: 85310 - protein, 418 aa, unidentified
MNKHNNSGKKSEPTTKRAKPRDPMRRDTKEVLAELVGKLKEKLDPKKPAATSVGEKHKRSELRPNLDRLTVGVDLGDQWSNYCILGLEGETLAEGQLRTTQEDLAEFFQALNAARVVFEVGTHSPWVQEVIGGCGHEVLVANPRMMDGSKRRKRKNDRIDANKLARLGRVDPQSLHPIQHRSREVRQDLVVLRAREALVAARTELINATRGLVKSMGTRLPNCSSPSFAEKVEGTVPAELRDTLLPLVHMTAALSNCIREYDKKIEKLGQEKYGHTTLLRQVKGVGPITALAYVLTLENPDRFVKSRDVGPYLGLVPKQEDSGEMQPQLGISKTGDTMVRKLLVSAAQYILGPFGPDTDLRRYGLRLCERGGKNAKKRAAVAVARKLAVLLHCLWVSGEAYEPLRQGMSATTAPAVAA

SEQ ID NO: 85311 - protein, 332 aa, unidentified
MNMHPQGRVANCDQRPNAGVDVCKQHLDVCLGTLQQRLANDANGWGELTAKLKAAEVDLVVLEATGGYERGLVCALQGAGIVVARVNPRQARDFAKSMGVLAKTDQVDARTLRDFADVLSRHKDRAKYITAIPDQRRQALAELMTRRRQLVDMRVAESNHLEHAGKLAARSIASVLKTLDRQLAAIDHEINDHMDRDFKEQRTLLDSVKGVGPVTILTLTAALPELGTLGRRQISKLVGVAPLADDSGPRKGKRRIWGGRANVRAVLYMAALVAIQHNPAIKVFHSRLIAAGKPKKVAIVACMRKLLTILNAMLRDQAMWNAAKHLQLAQSA

SEQ ID NO: 85312 - protein, 367 aa, unidentified
MKQSSKIFVGMDVHKDSIDITLAEQGGEVRRFGEVRGDRAALLKAVRKLTSRGCELVFVYEAGPCGFWIQRDITALGHPCWVVSPSLIPQRPGNHVKTDRRDSENLARLARAGELTAVHVPDVRDEAIRDLVRARDDAVIAQRRARQQLKALLLRNDIRYVGKTSWTSAHLRWLAELKLPQPAQQIAFQEYVDAITVATGRIERFEQAMRDEVPTWRFAPAVAALQAMRGIQFVHAMTLVAELGDLTRFASPRQLMAYLGLVPSEDSSGQHRRQGSITKAGNAYARRALVEAAWAYRHPARLTRIIALRQDALPKQACDIAWKAQLRLCAKYRRLRARRVLETKIIVALARELSGFVWAIGQHVKPQ

SEQ ID NO: 85313 - protein, 403 aa, unidentified
MQTLVERGCGLDVHQATVVACLLIVLKNGQVQKQIRTFGTTTRELLALREWLLSQGCTHVAMESTGVYWKPVYAVLEGGALEIVVANAQHVKKVPGRKTDVKDAEWIADLLCHGLLRSSFVPPKPIRELRDLTRYRRKLVESQAAERNRLLKLLETANIKLSSVATDVFGVSGRLMLEALVEGKATPQEMADLAKGRLRQKIDELGPALEGKLEEHHRFLLRLQLDRLEAAEKDLAVLEQRLQEKLKPYAEQLTLLDEIPGVDWTLAAVIIAELGVDMSVFGSVSQLASWAGVCPGNNESAGKRKSSRIPKGNVYLKTALVEAANSAAKAKGTYLRDKFYRLKARRGYKRAAVAVAHKILVAIYHMFSDRVCYNELGDVYLDKLNKHHLTRNLGIASSVWDMP

SEQ ID NO: 85314 - protein, 391 aa, unidentified
MDRAWVGIDVGKEFHWVHVLDTSGKELLSRKLENDEIEISKLLDKVLSVAEEVLWAVDQPGGSAALLLALLWERDQRVLYIPGLTVNRASDTYRGESKTDARDAHVIADQARMRSDLNELEPGEEEVAQLRILLGRRRDLVVDQNRIITRLGEALLLLSPALERALDLNRRGPLTLLTHYQSPAQLRRAGHKRIAAYLRKRGVKGFDSVAGKALAAAKSQYITLPAESIAARIVAELAAEILALKEHIELIDEEIEQRFFDRPQAKILASLPGIGPLLGAEFLVAVGNLTAFDSADHLAAYAGLVPAAKDSGKRVGNNRRMRGGNKNLKRVFYQAAFASLRSSPESRAFYDRKRAEGKRHVQALIALARRRVNVIWAMLRDGTTFKAQSAA

SEQ ID NO: 85315 - protein, 387 aa, unidentified
MGPATCERGLPTGWSWPVEPTDVGAPVMVERRSVGLDVHARSVAAAVIDGRTGEIHRRKMTPDRAEILAWIVSLAGPVRVVYEAGPTGFGLARFLLAAGVECVVAAPSKLQRPAGDRVKTDARDALHLARLLHLGEITAVTVPSVEQEAARDLVRAREDVRGDLMSARHRVSKLLLRQGIVYSGGKAWTGVHDAWLRRQRFELVGLQIAYESAYETMLATLARRDRLDKAITAMAADSSFTPVADRLGCLRGISTLTAFGLAVEIGDWGRLSGRSIGAYLGMVPTEHSSGQSRSQGGITKTGNAHARRLLIEAAWHHRQPYRAPGVELRRRWEHAPAVAAARGHAGNRRLHARWQNFIDRKKTPVIANAAIARELAGWCWSLAVLDT

SEQ ID NO: 85316 - protein, 343 aa, unidentified
MDHFAGLDVSVKETSVCVVDDTGKIIREVKVASEPEALLAVLTNPAYHFKRIGLEAGPLSQWLYSALAEAELPVVCVETRHMQAVLKAQINKTDRNDARGIAQMMRVGLYRPVHVKTLRSQKLRMLLTHRKLLQSKAIAIENDLRGTLRNFGLKVGMVGKAKFEARIKELVEDIPDLVTLVEPLLIVRRALREQIVILHRRLLAIVRDDEVCRRLMTTPGVGPVVALTYRATVDVPARFRKSKAVGAVFGLTCSKYQSGEIDRSGRISRCGDEMMRVMLYEAAQSMLRSKKWSWLKAWAMQIARRRGMKKAIVALARRLAVILHRIWVDGTEFRWTREIVTAA

SEQ ID NO: 85317 - protein, 341 aa, unidentified
MKNLFIGVDFSKEKVDVAIIFADGLTETATRVFNEFKTTVSGYKQLVKWVEQNSYGIDSSLWLFCGENTGDYSKGLCNFLYGKGYDMWLENAKSIKDASGLRRLKSDRADASMIAEYAMRNYDKAVMYEPLSESLAQLRELFLYRQMVVRHRCSFQVRRGEKRLTMEKSPIKTMISQSGRHIVSELNKEVEKIDKRITELIKSDEELTEVFTIVTSVPGIGTQNAVCLMVYTDNFRRFNYDSRKIACYYGIAPFGKDSGTSVHSDPHVHYMANRQIKAMLTQAALAAVNFNPIMARYYMRLVERGKKKQVALNNVKNKLVHLITAMVRNRQLFSPEYKISA

SEQ ID NO: 85318 - protein, 388 aa, unidentified
MQVAADRRQTPTAIRTDLGAIFVSLELSRSTWLITSLSPAGGEKMSKHSMRSGDVPALLGRFAQLREKAQARTGQRFPIIVIQEAGLDGFWIDRVLQKEEIESHVVDPASIATSRRRRRAKTDKIDGESLVRSLLAYKRGEPRVCAMVKVPKPEEEDRRRLCRERKTLTAERVSHINRVKGLLFSQGITGYEPRRRDRRERLEELQTGDGRPLPEHLKAQVRRELDRLELLLEQIKAVEAERDLLLAAEHAATPALAAMLLKIKGIGPEFAAILWSEGLFRHFDNRRQVAAYAGLAPTPWQSGSVDREQGVSKSGNPRLRTTLIQLAWLWVRHQPHSALTQWFEERVRRNGGRLRKTTIVALARKLLVALWKYVTAGVVIEGAAMKTT

SEQ ID NO: 85319 - protein, 350 aa, unidentified
MFPRVDRACGIDVHRLKLTATIIDSLGHTITKEFSTQIQSLIELREWIIENEIERILMEATGIYWLPVYAILEDDIPTFVANPYFIKYSPSSKTDKKDSIWLAEVCLEGHFRASYVPEKGIREYRDLCREYRCLVQERTKFRNKIHRVLSRSGIRLSPVISDIFGKNGLIILQGIIQGKSMDSIFESIKHPGILQKREDIIGSICGNLSENDVFLIKSSLQIIDLLDNQIDSFVTKMEERFYQKPADIFILISIPGIQLQSASAILAEIGDINQYPSSKNLVSYAGLDPKVSESAGKASYGHISKRGNKHLRFVLVECANGISRSKNNRLKVSLKCQVQPRSSADFAVKE

SEQ ID NO: 85320 - protein, 365 aa, unidentified
MYKKMNVTGTLIQRTTTEAPQGHMYYIGLDVHKKTISYCVKDASGQVHQEGQIGATRWELDDWMKTLPQPWTVAMEATIFTGWIYDHLLPHAQQVKVAHPLMLRAIAAAKKKNDRIDAGKIADCLRCDFLPECHMASTAIRDRRRTLRYRHLLVRQMVQMKNRISGLLMETGVSHNKRRLHKVGYFRELLSSNAEVNESIRPLLRVSRDSIVRLQKTEYALVSSLQRDPLLAERIKRLRTVPGVGPITALTWALEMGEVSRFPSIRQAISYCGLCGDEKSCADKVTRTPLSKQRNKHIQRVLVEAAKLAPRQNHDLALVYEREKQKGNANRATLAVARKMVAYLLAVDRGQRDFVPFADPRSVAA

SEQ ID NO: 85321 - protein, 401 aa, unidentified
MQDTQQRDAVDVFVGVDVGKGHHHAVALDRNGKRLYNKALPNDEAKLRALIAELKTHGRLLFVVDQPSTIGALPVAVARAEGVLVAYLPGLAMRRIADLHAGEAKTDARDAAIIAEAARSMPHTLRSLRLADEQLAELTMLCGFDDDLAAQVTQTSNRIRGLLTQIHPALERVLGPRLDHPAVLDLLERYPSPAALAGTSEKTLANRLTKLAPRMGKGLAAEIVQALSEQAVTVPGTQAATIVMPRLAQQLAALRQQRDEVAAEVERLVLAHPLWPVLTSMPGVGVRTAARLLTEVAHKAFASAAHLAAYAGLAPVTRRSGSSIRGEHPSRRGNKVLKRALFLSAFAALRDPVSRAYYSRKIQQGKRHNQALIALARRRCDVLFAMLRDGTIYQPKSAPNA

SEQ ID NO: 85322 - protein, 317 aa, unidentified
MPDSRVIVGIDVSKDRLDIFLRPMGVRFSVPNDRAGRMTLAARLDRYQVTVVSLEASGGYERPVVADLMEAGFAVRLLNAGQVRKFAQAGGLRAKNDRIDAEVIAHYAEVFDGPLCQSDEQTAVLDELVGTRTLLVEQKVALGNRRRMMSDAGARTILDSAIAELEELIGEIEERLADIVAADPVLRRKAEIVTSVVGFGPVVSWTMLAQLPELGTLGRKPIACLVGVAPFDRDSGAYKGLRKIEGGRKPLRDVLYMAAQTARRFNPDLAAFDERLRAKGKKKKVAIVAIMRKLLVMLNALIRDDRLWTPNHVSVRP

SEQ ID NO: 85323 - protein, 370 aa, unidentified
MKHSIIFVGLDVHKDTIDIAIAESDGSKEVRHYGKIDGDLAALDKAVRKLQSKGAELHFVYEAGPCGYDIYRHLTKQGFSCIVVAPSLIPKKSGDRVKTDRRDAMSLARLYRAGELTAVYVPREDDEAMRDLSRAREDAVNASRTARQRLGAMLLRLGYRYHRKTMWNATHFNWLSTIKMPHPAQQIAFQEYIHAVMECGERVNRLTEQIQKLIPEWRLASVVKALQALRGVSLMVATTTIAEIGDLSRFANPRQLMAYLGLVPSEHSSGKKEKRGRITKTGNGHVRRALVEAAQTYHHQARVSRVLLARQEGLPDSIRKISWKAQVRLCGRFRKLTGRGKPRNKVVTAIARELSAFMWAIAKEVPVQYA

SEQ ID NO: 85324 - protein, 365 aa, unidentified
MASLPSGPGVVHVGMDTSMREIVCGVLRPGMEVPAVERIPNDEESVRRLIGKLGSRHLLAVCCEAGPSGYELHRLITSMGVACQVIAPSLVPKGGSERVKTDRRDAVRLTLGLRAAILTPVRVPSPAEEAVRDLVRARGDLLDDRKRMQQRLNAVLLRHGRVWRGGAKWSCAHRVWVDRQAFDEPALAEALALYRGGLDAREAELRAAEARLAAWAGREPLAAPVARLGCYRGIAQLTGLTLAAEVAGWRRFASAPAFMGFAGLTPTEYSSGSRTRRGHITKAGPEGVRTALVEAAWACRYRPAIGATLRRRQAGAPPETLARSWTAQQRLHAKYKKMTARGKPAGAVVAVARELAGFVWAEMTS

SEQ ID NO: 85325 - protein, 345 aa, unidentified
MKHFAGLDVSLEETAICVVDETGTMVREARVSSEPEALVAFFRGLGLVVERIGLEACSLSAWLHESLVAASLPAVCIETRRAKAAMGAMPNKTDRNDARGLAQIIRTGWYRVVHVKSPTCRSWRALLTARRLVLNKMRDLENGLRALLREAGLKLGTPARKEFAARVRELTAADPVLSVMTEPLLTIIAAMTRELAQLTKRVLDIVRDEPVCRRLMGVPGVGPLTALTFRATIDRPERFRRSRDVGAHLGLTPKRYQSGETDVQGGISRCGDELARTALYEAAHSLLIRSRKWSTLRAWGMQVAKRRGMARARIAVARKLAAILHRMWADGTEFRWGEADAAVAT

SEQ ID NO: 85326 - protein, 408 aa, unidentified
MYNAVGIDASKLKSTITIIQPAGVVIRKPFDVLHTSDELNTLVTYLKSLEGETRAVIECTGRYHEPVVKSLSEAGIFLSAVNPKLIKGQKQNTLRKVKSDPADARKIAKYALDNWAELREYSSMDTTREQLKTLNSQFTFFMKQKVAAKTNLISLLDNTYPGVNKLFDSPTRDDGSEKWVDYAYSFWHVDCVRKIGLKAFTERYEAFCKKHHYNYQKNKPALLFGESKQLVAVFPKEKSYKLLIQQSIQQLRLASEHIEIIRKEMNELASTLPEYETVMSMYGVGETYGPQLIAEIGDVSRFTHREAITAFAGVDPGVNESGQFKQRSNRASKNGSTRLRKTLFQVMSTYLQNKPVNEPVYQFLDRKRAEGKPYLVYMTAGANKFLRIYYGKVKECLRNLEQSQIEES

SEQ ID NO: 85327 - protein, 326 aa, unidentified
MEHELHYIGIDTAKEKLDVDVLRPDGRHRTKKFANTTKGHDELVSWLKGHKIDHAHICIEATGTYMEPVAECLYDAGYIVSVINPALGKAFAQSEGLRNKTDTVDARMLAEFCRQKLPAAWEAPHPLERALRALVVRHQALTDMHTQELNRTETAREVQRPSIDAHLLWLEAELKRLEKQIKDLTDDDPDMKHRRKLLESIPGIGEKTSAVLLAYIGLKDRFAHARQFAAFAGLTPRRYESGSSVRGASRMSKAGHVSLRRALYMPAMVATSKTEWGRAFRDRLAANGKKGKVILGAMMRKLAQVAYGVLKSGVPFDASRHNPVAA

SEQ ID NO: 85328 - protein, 350 aa, unidentified
MAEVIMDSVTLVGIDLGKHSFHLHGQDRKGLAVFRKKLNRKQLVEFFAKFHACTAVMEACAGAHDLARKLVALGHEVKLISPQYVRPFVKGNKNDFIDAEAICEAASRPTMRFVRPKTEAQQTLSMLHRVRESLVHDRTKTANQMHGFLLEFGVSLPVGFAVIKRLPALLAEHEDLPPQLIAVLERLHEHFKYLDGQIAEVEKQLSHQAHEDDLGHRLMTLPGVGPITASALSAEMGDGHQFATSRDFAASLGLVPRQHSTGGKATLLGISKRGDKNLRRLLVQCARAFMLRLDKYPSPLADWVRSLLTRRHSNVVACALANKLARMAWALARGHTVYEPGKLKLGSAAA

SEQ ID NO: 85329 - protein, 366 aa, unidentified
MLKINPLSTLYVGIDVSSKSNYVCALDFYKNKYINSSFANNQPGAEELALKILECLKEHPDITTIVAALESTSVYSIHIANYLSSCEELMRFKPYVFVLNPKCTANYKKSYIGLGKSDPIDAFVIADYARAGNIESEPWRGSQFLALKRLTRHRLHLVECMTREKTYLVSNLYLKFSELQMLEGDDQPFCDIYGATSSSVLMEYFSPEEILDSSEEDLIAFLAKKSRNRIKDISKTADLLKKAARDSYRLDKALYEPLNVSIASSFNCIETFKREIKVIDNAIEKEIKGLNPNAFIILQSIDGIGPVFAGGIIAEIGDITAFHSSDALAKYAGLTWKSNQSGDFDGEDTPMIKACLLYTSPSPRDS

SEQ ID NO: 85330 - protein, 367 aa, unidentified
MTSLTHRGFIHLGMDVARDSISVAVLAPDSDVAEVDKITSDAESVRRLIKAMGRPAGLWVCYEAGPTGYDLYRLLVSMGVRCDVVAPSLVPKGRGDMIKTDKRDARRLAGLHRAGELTAIAVPSPAQEAVRDLCRIRGDMVQDLTRARNRLGKFLLRHSLVYRGGSTWTDRHRRWLAGLSFEDKALASTFMHYRATVNLRETTLDAVEADLAGYFTTQPFGDAVLRLGAYRGVTHMGGLCLGAEVFDWARFPKARSFMNFTGLTASEHSSGLSTHRGWITRAGNSHVRGQLTEAAWSYNHVANVGHGLRERQDGVPAGTIARSWSAQTRLSKRFRALAARKNVKSVVATAVARELAGFLWAEMTAVD

SEQ ID NO: 85331 - protein, 412 aa, unidentified
MADGTVSWFAGVDWGSERHQVCLLDAAGQVVGERAFRHGGAGLAALCDWLVSVAGEPSRVAVAIEVPHGPVVDALLDRGFAVHAINPKQLERLRDRVSLAGAKDDRRDARVAAGGLRTDPHLFRPVEAGDPAVIALREWSRLAEELQQERTRLSNRIRQQLWRYYPQLLAVSDDVTAEWVLELWTLAPTPAKAARLRETTLARLLQEHRIRRVEAEQVVGLLRQPAIPVAEGVTEAAVLHLRSLVARLRLANREFYQAERKLDELCATLRESTAGAGGAPRDAAILSSLPGIGTVTLATLLSEAAGPISRRDYAALRTLSGVAPVTKRSGKSCIVTMRYAAQVRLRNAVFHWARVAALNDPTCRSRYAALRARGHSYGRALRSVADRLLGMACVLLQRQVLFDPDYGSSTAA

SEQ ID NO: 85332 - protein, 387 aa, unidentified
MTVPAQVFKIIPRHYDIFGGLDVAKKNMAVTFTDHEALMRSLRLPYSSAHLLHYVRKHFPDQRVAFVYEAGPTGFGLHDELVSAGYRCLVVAPSMVPTAPGDKVKTNRLDSRKLSVQLRGGELRSIHVPAPRYRELRHLVQLRDTQVGQLKATKCRIKSLLLCEGLAFPPAPESSQWSARVLSELLELPCSPAVRFELDQLIGTLHFHFNSAAAAQKQIRYFCQNDPELRQSIRLLASLPGIGVIVATHLVARLGDWREISNGRQIAAFLGIVSREHSTGEKANRGRITRTGDSRLRNKLIQSAWTAIRKDAELRAFYLRIYHRHPKKIAARKAIVAVARKLTTRIYAVLKEQRPYVLRPENLPAPLTAEETVGPRGRLVGPQNEQP

SEQ ID NO: 85333 - protein, 340 aa, unidentified
MTITTVGIDLAKNVFAVHGVDQNGRTVLVKPKVSRAALPELIASLPPCVIGMEACSGAHYWARLFRQYGHEPRLMAAKFVSPYRMAGKSGKNDAADAQAICEAVRRPHMRFVPVKDESQQAMQCLHRTRQGFIEEKTATYNRLRGLISEFGVIAPQSADALRHMVSVQKSSLPLQVQQCVDDLMEHVDRIEANITEYDRILSHIAKTDHRSQRLMELKGVGPTTACALVASIGNAHDFKNGRQLAAWLGLTPSQYSSEGKSKLGRITKAGDSYLRTLLVQGARSVLIGAGKRTDSFSRWVCMLVERRGYWRAVVAIAAKNARLCWASLHYGDDFRLYSVN

SEQ ID NO: 85334 - protein, 357 aa, unidentified
MKIIGVDLHTRQQTIALLDDQTGELVEKQLTHEGEQVREFYAGLPKPVLVGLEATGSMHWFLRLLEELGIEFRVGHPAKIRAAEPRKQKNDRRDARLLLTLLAENRFPAIWMPSREQHDLQILLRHRDQFVRIRTRVQLSLQALALSHGLRRGHALWTRTGQHTLRALPLAPHAGEQRDTLLALCPQLQGPIDELDREVQQETQQRPQSRRLMTHPGVGPITALATEVFLGDPRRFVDGKSVASYVGMIPSERSSGRRPRFGRLSKQGNSLLRFLWGEAAIHAVRRDPELRRFYGRKLVQKGMGKARMAAARKLGIRLWIMLRDEIDYTEFCRRGSLRRQSSGVVHAGMPAGDSGLN

SEQ ID NO: 85335 - protein, 321 aa, unidentified
MDKYTEIYGVDISKAVFDVYSISKGHVQYENDAKGFKSFKSSLPKSSLVVMEATGYYHYRLAQYLYKQKVLVSVVNPLSVKRFIQMKLAKVKTDKSDAKAICEYGKMNEVPLYTALTDVQSECLQLFRLLDNYLKKRTATKNKLHGEDTLGIPSKFVYRSLNRDLKHLNKEVKGIENRLLELVKQDQQKQLTLLKSIPGMGVKTALFLIVVTDGFSKFDKASQLCSYVGITPTIRESGSSVRGRSRISKVGNKKLRNLLFLCAFSACKHNKGCREIYERIVNKGKSKKLALIAVANKLLKQAFAIAKSGIPYDENFVSVLK

SEQ ID NO: 85336 - protein, 417 aa, unidentified
MKDDSNASPIRYIALDIHKYYSVVAGVNREGEEILLPCRVEHMNLEEWLGKHLLASDRVVIESTTNAWHVYDLLEPLVAEVLVANPIKVKQIACARVKTDNKDTLILARLLAANLVPTVWVPPQPVRELRQFVSHRRRLANMHTQVVNRMHSVAHRHHLNHPKGKDFQPKNTAWQQDASLSQLEKLQLELDMATRAHLEKQIEQMTRELGRMSHKEPWASDMLYLMQIPGCGVVTGMTIMAAIGDITRFENPKALASYSGLTPGLEQSGVKLRGKGITKEGRRELRWALVEVAWRAVRADPHWKRLFEELKKRMHPNQAIVTIAHHLLVVMWHVLTKREPYRHYSPERIAYKYLTWSWALDEEQRGGMTRPQFARYYLMRLGIGDELERVALNPKFPYRLASVEEVLAIRPELLRSE

SEQ ID NO: 85337 - protein, 379 aa, unidentified
MEIITRNEKILYIGIDVHKDTYSLCCFDFFRNELSDEMTIKATTKAVIKYLEAIKKKHREEILFACGYEAGPTGYGLCRGLQKAGYGCVVMAPTTMSNPDGKKRVKTDRIDARAIARILAYKSYSQVHLPSEEMEALKEYTRARDAKKRMFKKAKQELLSFLLRNGKTYPESGNYWTEKFFKWVKTVQFSEKWMQEAFNEYLSEVYSLKAKIELMDMKIREIAELEIIKDKVDKLVCFSGIDITTAVETAVEIHDFTRFATAAQFVSYLGLCPGEDSSGKTKNMLPLTKAGNKRVRALFCESAKAIKRTNPYGQKSKRILERQKNASPEIVAYADKATKRIRTKMKHLEERGKNYNVSSAAGARELACFVWGMMNGKIA

SEQ ID NO: 85338 - protein, 321 aa, unidentified
MQEPTLFIGVDVSKAELVISMGPERRPCSVANDAPGIERWLRELSPGALIAMESTGRYHALLAHLASQAGFKVYVLNARAVFFYARALGTRGKTDGVDAGVIARYLAEHHAHLHPWRAASSLQQRLQQLLTRRAQIVVHRSALNQVLSDVDLPDIQVCGLQAAFDGLLQVMDNKVQELIAGDVQLCAGCTRLRTITGIGPQTSALLATLFSRIDFANADALVAYSGLDPRPNDSGTKRGRRRLSKKGPPLLRRQMYLAGFAASHSKALGPLYRSIRARGFAPTQAFVILGRKLLRVAFAVWKGTESFDPARLMPANDLKKT

SEQ ID NO: 85339 - protein, 413 aa, unidentified
MDTLLFRVAGLDIHKKFVMACIRITDTQTGKVREEVRRFDSMTGDLRKLRDWLVAEQITDVAMESTGVYWKPVWNILEGALRLTLANAHELKQVPGRKSDVKDSQWIAHLLACGLITPSFVPEQAQRDLRDLTRNRTTLLQERTRVSNRIQKVLEDMNIKLASVASNVLGVSGRDMLAALARGETAAESLADLARGSLRGKSEELKRALEGHVRPHHRFLLRQLLDHLGHLEEQIATYDLQIRDTVGPFLTPKTEAVLDKVPGVNKRTIEVVVAEIGTEMSHFPTAANLCSWAGICPANEESAGKRKRIKLGNKWLKSALVESARAAARTKDTYFRAQYARLAARRGTNRAAIAVAHSLLVVLYHLIKNPESEYKDLGVAYFDQRNPARQAKHLVKRLETLGFDVTLTPHTAA

SEQ ID NO: 85340 - protein, 408 aa, unidentified
MRIIGMDIHRDFAEVVALEGTALTHLGRVEMTRDKLRAFAAELEAADHVVLESTGNTVAVVDLLSPHVARVAVANPLQVHLIAKAKTKTDKIDAGVLAKLYAAGFLPEVWIPDEATLARRRQVARRSQLVKQRVRLKGFVHSILHAHLVPRCPHADIFGGKGRAWLRAQVLPDDERSAVERHIAEHDRLTIALKDIEKDIAQAALADENVQRLMTIPGIDMIVAVGVMAAIGRIDRFGSPDALVAYIGLNPSVFQSGDGPARHGRITKRGRSHARFLLVEAAWQTVRSPGPLRAFYERVRARRGNHIAAVAVARKLAVLIWHLLTKREDYTWASPALMARKRRSMELAAGMPSERGKKGATADYNLPHRRRADRAGAELSEIAYRRMMEGWRKKKPRKGAGATPEERL

SEQ ID NO: 85341 - protein, 395 aa, unidentified
MNDVAARPMSRVMIAVDPHKASWTAAAVDKSLQVLSTIRVPVSRGGYRSLRRFAQRWSDAGWAVEGATGLGAPLTNRLSADGMDVVDVPAKLATRVRLLSTGHGRKSDDADAVSVAVAALTSRGLTTARMDSAVTALRAVVEHRDDLVRTRTQTVNRLHVVLTHLVPAGAPRGLSAKRAADLLRTVRPRDLAGKTHRGLAVDLIAEVRDLDRRITKAANDIEAAVTESGSGLTELCGIGTLTAGKILARTGSIHRFRSAAAFASYTGTAPIETSSGDIVRHRLSRAGDRQLNCCLHTMAITQISRDTPGRAYYLRKRSAGKSHKEALRCLKRRLSDAVYRQLVHDATQPMGAGPAGHTGAALSSSAAGSHPFAGTSDQSLTGPANCHHTTGNQKP

SEQ ID NO: 85342 - protein, 355 aa, unidentified
MNALNEHSIVVGVDVHKYSHTAVAMNAWGEERGTLNFTNGTMETYTRWLERMGIKENIIVGLEDVNSYGIHLVEDLRSKNYHIRYVPAILTERERKASTKRHKSDEVDAKRVGKVILTKYEDTLPAKESIADERELETARSLDLLLMERRDLVKWKTIVKNQLHCLIHQYYTESYREVCPRSFSKKAIKWFLDDLKNNQTILATSIVRRLQRLLFVEEQIYTISKEVAVIGEMSKEAKVLTTIHGCGMVTACSIVAEVITAKRFKNKHHFSMYAGIAPTPHSSGRKNKMHTNPFGNRQLNRAIHTIALSQIAIKGDPTGKEYYQKKLKEGKTKLWALRCLKHQLTKVVFQKLRYA

SEQ ID NO: 85343 - protein, 355 aa, unidentified
MKRTTKYVALDVHQATSVASVREASGRVIARTVLPTEAAALTDFFDGMRGAIHVAFEEGTQAQWLHDLLAPVVDRVVVCDRRGTPRAGNKGDQVDADGLSELLRCGGLRVVYHGSPHRVALKELARTYLNLVQDGTRVMLRLKALFRARAIPTPGGAVYRSAGRAAWLAQLPDAGVRFRAEMLYAELEVLQRLRPRAKAALLAEAAQDPAWRVLRTIPFLGPVRVALLLAMLQTPWRFRTKRHLWGYAGLAVVTRSSADYALVAGQPVRRRRAPMTRGLNRNHHRVVKDVFKGAATAATARPGALRDFYEARLAQGMRPELARVTLTRKLAALMLHCWKTGEPYDATRLSPAVPT

SEQ ID NO: 85344 - protein, 394 aa, unidentified
MGIWVGIDIAKHIHWATAIDDLGQVVLDQRVPNDPAALQQLIEALAGLGDEPVIGLDVVGGIAALAQALLGAAGFRLVHVSGLAVNRARQGTTGGEHKSDPRDARVIAEQVRTRRDLRPIEPVSELDLELRLLVGRRGDLQVEQTRRLARLHDLLVGIHPGLERVLDLTTKGGLWLVSRYVTPAEVRAAGRQGLIEHLQGAGGLSARQVQTLADRALAAAAAQHLTVPGERLAASLVRELAAEALACRQRVGELDRDLARLLERHPDAALIRSLPGMGAVLTAEFIAMAGPLTRFRSADALAAAAGLAPVLRQSGKVRFQRRPSGGNKALKRVFYQSAFCSLSSPDSRAFYARKRREGKRHHQALIALARRRIDVLWAMLHTRQPFQPNYPKAA

SEQ ID NO: 85345 - protein, 369 aa, unidentified
MEVTTIGIDLAKSVFAVCGADASGKVVLRKLLRRAQVLPFFRALRPCLVGMEACGGAHWWARQLGELGHTVKMMNPHTVASYRSGPKHDFNDAEAACEAVTRARVRAVTPKSLAQQDLLALHRARQFLIKQHTGWSNQLRALLHERGITVAKGSTALRRTLAQLPEDNPDLSGEMRELLRTMGQYWEQCHQHIAELDAQLERKCRDDERCQRLDQVTGIGPIIATAVVGIVGNGSEFRRGRELSAYLGLVPGQHSSGGKTVLLGITKHGNRYLRTLLIHGARSALRTCAQRSDALSCWMYQVLQRQGANVAAVAVANKLARIIWALLQSGRSYDPRRAACAPSPAPAGESAAPQPAPHHKLHLLMDGGD

SEQ ID NO: 85346 - protein, 387 aa, unidentified
MQKPHDNSKASPAAFMQDNTLIAVIELSLSNWLVAGLIPGVSREPLKKLEPNPEDLLKLLHGWRDEAIKAGRPITRIAVAYETGRDSFWLARWLRERGIDAHVIHATSVAVSREHRRAKTDRLDTAMLKRGFLGWLRGERGHCTVAIVPTMEEEDAKRPHREREGLVHEQTRVVNRMKSALIQFGVRNFNPKLRKASVKLETVRTPEGKSLPPNTIAALRRDMERLKIIKEQIKAIEQTRLQQFEQKPEALANRMVYLLVRIYGLGWETADLLVHELLSRTLRDRKAVARYAGLTGSPDESGSKRREKGLSRSGNARVRKIMIQLAWRMVKFQPDSALVQWFKQRTENAKGSRKPMIVALARKLIIALWRYANDGVIPEGFRLHSAA

SEQ ID NO: 85347 - protein, 420 aa, unidentified
MKVVYQTCCGVDVHKSFLVATLIKTTSAIQPSYHKKRFSTFNKSILEFKKWLLDNSCLDICMESTGKYWVPVFNLLEDKINVTIANPKWVKAVKGNKDDSKDSKWIGDLFRLGLVPGSYIPCKPIRILREFTRYRYKLTSCKSSEKNRFQNALTVCNVALDSVVSDIFGKSATSVINYLLEQPGNSINHEEISSRLLCSLKKKSESVIESIEGYQMTDAQKCRMRLIHAHMDYVTSTISDIDTTIHSLVEPYKDAIHLLCTVPGIDRNSAITIISEIGTDMSQFSNSKRLCCWAGLTPGNNESAGKKKSVRITRAGVYLKPALVQVAHAAVKSDKSPYYQTKYERIAKRRGKKRAIIAIARMILTAIYHMLSTGELWNPTDLYKIDMPEPLKSIQKEKAVKQAMKLLIAEGLLEESKLVS

SEQ ID NO: 85348 - protein, 343 aa, unidentified
MDHFAGLDVSVKETSVCIVDDTGRIVREVKVASEPEALLQVLGNPAYRFKRIGLEAGPLSQWLFSALAEAGLPVICVETRHMRAVLKAQINKTDRNDARGMAQMMRAGLYRPVHVKTLRSQKLRMLLTHRKLLQSKAIAIDNDLRGTLRNFGLKVGVVGAVKFEARIRELVENLPDLAVLVEPMLIVRRVLREQIVILHRRLLAIVRDDDVCRRLMTIPGVGPVVALTYCATVDVPARFRKSKAVGAVFGLTCSKYQSGESDWSGRISRCGDAMMRVMLYEAAQVMLTRTNKWSWLKAWAMQIARRRGMKKAIVALARRLAVIMHRIWVDGTEFRWTRDVATA

SEQ ID NO: 85349 - protein, 328 aa, unidentified
MKCDKYMGMDVHQAMTVVVVLDADGKVILETMVATEAAPIIRLVQSLSGPLHVTFEETTQAAWLHDVIRHFVTEVVVCDPRRNKLLAEGSKTDKVDARKLADLLRTGMLRSVYHGHEVTRKLKELVRAYETLSGDSRRTMTRIKAIFRGRGIRTAGRGVYQPKQREQWLEMLTEPGIQQRAAWLYEQLDQLRVLRRKAKQVMLEESRKHRAVGLLKTIPELGCIRAAFIVATVDTPHRFRTKRQFWSYVGLAVVTHMSSEYEMKAGQVVRRRKPLATRGLNHNCNHRLKEVFIGSGHQCKSAQVVWASPGEVASQRHAYRDGSADTGT

SEQ ID NO: 85350 - protein, 400 aa, unidentified
MRAVFGIDVSKASSEVAILVNSEKVHGYSMPNDAIGFSRLLKDLNTVSNPEIIFEATGVYSRRLQAFLEENGYAYTRLNPLEAKKQLDSLRVRKTDKIDAEKLAESQFILNRKPTYGQEEVYQNLRDLSRFYQNLTEDMVRTKNRLHKTLQVTFPELEQLLAAPTGEQYWNLVSSFPSKDFVLDLSPSELAEVIRQSTSKRISEKRVTLLSDKLTALAKQSYCAVKKTSPMIEEVKYYAQELLRLTKRRQVILDEMVNLAQPLPEYEILLSIPGIAETTATSIIGELGDVRRFQSANQINAFIGIDLRHYESGNFLAQEHITKRGNPYARKILFKCIHNIAAASHTNPCHIADFYEKRKRQSQTTSTKPHTIAAVHRLVRTMYYLITHNKLYDYNLTQSH

SEQ ID NO: 85351 - protein, 410 aa, unidentified
MEVLHAHCAGLDVHKDSVVACVRHMAGGKISAPVKTFKTTTQELMALSEWLSSQGVTHIVMEATGIYWKPVWHILSDGEFELVLANAAHVKNVPGRKTDVNDATWLADLMAHGLIRASFVPDEPTQQMRDLLRTRKQMMRERSSHIQRIQKTLEDANIKLDSVVTDILGLSGRRILKALIAGQTMPQALATLAHRRIHASADELEAALRGRVTKHHRFLLKLHLDQIDAFDAAIAAIDQEVNVNVEPFRAAIELLSSIPGVGNLAATVIVSEIGIDMSRFPSAGHLISWAGLCPRNDESAGKRRSNRMKKGAPWLKTTLIQCAWAASRKKNSYLQAQYLRLRSRRGAKKAICAVAASMLTAAYHMLKDGAFYKDPGADHFDRREKGKQALRLVNRLQSLGYVVQITPQAA

SEQ ID NO: 85352 - protein, 346 aa, unidentified
MLIIGCDFHSRFQQIAMLDPETGEVEERRLEHAQDEVRTFYTSLPAPALVGMESTGYTLWFAEMLSDLGHELAVGDAARIRASATRRQKHDRRDAWQLMVLLAEGTFPRLWLPSPEERDVRVLLNHRHFMVEMRTRVKNGLQALALSRNLCQGRKLWTVAGQGALRALPLGEAPARRRQDLLRLLAELNGWVQELDQCLEKEVEKRPEAQRLQTHPGVGPLTALATVVVLGTAERFANGRKVASYLGLIPSENSSGGRQRLGPLTKQGNRLLRFLLVEAAQSACRSDPALKQDYKRLAFRHGWAKARVAVARKLAIRLYIMLRDQIDYTEFVRRGSHVGMPAIGLV

SEQ ID NO: 85353 - protein, 263 aa, unidentified
MRNSYWLGVDLSKETFHAAIADVQTPSSAWASLQNAEFENTSAGIDALCAWIAQRGLSIQSLLGICVEATGRYAWTFVAQLEGRLGPVSIVNPARPAAFAKSMGLRDKTDRVDACILALYGVAHKPHPTALPTLLQRQLRELTAHYTHERRDLTACHNRLAESIQSLLVRKQLIAKISAVTNRIQAIEKEIDRLIAQDPTMQHDATLIQSIPGVAAKTCRVILAEFGDLRHYSRNELVALAGLFPKQFSSGTSVHRRARLAKG

SEQ ID NO: 85354 - protein, 341 aa, unidentified
MKQFIRIGVDLAKNYFQVHALASEGGPAVTRKLKRAKMLEFFSQIEPCRVGMEACGSAHYWARELKALGHEALLMPPAYTKPYVKRGKNDAADAEAICEAVSRPGMRFVPVKSAEQQATLMLHTTRELLIKQRTMTVNALRSHLSECGIIVAKGVGRVDELLELADKDAMLPNAAKAAVKVLAQTLEGFDKSLDDLEDEIASAHARSEMSRLLVEVPGIGKLIATAIVASMPNPSVFKSGRNFAAWLGLTPRQYSSGGKQTLGTITKQGNRYIRKLLVLGATSLLNVVGKRKGALRDWTVALLAKKPARLVTVALANKLARIVWAMMKTGEGFRTEMFSKA

SEQ ID NO: 85355 - protein, 333 aa, unidentified
MQAVTTIGLDIAKSVFQVHGVDAAGQVLIRRQLKRRVVLAFFQKLPVCLVGIEACASSHYWSRELQALGHSVRLMPPAYVKPYVKRQKNDMADAEAICEAVARANMRFVPTKTPEQQSCLMLHRTRHLFIRQQTAVINSIRAHLAEFGIVAPVGRKGVTELLHIVADPSDKRVPEVARVCLAALGNQLLSLKEQIVEFDRMIMVWHRSNETSKRLHYIPGVGPMLATALVASVADPRTFRSGRNFSAWIGLVPKQHSSGGKDRLGSISKQGDRYLRSLFVAGALAVIRYAKIHGTKHRPWLTALLTRRPTKVAAIALANKIARMAWAMMAKGE

SEQ ID NO: 85356 - protein, 354 aa, unidentified
MKQTTKYVALDVHQATTVAAVREESGRLIARSVMPTEASAIIRFFRGMRGSKAVTFEEGTQAQWLHDLLGPVVDRVLVCDRRGESQQGNKADQLDADLLSELLRRGALRAVYHGSPQRAALKELARTYQNLVEDSTRVMLRLKALFRARGISASGRKVYNVAKRSEWLAKLPERGVRFRAEALYAELEVLQALRPKAKSALVAEARRDPAWRVLRTIPFLGPVRVAFLLATMQTPWRFRTKRHLWAYAGLAVVTRTSAEYVIQGGRPVRRRRAPMTRGLNRNHNRVLKDVLKGAAIAAATRPGPLQAFYQGMLLRGMRAELARVTLTRKLAAITLHLWKTGELYDPDKLTLQAR

SEQ ID NO: 85357 - protein, 332 aa, unidentified
MNYELFVGIDISKSTIDVAVVTQACFDKPLHHVFKNSYDGFGLMLEWLSIHGIALKKVLFCCEHTGIYICPITNFMHANDLSIWVENGLHIKRSIGLKRGKSDKADAQAIASYAFSNQHKARPYLLPSATSSKLKHLLAHREQLVRHQTSFKCTCSALKGFDRENAGYCIADSQEMLALYAERIKKVDIELAALITEDQELNEQFSLVQSVHGIGKQTAMFILIHTEAFAAFSDYRKFASYCGIVPFPHSSGTSIRGRNRVSNLANKKLKALLTMCALNTIKKDNEFKRYYDRKKAEGKNAMCVLNVIKNKLLSRAFAAVKRGTPYLLEPAT

SEQ ID NO: 85358 - protein, 492 aa, unidentified
MKPKPKRKSVYRSQNATLRALFERAGDPRKVICVPLDYAKRKHVALVCDGHGDILKGAFPVENNPAGVAWLIEQISATARHRKIPKNQIFFGGEDEPAYVANFTAALREAGYLVMRVNAHEAKENRETHAASTDQLDLIGIAKTLLSRRARSSGDASPENPAYYHLRELARCRRSLVRQQTATANRIHALVDQLFPGFLDDSKTGLSAFCDASIELMKERFSAPEIAKRKPAALAKTLRRLLVHHPDEAAAKIINLARSVLPPAPHRVATLQRTLTATVDLHQCLSRNANELRTDAALTLATTPYALLTSIRGIGFVLAAGVAGELGDPAALGTTDSLCCYAGIIPKTLQSGGPDSPPVQGHVSPRCNRILKDWVVQSAQKIHLYGVPEHKERITRWNAEGRSGLYAGARHYLRLLRSLVKNQVPYLAPAGRIRSAAPEEFAAAAQDTWKVMQNKWRTIPGGLDLMLDEAHPLGFWRRVIKETHDIQLPVRL

SEQ ID NO: 85359 - protein, 423 aa, unidentified
MSERDYSKQVARRQRIGDRTLVVGVDIGSASNAVGFMNKEGKVLGSYPKMPNSREGFEEFVKITERVKAKHGLTDVIIGLEPTGHYWRKFGYFAKEKGYEVRFVRTTALKHHRELDESSSAKSDKQDALTITNITREGKYIDTVIEGGKMRQLRTLVKVREKIQKGNASAKNSLHAALDDYFPELHGIFWSMNSRGLWVLLERCPFPEDVLTLKVSSLKEMIGRASRRKAEASQKATALSQAAKESIGLKQIGSADRYRLRMCLEEVKRTELTIKDIEREIKRMLKDIPQAQYLLSIPGIGPISAAVFLGELGDTTSFPGARQIVKYAGYDPQESDSGYRVSRKFISKKGRWLLRKHLFLMSMRVVVLSRYFQGYYQRKLQTKNRFGQLPRKKEILCAVAIKLIKVIFALLRDQRSFEDTVAC

SEQ ID NO: 85360 - protein, 464 aa, unidentified
MKRHRRHTPKPRVSSSVLEHLNPNAAGIDCGSAEHFVAVPADRDATPVRSFATFTGDLQRLADWLTACRVTHVAMEATGVYWIPVFEILEARGFTVALVNARHVKHVQGRKSDVSDCEWLRDLHILGLLRGSFRPADAIVALRAYLRHRATLIESAAAIVQRMQKALVQMNVQLPLVVSDITGVTGLRILRDIVAGQRNPQHLAQHRDYRCHASEAEIVAALTGNYRPEHVFVLAQNLALFDQYQGHVATCDAAIEAHLQRLTAQVTGPTTALPPARRRQKPRDNEPRFDVRTPLHQLTGVDLSQIDGIGPYNALRLLSEIGTDMTRWSTEKHFTSWLTLAPQNKISGGRLLSSRTQPSANRAAAILRLAATNLGRTQTALGAFYRRLAFRVGKGKAVTATARKLAILVYRTLKDGLVYADPGAETYDARHRAHVIRRLRQRATTLGFDLVTRATGEIVEGAVS

SEQ ID NO: 85361 - protein, 343 aa, unidentified
MEHFAGLDVSVKETSVCIVDDTGKIVREVKVASEPDALLAVLTNPAYRFKRIGLEAGPLSQWLFSALAEAGLPVICVETRHMQAVLKAQINKTDRNDARGIAQMMRAGLYRPVHVKTLRSQKLRMLLTHRKLLQSKAIAIENDLRATLRNFGLKVGGVGTVKFEARIKELVEKAPDLMMLVEPLLVVRRALREQIGILHRRLLAIVRDDDVCRRLMTVPGVGPVVALTYRATVDVPVRFRNSKAVGAVFGLTPSKYQSGEINRTGAISKCGDEMMRAMLYEAAHILLVRSAKWSWLKVWAMQIARRRGLKKAIVALARRLAVIMHRIWVDGTEFRWTREAAAA

SEQ ID NO: 85362 - protein, 343 aa, unidentified
MDHFAGLDVSVKETSICIVDETGRIVGEVKVASEPEALLQMLMNPAYHFKRIGLEAGPLSQWLFSALGEAGLPVICVETRHMQAVLKAQINKTDRNDARGIAQMMRVGLYRPVHVKTLRSQKLRMLLTHRKLLQSKAIAIDNDLRGTLRNFGLKVGMVGKVKFEARIKELVENFPDLAVLVEPLLVVRRVLREQLGILHRRLLAIVRDDDVCRRLMTTPGVGPVVALTYRATVDVPARFRNSKAVGAVFGLTPSKYQSGEINRTGAISRCGDEMMRMMLYEAAQSMLVHSARWSWLKAWAMKIARHRGMKKAIVALARRLAVIMHRIWVDGTEFRWTREVAAA

SEQ ID NO: 85363 - protein, 316 aa, unidentified
MYLGIDVSKLTIDCCLIADGQSHQKKFQNNKGGFEQLTKWLQSHKVSDKLHCVCEATGTYYEALAEYLYSRYTITVENPRKIKGYAIAELQRSKTDTQDAKLIAQYCQDRKHKLKAWQPPAKEQKQLQEIARYLDYLKQQRATEKAKQHEAPDYIKSHIQTTISNLTTQIQTVKKQLLQFYKDNPSYNNMRKRLKTITGIGEQATAVLLSTYKRHEFKNAKQFTAYLGLDPRKYQSGTSVNGKSRISKIGSSEIRKSLYMPAVVAYRCNAFPEFVGRLKNKGKHIKLILIAIMRKLAVIAFTLLKNGQDFQVERYK

SEQ ID NO: 85364 - protein, 341 aa, unidentified
MKIRSIGIDLGKTTFHLVALGERGKTVIKKKLSRKQLLSFTANLQPSLIGLEACSGSHFLGRALSQQGHEVRLIPAQFVKPFLKSNKNDYLDAEAIAEAVERENMRFVPIKTEDQLDLQALHRVRERLVSRRTAVINQVRAFLLERGTSFRKGPASLRRQMPEILEDGEAQLSPRMRALLATLWQEWKHLEEQIELLSTEIGSICDGDPACRRLRQIPGVGPLVATAVVAAIGNGAAFRKGREFAAWLGLIPKQYSTGGRTKLFGISKRGNTYLRKMFIHGARAAVLRLKREGSLIGAWMNALEARAPRNVLIVAMANKLARITWAVLSSGEPYRAATVAA

SEQ ID NO: 85365 - protein, 435 aa, unidentified
MDEVTDEPLYRDRVCGIDIGKAGMAATIRVPSEKDPGRRMAETRSFGTTRREVLALADWLRCWQVPAVVMEATGDYWKPVFYRLEAEGLECVLADARQVKNLPGRPKRDPSDSRWLAACFERGSVSPCFVATPEFRLIREHTRYRRDLTAERTRDKQRAEKLLESAAVKLSSVLADLHGVTGRDIMDHLIAGQRDPKVLAQLARQRARAKIPRLEQALEGAEFFTPEHAALLQVMLARIDRVNADIAALTAVIDQLLAPYEEQLAQAGSMPGWGRRAAQDVIAETGVDMTRFPTGGHLASWAGRTPLDSQSGSRAGRARHKHGNRYIGAVTGETAVAAGRTQTREGARHRRLARRRGKAKACVATGNTQMRVFHKLLSNPGMRYADLGWDYYEPDRHTARQVSHHVGKLASLGYQVTLSKRPDPAPGQDADTPAT

SEQ ID NO: 85366 - protein, 356 aa, unidentified
MKYLKDIETFTSNKTVFCGIDIHLKNWNLCFMCDGQLVEKINITGNADRLIQHASRFYHRASQVHFVYEAGFSGFHLYRKLEAAGFECTITPANRVPSVLDKVKTDKRDAQKLAQYLSGGLLKAVFVPPLTVEAERQVLRMRNSYQKKLTQVKNQIKSLLNLHGIIWSDSDGNKWTKRYLAWLETVEFENENYRFILDQHLASFRFNREKIALLTRRIRDLSKNSTYHGNYMRLTACKGIGLITAMTFLLELHDVVRFPSAEKFCSYLGLTSSQYSSGEHVRMGHITREGNSHVRRVLVESAWTVIRHDPFLREKYDRIRSRGTNGKKAIVAVARSLAVRLRRCLIDQVPYELGVC

SEQ ID NO: 85367 - protein, 421 aa, unidentified
MRKADTGKVKVVKDDTLIVAIDVGMEMNRGYCTTPDGRSAKPFKFDNTREGLDTLWGMVMASKNRFTCTEVIVGYESTGPYGEPLVHYLIKKPVKVVQVNPMHTKRVKEINDNSPLKTDDKDPRVIADIILLGHALSVVIPEGDAAYLRRLNNARERHVRERTALVNQLQQLVFLLFPEFQKVIKDIKCRTPLYLLKRYPTPEAISVLEAHVLGEEMRKKSRGKFREHHADMLITLARNTIGITEGVSGLSMNIRHILVQLEMLKDLIAEIEGEMEKALGRIPYSSKLLSMKGLGVVSVAGIIGEIGDFKKFRTQSEVMKLAGLDLYEISSGKMKGQRRISKRGRSLLRKILYYAAIQTIRKNGILHEYYTRLTDRGMKRMMALVAVSRKLLGIIYAIVRDNSEYAVNFESMKRQVIKKAA

SEQ ID NO: 85368 - protein, 378 aa, unidentified
MHKDSVYLCILRENGEKIERVYGVLTPQLDSMRDFMAENEVSEVAMESTSVYWIPIWRVLVDSFELKLVNPYFIKQLPGRKSDVKDAQWIAECVMKELIRGSFIPPPLIQQLRLYDRRIFELNAELGRKYSKIDAILQRCNIRLSNYVSNTDCKSYKNVVKRISEGVTSPQELLMLVHKRIINKHGEDTILAALTGVVSEAEIDMLAQYVAESALLEDNKNKCIEKMREICNREFEEQMKNLQTIPGVSERSAQTILAEIGPDVNAFPSAKHLVSWCGFNPRNDESNKKIKSNKITHGNRFIRIASVQCAWAASRTKDCYFSKFYAFHTQVRKKFKLKVVVAVARKILVCIWHILKFNVSYKDFEPQKSVDKDCTQLA

SEQ ID NO: 85369 - protein, 319 aa, unidentified
MQSKLTFGMDIGKNEVVVACHEGAFAILKMANAVAGLRRWLGSVPAGSRLGLEATGGYHEPVAELAYSLGFTVYILNPKDVHFYARALGARGKTDRLDAQIIAAYVAEHCARLHPFTPLSADEKLLRELARRRATLVNAKSMLQQSLRVLPGFEREGRELLRAMGSFADRLERKLAQIAARSSERATLVKRLQTIDGVGTLTSIRCATLFTRVPFHSSDAVVAFFGLDPRPNDSGQHRGRRRLSKRGPSEDRRLLYNAAMSAIRTPAWRPLYLHLRNRGLASTEAIIIIARRIVRIAFAMYQNHSNFNPRLVPRPYCPA

SEQ ID NO: 85370 - protein, 378 aa, unidentified
MPSESTVHIAIELSVSSWLVAARLPGAEKSRLHRIEGGDTAALLALFAELRSRASAKLAGEANVACCFEAGRDGFWLHRLLTAHGFAAYVLEPTSILVNRRARRAKTDRLDAEGMLRVLVAWLGGDRQVCSMVRVPTPDEEDAKRTHREREHLVQEKLRIENRIQALLFTQGIRARPSLRSWARDMAELRTGDGRALLPLLRTELNRLRRRLVLILELIRELEAERAEAMAAAVNDAMVRKITALQRIRGIGSNFAAVLVREVLYRSFANRRQLASYVGITPMPYQSGGMDRDRSISRAGNPRARTTLIQLAWLWLRYQPGSALATWFRERVGLLQGRTRRIAIVAMARRLLIALWRYVETGVLPEGVEIRAEAAPMA

SEQ ID NO: 85371 - protein, 467 aa, unidentified
MGKGSGNGTTRGDRRRNARRERLRGLLPRDGAVIGIDLAEDKQALAVVDHDVRVLARKTVKVKAFRLGEALGWAVAAAKVKGFRHVTVACEPTGPRWMQVQRLCAERGLPLVCIQPLVSHIAREQQDYTSHKTDESDCVLIGRLAAELHCYIPEELDEAWAHLRHLGRRRAQLITAATASVQRIRDFLSVAWPVVTEACAGPFESVTWLAALQVVTARCGGDPARMAALGMEEFTALVRAAVPGWGGKKGWGRICRRVFTALTDTEGVVTWSRRGLLRRCADELGDLARTRAQLRAVEADMVAVLGELGLSRLGDIPGLTAVGAAAILAETGDPRRYDSSSALVKHAGLSPSENASGAFEGQAHISRRGRPGLRLTAWRAVWPMLQFNPVMAAKYAALTQAVGAAAAAGTGSQQARAAAAAARARRARARVACAASLLRWIYSMVVHGTSWDAAAASGAAACQPEAA

SEQ ID NO: 85372 - protein, 358 aa, unidentified
MNRTAGMNAGQIIGTVDGQQVVGLDIAKSVFQLHTVDMATGEIINIQLKRAKVLEYFANKAPCLIGIEACGGAHHLARRFKSQGHSVRLVHAKAVRPFVAGNKTDAADARAIWLAIQQPGVKFVGMKTLEQQATLTLHRQRDLLMKMRVMQTNALRGLLYEFGAIFARGKNALFSEIEAALESLVADIPQYVVDSLREQVERIKKLAEDIKAIELRLAQRLRADADMKRVAAIPGVGLLTATASIATMGEAKAFKSGREFCAWLGLVPRQSGTGGKVKLLGISKRGDTYLRTLLIHGARSVLMHAKEPGPWLEQIKARRPANVVIVAQAAKMARTIWAVVAKQQEYQRGHHSVKPQPA

SEQ ID NO: 85373 - protein, 340 aa, unidentified
MSIVCGFDVHRQQITFDLVDQVSGEVQTGRVTPATREGLREWLALIDASRLRVALEATTGWRFVIEELERAGAVAVLAEPAETRALRGPKRRAKTDRADARHLRELLERDGVPCSWVPPTHLQKLRVLVRLRHSLAGERRVWLQRVQAQLFHQGAPPVSGRLLGPGGAAAEAMLSPAGRELVDTADRVCAQLEREIGELDRRLAVWARRHPACRALQRLYGVGPTIAVALYAEIGDARRLSSSRRLVRLAGLDVTVSESADKRSPGRLSRQGTPILRWAAYEAALSACRRSSPDHTDYQLLRAQIGHGRATLTIARRLLRRAHHVLVAVGDDLLAPLPQP

SEQ ID NO: 85374 - protein, 392 aa, unidentified
MSQHFCFDASRSLTALEQDSTIVAVIEMSQTKWLVAALVPGVERQPLKKFDAQEEMLLKLLHRWHCEAGQAGRNIKRIVVAFEAGRDGFWLARWLRARDVEAYVIHPTSIAVSREHRRAKTDRLDTELLMRVFLGWLRGEKRHCSMVAIPTIEEEDARRPNRERQNLVTEQTRIINQIKAIFARFGLRTLRPTMRKLAEGLEDLRTAEGTPLPQNTLSELRRHLARLRFVRDQIHAVEQERLRKLAVAPAAETKSPDAMVRLIARVFGAGIETADMLVNEIFSRHWRDRKAVARYAGLTGSPDESGSRRRERGLARAGNVRVRCGMIQLAWRFVRFQKTSALAQWFAARTADGRASTRKTMIVALARKLLIALWRLVTRGEVPQGIVLRPAS

SEQ ID NO: 85375 - protein, 308 aa, unidentified
MPTTPVHVGVDIAKAAFAVRLLNENLTYANTPEGHAGFIKALPEAAHIVCEATGGYERALVQALHDAGVAVSVINPRQVRDYARAKGLLCKTDRVDAAILADYGATLRPELDQAPTAAQLKLAALVSARQDLLEMLRAEAGRAEHLDVPVLKRQHAARVRLLEKQLAALDRELAESIAADSRLAAKAARLQTVAGVGPVLAHTVLGLMPELGQLGAPQAAALAGVAPFARDSGDHKGRRHIAGGRSAVRRVLYMAAVCASQHNRILHDYYHALLARGKPVKVALTAVMRKLIVLLNRLLADPNFVLAD

SEQ ID NO: 85376 - protein, 433 aa, unidentified
MLKINYMSTLFVGIDVSSKANAVYAMDFDENKYISSSFGNNQPGADKLVDMIAECMRKHPNLDAILIVLESTSVYSVHISNFLSTSEVLMPYKPYVFCVNPKATSNYRKSYIGMEKTDPTDAYLIADFGRVGRTKKLEPWRGGQFIALKRLTRHRMHLSECITREKTYMVSNLYLKFSELQLLEGDDKPFGSLYGATSSAVLTEFLSPQEIIDMPEEDLLTFLAQKSRNRICDISKTSQLLRKAARDSYRLDKCMYEPLNISLASSFNCIHAYQKEIKLIEQAIEKCINGMNPNALIILQSIPGVGPVWASGILSEIGDITAFHSSDALAKYAGLYWPKGDSGDFTSEDNQMSKAGNPYLRYYLGEAANSVRKHIPEYADFYARKYAEVTRHQHKRALALTSRKFVRLVFGLLVKNQLYTGEKLDTEYNIESN

SEQ ID NO: 85377 - protein, 427 aa, unidentified
MYNNKANRNGWVNEKTLIGTSDVSKYSLTCFVRCPNGYEIKPFKVTNDWAGIDKFWQLLRETKIKHQLDEIIVGFESTGCYGEPLIVFMKDKPVKLVQINPMHTKRVKELSDNSPNKTDNKDPVIIADIIQLGHYLSMVKPDGAAAELRQLTHTRLAQLGYQNGLINQLESLMFRVWPEFVQIMGTLTGKTARYLIAHYPQPDKIRKFSLAKLTAKIKRVSRGRMGQDKAGQLLESSKHSLGIRDGLQSALIEIKQILKQLDQIDQFMKVLEQKMAEEIARIPYSQNLLSIKGLGVVSLGGIIGELGSFKSYQKQSEVVKMAGLDLYEISSGLHKGMKRLSHRGRSLLRTLLFLATLNMVRKDGIFNQDYERLLARGMIKIKALLVIARKLLRIMFALVRDGSEYKVGYENNKPRQKLEANITRAAG

SEQ ID NO: 85378 - protein, 331 aa, unidentified
MQRKEIYVGVDVSKLTLDVAIYGTKNHKKIVNNSEGFKQLLAWLKSLEVELEKCWVVMEYTGGYEYRLVSFCQSKQITYSRIPGLEIKKSLGMQRGKNDKIDSRRIAEYGYQKKEKLKAHKACNEAIPKLKQLLTQRSAFVNDRKRHEHRMKELLSMVDFKANDPLIKHYKEAINFLVRLIQKVELDLHTIIKADEAMKRNFELITSIPGIGNVNGWMTIAYTENFEAFKDGRQYAVYSGVVPYEHQSGTSIRGKTRVSQMANKPVKGDLSMAAKASAVHDPEMKAYYERRAALGKKHMAIMNEIKFKLILRMFAVVNKGTFYVKNLPLAA

SEQ ID NO: 85379 - protein, 346 aa, unidentified
MKHFAGLDVSLDETTVCVVDEAGGIVREARVPSEPEALVAFFRGLGLAMERIGLEACSLAAWLHEGLTAAGLPAVCLETRRAKAAMGAMPNKTDRNDARGIAQIVRTGWYRAVHVKSPACRSWRALLAARRLVLNKMRDVENGLRALLREAGLKLGTPARREFAVRVRELTAADPVLSALAEPLLTIIAAMTRELAQLTKRVLDIARAEPVCRRLMGVPGVGPLTALAFRATIDRPDRFRRSRDVGAHLGLTPKRYQSGETDVQGGISRCGDELARTALYEAAHSLLVRSRKWSTLRAWGMQVARRRGMARARIAVARKLSTILHRMWIDGSDFRWGEEGPAPAAV

SEQ ID NO: 85380 - protein, 370 aa, unidentified
MNFIGIDLHTNRFTCCYRNERSSVENPKDRVTQTFNLDMEGLASFFTTLTKDTYVLVEATITTFSFVRLFKDRVKEAIIANTYELKQISLARCNTDKIDADKLCRILKAQVLSGEQLISPVVIPPMEIQDLRSLFTTYRLYKKQNSQLKNRIHSLLKEQLHGFTQEEIFSNKKREHIREISPGSPMHFQVNQLLNRLERDEADVEELQNQVLIHGAPFMAQIEILTSMKGISVFIAIAIITDIIDVSRFRNSKAFASYLRSAPKVSNSNTSENTTGINKKGRKLSATLVTQSLTHVLDSSQKLRSWYERLCEHKKPGLVRTGLRRRVFAEIFQMLKKGEYHYGREAAKHEAKMKQYRNFLKKRKILIEIA

SEQ ID NO: 85381 - protein, 339 aa, unidentified
MTYSKWLGVDVSMDKLDISEFDGGQHKMHEIANNKRAISKFFKKFLSASTHVVMEATGIYHMVLFTKLLELGISVSVVNPLIIKRFSQMKMVRAKTDIVDARVIAEFGFEQNPKLSKLPSEDQRKIITRLRAINGMHKIINMLSNKIHALDSSGNGDKLVIKEYKLLIKAHRRSIKKFEEQISKLVKESYNEVYERVIKIPGVGPRTASMTIGFFGEFEDFESAKQVVSFVGLNPNPRESGKSVKRGSNISKKGNPLFRKILYVAALSASQYNPSCKDLYERLSNKGKSKMKSRVAVAHKLLRQIFAVVKYEREWCPNYYEKRDTFNSDDGKLAKSAAN

SEQ ID NO: 85382 - protein, 317 aa, unidentified
MQAIRRIVGVDVAKEELVVAVHTEAGSGKVANSAQAISTWLGTLERGSVVAMEATGKYHRLLAELAHAAGMRVFVLNARDVHFYAKALGARGKTDRLDAMVIARYVAEHQDQLLAWQPAQGVEQQVQDLLNRRWMLTRQVVTLKLSLRDMPTLQVASERLQEQFGRTFEEIDRQLEELVSSQDELAKGVARLRTITGFGAQASIRCAALLSKHAFSNADAAVAYSGLDPRPSDSGKKKGLRRLSKRGSGDLRRQLYQAAFAASHSKVFGPTYQALRAKGFATTEALVILARKLLRVAFAVWKGGGAFDASKFALKTT

SEQ ID NO: 85383 - protein, 334 aa, unidentified
MDKVTTVGIDLAKNSFAVHGVDQGGREMLRKTVSRARLVQLVAQLPACLIGLEACSGAHEWARQFQAFGHIVRIMAPRFVTPYRRSGKNDGNDAEAICEAVQRPSMRFVPVKSAEQQAVLTVHRVRQGFVEERTATINRIRGLMTEFGVVLPARAAEVRRGAGTAAEALPVLARRAVHELLAHLAILDERITGYDRELAVLARSSAAARRLMTVPGVGPLGALATVATVGHAHEFRDGRQFAAWLGLVPRQWSTGGKSRLGRITKRGDAYLRTLLIMGARAALQMAAGRDDKVSRWAIALKERRGYHRAVVALAAKNARIIWVLLTRQSEYRVA

SEQ ID NO: 85384 - protein, 343 aa, unidentified
MAQQMIIGIDLAQHVFQVCMVTPQGTIKTNTTVARGKLLTLMARQPPALIFMEACGGAHDWARRFRAMGHEVRLLAPQYVTPFRRGQKNDPNDALALTEAGQRPNIPTVPIKTIEQQDLQALHRVRERLVKHRTAVVNQVRGLLLEYGIVIPQGMARLRKRLPRVLEEADNGLSFLMRDLLQSLQSELSALDTRITEVTSQLTRLSHELEACQRLQAMEGIGPLSATALVAALGNGHDFQTGRQVAAWLGLVPRQHSSGGTTRLGSITKGGNSYVRRLLIHGARSVISHVRDKPDAKSAWIRQLVTRLGVNKACVAVAHKMARVAWALLHTGEQYRKPAVLSI

SEQ ID NO: 85385 - protein, 395 aa, unidentified
MLYLGIDIAKHKHYASIMDSNGNPVEKPFPVYNHRKGGQALLTKIYQHIDAPTEIKIGMEATGHYWLALYSFLLDHGFSVIVLNPIQTNAWRKGTEIRKRKTDAIDATMIADIIRFGNFLETPLVDEKMFALKQLSRFRNSLVSSMSDLKRKSLVVLDQTFPEYQKMFSDVFGKTSTQLLLEYASPSDYEQVSIDDLTQIIEQASRNRLGKEKAYQIIESASHSFGITFGKEAFSFQLKMLMEQIHFIEIQLKQCEEQMDQLLIELDTPITTVPGIGPILGATILGEIGDIKRFDKPSKLVAYAGIDASVSQSGQYNSTSMSISKRGSSHLRRALFQAAVTGYKYDPILKAFYEKKKQQGKHYYVCICAVARKLCHIIYAILKNNKPYKVPIPIA

SEQ ID NO: 85386 - protein, 289 aa, unidentified
MVKNKDFVGVDVSKDTLDVYDGNTFYQIKNSYSGFKKLMKLSGVHSQFVMEATGYYHYKLAYFLLENGRAVSVENPLKVKRFIQMRLSKVKTDKSDAKQLFEYGSSQNPDLWKGESKSQQECLQIVRLLATYTKQTTQLKNKLHGEAVLGNPSKSVVNSLRRQLRHTEKEIAKLEGELEEKVRQVNAKELTLLKSIPGIGNKSALLLLVFTDGFRRFDTSSELCSYAGLTPTIRESGSSIKGRPRISKMGNPKLRKLLFMCSFNACKYNRACKALYERLVAKGKSKNWL

SEQ ID NO: 85387 - protein, 297 aa, unidentified
MIERVHGIDRHKSFWTISVLNRAGEEVRFEGTCREFREYVGELGPSDAVALEASNGSFWWADQIEAKGAKCFVVDPRKFRIIKDSWNKTDRQDARNLAKALWVHVVTGEFGIPTVYKPSGVIRELRKLFAQYCALNRQITRLKNGLQAIFVENGVELKREGKARLFPAESGLELVKELEVSAASRVCLEVSLQVLWSVEEAKERVAAEILLAGEPLKSQVELLITVKGVTPLIALAFLADVADIRRFRTLRKMNAYLGLVPRARNSGGKERSGHITRGDLSRVLCLSGCGAAGRPRS

SEQ ID NO: 85388 - protein, 331 aa, unidentified
MTSMADVERQFIGGVDTHMDNHVAVVIDELGRVQGTESFPTTSAGYRKLLAWMRHFGPVVKVGVEGTGSYGAGLTDYLTGQNVDVVEVNRPNRQFRRLRGKSDPTDAEAAARAVLSGEASSTPKAKTGAIGAIRALRVARRGAVKASTQASNQLRDLILTAPEALRARMDALPKSDRIEVAARFRPGAIGNPIEDMKAAMRAVACRHQELAAEIAELDRRLAVLVEQAAPEGLLEKTGVATQVASVLLVTAGDNPERLVSEASFAALCGASPVDASSGKQIRHRVNQGGDRQAKPPSGASPSPACGSTREPSAMWNVDGPKARPTRRSSAA

SEQ ID NO: 85389 - protein, 348 aa, unidentified
MIVVFGVDAHKRTHTVVAADEAGAELARTTVAATSEGHLDLLRWAEGFGQHRWAIEDCRHLSRRLETDLVVAGERVLRVPPKMMAATRRGARTRGKSDPIDALAVARAALSEPGLPAAHLDGPARQLRLLVDYRETLISQRTAAQSRLRWHLHELQAGWDPPARSLDVTRTLNRIEEQLTGRPGTVADLARRYLNRIRDLTREAADLEKEITRLVADLTPTLLSIPGCGPLTAAKLIGEAADISRFHSRDAYAMWAGTAPIPVWSANTQRYRLNRGGNRQTNTALHRIAITQIRCHPDAQTYLKHRLANGNTKTEAIRALKRHLANTIYRALQHDNAHHHNITHPHAA

SEQ ID NO: 85390 - protein, 420 aa, unidentified
MDINQRRAPLAAWVGLDWADRQHLICLQANGSPETESRKLNQRPDALHEWIAQLRARFTGRKVGIAIEQSRGAVIHALMMYDFLELYPINPKALARYREAFTVSGAKDDPADAEFLMDLLRLHQARLRAWIPDTVETRRLQILTEYRRKLVNDRVRHTNRITSLLKMYFPQALDWAGELGTTLSCDFRQNWPTLTAIQQVTPTQLRDFYRQHHCRRLALIDQRIAQIADALALTDDPAIVQTLSMAVQAEAAQLRPLIQAIARFDEVIAEQLTRHPGHTLFDSFPGAGPVYVPRLLTAFGEDRSRWGGSAAFLCHSGIAPVTRKSGKSCLVHRRLACSNFVRQTFQEFAAQSIQSSSWARACYDRMRSRGFRHPAAVRSLAYKWIRIMYRCWMDSTPYDEEIYLASLRAKHSPLVQEPSE

SEQ ID NO: 85391 - protein, 394 aa, unidentified
MHSVGIDIGKRQHVAAICREGQRSADKAVLRFGADRSGLALLERWLSRHGPVERVVMESSGHYWLPLAAALHRASVPVAIVNPVSARHFSARRLQRVKSDPADARTLAALGMADRPRIREPLAGAEVREAARFAMHLVEEQSRIDNKVTRLIELGFPELEQVYDDPTCQSALAVLRLAPTARAVARKQVATLAAANRAPGHRAVGTAKAARIQALARDTIAPPELAPQIGFEMELLIAQHDLLEQQIVQAEARVAGLLDGELARRLQTIPGVGPAICATLIAEIGDILRFSDFDQLVAYAGVHPAEQSSGQKGANPETSWHMAKTGNAYVRAALYRMSVVGLQHNPTIKAHYARKRAQGKSKMNALGHCMKKSLAIVWGIWRGDHDFTPEPPIA

SEQ ID NO: 85392 - protein, 284 aa, unidentified
MTLVGCDLHSRKQQVAVLDTTTGEVLEQELVHDGDAVERFYRALRPPVTIGIETTGYTQWFHGLMHRLGHTVLVGEAAKIRAMVVRKTKTDRRDARHLLDLLKHDRFPTVWMPDPDTRDLRALVAHRVRLVRMRTMVKNGLQAIALNQRLAIGSKLWSQRGLAQLRALELAPHTRRRRDDSLELLAWITSRTDQLDAQIADVVAHDPRARLLLTHPGVGPLTALTTVLVLGPLARFPAGKHVVSYVGLAPAINASANKQHLGKITKQGNALLRWVLGQAAPLAA

SEQ ID NO: 85393 - protein, 339 aa, unidentified
MGEFIGLDVSLKETSISIRRSGKRVWRGKCPSDPALLAELIRERSPNVGRVVFETGPLSVWFYHELTRHGLPAICIDARHAKAALDMAPNKTDANDADGLAHLAEVGFFREVRVKAYDSMLIRTLVAARTKLVRITTDLSNQIRGLMKTFGLVVPAGRGGAFEAHVYRLLEGEDALARIIFPIIEAWRAMRMRSAELGRQLCAAARESRACRLLMTIPGVGVVTATAFTTAIEDPTNFARSRSVGAWVGLTTRRYQSGEVDYDGHISRRGDANLRALLYEAASVILTRTRAESDLRTWGLRLREKLGFKRAAVAVARKLAVIMHAMLKSGKEFNQRAAA

SEQ ID NO: 85394 - protein, 354 aa, unidentified
MSQTLKTSVAVIGVDIGKNSFHVVGQDRRGAIVLRQKWSRGQIEARLANLPPCLIGMEACVGAHHLSRKLQMLGHDARLMPAKYVRPYSKGQKNDFRDAEAIAEAVQRPTMKFVATKTAEQLDLQALHRVRERLVSQRTGIINQIRAFLLERGVAVRQGLRFLRGELPGILATRTDVLSPRMLRIIEDLAGDWRQLDERIEGLSNEIETLARHDQACARLMTVPGIGPIISSAMVAAIGSGDVFSKGRDFGAWLGLVPKQISTGDRTILGSISRRGNRYLRVLFVQAAWVVLVRLKQWERHGLKSWIEAAKKRLHHNVLAIALANKLARIAWAVLNKGRAFECIKTDAMASRPA

SEQ ID NO: 85395 - protein, 315 aa, unidentified
MSQEPIYVGLDVSKERIDIAARPTGTSWSVSYDSDGVDDLVAQLKDLKPAGVITESTGGLELPLVAALAASSLLVAVVNPRQVRDFAKSTGQLAKTDRLDAQVLAHFGEAVRPPIRPLRDADTQALGVVLARRWQVMGILVAEKNRLRRAAPEVRPSIEAHIDWLKQELDDLDTNLRQRVQRSPVWREKDDLLRSVPGVGPQVSLTLLAYLPELGKLNRKQIAALVGVAPFNRDSGPYRGKRSVWGGRATVRKTLYMGALVATRFNPVLSEFYRRLLDAGKPKKVALTACARKLLTILNSMARTGVHWDPTAPRP

SEQ ID NO: 85396 - protein, 411 aa, unidentified
MEVLVERCAGLDVHKNTVQACVRVPGAGGREVHQHEFGTTTRELLALRDWLAALGVTLVGMESTGGYWKPVYYVLEDAFECHLLNARHLRNVPGRKTDVKDAAWICQLVEHGLVRPSFVPPKPFRELRNLTRYRKTQIEERTREAQRLDKILQDAGVKLSSVASDICGASGRAMLSALVEGTRDPAVLAELAKGALRRKIPALREALEGRFGHHHSLIVSSILAHLEFLDESIDRLSEEIGEAIAPFGLAVEMLRTIPGVDRRTAEVLVAEVGVDMDRFGSPERLASWAGLCPGNNESAGKHYSGRTRKGSKWLRAALTQSAKATARTKDTYFAAQYARLKGRRGHGRATVAVAHSILVVVYHLLDRATPYEELGADYFLRRHDPARQATRLIRQLNALGYRATLDPIRAA

SEQ ID NO: 85397 - protein, 477 aa, unidentified
MAIKHNAATEAKPNRKQRREQQRKIWTDNPGLDVVHPNAAGIDVGNSEHYVAIAPDKSAEPVRRFGCFTADLRELAGFLKEHGVVTVAMQSTGVYWIPLYDVLEEAGLEVYLVNARDTKNLPGRKSDVQESQWLLKLHTYGLLRNSFHPTSEIRVLRAYWRQRAEHIHTATECVQRMQKALTQMNLQLANVISDIMGVTGQAILRAIVAGERDAEKLAKLRNWRIQASQEEIVASLTGNWREELVFALGQEVARYDFCRQQIRECDREIERHLGSLPARPQEVAQPGEAELPPQKRKKATGNEPAFDLAGALIRIAGVDFTRIDGISVLTTQTVISEVGLDMEKFKTEGHFASFLGLCPFNAVSGGKVLRRGTRKVVNRAATAFRIAAFTLKNSNSYLGAQYRRFRSKLGAPKAITAMAHKLAVLFYRMLRYGQEYVDRGQQFYEEKYRQQQISLLNKKAAQLGFSIVPAANAQVTA

SEQ ID NO: 85398 - protein, 319 aa, unidentified
MAQNELVVVGIDVAKHKVDVCIRSPLLRQTFETTAQGQRKLVARLRKHRVNKAVMEASGGYERGWARVLREAGIEVRIVDPKRVRNFALSAGRLAKNDVIDAEMIAWFAETFSDAPSQRHDAAHEELQTLVKARLGLIDFRMRLVSQSEHAARGLVQKAHAHVLKSLASENARLEAAICTKIKSMPDFAERAEIIESVPGFAETSSANLVAGMPELGQVSNEIAAALIGVAPYDDDSGKRRGERHIKGGRRWVRNAIYMPCVGAATLNNPVLKAYYQRLLAKGKEPKVALIACMRKLIVILNTMIARRQKWDPSRYALN

SEQ ID NO: 85399 - protein, 330 aa, unidentified
MKQEMTVLGIDLAKHVLHAVGMDNTGKIVFRKRLSRHDLLPFLAKLPMVLIGLEACGGAHDWARRFRASGHEVKLMAPPCVKPYVKSHKNDSRDAEAIAEAVTRPTMRFVPAKDVDQQDIQALHRVRERLISERTALVNAVHGLMHEYGIVMPKGVSKFRQAVVGKLASEKDKLTPLSQEMFWKLVEEFAALEEQLAYDQKKLEALATTHPECQRLMTIPGIGPLSATALVAAVSDASAFKNGRQFAAWLGLVPRQHSTGGKERLLGISKRGDSYLRKLLVHGARTTIRWVGRKTDRRSQWIRQLVERRGKNRTAVAVANKNARCEVESS

SEQ ID NO: 85400 - protein, 331 aa, unidentified
MKILDTVGIDISKLSFDAKIHGSQTYAKFENKKKGFKELVNWAYKNSSISKENILFVLEHTGLYSYEISVYFTDNKIPFVLVPGLEIKRSLGLSRGKDDKVDAKNIAKYAYRLRDEIKPYKLPSKQIQALKRLLSLRERFVKQRTGYKASIKEQKRVLIKKENNVLFETQKKMIEYLNKQITKIENEIECIIKSDEELNLQLELITSIKGIGKQTALFLIVYTHGFTRFNNWRKFASYSGIAPFPNQSGTSLRGKTKLSNLANKKLKSLLDLCAKSSIQYNVEMIKYYNKRIDEGKNKMSTINIIRNKLLARVFAVVQRKSPYVDFLKYAA

SEQ ID NO: 85401 - protein, 361 aa, unidentified
MRAVFGIDVSKVSSEVAILVNGEKVHGYTMPNDAIGFARLLGDLKTVHKPEIIFEATGVYSRRLQAFLEDNGYAYTRLNPLEAKKQLDSLRVRKTDQIDAEKLAQSQFVLNRKPTYVQEEVYQELRDLSRFYQNLTEDIVRAKNRLHKVLQVTFSELETILSTPTGEQYWNLVIAFPCKDFVLDLSKNELSKSIRQSTSKRISDKRVAYLAEKLTVLANQSYCAVKKTSPILEEVHYYAKELLRLSEQRQAVLDQMVELAQPLPEYDILLSIPGIAETTATSIIGELGDIRRFQSANQINAFIGIDLRHYESGNFLAKEHITKRGNPYARKILFKCIHNIASASHTNPCHIIVTPYQKIST

SEQ ID NO: 85402 - protein, 445 aa, unidentified
MTNATPVAKSEPEWAAYVAIDWADQKHYWKLVPAGSQQQEQGELQNTPEAVETWAAGLQQRFGGRPIAVCLEQARGALIYMLTKYAHLVLFPVHPTTAARYRETFCTSGAKDDPNDTGFLLDLLLRHRERLRQLQPDTVETRLLQFLVEERRRSVNERTRQSNRLTNCLKQYFPQILLWFDGVDSLLVGDLLERWPSLDTLRSAHPGTLRQFFQKHNCRSAERNQERIDAIYAAVPATHDAAVLEAGTLTARGLVALLRTLRDHIAELDRRIEQLVMAHPDGALFASLPGAGPVLVPRLIVALGTHRERYDSAFEVQCYSGIAPVKESSGKTSWVHFRRTCPTFLRQTFHEFALHSIGQSQWAKAYYQHLREDENKTHQAAVRSLAYKWIRIIFRCWKDNKPYDEEVYLQSLRRRGSLIVGALGLPTGVGWRTVAGFQKLSENNA

SEQ ID NO: 85403 - protein, 344 aa, unidentified
MPYNFYLGIDVSKASLSVVLMNSDSKVLWSSKKIANQPSGFKQMVEHASKIASKHADGDDYSIAAGMESTGVYGEQLSYYLADNNMSGRISLYVLNPFAVKSYRKATMQLNKNDAADARLIASYLLSMITTGQITPWQAPSLAERLLRELTRRRAELVTLREAEYNRLEKFRAGGSHPHPVIESVQELIAHLEQQIREIDEAIEKHIDDAGLRDTAELLRSIDGIGKVSSASFIGEAGDISRYRSVKQLVSRLGIAPCENQSGTSVHKKPVMSRMGSAVLRHAMYMAALVATRKNKVISAFYNRLLARGKCKKLAVIASMRKLLHIIWGVLTHRVKFDPEYAPA

SEQ ID NO: 85404 - protein, 411 aa, unidentified
MDKIYDKCCGIDVHKKLIVACFRCGKQQEVREFGATTRELLELADWLKEGGCEMVAMESTASYWKPLYNILESSDLKAMVVNARHMKAVPGRKTDVKDAEWIADLLQHGLLQPSYIPGKDQRELRELVRYRKSLVGERTRELNRLQKMLEGANIKLSGTVSDINGKSARSILEYLLTGKSIDGSKYDEMYEQKIIAHNLKATKEQIVDDLNGVMSPLQRRMMKELLLHLDELNVHIKNLNDEIDNFMKPEEKQASQAIQDVTGIGNTSAQAIISVIGSDMSRFPTDRHISSWAGLCPGDNESAKKRKSGKTRKGNALLRTTLITCAHAAVKNKKSYFYAQYMRISAHRGPNRAYVAVAHSMLISIYHILKDGVMFKDLGADYYNQFNKERKINAYLKKLKTLGWEAPIVAA

SEQ ID NO: 85405 - protein, 366 aa, unidentified
MIRKEYYIGMDVHKDSVQMAVFAETGEDPVYERRLNNDTSLLVKEVRRFSLQGTAEVAYEAGSLGYVIQRAMEKAGITCYVLPADKVAKKRDSKIKNDKRDARLIGRELRSRSIRPINVPDKADEAARDLLRCREDTSEDLRRAKQRLLKFLLRHGHNYSGGGSNWTVKHWQWMDGLQLSHTYGRMVYEEYRSQIFALEERLKRLSREVEEVAESPRYRAAVSRLRAFKGIDYIIALALLCEIGDFRRFASAKAFMSYLGFVPSENSSGNKRRQGGITKAGNGHLRKLLIEGAWHYTKNARPGKRLTQRRQNSPAQIIAIADQALHRLYKKYIRLVMKGKHKNTAVTAVARELAGFIWAVQVSPAA

SEQ ID NO: 85406 - protein, 420 aa, unidentified
MELQRNKVCGVDVHKKFLVATMLSRDCTKDTKRFSMIIEDLLKFKDWLVENNCEQVAVESTGIYWYPIHSVLEGKIDLIVANAYKIKHIPGRKTDVSDSEWIAELCLNGLIEPSRIFPKEDRELRRLTRARESYVKEVTQEKNKIHHALDSSCIKIASVLSDIFGKSGRYILNCLMEGKSVEDIIEGLPSRRIKKKADSIREAIMSSLEISQIIQIRGSLKVIDAIQERIDELDSEIQTRIIRRKSDLGIAMSIPGMGFISAAAILAEIGNCADFKNGEQLAAWCGLVPSLYQSAEKTVSGRITKHGSKHIRRMLVQVAYAISRMKDSKLKRFFLRIQAKKGSKIAAVALARKVLCILYHLLMNQENYYEDTEKKNRSIKIDKTHSPKEMSLDEMIDCIVRAGFVVEKRLTKGVDTASKG

SEQ ID NO: 85407 - protein, 351 aa, unidentified
MSSMPCLQSKVFGGIDTHKDLHMAALVDETGAVIATHAFSTTRAGYRALLRWMTGFGQLQRVGVEQTGSYGAGVVRHLALASVPVLEVTGTDKAERRTRGKDDTLDAITAARAALEGKRISLAKHRDGEIEALRVLRVARQTAVKSRRSALQLLHNMIIAAPDEVRDQTRNLTRMQLIRTCAAWRPDVEAASDPAVATRIALKSVARRIIDLNDEIANLEEPIERLVRELNPKLLDQIGIGVEIAGQLLVTAGDNPERLRSEAGFAMLCGVARLPASSGITQRHRLNRGGDRQANRALHMAAVSRLRLCPRTRAYATRRKAEGLSKREIIRCLKRYIAREAYHLITAETGP

SEQ ID NO: 85408 - protein, 349 aa, unidentified
MVIIGTDSHKHTHTCVAADELGRRLAERTVAATGAGHMELLAWAARFTDRSWALEDCRHLSRRLGRDLLGAGEPVVRVPPKPMAGARRSSREPGKSDPIDALAVARAALREPGLPVARLDGPEREVRLLVDHREDLVAQRTAHENRLRWHLHELAPGGEPAPRTLGRLPVLDALGARLGGIDGPVARIARDLVARIRELTTAVTALERELAALVRPLAPTLLALQGCGVLTAAKLVGEVAGIGRFRSAAAFARWDGTAPVPVWSGDTTHVRLSRGGNRQVNAALHRIAVTQLRLPGPGRDYVARRRAAGDSWTEALRALRRRLSDEVHRRLRADEPVHMSRPAAHQAAA

SEQ ID NO: 85409 - protein, 394 aa, unidentified
MLRRGLPGLAGQSLEQGGRVVGQHSRAFVGIDTSKLRNAVAVAEEGRGGDVRYLGEIDTAEAATRKLVVKLAAKYRQLTFCYEAGPTGYGLHRLIGKLGHDCIVAAPSLIPKKPGDRVKTNRRDAVGLAKLLRSGELTAVWVPDERHEAMRDLSRAREAARKDLKGKRQQVSSFMLRLGRHYPGKKTWGPAHMKWLMLQKLEHREQRIVLEELLGAVRQESERVERLEQAIRDAVPEWSLAEVVTAVQAMRGIDLVAAVTVLAEIGDLSRFQTPRELMAYLGLVPSESSTGDTVNRGGITKAGNGRARRILVEAAWSYRYPPRVSREKQMKVAAAPRAVREIAWKAQMRLCGRFRSLTRRGKRPTVVATAIARELAAFIWAINREVVRSHAMAN

SEQ ID NO: 85410 - protein, 363 aa, unidentified
MRILALDLGKSKSVAYTVDTATGECGFKTVRTEPAVLGRLFAEGRPDRLVFEIGPLAGWVHDAAREAGVRQIEVANVAHEAWRWRHTRRKTDRVDAVRLADLSAAGQLPTVHVPQAATRQWRGLIAYRARLVARRTAVKNRIRAILASVGETMPRGAGGWTHQTLASLEVLARSLADVGPEDLWRGELALELEALAHLEAQVATVEAKLDTVAEADQRVARLRTIPGVGPRLAELLVALFDDPNRFRSGRQVGSYLGLVPRQFQSGAMDRHGRITRHGNPLARALLVEVAWLGLRWNGRLRAIYERVHRGSRARRKVAIVAVARRLAVFAWAMLRDGTAWRPYRPAETPAQSRRAGTEAGVLA

SEQ ID NO: 85411 - protein, 405 aa, unidentified
MDREVAEVIHPVACGLDVHSAILVACLVRSGPSGGPRYEERSFPTALQGLRELRDWLFASGCQVVGMEATGVYWMPVFAALEGHVQMTVGNPNHMQNLRGHKTDRKDAKWIAGLVRHDLIRPSFVPKQEFRDARELTRFRRQLIQARTSMRNEVQRLLARQGITLGTVLSNVFGTSGMAILESLAEGRSVVDELPKLIHHSVKKKLGMLTAALEAPLFPVPRKLLALQLKRLEVVEENIQDVEGLIAAQMAPHKQQLELLMSIPGISLTSACVILAEIGVDMSVWPTEKHLSAWAGVAPGCREWRQNMRAAARKGNPYLCSALMECAIAAVKAKDCHLGGKYRHLCAQIGSKKKALMAIARKLAVIIYRLMSKGATYQEPISQPPPLSPATVASRGTFATSKNSV

SEQ ID NO: 85412 - protein, 416 aa, unidentified
MNSVEDRVVIGMDPHKRSVTIEVMAGDEIILGGGRFATDRDGFKALLARARAWPNRVWAIEGCSGIGRHVAVRLLGCGEEVVDVPPKLSARTRVFATGQGRKTDATDAHSIALVGTRMAGLRPVVDDQQLAVLRILVDRRRSLGDEHTRMVSQLHRLLLELIPGGAKKDLSAAQAKALLAKVRPRDIAGKTRRRVAAELIGDLERIYQRKKAANKELTGLVAETGTTLMDLHGIGPSGAARLLVEVGDITRFPNRAHFASWNGTAPIDASSGDQVRHRLSRAGNRQINRVLHIMATVQLRNPTQGRAYYDRRKADGKTSMEAMRCVKRRLSDIVYRHMVADAITHMVTGPGGQRGTATDSSAAGLHPNAGTSEKPLPGPATLNATPPAAAGPDPCSPRSRRPVPAPRRSRSQARFA

SEQ ID NO: 85413 - protein, 339 aa, unidentified
MKKVFIGIDFSKLKFDAAIYSVDTKAIVSTEVFDNEQSGYVDFLQWVKENTRCQKSGMLFCGEHTGYYSGNLSVFLYESGYDMWLVSGLEMKLTQGIKRTKTDRVDACKIAEHAYRYQDKRVLFQPVSKALEEIRELLSYRERLVETRKVLTTSAKEMKRVKDNASCDYIYQDSLEYIKSLNASVRDCEKRIEALLKQDISLNTNYKLVSSVVGIGLVNAALILVATANFTLFDNPRKFGCYCGVVPFEHSSGTSVRGKTRVSKMANKHLKTKLTLAAQNAARFDPELKEYYQRKRSEGKNNWLVLNNVKNKLIHRIFAVVRDGQMYEKQYVHPLKQVA

SEQ ID NO: 85414 - protein, 335 aa, unidentified
MKVFYLGVDVSKKKLDLCLRSNGKDILYDVIPNDLSSIKSWLTRTFEKFFLSEDSLVVCAEHTGQYTYPLVCATKSIGVYLCLENAAKIKYCHGIPRGKNDKIDACRIAMYAERYNDCLQPYTASELIIQKLKNLSTERSMLVADRAKYQSQLKDQVDYMEHSIYIAKCNRVEGIINTFTDYIAQIDLEIKELINQAPVIAHQMDLLMSVDGVGERVALKMIMETDAFTSFTDPRKFCCHAGVVPFVYVSGSSQRSKNRVSNRADKSIKHLLHMAALSVSQVKNSPLKKYYDRKVEEGKNKMSVLNAVRAKLVTIMFAVIRADAFFSRNYQNSLA

SEQ ID NO: 85415 - protein, 347 aa, unidentified
MEYFAGLDVSLEETAICIVDDTGLIVREARIASEPEALVAFFRASGMAMKRVGLEACSLTAWLHQALTVAGIAAICIETRQAKAAMGAMPNKTDRNDARGIAQIMRTGWYRAVHVKDPCCRSWRALLAARRMVLNKRRDVENGIRALLREAGLKVGTPSRRNFAARVIELVADDPVLAALSRSLLSVISVMTEEIDRLTKRVLDEVRIEPTCRRLMTVQGVGPFTALAFRATIDRPDRFQRSRDVGAHLGLTPRRYQSGETDVQGGISRCGDELARTALYEAAHSLLIRSTKWSALRAWGMNVAKRRGMARARVAVARKLAVILHRIWADGTEFRWTKQAAASVTAA

SEQ ID NO: 85416 - protein, 391 aa, unidentified
MIYIGIDVAKDKHDCFITNSDSEVLFKAFTIFNNLDGFNDLYQKIESVMDDVTKVKVGLEATGHYSYNLLGYLIDKGLPTYVINPLHTNLYRKSLSLRQTKTDKVDARTIASMLMSDVNLKSYSDTSYHNEELKSLTRYRFDKVKERAKLKTSVSRLVCILFPELEKLVPTLHMASVYALLSEFPSAKHVATAHLTRLTNLLSKSSKGRYGKDTAITFRDSARASIGSNMPAKSLELKHTIKLIQELDSEIDEIENEIKIIMDEINSPILSIPGINYRMGSMIIAEIGDFNRFDSPDKILAYAGFSPSTYQSGQLDGAYAHMEKRGSRYLRYALYNATKYVCHWDPTFAAYLAKKRAEGKHYNVAISHAVKKLVRVIYHLEKTKQQYIKAA

SEQ ID NO: 85417 - protein, 457 aa, unidentified
MSSISNNIQGKKGCQFSQSLRGVNLEQVLVVSIDAAKFLPKALICNYFGDVVEPAFFFSIDKPGLNHCLSKVEKATVICNAQRIFIGVEATGHYYEDIVRFFVAHGHNVAILNAATTHEERASALNWCKTDDRDLVAIAYALKNNKATESKLPTGHYRQLLALTRARRQEVRKRSLIRMEMRNLMDKIFRPYQGIITFKNNSPKKVTIFSDFFGKSSLWIMKNAPHPSDIILLGELGLRRISKENNLKLRQTTIQKLLQAAECTYTFSKEELKPELLLLQLKLQDLARLNDNIGQLENEMETLLLQTDGYLLLTITGIGVVTAAELFSEIGDISNFTSASQLIKKAGTNPMVKQSGGQKGYYGKITKQGNKHLRYVLYQAGRSICRHNDDLRPFFDRLKQKGKHSKMIFIAMGNKLLKITFAMLTKKEPFHSKTATSIRDQLAKKLKQKSSLKLIPA

SEQ ID NO: 85418 - protein, 362 aa, unidentified
MMKLKYSICCGLDVHKNVIVATIVTTNKDGISEYLQKSFSTINSDIQRFHNWLIENNCYHVCMESTGKYWIPIFNYLENDIDVCLTHPKYVKAIKGKKTDKKDSKWIADLYKFDLVRCSFIPPKDFRQLRELSRYRFKLVCMKSSEKNRIQNCMTISNVGIASVLSDPFGKTATEIISYLLEHTADSMDEKAVRKLIKKGAKSKSDEIIEAIKGYTIETDQAKKLELARGHLEYLDDMITQTEVELYVRIKPYYEFVEFVSTMPGMTELSSTIVLAETGVDMDIFDDAKHLCSWCGLSPANNESAGKKKSVRIAKAGDYLKPMMVQCALAAIKSKKSLILQSNMVESKSDVDTKRQSLPLQE

SEQ ID NO: 85419 - protein, 446 aa, unidentified
MKTKTHPKTQYIYVGVDSHKLTHTATIINCFNEKLGAITFKNNYKGFASLTKLANQVGDDTPAIYGLEDTKQYGYLLKNFLMKNGLIVKHINYSETAAERRKYPVSIKNDNLDSSCIAKVTLDNFDKLQDAQDDEIYWTLKQFTVMRETLTNSSARFKRKLHNQLMFNYPNYYDLFTDISCKSAIRFWEKYPSPDLLKNVTDEELFNFFKEDSNSLWTSRINKIIENVRKIDLNNFVYQENRNIIIKMTIKQIKENILMREDLEWEMIKIYDIIGKKLHTFPGMNKILASYILAEIGNIDRFATSSKLAKYAGIAPIDYSSGNSSKAYANKCGNRKLNMRIYIIAFSCLGRGSGTFPMNPIFAEYYLKKISEGKTKHQALICVMRRIINIIYNILKNNTEYKIPVQLLEECKTKFLKRQQEQEDTAEKIMNRIASREILKNAGKNV

SEQ ID NO: 85420 - protein, 377 aa, unidentified
MSKIRFVGLDVHAETIAVAVAESAGEVRSLGVIPNRPESVRKLIGKLGPGEKLKCCYEAGPTGYILYWQLTRMGVACEVIAPSLVPVKQGDRVKTDRRDAEKLARCYRAGELTPVWVPDAAHEALRDLVRAREAAKKDQLRHRHRLGKFLLRHGVRPVNAGPAWTQKYLNWIRIHARFDEPALEATLADYLGEVTHAGERIATLEQAIDKAVANAPAEIRAVIEALQALRGVAQTTAVTVVCELGSLSRFASPRQLMGYSGLVPREHSSGNKTRRGAITKSGNAHLRRVLVEAVWCYRHRPNVQGRVLRRQKALALSDEVRQIAWKAQQRLYKRFVALTARGKTSGQAMTALARELLGFLWAIAVSVEKRFPVAKAA

SEQ ID NO: 85421 - protein, 361 aa, unidentified
MNATTVAVDLAKSVFQVAVADANWMPIESHRLTRTQFERWFANREVGLVIMEACGSAHHWARWLKRQGIEVKLLPAAYIRAYVKRNKTDAADACALLEAARCADIVPVRIKTVEQQALQGLHRIRSLWMSTRTSRINALRGFCREFGLAVPTGARTGVEVMSRTLADPNSPVPILIRGSMKLLIEEIRLLELRIAQLEKELTALAKQSPACTTLLSIPGIGLLTATAMVAATSGDVTHFKDARHFASWFGLTPKEHSSGSTRKLGRISKKGDRYLRMLLTHGARSVLRTASLARLAGRGLDGLKSWALGVQGRTNHNKAACALANKLARICYAVLRDGADYGKPAPRLSRKIERASFAMAA

SEQ ID NO: 85422 - protein, 346 aa, unidentified
MEHYAGIDVALELSSVCVVDAQGKIIRETKVASEPEALVAFFASLGFAVKRIGLEAGPLSQWLHAGLKRAGFDTVLLETRHVKAALSAMMVKTDRKDARGLAQLIRMGWFRPVHAKSMGSQEVRALLVARKQLLGRLIDVELSIRGILRGFGLKVGVVTRKGFEGRIRELVSGHITLERIAGAMLSARATLKVEYEKLHKTVLTIVREDAVCRRLMTVPSVGPLVAITYKSAMDDPNRIAKSKAAGALFGLTPKKYQSGEKDVTGGITRTGDEMVRTALYEAANVLLARITRFSKLKRWGMDVAKRRGSKRAKVALARKIAVILHRMWVDGTTYRWTNAQPNAVQV

SEQ ID NO: 85423 - protein, 336 aa, unidentified
MFSLGVDIADKKFDISLYDTVTKKHIIQASFINGEAGFIDCYNQIKEKSGDLKALTVFMESTGGLEEPLYNFFNQKVKDCYILNPQQAKNFKKALFIDQKTDNIDAKALALMIILPQLQKSLKTQNDEMSQTLISLISQREFLIKENTRAVLRKLRISKTKVDGTKDFLVLQLDRNIEHLTEEILIIDKEIMKQIKKNPKYLKNYELLKEIPGIGDKTAKILVSYLGLNADLFSSAEKFAAYAGLYPTENQSGNHVGQAKLTYKGCRKLKSSLYNCALAAIKNENKLHEYYLQKIASGKSKKQILIAISNKLAKLSWSIIKYQKRYDNSKFMPNLA

SEQ ID NO: 85424 - protein, 448 aa, unidentified
MNKIIKKEGKKVNISQLIVINPHTAGIDVSDTEMMVAFPINSKELEVRAFGGFTRDLHLIAMTLKQNGITSIAMESTGVYWVSLFLLLQEQSFEVCLVNAKHVKNVTGRKDDETDAEWIQKLHSCGLLSPSFQPDYMTRALRSLVRHRKNLVRTSTTYLNRMQKALELMNIKLQTIISDIDGKTGLSIIKAILDGERNPEVLADLRDLRIKASREDIIKSLEGYWTTEHLFELRQCYQLYCTHWQMINECDLEIEKQLIQQIAFQNLGDISTISQTKRKRIPKHQVPYNLTAYIRKFLGVDVTEIFGINEVSALSIISESGTDMSKWKTEHHFTSWLGLAPNTKVSGGKVISSKIMKKKHYAGQAFRMAALSLNNSKSPLGDFYRRIKSKAGPGKAIVATARKLAIIWYKMLSNQEDFNPKALEDYQQKYKEKKIRQLRRKLETLEAA

SEQ ID NO: 85425 - protein, 338 aa, unidentified
MEQVCTVGLDIAKNVFQVHGVDESGTVLLRRQVRRRQVLDFFGKLPACLVGIEACATAHHWARELAKLGHEVRLMPARYVKAYLKRNKNDAADAEAICEAVTRPTMRFVPVKTPEQQSLQMLHRSRRLLVQHRTRLINAIRAHLAEFGIVAGVGRNGIAALLELIAEGGDERVPELARDCLGALATQLDLVTRQIREADSRILVWHRSNEVSLRLAAIPGVGPLTASALVAAIPNPKVFRSGRDLSAWIGLVPKQNSTGGKERLGSISKAGDRYLRQLLVIGAMAIIRRARKLGQTRYPWLVPLMQRRAVKVAAVALANKTARIVWAMMVRNEPYRAA

SEQ ID NO: 85426 - protein, 307 aa, unidentified
MFVGIDVAKDRLDVHVRPAGESFVVARDGEGIEELARRLGAVMPTLVVLEATGGFETVVAAGLAAAGLPVAVINPRQIRDFARATARLAKTDTLDAAVIAHFAEAVNPPVRLLAGPQQRLLGELMARRRQLIEMMVAEGNRRRLLTARRALKSVDRVLAVLKAQLEEIDHDIDIAVRGTPAWREAEDLLISVPGIGHKIARTLLAEMPELGRLDRRQIAALTGVAPFNRDSGTLRGRRAISGGRIVVRSALYMSVLVSIRRKLPLAETYHRLRASGKPAKVAIVACMRKLVTILNAILRDKKPWATA

SEQ ID NO: 85427 - protein, 363 aa, unidentified
MFVAGLDAHTRYVIVVVVDRMGELVLPPTRVRMGDAERLLTVLAPYRPLDAVMETSSAWPWLHEVLTGAGIQFVLAHARRLRAIADANYKSDDVDAELLARMRLARLIPEVFPTPGAQREWATLLRHRATLVAQRTALANRLHGQFHTRGLHLERGRLLTQAGRQWLRTEAWPHLSLEQRAVARSHLRVIAGLRPLIRAVDRHIAQVAPAIPEARLLMTIPGIGPQRALVVCAEALPVSRFRTPGHLASYAGLVPRTKQSGERPVRHGGIPAGANRWLRGALVRAVVSHVQHQPASPLTAYYQAQKARVGWPVARVATARKLARVIHAMLRTRAPWMPLASPASPGPDPCGESSFNRMPHPTA

SEQ ID NO: 85428 - protein, 364 aa, unidentified
MKKLAYLGVDYHVKTVTITVYLNDEGFYETVRLNNTDKTIAKYLKKLSTQFEIKLCYEASSSGYVFQRKMDKLGYHCDVIAPSLIPRKPGDKRKNDHRDSKKLAENYAKGLLTLVHPPTKSEESIRGLVRCHLAMKNSEKRIKNQINAYLLSKGHRWPKSKWTLEHLNWLSTLELCDDYSHMVLEEYLGHLEYITTRVQALTQEIEKLANSDIYASSVKKLRAFKGIGTMTAMLLIVEITDFRRFPTAGALMAYLGLIPGEESSDSRSKDKAITKAGNTRCRKAIIGAIQHYMTQPRITLSMQRDLGNVDAHSANIAIKCMKRLNKRFWTLIHKGKTPNKVKVAIARELVGFVWAMMQPEPTMI

SEQ ID NO: 85429 - protein, 306 aa, unidentified
MGGVGVDVSKPILDVAWSSGKERAFANSLTGWKALARGLSKDDRIVLEATGGYEQGVLDYLTQAGFWVCRVNARQARDFAKGMGLLAKTDRLDARMLAQMACVVGTLNRYVPPPPAQREIGQWITRRQQVVETLHRVRQRLAMLEDAQLRRWAQQELLAATRQLRRIEQGLRERLQALPVRSAFAHVKGAGVVLTTTLIGLVPELGRLSRRAIAKLIGVAPLNDDSGTRHGRRSVWGGRALVRAVLYMATLTAVRHEPPLRTMYQRLRANGKAKKVALVACMRKFLVILNARVREHYEQNPPSPAL

SEQ ID NO: 85430 - protein, 337 aa, unidentified
MNKTDLSFTPCGIEVSFQTLLVDRAGKAPREFPNTPAGHRALLAWLRRSPLPLRVCMEATGLYGLDLALQLAAAGIPLLVANPRAVRHFARAMMQRSKTDLLDAAVLREFAARMPFEPWQPPSPSALNLMALAHRLQALTRMLAAEKNRLHAASLSRALPDLVRRDVVRSMQSLGRAIRRLTQEALLFIADDPQLARRTELLLSIPGIATTSALHLLAELLRFGPDSHVRQWVASAGLDPRAHVSGTSVAKKPAISKAGNAHLRRALYMPALGASQHEPYLRAFYQHLQQRGKTKLQALVAVMRKLLHAIFGMFKHNAAYDGSKVYVLKPKAELLCA

SEQ ID NO: 85431 - protein, 281 aa, unidentified
MRRPTEKVIAGIDLHSNNLVIGLINQDGKRLGHQKLDCDLAEVEKFLRPYKRQFQSMAVESTYNWYWLVDGLQAKGYPIALANPAKIEQYSGIKHADDKHDAFHLAELQRLNILPKAHIYDAQLRPVRDLLRRRTNLVQERTALMLSFKSLYSRTTGKQLPLAHLKQLTPKEAPKLYQHPANQLIAQIQVEHIEALDKSIQRVEKAVLAAAREIPLYPKLLTLPGIGRILGMTITMEVGDIKRFKTDGNFASYCRTVDSRRLSNGKQKGENNQKCGNSYLS

SEQ ID NO: 85432 - protein, 338 aa, unidentified
MNLSVIGMDIAKHVFQLHTVNQETGEITRIKLQRSEVIPFFAQCEPALIAMEGCGGAHWWARQLMQLGHEARLLPAKAVRPFVLRNKTDAADARAIWTAAQQPEMKVVAIKSEIQQSILALHRLRAQLLKFRHMQTNAIRGLLLEFGVTLPEGYTALRKALPTVLASLDGKMLGMLLDTLREQWARVQSLDDEIALIEGRLKRVMSETAACKLIADIPGVGLLTATAAVATMGDPRTFKTGREFAAWLGLVPRQRGTGGRVRQLGISKRGDVYLRTLLMHGARAIIAKGKRSDWVAGLLARRPYSVAVAAIANKLARTIWAVLATGKQYEAAAFSAAM

SEQ ID NO: 85433 - protein, 427 aa, unidentified
MKEPTIACGIDVHKMFLQVCILSRSGEASQHRFHNTLNGILALKDLVLAEGCEIVAMESTGIYWYRLFLELESDIRTIVANARQIKSIPGRKTDMNDARWIAELALHGLIRPSRIFPRRDREFRDLTRNRETLVRTRTTIKNRIHKILDSAGIRLNLALKDLFGKSGRHLLSGLAEQKDLETTLATIPSPRILRRADQLREILQGNPLSPIQLHLLTTQLHLLEEIEEKIAHLDELILASLEDPQLEAVAICTSVPGISITAATTILAELGDVRDFSTASRLVSWAGLAPSVYQSADTQVCGKITKQGSKSLRWILVQAAQAASRTTGTVFSSFFRRIAYRRGRNKAIVALARKILSILWHLLVNRESYVEPGLKRVRKLPARMTLPKISIDDAVETLLSAGYRIYSPENQKSTGKGVRAERATHPL

SEQ ID NO: 85434 - protein, 356 aa, unidentified
MSEITRVGVDLAKSVVQVNAVDAGGKLVTNRQLSRDKFLPWCAQLSPGCLVAMEACGGSHHWARKLIALGLNVKIIAAHLVTPYRLQGKGGKNDANDAAAVCEAASRPNMRFVPVKTTVQQGILCVHSLREGLKEERTASINRIRGMLTEFGLVVSKSPEKLREKLTEMLEDASNDLSGLARLVVQEAYDHWKDIDKRIEWCDERINAHVKDDAQAKAAKELVGVGSVTASAVVATVGDFNQFKNGAQFGAWLGLTPRQNSSGGKNSLGGITKRGNMYLRMLLIQGAKSAVMTAHMRSDPISKWLFQLREKSGWQKAAVAMANKNARILWAIMTKGCRFDPRHVSVKPAGPATAMA

SEQ ID NO: 85435 - protein, 362 aa, unidentified
MLHVGVDLHKQTSQIAVLSEDGELTQHRVANDIQRLEQFFTQLPPATPVAIEASGTWWWLVDLLERLGHHAILSHPKQTKAIAAARLKNDRVDAHRLVLLLRGDLLPSVWIPPAPLREARELLRHRMQLVWLRGEIRNRLVALLDRRNLHPTTAKSWFTKRGQRELQQLPLAETPSRVREDCAALLPLLDAQIRRLDAELVAHWGRDARVQRLTTIPGIGPFIAILLVLELGDIQRFANAKRVSSYIGLTPRIRASADRVRTGHISKEGNRLLRWALVLAATQAVRRPGPLRAWYHAVKKRRGRNVARVALARRLAEIVYHVWKHECDYFTVLRRGDRAGVSSPGEMGLSTAALIGQPPSRG

SEQ ID NO: 85436 - protein, 412 aa, unidentified
MEVQRNKVCGVDVHKRFLVATILSRDGTKQTQRFRMNPEELSQFRTWVVENGCEQVAVESTGIYWIPVLNAIEGYVDMILANAYKIKNTSRPKTDLTDSEWMAELCLNGMIKPSRIFPKDDRDLRSLTRARERYVNDTTREKNRIHKLLDSCNIRLSSVLSNMFGKVGRYVLEGLLDGKDIDEIIEGIPVKRLMKKADQIREAIKNGLDITKIQLIRGSLELIAALEKRVDELEAEIRRRVIHKKEDIRILMSVPGIGFISAVTILAEIGDFRDFEKPEKLAAWCGLVPSVYQSADKLITGKITKHGSRHLRWILVEVAQTVARCSSPKLNRFFHRILERKGFKVAIVALARKILCILHHLLMNHEMYEDEVTKKEARIELVAPETSMCIEEMIEYMIKAGYEVKKKSGVGG

SEQ ID NO: 85437 - protein, 340 aa, unidentified
MKLYGAIDLHSTNSVLVVIDEEDKIVYQKRLPNDLALILQELCVYQSRLEGIVVESTYNWYWLVDGLMEQGYKVHLANTAAIQQYEGLKYTDDHSDARWLAHVLRLGVLPEGYIYPRADRPVRDLLRKRSQLVRQRTTNLLSIQNLVTRNTGESLSPNQIKGLDVQQVDELLPNGDIALAVKANLSVMCCADEQTEILERTVRDRIKLRPEFSFLKTVPGIGQILALTIMLETGDIRRFPSVGNFASYCRCVGSQKVSNGKKKGKGNTKNGNKYLAWAFVEAANFAIRFNCKIKSFYQRKKAKTKGVVAIKAVAHKLCRACYYIMRDRVAFDLTKAFGQK

SEQ ID NO: 85438 - protein, 337 aa, unidentified
MKYCGIDLHSNNCLIVVIDDHDKVLLEQRVQNDLAGILKLLCPYRCELGWVVVEATYNWYWLVDGLIDAGYEVKLANPSAIKKYDGLKHRGDQADARYLAHLLRLGILPTGAVLPKELRAIRDLARKRMQLVRNRTLHILAVENITAREYGSRISSNQVKQLGVEQIDAMALYDDVKYALKANVAIVKALSEQIEVVEKRIHEQVASRSEYRLLNSVPGIGRTLAPVILLETGPIERFKEVGNFASYARCVNSEYTSNGKKKGKGNMKNGNKYLAWAFVEAANIARRYDDQARRFYERKKAKTNGVVATKALAHKLARACYHILKEGKPFDGARCFA

SEQ ID NO: 85439 - protein, 325 aa, unidentified
MRKIRDCLGIDISKDVFDVIDEKGKHYVFTNDYSGFRKFKKILTSNSHCVMEATGYYYCKLAYYLLENGYVVSVENALSIKRFIQMQLVKNKTDKADARMIQMYGERVDLKHWEGQTKDQRACLQIIRLLETYTKQSTALKNKIHGEKVLGIPCKGVLRSLERMLRTVQKEIRSLEKELETKVKVSHQTLLTNLKSIPGIGMKTASMLVVVTDGFTRFDSSSSLCSYSGITPVLRQSGSSVRGRPRMSKVGNRKLRNLLFLCSLTASKYNKGCRELYQRIVAKGKSKKLALIAVCNKLLKQAYGIAKSGLVYDESYRSLHPGYSS

SEQ ID NO: 85440 - protein, 427 aa, unidentified
MNEPKYKPTLCVGADVHKDEIVLRAVDKAQGHEVLEPFRVTNNLPGAQSAAAALAQVTADLGYTRIEIGWEATGMLWIPFHRYLSHEPLLQPFELELVCFNPKLVAKFKDGLVLRSPKNDDRDAFDIAARIRFGELPVTYVPSDFWQGLRRLTRYRYRLSKALSQEKMRFQSYAFLKASDWKRVKPFANVLGATSAALLTEFTVTELQQMTHDQLVDLIARRGRGRFADPTTTARLVRQALRTSYPIDPRMDDMVTASLAAMWDHIRYLDRAMKRLDQHIARYIDLIPNPIITIKGLGAVITAGILAEIVDVLRFKEHKHLAQFIGLTWRKSSSAGFVSQNTRLTKVGNVYLRYYFILGANLLRQHNLEYKAYYWRKYQEVSKYQHKRSLVLTARKLVRLVHALLTKNVPYVRPRMTDPSQEDDGLQ

SEQ ID NO: 85441 - protein, 448 aa, unidentified
MSERKLEMDIINPNAAGIDIGGRSHFVAINQEQSDVREFGVYAQDTKELLKWLLDNDVRTVAMESTGSYWQNLYAELQDSTIEVILINGKFTKNIKGKKTDVLDCMWIQKLHSLGLLSGSFLPDLQTEYLRTLVRHRGNLIETTSQASNRMSQNMRLMNFRLDVVVKDIVGLTGLRIINEICNGETSGEELAKLRHGNCKKSEEEIAKALQSNNRQDYLFVLKQELRKYQDAQQLIMECDDEIKKLLDEFIDRDNVKKALFIDKKVHKRINKNTPKNIDLNLISYQYFDGLDLYAIEGFSHGTVLTLMSELGEKGILEFQNAQHFASWLRLAPNNKISGGRILSSRTPKGSNRLKIALRQAANAIGNLKDTHLSNFFNRIAYRKGRAVAVSATARKLATILWNMLYKKQQYCPPIIYEYLDQKRKRKVLELQKQIANLDNRMSKIQPA

SEQ ID NO: 85442 - protein, 457 aa, unidentified
MARKRTRKKKQDSLSEIPKLDSLKQLNLNAAGLDIGAEEIYACVPEDRDSQSVRVFSAFTIDLYALADWLQTCGVDTVAMESTGIYWIPIYEILEERGFEVFLVNARQIKNVSGRKTDILDCQWIQQLHTYGLLRASFRPSEDICALRSLVRHRDNLIRYRSAHTQHMQKALNTMNLKLTNVVSDVTGVTGLKIIRDIVAGVHNPNELARHRDYRCKKSEKEIAKSLHGNYRAEHIFELRQALELFDFYNLKIKACDDEIQDLYAAFEPQVDVADNPLPPGRNPRGNEPEFDLRSYLYRMTGVDLTRINGIDVLTAQTVVSEIGLDMSKWKSVKHFASWLGLSPNNQITGGKIIRRSTKRITNRAAQALRMSALALTYSDSALGVFFRRMRAKHGAPKAITATAHKLARIIYFMLKRREEYVDPGASYYQEKYRERVVKNLEQKADKLGYKLVPNEA

SEQ ID NO: 85443 - protein, 341 aa, unidentified
MEQYIGLDVSLKDTFISVREGGKRIWRGKCASDPAVISQVICTHARSVRRVVFETGPLSVWFYHALTAQGVPAICIDARHAKAALDMAPNKSDVNDADGLAHLAEVGFYREVRVKSFDTMLVRTLVAARHQMLKITVQISNQIRGVMKTFGLIVPKSAGSVLEGHIRTLLATNAGLERIILPMLEAWLVLRERVAQLSKQLVASGRTNEQCQLLMSVPGIGVVTASSFIAAIEDPANFAKSRSVGAWIGLTTKRCQSGEVDYAGRISKRGDTQLRALLYEAAMVILTRTTADSALRIWGLKLREKVGFKRAAVAVARKLAVIMHTMLKTGELFNRSAGAAT

SEQ ID NO: 85444 - protein, 415 aa, unidentified
MKVHRNCCGLDVHKQTIAACLIHEDGSGNTYKEKRLFGTMTRDLRELAQWLREAEVSAVAMEATGVYWVPVWNVLERTGLHLLLINPEHYKAVRGKKTDLKDGERIAELLQDGRLEASFVPSPELRILRDLTRYRVKLVQHQSSIACRIQKLLEQCNIKLGSVASNVLGVSGTAMLQALASGETNPERLADLSKKQLRKKIPALRLALDGYLMPHHRFLLRDMLDELTQIEVQLSRLEAEIERNIPHFQNALQTWMSIPGVKQRVAWTLVAEIGPDMQVFPSPAHIASWVGVCPGNNESAGKRKSGKTRKGNCWARRALCEAAWVAAKAKKSYLAAQFRRLAATRGNKRAIIAVAHTILTIGYHMLQRGTRYQDLGANYFDQRHVLRTTKRLVKRLEALGHRVILQSPLSNPGTA

SEQ ID NO: 85445 - protein, 483 aa, unidentified
MNSTRLSNLPVVLGSGNEYSDEDESALETITSGYKEFASGSSPREQPYPHLSNMNESVCEQPLSPKVAAFVGIDWADQKHDVVLRSAADQAKPEHQVIKSELNALAEWIAQMHERFAAKGKVLVCLEQSRGALIYQLMAYELFELYPINPSQLANYRKTFFSSGAKDDQPDADLLSELVMCHRDRLKAWRPDDQLTRELASLNEGRRHAVDRRTELANEIKSQLKVYFPVALQILDHDITTALAADLLVQWPTLAELQKVSPAKLRKFFYGHNSRQEKKILERLALIKEAKPLTTDLAIIRPNALSVKLLAQQLKSLLPFIAEYERRIAELFGSHPDRFLFDDLPGAGPALAPRLLTAFGTDRDRFEVVGDLLELSGIAPVRIASGKKTGKHASVHCRRACPKFLRQSFHEFGACSIRYCPWAQACYQAQRSRGKGHHAAVRAVTFKWIRILFACWKQRTPYDPQRYFQALQTRGSDYAQTTA

SEQ ID NO: 85446 - protein, 359 aa, unidentified
MITQKSVIIGVDVHKYSHTAVALDSFGQEKGRMEFSNDSLLDYATWLLSFGKKEDIIVALEDVNRYGIHIVEDLRKQGFSMRYVPAILTERERKKSTRRHKSDYQDAKRVGKVILSKYEETLPARESIANENELKISQSLDLLLMERRDLVKQKTVLKNQLHSFLHQYYGDHYADKFKKVFHQEAINFFKKDLSENTIETKEILASGIIRRLVRLELTERQIEDISEEIKQTSSFSKEIVALEEGIHGCGNITAASIMAEITTIKRFKSKDKFAMYAGVSPREHSSGRKNKMYTNPFGNRQLNRAIHSIALSQIACKGDPQGKEYYQKKLKEGKTKLWALRCLKRQVANKIFKILKKQG

SEQ ID NO: 85447 - protein, 433 aa, unidentified
MVEDSRDEPAQVVARVCAIDIGKTGLVACVRVPHPTNPGRRVQEVREYATVMPALLALADWLRVERVELVVMEATSAYWKPVFYLLEAEGFTCWLLNAKHVKNVPGRPKTDRLDAIWPALVAERGMCRPSLVHPKPIRRLRDLTRYRRSLVREQTREKQRLEKILEDAQIKLDSVISDLHGVSGRQMLQAMIDGQRNPTILAELARGVMRRKIPQLREALTGHFDDHHAFICATMLRRIDTLTADITELDTRIEELIAPHTDAVNTLDEITGVGLRSAQEIIAELGVDMTVFPTAAHLVSWAKFSPIDATSAGRHKGNSTGKGNPWLAATLGEVVAGTSRTNTFLGERYRRLARRRGKKRAIVALGNSILTIVWHLLSDPNTHYQDLGPDYYESKISQRRRQRDLIRQLEHLTGQKVSLQPPTELPTELPTAA

SEQ ID NO: 85448 - protein, 346 aa, unidentified
MKASASSRTIVTIGIDIGKNTFHLIGLDGRGAIVLRQKMSRGQVVVRLANMPPCLVGMEACVGAHHLSRQLLTLGHDVKLVPGQFVKPFLKGQKNDFRDAEAVAEAVQRPTMRFVPTKSVDQLDLQALHRVRSRLVSQRTAIVNQIRAFLLERGIAVRQGLRFLRQSLPDLLANRADVLTPRMVNLIEDLAGDLHHLDQRIDEVTGEIETLARDDEACQRLMTVPGIGPIIASAMVATIGNGSAFRRGRDFGAWLGLVPRQISTGDRTILGRISKRGNSYLRMLFVQAARVVLLRPANWPKHSFGRWLEAAAKRMHHNVVATALANKLTRIAWSVLYRGRSHEEPS

SEQ ID NO: 85449 - protein, 411 aa, unidentified
MHNRQNYLYVGVDLHKEHHTAVMINCWQEKLGEIQFDNKPSAFSKFLLEVETYVCDGITVVFGLEDVGGYGRALAKYLVDHERIVKEVNPALSFLERKSQVMIQKNDSWDAECVARIMVNKFNQLPDAKPNDLFWSIQQLVSRRNALVKAQSALKNQLHIQLNHHYPSYKKFFSELDGKTALAFWQQYPSSSCLEEANIKQLTAFLLDVSNNTCSVKKASDILKLVKEDGQTMKEYQETRDFLVRSIVRDIEFKKREMKYIERELKRLLNLLDYQLETMPGIELVTASALIAEIGDVRRFPNANKLARFAGIAPVYFGSGGKGKTHKSKQGNRALHALFYNLAVQQVQVAKGSKLPRNPVFHAYYQKKLKEGKTKGQALVCIMRRLVNIVYGMMKYKTAYELPVVEEKEVV

SEQ ID NO: 85450 - protein, 355 aa, unidentified
MSQEKYIGMDVHQATICAAVVDAQGKVLMECVLETKASTIIEFVQGLQGTLSLTFEEGTWAAWLHDLLKAHVSRLVVCDPRKAALLKEGNKSDRIDARKLAEMLRTNQLRPVYHGEHGFRTLKELGRCYLTLSKDVTRTMNRIKSLYRSWAIPCQGSSVYAPRQRAEWLAKIVEPGVRMRAEYLYQQLDGLQPLRLQARRELLRESHQHAAVERLRQIPSIGPIRAALLVALLQTPHRFRSKRQLWAYSGFAVETHDSGEYRWVRGKLQRNRERITVRGLNDNHNRDLKNLFKGAAISASTRPGPLQDFYLARVAQGIRPTMARLTLARKIATITLTMWKKGASFDPEQLRRQAV

SEQ ID NO: 85451 - protein, 366 aa, unidentified
MKKISTVRVNGNMIFKGHKLTIGLDLGDRWSCYCVLDEAGKIILEQKVAMTPEAMKQAFAKIPRSLIALETGTHSPWVSRLFTELGYTVIVAHAQKVQLITKSNRKDDRHDARTLARLARIDPELLGPVRHRSAKAQIHLTVIRARAELVRARTSLVNAARGLVKSYGQRLPKCGTQQVSRELGVGLNAELREVLEPLLKEVESLNERIQEYEVRMEKIAKESYPQVELLKQVKGVGTQIALTYVLTLEDPHRFPKSREVGCFLGLCPGRRDSGESQPQMRISKEGDRYLRTMLVQGAHYILGPFGEDSDLRRWGLKLAARGGKNAKKRAVVAVARKLAVLLHRLWVSGEVYEPLRNSQKAMRAVA

SEQ ID NO: 85452 - protein, 386 aa, unidentified
MNYIGIDISKYKHDCFIATETVDHQFSFENSQLGFNELLGHFKPLIKQEMIIGLEATGHYGENLKSFLTFHGYSFMEINPFLVKKFGEAQSLRKTKTDKKDAQMISTYMRSVDYKAYHHQSYHISALKSLTRLRFKLISIRTKHYNMMTKVLDVIFPEYKAFMREQGYSETSLYILKRFSSPDRIVKMNDEHFDKLRRLSMGKFNYPKFVKLKELAKSTIGVTQNHQLFKLKTSISYVEQLNRDIDETEKQITSLMAKYPTRIQTIKGVGVISAAVIISEYGDISLFSNPAEMLSYAGLDSTIKQSGTMSSTGKLVKRGSKYLRATLINVCMMVMIHNPVFYDYYTKKKQEGKHHRVALVHLAKKLVRVIHHLETNHEDFDSSKLK

SEQ ID NO: 85453 - protein, 332 aa, unidentified
MTATAARDEGGEILERQSFKTSKLKLISNISRYGMDTEVLLEEGELAGWAYRTLLPYTGEVVVCDPKRNAWIAKGKNKNDDVDAEKLSELLRIKSFTPVYHTMDEEIAAFKAAVKHYEEATERAARQMVQIKARFRTNGVFPEGKQVYGTPGRCEYLSKVDNSSIRLILAQEYDLLDYLKGKKAEASALVAKMSREFPVIERFRRIPGVGPVMSARFVAYVQDPNRFNRSGLWKFSCLGVVTRISDGVSLGRQYLDKSGVSQMKDLSRKVFDGAMRTRDRNGIQIYFKRSHRNCGDLNHARLSTQRKILSMMNAMWRDETEYSDEMFLGLGA

SEQ ID NO: 85454 - protein, 465 aa, unidentified
MRTIGIDLSAKGEHKAVVVDETGHFVSSVLRFRTEPASLTRLLEMAQEGNADGQLQAVMEPTGMAWFPVAVFLIRHSVTVYLVNSQQVADLRKYFKKHAKSDRIDARVLAKLPLVAEEKLHRLELSDARTLACQRGCKQLERLMKQRIACQNRIIALDRFAWPGLETTVFSDLFCPAARWFREHWYSPLRVHQAGAEAIRQAWLESDLDPADAGEWTRYLTNLAEQGLAIYGEEASYLDYELLQAEAVREQAYLAFVEEMHHRLLLKTVRPLYRQLHPSRNLETIPGVGQDGAAIYISFIGNPKRFGSLRQLRGWSGMVPNSKQSADSQASGLKITQAGPSLIKKFAFLDAESARQWDPQIAAIYYDQMVQHGKHHIQAICTCSAHLLDRVGVVLREDRPYQLRDVDGTPITSERAHQIIAERYTVPEEVRQRHRKAARRERKEAQAEKQYKRGKAAPSGSGASA

SEQ ID NO: 85455 - protein, 365 aa, unidentified
MTTRQRSTSSSTDPPVRREVVLGVDTHGEVHVAAVISPLGKVLGTESFPATVAGYRRLLVWARRRGTVRRAGVEGTGTFGAGLSRYLLTQQIQVFEVNRPDRTARRLLGKSDPLDAQAAARAVLSGRTRAQAKSGDGPVQGARIYKLAKDSAVKARTQEINQLKAVLVIADPALRERLSSLGNAELFRTCATLSPPDGGGDEDAVVQATHMTLRMLAERIEQLTGQINELNQRLTRLVERHAPQLLVPMGIGPDSAVTLLITMGDNPERLNTEASFAALCGVSPIEYSSGRRRTRRLNYGGDRQANAALHRIVFTRLRHDPRTQAYYERRTQEGKTRREIIRCLKRYAAREVFNLVRPVSRDPSL

SEQ ID NO: 85456 - protein, 382 aa, unidentified
MRVVNERCCGLDVHKSSVSACALVPEGKQVRTFGATTPQLQALVAWLQELGVDSVAMESSGIYWRPVFNLLEGAGFELLVANARHMKAVPGRKTDVKDAEWIADLHRHGLLKPSFIPSRSERELRDLVRYRRTLIEERAHEVQRVQKLLEAANIKLEDVISDVMGVTHGLQRKRERLAEALTGSVGEHQRFLLRHLLSHIDFIERQIAELDAEVARRSRPFEAAIASLDQISGIGRRAAEEILAEIGTDMSRFPSHRHLASWAKVCPGNNQSGGRRRSGSSGKGNRWLKSTLVDCAWCATRTKQSYFRALYYRLAPRRGKKRAQLAVAHSLLVTIYYLLRDGTVYQDLGAAYFDQRDKAFIERRAVRSLERLGYRVHLEGAA

SEQ ID NO: 85457 - protein, 378 aa, unidentified
MTHAQMIQENITTSSERLYIAFELSNSKWKLAFGNGMKIRQKTIAAKDLGALAEEIAKARQKFKMADDVPIYSCYEAGRDGFWIHRYLESAGIQNLVVDSSSIEVNRRHRRAKSDRIDANKLLSMLIRYLNGEQKLWSVLYVPDVEEEDARRLNREIERLKKERTTHTNRIKSLLALHGIVLQIGQNFLEKLEEATQWDGNPLPPRIKNEIQREYQRYELIRDQIKALELERKELRESSKTVGRQMSALEYLKGLGPVSSRILVLEYFGWREFKNVKQLGAGAGLAPTPYNSGDSEKEQGISKSGNPRVRCTMIELSWIWLRWQPQSHLSQWYMKRFGSGGKRMRRVGIVALARKLLIAFWKYLETGLVPEGAVLKKI

SEQ ID NO: 85458 - protein, 313 aa, unidentified
MGPQSVYVGIDVAKATLDVAVHPTGARWTTTHTEREVAGLVTRLTPLQPALVVLEATGGLEGPLAGALAAAGLPVVVVNPRQVRDFAKATGTLAKTDALDAAVLAHFAAAVRPTPRPLPDAATQALAALVTRRRQLVEMLTAERNRLGSAPRALRAEIQAHITWLQRRLGRLDDDLHEAIRTSPVWRAQDDLLQSVPGVGPVLARTLLASLPELGRLDRKAIAALVGVAPLNRDSGTFRGRRMIWGGRAGVRAVLYMGTLVAVRHNPVLRAFYQRLRGVGKLPKVALTACMRKLLTILNAMLKQQTRWNPTHA

SEQ ID NO: 85459 - protein, 403 aa, unidentified
MNAVGIDVSKGKSMVTILRPFGEIVSSPFEIKHTSSDIHSLIKLIHSIKGESRVVMEHTGRYYEALAHQLSAADLFVSAVNPKLVKDFNNDSLRKIKSDKADSVKIARYALDKWQSLEPYSITDELRAQLKVMNRQFHFYVKQKTAMKNNLIGLIDQTYPNANTYFNSPTRSDGSQKWVDFVSTYWHVDCIRKMSLNAFVEHYQNWCKRKKYAFNKSKAEEIYTKTKELVPVFPKNEITRHIIRQAIDQLNSTSVTVETIRTLMNETASKLPEYSIVMQFKGIGPSLGPQLMAEIGDVTRFTHKGALTAFAGVDPGVNESGSYAQKSVPTSKRGSSNLRKTLFQVMDVLIKTMPQDDPVYQFMDRKRTQGKPYYVYMTAGANKFLRIYYGRVKEYLSVLPDPS

SEQ ID NO: 85460 - protein, 314 aa, unidentified
MRNDVTIYVGIDFSKEKFNACLLMDQGVMGESEFPNTKTGYLKLTKWVKNTSELGRSFDSSLVLFCGEHTGTCSIGLCEYLYAKGMKIWLESALKIKYGSGLKRIKDDKADAEMIAYYAKRFYEPGSCALFEPDSADLKTLRTLYQFRNRVVCDRVAIGNRISSGAFDCSTLVRNRMVKHHKEAQKDEKDIEKEMVKLMETSEELASNYQILISFKGIGPITAAALIIYTSNFKKFDNPRKFACYCGIAPFGKQSGTSINTKPHVSRFAHIGIKAAMVQACKSAMQHNAVIKAYAQRLYAKGKHEGIVMNNVKS

SEQ ID NO: 85461 - protein, 416 aa, unidentified
MTTHRIAGIDVHKKMLAVVVLDAAEEGEWRLHRRKFLTTGEDLDALAVWLASLEVREVVMESTAQYWKPVWRVLEPQCHMELAQAQSNRGPRGRKNDFADAERLVRRYVAEELILSFVPDPQQRLWRALSRTKQTLTRDRVRLQNRVEGLLEEMCLKLSSVVSDLLGVSARRMLTALSEGETDPAKLAAMAEPGLRATPERLCDALRAAPSLYPGYRHLLKQYLERIQLQDRHIAELDRELGVALKEHEDAVVRLADVPGLGADSAQQIIAEVGPQAARFPTAANLCSWVGSCPGQEESAEQSTSDHSPKGNRSMRRILNQAANAAIKTKGTVFEAHYRRIRGRDPKKHNVAVWAVANRLCRLIWKILHHNVKYEERGSRPNPKAVRKRARRLVRQLRALGYCVQVSPPQPQAGTA

SEQ ID NO: 85462 - protein, 398 aa, unidentified
MTESSDYESVQVFIGVDVGKDTHHAVAINCSGKRLFDKALPNDENKLRSLISDLKQHGQILLVVDQPATIGALPVAVARSEGVLVGYLPGLAMRRIADLHAGEAKTDARDAAIIAEAARTLPHALRTLKLADEQIAELSMLCGFDDDLAAQTTQASNRIRGLLTQIHPALERVLGPRLEHPAVLDLLQRYPSPEKLASLGEKKLAAQLCKLAPRLGKRLAADIAQALAEQTVVVPGTNAAAVVLPRLALQLITLRKQRDEVALEVELRVLAHPLYPVLTSMPGVGVRTAARLLTEVACRAFTSAAHLAAYAGLAPVTRRSGSSIRGEHPSRRGNKALKRALFLSAFAALRDPLSRAYYTRKMSQGKRHNQALIALARRRCDVLFAMMRDGTFYTPQGS

SEQ ID NO: 85463 - protein, 451 aa, unidentified
MAKRKEKQARRSMVLEPDAAGIDIGAEEIYVAVPPDRAEESTRRFSSFTCDLHALADWLGQCRIQSVAMESTGVYWIPLFQILEERGFKVYLVNAHYLKSVPGRKSDVSDCQWIQYLHSVGLLRASFRPPEAICALRTLWRHRGSLLEMAAEHILHMQKALSQMNLQLHHVLSDITGTSGQAILDAILSGQRDPVELAQLCHRRVQSPRDKVAQALVGDYRPEHLFTLKQSLAGYRYYQKLILELDQETARLMQALPSATEDPIPPRSKPTAYHRKGNDPQFDLRSELYRIAGVDLTDIPGISAATAQVMLTEVGTDVSRFRHASAFASWLGLCPEKRISGGKVLSCKTRQVKHRAATALRMGANSLCRAKGYFGEFFRRMRAKLGTAQAITATAHKIARILYHVLLTKEPYTETVFHRCDEQAQQRAEMRLRKQAARLGFQLLPIPLTGE

SEQ ID NO: 85464 - protein, 331 aa, unidentified
MVSDFMKGRYNLMKIFVGIDIAKLNHFAAAISSDGEILIEPFKFTNDADGFQLLVSKLESFDKNSIIIGLESTAHYGDNLVRYLVAEFYQVCVLNPIKTCQMRKNNIRKTKTDKVDTYVIAKTLMMQDDLRFISFYDLDMMDLKALGRFRQKTIKQRTRLKIQLTTYVDQVFPEIQYFFKSGLHQNAVYALLKEAPSPKEIASMHMTHLANLLKVNSHGHFTKEQAKELRVLAQKSVGANDSAISIQITQTIQQIELLDSQLEKIEAEMTDIMKFNDSVIMTIPGIGYINGGMILGEIGDIHRFSNPNKLLAFAGLDPSVYQSGKVYRCCV

SEQ ID NO: 85465 - protein, 316 aa, unidentified
MRKKEVFVGIDVAKEELEVAVFPRAETETWPNTEEGILRLVDHLKSLCPTLVVLEATGGLEMPCVGALAAEGLPVVVMNPRQIRDFAKATGRLAKTDRIDARVIARFAEAVRPEIRELKTEEMQELTALGLRRRQIIQMITSEKNRLATASKWTREDIKEHISWLEKRLDDVNKELEKSIRNSPVWREKDDLLRSVPGVGPVLSATLLSQLPELGSLNRKQIAALVGVAPLNRDSGQFRGKRCIWGGRASVRCALYMATLVATRFNPTIAEFYHRLRTAGKEHKVALTACMRKMLTILNAMARDCAHWSPACLGEP

SEQ ID NO: 85466 - protein, 422 aa, unidentified
MERVFPNCAGLDIHKKLIVACRLTTDERGQTQKAVRKFGTLTAELEALAAWLAAGGCTHVAMESTGVYWRPIYNILQEHVEVWVVNAHHVKHVPGRKTDVKDAEWLAQLLQQGLLRPSFIPSREQRELRDVVRQRQALVEDRTRVVNRLQKVLEDANLKLASVVGDLQGVSAQAILRALLGGEEEPRALADLARGRLRKKRADLERALVGRLREHHRFMLLHLLAQLDFLDEEITLLDAHIDALIAGQPEVAAAVERLDSIPGVSRLTAIVLVAEIGADVSRFPTARHLAAWAGLAPGNRETGGTPRAAGTRKGNRYLRRCLVQAALAAARTKGSYLKALYHRLAARRGKRRAAVAVARSLLEIAYYLLRRGEWYRELGAEYFDRLDRERTGARLVQRLRRLGFVVTLTEPAPVPAGVTASP

SEQ ID NO: 85467 - protein, 417 aa, unidentified
MTARTLTQRLAAFEPGTLFAGTDLALDDNVTQVIDQQAHCLDRFEFPNDRAGYDFFRNRLAQLQQRHGAPTVLVGMEPTNYFWKLLAGYLNEHALAYRLINPYTVRKHREGNQIDRSKDDHRDAFTIADILRSGHYTETRLLTGQYAELRQYSILQRRLARDHGRQQQLLGTTVGQVFPELRQVFKDLTGNTARAMLRRHAPAAVVAALSVDAFIAAVRADSPSTRLMPSKLRQAHALAQHSVGVRSGLQAFQATVSSQLQTLTLLEAQLETTQAQLGAVFMALPAAPYLLSVPAIALASAATFLAEIGDPAHYNNYRQWTKLAGIQPTPDTSGRKHYSRTPMSHQGRPALRTMLYFTVLRLIQIDAGFAHAYHTLQHRQPNPLTKMQAIGALMNKLSRVLWAVVQQPTFYQPQLAF

SEQ ID NO: 85468 - protein, 378 aa, unidentified
MSVYVGIDVHRKRSQVAVVAEDGQVQVNRNVVNGAEPILKLIGGLPTGTPVAFEAAYGWGWLVELLEDYGFAPHLVHPLRCKAIASARLKNDKVDAAILAQLLRADLLPEAWIAPPEVRQLRALLRHRVALVRLGTGLRNRIHAVAADHGYDRPGSYWTGPGRGWLAELPLPAVSRQVVTDSLAFIDALAPTIQALDAEVHARAKADPRVKVLTALPGVGEFTAMVLLAEIGDITRFPNARRLASWAGLTPTVRGSDLTVRHGHISKQGSPYVRWVLNQAAQTAKRHPEFAATYQGIARRRGKKIATIAVARKLLTRAFHLLADAGTAGEAASTEATQNSTCVARGARARPQTGRVAKARARSPQRHEPATSRARSFD

SEQ ID NO: 85469 - protein, 355 aa, unidentified
MMQSQIIASPKLFIGMDIHKKSWSVHLRTDLFDHKGFTMPPQPQKLVDYVSSHFDGHEVSLTYEAGCCGFSAARYFLSMGWQVKVVNPSDVPRSDKQQYQKNDKLDCRNLCKQLQQDQLHGIYVPTEWEEQLRSLLRQRNQVVKQLRTIKSHIKGLLLFHGIHIPEQFDNPNWSKDFMAWLRDLPWSYTTGAASLHSKLRILELLNKEYLQTSNELRAWCRKHNSKDYYLLKSIPGIGGLVAAAILAEMGDIRRFNNEREFSNCIGLVPAIHQSSETDIKKGITPRCKALLRSYLIESSWVAIRTDPEIQAYYRKHVGKNPKNVIVKVAHKMCRRILSVIKNETPYQTSYSKTLK

SEQ ID NO: 85470 - protein, 334 aa, unidentified
MEEITTVGIDLAKNVFSLHGVNAAGKAVLRRTVRRDQLEAVVAKLPACVIGMEACSGAHEWARRFGRYGHTVRLMAPKFVAPYRKSGKNDGNDAEAICEAVSRPSMRFVPVKSVEQQALLTLHRVRQGFVSERTATINRVRGLLSEFGVVLPLRAKTVRAQAAAASEQLPELVRRAIDELLEHLRLLDMRIAAYDCAIDSQAKLCEPAQRLMKIRGIGPTTALALVASVGSAREFKNGRQFSAWLGLVPRQFSTGGKSRLGHISKHGDPYLRGLLFQGARAVLHSAAAHQDRFSRWVLELQARRGYYRTLVAIANKNARIAWALLSRNEEFATR

SEQ ID NO: 85471 - protein, 467 aa, unidentified
MSKSQNPTKEVIPIMKKRIYRRMPVNDFQPETVSLADLRGKLVFAIDVAKVDMVAAVAAADGRVLQTICWKAPEQNLAVLSILRGFRAAGITVEAVMEPSGTYGDVLRHQLEKDAFPVFMVSGKRTYDAKEIFDGVPSLHDAKSAAIIARLHADGLSTRLPDEVPERRQLKAALAIMDLYQERYLQLVHRLESWLARHWPELPTLIELTSSSLMALLARIGGPADVAAHPAETTKLLRGISHRLLPDDKIAAIITSANSSVGVPLVGLERDALMAIAADAYRAHRAFATARTNVAQLAEATPAATLTPVVGPTTAAAIFAEVGDARSFPCARAFLKAMGLNLKEKSSGTVQGQIKITKRGPSRVRQLLWLAVFRWIQDDPIANAWYQRKKQRDGGRASRAAVALMRKLAKGLYHVGRGGSFDSSKLFDTRCLQVANAGFPKGDLPLHRLSAKRKSDVCLEAPCGILA

SEQ ID NO: 85472 - protein, 409 aa, unidentified
MDQMLERVAGLDVHKKTVTVCVRVPGARGARRQEVRTFGTTVPELLALREWLETQGVTHAAMESTGVYWKPVFYILEEAVTCLLANAAHIARVPGRKTDVQDCVWIAQLVEHGLVRGSFVPPAPIRDLRDLTRARKALSHDRTRAANRLHKVLEDAGIKLASVANDVLGVSGRAMLEALVGGTTDPTVLADLARGKLRAKLPALRHALTGRFRSHHAFLVGQLLAQLDFLEEALAQVSAQIDEVIAPFQAELERLDTIPGVNRRTAEVFVAEVGVDMRQFPTAKHLASWAGLCPGNRESAGKHKSGTTRKGDRWLRTALVEAALSASRATDSALAGRYRRVMRHRGHKKAVIAVAHAILTSAYHVLARQIPYHDLGPDYYDHRHAERVRRRAIAALERQGYRVTLQPAA

SEQ ID NO: 85473 - protein, 387 aa, unidentified
MAQVNDLSRSLTAFDPISTLVVVVEMSKASWLVSGAVPGVERQPLKKLEPDATALLRLIERWRNEAVRAGRPISRIALAYEAGRDGFWLARWLIARGIEAHVIHSASVAVSRERKRAKTDRLDAAMLMRVFLGWLRGERGHCGMVAIPTMEEEDARRPSRERESLVNERSRITNRMKSALVRLGVRGFKPHLRKAPERLAGLRTAEGTGLPANIIEEFRRDMARLALVREQISSIEKTRAERLDQAPDTGPHAMVRLLARVIGIGIETADMLVREILSRKLRDRRAVARYAGLTGSPDESGLKRREKGLAKAGNARVRRGVIQLAWRFLMFQKDSALARWYRTRTEGPSGARKTTMIVALARKLLIALWRLVTTGEVPDGVELRPAA

SEQ ID NO: 85474 - protein, 477 aa, unidentified
MDKEDGQPAGRRLVGIDLGIASRHSVRVLEADGQVVCRSSCVPTVESLTLVESAALAGAPDGTKLAVVFEPTGPAWMPVAVFFARRGHSVYRVSSAKAADLRKFLHRHAKSNGIDAETLARIPLADPAGLQQLELPGPDAAALGRRVRACERLTRAASEHKVRIKDLVRQLMPMTPLTGDLGKADLAVLERYADPRALLAAGTADLTRLITSASGSQQGQERAGQWRAAAAAAVELYGDHPAVPYDELAAEVATEVRLLRAIQGELAAHAAAREQRYRQVDSGQLARSLPGFAEISAPVLVAVMGRPGRFRDGTRFKSYAGLAPRASETGDTDRKGQPMSKAGPSVLRATLFRAADTARRHDPQLARIYYLQMTERGATHLKACCVVAGHLAERAWTVLHRGTPYVICDNNGGPVTPAEAKRIIAEKWTVPEDVRKRRRSRKMAGKAPQAATRPDRRGDPPRPRSSRPRTQAVKTVT

SEQ ID NO: 85475 - protein, 411 aa, unidentified
MENVFLCCAGLDLHKKSVEACVRRMEPSGHVHQQTRHWGTMTRDILMMADWMAAQGVTHVAMESTGVYWKPIYNILESRFTVLLVNARHLKQVPGRKSDIRDCQWIAQLLQHGLLKGSFIPPRPQRELRDLTRHRTQLVEEKTRTSNRIEKVLEDANIKLGSVASEVLGVSGRSMIQALLQGEKDPTQIADLARRQLRGKIPELEKALEGNLTEHHRFMLRLLWKGLTQQEALIAELEAKIEEVTRPFASEIERLDAVPGVDRRVAEVLLAEVGAKIDPFPTHQQLAAWAGICPGNEESAGKRRKRRITPGNRWLKRTLVQAAWAASHAKNSYLGSQYRRLAGRRGKKRALIAVGHSILVILYYLLKEGSQYADLGADFFDRLEPERLTRYYVKRLERLGHNVKLEPCVSA

SEQ ID NO: 85476 - protein, 355 aa, unidentified
MKRGSSAVPKLTTGLDVGDRWTALCTVDEGGAALERGRIATTPAGVERRFRQGPVQRIVLEAGKQSPWMSRLLASWGHEVIVANPRRVKLIAAAANKDDPRDAETLARLGRLDPQLLRPITHRSAEAQQDLAVVRARDALVRSRTLLINHVRGVVKSLGSRVPRCSAHAFARQADRVVPDALRPALAPMIAIIEQLTGEIRRQTRAIEALVQTRYPEALPLQQVKGVGPITALAYVLVLEDPTRFATARSVGPYLGLVPRRRQSSRADPQLRITKTGDGLLRRLLVQSAHYVLGPFGPECDLRGYGERISARGGKNAKKRAVVAVARKLSAVLYHLWVTGEAYEPGHGAAPKVAA

SEQ ID NO: 85477 - protein, 352 aa, unidentified
MQHFIGCDVHTRNQMVAWIDEATGEIKERRLEHGGEEVRQFYAQFPRGTVVGIEATFPAYWFERLMGELGHELWVGDAARIRASEVRYQKTDSRDAELLLDLLRTDRFPRIWVPSLQERDLRQLLVHRMKQVRARTQVKNQLHALAISQGVCRKRKLWSVKGRKELESLALLPWAARRRKELLESLDRLDEQVRELDRAVEEAGRGREEVALLRTHPGVGMVVGLAFVLTVGPVERFRNSRKLVSYWGLNPRENSSGGRQRLGSISKQGNTMMRWLLVEAAQTAARLDPQLRRLYQRLKKQKTSAVAKIAVARRLVVRLFWMLRTRHNYTQLVHMSGSPSSAVAPPQGGPNL

SEQ ID NO: 85478 - protein, 348 aa, unidentified
MKHYVGLDVAMKKTSICIVDEKGKIVHESEAKTDPQVLTEAINKTGFSIELIGFESGSLSHYLTQGFKEKSMPAICMDARKLSAILSIRINKTDKNDARGIADALRTGMFSQVHEKSRESIDRGTVLSVRRSHINQRTGVKNHIRGILKTYGIRLGSVGPMRFNKAVTQSIEGQLDLLVCQAINGQLELFDLLTKKIDELDQKLLKIARQDKDVQLLMTCQGVGAITALTYKTEISDPKRFIKSRTVGAYLGMTPTQYSSGETSKQGRISKCGSNELRSLLAEAGIVVLTRSQKWSKLKAWGLKLMRRKGIKKASIAVGRKLAIIMHRMLIEEKEFVWGEEPKPKKAA

SEQ ID NO: 85479 - protein, 390 aa, unidentified
MKEFNEQALLEESKGLTHGAEMGTDPHAGYVGLDVHKETIAVAVALKGRNQPRYLGEISNTPKELSKLIERLSEDGEIYLFCYEAGPCGYGIYRQITASGHDCEVVAPPESSRLKTDRRDALKLSRLLRTGDLRRVWVPGEEQEAMRDLSRCRGDFKIVQNKARQQLNAFVLRHGHHWPAGKSRWTKQHMAWLEDLKFVHPWQQLVLQEYINAVVAGTDRVTQITKTLMDSIPHWSLSVVVDSLVALRGVDKITAVTLLAELGDISRFDSPKQLMGFLGLVPNMHNSGSTRRLGSITLAGNSHARRVLVESAWCYRFPARQTKHLSRKAEQASTEAQAIAWRAQKRLCGRYRTLIQGGKIPKVVCVAVARELVGFIWDIVCHEMPKVKPA

SEQ ID NO: 85480 - protein, 416 aa, unidentified
MNAVGIDVSSRKSTVAVLRPLGEVVCLPFDVTHDIAGLASLAEKLKALDGETRVVMEHTGRYYEAVEKALHEAGLFVCAVNPLLIKEYGANSLRRVKTDKADAVKIARYALDNWADLRDFTPMDAIRYDFKTLNRQFQLASKQRTASANNLIALLEQSFPGIRKCFDSPVRSDGTQKWVDFAHSFWHVDCVRKQPFPAFCERYRKWCKRHAYLFKQSNAEEVYALAKRAVVLTPKSKVVKVLVQEAANQLISISRSVEVYRAEMDRLAAMLPEYPVVMAMYGVGKSYGPQLMAEIGDVRRFERKQALIAFAGIDPMPNQSGDKNVRSNKSSKRGSPYLRKTLFNVIRTYLQCAPQDEPVFQFLNRKRAEGKPFYVYMLAAANKFLRRYYAKLRDYFASLDTLQPVAPIPTILKATL

SEQ ID NO: 85481 - protein, 386 aa, unidentified
MHHASTISVPERTCSRGDCATLFVSLELSRSTWVATALAPGSRKMSKHTLVGGDGRKLLDLLARLKTRAEQRIAAPVKVVTIHEVGLDGFWIHRLLEANGVESHVVDPASIAVPRRHRRAKTDAIDGETLLRTLMAWQRGEPRVCAMTVPPSPSEEDRRRISRERATLLQERIRHTNRIRGLLFGQGITNYNPLHKNRRECLEELRTGDGRSMPAHLKSEILREIDRLELVIRQIGEVEAERDEMLRPAEASSPAALLMRLKGIGPEFAAVLYLEGLFRHFNNRRQLAAYAGLAPSPWKSGTIDQEQGISKAGNPRLRTTMVELAWMWVRYQPDSALSCWFRQRVGSERGRIRRISIVALARKLLIALSRYVTHGEIPAGAVLKPV

SEQ ID NO: 85482 - protein, 439 aa, unidentified
MKFKGLQTKRHFVSGKMIVGIDPAKKKHQAAVLNSSGIAIGDSFTFKNCHEGYHEQLWHKLNKIGVKVKQREVVFAIEISCNLWQTLAHYLAGLGYKVVLVSPVTTRRSRPFINHDFSKTDPKDALLIASNAKAGYFDYFQDFSTHIRAMHQLSLTYDKLRKNLVQNKQRLRAQMELVFPEFLSVIGSDIDTARLLLKDYFLPQHYLELDVEKVAAEMEAVSLKQHGKATLNKIIAFAEISVGIPVCEELEIAIGLSIRAWITMIETVQAQMKQIMQQLITLARQTPYFNILVSLKGISDKLAAFFIAETRDLAQFEHYRKLEKFAGLNLKQTQSGNYVGRRHISHMGNHRLSWALYKMTEETAKYIPEVRMKYLRRQLKQPLYRKNVVASSTALIKLVVSLVKSNRVYEPNEDNLRALETLEHQYQQKRFTKKYRLAS

SEQ ID NO: 85483 - protein, 344 aa, unidentified
MQVITFGIDLAKNVFQIHGVDAAGHTVVKKQLKRDQLAPYFANAAPATIGMEACSSAHYWARKLQSLGHSVKLMAPQFVKPYVKGNKNDANYAEAICEAVARKSMRFVPIKNVEQQALLSLHCVRQGFVAERTAYANRIRGLMGEFGFVIPQGIHHISERVHDLIEDASNELPGLFRVTMERLLEHFKELHRQVRELELQIQAWHRSNDASRKLEAIPGIGPITASALIASIGDAKNFKSGRELSAWLGLVPRQHSSGGKQNLLGISKRGDMYLRMLLVQGAHAVINACCRKGVEASWLAGLLKRRNHNVAAVAVANKNARIVWALLARERQYETGYIRDTALA

SEQ ID NO: 85484 - protein, 347 aa, unidentified
MSYFAGIDLHKRYLTLCVLDRIGNVVVQHRRLTTDGLFAVLAELDGSITVAVEATLHWAWLYDRLVAQGYAVQVADPGQVKLICKARCKTDPIDARKLADLVRTNLLPAIWVPDPTTRANRKLLRGYAFLVRIRTRIKNRVHAYLAEINLASPTTDLFGKQGRIWMDSLSLPDEVRFQVDGLLELLDSLETRIRRVAKRIEQRVDMTPEAQLLLTVPGIGAKTAMLIMAEIGTLDRFSSSHHLTSFAGLVPTTRSSGGKTTHGSLPRAGSPWLRWALVETTQTLKMKPGPVRAHFTRLTRAKGNSKATVAAARKLCCYLFWMLKEERTYPEWLQNRHSQPLLEVRPT

SEQ ID NO: 85485 - protein, 345 aa, unidentified
MSTITIGLDVGDRWSEVCVLDAGGTVRSTRRVRTTAPALEQWFGAQPGSRVVLEVGTHSPWVSRLLTSLGHEVLVANAYQLRLIYASPRKSDRVDAETLARLGRLDPALLKPIRHRGAQAQADLAQLRARDCLVRARAQLINHVRGAVKSVGQRLPASSAPAFAHRAATASLPEVLRPALEPLLALIASLTQQIRVMERTLEDVAARYPETQRLRQVGGVGPLIGLCYVLTLEDPHRFTRSRAVGAYLGLCPRQRDSGAAHPQLRITKCGDPMLRRLLVNGAHYILGPFGPDCDLRRWGLALAARGGTNAKKRAVVAVARKLAALLHRLWVSGARYEPLRQPIAA

SEQ ID NO: 85486 - protein, 326 aa, unidentified
MQGKEVSEQETKAKSSVGIDTSKYWLDAHVIPAEQRLRVANTCDGIRKLKRWLSRFDVELVVIEASGKWHRHTHRSLAASGVAVAVVDPFRVRMFAKAQGVFAKTDRLDARVLAQFAAIMAPPVRPPAPEALAELAELVVARLSTVEAQTALKNQLSAAEGRFLKRQLESRIARAGKDIAALEREILRRIKADEGLARRYAILTSIPSFGFVVAATLIACLAELGSATAKQIGMLAGLAPIADQSGERDGIRVIWGGRASVRRILYLAAVTAARCHGDMKAFYQRLKANGKPPKVAIIAIARKLVVLANTLISEDRSWQPRAPKYA

SEQ ID NO: 85487 - protein, 338 aa, unidentified
MDLHKNSSTFCVKDKDGKLYDSSRVVTNPFEVQKYINNFKDSELSLVVEPVSQWYFYADLMEKAGVDVHLANPLKVKAIASSKVKTDKIDASVLCDLLRANLLPEAYFSSKEVRNWKEMVRFRASLINLRTQTKNKVHAIIFKNGLAFKATRLFGKAGRNWLKSLNLSEQFQVSLEKYIDLVEYLDQLVLEADKNIEATVSDNQQANLLTSIPGVSYISALTIIAEIGDINRFPSAKQLQGYAGLVPSTYASGDSVRHGRITKQGSRWLRWTMVEIAHRQILCKKTPGLAWYYVKMKQRKGSGTAAVATARKLLAVIYRLLKDNRPFESRVGSLGCLP

SEQ ID NO: 85488 - protein, 400 aa, unidentified
MNAVGIDVSKGKSTVAVLRPFGEVVASPFDVIHNDNDLKRLVKLIRSLPGESKVVMEYTGTYFEPIAQFLHNNGIFVSVVNALLVHNYGGNSLRKVKTDKKDALKLASYALDRWTEHDEYVPADEQRKILKLLNRQYNQSIKIQTTMKNNLISLTDSVFPGINRLFTSLERQSDGHEKWVDFLHAFPHKDCVAKLYLSAFKAKYKSWCSRNKYRYSESKAEKIHSYAKSVIAVLPLNESVKLIVTQVVSQLNTILETAFSIRTEMNRIASSLPEYDTVMSMFGVGKVYGPQLIAEIGDTRRFRNRRAITAFAGLDAPPYQPGQLDVSSRHISKRGSAALRKVLFQITEVFILSKPEDEPVYQFIIKKRSEGKHYYSYRIAAANKFLRIYYAKVNQILNAT

SEQ ID NO: 85489 - protein, 360 aa, unidentified
MAQVRTWVGLDVHAAKVVAAIADSESGELTVRRMGGATQQVADFCAALPTPVRVAYEAGPTGFGLARALAARGIDCTVAAPGKIERPTQDRVKTDRRDAERLVRLLMIGGLHPVRVPTPAEEAMRDLVRAREDVRGDLMRARHRVAKLLLRHDLRFEGNNWTQRHLEWLGRVELPEPVAQSVLLDGIGSIDALLVRRESLESQMGALVEGSPWEQAVAHLRCLRGIDTLSALGLCAEVGDFERFERPAQLMSYLGLVPSENSSGEKRRQGSITKSGSRHARRLLVEAAWHYRRAPRKGRELRRRQEGQPQAVCAISWKAQQRLHHSWVRLDSERGKRRTLCAVAVARELTGFCWAVATAD

SEQ ID NO: 85490 - protein, 365 aa, unidentified
MENHSIVWVGMDTDTKKNQIAVYRGWETAAEEFEAGMDRQGIKRLVQRLKREVGEVRCVYEAGPCGYQLYRKLREAGIHCDVIAPSLTPRRPGDRIKTNRRDARNLGRLYRAGELTVIAVPNQQQEAVRDLTRAREDVREDLTRRQHRQNRFLHRYGYHYSEGERWTKKYWLWIRQIRFEDTNLQVILEESIRAVEQSLEQLKTYDAKIEENARKPEFATKVARYQSLRGVQTVTAMTLATEVWDMRGYPTAPQFMKSTGLVPSENSTGEHERRGRITKAGNAHLRRVLVEAAWHYRHRPIAGPAIKKRRRQQPAAVVSIAERADQRLNRKFRRLVDRYNKKPSIAAVAVARELAGFIWAIGQED

SEQ ID NO: 85491 - protein, 412 aa, unidentified
MKVVHEICGGIDVHAKMLVACLLLANGEKEIRTFSTMTDDLLRLRDWLVAARCTHVAIESTGVYWKPVFNILEDALTVILINPEHAHALRGRKTDVKDAEWLADLLRHGLLKASFIPPPEIRELRELTRYRGSLVREQSAVANRIQKLIESGNIKLAQVASDALGASGRTILWALARGETDPVKLAALAQRQLKEKRVQLERALHGRLTVNQRFVLRELLQRWEELEAAERRVTKEIDRYLQARPKLARARDNLDTIPGLGPRAAEIIVAEIGVAMKANFESDAHLASWAGICPGNKSTGGKRLSGRTRKGNTYLRSALVQAAWGASMKKNCYLSSQFFRLVKRLGRKKALVAVAHSLLVIIFHVLQNDQTYTELGGDYFDRQQVGQQRDYYLRRLQMLGFKVTVEELPEAA

SEQ ID NO: 85492 - protein, 407 aa, unidentified
MDVLHPTCAGLDVHQQTVVACARIVVGNAVTHDVRTFGTTTPELLTLSDWLTAHGCTHVAMESTGVYWKPVWHVLDGAFELVLANAMHIRNIPGRKTDVNDATWIADLLAHGLIRGSFVPPEPVQELRDLTRTRKQLVREIAQHTLRLQKTLETANVKLTAVLADILGASGRAILEALVAGERSPERLADLADERVKASRGELVAALHGRVTAHHRFMLKLHLTQIEALEAAVREVEARLGEALAPFRAAVDRLITMPGVSDTVARVIVAEIGFDMTRFPTAGQLVSWAGLCPRLHESAGKRLSNRTRSSNPWLKTPLVQGAWAAVRKKDCYFRAQFLRITSRRGPKKAVLAVAASMLTAAYHMLKEGVDYRDLGADHFDRRDKAKLAKRLIARLHDLGLTVEVRAA

SEQ ID NO: 85493 - protein, 347 aa, unidentified
MNCVATVIGLDISKSVFVAVGRDDQGREAFRKKLSRHQVLAFFARATPAKVGIEACAGAHHWARALADQGHDVRLIAGQHVKAYLSGNKNDANDAAAIAEARSRAMTKYVPVNTEAQQDLQMMHRVRQSLIERRTAVINQARGLLGEYGIVIAIGARTLRRELTAILTSDVHDLSAVALNTFQDLSQQLDELEGRITRYDERIAQAARADERAQRLMEVPGIGVLTATALLASLNNALHFTSGRHFAANIGLVPHEHSTGGRQRLFGISKRGDRYLRMLLIHGARSALQWAHRRTDRILRWAADLQQRKGTNVATVALANKLARIVWALLAHGRRYESAHISSMTTH

SEQ ID NO: 85494 - protein, 351 aa, unidentified
MLIIGVDYHPSFQQIAFMDQRTGECDERRLSHSDGEAERFYRDLQQRGVSVRVGMEATGYSRWFERLLAELGIEVWIGDAAKIKTKRVRKQKTDRQDAQLLLKLLLENNFPRVWAPRPENRDLRQLLWHRHRLVQMRTRIMNQLQVLAMNEGKRWKKKLFSEQGRAQLEKLPLAPWASRRRQDLLELLDRMNPTIEELTAAVEQEAKKWPEVLRLMMHPGVGPLTALAFVLIIGTPERFPCGKQIGSYIGLIPSEDSSAGHQRLGHISKQGNALLRYLLGEAAQAAVRCDSGWRRRYMHLAMRREKNIAKVAMARKLAVRLYWMWRNGWEYSQLVEFGSHAGQLVTGQGVN

SEQ ID NO: 85495 - protein, 308 aa, unidentified
MTTIYAGLDIAKLNLQLHLAGRFHDLPNTAAGHRRLLQLLAARPGSQVVCEATGGYERAVVAALHQAGVPVSVLNPARVRHFARAQGQRAKTDRLDAAVLSAYGQAFQPKAATPPTATQQQLTELVRRRAQLLDALVAQRLQAQGLTLPTLRRQAQSLIRRLERDLAQLETALAQLRDQSDALNQRVQRLATIVGVGTITALGVLAELPELGTLNRRQVAALAGLAPHPRESGQWQGRRTIGGGRAAVRRALYMAALVAAHTNRQLKEFYQRLRTAGKPAKVALTAVMRKLIVLMNHLLKYPDFALAN

SEQ ID NO: 85496 - protein, 501 aa, unidentified
MKAKQRKAKGNDHSSSRASKQRAKIAKAMQAPEQMEIVNRHAGGIDCGSEEHYAAVSPESVEEGEPFVRCFSAFTEGLDALVEWLKDCGVTTVAMESTGVYWVALYQKLEAAGIEVFLVNARHLRHVPGRKTDVKDCQWIQRLHSFGLLSASFRPEDMICRLRSLQRHRLNLVSAGAAEIQHMQKALQQMNLHLHHVVSDISGLSGLRIIEAILAGQRDPSQLAKLRDPRVRKSTVAQMEAALVGDYRPEHLFVLDQSLQAYRFYQARIEECDHEIEPLLQQLAERFECSSSPLAAESSQPEVIQDQAAQSQTARPIKPKRKRKPKANQPKIDLAGYLQRIWGVDLTQVVGLDVLSVLLIVSEIGVDMSKWRNAKAFCSWLGLCPGNKISGGKVLDRRTCKVINRVATTLRLAAQAVGRSNTCLGIFYRRKKAHLGPAKATTATARKLACLVYHLLKYKDQYREPDPVTYQLKVQKTILNKLQKQAAALGYQLLPTALVPA

SEQ ID NO: 85497 - protein, 422 aa, unidentified
MKLTYPICCGVDVHKTFLVATIIKTDGLVLKYHKKRFSTFSRDLLAFKQWLLDNNCKDVCMESTGKYWIPVWNILEDVVHVVVANPKWVSAVKGNKDDTKDSRWIGDLFRMGLVPGSFVPNKKIRVLREFTRYRYKLISMRSSERNRFQNAFTVCNSTLDAVLSDMFGKSATAIQNYLLDTDVVNPAYCASLLQRTAKKKSADVMAAVEGFKMSAEQKERVRIIQEHFSDINARVARLDAEINKMVSEYESQISLLCTIPGVDRNLAITIISEIGTDMSEFGSSKRLCRWAGLTPGNNESAGKKKSVRITRAGVYLKPALVQATHAAVKSTKSVYFKSKYERISKRRGKKRAIIAIARMILTAVFAMLKTGEVFNPCDLQKYDMPEQLKRKQIVSSAKDAVKFLVSLGVLQEDTVSLAALTG

SEQ ID NO: 85498 - protein, 311 aa, unidentified
MENYIGIDVAKHTFELCCLNQQEIQQFENNTKGIRQAAKVLSKLKPKLVVMEATGGYEAMLAAGLYLADLPVAVVNPARIRDFARANGQLAKTDKLDAIVIAMFAAKMQPPAQEQLDHSSRLLKALVARRQQLIDMRTAENNRQEHALDKVIAQSLNRMLRTIDREIQKVEQTIQEQLANMPELKAKAQIVNSVPGIGETTAAMLVAEVPELGRLNRRQIAMLIGVAPINRDSGTFRGKRMTGGGRRGVRTRLFMPTLVAVRHNPVIRRFYERLLGKGKTKMTAIIACMRKLITILNIMVARNQAWNPKFA

SEQ ID NO: 85499 - protein, 389 aa, unidentified
MEARTVYNPPPAAPHDDAVRCVLAIELSKKSWIVAVNTPLSEKISRHTLGACDWKELLKLCERIRTRIARELRKDVELVSCYEAGYDGFWLHRLLEAHGIRNYVIDPASLQVDRRARRAKTDRVDVERLLRSLMAYLRGEPKVWSVVCVPSVAEEDDRRLHRERGRLINERIQHVNRIKGLLAIHGIYDYPPLRHDRMQQLERLRTADGRTLSPRLKAEILRELQRLELVIGMIKTIEAERDAIASAKIETEHSSAKRIQDLAKIKCIGPEFATTLVGEVFYRFFDNRKQLASYVGLTPAHFQSGETCRDQGISKAGNAKARRVMIELAWLWLRHQPASPLSVWFHDRVGKLKGRIRRITIVAVARKLLIALWRYLETGLAPEGAILKV

SEQ ID NO: 85500 - protein, 376 aa, unidentified
MEHDSTLYVGLDVHKESITAAYALGMGEVELLGKVGATNTDIDRLCKRLQSKASRIRIVYEAGPCGYGLYRQLQKKGIDCMVCAPSLIPRKPGERVKTDRRDAIKLVRSLRAGDLSEVYVPTVEDEAFRDLARAWVSAKEDLKRARQRLKSFLLSHGVSYTGRADWRAAHRRWLSTFAFDSAWQQLAFEEHRRTIEDRLAQCDRLEAALREAVVAWRFYPAVLGLQTMRGMQFTTAVGMLAELGDLSRFTHPRQLMAWLGVTPSEHSSGEKRRQGSITKNGNSYARKLLVESAWSYQHPARVSPEIQRRHEGIPKPIVDRAWDAQVRLCRRYRTLVARGKQKNIAVVAVARELSGFIWDISQLAMSLASQPQRRAA

SEQ ID NO: 85501 - protein, 380 aa, unidentified
MAGNGKNVVEDPSVPTEARYFGIDLHKDQITWHCIRKAAGGAIERTTGSVATSRILEDLVPMLGEGSCYVIVEASCSTFFFSGLVEPHCTKVFVVNPAAFRELYMTGKKTDRIDAKKLADRLMYHVEMNDPDDGFPAVFVPDEEALKVRKLVTTYELLVKQMTQLKNQVKSLLRSKLIRGYEDVLGDDYEGCLADRHLDNADKVIMRALKISFDALRNEKEEIRQSILEIGVHRFRREAELLTTVSGVSVMGAIVFMADIVTVERFGSAKRMTSYLASVGKVDASGNTTRDGGLNKRGRRSSYRFLLQGLEHIVHGNEGFQRFKERHASKKANKVRAAIVRKTFVAMYYMLRNEEPYRYVDDAIYRRKTREIQRIMKNAA

SEQ ID NO: 85502 - protein, 356 aa, unidentified
MVMIGTDSHKRTHTVVALDEVGRRFGTKTVRTNAEGHLALVEWATQFADHDEHGVRFALEDCRHLTRRLESDLLAAGQRVLRVPTRLMAGARRSSREPGKSDPIDAEAVALAALRHPDLPVAELDGPAREVKLLSDHRHDLVVQRSRIAQQVRWHLHELDPDLMIPSRGLRRQKVVRELLAELERFDGVVARLARRHLLRCQELTTQINDLERELRDLVRRLAPSLLEIPGCGVLSAAVIVGETAGVHRFRDKDAYARFTGTAPVPVWSGSSAGKVRLNRGGNRSVNCALHMIAVTQARGVGPGRPYLDKQLARGKDRVAALRLLRRRLSDVVFAALRADLRAAQQPAASPVQLAA

SEQ ID NO: 85503 - protein, 342 aa, unidentified
MTIAVLGIDLGKNSCSLVGLDATGRVVLRRRMRRETVLAFGAKLPACVVAMEACCGAHHMGRALAAQGHTIRLMSPEYVRPYVKAHKNDDRDAEAIAEAATRPTMRFVALKSEAQLDVQTLHRVRDQLVGERTALMNQIRAVLLERSHVVPQGRAKLAAYLAGLLDTDAGLSLTPRMRALVADVRERWQFLDRRIAALDAEFSEQVRTDESTRRLTSIPGIGALNATALVAAVGDTGTFARARDLAAWLGLVPRQVTTGGRPTLVGISKRGSKYLRKMMIQGARAAMPGLRQSETRLGQWLRGLLARAHVNTVVVALAAKMARTVWALLRHKQIYKAASIAP

SEQ ID NO: 85504 - protein, 348 aa, unidentified
METIGLDLHKRESQLAIQAEDGTITERRIVTSQERFTAVLGHRPRARILLEASTESEWVACHLEALGHEVIVADPNYAPMYATRSRRVKTDKRDARTLMDACGQGTYRRAHRLSAPRRHLRAELAVRDALVRTRTRYVALAKALVRRDGLRVPSSTAERVGDRVQALALPAPLAAELAPLLTLLPPLNATIAATDHQLTALEQTDPIVALLMTAPGVGAVTASALVATLDDITRFPSAHQCEAYLGLVPGERSSGEQRRIGPITKAGNRRTRWLLVEAAWRILRAKDPESAALRAWTLRIAGRRGKPIAVVALARRLAGIVYAMWRDGVPYDGRKIRAPHHARGAQAG

SEQ ID NO: 85505 - protein, 339 aa, unidentified
MKFLNFIGVDMSRNWFDAHLLKSESSSRGVHEQFSNDKKGFRAFKKWLSKNKVNSLKQSLICMEHTGVYTVPLCRYLNSIKAIYTLIAGYEIKYSSGTRRGKTDKVDAKRIARYAFEKQDVIRMYDLPSPAIRSLRTLLSLRSRLMKATHAFKVSNQELQKFEKLEVMTVLDKASKSVIESIDNQQIEVKSAIKQLLKAHPSMQHNYELLLTVPGIGEIIALYLIVQTQNFVSFRKSRKFATFCGIAPFEESSGEDQALSAHVSHLANKKMKALLTNGAYSAIQHYPEFKAYFEKQIKKGKKEFSVINAIKNKMIHRAFAVINRGTKYMDNFAYKPAGL

SEQ ID NO: 85506 - protein, 360 aa, unidentified
MWTIGLDAHQRLFVVCILDSAGKRLKWERIRGGPEKLLAYLRGLPERFQICYEASCGYGYLYDRLNGLARRVVVAHPGGVRLIFRAKRKCDRIDARKLATLLFLDQVPCVYVPRLEVRSWRRLIQFRRRLVAQRTAVKNRLRALLRAYGVEAPRRGGLWTRKGRVWLGALEWPTREAALERDLGLDELEHLHRRLGVVERWLNQVARRDPRVKCLRTIPGVGPRTAEALVAWIDEVRRFRHNRQVGCYFGLVPSQDQSAGTNRLGHITREGPSVVRQLLCEAAWQAKGRSAFARAYYERICGGDPDRAKIALIALARYLACVAAAMLRSETVWRHDSPSAAETVPAEAGTPAAACVTGVA

SEQ ID NO: 85507 - protein, 418 aa, unidentified
MKSMEITAVGIDVSKRKSTVAIRRPGGVIVACPFDISHSSHDLEKLVSILKTTGGDIRVVMEHTSNYWKPIALTLKNAGFYVSVVNAMLIHDFSDNSIRKLKTDRADSLKIANYALTFWNQLPPFNDEDETRLVLKEQSRMYERLASTATSLRNGLIALADQTFPSIDQAFGHAIKNADGHEKWGDFFSIYWHRDCVLRLSIEKFTESYRKWCLRRNYKFRTNTAHKLYALAQDAVPTLPKNNGTKALVLQACKSLNAVCEAKQSTQEEMNRLASLLPEYEVVMQMEGTGPITGPALMAEIGDVRRFKNKKALVAFAGIDAPPFQSGNFESKSRHVSKRGSPHLRRTVFLVANIILTLSHKDNSVFCFMDKKRAEGKHYYVYTIAGSAKFLRIYYARVSEYLRTQEPPAAAICLDCKD

SEQ ID NO: 85508 - protein, 430 aa, unidentified
MKSNTQNAKIEAITEKTLVLGIDVGSETHYARAFDYRGVEYSKKPFKFSNTEAGFVTFKAWVLDIKEKHGKDKVIPGMEPTGHYWFNLGKFLQDNEMKPVLVNPHHVKKSKELDDNHPTKNDRKDPKVIAGLVREGRYMIPYLPDGVYADLRTASNIRFQLQAELTRIQNRINRWFNIYFPEYKTVYGKPDAKSGILILKEAPLPEDILTLGINGVNQIWRDAKLRAVGKARAKTLIEAAEHSVGSKEGAVSARMEIRMLLEDYESRNIRLQEVMGLIEGLVNQIPMAEKLLEIKGVGIKTVSGFLAEVGDIRRFNDPKELQKLAGLALVENSSGKHKGKTTISRRGRKRLRYLLFEVAMSLVAKNPEFRELHNYYTTRRLNPLKKMQSLMAIAAKLLRVFYAILTKGVGYDPKKMVNDIRRPAAYAQAA

SEQ ID NO: 85509 - protein, 342 aa, unidentified
MRQATRCYRLFVGIDISARTFTVALMQSGEIPSQAQTFDQTHSGFNQLQRQLLSLEPDPTAILVVMEATGTYWMRLALALVNAQIAVAVINPAQAHDFAKALLKRSKTDAIDAQSLAELAARLQPHPWTPPPPVSTELQQRLTHRDALVDIRTQLRNQLHALERQPVVIESVRTRLQELIATLNEQIAEVEQEIEAALQQDAAWASAAAHLASIKGLGMLTIAWLLTATTNFTLTPTPEAAANYTGLVPQQRQSGTSVRGRARIGHSGHARLRRALYMATLSAIQHNPVIKAFYQHLIAKGKAKKVAVCAAARKLLRIAWAVASKKQAFDPDYAQRHVARAA

SEQ ID NO: 85510 - protein, 347 aa, unidentified
MRFYNRQHRHYCGIDLHVKTMYVCILDETGQVLVHRNVKSNPEAFLQVIAPHRDDLVVAAECMFTWYWLADLCAAEGIPFVLGHALAMKAIHGGKAKNDKIDSQKIAALLRGGLLPQAYVYPADMRSTRDLLRRRLHLVRKRGQLLAHIQNTRAQYQLPEFRRRLAYPANRTGVSGHFSDPSVRKSIDVDLALLERYDTLITDLELTIVREAKRHDGDAFHRLRSVPGIGKVLGLTILYEIHDITRFDRVQEFASYARLVKCAHTSAGKVHGSGGAKMGNVHLKWAFSEAAVLFLRHAPGGKKLLTQIEKKHGKSKALSILAHKIGRAVFYMLSRGTVFSMEKFRAA

SEQ ID NO: 85511 - protein, 416 aa, unidentified
MNAVGIDVSSRKSTVAVLRPLGEVVCLPFDVTHDIVGLASLVEKLKALDGETRVVMEHTGRYYEAVEKALHEAGFFVCAVNPLLIKEYGANSLRRVKTDKADAVKIARYALDNWADLRDFTPMDAIRYDLKTLNRQFQLASKQRTASANNLIALLEQSFPGIRKCFDSPVRSDGTQKWVDFAHSFWHVDCVRKQPFPAFCERYRKWCKLHAYLFKLSNAEEVYALAKRAVVLTPKSKVVKVLVQEAANQLISISRSVEVYRAEMDRLAAMLPEYPVVMAMYGVGKSYGPQLMAEIGDVRRFERKQALVAFAGIDPMPNQSGDKNVRSNKSSKRGSPYLRKTLFNVIRTYLQCAPQDEPVFQFLNRKRAEGKPFYVYMLAAANKFLRRYYAKLRDYFASLDTLQPVAPIPTILKAAL

SEQ ID NO: 85512 - protein, 353 aa, unidentified
MALAVAGRDGEVRFFGDIDSAPEAVERLVRKLEKRYRRLCFVYEAGPTGHGLQRQIVAFGHDCAVVAPSLIPKRPGERVKTNRRDALSLARLHRAGELTPVWVPDPGHEAMRELVRAREAAMEDLRAKRQHLQSFLLRHGRVFTGRGAWTKAHTRWLCELRFEHPAQHLVLAEYRQAILDAEARLERLAGQVAELVPSWSMAPVVAAYQALRGVAFLTAVTFAAEIGDVRRFDSPRQLMAYLGLVPSESSTGEKVRRGGITKAGNGRARRVLIEGAWTYRFPARMSRPLQERQVGLPKAVCDIAWKAQLRLCGRYRKLAARGKRQGVVTAAIAREMAAFLWAIGREVEPRPAA

SEQ ID NO: 85513 - protein, 348 aa, unidentified
MGSIAPSERDVIGGVDTHLDLHWAAVVEPDGTVLGVQAFSTTRAGYRAMLGWMRGFGALLRVGVESTGSYGAGLTRHLALSGVPVLEVTGPNRVERRTKGKDDTLDAIEAARAAASGQRVAVAKDRTGAIEALRVLRTTRHTAIKVRRSSLQLLHATVVAAPDEIREQLRSLTRMQLIRTCAALRPDQIAFRDPVVATKIALRSIARRILDINDEVAELDRLIEPLVEELAPRLLALEGVGHETAGCFLVTAGDNPERLRSEAGFAMLCGAAPIPASSGKTERHRLNRGGDRRANSALHMVVISRMRIEDRTKAYVARRLAEGLTKREIMRCLKRYVAREVFQVLVAT

SEQ ID NO: 85514 - protein, 387 aa, unidentified
MKRSKPRVVGLDVHPDSFAGAILEGNDPWSAQVVRTSTRVALGELEAWTGRQTEPGDILVLEASGNAFCVAERLRALKRKVVILDSHRAGKVGKAYCATDRVDAIKIARIYLSALSPVVWQPDPQTRERREVFSAYQGVVKEAVRLKQQIKSMLNEHCVRLEKGFRLSHPSALGRLLGRRAWSGAQKMLLEQLHAGLVGACRRRQQLRHYMAEEILGETELLRLTRLCGISLITLYGLISSIGDITRFASARKLSAYFGLNPSVEQSGKYEGPTGLKRHGRGAIRALLVQSAKKLLQVENPLRKWGLAVAARRGRNKATVAVARKLCVAVWHVLQGHTIGALERLDTLHTKLHKLATELGVPTIKALGYETKEAFVQKKLYLLKSYP

SEQ ID NO: 85515 - protein, 314 aa, unidentified
MTILNSPTVIGIDVAKAEIVAYREDLKNTQSIDNNRVALWRWLKALPAQCSIALEATSRYHLDTVEMAHQLGHRIYVVDPYRVSHYRESVGQRAKTDPCDARLLARYLTSEQSRLRVWSPPPQLYNELKSLLNRRAELIKVRVSITLSWSSEPLLKEALVNLLESIKHAELAIQKLLRKVSQEAGITENIRRCKVIEGIGELTATGLATAFMRGHFVSGDAFIAFLGMDLRPKDSGKKHSPRHLSKKGDGELRRLAHTAAMAACRSPTWKPFYESYLARGLARTQALVILARKLCRVAFALMKNQSEYQPNLRR

SEQ ID NO: 85516 - protein, 352 aa, unidentified
MTRITTIGLDLAKKVFQVHGVDAEGKIVVARKLRRKEVLAFFGKLPPCLVGMEACGSAHYWAREITKLGHTVKLMPPRYVKPYVKRGKTDPGDAAAICEAVARPTMSFVPIKGVEQQGLSMMHSARSQLVGQRTQLINAARGHLSELGIVAERGLLGFAELAAIVRDESDRRLPVTARAALIVLVRQIEMISTEIAALDSIVRKENKASELGPRLETIPSVGPVIASAFRARVTDAKLFKNGRHLSAWIGIVPENDSTGGKVKQKGLSKKGDRYLRSLLVNGAMAVVQQTQKRPDKHPWVAKLLGRMSAKQAAIAIANKTARIAWAIMVHGGVYEAGHRAPLYRAQACAAAG

SEQ ID NO: 85517 - protein, 331 aa, unidentified
MKKPVLIGIDVSALTFTVAEEIPDEAVRETEGENTPAGHREFCRRLGKARRPVRVCLEASGIYHLDLTLALAATPNVEVMVANPRASRDFARAQMGRSKTDRTDARSLLEFVRRMPFVAWVAPSPQTLALRAISRRIASLSVHSAQERSRRDAVDHCEALPDVLDQEIDAHLAFLKDSSKRLAAEALKIIAADPWLQKAFGHLVSVRGIAQTSAVALLGELAILPTDMSVRQWVAHAGIDPRHFKSGTSVDKPPRISKTGNRRIRAALYMPALVAIKCEPNVRAFYEKLIGRGKKPLQAIVAVMRKLLHAIWGMLHHDCDFEGEKFYRLST

SEQ ID NO: 85518 - protein, 390 aa, unidentified
MERPMQKLNDLSRSLTALEPDGTLIAVIEMSLSSWLVAGIVPGVERQPLKKLAVDESALLKLLYRWREEAEKAGRRIERIVVAFEAGRDGFWLARWLKACGIETYVIHASSIAVSREHRRAKTDRLDTELLKRSFLGWLRGERDHCKMVAIPTIKDEDAKRPNRERDSLIREQSRIVNRMKAAFVRLGIRGFNPKLKRAAGRLDGLRTPEGEPIPPNTSAELRRDMERRRLVSNQIRQIEEARLERIEQAPSDGPHAMVRLLARVIGVGIETADMLVHEVLSRNMRDRRAVARYAGLTGSPDESGRKRREKGLARSGNARVRRGMIQLAWRFLLHQKDSALTRWFRARTENARGTRKPMIVALARKLLIALWRLVREGVVPDGVVLRPAQ

SEQ ID NO: 85519 - protein, 414 aa, unidentified
MGGGASAKRVVQRDVLVVGIDVAKGWHIAAFRRADGWRLGRLRFSNDRSGFERLLEQAEYLREGRGCRSVAFALEATGHYGHALQGFLTERGHLVLRVNPAHTKRAKELEDNSPEKSDPKDAEVIADLAAQGKARLAVFPQGVYADLRRLAKLRERLVGERTRVRNRYLGLIDLIFPELPTLVRDPAGRSILQLLARCPTPAAIVNHGVNQLQLDLHRWSRGHFRADCARRIHEAAISTVGISEGLAAAQLELRQTMESLVQVERRLREVEQAQADTLAQVPYADLLRSVPGLGVVTVATILGETGDLRQYRDADAVIKFAGYNLYTIASGRQRGRTQITRRGRPLLRRHLFLAACRLCKTGAPLSSFRRRLFDRKPGPVVMVGGCRKLLRLLVAIVRDGKPYEPGRLGVPTAA

SEQ ID NO: 85520 - protein, 439 aa, unidentified
MDKYYLGIDASKGYADFVLISENLRIIEKAFRLNDTFDGHNKLFEIISHYIDYEIYAGIESTGGFENNWYHMLKKVRRNINIKVARINPYAVHHSAKANMRRVTTDKISAMNIAEYMIAHKGTLLFEDHDSFKSLRSQWKYVALLNKQRTQIINQLHSLLYASHPQLLKHCRDVINQWILKLLIQYPTAKQLSRARISTVAKIPYLSERRAASLVNDAKRTVASSTDNISAQLIKNISSKLLDIESEISEQFKLIRSNCDLPEVELLTTFVGIGEKAALGLIMEIGAIERFSSAKKMASFFGLHPVFKISGDGIGGVRMSKHGRKEPRKILFLVSLTAITSNEYIRTIYLSSLEKGMSKMAAIGKIMHKIMRIIYGMLRTQTAYDPAIDQFNRNKEIKVKQKINNWEDYRYQVADNDAPISNRQYKKRKRQKESQLVNQ

SEQ ID NO: 85521 - protein, 391 aa, unidentified
MPTVADRPEAQTAIQTNLAAIFISLELSRSIWLITSLSPGGGEKMSKHSVPAGDIAALLARFSELKQKALARTGKSFPIVTIQEAGLDGFWLHRVLQSEGIESHVVDPASIATSRRRRRAKTDRIDGEALLRALLAFKRGEPRVCAMVRVPTPEEEDRRRLCRERKVLIAERVKHVNRVKGLLFSQGVSGYEPLRRDRRQRLDELTTGDSRPLPTHLKTQISRELDRLELLLDQIKAAEAERDALLAAQQAATPAPAGRMLLDLKGIGPEFAANLWLEGLFRHFDNRRQLASYAGLAPTPWQSGSVDREQGVSKAGNPRLRTTLIQLAWLWLRHQPQSALAQWFKERVSRNGGRLKKTTIVALARKLLVALWKYVTAGVVIEGAVMKAAGR

SEQ ID NO: 85522 - protein, 387 aa, unidentified
MQKPHDDSKMCLAAFEQDRTLVVVVEMSLSSWLVAGLIPGVSREPLKKINPDPERLLQLLYRWRDEAVAAGRKISRIAVAYETGRDGFWLARWLRNRGIDAHVIHATSVAISREHRRAKTDRIDTAMLRRGFLGWLRGEPGHCSMAIVPSIAEEDAKRPHRERDTLIHERTSIVNRMKSILIQFGVRNFNPVLRKANEKLDAVRTPEGIPLPANAVAALRRLMDRLRVIKEQVKAIEQTRLQRMQRNPADKMNTMVFLLVRIIGMGVETAEQLVREMLFRNFHDRKAVARYAGLTGSPDESGSKRREKGLSRSGNGRVRNILIQLSWRMLQFQPDSGLVIWYKKRTESARGSRKPMIVALARKLIISLWRYVNTGVVPEGFELRSAA

SEQ ID NO: 85523 - protein, 418 aa, unidentified
MAEVMIGIDPHKSSHTAVAISAGEQPLGELQVHACPSQAQRLLAWAAAWPERAWAVEGAAGLGHLLAQQLLAAGEQVLDVPPKLAARVRLLQAGDTNKNDPNDALSVAVAALRSPAPRPVLAEDHAVVLKVWAKRHRDLARLRNQACCRLHAVLCDLVPGGVGKEISAGQAARILEQLRPSDAVVTARCELAGEFLDDIRRLDAKLRDTKKKLAAAVKASGTSLTGIFGVGPVIAGTVIGDVRQVFRFGSRDHFAAYHGTAPVEVSSGGRQVYRLSLRGNRRLNHAIHMAAITQIRHKHSQGRAYYDKKLAEGKTHKEALRALKRRISDAIYAALVADARQAAATCPQGPGGQPGNRSVSRAASSHPARRLFGQATPGPATTIRPGATAGPAPIQPHRAPQQRAAHSAATSKKPHTTT

SEQ ID NO: 85524 - protein, 409 aa, unidentified
MSLSVLYARCAGLDVHKKTVVACLLLSAASGRFSKEVRTFATTTAGLLVLADWLASEGVTHVALESTRVYWRPVFNILESVCTVILVNAQHMKAVPGHKTDIRDSEWLADLLRHGLLKASFIPPKPIRDVRDLVRYRKTVVHERAQAINRVQKVLETANIKLSSVASDVLGKSGRDMLAGLLAGISDAETLAELARGRLRAKLPALREEATHRTLLRHLLSHISFLEGELERLHGEIDQLLTPYEEHLARLMQIPGVQRTTAAAIVGEIGTDMSRFPSAKHLASWAGVAPGNKQSGGKRLRAHTNKGNTHLRAVLAEAVWVISHTTDNYLSAQYHHLARRIGAKRAIVAVSHSLLVIIYHMLRANQDYHDLGAHFFQTLDTTRQRDTAVRRLEALGYKVTLEEQREVNP

SEQ ID NO: 85525 - protein, 344 aa, unidentified
MKKHKYFIGLDVHKKKTTYVVRDNIGTIIIQGETSTQYTDLLPILQPFLKEGIMGLEASTSYYTLYQNFLKNGYTIKVANTIQLRQLIAKNDKLDAKRLADMLRLGTFPCSYIPPEDIQHLREFIQTRHTLVEEKTRCKNRIHAILDKHHTIILPATKPFGIIWKKAVQQYIASNPISLELRHSVDHYHYLEQKTNQIDQELIGYTKTHWNNEYQLLQSITGIGPILSCYLIANIHPITRFNNKRKLRRYAGVIPVFKQSGEHTSKGRLPKTSSRKLLRWALIQAANTIAKTQTPLGNYYRRKKKQKKNTGIAKVAVASSLIDIVYKVLTTKEPYHNHTSITST

SEQ ID NO: 85526 - protein, 343 aa, unidentified
MDRLLIGADIAKDTFEVAAYGPSGEATWGEFCNTPAGFAQLADRLAQARISWDAAWAPVLLVLEPTGGYELALAAFGHQQGWQVSRPNPKRVRDWAKSQGRRAKTDRLDARVLARYGASQPPARWRPLPVELSELDSLLGRQDELQQMLQAERNRQAALARQPASARLVVESLAAMITTLEGGLAEIAQAIKTHIRTHARLKAKLGQLRTVPGIGPKNGPYILLLLSRWEHLTDGKGEAKGLVAYTGLDPQTYESGTSVHRNASISRMGQSQTRRLLYMGALGGVRGQNPLREFYQRLVGRGKAKKLALTAGARKILVWAWAVYRHDTAFDPIRGRSKVAVQA

SEQ ID NO: 85527 - protein, 421 aa, unidentified
MRKADTGKVKVVKDGTLIVAVDIGMEMNRGYCTTPDGKSTKPFKFDNTKEGLDTLWGMIMTSKARFQCNEVIVGYESTGPYGEPMLHYLMKKPVKVVQVNPMHTKKVKEINDNSPLKTDDKDPRVIADIIKLGRALSIVIPEGDAAYLRRLNNSRERHVRERTALVNQLQQLVFLLFPEFKKVIKDIKCRTPLYLLKRYPTPEAISVLDKYVLGEEMRKQSRGKFREHHADMLINLARNTIGIREGVSGLSMDIRHILVQLEMLKNLMAEIEDEMEIALGRIPYSSKLLSIKGLGVVSVSGIIGEIGDFKKFKTQPEIMKLAGLDLYEISSGKMKGQRRISKRGRSLLRKILYYAAIQTIRKNGILHDYYTRLTDRGMKRMMALVAVSRKLLGIIYAMVRDDSEYSANFESMKRQVIKKAA

SEQ ID NO: 85528 - protein, 396 aa, unidentified
MHQASLAVCVAIKEDGKSEKHKLRCGTTTAELLRLADWLHGHQVTHVAMEATGVYWKPVWHILEGQFELLLANPTQVQALRGRKTDLKDGERISDFLQHGLLQGSFVPPQPIQQLRDLTRSRTTLKQEQVRIGNRIRKVLEDANIKLSSVMSDVMGVSGRAMLRAMVRGESDPETLARLARKRLRGKIPVLQQAATGSLNEHHRFLRKQWLTHWDELTERITEFDNRIEEQMRPFAAAIETWDSLPGIDRITAWTIVAEMGPNMNQFPTAAHAASWAALCPGQEESAGKRKSGRTRRGNVWLRRALTQAAWGASMTKGSYFKAFYHRLAARKGKKRAIVAVAHALLSTGYMLLWTGRTFSDLGEDYFDRLDRERLTKRLLKRLEKLGHRVLIQPVA

SEQ ID NO: 85529 - protein, 410 aa, unidentified
MEVLYPHCAGLDVHKDTVVACVRHMVNGSVRREVRSFKTTTKELLALSDWLAGEGCTHVAMEATGVYWKPVWHVLSDGDFTLVLANAAHVKNVPGRKTDVNDATWLADLLAHGLIRSSFVPDGQTQEMRTLLRTRKQLVRECSRHVQRLQKTLEDANIKLDSVICDIVGLSGRRMIEALIAGETEPGALAAMAHRRIKATPDELEAALRGRVTRHHRFLLQLHLQQIDAVNAAIHQIDQEVDAYVEPFRATVRLLTTIPGIDELSACVILAEIGRDMSRFPTAGHLISWAGLCPKNDESAGKRRSTRMRKGAPWLKTTLVQCAAAAARKKASYLQAQFHRLRARRGAKKALGALAASILTSVYHRLISGELYRDLGPHHFDQRAKAVNTRRLVVRLQNLGYAVQITPLAA

SEQ ID NO: 85530 - protein, 291 aa, unidentified
MAQSTPLFVGLDVHKDSIAVAHAAGGSAEPPVFVGAIGPRQADIDQLLRRLQGKTSALTFAYEAGPCGYGLHRYLTGKGVACQVVAPSLIPKKPGDKVKTDGRDAVELARLLRSGDLTAVYVPSVEDEALRDLCRARDAARVTGKDAKLRLKAFLLRLGRHYVGRATWNDAHRRYLAKVVCPTPAQQIVFQESVRSVDEQVDRLQRLEGELLERAPAWRLYPVVQALQALRGVQFLTAITGVAELGDLTRFDNPRQLAAFVGLIPSEYSSGGSRRQGGITLPPQNLWVGNQ

SEQ ID NO: 85531 - protein, 422 aa, unidentified
MLEETEDREVIIERVAALDIGKAEVMCCTRVPAESGRGRRLQEVAAYPTMTRSLLRLADRLAVLGVTRVVMEATSDYWKPVFYLLEAAGLETWLVNAKDVKHLPGRPKTDKLDCVWLCKVAERQMIRPSFVPPPQIRRLRDVTRYRADLVGARTAEKQRAEKLLEDACIKLSVVASDIFGVSGRAMMAALIAGQRDPTVLAQLARGRMRAKITALEDAFTGHFTDHHAFLLAKMLARVDAIDADIAALDVKIEELIAPFAAAVDQLDEVDGVGRTAAACAIAEIGTDMTRFPTPGHLASWAKYAPGVKESAGKKKGKSTTGHGDRYLARVLGEAAIGAARTDSFLGERYRRIARRRGKNKANVAVGRSLLVIFWHLLSDPQARYRDLGPDFYDTHISNSRKARNHVRQLQALGYKVTLEPAP

SEQ ID NO: 85532 - protein, 349 aa, unidentified
MVADELDYVIGVDTHLDEHVLAIIAAPSGAVVARRSIQASARGYNAALRFAAAEANGARVWAIEGSGSYGAGLARFLAGRKETVLEISRTPRAERRLRGKDDSLDATRTARAALASETLALPRSGERREALRLLLVARRSAVDVRREALGQLRGVIVTAPDMLREELRGLPVGRLLERCSRLRRSRSASADELATRLVLRSLARRIEAATLEAAELERELLGHVRVLTPTLLDEPGVGPIVAAQLIVAWSHPGRLRSEAAFARLAGVAPVPASSGKTTRYRLSRGGDRQLNRALHTVVLHRRQHDPATKAYIARRIAEGKSRRDATRLLKRYLARHLYRLLQHQEPLLA

SEQ ID NO: 85533 - protein, 350 aa, unidentified
MTDPDHSVTVGVDTHLDTHVAAAFNHLGQPLGHLEIPTTPAGYRRLLGWAQSLGSAVTFGIEGTGSFGAGLARYLRAAGCTVIEVSRPNRQTRRSRGKSDPLDAVAAARAVLAGEAAGLAKSDEDRVGMIRSLRIARRSAVKMRTQIANQMDALVLTASTDLRERLRHLSHDALVTLAAGFRPGAVTTPAAATKLALRGLAERHRLLAAELDQLDVELRRLTVEAAPALLAIHGVGPDVAGALLLASGDNPHRLRSEAAFASLCGVAPLPASSGKSHRHRLSRSGDRQANNALWRIVIVRLAHDPRTRHYVERRTAEGLSRRDIVRCLKRYVAREVFLVLRGRSLAASTP

SEQ ID NO: 85534 - protein, 312 aa, unidentified
MSTVYKHFIGIDIGKLEFVVNVHGAKKTYAFNNELDGFNSLYQTLYDELKNGLVVLEVTGGYEISLINFLQAKEVTVVRANSRQVKSFIRSHGIIAKSDNIDACALSLYAYERQKVLKIYQPNKHDVLRKLNARRNDLVHIRVQEKNRSKAPDNDGIMHTFNPILRVLDEQITLIEKQIKSLIESDPLLRQKIQILKTVPGIGEITAYAILAEMPEIGSMNQKQVASLAGVAPHPNQSGLKTGYARTRGGRRKMRPILFIAALSVTRTKNNLGEFYHKLIARGKAKMTAIVALMRKLIVIANARIKLNINHS

SEQ ID NO: 85535 - protein, 345 aa, unidentified
MELQTIGIDLGKTVFHLVGLNLRGEVMVRKKFSRTQLLRFTANIHVELIGMEACGGAHFLGRALREQGHEVRLIPAQYVRPYVKTNKCDYIDAEAIAEAVARPTMRFVPIKTDDQLDMQSLHRVRERWVMRRTAVINQIRGLLLERGITLRKGRHHVDAALPLILEDADVKLSGAVRMLLAQLKLDLDQLAVRIDEADAVIQKTAHENEACRRLVAIPGIGPVTASALIAAIGNGGAFHKGREFAAWMGLVPREHSTGGQQKLLGISKRGNSYLRKLFVQGARAVLQQRTKQSSGLSAWLAQLTSRTHRNVAAVALANKLARIAWAVLAKNEQYRPPVLADVVTA

SEQ ID NO: 85536 - protein, 343 aa, unidentified
MAIVGGLDIHRRQITFDWVDHDSGESGRGRISPADRVGLRKWLEQFAGKPLELVVEGCTGWRFVAEECQAAGVPVHVADPAEAAGPRNRKMRAKTDKIDARKLRMQLEKGDIHDSWIPPRQVLEIREKVRLYLDLIEDKQRWQKRIHATFFHQGVPKPEGRLLRGDNVKLGLDDPDLSPAGAQAVDVAMRIITTIDADLVRLRGELTSFGRRHPGPRELAREYGLGALLATAVWEELGDTRRFTASKQAVRHAGLDISIYDSDGKQRGAPKLTRQGPPALRWALYEGALHAHKKTSPDNTYYLHLAHRIGGGRARLAVARKLARRCHHRLRALGDEAWIELPA

SEQ ID NO: 85537 - protein, 338 aa, unidentified
MNKLMTIGLDLAKNVFHVACCDQHGKLVSKKMLKRFQIMKYFANRSECLVGMEACATAHYWARELSALGHRVKLVPPQYVKPFVRGNKNDYNDALAIAEAVTRPEMRFVPVKTTEQQDVQALHRLREKCLQARTALCNQLRGLLAEYGLIVPQGVNRLRASLPELLEDGENGLSDLFRQLLAQGYQELQELDIHIHDYTQKVKRQSHQEEACRRLQTIPGYGPIVASVFHSEIGNGAGYRRGRDVSASLGLVPRQHSSGGKEALLRISKRGDRYLRSLLVHGARAVVLQAARKDDRLSRWINKVRAERGFNKSVVALANKMARIGWAVLANRTAYQSA

SEQ ID NO: 85538 - protein, 376 aa, unidentified
MERIAYIGIDVHKDTNTAHLFTRTEDSIIDYEMGTIVAGTDSMIKAFKKVLKEFDLTGYQIQAGYEAGPTGYGLCKALQKAGYNCEVMAPTTIKRAPGERTKTDRRDARMLAMALATNSYKPVHILDDRDLSTREFTRTRNTRKNELKKAKQYLLSFLLRIGKSYPDSGSYWTQKHWSWLETLDLQDKYMNYSLKSYMQDIKDLEIKIQMMDKMIEQIAFTDERYKEKVGKLMSFTGIETYTALSIVCEIGDFNRFPDAKFFSSYIGLVPGQDSSGQRKRYTAITKTGNSRVRKLLIEATKGIKHSSVFNKSRRLIERQTGQNPEIIAYADKCRQRIKHKMTNLEIRNGKNANVATAAGARELACFVWGMMTGNIA

SEQ ID NO: 85539 - protein, 388 aa, unidentified
MPQTPNDLSRSLTALEQTTTLVAVVEMSQASWLVAGMIPGLERQPLKKIAPNEAALLSLLQRWQEEAIKICQTIRRITVAYEAGRDGFWLARWLCSRGIEAHVIHPTSVAVSREHKRAKTDRLDTAMLIRVFLGWLRGERGHCGMVAVPTLEEEDAKRPSRERENLVGERTRIINRMKSALVRLGIRGFKPELRRAPQHLEKLRTPENVPIPLRTLEELRRDMARLALVRAQIEAIEQIRLQRLEQAPQDGAHAMVRMLANIIGVGVETADMLVREILAKELRDRRALARYAGLTGSPNESGSKRREKGLAKSGNARVRRGLIQLAWRFLRFQKDSALAQWYRTRTEGAKGARKTSLIVALARKLLIALWRLVTIGEVPQGIVLRQAT

SEQ ID NO: 85540 - protein, 481 aa, unidentified
MGEKKSAPRGKSGHGGKRRGRGVQKALQVVNPDAAGIDIGAESHYVSVPEDRSEEPVRQFGCYTPQLEEMAGWLIECGIKTVVMEATGVYWIPVFRVLESRGLEVLLVNPKRVKHVPGRKSDVADCQWLRQLHTFGLLRGAFVPPQDVAAMRTYWRQRRTLVEAASREILHMQKALTQMNLHLHVVLSDVTGVSGMKILRAIVAGEHDPVQLAGLAGTQVRASREEIAQALSGHYTGEHLFVLGQALELFDVFQAKIRDCDGQLAMHLSRFEGKAGAGAPPSNPKRSRRVSRRKNEPYFDLRAELWRLTGVDFNRIDGIDSLTAFTVLSETGFDVSAFATEHHYASWMGLCPNNSITGGRVKRRHTRRVINRAADALRIAAQSLWRSKSYLGAYYRRLAARMGAPKAITATAHKLACIMYRAVKYGQQYVDKGEQYLEEQHRKRNLKSLVHRAKDLGYMLVHSETGECLSLTNQPLTRCVS

SEQ ID NO: 85541 - protein, 455 aa, unidentified
MAKQKTRKIPTIETVNIGAAAVDIGSREHMAAVNPEVADSPVRAFGTFTHDLHDLADWFKSHGVTSVAMESTGVYWIPAYEILEQHGFEVILVNARYAKNVPGRKTDVSDASWLRQLHSYGLLRGSFRPSAEIATLRAYLRQRERLVEYAAAHIQHMQKALMEMNLQLHHVVSDITGITGMKIIRAIVAGERDLDVLAGYRDVRCKASTQTIKAALNGNNRPEHIFGLTQSLELYDFYQAKMLECDRHLEATLVALGADTEHDPSQLPRPRTKTKQVSTPSFDVRAALFGVLGVDLTEIHGMGPSLSLKLVGECGTDLRAWPSAKHFTSWLCLAPGDKISGGQVLSSRTRRSSSRAAALLRLAAVTIGRSDTALGAFYRRLAARAGKAKAVTATARKIAVLFYNTLRHGMTYKDPGASHYEERYRNRVLGNLRRRAKSFGYDLQELPLEADMAVS

SEQ ID NO: 85542 - protein, 346 aa, unidentified
MIENHYIGLDVSARTVNLCVVDHSGQVVHEAKLTSEPEEIAQHILALPFIVYRVGLEAGMLSQHIFGTLAEAGLPVICVETRHMKAALAAQMNKTDRHDARGIAQMMRVGLFKEVHVKTPTSRRLRAILTARQLLRNKLQDVENEIRGLIRDFGYHLGKVTARDFEPRVRELTADTDLHVVTDTLLAARRGLREQFGRLDDLLVKLARQDELTRRFMTVPGVGPLVALTFRATVDVPTRFMRSRTVGAHFGLTPRKQQSGEVDRSGRISRWGDAMMRSLLYEGAQVLLTRVKRWSALKAWAMQVARRRGHKKAIIALARKIAVILHRMWIDGTEFEWGERRQPASL

SEQ ID NO: 85543 - protein, 349 aa, unidentified
MSTVRDEYTNVVGVDTHARTNTYAVLAAATGLVMDTATFPTSPPGLTRAIAWIDRRSEPGRTLVAIEGTNSYGSTLTRALRTTALEVCEVRPPRRTSRAGRGKSDDIDAVAADRTVLAEEVSALLEPRAEGHRDALRVLLNARDAMEHQGTANRLMLTALLRTLDLGVDARKALTDSQITQISRWRVRSGDDLPARIARGEAKRLASAIHDFQALLTQNREQLAEVVDTMAPGLMDLPGLGPVTAAQVIVSYSHHGRIRSEAAFAALAGVNPIPASSGNNVRHRLNRHGDRQLNRALHTIARTRMMFDPQTQDYVQRRTAEGKTRREVRRCLKRFIARQLFRKLQTLLT

SEQ ID NO: 85544 - protein, 345 aa, unidentified
MPIVGGLDIHRKQITFDYLDTATGEVKRGQITPAGRKHVRAWLARFADRGDVAFALEGCTGWRYIAEELAAAGLEAHLGEPADTAAARGRKRHAKTDKTDARHLRTLLGEGRLPECWIPPEHILEYRALLETYHDLRAEHTAWVQRIHAVFFHQGAPPLGEGALRTEQGLAGLRAAAVAHLSPAGQLQIATALDMLAAVDARLGPLRHQLLGAARHLVGAKVLAERLYGAGPVTALALTCWLGGAGRFSSSRKAVRFTGLDVTVHSSDRKGPPGRLSRQGPPVLRWAVYEAGKTHGRAAAPDHGYYAAVKDRKNGKRAALSEARKIVRQACHILAELGDDALTAI

SEQ ID NO: 85545 - protein, 393 aa, unidentified
MVCVGIDVAKDKHDCFILSSEGEVLADVFTIQNNAEGFNTLLQTISCCTNPKDKIKVGLEATGHYSYNILGFLLDKGLPTYVINPLHTNLYRKSLSLRKTKTDRVDARTIAAMLMSDVDLKSYTDTAYHNEELKSLTRYRFDKVRERAKLKQSVSRLVTILFPELEKLVPTLHMASVYALLSEFPGAKQVAEAHLTHLKAVLHDASKGRYGRDMAVTLRDAARCSVGSVMPAKSLELRHTIRLIRELDSEIQDIEAAIQTMIEEIASPITTIPGIGVRMGAMILAEIGDFSRFDSPDKILAYAGMSPSTYQSGQMSLTGAYSHMEKRGSRYLRYALYNATKYVCHWDPIFSAYLAKKRAEGKHYNVALSHAAKKLVRLIYALEKSKLPYSSAT

SEQ ID NO: 85546 - protein, 423 aa, unidentified
MNNKIGQEKKQVLNNNPIVKALSREEISRRIAEIQDSLKASTWKELETKGKFTKDDKLTFITDDMLIIGCDVGSETHYARAIDLRGREFSRKPFSFRNDSDGFQSAKQWALDLAARHQKKQIVLGLEPTGHYWFCLAAWMVSNGISVVQVNPYAVKQTKELEDNSQLKDDRKDPKLIANLVKDGNYGMPYLPEDVYAELRRLSRFKDQLSEDRIRAINRLHKEMAIYFPEYKDAFGKIESAFALEVLKEAPFPEDILAIGADGLRDIWRRAGLKGRGYGRAGKIVDLASGSVGLVHGTQGGRKAVRWSAAELERLNGEIADTEEMLHIRCREIPSASNVLEIRGIGENILSGILSEMGDISRFDDAKEIQKMSGLSLVSSSSGKHTAGKGSGTGCSRQQGHRSHTQMSSGRCISTTRPGRKTL

SEQ ID NO: 85547 - protein, 366 aa, unidentified
MQYIDKSSTESSSLEETRSQFNGGRCTIKLGIDVHQDFYVVVMQEGATNPKPPQRFRKEAFLHWVAKLKQRGAQVHAVYEACGFGFSLQRKLRALGLHCYVVCPQKLDEQNKRVKTDGLDAKALCLKLDRFVEGNRDALALVRVPSEEEERARVIHRQREQLVKTRKQLEAHGRSLMVNHGIEPVVQQWWKPRAFAQLQVPDWMRALLCNSQPILLGLQEKISALTVQLQSAASANQPRGLGLLTSVIIDREIGDWHRFNNRRQVGSYTGLCPGEYSSGNSRLQSCVTKHGNPRLRAALVELAWRLVRFQPNYKPVIKWRRILAKGALATGAARKKAIVAVARQLAVDLWRIRTGRCSAQQLGLTI

SEQ ID NO: 85548 - protein, 476 aa, unidentified
MKKHKKTKPNPEAAKPLHEPKPDAAGIDLGATEIWVAVAPDRCQMPVRRFGAFTQDLLAILQWLLECGIRTVAMEATGVYWIPLYQLVADAGIEVYLVNARHVKNVPGRKSDVRDCQWLQYLHSVGLLMASFRPAQIICQTRSIYRFRQNLLTQVGQHLQHMQAALDQMNIKLHHVINDLSGQTGMAIIEAILNGERDPLRLAQYRDRRIKATQETIAKSLEGDWRSEHLFVLRLAWENGKQVQEQIKKCDQELMQYTRQLEAKTMVAQPIVPVKIMSLNVEPGVPELTPAPAVRPAKPRKKTSKNEPDGPWRENLHRFFGVDLTLIPAISVLTGITLMTELGNDLSAFKSVHHFCSWLCLCPDNETSAGKVLHKSTRRSQNRVRQALRMAASSLHHDKSYLGDKYRRLRAKLGAPKAITAMAHQIARIIWYLITHQVAFDMSIFAELEKANQKRHLNRLNSAAHQMGYQLTPIAA

SEQ ID NO: 85549 - protein, 347 aa, unidentified
MHEHTTIGVDLAKSVFELAVSDRPGAVSLRRRLTRGQFSSFLAAQAPATIVMEACGTAHFWGRTAQSYGHRVVLLPPHAVRPYVLRNKTDGADARALLEALRNDALCAVPVKSVDQHVLAALHRMRSGWMATRTARLNTVRGLLRELGIAIPIGATRVVPAVRALCAQGDAALPAPLRLVLRDAVTEIGGLEARMRTLERSLEALAADSPLVSRLRSVPGVGLLTATAFVAFVGDVARFPSGRHFASYLGLTPRESSSGLKRKLGRISKRGDPYLRMLLIHGARSVLTHAKRSNAPRDGLRSWALSRETARGHNKAAVALANKLARIVWAVWRHERPFQPREEEALP

SEQ ID NO: 85550 - protein, 322 aa, unidentified
MAMHSFAGIDVSKDRLDVMVLPEEQCSSVSNDPTGWAKLVEQLRGSSIAAIGLEASGGYERGVMRSLLAAGMSVRQVNPFKLRQFAKASGVLAKNDPLDARMIASFVAIMPTRPAQPRAPALERLVEMLAVRRQLSAEKVAAENASRLLENAMLQRLSRRRIARLAADIDMLDERLVEIVVADAALAHRYRLLTSMPGVGPVLACTLIALLPELGRMSRKQVAALVGVAPYAFESGKLKGKRCVWGGRAPIRHVLFMAAMSASNWNPLLKRFHDRLAATGKLPKVVIVAVMRKMITTLNAMVRDDVVWADRHRGRHTVPTTR

SEQ ID NO: 85551 - protein, 466 aa, unidentified
MNNVAYLGVDVSKGYADFILLNPKKEIIENGFQLDDNYKGHSKIKGLLKTFCTNHRLEEIQCAVESTGGYENNWYNFLKELNDELPVKVARLNPKGVKSNREATLSRNVTDELSSKYIAEYMISHPGKISFNQESINNFDSLRRQYKYIKLLLKQSTQLSNQLEKLLYSANPEILYYSKNGIPVWAIQLLTKYPTAEKLSRATVKGVSKIKNITSKKAQKLIEKAKNSVGKVNDPYMGSLISSQANELIHKKQIIETQKKLFENNAKGESIELLESIKGFGTYSAAALIIEIEDIGRFESAKKLASHSGIHPEMKESGDKKKVVRMSKKGRAGIRDIMFNVAKTAAVHDEHIKAIYIRLRKGGMSYLGAIGVIMHKMLRIAYGVLKSGKKYDVEIDKKNQEISQRENMSLEERKNKHIEFSRRHQSLESEAPVSSRNWKKRKALLSSQSNDITEHGIKETTPVAKI

SEQ ID NO: 85552 - protein, 365 aa, unidentified
MTRKRYYIGMDVHKEYVQMAVFDQSGEDPIYERRVSNDTSLLVKEVHRFSRERKTEVAYESGSLGYVIQRAMAKVGITCYVLPANKVAKKREDKIKTDKRDARLIGRELRSKNIRAISVPEATDEAARDLLRCREDVGGDLRRAKQRLLKFLVRHGHIYHDGNHWTLKHWKWMDEIHFDQEHKRVVYEEYRSQIRALEERVARLSGQVEEVAESPRYKAAVSTLRAFKGIDYIIALAVICEIGDFRRFANAKAFMSYLGFVPSENSSGGKRNQGGITKAGNGHLRRLLVEGAWHYTRNARVGRRLEQRRASSSTSAIAVADRALHRLHKKYIRLVMKGKHKNVAVTAVARELAGFIWAVQVSPAA

SEQ ID NO: 85553 - protein, 352 aa, unidentified
MSHKSAPSTAVGTIGIDLGKNSFHLVGLDQRGAIVLQLKCSRAQLERRLANIPSCLIGMEACSGAHYIGRQLAALGHDVRLIPAQYVKPFLKGHKNDYRDAEAIAEAVQRPTMHFVAIKTPEQMDLLALHRVRSRLVGQRTGVINQIRGFLIERGITVRQGVVPLRKALPDILSSYTDALSPRMVNLITELVQDWRRLDERIAAVSAEIESLAEQDEGCQRVMTVPGIGPIISSAVVAAIGNGAGFTQGRDFGAWLGLVPKQESTGDRTILGKISKRGNKYLRTLFVQAAHVVLVRRPRAAMRGLWPWIEQASKRLHRNMLAIALANKLARIAWAVLARGREYQPRIAPHAV

SEQ ID NO: 85554 - protein, 343 aa, unidentified
MDQYVALDVSLRKISVCVLNSCGRVVTEADVPSEPGALISFIRTRAPHASRIGLESGPTSTWLWHALKAAGLPVICMDARHAHAALSVRPSKSDRNDARGLAEMVRVGWFKEVQVKSLEAHERMALLGVRRRLVDIRVEIDGQIRGILKTFGLVVGSGNKGAFAQRARMMAQDHPILSALVEKLLDVREVAAAKVAVLDKEIRRFVRDDPTLRRFLTVPGVGPVTALAFRATVDEPSRFRRARDVGPYLGLTPRRYQSGETDRQGHISKCGDRFTRTCLYEAANVLLTKVQRWSPLKAWGTRLAKRIGSKKARVAIARKLAVILHCIWTDGTEFWWTKEMAAA

SEQ ID NO: 85555 - protein, 352 aa, unidentified
MEKYIGIDVHSESCTIAVMNSAGRQLRQQVVDTQAKVLIEFLKGLAGDRHVCIEEGQLAEWLVETLEPYAKEMAVVQPKAHQGHKSDAADAWALAEQLRVRAKGVYVFKPTRQYRPLREAVRTYGVAVKDMTRAKNRFRSLLRARGVANFDSSIYEPEQRSAWIRKLPAAYRRRAEWFGRQIDSMSEAHEIAQSWLEEEAEKCPEVERLQTLPGFGPIRAAQVVALVVTPHRFRTTRQFWNYCGLAVVTRASSEWKRDASRDGWQHVRGNVQTRGLNRNCCSQLKAVFKGAATTVIAKPNPLREHFEQLVANGTKVHLARLTIARRIAAATLAIWKKKEDYDPTKHQSIKPA

SEQ ID NO: 85556 - protein, 318 aa, unidentified
MTFSPIGIDIAKAKFDAAALRHGKYKTKVFQNTPEGFRAFLAWLQAFPTPHVCLEATGRYGEGLALFLVDHGLAVSVVNPAQIHAFGQAELSRTKTDKSDAKRIARFCLSQRPLLWQPPPPAVRPLQALVRRLESLLEMRQMEKNRLDGADPTVRPSIEAVLATLDAEIAATQQRIREHIDHDPDLRQRRDLLDTIPGLGDATIPVLLAALGDVHRFENARSVAAFAGLSPKEHQSGKWKGHTRLSKTGDALLRKALYLPAIVARRHNPLIRAFCERLKAQGKNGKLIVGAAMRKLLVLAYGVLKSGRPFDPNHGLAS

SEQ ID NO: 85557 - protein, 363 aa, unidentified
MQQSTTIIAFDQHAATTVAAILLPGHRTPALHELASDIPTIVRFIGRVRPDHPEVQCCYEAGPCGFELQRALTARDVPCDVIAPALIPRRVGDRIKTDRRDAGQLAVLYRAEALTAIHIPTEQEEAARDLLRCREDIRTDLLRARHRLSKFLLRHGRRFTGTKKAWSKAHDTWLRAQTWPLPALDQTHAAYLRAVDEAVARLRSVEADLRTLLDLEPLRPRIQRLRCFRGIDDLTALTIAAELGDPRRFASAPRTMAFVGLVPSEHSSGTKQARGAITKTGNAHLRRVLVEAAWHYRHRPFVGAALRRRQQSAPAPIIAQAWTAQERLYRRYHRLRGRGKPNQQVITAVARELTGFVWAALIQ

SEQ ID NO: 85558 - protein, 416 aa, unidentified
MEVLYRRCAGLDVHKDTVVAGLRLAEAGSVITEIRSFATTTPGLLALSAWLGEHGCTHVAMEATGIYWKPVWHILSDGDFMLILANAAHVKNVPGRKTDVADAIWLADLLAHGLIRASFVPPPATQELRALLRTRKQLVREQASHVQRLQKTLEDANLKLASVLTDILGVSGRAILEALIGGECDPDALLGLVRRGVKASPDTLRAALTGRVSERHRFLLRLHLRQIEALDGAIAEIDREVDRDLAPFHDAVRLLRSIPGVSDLTARVIVSEIGTDMTRFPTAGHLISWAGLCPRNDESAGKRRSTRLRKGAPWLKTTLVQCAWAASRKKDSYLQAQFRRLRHRRGPKKAICAVAASILTAVYHMLRDGTFYHDLGAGYLHRISPEAQANRLAKLITKLGFTCTLAPIQLNSAVSV

SEQ ID NO: 85559 - protein, 345 aa, unidentified
MTPPTNRPAYQLFVGIDIAATTFTAVWTTDGPPQERARSFGQTPAGFEALQAQLQATGVAPGQILVVLEATGSYWVALAVALHEAGYVVSVVNPAQAHNYAKSLPRRAKTDLLDAAVLAQFAAERRPCPWTPPPAVYHELRQRLLARDALLTMRQQARNQRHALLQWPIVVESVRQQLDSLIADLEKRLTELDSEIAQVLSEGALAESATLLLSITGIGRITTAWLLVGTLNFQACRSAESAAAYAGLVPLAHDSGSSVRGRAQIGHGGHARLRTALYLATLTAARFNPIIKAQYERLRAAGKPMKVARCAAARKLVHLAWAVVTKRQPFDPSYGMRMVEERRAA

SEQ ID NO: 85560 - protein, 367 aa, unidentified
MPSMTQQSHPRHDTADQHEQVLLGVDTHKDVHVAAVITSTGLLLDTRGFPTTREGYRQLLSWARAFGQLQRAGVECTGSYGAALTRYLHHEGVTVTEVNQPDKAARRRHGKSDSIDAAAAARAVLSGRATATAKTTDGPVETIRLFKMAKASAVKSRSMAINQLKAVLVAAEPALRESLAGLSTPKLIRRCSQLRPAPGTGPQAASRHTLRLLAKRILHLTEEINDLTARIRTAIDACAPKLLGLYGVGPDTAAALLTAAGDNPDRLASEASFAALCGVSPVEASSGKTQRRRLNRGGDRQANSALYTIVIARLRWDTRTRSYVERRVIEGKTRREAIRCLKRYVAREIYQALLPSRRQSLAPAPAV

SEQ ID NO: 85561 - protein, 354 aa, unidentified
MDHYIIGCDAHKYYSQFDVFNTSSQAEQRLRVEHTPQALRSFLAQFPKGTPVALESVGNWYWIVDEIEAAGCIPLMAHAAKAKVMMGNVNKSDKLDAKGLLTLLRNGTLPTVWLPPAAVRDERELPRTRMSFCKQRTALKNRIQATLAKYALSPQEGEDLFTSQGRAWLNETIQKLPAETRRCVQQELETLDHLQGQINQLERRIRDCVALTPEMQLLKSLPGIGDILAIVVAMEAGEMSRFPSPEHFASYSGTVPKVKSSGGRTRYGHMRQEANRYLKWAFFEAANAVVSRRHHPLWRNRHVVRLYERLRQRKGHAVAAGAVARHLAEAAYWVLRKNEPYREPISKKGLSKQG

SEQ ID NO: 85562 - protein, 466 aa, unidentified
MENNYILYVGMDSSKGKADAAILKVSDRRSVKPKFLRKKLSFKFVKSEVTSFLETVRSYSDDDCTSICFALEVTGIYSTNVYNFIKDNLNDNESIKFLNTDFVNQWRNAHNIAKSDPLDAQTISTIIGTDSNVQYVNDNVFENKNGYQDLKALVHRHYQIKKIYSQEINRLIAQCDCLFPELQYVFEPKSAAFIAVLSSYPTTHDIINASRLEVFNVVYEATKHRCSMDKIDKLFDLCHDTLVPDNISSYGRSIILDLVENIKNIKGQLKMIERYIRDVASLNPAYKLLLTITGCGPLTAATVIAETGDIKRFRNADCFVSYSGTSPRNKRSGTSVETMGKISKKGSRYLRHAIYMIAEFARRHNPVLKHQFERIKNGNKKRHKLANIAVANKIARYIYSIMKNESSFVILHEHIMRLPEETQNTFFNSISLDFPKNTRKQIYQYSDINGEIHKFVYTKLEETMII

SEQ ID NO: 85563 - protein, 367 aa, unidentified
MDANSGIQVVAQKRWKETAMYLKEDIILAVDYHDENLVIRWFNCHTGQERLLKYRTTARNIRKIVSDSVKEAAQVGGRVFWIMESTTGWPRVKKTIGSMASLVVANVLQMPLPPKAYRRKTDKVDTKRILREFLNGSLPVAFQPSAKLRQIRRLVAARESLVSRRTALRNWINRYLAHETWRSREGLWSARGIRGLKRFAASAEGPDRVVLSVKLKELEQLEELQTTVEDEMLAVYKKWPEAQWVDDIPGIAEISAVSILARIGPIERFGDAEELISFAGLAPGVQQSDGSNRDGHIGGGGTDEHLRHYLIEATFWARRVPRYRPTYERMLYKRGPKIARVVVARMMLRSIHKMLQAQVRFNRLRVA

SEQ ID NO: 85564 - protein, 313 aa, unidentified
MQFTRSYALGIDLHKRKSWWTILDKEERILWKGELPTSKESISATLATLKLQGKDIEACIEPVEQWGWYAEALEDAGILVHLVNPLSAKDRVTARKKSDRVDSEKLSGLLIHDYLPTSYLAPRRTRDLRELVRTRSYFVQIRTRIKNRIHSILGKHGLIFPYSNVLGKRKAIRWYEACQIREVFRESLNHFLLIGWQLESHISKFDSLVKHEDAKDKDVPLLRTIPGIGEFRALAIKAEVGDFARFPSAPALASYAGLVSSSNSSGDRNRLGHITKAGSRYLRWVMVETVTKVDESWGELFDFFKRIREKKGF

SEQ ID NO: 85565 - protein, 341 aa, unidentified
MSTVTLIGIDLGKHSFHLHGQDATGRMVFRKKCSRQQLFTLLGNTPCSTVVMEACAGAHWMARRIQALGHQAKLISPQFVRPFVQGNKNDFADAQAICEAASRPSMRFVSARSEAQQTVSALHRVRESQVSERTGVINQIHAFLLEFGISLPRGKAIIRRLPAALAEHELPPRLVALLERLQAHFKYLDEQIGQIDRELGQQLREDERSQRLLEIPGIGPITASALMTELGDARQFGSARQFAASVGLVPRQYSTGGTPKLLGISKRGDKNLRRLLVQGARAIMQRVDRRTDRLGIWVRELLERRHSNVVACALANKLARIAWAILANGTNYRSEQAVSAA

SEQ ID NO: 85566 - protein, 399 aa, unidentified
MAEGVVAGIDWASEVHVACVVGGDGTVADRFSFTHDTAAIRSMVSRLRSANVAGIAIERGDGPVVEELLAAGLVVFVMPSRQIKGLRTRYGSAGNKDDRFDAYVLADTLRTDGHRWKPLRPDTGPTRALRALCRSRKDLVETRVLVTGQLRANLELAFPGAIGLFTKPASAISLAFLQRFPAAGKAAWLSPSRLASWLRSAGCTGGVSAGTLYGRLAAAAPGLTGPEGDARGQITLAFVAMLRTLNEQITVMDAEIGRLFAAHPDRHIFASLPRSGTVRGATLLAEIGDCRQRFPTDDALAALAGACPSTRQSGKRSQAVFRWSCSKKLRAAMMDFANGSRMSDPWAAAIYAAATGRGCRHPHAIRILARAWIRVIWRCWQDGTAFDPALHRGRQAAAA

SEQ ID NO: 85567 - protein, 430 aa, unidentified
MKSNTQNAKIEAITEKTLVLGIDVGSEMHYARAFDYRGIEYSKKPFKFSNTEAGFVTFKEWILDLKERHEKDKVVPGMEPTGHYWFNLGKFLQDNEMKPVLVNPHHVKKSKELDDNNPTKNDRKDPKVIAGLVREGRYMIPYLPDGVYADLRTASNIRFQLQAELTRIQNRISRWFNIYFPEYKTVYGKPDAKSGMLILKAAPLPEDILTLGIDGVNQIWRDAKLRAVGKARAKTLIEAAEHSVGSKEGAVSARMEIRMLLEDYESRNTRLQEVMILIEELVRKIPMAEKLLEIKGVGIRTVSGFLAEVGDISRFNNPKELQKLAGLALVENSSGKHKGETTISRRGRKRLRYLLFEVAMSLVSKNQEFRELHNYYTTRRLNPLKKMQSLMAIAAKLIRVFYAMLTKGVDYDPKKMVSDIKRPAVYLQAA

SEQ ID NO: 85568 - protein, 347 aa, unidentified
MDVHREAIVIAVLNGSGKLVMETILETKASSILQFLHGLRGELHVTWEEGTWAAWLYDLLQPQVEEVLVCNPRRNALLKEGSKSDKVDARKLADLLRTGMLRPVYHGENGLRTLRELGRSYQTIGKDLTRVMNRLKAVYRGWGIPCAGTRVYAARYREEWLSKLPQAGVRRRAELLYQQLDGLQALRREVRPEFLAESRKHKAAKLLRQIPCIGPIRAARLIALMQTPHRFRSKRQLWTYSGLGIETHDSAQYRYVGGQLQRSKKPQQIRGLNRNHNHEMKEIFKSTATRASCGTGPFHEFYAALLAKGMEPEMARLTLARKIAAITLTLWKKGERFDAEQLKTQAA

SEQ ID NO: 85569 - protein, 393 aa, unidentified
MRKSKKQQKPLNDLSRSLTPFDPNHTLIIVVELSKKTWLVAGIIPGIERQPLKKLTADENELLKLLERWRAEAEKAGHKIHRVAVAFEAGRDGFWLARWLKAREIEAHVIHAASVPVSREHRRAKTDRLDTKALKRVFLGWLRGERDHCKMCAIPTFAEEDARRPHRERETLVGEQTTIINRIKGTLARLGIRNFNPKLKKAPERLENLRTPEGEPIPPNTLAELHRDMERKRLVAEQIRQIEKARLEQLKQAPKTGPNLMVLLLARVIGIGIETADMLVKEILSRNMRDRRAVARYAGLTGSPDESGNKRREKGLARSGNARVRRGMIQLAWRFLEFQKESALAKWFEARTENARGSRKKMIVALARKLLIALWHFVRDGVVPQGIVLRPAH

SEQ ID NO: 85570 - protein, 386 aa, unidentified
MPHVDDLSRFLTAFDQDSTLVAVIEMSLKSWLVAGIVPGVSRAPLKKLGADENAVLRLLHRWREEATKAGRRITRVVVAFEAGRDGFWLARWLRARGIETYVIHAASVAVSREHRRAKTDRLDTEMLKRAVLGWLRGEPEHCQMAAVPTLPEEDARRPNRERDCLVRERTRIVNRMKSALVRLGIRGFNPKLRKAAERLEELVTPEGEALPLNTLAELRRDLARLALLREQIKAIETARLERLEHAPKEGPHAMVRLIARVVGVGVETADMLVHEILSRNLRDQRALARYAGLTGSPDESGSRRREKGLARSGNGRVRRGMIQLAWRFLRFQGDSALAKWYQARTETAKGTRKTMIVALARKLLIALWRFATTGTVPDGVALRPAA

SEQ ID NO: 85571 - protein, 396 aa, unidentified
MEVYSKYVGMDVHKETIAVAVAEANGGEVRFLGEYRNTPEAVVKLVKQLRKGGAELSCCYEAGPCGYGLHRQLVGMGVANQVIAPSLTPKKPGVRIKTDRRDSLTLARMLRAGELTAVWVPEVAQESLRDLTRGREDLKHLEKQAKQRLQAFLLRHGKVYAEEKKWTRMHFRWLESLKFDLPVQQIVFQEYVDTLQSLTRRVEALDGQIHQAGSESKSAPVIVALMALRGINQLTATTLMAEIGDLRRFPTAPQMMTYLGLVPSESSSGETRSRGPITKTGNGHVRRVLVEAAWTYRFPARKTTHLQQRAKRAPEVVQDIAWKAQTRLCARYRTLEARGKLKVKVCTAIARELIGFIWAIGQTVPGPEANAPGPLVKPQCVGSRTDHGGRTLEDPM

SEQ ID NO: 85572 - protein, 398 aa, unidentified
MICFGIDVSKGSSTVTGISSDGYIAFKTQSIEHTQEQVSALVKTIQFFSASNEIRVVCESTGYYHWQIVTPLLEAGIYVSIQNPIVTSKFAKTALRNVKTDSVDSVMLAKYGLLYWNTLCCSLKYDEVYDELHTYSRQYYQYLTLRVKSRLNLVSILDHTMPGITNHLKEENGNHKLTDFVDKFWHFNNITKHRESTFITTYQSWCKKMGYQFSTNKATTLYHLAKNGITTMPCTSSTKMIVQEAVKSLRFQGDSADLILTRMLELANSLPEFKILSSRTGIGSTLAVRFIAEVGDIKRFRNKHSLVAYAGLDAPPFQSGIYEGRNRHISKRGNKYLRKTCYEMIKCLTSSAAYIEHDDVLDFVNKKRSEGFAYKKACVAGANKLLRTYYGEITALYK

SEQ ID NO: 85573 - protein, 343 aa, unidentified
MDYFAGLDVSVKETSVCIVDDAGKIMREARVASEPEALLQVLTNTIYRFKRVGLEAGPLSQWLYSVLAEAGLPVICVETRHMRAVLKAQINKTDRNDARGMAQMMRAGLYRPVHVKTLRSQKLRVLLTHRKLLQSKAIAIENELRASLRNFGLKVGMIGTMKFEARIRELVERLPDLAVLVEPLLIVRRVIREQLGILHRRLLAIVRDDEVCRRLMTIPGVGPVVALTYRVTVDAPARFRKSKAVGAVFGLTPAKYQSGENDRTGAISRCGDEMMRIMLYEAAQSMLVRTAKWSWLKAWAMKIARHRGMKKAIVALARRLAVIMHRMWVDGTEFRWTRELPVA

SEQ ID NO: 85574 - protein, 346 aa, unidentified
MDQIIRIGMDTSKNVFHLHGVNAAEQPTLRRRLTRKQMMGFFEKLGPTIVGIEACGGAHYLARQLCAFGHEVKLLPPQLVKPYVKRNKNDARDAEALCEAMSRPTMRFVRVKTAEEQAALMLAGQRDRQVRSRVQLANSIRGYAAEFGLIAAKGPAKIEELLLRTQAEEGLPALARELFAAMAKEYAQLERRLAEIDAKLMAWHRSNELSRRLVEIPSVGPVIASLTAMKVQEPRAFRSGRDYAAWLGLTPKDHSTAGKQRLGTITRAGDEDLRRLLVVGATAVIWQARRGKGKASPWLAALIKRKPPKLAAVALANKTARICWKLMISGERYNPRIMALAASEAA

SEQ ID NO: 85575 - protein, 347 aa, unidentified
MNLYNLPHKYYCGVDLHSRTLYLCVVGQEGGVLLHRSLPCDPTRFLLAIAPFREDLVVAVECVYSWYWLADLCAKEGIAFVLGHALYMRIIHGAKAKSDRIDSEKIAVLLRGGLMPNAYAYPADMRATRDLMRRRLLFVRQRGSLLAHIQITHHQYNVDPPGKRITYRSNREGLGEAFEDPSVRQNIASDLTVADHLEVVIGELELAVLRQARVHDPNAFALLTSVPGIGKVLALTILYEIHDIARFPSVRDFASYCRLVKCERRSAGKSLGSGGNKIGNAYLKWAFSEAAVLFVAKSEQGRTVLSRLERKYGKPKALSVLAHKLGRAVYFMLARKQAFDPQRFAAA

SEQ ID NO: 85576 - protein, 400 aa, unidentified
MISVGIDVSKGKSTVCILKPYGEIVSKPFNITHTQKDLSELSSMLFRLNDEVKIVMEATGIYHLPVLTYLQEKGFFVSVINPYLMKSYRNESLRKAKTDKIDSRIIANYGIDHWFKMKEFQTSGVIYEELKLLGQQYRHYMKLHLLSLAELTHLLDLTMPGIKNLLASWNETNRKDKRSDFVERFWHYDVITSMSEQEFTEEYILWAKEKKYVPSQEKAKVIYTLAQESIPTLPSETSSIKMLVTEAVRVLKEVDATLGLILSRMQEIAKTLPEYSVVREMGGVGNTLAPKLIAEIGDVRRFRNGKALVAFAGIDPPPYESGQFVGCNRKISKRGSASLRKVGYETMRSLKMRSRPEDPVYRYVVKKESEGKSKKSAKIAGLNKFLRIYYARVTELYKNI

SEQ ID NO: 85577 - protein, 341 aa, unidentified
MDAASLIGIDLGKHCFHLHAQDASGRMVFRKKLTRSQMLTLLGNVPCCTVVMEACAGAHWVARRIQSFGHQAKLISPQFVKPFLTGNKNDFADAQAICEAASRPSMRFVSPHNEAQQVVSALHRVREGLVRDRTGTINQIHAFLLEFGVSLPKGAAVIRRLPAVLASESLPPRLIALLEGLQAHFKYLDEQIVQLERELMQQLREDERSQRLLEIPGIGPITASVLGTELGDAQQFVSARQFAASIGLVPRQYSTGGKPTLLGISKRGDKNLRRLLVQCARTIIQHIERRSDRLGVWVRSLLSRRHSNVVACALANKLARIAWAILARGTHYQGEQAVAAA

SEQ ID NO: 85578 - protein, 435 aa, unidentified
MKFMSESEVLGQEPQFAALVGIDWADQKHAWCLQAGGATQRENGEVEHTPEAVEAWVGQLCQRFGNRPIAVAVEQVKGALVFMLSKYEPLHLYPVPPAMSANLREALYPSGAKDDPRDADLLLELLLQHRDKLRRLSPDSEATRRVQNLVEERRNLVDEKTAQTNRLTNQLKMYFPQMLEWFEQLDTGLVCALLEQWPTLEELQKVPPARLRTFFRKHHCHYPELIERRMVGIQQAMPAIRDRAVIEAKSTVVKVSAQVIRSLVRGIADLDRKIEEAAAAHPDFFIFESLPGAGAVLAPRLLAAFGSQRERYANAEEVQAYSGIAPVTERSGKKKWIHFRWACPKFLRQSFHEWAGHSIAHSQWARSYYQQQRERGKGHHAAVRGLAFKWIRIVFRCWKDGVVYDESKYLAALAKRNSPLLRSLGQSCEIFVDSL

SEQ ID NO: 85579 - protein, 341 aa, unidentified
MNKFIRIAVDLGKRYFQVHGLESEGGRSVSRKLKRSKMLEFFSQIERCRVGMEACGSAHHWARELVAMGHEVVLIPPAYIKPYVKRGKNDAVDAAAICEAMSRPDMRFVPIKSADQQAVLMLHKTREMFVKQRTMSVNALRGHLAEFGIVVAKGIGRVDELLALAESDAALPQVAKSIVAGLAQHLAGLDQSIEAVEDEIARAHGQNPTSCLLDEVPGIGTLIASVIAASVPDPGVFKSGRDFAAWLGLTPRQNSSGGTEKLGAITKQGNRYIRKMLVTGSTSVLRVAGKRKGALADWINALRARKPERVVAVALANKLARICWAIMTTGESFRVDTYVKA

SEQ ID NO: 85580 - protein, 366 aa, unidentified
MKKISTMQVLGNEVFKEQKLTIGLDLGDRWSFYCILDEAGKIILEQKLPTTPEAMKQTFGKIPRSLIAMETGTHSPWVSRLLTELGHEVLVAHAQKVELITKSNRKDDRHDARTLARLARIDPELLGPVRHRSAKAQIHLTVIRARAELVSARTALVNAARGLVKSFGQRLPKCGTQQVSGKLAEGLSAELREVLEPLLREVESLNERIQEYDARMEKIAKEVYPEASLLKQVKGVGTQIALTYVLTIEDPYRFPKSRAVGCFLGLRPGRRNSGESEPQKKISKEGDRYLRTMMVQGAHYILGPFGEDSDLRRWGRKLAERGGKNAKKRAVVAVARKLAVLLHRLWVSGEVYEPLRNSQKAMRAVA

SEQ ID NO: 85581 - protein, 376 aa, unidentified
MTRVIYTGMDVHKDTYSLCSFDAQDNFMFSETTVKAETASVLSYIKSIEKRYSDDDVMIVCGYEAGPTGFSLCRQLQKNNISCVVMAPTSLPKAPDEKKRKTDKGDARSLALHLAHKTYKAVHVLSPEIETIKELTRTRATALKAQKRAKQNLLSFLLRKGMVYPYGGRAKYWTQKFYAWLKTLEFANDIERYSFEEYLSEVNHQMSRVSRLDEKIGEIAEDPLIRDDVKKLCCFSGISTLTAVSLVSEIGDFNRFEKARYFASYLGLCPGIHSSGLSSQTLGITKAGNKHLRCLLIEAAQAMSRSQICGKKSLRLLARQKDMNPLVVAYADRATERIKRRRSSMIFRGVNCNKATTAAAREMACFIWGLMTNNIA

SEQ ID NO: 85582 - protein, 408 aa, unidentified
MTPIIERGAGLDIHQATIVATVRVPDGHGRRTAITQTFGTMTVDLLTLRDWLQAHGVTHVAMESTGVYWKPIYYLLEDACTLVLVNMQHLKIVPGRKTDVSDSAWLAQCLEWGLLRGSLVPPPAIRDLRDLTRYRKKQVEDRTQEVNRLHKVLEEAGLKLSSVVTDVLGKSGRAMLTALVAGTTDPAVLAELRGRLRQKLPALREALRGHVRAHHAFLISQILAKIDYLEEVIDTLTEEIDRQIRPFEATLTRLQTVPGIARRTAITIIAETGGDMAPFPTAGHLCSWAAMCPGHNQSGGKRRSGKTRAGNRYLRSALVEAGWACTRAKGTALQARYYRIKRHRGHKKAVVAVGHHVLAIAYYIMRDGVDYRELGPEYFARRDRERATQRHLRQLQALGYRVTLEPAA

SEQ ID NO: 85583 - protein, 411 aa, unidentified
MTHPKMKFTYVGIDSHKETHTAVFLDCFFDKLGEISFGNRNGDFVEFIKKARKFKLNGTDFLFGLEDVSKYGRSLTKFFLANGQAVKHVNAYLVAGERKNLGYEKSDSVDAECAARILISKFQSLPDAEDDDRYHILRTLVVRRDYLVRGKTSLKSYLHSLLTIDFPDYHKFFCELNGKTALAFFTKYPSPNLLKSTSTEELAQFLWKHSGGLLEIDRAKEILSAVDEVPVVVDEIRNKTVQSAIRQLQYNILELEVVETDLYKVYKEFNTTLTSMTGLDLVSASKLLSCIGDVRKFATPAKLAKYAGVAPVSHSSGKRDMQFANTCGDRELNSLFYNLAVRVTNTYEPGHKAINPFFYEYYHKKLGEGKTKRQAIKCVQRRLVNIIWTMLMNNEDYVNPPMIGVESYTAP

SEQ ID NO: 85584 - protein, 397 aa, unidentified
MAHSIGAKRRPDMKKNSTAKKSPKKAVTKGEKTQIHRMAAEQRLTVGLDLGDQTTRYCIWDEAGEVVSEDQLPTTKTGLDGLFAKMAASRVALEVGTHSPWMSRHLASLGHEVIVANSHKVKLIPQSVRKNDRIDARQLARLARVDPKLLSPIRHRGEGAQMDLAMIRARAELMTARTQLINSARGLVKPMGERLAKCDADQVREGLGESVSEGARAVIGPLLKAVERISEQIGEYDKQIEGIEKRYPEVKLLRQVYGVGPLIGLTFVLTLEDAGRFAHSRDVGPYLGLTPRQHESGESQPELGISKAGDGLLRSLLVQGAQCILRKKAPESDLRTWGTGKMGKGGKRAKKRAVVAVARKLGVLLHHLWATGEVYDPQYNRKAAEGAAAKGKGKAAA

SEQ ID NO: 85585 - protein, 404 aa, unidentified
MPKKTVNGVEAMLYLGIDVAKTNHVATLIDGERKTLFKGLTIKNTAQGGELLLSSLARHAQSTSDVVIGMEATGHYWLSLYSFLVEKGYRVHVINPIQTDGWRKGVEVRKRKTDQIDSFLIADLIRYGGFVETSLSDENMMSLRNLSRFRHYLVGSIGDLKRKVVCVLDQVFPEYESVFSDIFGQASTELLLNFQTAEDFQNITAEQLEAALENVRQKGFAKAKLSQIAGLAETSFGLKFCQDSFALQLRLLLEQIRFIDGQVNDVEAEIARLLDGLNSPITTVPGIGAVTGAAILGEIGDIRRFSTPSKLVAFSGIDATVSQSGENAGTGFKMSKRGSPYLRKALFQAALVASFHDPTFSAFYQKKRNEGKHHLTAVGAVARKLCYTIHAVIKNNTPYKVQPA

SEQ ID NO: 85586 - protein, 413 aa, unidentified
MDVLYPRCCGLDVHKSSISACILVQGAGRVQKHQRRFGAMTQDLQELANWLRQFEVAQVAMESSGVYWKPVWNILEGQFTVVLVNAQHIKNVPGRKTDQKDAEWIAQLLQHGLLRPSYVPCEVIRDLRDLTRMRASLSQEASRISSRVQKVLEDANVKLASVATNTLGKSGRAMLEEIIAGQNDPEYLASLALGHLRAKTPQLKLALEGKIRPHHRFLLRRLLDQLRFVEHEIELLDERLEDIGRERPELSQAVARWDTIPGIDRVAGWTLLAEVGHNMAQFPTAEQLASWASLCPGNHESAGKRLGGTTRKGSPWLRRMACQCAWAAARTKNTYLSAQFRRLAPRRGSKRAIIAVAHSLVIIGYYLQKSQRNYEDLGGDYFDRIDSDGLKRYFVRRLEKLGHKVTLVPIQAA

SEQ ID NO: 85587 - protein, 340 aa, unidentified
MAIVAGFDVHRAQITFDALNRQTGELSRGRIRATPEAVRRWAARFAGEEIHVAVEACTGWLFVCEALVEAGAIPHLAEPVETSALRGKKRRAKTDREDARWLRTLLCEGRLPEAWIPPAHVREWRTRARLRKTLVDERTTWLQRVQATLFHHGVSGAPDKLLSATGREFLAALELPESARERVEVALSMIEALDRQLAPIEKQLRQLARRQTGCRALMAHYGIGELTAPTILCELGDVTRLSAARKAVRCAGLDVGVHRSDRRSRAGKLTRQGSPQLRWALYESAQAACRPTSPDRADYLALKARGLSHTRASLTIARKLARRCFHTLRELGPDALQPVT

SEQ ID NO: 85588 - protein, 339 aa, unidentified
MERQYVGIDLHRRTSTIYRMNAEGEVLGCVRVPSQPFELAQAMAEAGEHPEVVLESTYGWYWAADLLKELGANVHLAHPLGNNWGNRRVKNDERDAKDLAAMLRLGRLSEGWIAPPEVRELRELVRYRFRLIYHRSSLKAQIHGVMAKNGVLPVKKDMWHTSGPAQLDQLCEELPDAYVLRLQSLRDLLEVYEAEVVTVDDAIRRRVRDDPGYRAITKIDGVGKVIGAIFVAEIGDVTRFPGQKQLCSWAGLTPKHRESDEKVWRGHLTKQGSPLVRWAAIEAVTKYRGGEKLRADYFRIREHAGKFKARVAVARKLLTLVYYGLRDGEIRAIEAPEAA

SEQ ID NO: 85589 - protein, 348 aa, unidentified
MVHFVGLDVSVKATSVCVVDDAGKVIVEQKVPTEPADIIALLTSLGVSFGRIGIEAGPLSQWLVNALTAADLPVICVETRHMKALLTAQQINKTDRNDARGIAQMMRVGLFKPVHVKTLVAQEQRMLLTSRKLLQRKLLDLESDLRGTLRNFGLKVGVASRSRYEVRVRELVEGFPRLAAIAEPLLAVRRVMRQQLAVLHKMLLDTVRGDLVCRRLMTAPGVGAVVALTYRATVDQPQRFLHSRAVGAHVGLTPKRYQSGEIDYDGGVSKCGDTLLRTVLYEAAHSLLTQSRKWSWLKAWGMRVAQRRGIRRAIVAVARRLAVVLHRMWVDGSEFRWRKDSAAVPAVT

SEQ ID NO: 85590 - protein, 389 aa, unidentified
MIYVGIDVAKDKHDCCILDDESRKVYPIFTISNDKVGFDELFSRIEEVTTDKAEIKVGLEATGHYSLNLLGSLIDKGIATCVINPLHTNLYRKGLSLRKTKTDKVDASSIAMMLMTDKTLKPYSDTSYHSEELKSLTRYRFDKVQERAKLKSSVARLVNILFPELESLVPDLHMASIYAMLSEFPGASYIADSHLTHLRTILRTASKGRYDRNMAVTIRDAARDSIGSIIPAKSMELKHTIHLIEVMTDEIDEIESFIKSIMDTSSSPIMTIPGISYRMGAMILAEVGDFSRFSNADQILAFAGLSPSTYQSGQLDSCYSHMEKRGSRYLRYALFNATKYVCHWDETFGTYLSKKISEGKHYNVAVSHAAKKLIRTIYRMELTGEAYRK

SEQ ID NO: 85591 - protein, 375 aa, unidentified
MVPAPTPQLWEVPTMSESMALVGLDVHQAQTVAAVLDPLTGELRVERLRGEPAMVVPVFLEELDRPVRAVYEAGPTGFALARVAEERGLDVRVVAPGSIPRAPGDRVKTDRRDAKRLVRLFAAGELSYAFVPSETDEHFRDLVRCIEDARKDLMRSRHRLSKFLLRRGHRFPCKAWTQPHEQWLGKLSFEDAISQATFVDYLCAVQGLVQRRRVLIDALEVAVPESSHAQTVARLRCFRGIDTLTAAGLSAEIGDFTRFAKPALLSGFLGVVPSEHTSDEKRTQGQITKAGPPHARRLLVEAAHHYRHQPAVRLGLQARQAGQDPRVVQIAWRCQRRLHERWTHLAGTRGKRTGTVAIACARELAAFCWEAATLN

SEQ ID NO: 85592 - protein, 424 aa, unidentified
MKVTFQTCCGVDVHKSFLVATIIKTTGGIEPSYQKRRFSTFNNSILEFKKWLLENECLYVCMESTGKYWIPVFNLLEDEINVTIANPKWVKAVKGNKDDTKDSKWIGDLFRLGLVRGSYIPCKKIRILRKFTRYRYKLVSCRSSEKNRYQNALTVCNVALDSVVSDVFGKSSTSIIDYLLEQSGTSIDHEVIASKLLKRLKAKEDAVIESIEGYQMTDSQKYRMHLVRAHMDYITAAINDVDSEIESLIASDPDYENAVELLCTIPGVKYDSAITIISEIGIDMSQFCSSKRLCCWAGLTPGSNESAGKKKSVRITRAGVYLKPALVQCAHAAVKSDKSPYYKKKYESLVERRGKKRAIIAIARMILTAIFQMLTTGETWNPCDLYKIDMPEALLEKQKQKAIKQAQKLLIREGLLPPTEPIAS

SEQ ID NO: 85593 - protein, 349 aa, unidentified
MHSTTVAVDLAKNVFELAVADAESKIGERLRLNRARFAAFFVRRPPCRVLMEACGSAYYWARCIARHGHSVELLPAQYVRAYVRRNKTDRADAAALIEAVRCGEIRTVPVKTVEQQQVLALHRLRAQWMSTRHRYINSLRGLLREFGIAIPLGARVARTQIASHLVQPPQQLPAALRPLLAQMLSDVDQLEQRTQQVEREIAALTRADEVVQQLRQIPGIGLLTSTALHATVGDIQRFPSGRRFASWLGLTPREYSSGERRRLGRISKQGDSYLRTLLVHGARSALLAANRQQRSGRPLDRLRQWALQCERLRGHNVATVALANRLARIVWATWKHQRPFDGNWARSAH

SEQ ID NO: 85594 - protein, 434 aa, unidentified
MPVHPKVFLHSYLPFHGTEQPMPYEWFVGIDWGSQQHQVCVLDRDRRRVGERVVDHDGASLAQLADWLLTVAMGQPQRVAVAIEVPRGALVEGLLERGFHVFAINPKQLDRFRDRHSVAGAKDDRRDAFVLADSVRTDQPSFRRLQLDDPQLLRLRDLSRAEETLLEDFRRSANRLRDQLHRFYPQMLALCSAADEPWLWDLLDLAPTPAHAVLLSREQVQQVLKAYRIRRVKAHEVLTRLQAPALPVAPGAAEAAQAHCALLLPCLRVLATQLQACHQQVSALLHMLAEAPGEGGRLSDVAIVLSLPGVGRKITAWLFAEAAQPLAERDYQVLRTHGGVAPVTKQSGKRRQVVMRRGCNSRLRHALYHMARVAMQRDAHFSSVYAALRAQGQRHGQALRTLGDRLLRILMAMLRNGTCYDASRIRRGLAVQKG

SEQ ID NO: 85595 - protein, 351 aa, unidentified
MLIVGCDYHPSVQQIAWIDTESGECGESRLLHSNGEAERFYRTLKEQGANVRVGIEATGHARWFERLLAELEYELWVGDPAQIKAKRVRKQKNDRQDAQLLLKLMMEDRFPRVWVPSVENRDLRQLLWHRHRLVQMRTRVMNQLQAVALNEGVRCKKALWSQAGRSRLESFRLGPWATRRRQDLLQLLDQLNSRIAPLTAAVEQQAAQHADAQRLMTHPGVGALTALAYVLIIGSPQRFRCGKQIGSYLGLIPCEDSSASRQRLGHISKQGNVLLRFLLVEAAQATVRANTDWRREFLHLAMRRERRIAKVAMARKLAVRLYWMWRKGWDYEQSLQFGSHAGQPVVGYGVK

SEQ ID NO: 85596 - protein, 353 aa, unidentified
MTKYVGIDWAYRRAAWCAMSAGGVINAEGFTPADEDGLAKLVLRLGSEVKACLEMMSGAVWVRDRLRSAGWQVEVADARRVKGVAPLACKTDRVDARVLAELCRRDLVPALWIPSLEERELRERLRRRMHLVRLRTSAMNRIFGLGTQWGLRLSAERLRRRGALELLAQRGVPAVWQRSIQEALAVIDLLEARIAPLEAELAPIARADRDVALLVTIPGVGEMLALTLAAEIADVSRFPSPGKLVGYAGMAPGVKQSGQSSRSGLPLSKAGSRTLRWAAVEAAQHAWRESNPWHQLYSDVAKRSGKNAAKSAVARKVLIASWHMLSRREPFKPSRPRGGTRTVPASSISVLAP

SEQ ID NO: 85597 - protein, 433 aa, unidentified
MTATPYDLIIGLDRSDQTADLCLLDTRTGERRRVSIATAPEALWEWLAELRQQYPAARVGLCLEQPAGHLIPFLEAYAWLTLHPINPLTLQKYREAFVTSRAKDDTKDAEYLADLLLNHHAQLPVWAPEDSATRAVQQLVFHRRAVVDERTALTNRLQALLKQYYPQALTLCGEDLWRPLATAFLLKWPHLGAVQKARPATVTQFYYVHGSRSQKLLAQRLALLEKAVPVTDETAVLQSFELRVQLVCRQLQALQRTLGEFDQQLAAAYAAHPDRAIFASFPGAGPVLGPRLLASLGANRERFADAATQLQRYTGVAPVTKRSGGSCRIHRRYLCPKFHRQSFHEYASQSVLWSRWAAAYYLQQRSKGCAHHTAVRALAFKWQRVIWRCWQSHTPYDERIYEAALRKHGSPLLALFERVQLGKSPWKNPAPKN

SEQ ID NO: 85598 - protein, 481 aa, unidentified
MNGPLPVPQVPRLFWTSPTRVNRRSPTPAVADAPKAERTPPREGSCISSPGPRRPEPVRAARIMNTDWTQHAYFAALDWASDHHDVLVLDRQGAVQAEFRFAHTADGWAEFTLKMQPFTGAPITLETSSGPAVDQLLQRGWAVYPVAPPAAARYRERKVPSGTKTDRHDTWALADALRTDGHAWRPLRPQDEATATLRALCRDEIALIEQRTALVNQLQAALREYYPAALAAFDDWTAPYAWALLLQFPTPAQLQAAGKRKWEKFLHTHQLWRPQTVAARLELFAHAHALPASPAVTAAKSLLAVSLAKILVTLQTQLDEYRRRITEAFHQHPDHDVFGSLPGAKATLGPRLLAEVGGVREEYPDADALLCQAGVSPVSYQSGKVNKCRLRRACNKVLRATVHLWANSSRLTCEWAQAYYQMKRDEGQSHASALRCLGKRWLKILWRLWQNHEAYNEAKYLAQLQKRGALTWTKLQTPQTV

SEQ ID NO: 85599 - protein, 369 aa, unidentified
MSTSVVYVGLDVHKESITIAVAREGREPAETLKTIPYDGVRLRKTLSMLCKNGEVLKVCYEAGPTGFGLCRRLREKGTDCIVVAPSLVPGKAGDRIKTDPRDARRLAHFLRSGDLTEVYVPDEAVEAIRDLERARDDAKCAERVARHQLSKFLLRQDRHWEGTAWTGKHRDWIRVQKFAHPAQQRVLEDYLKTVEDLAERVERLTAQVEELVQETALAPLVKALQAFRGISVVSAVTIAAEAGDLRRFATASQFMSYVGLVPSEDSSGKRQCRGGITHCGNRHLRRILVETAWHYRHPPGLSKELRRRNQGIAVRVQRIAWEAQKRLNKRLYHLVHAGKNVNKAITALARELAGFIWAVGQEEKLLEAT

SEQ ID NO: 85600 - protein, 317 aa, unidentified
MGQRQSSTKVAGIDVGKRRLDVAVHGLEDATAVDNGLAGFSELIGWLKAREVGRVGLEASGGYERGVRRALEQAGFQVVVHQPIEVRRFAQLKRWRAKNDRLDARLIAWATVQVEAVKAAQDPRLVQLAERLTAYEQITDQAAELKTFLESVTLKDIAALIRSQIRSLERLKAKLLADILQRIKAQDDLLQRLRLLTSLPGVGPVVAATLVVRMPELGAMRRGQAAALLGVAPFDRDSGQWKGLRFISGGRARPRRMLYLAAFSAKRCDPGLKAFAEQLCARGKPAKLVIVAVMRKLIEAANLVLARGQPWLRQPTT

SEQ ID NO: 85601 - protein, 443 aa, unidentified
MDCAPSSFVRGPTSGRELRFERQYRGDGVCGIWRPMKSYRFYVGIDWADRAHLVSLRETSTERVEEKSFDHSGTGLRAMVAWLIDRSGGKPEDVAVAIEITRGAIVEVLMERGFAVFAINPKQLDRFRDRHTVAGAKDDRRDAFVLLHSLSTDAQAFRRLRIEDAAILELREHVRMYEDLKQDFRRLTNQLREQLHRYYSQMLTLSSAADEPWVWDILERAPLPYQGARLKDRSAEKILRDHRIRRLSAAEVVAILKSPSLPVTPGAAAAARAHVEMLLPRIRLTRDQFNRVEATLARLLDDMETAEAEIGGHRDVALTRSWPGQGVIVAATMLAEALGPLENRDYHWLRALCGVAPVTRQSGKSRQVTMRHACNERLRMAVHWWAGSAVVRDPKAKALYASHRARGHSHGRSLRAVADRLLRDLMVCLSRQEPYRTELRQVA

SEQ ID NO: 85602 - protein, 343 aa, unidentified
MDHFAGLDVSVKETSVCIVDDTGRIVREVKVASEPEALLAVLTNPACRFKRIGLEAGPLSQWLFSALAEAGLPVICVETRHMRAVLKAQINKTDRNDARGIAQMMRVGLYRPVHVKTLRSQKQRMLLTHRKLMQSKAIAIENDLRATLRNFGLKVGVVGTVKFEARIKELVENLPDLVVLVEPLLIVRRVLREQVGILHRRLLAIVRDDDVCRRLMTVPGVGPVVALTYRATVDVPSRFRNSKAVGAVFGLTPCKHQSGESNRTGGISRCGDEMMRMMLYEAAHIMLVRSAKWSWLKAWAMKIARHRGLKKAIVALARRLAVIMHRIWVDGTEFRWTREVAAA

SEQ ID NO: 85603 - protein, 355 aa, unidentified
MCANKTGSIEDLAVVGIDIGKDTFHLVGFDRSGQLVMRKQIKRLALNATFEQLPRCIVGMEACLSAHFVSRTLRGMGFESRIIPAIFVKPFNKGQKNDYNDAEAIAEAALRPNLRTVSEKDQDQLDLQALHRVRARLVSRRTATINQIRAFLIEQGITVRPGLRALKNSFETILEQRRDEISPRMRGILIGLYGDWLWLDKRIEDVSGEIEEISRTEENCANIMTIPGIGPMISTAMVAAVGQGEAFGRGRDFAAWVGLVPRQFSTGGRTILGRITKRGSRYLRMLFVQAAKVIMMRPHRWSDFSFGPWLTEAVARMPRNKAAVALANKLARTAWSLLRHGTRFDAPRDAAMEAI

SEQ ID NO: 85604 - protein, 315 aa, unidentified
MNNKKQVVGIDVSKAVLDVAVLPSGEVLQFSNDVNGIDELSKRLKSDAVDLVVMEATGGYETAVATALVGAGLRVAVVNPRQIRDFAKATGRLAKNDRIDAQVIAAFGLAIEPQIVRLPDEDARELEALLVRRRQLVAMRVQEVNRLGLMQGAMRKRIKAHIDWLEKEIDKLDVDLTAGLRSSPAWRAKDELLRTFKGVGPITSSTLIVALPELGQLDRRAIAALVGLAPFNRDSGVMRGRRSIYGGRSQVRTLLYMAATTAIRSNPVIRAFYERLKSRGKPHKVAMVACMRKMLTILNAMVRQSTPWTPETNPL

SEQ ID NO: 85605 - protein, 519 aa, unidentified
MTTSVRRRRSKTSKVGFVQKPQGRFSERVQVVGPEHFGIVCIDCAKARSRYMLADFYGNYLLEPTTLIHSRGHFAAAVDRIRQAQTEHDLRDLIVVIERTGEYHRPVQRAFRAAGWEVRLMHPYATKQYRQPADPGNKTDDTDLSAIFRGAVNGFGLMETPWPDAYQQLQALRRHRRDLVRKASRLRCQIREVLHAMMPGYAELFGHLWEHASALFLARHTGSAAAVQQLGFEGLASLVRKADLPYRPKALEQILLWADNAPPGHSQPACLGGILADLDDDRLEKTRKIKALEPSLAHLVVRSPYLLLLAIPGINIVSTADLAGELGPIENYANPNAITGRAALMPCRYQSDQVDCQGPLRRSGNRRLRGALMQIAENLSKKNHYFNARAATWLRAGKDPRWIRVKIAKSFSRLGFAMVAGRQMSSHPCCRERHYILAKLMEFHTSHGSLPQTMRDDLEAAIPQLPAKTRREEIKPLEEHLEELKNRRGPQPLAKIIPLVLAKLGLRQVQLTSEGEDPS

SEQ ID NO: 85606 - protein, 402 aa, unidentified
MAYDFVIGVDVGKYFHHACVLDPQGRQVLSKRINQHESSLRKLFGQFIADNASVLVIVDQPNNIGRLTVTVAQDMGADVRYLPGLAMRQLSRIHVGNSKTDVRDAYVIAHAGLNLPDALRSVDRVEEVFIQLKVLNGIDEDLARAYTRLINQMRSALVGTYPAFEHVLRGQMIHRKWILHLLAKYGGPTKIRRIGRTRLAAFARSHKARNPEPVIDAMLAAIHAQTVSIAGAEYAELGVAMSAKDALAKLENRKEIEAQVLKLIQDIPQTEILLSMPGIGPRSAAQILMTAGDMSDFPDAAHLASYAGLSPRTNQSGTSIMSSSPNRAGNKKLKNALWQSSFASIRFHERSRQFYERKRKEGKRHNAAVVALARRRLNVLFAMMRNGELYRDISTVQEAAAA

SEQ ID NO: 85607 - protein, 426 aa, unidentified
MNEVESIRLADFRQLKKEIRGSREYLIVGIDVAKERHHAFFGTATGKTLLKRLIFDNNIEGFRKLLEQVRAIEVGQGLPKVVFGLEPTATYHKPLGEYLIKCGRMVVLVSGVAVKNNRKSLDGRWDKNDSKDAANVADLISQGKCLFYEYPETRLRDLRSLLSLKRKLKKQEHSYRVRIRNHLLAQYFPELDKYSGRAEVESIVRWCLDPSRIAGLEKDQFRVLVAPGRKTLAQGDRLDTIQKLAMDSIGCEMGEGACLEGEVMVEGIRYIRQAIKATETKIEEICGSFPEYACLLTIPGFGPDVSSKVLGALGNPHRFLNQKQVLKTAGLDLSADRSGKGSQTAVPIISKQGKADLRYALYQAAFIASTRNIDFMRYYTHQLQGRAKEPGIKTKRWVKLSAKLLVIAWTIMKKQESFNSKYFNQE

SEQ ID NO: 85608 - protein, 451 aa, unidentified
MKKGNIKMNIVNPNAAGIDIGSRSHFVAVGQSDNEIEEFGVYAEDLTAICNYLSKHDVKTVALESTGDYWQNLFTELIKHEFEVILVNGKFTKNAKGKKTDVKDARFIQQLHSLGLLSSSFLPDHETEIVRTYYRQRNNIIRQTAAASRKMQKYLKFLNFRLDVVVKDVCGLTGLTIIEEICKGNLDPKELAKHRHYNCRKSENEIAKALHGNNRADFLFGLKQEFEAYKFLQKQLKQCDKEIEKALIKLLKDKPQIRKLKYKSNPLKRVNKNAPQVKSFDKKAYQYFNGIDFMAIEGVSHATVLSIMSEIGINGFNKFNSAKHFTSWLRLAPNNKVSGGKVLSNKLPKGSNRLKIALRQAANAIGNLKDTHLSDFFKRIAYRRGRQAAVSATARKLAVIIWNMVTKNEPYNPPRIYLFRDEKKKLGLIKKIKKQIVKFEINPIDIGLSTS

SEQ ID NO: 85609 - protein, 320 aa, unidentified
MSVLSVTVGIDVAKAHVDVFVLGTKSDAKRLNNDAEGHSALAASLLPLDVELVVMEATGGYEAALACALQAAGLPVAVVNPRQARDFAKSMGRLAKTDTVDARMLAELASVLVRREDLARFLRPVANEHQQWLAALVTRRRQLLSMLHSERQRLQITPKKLHASIETIVKAIKAQLDEIEGQMVGHVREHFGDLDRLLQSAAGIGPVASATMIAELPELGRLNRREIAALVGVAPIANDSGNKKGRRRVQGGRFEIRRVLYMATLTATRHNPAIKAFYERLKAAGKLPKVALVACMRKLLTTLNAMVRTGKPWDKSLHGT

SEQ ID NO: 85610 - protein, 340 aa, unidentified
MQLYAGIDLHASNNFIAVIDADGKRMFKKKLPNEAELILSTLGSFQEEMAGVVVESTFNWYWLVDLLGEAGYRMHLANPSAIQKYSGLKHSDDKHDAFWLAEMLRLAILPEGYIYPKEERPIRDLLRKRGHLVRLRTSLILSLQNIVARNCCVRLSANDAKRLRKDVVNPLLKSNEDLAMAGMVSKESIDFFTREIRKVETMVEQRVKLKNQYRYLLTIPGIGKILALTIRLETGPISRFPKVGDYVSYCRKVSSKWTSNDKAKGKGNKKNGNKYLAWAFSEAAEFARRNDTQCRGYYNRKMQKTNFMVAHQALSHKLARAAYCIIKQEVPFTPERLFAS

SEQ ID NO: 85611 - protein, 416 aa, unidentified
MISFPKRERAQHAAACVGVDAGKFSHTLVLRPQHRPDSKPFSFPTTRAGFDSAVAFIRQQVPGAAAATMLVGIEFAGNYGFTFAHYLAQLGFPIVSVLPAHTKRWKDVAHNQPLKTDAKDAGTITDLLAQGHFVTFPFLSPAYADLRYLVTARERLSLLRRGAITQVRTLIQVVFPEFEALFPLITKKTPFTLLRTFPTPQDLLDATRTKVLRVLKTASRGHLGAETYDKLVAAARATLGLPGAQARLRQEILLTLERIALFERQIKALETELVEALQAVPETPYLLSIPKIAPVTAAIFLGSIGDPRAYEAAEQILRVAGLSLIERSSGVLRGTKRISKRGRPLLRQAAYMFAVRSITKGSLFRAEYEALCQRNGGVKMKVVVAVMRSGLRLLYSIARDRRLFTAEPPARRRAAA

SEQ ID NO: 85612 - protein, 373 aa, unidentified
MKYSTVYVGMDVHKETFSLCCYTNEKEQAEYPQKVDGHYSKVINYIEAMRFHYGDDALFICGYEAGCLGFTLYHQLTDHNVKCVILAPTTMLQQKGKKKVKTDKRDAALIARCLAHHDYSPVHIPTDQDEQTKEYIRMRDDHKLALKKVKQQILSFCLRHNYRFDGTANHWTQAHLKWLRALKPEGLYTEILKEYLLTYDNLTDKLERLDKRIEELAADETYQENVQKLSCFIGVKTVTALAVLTEVGDFKRFSSAQHFASYIGLTPGEDSSGGDQNRLGITKAGNRHVRCLLVEAAQSYSRGQIGFKSKALKVRQEGNTPEVIAYADKANERLRRKYYRMILKNNKKTNVAKTAVARELACFMWGMVTGNAS

SEQ ID NO: 85613 - protein, 413 aa, unidentified
MDVLHPRCCGLDVHKSSISACILLREAGRVQKHQRRFGAMSQELQELAEWLRQFGVSQVAMESSGVYWKPVWNILEGQFTIVLANAQHIKNVPGRKTDQKDAEWIAQLLQYGLLRASYIPCEIIRDLRDLTRMRTSLSQEASRISSRIQKVLEDANIKLASVATNVLGKSGRAMLEDIISGEDNPEHLASLALGHLRVKIPQLRLALEGKIRSHHRFLLGRLMDQIQFVEHEIALLDERLEDIGRQRPDLAQAVARWDTTPGIDRVAAWALLAEIGDNMAQFPTAEHLASWAALCPGNHESAGKRLRGTTRQGSPWLRRMACQCAWAAARTKNTYLSSQFRRLAARRGKKKAIIAVAHTIIVIGYHLQKNQSNYEDLGGNYFDRIHSDGLKRYLVKRLQQLGHKVTLEPMEAA

SEQ ID NO: 85614 - protein, 345 aa, unidentified
MVIIGCDYHPSMQQIAWCDNRSGAQGERRLEHASGEAEKFYRELKQREVEVRVGIEASGHTRWFERLLAELGMELWIGHPAKIAAQRVRKQKTDRGDAQLLLQLLQEDRFPKLWIPSPENRDLRQLLWHRHRLVQMRTRVKNQLQSIAMNEGVRRQSRLWSKPGRAQLESLALPPWSARRRHDLLQLLDQLTPQIAELSRAIEQEAERRPEVLRLMTHPGVGPITALAFVLVLGTPQRFRCGKQVGSYLGLIPCEDSSAGKQRLGHLSKQGNTLLRYLLVEAAQTAVRCDAQWRRRFVHLAMRRQRNIAIAAMARRLAVSLYWLWRKAEDPPAAPSSGSHAGPLD

SEQ ID NO: 85615 - protein, 368 aa, unidentified
MGRKSSKLFVGMDVHKESIDIAVAEEGGEVRHHGRIGGDMNALTRAVRKLESLNRELVFVYEAGPCGFVIYRGLQARGHECWVVAPSNTPRRVRDRIKTDRRDCLKLAGLARAGELTPIYVPDQLDEAMRDLVRTREDAVAMQRQARHRLAALLLRNDIRYVGKTAWTTAHQRWIARLTLSQPAQRIAFEEYVQTVSEATERVQRLTQSIEQELAAWRWRPVVSALQACRGIQLIHAVRIVAELGDPSRFAHPRQLMGYLGLIPSEDSSGEHRHQGAITKAGNSSARRALVEAAWAYQHAAKVSPIIARRQTELPKTAIAIAWKAQLRLCARFRRLAARGLNRNKIVVAIARELAGFVWAIARQIKPV

SEQ ID NO: 85616 - protein, 308 aa, unidentified
MPQAVIGCDLSRAAIDICELPSGRIGQIANTPDAIAVWLDTLDHDVRVVFEATSGCDGDLIAALATRGHPFSRVNPRQAREFARATGTLAKTDRVDARVLAQMGAALDLPATIPLSPARSRLADFLRRRRQLVDMRKAEKLHRHSAGQPEIAQAIQTMITMLGQQIAELDRQIAGFIAQDQVLSEQAHLLNAVPGIGPTVLATLLGELPELGTLCRRRIASLAGLAPHARESGTWRGARRIWGGRRKVREALYIAALNASRRIPVLTAMRDRMRAKGKAPKTILIAVARQLLVILNAMIRKRQPIALA

SEQ ID NO: 85617 - protein, 425 aa, unidentified
MEVIHRRCSGLDVHKETVVACVRLVLDGKITREVRTFETTTSGLLLLLAWLTELGCTHVAMEATGVYWKPVWNILSDGDFELVLANAAHIKNVPGRKTDVSDAAWIADLLAHGLIRSSFVPEQAIQELRELLRTRKQLGRQQSSHIKRLQKTLESANVKLDSVITDIVGKSGRAMIQALIASETDPVKLAALADPRIKASTRELREALRGRVTNHHRFLLHLHLQHIEFADAAIQDIDRNVTALITQMDQEVEAGQTRATFQSLILLLMTIPGIDVLSARIILSEIGRDMSRFPTAGHLLSWAGLCPRNDESAGKRRSTRLRKGDPWLKTLLVQCAWAARRKKGSYFNAQFLRLRGRRGPKKAACAVAASLLTTIYHMLKDGTQFQDLGADHFDRRSKDVRAKRLVAQLAKLGFDAKLAPLTQAA

SEQ ID NO: 85618 - protein, 340 aa, unidentified
MSEITTIGLDLAKHVFQVHGIDAQGTTVLRKRLRRGQVLAFFSRIPRCVVGLEACATSHYWARELGALGHEVRLMPAQYVKAYIKRNKHDAADAEAICEAVQRPTMRFVPIKTAEQQAAQLLHRGREQLVRQRTMLVNALRAHLAEFGMVAAQGLRNIGELIAIVGDDGDTRLPDVARQVLQVLANQIRQIEAAVAALERQLFAWHKNNAISQRLASIPGIGPIIAMAIATTIADPKVFRSGREFAAWLGLVPRQNSTGGKTRLGGITKRGNRYLRRLLINGASANLLRSKATKADPWVIGLRRRRPPLVVAVALANKTARIAWAVMLRQRDYQPRAVAA

SEQ ID NO: 85619 - protein, 423 aa, unidentified
MISFAKRERAQHAAACVGVDAGKFTHTLVVRPARQPDSKPFTFPTTRPGFERAAAFLRQQAPGAPTAAVLVGIEFAGNYGFTFAHYMRELGFPIVSVLPAHTKRWKDVAHNQPLKTDAKDAGTITDLLAQGHFVSFPFLQPAYADLRYLVTARERLSVLRRGAITQLRALLQVVFPEYEAIFPLVSSRTAVTLLRAFPAPQDLLAATRAKVLRVLRAGSRGHLGPELYERLVAAARASVGLPGAQARLRQEIVLTVDRLALFDRQMQVLEAELIAALEAVPETPYLLSIPKVAAVTAAVFLGSIGDPRAYDSSAQVLRVAGLSLVERSSGVLHGTKRISKRGRPLLRAVAYLFAVRSITTGGLFRADYEALCARNGGRKLKAVVAVMRSGLRLLYRIARDRRRFTLEPPPRRRTPQTLEVTPA

SEQ ID NO: 85620 - protein, 313 aa, unidentified
MSQNNTAILYVGLDVAKLSVQLHLANRFYTLTNDPKGHTQLLKRLRAHPNAHVLCEATGGYEQPVVRTLQAAGIPVSILEAGRVRHFARAQGQRAKTDPIDAAVLSEYGKTFNPPPTKPASPQQQQLADWSQRRHQLVRLMVIERNHAEHYTDSFRRRQNQQLCRLLENQIDQCDKAIATLIAQDPQLAYKASRLQGIPGVGPVVASTILAEMPELGTLNKQTAAALAGVAPYNRDSGTQKGLRSISGGRRAVRKALYMVTLNAMRYDRILKEFYQRLLVAGKKPLVAMTACMRKLIILMNRLLKNAHFQLAP

SEQ ID NO: 85621 - protein, 414 aa, unidentified
MTNTTFVAIDIAKVKNDILVEFSDGKRRKLKIYNRMEDFLELDGLLRAQNGPCIVGVEPTSNYHRPISYFLKNRGYDVRFVPSIGVARTREALHNSWDKNDPKDAQVILHMLKTGVTQIYHDPVINGFNDLQELSKTHYLISLRKTKTQHSLLTHYLPLYFPEVQKYMHASRAEWFFKMLHRYPTPSCITKFSEEDFIKDAWSVSGRKVAKEAFLKDLYATAGSSIGVPIDEDSQSMKMYRLILEEVISLCARRQALEIQAHNFLKDDNQYKILRSIPGIGPILALTIIAESGDLKRFSHHRKYLNFCGMNLSTHQSGQFRGKSSLSKRGNSRLRCAFWMAATVAIRMRENSFRYKYERYIKSNPNDADLKRKALTATAAKICRVAYSLVKENKIYRPYFEASVPSGGIRSEGP

SEQ ID NO: 85622 - protein, 353 aa, unidentified
MAQPTLWAGIDAGKAAHHCVAINADGQRVLSRRVVNDEGALRDLIRAVKALADGGAVRWAIDLNSGGAAVLITLLLDDHQELLYIPGRVVHHASGAYRGDGKTDAKDAAIIADQSRMRRDLHPLRHRDKTAAELRILCARRNDLAADRNRAINRLRAQLLEYFPALERAFDYAHRKAALVLLTGYQTPDGLRRMGVARLEKWLRDRHAYHAGDLAARAIAAANAQRITVTGQEVAASVVARLAQTVLDLNAELVDVDAMIEAKFEQHRLAGIITSMPGFGSLLGAELLAATNGDLASFNTADRLAGIAGLAPVPRDSGRISGNLKRPRRYDRRLLRVFYLSSSQPGLATGHAP

SEQ ID NO: 85623 - protein, 307 aa, unidentified
MFVGIDVAKDRLDVHVRPTGEAFTVARDGEGVAALVERLKAMTPELIVLEATGGFEVMVAAALAAAGLPLAVVNPRQIRDFARALGRLAKTDPIDAEVIARFAEAIRPTPRPLPDEQARALGELVVRRRQVVEMMTAERNRHRQMTARKRVKAIERHLDWLQKELSEIEQELDQSIRGTPAWRESEDLLTSVPGVGDTLARTLIATLPELGQLTGKQIAALVGVAPFNRDSGQWRGKRMIAGGRADVRSVLYMATLSATRCNPSIAAFYTRLIDAGKPAKLAITACMRKLITILNAILRDRRHWQTA

SEQ ID NO: 85624 - protein, 337 aa, unidentified
MNVTLIGIDLAKTIFQVCGVNQAGKPVFNRTVKRKDLLAFLVNYPDTTIAMEACSGSNYWGRTLEGMGFKVLLIPPIHVKPFVKGNKNDRNDAFAITEAARRPNMRFVSPRNLEQTDMMMLHKIRVRRVSARNDLTNQLRGVLSEYGIVLRQGKSILKTSLDDLLEDAENGLTIPIRHLIQDIQQEWKMLENDINKLDKQIKSEALANSDTKRLMTIRGVAEKTATAVVAFAGKGQAYKNGRHFSANLGLVPKEHSSGGKQQLGGITKRGNGYLRRLLIQGAWTIIHHMENNDERISRWARTIVARRGKHKAVVAVANKMARIIWSVLYHQAEYKPA

SEQ ID NO: 85625 - protein, 358 aa, unidentified
MEKLIRVGMDTSKSVFVLHGVDAAEKVVLRKKLRRQQVIEFFGKLKPTKIGLEACGAAHYWARELEALAHEVVLLPPQYVKPYVKRGKNDAADAEAICEAMSRPTMRFVPVKTAEQQAALMLAGTRDRLIRMRTQLTNAIRGYAAEFGLTAAKGLDKIEPLLARLTAATELPKLAKELFAAHAREYAQLKVEIQKIEAKLMAWHKHNELSRRLVEVPAIGPIGASLVVMKVPDPHAFRSGRDFSAWIGLTPKDHSTAGKTRLGVITRAGDETLRRTLILGATAVIQQVRRGRGHPSPWLIDLLKRKPPKLAAVALANKTARIVWKLMISGERYNPMRLRDTRSPSARCGSEPTAITQA

SEQ ID NO: 85626 - protein, 407 aa, unidentified
MAKRLWAGLDVGVETTSVCIIDENGEVVHKAVCSTAVKSLHRELVFLKRRKWATVAMESGGGTSLARGLQALGYTIILYETRQLSGFLKVRRIKTDAGDAFGIAEVGRVGARLVSRVHLKSLECQSLGARLRIRRHIIISRVKAVNLLCRQLEHFGGRVTKSTRSPLLRERVESEIRALFGRTSTPLVAEFRRLLDYCLDLMAREKVIERDLLQFARSSEVCRRLMQIPGVGPICALSFYAAVDEPERFARTSQVGSYLGLTPRLHQSGLTTRSGRISKMGNKEARSLLFTASVRFMMYCSPDVELYAWTRSIELRCGRLKSRVALARKLATVMLAMWKSGEPYRPRLAQPAAGGTLSEVRGGRTSLAALPDPTPQSSANAVKVLRPATASLQERPGEASSLSSEAS

SEQ ID NO: 85627 - protein, 317 aa, unidentified
MESEDPYVGIDVSKDRLDIAVRPTEDTWSVANDASGIPEVVQRLAQLHPKLVVLEATGGLQLPVVAALASAGLPLSMVNPRQVRDFARATGKLAKTDQLDAQVLAHFAEAVRPTPYPLPDAQTQELTALLTRRHQVVEMLTAEKNRLRTTRESVRQRVQDHIRWLEQELADLDDDLERTLRESPLWREKDNLLRSVPGIGRVVSITLLADLPELGTLSRHQIAALVGVAPLNRDSGRFRGKRTVWGGRARVRAALYMAALTASRYNPIIKAFYHRLCAAGKARKVALTACMRKLLIILNSMVKHQQTWDPDVQPSWH

SEQ ID NO: 85628 - protein, 342 aa, unidentified
MTAIGVDTHKATLAACAVDPRGSPIAEATFANDPKGHLAFIAWARSNAPEATIGIEGSSSYGAPLARSAQQAGLCVREVPPHLSRAERRRTRRPGKSDPGDALAIARVTAREASLPPIRLPDQTTELRLLVEAREDLIGEATRVRNRLHAHLIILLPGYGGTVANLVAAHNRTAVGRRLRGNHAVQAELARSLLARLVALGREVDDLTRRITAGVAGHPLLRLPGAGAITVARLIAEVGDVRRFRTADALAALAGVAPIPASSGQVQRMRLNRGGNRQLNRALHVIAVSQARFHPEAKAYVTRRIEVDGKTWREAIRALKRRLVRPVYRLLLEGSNLQLAAA

SEQ ID NO: 85629 - protein, 440 aa, unidentified
MDAVIIGVDPHKASVTIEVRDRREVLRATGRFPMDKAGYRQLLRYVGQWPERTWAVEGAHGVGRPLAARLLADGEGLVDVPAKLAARVRVFDTGQGRKTDATDAHAVVMVALRTRGLRQLVVDEQLAVLGLLADRRDELSRARTQTVNRLHRLLAELVPGGAARHLSAVQATALLASVRPRDLPGRTRRELAVELVAEVQVLDGKLKALTRRLAEAVTAAGSGLMGLYGIGPAGAARVLADVGDVARFADRNRFASWTGTAPLDASSGAQIRHRLSRAGNRRINHVLYIAAVCQIRHDTPGRAYYRRKLAEGKIPLEALRCLKRRLSDVVFRQLVDDATNKLNTDKDTERAGPGGHSGATLLSSAVDLPPVIDTSDQPLPGPAPATLPAPTTPAKTAASPTAASTRRRDRGVNVERPTGRTTLTPTSAGAPSPRARKPRP

SEQ ID NO: 85630 - protein, 342 aa, unidentified
MRIIGCDLHASQQTIAMLDRESGEVVERTLKHDGNTIREFYAGLPRPVVVGIEATGSMGWFLRLMADLEITCHVGHPATIRRAETRRQKHDRRDAALLLELLTQDRFPSIWMPSTELGDLRALLLHRHQWVRIRTRVMNALQGMALAHGIRRRAGLWSREGQATIASLPLPPHAAYRRTQLQALYVHLTQQIDELDQRVRTHAQDRPQAVRLMTHPGVGPVTALATEVFLGDPARFADGKAVTSYVGLIPSEYSSGDRQRLGKITKQGNPLLRLLWCEATIHAVQRDPALCRFYRRKLQQKGFGKARVAAARKLGIRLWILLRDQIDYSEFCRRAPARAATR

SEQ ID NO: 85631 - protein, 351 aa, unidentified
MKINWIGIDAHKQFCTISVLNNKGVLISQRDIPTNESDLIQSIISIKGDRNIAIEESSIANWLFLTLQPYASNLIISDPLKNNWIHSSEDKSDKVDSVKLADLFRMNRISAVYHTEIKALTIMKKLINHYDKLVQNSTRAMNRIKGEYTSVGIFTQGKKVYSIKERQSYLKKIRSVHHKAIINNYYSQYDMYRDQQLEILKRLKTISKRHPILNKLRTIPSIGFIRSITIYTTIITPYRFTSRSQINKYCGLAIVEKTSANKVLCSYASKTGNRVLKNVLMEAAKTSIYISKDDYFSQRHAELMKKGLSQKSAIRSIAREIIHISLGVWRNNKKFSDKIAIENKRTEKKVA

SEQ ID NO: 85632 - protein, 424 aa, unidentified
MTESSDYESVQVFIGVDVGKDTHHAVAINRSGKRLFDKALPNDENKLRSLISDLKQHGQILLVVDQPATIGALPVAVARSEGVLVGYLPGLAMRRIADIHAGEAKTDARDAAIIAEAARTLPHALRTLKLADEQIAELSMLCGFDDDLAAQTTQASNRIRGLLTQIHPALERVLGPRLEHPAVLDLLQRYPSPEKLASLGEKKLAAQLCKLAPRLGKRLAADIAQALAEQTVVVPGTNAAAVVLPRLALQLITLRKQRDEVALEVEQRVIAHPLYPVLTSMPGVGVRTAARLLTEVACRAFASAAHLAAYAGLAPVTRRSGSSIRGEHPSRRGNKALKRALFLSAFAALRDPLSRAYYTRKMSQGKRHNQALIALARRRCDVLFAMMRDGTFYTRRGHNILDNLIGAPPWLLCAHTLKLKIGSK

SEQ ID NO: 85633 - protein, 416 aa, unidentified
MEPPAHFAAFIGLDWSDQKHDVCLVDSSTGEQELSVIKHQPESLNEWALALRTRFRGGRIAVCLEQSRGPLIYALLKYDFLVLYPVNPKTLSRFREAFTPSRAKDDPRDAAYLVELLVHHRDRLKAWLPDSDETRTLQLLVEHRRRLVGDQTRISNRLTALLKGYFPQVLEWFPDIRTALVCDFLLRWPSLDALKGVHRTTLLKFFHAHNSHRQDTLETRLAAIKEATPLVTDTAVINSSVLMVNALASQMKTTLEAVHDFDVRIEELCQAHEDFELFASLPGAGRVYASRLLTAMGSNRERWASADELLRFSGVAPVVERSGKSSWTRWRYFCPKFVRQSFVEYAGESVKHSEWAKAFYVSQKAKGKRHQAAVRALAYKWIRIIWKCWQTRTKYDEARYLECLRKKGSALVSTPV

SEQ ID NO: 85634 - protein, 456 aa, unidentified
MPAANKKNKIGTTNALPVLQHNAAGIDIGATEIYVGVPHDRDPRPVRAFATFTQDLHALADWLGKCGVRTVAMESTGVYWIPLYQILESRGIEVCLVNARHVKNVPGRKSDVCDCQWLQYLHACGLLRASFRPKEDVCALRSLLRHRDTHITNAAAQVQRMQKSLALMNVHLHNVISDITGKTGLAILDAVLAGERDPHKLAQLRDYRIRASSDIIVKSLEGDWREEHLFTLEQCLSLYRTYQKMMHECDVKIERLMKRFESEPEQSQTCDAPAPKAPRGNDVRFEQGSLSAELHRILGTDLTRIPGIDSGIAHHLFTEMGADLSAFPSARHFSSWLGLCPDNRISGGRVLSVKTREVKSRVATALRMAAQSLCHSKCALGDFYRRMRSKLGAPKAITATAHKLARIVYHLLTTHESYNESIFAESDAISQQRRLLRLQRDATALGFKLTPRESVS

SEQ ID NO: 85635 - protein, 286 aa, unidentified
MNQISRIGMDTSKHIFQLHGVDAAEAPVLRKKLRRKEMVTFFEKLAPTVIAIEACGASHHWARLLQSAGHSVKLIPPQLVKPYVKRNKNDAADAEALCEAMSRPTMRFVPVKTAEQQAALMLVGVRDRLIRNRTQLSNAIRGYAAEFGITSAKGRTHLVPLLERIQADESLPVLARELFAIQAKEYTHLQEQIDAVDAKLMAWHRADECSRRVAKIPGVGPIGAVLLKLKTPNPELFRSGRQFAAWIGLTPKDHSTAGKVRLGVITRAGDEALRSVLVVEATSVIL

SEQ ID NO: 85636 - protein, 373 aa, unidentified
MGEDSEVFVGIDTSKLRHAVAIAQGGRGGEVRFLGEIEATDAAVTKLVRRLAAKHSKLFFCYEAGPTGYGLYRLIKELGGDCVVVAPSMTPRKPGDRVKTNRRDAVSLARLLRAGELTGVWAPDERHEAMRDLVRARSAAAADLRRKRQQASAFLLRLGRHFPGKKKWGRAHMKWLLGQKLAHREQRVAFEEMMLAISEAQGRVGRLEQAIGAAVPDWSLAEMVTALMALRGVDLISATTLLAEIGDLGRFSTPRELMAWLGLVPSEASTGDRVRRGSITKAGNSRARRMLVECAQSYRYPARVGAAKQARVAAAPRAVREIAWKAQTRLTARYRALIKRGKLRNVVVTAIARELAGFIWAIHRALTEPRTAA

SEQ ID NO: 85637 - protein, 320 aa, unidentified
MQTLQPPLDVGADVSKDQIVVACAEQSFTTTKIANTRTALLSWLKELPAGSRVGMESTGTYHELLAELAHKLGLSVYVLNARDVRHYAQGVGLRGKTDRVDAQLIARFVAKEHTKLHPWLPPTREQRQLQRLLKRRAMLTRTKGALSQSLKGLAGCNTQLKALVSRLDALIAYIDARIDALIQVDPARRDGYARLQSIVSVGPVVGSALVSALQRHSFARADAFVAFCGWDPCAHDSGHKRGRRRLSKRGPSELRRLLYNAAMSASRTKTWRPLYQRERAKGLSRTAALVVLARHITRTAWSIYTHKTSFDPKRVILGLT

SEQ ID NO: 85638 - protein, 400 aa, unidentified
MISVGIDVSKGKSTVCILKPYGEIVSKPFNITHTQKDLSELSSMLFRLNDEVKIVMEATGIYHLPVLTYLQEKGFFVSVINPYLMKSYRNESLRKAKTDKIDSRIIANYGIDHWFKMKEFQTSGEIYEELKLLGQQYRHYMKLHLLSLAELTHLLDLTMPGIKNLLASWNETNRKDKRSDFVERFWHYDVITSMSEQEFTEEYILWAKEKKYVPSQEKAKVIYTLAQESIPTLPSETSSIKMLVTEAVRVLKEVDATLGLILSRMQEIAKTLPEYSVVREMGGVGNTLAPKLIAEIGDVRRFRNGKALVAFAGIDPPPYESGQFVGCNRQISKRGSASLRKVGYETMRSLKMRSRPEDPVYRYVVKKESEGKSKKSAKIAGLNKFLRIYYARVTELYKNI

SEQ ID NO: 85639 - protein, 429 aa, unidentified
MTSKSSTTSPAVRVAIDIAKLTHQVLLELPSGKRRVMRVANTKTEIDRFVETLRALELPCEIAFEPTGDYHRPLAYVLGQVGLHLCLVSSIAVARTREALYNAWDKNDPKDAQVILHLLKNGTTQRYLDPVVTGHQDLQEMANTYQQVSLRKVRLQHSLITHHLPLYFPEAERYLHSSRAEWFTELLLFTPCPAAVRQYTKAAFVAAACEQIAGRKVDKARWLADFYETACHSVGLPVAATSETIRMFRVVLEEYRALCQLRKRLEAEITTQLAPQPDFVRLQTIPGVGPILAMTILAEARDLRRFGCVRQFLKYCGFDLCTEQSGQFRGTTHLSKRGNARLRYAFWMAGTVAIRMQQNSFRRKFEDYIRPDPKSADRRRKGYTAVAAKMARVAYAVVTTGTDYRRFPEATRPGGRIPSSGAVEAHATS

SEQ ID NO: 85640 - protein, 470 aa, unidentified
MADWVHAHYARVRSPYAAQDKPFASGFTNPYRNGGDIMLKINYMSTLFVGIDVSSKSNSVYAMDFEENKYLSTSFGNNQPGADELVNRIAACMQKHKNLDTLLIVLESTSVYSVHISNFLASSEVLMPYKPYVFCVNPKATANYRKSYIGMEKTDPTDAYLIADFARVGRTKKLEPWRGGQFIALKRLTRHRMHLSECITREKTYMVSNLYLKFSELQLLEGDDKPFGNLYGATSSAILTEFLSPQEIIDMPEEDLLAFLAQRSRNRICDLSKTSELLRKAARDSYRLDKCMYEPLNISLASSFNCIQAYQKEIRLIEQAIEKCIKGMNPNALIILQSIPGIGPVWASGILSEIGDISAFHSSDALAKYAGLYWPKGDSGDFISEDNQMSKAGNPYLRHYFGEAANSIRKHIPEYADFYARKYAEVSKHQHKRALALTSRKFVRLVFGLLAKNQLYTGEKLDTEHNTESN

SEQ ID NO: 85641 - protein, 334 aa, unidentified
MAGKVTETAVVGGVDTHKDLHVAAVVDQNNKVLGTQFFSTTRQGYRQMLAWMTSFGALKRIGVECTGTYGSGLLRYLQNAGLEVLEVTAPDRMERRKRGKSDTIDAECAAHAAFSGIRTVTPKTRNGMIESLRVLKTCRKTAISARRVALQIIHSNIISAPDELREQLRNMTRMQLIRTLGSWRPDASEYRNVTNVYRISLKSLARRYLELHDEIADLDVMIAAIVDELAPELIKRNAIGYESASQLLITAGDNPQRLRSESGFAALCGVSPVPVSSGKTNRYRLNRGGDRAANSALHIIAIGRLRTDDKTKEYVARRVEPPRESWRLNFLRKR

SEQ ID NO: 85642 - protein, 412 aa, unidentified
MISVGIDVSKEKSMVCIMKPYGEILKSPYEISHTKEELGELIRTIKSFTEETKVVMEVTGYYHLPVLNTLFENDIFVSVINALVMKKYASTSIRKGKTDKIDSVKIANYALSYWHELRRYSPRADIYDELNLLSRQYHQYINMRVKAKVTLGNLLDKTMPGITGLLRNSSENPDSDKLYSFAIEYWHFDNVTQKSEKKFVDSYIKWAKREGYHRSESKAKTIYALALNAIPSLNSNTPSTKMLVLEAVRVHREIEKTLTVILTRMQGLAKGLTEYSFVRDMSGVGDKLAPRLIAEIGDVFRFHSPKALVAFAGIDAPPYQSGAFTGTRCKISKRGSKYLRKTGYEVMKVLKSVKPTSDTAVYDFILKKESEGKSKKSAKIAGLNKFLHIYYARFKEAYLEATYVQEHDIVCE

SEQ ID NO: 85643 - protein, 349 aa, unidentified
MEKITVIGIDLAKSVFQLEAQSGSGAVVWKKRLRRAAFMQFMEGKAPRCLVGFEACGGSHYWGRFLSELGFRVKMMAPKAVKAYREGPHKNDGRDAHAAAEAASRASVRPVRIKSEAAQAVQCLLRVRALQIKQMIQTGNQLRGLLNEFGIVLPKGYKRLRDSLVGLQGDPAYIRIPQSLRLAIEGLCLQLAEQVERVKQATDALTQATQDDESCVQLRSVPGLGPINAAGLSVALEAPQAYHNARAFAAALRLVPRQWQSADRQKLLGVAPECANDTRRHLVLAGQSLLTMVARMKQPPSDPFLLWVDRIRQRKNRNVAAVAVAARLARIAWALMAKDTSYRPRAVTA

SEQ ID NO: 85644 - protein, 319 aa, unidentified
MTAEIFIGIDVARDSLEVAVRPTGEQWSVGNHSVGIAELLVRLRALRPTLIVLEATGGLELPALGVLGSAGLPVVAVNPRQVRDFAKATGKLAKTDAIDAQVLAHFADAVRPAVRPLPDAATRALSALVARRRQLVEMLTAEENRRASAAATIRPDIQEHIGWLRKRLRGIDQELSQALRTSPLWRAQEDLLRSVPGIGPVVAATLLADLPELGVLSRKPLGALVGVAPLNRDSGTLRGKRTVWGGRSTVRAALYMAALVGTRHNPVLRALYLRLLAAGKTKKVALTACMHKLLTIINALLKHGTPWATPASLGAANSG

SEQ ID NO: 85645 - protein, 419 aa, unidentified
MKKIIHYIGLDVHKNSIAVAIAVEEGGELRSYGTIGGKLADLDKLIKKLEHPGVELRFCYEAGPTGYVICRHLKKRAYACEVIAPSLIPQKPSDQVKTNRRDAKMLARLFRAGELTSVHVPDEEDEAIRDLERARFSAVKDQRRARQRLKGLLLRQGFPYEGKTSWGPAHLNYLARLKMPHTAQQIAFEGYKAAITVATERVARLSQALEAQLDGWKWKPVVLALMTLRGIQTINAMTLLAELGDLSRFTNPHQLMSYLGLVSSEDSTGDKRHQGGITKAGNEAGRRALIEAAQHYRLPARLTPTIQARQHGQSQAVRAIAWKAQQRLHDRYHHLKAKGKKTQVVVTAIARELAGFVWAIACTAVGKAPAARPESKPEAPQHRQKTSENKSGQKKTYQLKPAMKYSASRKVNRSSAPRP

SEQ ID NO: 85646 - protein, 319 aa, unidentified
MVAQATVPATPPGYRQLLELADQHHGQRVWAIEGTGGYGAGLTRFLHAHAEQVGELDRPKRAPRRHGAKSDPLDAVRAAREVLGRDQLAQPRATGPRAALSVRLAARRSAVQAAGDAQRQLHALVIAAPEVLRERLRLGSTRQLVTACARLRVQASWDVETAATAATLRSLARRIRELTSEAADHRQAILGLVRAWRPDLLARQGVGPIVAATVLCAWSHPGRCRSDAAFAMLGGAAPIPASSGQTIRVRLNRSGDRQLNQALYTVVLTRLRTDPATRAYATRRRAQGKTNREIKRCLVRYVARQLYRLLETQPALDPT

SEQ ID NO: 85647 - protein, 347 aa, unidentified
MNFYTQQHKHYCGIDLHAKAMYVCILDQSGTILVHKNLPTTPEAFLRVIAPYRDDLVVGVECIFTWYWLADLCAKEGITFVLGHALYMKAIHGGKAKNDKIDAHKIAVLLRGGMLPQAYVYPAEMRATRDLLRRRCHLVRKRAELLAHIQNTNSQYNLPEIGKKLAYKANRAGVEEHFPDPSVRKTIEVDVSLIDHYDKLLGEVELYITRTAKAHDVQTFSRLQSVPGIGQILALVILYEIQDIARFPRVQDFVSYCRLVKCAKESGGKRLGTSGKKIGNVHLRWAFAEAAVLFLRHNQPGKEYFTKLERKHGKAKALTVLAHKLGRAVYYLLTREQAFDLNRFVTA

SEQ ID NO: 85648 - protein, 403 aa, unidentified
MEGLLISLDVSKGKSNYRFFENETDRKGKKGVIRHDIQGFDSIRDEAEKMEKRLRIKPSVILESTGVYSDVVEKYFTDKGFDVYVISPLLSASMRKEGVRPAKNDSLDTLSIAKVFYSRDDLRKCSENDKNAERLREMSYELDMMNRRIRPMKCQFLRLLDKVWPCLDEVSDYSSRFMLDFIIAFGHPENIKTVKGVLSVIRKSEMGTAGRKDKIAQDLFDYCHTHLSAVSKDSSYVELLKRMAIELKAMAKKKSELIDRMAEEARNKDEFVRLLTIPAVAKTTALKIMARVGDISRFRNAEALVAYCGLDPRVYQSGKMTGEHRTITKKGDCILRSTLFLAVKLMVMLYPDTKVARFVAAKAKNGLSYKQAVVAGSAKLARIIYSMLTHHENYVEFNADIVA

SEQ ID NO: 85649 - protein, 388 aa, unidentified
MALDEGEAPLGELRVRSAANQVEQLMAWAAPLGERTWAIEGAGGLGYLLAQQLVAAGERVVDVQPKLAARVRLLATGASNKNDPNDARSVAVAALRATVPEVRVEDHAAVMKVWAKRHRDLSRQHNRVACRLHSVLCDLAPGGIAGEISPAQATRLLDGLEPVGAVATARHELAVELVADLVRLDTQRRDARRRIVTAVTASKTTLTELFGVGPIVAATVIGEAGDVSRFPTRDRFAAYNGTAPIEVSSGGRRKVFRLSRRGNRCLNHVIHMAAVTQIRYRHTNGRAFYDRKIAEGHSGKEALRALKRRISDAIYARLRHDAEQAARVAAGPGGHTGNGSVACAAGSHPEHRLFDQATPGPDSSLRPARTRADAPTSKPPTRRPRKAS

SEQ ID NO: 85650 - protein, 374 aa, unidentified
MSDHSEAFVAFDTSKLRDAVAIADGGRAGEIRFLGEIDATPAATATLVKKLAAKYQRLTFCYEAGPTGYGLYRQIKSLGHECIVVAPSLIPKKPGDRVKTNRRDAVNLAKLLRAGELTAVWVPDRHHEAMRDLTRAREAAMMDLRSKRQQVSAFLLRQSLHYPGKKTWSKAHMNWLASQKFDYPEQRLAFEETMLAVRQAQERLERLEQAIRVAVPDWSLAEVVTALMAMRGIDLIAATTFLAEIGDLSRFRTPHELMAYLGLVPSEASTGDTIKRGPITKAGNRRARRMLVECSWSYQHPPRVGREKQQKVDAAPPAVREIAWKAQCRLNARYRALIRRGKLKTVAITAVAREFAGFIWAVGREITTTRAAAR

SEQ ID NO: 85651 - protein, 344 aa, unidentified
MYHYAGIDVSLESSSVCVVDGTGKILREVKVASEPEALIAWFRSVDLTMERIGLEAGPLSQWLYAALREAGFAVELLETRHVRDAFKAMLVKSDRNDARGIAQLMRLGWFRPVHCKSIEAQETRAVLTARKLLQSKLRDIENSLRGVLRGFGLKVGKTTECTFAERIRELVAGHPGLELVAKALLEAHAVLRREFNGLDKHTQRLARSHPPAKLLMTTPAVGPIVALTYASAIDDPKRFSSSKATGAHFGLTPKKYQSGQTDYTGRISKIGDASVREALYQAAHVMLTKPVKNCSALKSWAMRIAKRAGMRKAKVALARKLAVILHRMLADAKPFNPVAKAAAT

SEQ ID NO: 85652 - protein, 363 aa, unidentified
MDFLTVDTTHVVEPLVVLGVDTHADTHVAVALLDGLGRRLGSKTVSATDAGYAELVAWAEGFGRLDRVGVEGSGSFGVGLARFLRARGVPTVEVNRPNRQHRRRFGKHDTADAEAAARAVQAKTATGEPKSADGPAEMVRTLQLVRRSALKARTQAANQLRALLVTAPEELKTGLLGLSTAKLVGKAARFRSGGLPEDLRASTKVAMRSVARRYQQLSKEIAELEEQIARLVSEAVPALTSLRGVGTDTAASLLLAVGDNPERLKSEASFARLCGVAPVAASSGKTTRHRLNRGGNRDANRALHVLALGRMSWDERTREYVAKRTAEGKSKREILRCLKRYLAREVYRVLVAAGTPTASLSRA

SEQ ID NO: 85653 - protein, 424 aa, unidentified
MKVTYKTCCGVDVHKSFLVATIVKTTGGIEPSYQKKRFSTFNSSILEFKQWLLDNDCHDVCMESTGKYWVPVFNLLEDEINVVIANPKWVKAVKGNKDDTKDSKWIGDLFRLGLVKGSYIPCKIVRILREYTRYRYKLVSCRSSEKNRYQNTLTVCNVALDSVVSDIFGKSSMSIIDYLLEQSGTSINHEEIASKLLRSLKSKEDAVIESVEGYQMTDAQKYRVRLVRAHMDYITAEINDVDKMIENMIFSNPDFENAVQFLCTIPSVKRDSAITIISEIGTDMSQFGGSKRLCCWAGLTPGSNESAGKKKSVRITRAGVYLKPALVQCAHAAVKSDKSPYYKKKYESLVKRRGKKRAIIAIARMILTAIYQMLSTGEQWNPSDLYKIDMPVALVEKQKAKAIKQAKKLLQREGILPPDEPLAS

SEQ ID NO: 85654 - protein, 360 aa, unidentified
MSHRTWKLGNVKSASASEGDRMTVGLDVHKATACAAVRKNGQEIATWVMPMDNQTIVASLKRFGPALKKVVYEAGPTGYGLARALKKAGLPVEVIAPGKVPQAPNADSKTDRLDARKLAEEAEKGSLQKAVIAIPTEQEEADRQLARLRDQLIGKQRRVKQQIKSLLLQHGLPEPAGLAHWSAEGLAALKAMRLRHQLQLSLEVLVGELEHLVVLRKRVERHEVWLMKQRRHRRGARLLQTHPGVGVVTATAFRLEVYQPERFATPEQLAKYVGLAPRVRQTGPKRRGGPLIPAGRGSLRSLLIEASWRWIRDDAAAAKTYRRLVRNTGSGQKAVVAMARRMAVHLWCMLCRGQEYRPAA

SEQ ID NO: 85655 - protein, 403 aa, unidentified
MNAVGIDVSKGKSMVTILRPFGEIVSSPFEIKHTSSDILSLIKLIHSIEGESRIVMEHTGHYYEVLAQQFSAAGLFVSAVNPKLVKNFNNDSLRKVKSDKADSIKIARYALDKWQNLKPYSIVDELRTQLKAMNRQFHFYVKQKTAMKNNLINLIDQTYPNANTYFNSPPRSDGSQKWVDFVYTYWHVDCVRKMSLNSFVKHYQNWCKQKKYIFNKSKAEEIYTQSTELVPVFPKNEITKRIIRQAIAQLNSTSATVETIRILMNETASKLPEYPIVMQFKGIGPSFGPQLMAEIGDITRFTHKGALTAFAGVDPGVNESGSYAQKSVPTSKRGSSNLRKTLFQVMDVLIKTMPQDDPVYQFMDRKRAQGKPYYVYMTAGANKFLRIYYGRVKEYLCILSESS

SEQ ID NO: 85656 - protein, 338 aa, unidentified
MTIVMGLDQHRAQITAEWLDTETGEVSRARVTPADRAGVRRFLARFADQRLEVALEATTGWRFVVEELRAIGAEPHLAEPAEASALKGNKRRAKTDRGDARHLRELLMTGRLPESYIAPEHLLDLRARVRLRHALVDQRGEWQQRIHAVLYHHGHPQKAGLLTTANREWLQGLALPDAAREQVTVALAMIDALDSQSAGITVELRRYARRQAGCRALIGLYGIGELTAVAILAELGDTRRFSSSRQAVRYAGLDVTVHQSDQRRAPGHLSRQGPPALRWALYEAAQAARRPGSPDRAYYAQAAERLGGNRACLALARKLLKRSFHVLRELGDQALQPA

SEQ ID NO: 85657 - protein, 408 aa, unidentified
MKTLHRRCAGLDVHSDSVVACVRLTVRTKVSHEVRRFSTTTRGLLELADWLEGQRITHVAMEATGVYWKPIWHILEGRFELVLANAAHIRNVPGRKTDVNDAVWISDLLAHGLIRASFVPPVQIQEVRDLTRTRTQLAREIAQHIQRIQKTLEDANIKLTSVISDIMGMSGRRILKAMIAGETKPAKLAELGSTRLKCPRDELIAALDGCVTVHHRFLIAHHLRLIEQLERHIAAFDTRIEKLLAPFRNAVEQLITIPGVSRVSAQVILAEIGTDMTRFTTAGHLLSWAGLVPRLDESAGKRRSTRVRKGAPWLKPILVQCAWSAARTKCTYYQAQFFRLKARRGPKKAAIAVAASLLTTAYHMLKDGTFYQDLGADHFIKRDKARIAARLVKRIKDLGYGVSLTAAA

SEQ ID NO: 85658 - protein, 409 aa, unidentified
MQVMHEVCCGLDVHKKSVTACVVWAAGRRRQTREFGTFTKELLELSDWLRSCGVTHVAMESTGVYWKPVWNLLEGQFEVLLVNAQHIKAVPGRKTDQKDSEWIADLLQHGLLRASFVPPTPIRELRDLTRYRASLAQEINRISNRIQKVLEDANIKLASVATNALGASGRSMLEAIVHGEQESQKLAEMSRGLLRNKIPELQQAMQGRVTAHHRFLLRELLDHLYFVESKMRRIEQEVEEQLRPFQSEVARLCTIPGVDRVTAWSLLAEIGLDMKQFPDAQHLASWAGLCPGSHESAGKRKSGKIRKGSLWLRRCLCQAAWAVSTKKNNYLSARYRRLAARRGGKRATIAVAHDLLVIAYYILRDQACYRDLGPDYFDRLNPGPLRRRLTKRLEGLGFKVTLEPLSQVA

SEQ ID NO: 85659 - protein, 405 aa, unidentified
MDVIVERGCGLDVHKETVVACIDGGGIKKEIRTYSTFTNELLQLKEWLKGKGVTHVAMESTGIYWKPVYNILEEDFEVVLVNARHIKHVPGRKTDVCDSEWLCKLLRNGLVKGSFVPERDMRELRDLTRYRKKLVQAISSEKNRVQKVLEDANVKLSSVVSDTFGVSGSEIVEALLRGELTPEEMSCLARGKLRKKKGALREALVGKVTKHHVFMIKASQEHIQSIEKIIAGIDGEIEIKLEKYRKEYELLQTIPGVKEHGAASILAEIGTDMERFPTEDHLSSWAGMSPGNNESAGKKKVCGTTQGNKSLKTTLTECAWAASRKKDCYLRAKYHSLVGRRGKKRALIAVGHKILIASYHILKNGVSYKELGGDYLDKRRKEKITKSYVKRLASLGYQVTLSEVA

SEQ ID NO: 85660 - protein, 347 aa, unidentified
MMIIGCDFHTRMQQISMVDTETGEVTERQLDYEDDEARSFYAGLKEPALVGIESTSYTRWFAEMLAELGHELAVGDAAKIRARETRKQKHDRRDAELIRNLLVKGDFPRIWLPSAEERDVRVLVEHRHQLVQLRTRAMNGLQAVALSYGLRLRHRLWTKSGQEKLQKLPLREGPGRRRADLLKLVAQINTWVKELDQRLAEEVGRRSDAQLLRTHPGVGDLTALTTVLVLGPVQRFPDARHVTSYAGVIPAEESSGRRQRFGHLTKQGNRLLRFLLVEAGQIACRFDPSLQRLYRRLVFRKGTAIAKVAVARKLLIRLYIMLRDKIDYQEFCRRGSHAGMLGDVALA

SEQ ID NO: 85661 - protein, 311 aa, unidentified
MYYIGIDVSKKDLSVFDGKDLKFANKEGLKSFKKYLKKKYHLSEIVLIFEPTGIYSFYLKEFCAENSIKAYIVNPKKSHNFTRALGKRSKTDKIDAQILYQFHKHIGLEDIKVPKVDQQAKTLASYLVSYEFALKQRISLSNHLESLRDKGLIALMKKDLKRAKMLEDKLFHDIQEYVSKNQNLREAYQRLLTISGVGEKTAIALLTLFKTYQGTNRAQITALAGLDPVKRESGTSVKGKVKISKNGKGIYRKILYLPTICATVHNQKIRVFYQRLLAHHKTKKLAVIASMRKLLLIAHAMYRDKTEYVAV

SEQ ID NO: 85662 - protein, 350 aa, unidentified
MELHTIGIDLGKTVFHLVGLNQRGEVVVRKKFSRKQLLHFTANLQVKLIGMEACGGAHFLGRALRGQGHEVRLMPAQYVKPYVKTNKSDYIDAEAIAEAVERPKMRFVPIKSDDQLDLQSLHRVRERWVMRRTAVINQIRGLLLERGITLRQGRRHIDAALPGILEDASTQLSGAVRLLLAQLKLELDHLQMRIDEADAMINKAAGENEACRRLVAIPGIGPVTATAIIAAIGNGAAFKKGRGFSAWLGIVPGEYTTGGKQKLLGISKRGNSYLRRLFVQGARAVLQQSTKQSYGLRAWLAQLTARTHSNVAAVALANKLARMAWAVLAKNEHYRPPMLVGATAAGLAGR

SEQ ID NO: 85663 - protein, 371 aa, unidentified
MEKYKFVGLDVHKETIAVSVAEADGGEVRYQGEIPNTPDAVVRLVRRLRKEEGVKLSFCYEAGPCGYGLHRQLLDLGQVCQVVAPSLIPKKPGDRVKTDRRDSLNLARLHRAGELTAVWVPDGAQEALRDLTRAREDMKHLQRQAKQRLLGFLLRHSKRFEGKDNWTQAHFRWMEEVKFEQPVQQIVFQEYVDSVQAMTRRVRAFDEQMESAARDSVFWPVIEGLMALRGVKLITATTIVAEIGDLRRFATAPQLMAYLGVVPSEHSSGETKVRGPITKTGNGHVRRVLVESAWQYRYPARKTAVLQRRAERASEQAQEIAWKAQKRLCGRYRLLEARGKLKVQVCIAIARELAGFIWAIGQTLPQPAARA

SEQ ID NO: 85664 - protein, 330 aa, unidentified
MKNYKEVVGIDVSKKTIDAYCYHGQSHKAFINDIGGYKSLIKWVFKVVKTTEVFYCFENTGYYSLKLALYLSSQNIIYVEESPLKIKRSSGIVKEKTDVLDACLIARYAWLYREELKPSTVKSSSHLELGRLLALRDQLVRNNAGLKGTLKEMKVLLTSPTTGAGCISLKRSIDYLEKQVKSIETRIKAIVSEDSSMEKNYELLTSLRGVGLVVACQFIYHTGNFTRFDSWRAFASYCGTAPFEHRSGTSIHRRKQCHYLGDRKMKSLLSMASVSAIQHDSELRLYYKKKLAEGKDKMIAVNNVRNKLISRAFAVVKRGTPYVVLQQHAA

SEQ ID NO: 85665 - protein, 339 aa, unidentified
MELYAGIDLHSNNNVIDLLDEKDKVIYDKRLPNDLPTILSELSPYQSQIESIAIESTFNWYWLVDGLIDAGYCVQLVNTAAVQAYSGLKYTDDNHDARWLAHLLRLNILPTGYIYPKTDRAIRDLLRKRTQMVRIQTTNLLSIQNLIARNTGGSIKAHLVKRMTAKEFALQLPNDDHALALSCNLSVLQQCHEQVKILESAILKRIRLRPEFQSLLTIPGIGKILALTIMLETGDIHRFDKAGNFASYARCVQSKRVSNGKKKGENNRKNGNKYLAWAFVEAAHFSIRYSETIKRFYQRKCAKTKKVVALKAVAHKLARASFYVMRDNVEFDVNKAFTS

SEQ ID NO: 85666 - protein, 343 aa, unidentified
MALFVGLDVSQKLTSSCVVDDTGARLWRGQCATEPEQIARVIRGHAGEDAKLGIETGPMTPWLVHELRAHSLDVTCLDARHASAALKMQMNKTDQNDAEGLAQIMRTGWYRSVHVKSLGAHRARALLGARAQLVGMTTRLSNHIRGLLKTFGLLPGAMRGLPFDRRVEALIADRDDLAPIARPMLVAWRQLREQIATFDKEVRALAKKDPTCRLLMSVPGIGVVSVLAYVSTIEDPARFARSRSVGAHMGLTPRQYQSGEVDRSGRISRCGDTLARTLVYEAAVVILTRVKRASSLKDWAQAIAKRAGIGKARVALARKLSVMLHSIWRSGEAFRWSEQPARG

SEQ ID NO: 85667 - protein, 428 aa, unidentified
MNEEKNSRVKEFRQLRKEIRGSSEYLIVGIDVAKEKHHAFLGTATGKTLLKRLVFENSMDGFERLLDYAETIKTKHALEKVVFGLEPTGNYHKPLAEYLIKCGYNVVLVSGVAVSGNRQSLDGRWDKNDDKDSANIADLISQGKCLYYDYPSIPLRELRNLLSLKRRLKKQEQGTKARIRNHLLAQYFPEFDKYSEKGGAVSLAVVKWCLKPSKIWNMEFEEFVHMVAPRVRRADQEKRLKEIWDLAIESIGCEAGEDLYFEARFMIEDLQQIKESIKKVDEHIEELCLGFPEYEHLRSIHGFGPDVASKVIAAIGDPFRFDNGSQVLKLAGFDLNAARSGNTSDKAVPVISKRGKASLRYALYQAAFIASTKNKYFMVYFTNKLRGREREKGIRIKMTVKLASKMLIIAWTIMKKKEPFDSDYLNLN

SEQ ID NO: 85668 - protein, 408 aa, unidentified
MNTLYVGIDISSKSNVVYMMLPNGDKHSNFSVASSHEGSIQLVKRIYSALTSHSLDTVLIGLEATSVYGDNLVYFLREDATLAPFNSRIHVSNPKQVKRFHDAYNDLPKNDYVDSFVIADCLRFGRINKEVYSGDYRYQALRNLTRARFFTVQNLIKEKQRFMNVLFKKYSTMTQEKVFSNTFSATALAVYEEFDSAEALANMDLHELTDFIIEKGKNRFQNPDAVAKAIQKAARSSYRLPKTVNDSVNQVFSISITSMKALESQIKEFDKAIKAQTELLPNVLISIPGICPVYSAGIMAEIGDINRFDNQAALAKYAGLAWKQYQSGGFEAEVTRLIPSGNRFLKYYLCEAAFSLVRCDKEYSDFYHLKYKEVNRCQHKRALALTARKFVCLVFRLLKDNRLYCPAK

SEQ ID NO: 85669 - protein, 400 aa, unidentified
MRAVFGIDVSKASSEVAILVNGEKVHGYTISNDALGFARLLGDLKTVHKPEIIFEATGVYSRRLQAFLEDNGYAYTRLNPLEAKKQLDSLRVRKTDQIDAEKLAQSQFVLNRKPTYVQEEVYQELRDLSRFYQNLTEDIVRAKNRLHKVLQVTFPELETILSTPTGEQYGNLVVAFPCKDFVLDLSKDELSESIRQSTSKRISDKRVAYLAEKLIALANQSYCAVKKTSPMLEEVRYYAQELLRLSERRKAVLDQMVELAQPLPEYDILLSIPGITETTATSIIGELGDIRRFQSANQINAFIGIDLRHYESGNFLAKEHITKRGYPYARKILFKCIHNIASASHTNPCHIADFYEKRKRQSQTTSTKPHTIASIHRLIRTMYYLIMHNKLYDYASTQNR

SEQ ID NO: 85670 - protein, 391 aa, unidentified
MVCVGIDVAKDKHDCCILDSDGTVRADCFTIPNNMDGFKQLLQTIRNCTQKSDKIKVGLEATGHYSYNILGFLLDNDLAVYVMNPLHTNLYRKSLSLRKTKTDRVDARTIATMLLSDVDLKSYTDTAYHNEELKSLTRYRFDKVRERAKLKQSVSRLVTILFPELEKLVPSLHIASIYSLLSEYPGAKQVSEAHLTKLTNLLTTASKGRYGKDKAIQIRDSAKTSIGSVMPAKSLELKHTIKLIRELTSEIDEIEDSIQKIMDELNPPILSIPGVGIQSAAMILAEIGDFSNFESPDKILAYAGCSPSTYQSGKLTNCYAHMEKRGSRYLRYALYNATKYVCHWNPVFAEYLAKKRAEGKHYNVALSHATKKLVRLIYALQKSGKAYLTAA

SEQ ID NO: 85671 - protein, 345 aa, unidentified
MKIVGCDLHTRYQQIAMLDQETGELIERRLEHESGEARAFYATLSGPVRVGIEATGHTRWFERMLAELGHELWIGDAAQIRASVVRKQKTDARDAAHLLELLLSERFPRIWRPTMAERDLRQLVWHRQKLVWMRNAVGNQLHALAMGEGVCRKKKLFTKKGRVELEGLGLGIWASYRRQELLTMLDQFDVSLHELDRAVAEQAEQNAAAVLLMTHPGVGPVTSLAFVLTLGPVERFERSKQVVSYLGLNPREHSSGGRQRLGAISKQGNPMMRSLLVEAGHTAARLDRELRQDYQRLKLRRGSGVAKVAIARKLAVRMYWMLRGQASYAQLVRMQGSPWGTLVKE

SEQ ID NO: 85672 - protein, 317 aa, unidentified
MDAQDVFAGIDVSKENLEVSIRPQEERMCFAQSEDGWALMSQFLQSFSPRLVVLEATGGLERGAVATLAAQGLPVVVVNPRQVRHFAISKGILAKTDKIDARVIAQFAESIRPEIRPLKDLEAQELDSLATRRRQIVQMLAAEKNRLQSAAGWARGDIRMHIEWLEKRLEKIEKDMDRMIQKSPVWRVKGEILCSMKGVGPGLCRAVVSDLPELGTLKRQKISALVGVAPLNRDSGKFRGRRTTWGGRADIRSVLYMATVAAIRWNPIIRAFYERLLKAGKPPKVAIVACMRKLLTILNAMVRDQTPWQPPVAQKTV

SEQ ID NO: 85673 - protein, 363 aa, unidentified
MRFYKNQHQFYIGIDLHARSMYLCVVNNSGETVFHKNMACSRENLELVTDTFGKDIVVGVECIFTWYWVADFCAERGIDFALGHAYYMKSIHGGKTKSDKIDSEKIANMLRGGMFPTAYAYPKGKRATRDLLRRRLFFVRQRAELSVHLQNTNHQYNINEPLASSRMRSEFYRNTIPDKFRDPATLQMVNADLAMFKSYNDIITKLEFQIEDSMEVQDPVSYSIINSVPGLGFILSLTILYEIDDIHRFPDVGKFVSYSRLVKCSHESAGKREKGGHNKIGNVHLKWAFSEGAVLFLRNNERGQRWHDKLVQRYGRAKAMSIIAQKLGRTVYYMLKRKEAFNPDRFYGDKKIENKDSGGEHLA

SEQ ID NO: 85674 - protein, 335 aa, unidentified
MQVYGIDLSKEKFDVNFIDAKGKEKKQEVKNAVASISRFLFSVSGDGILCAEHTGAYGDLLVYLCNQMNIPIALVPGYTIKHSLGLVKGKSDPLDSKRIREYGERFTDKLEYAEYAEERIAELKQLYTLRHQLVKQRKALRTVDKGRGHLPLQSISVHNHTITILAELDKEIASIEDEIEMLIKADQEMNENYELVIGITGIGPVIATDLIIKTGNFKTIDTHRRAASYAGVCPFPNASGKMVGKSRTSPFADKKLKSLLYMGARAAVKHNKEYKLYYQKKELEGKPYFLIMNNVSNKLLRTVYSVVRNKTPYVRDHVCLDPRERNINSSTKKVA

SEQ ID NO: 85675 - protein, 358 aa, unidentified
MAKSTQISPVVGGVDTHKDLHVAAVVDQSDRVLGTQSFATTRQGYKLMLTWMRSFGELQRIGVECTGSYGAGLLRYMQAAGVVVLEVTTPDKQDRRRRGKNDDFDAESAAHAAFAERRTVTPRSRDGMVESLRVLKVCRKTAVQARRIALQLIQSTIVCAPDQLRDTLRKMTRMQLIRTLASWRPDLTAYRDVEEAYRIALKSLARRYIELHDEVADLDTMIRAIVTDLAPELIARNSIGVNSAAQLLLTAGDNLERLRSEASFAALCGVSPVPASSGKTIRHRLNRGGDRAANSALHIIAIGRLRLDLKTQEYVARRIAQGHSKLEAIRCLKRYIAREVFNIIARRHKQINQVKIAA

SEQ ID NO: 85676 - protein, 385 aa, unidentified
MQASNVSAPIAGHSGTIFVSIELSQRCWLVTMHSPDKNRFSRHKLDGGDDVGLLGLIERIRVRAAQALGSLPRVVSCYEAGYDGFWLHRRLEAAGFTNFVFDPASIAVEQRARRAKTDRIDGELLLRTLMAHCRGEPRVVRIVRVPTPEQEDARRATRERERLIKEQTAHTNRLKALLRLCGLAAGNPRRRDWMAWLERQRERNGEPLRPQLMAEVKREHARLMLVGEQLKELSRASQAEPVSAAAAEMAQRGATLQRLKSLGPAFTATFASEVFYKDFHNRREVAAYVGLAPSPWRSGQTNREQGISKAGNPRARAKAIELAWLWLRHQPESALSRWFHERTGQGRGRIRRIAIVALARKLMVALWRFLTTGLVPEGAVLKAAA

SEQ ID NO: 85677 - protein, 353 aa, unidentified
MMVFVAVDVGKRRCVTCVMGQDGSILDSGSYPNTMFDASHYARLMVERYGECKAVVESTGNMCMKTYEAFESNGVEVKLANPVKTRAIAEARVKTDKLDARILAHLLRADLIAECYVPSRDVRLSRALLTHRVNITREQTRIKNRIHSLLDKYDLECEYDDIFGAHGMRWLHTLQLNGHDHEILQSLLRELEFLQDEEEKADSTIAKDALHSQYVPTIMSMTGFDYYSASVLAAYIADVSRFPSPSHLVSWVGLCPSVYQTGESLYMGRMKGGSRKVKWIMIQAANTAIRSDHRMKAYYERKLRRHHHNVAVTHVANKMLRIIWHMLRENRLYNERKERLYESKLKRMTHTAQ

SEQ ID NO: 85678 - protein, 323 aa, unidentified
MFGDLNVHIPKSNQDLILDNNLKSFRSLFSKLKKIYKKEIEDIIFIFEPTGSYSEALRKYCSEKNIKCFIINPKQFSNYAKALGVEVKNDIEDARVLSKALHLAKDGQVKAPVFNEDVEHIKELMSFYRFTKKQTTQQKNHLEALRSKSGDKFSIKELEKSIKESKKKELRIIEEVQTLIDSTDEYKTAYENIISIKGVGQIGAIVLLHLFLKYPDTNKKQITSLVGLNHIYKQSGTSIQSGYKIAKSGASLYRGVLFMSALSAIEYDKNFRSFYERLKLKSKHSTSAQIAVMRKIILIAHSLYKNNRKYDEYFNSQEAANMN

SEQ ID NO: 85679 - protein, 386 aa, unidentified
MQKLNDLSRSLTALEPDGTLIAVIEMSLSSWLVAGIVPGVERQPLKKLAVDETALLKLLHRWRDESEKAGRGIERIAVAFEAGRDGFWLARWLKARGIEAYVIHASSVAVSREHRRAKTDRLDTELLKRSFLGWLRGERDHCKMVEIPTMKDEDAKRPNREHDSLIGERSRIVNRMKAALVRLGIRGFNPKLKRANTRLDGLRTPEGEPIPPNALAELRRDMERRRLVNNQIRQIEEERLERIEQAPCDGPHVMVRLLARVMGVGIETADMLVHEVLSRNMRDRRAVARYAGLTGSPDESGRKRREKGLARSGNARVRRGMIQLAWRFLLHQKNSALTKWFRSRTENARGTRKPMIVALARKLLIALWRLVREGIVPDGIVLRPAQ

SEQ ID NO: 85680 - protein, 416 aa, unidentified
MDTMYERCCGLDIHKKTIEACFRSGKKKTHMSFGTTSAELRKLTMWLVENDCQSVAMESTGSYWKPIFNILELSGTDMEIIVVNARHMKNVPGRKTDVNDAEWIAELLQYGLLRPSFIPDREQRELRELSRYRKSLVGERAREINRLQKMLEGGNIKLTSVVSEVTGYSSRRLLDRLLRNDEPMTEEVISGLVHTSLAGKSKELETALDGLLSELQKELLIKVLDHIDDMSRRIADLDDFCRKQMKKYEDALDKLDEIPGIARRTAETILIETGLDMSRFPTAKHFARWAGLAPGNNESAGKRSNGRTTKGNPTLKSTLIQSAKVAARKKDSFFKARYQKIAARRGANRASVAVAHSMLIAIYHILKSGERFKDLGEDYYNQFNKEKKKKYYLKKLTKLGVNLKEATLSISIQAAT

SEQ ID NO: 85681 - protein, 433 aa, unidentified
MTVNVTPPQYIGGFFMKIVHKICCGMDVHKDLIVATIAVTDQDLVTDYIQKSFSSQNFDLLLLKDWLKAHQCFEVAMESTGKYWIPVFNVLEDEINVHIVHPKYTKAIKGKKTDKKDSKWIADLFKHDLLKFSFIPPKEIRELRELSRYRIKLVNMRSSERNRYQNSMTVSNIGLASILTDPFGKSASSIMKEVLTSSSIDDAKISKLLNRSAKKKTAAVLESLKGSHVEHDQKLKMTIASKHMDNLDSYINDIEVEMFKRLLPHAGQFTHLTTIPGISTMSAMIIISEIGLDMSQFESDKQLCCWAGLTPANNESANKKKSVRISKAGTYLRPILIQCALCAVACKSETYFAIKYNRIKKRRGHKKAIIAIARMMLTSIYNMLLTGEVFNPSDYDSLKNPRPAKPSYTPESAVQYLASLGVDTSSIKLPVDA

SEQ ID NO: 85682 - protein, 385 aa, unidentified
MSELNDLSRSLTSLEQDKTIIAVIEMSQSSWLVAGIVPGIERHPLKKLEPSEEELVRLLMRWRTEATKNGHTIARIAVAFEAGRDGFWLARWLRARDIETYVIHPTSVAVSREHRRAKTDRLDTGLLKRVFIGWLRGEPDHCHMAAIPTLAEEDAKRPNREREGLVRERTRIVNRMKSCLVRFGIRNFKPTLRKAPERLATVGTPEGVPLPPNTLLELRRDMARLRFVMDQIKEVEEARAQRLEQAPQEKTHAMERLIARVIGVGIETADMLVHEILSRQLRDRRAVARYAGLTGAPDESGNKRREKGLAKAGNARVRRGMIQLAWRFLVFQKDSALVQWYRTRTESAGKKRKTMIVALARKLLIALWRLVTTGEVPAGVVLRAA

SEQ ID NO: 85683 - protein, 318 aa, unidentified
MLIHYIDIAKRNFVIAVSSLSKTKTETNNPKGIAHTIEYLKKHKVALVVTESTGGLEIPAAKAIRRAGIAVIIANPRQTHQFAQSQPLTKTDAKDAKMPAFFAQMTAQKEDSQTMPYQPPTEAEEVLEALVNRRNQPADMRTAEKNRLHQVHETQVGSVKQLIAHFDRLIDELDKQIDDHTHTHFDGKAQVAEQIKGIGSITTATLMAMLPELGRLSHKRIASLAGIAPHPRESGETKFKSRCFGGRSAVRKALYMATVAATRFEPLIRDFYQRLPSEGKPYKVAVTACMRKLLTISNARMRDYFAENDTAENGIRTA

SEQ ID NO: 85684 - protein, 343 aa, unidentified
MEASMYGIDIAKSVFQVHGANASGRMVVQKRLKRGQVVDFFRALPRGIVAMEACGSAHHWGRELTKLGHEVRLIPPAYVKPYVARNKTDARDAAAICEAGSRPHMRRVPVKTIEAQADRALQRTHDLLVRQRTAAANALRGHLGEMGIVAPAGLSGLRRLIEAIETQDEAIPARLLVPLQALARQHRTLEEEVDALKAVIVARVREEADMKRLARIPMIGPMTAHAMVAAVGDGRQFNSARDFAAWLGLTPKQASSGERLASGKISKQGDEPLRRLFVLGAANALRRPDRASPWMKRLLARRPPKVAMIAQAAKTARIAWAVLVSNEEYRTNIAPAASVPPRA

SEQ ID NO: 85685 - protein, 383 aa, unidentified
MIIIGCDYHPGFQQIAFVDTDTGEWNERKLGHREEAEQFYRQLKVGGKEVRVGMEASGHARWFERLISELQFELWIGDAAAIRAKRVRKQKSDRQDAHLLLTLLVEDRFPRIWIPNPENRNLRQLLWHRHRLVQMRTRVMNQLHVVALNEGIRLKKALWRPAGRAQLESLELACWSGRRRQDLLDLLDQLTTKIQELTRALEAEVEKRPVARRLMTHPGVGPLTALAFELVIGTPERFGCGKQIASYVGLVPSEESSGDRRRLGHITKQGNSLLRFLLVEAAQVTVRSNPDWRRHFLHLAMRRERRIAKVAMARKLAVRLYWMWRKQWDYQQMRKFGSQGRKSGSHAGVPTASTWYPRLRSSRIIRFVRLRLDFAFTAGPRSS

SEQ ID NO: 85686 - protein, 317 aa, unidentified
MTEVSFPSQVLRGCGIDVHLKVVVATIKGEGIRKETRSFDTFTSSLTELKEWLLQNGITHVAMESTGVYWKPVYHVLEDAIPNVWIVNARHIKNVPGHKTDKMDSEWICKLLLAGLLKPSYIPPKEQRQLRDLTRYRNKLIQHVSSEKNRIMRILEDCNIKLSSVVSNTSGTTATKLIDWLCEGKFITLQDVESIYHGRMSATPEELLKACTGFVESHHVYMLQMIRRDIDQTTVLIDELGAKIRDVLFKYDNAIEQLKEIPGFSDKVVEDLVAEIGFDMSKFPNEKHLASWAGICPDNNESAGKKKAEESPTETNK

SEQ ID NO: 85687 - protein, 350 aa, unidentified
MIIIGADYHPGFQQIAFVDSETGEVQERRLEHPGEAEKFYRDLGAPGASVRVGMEASGHARWFERLLSELKFELWIGDAAGIRAKRVRKQKTDRQDAELILQLLLENRFPRIWVPNWENRDLRQLLWHRHRMVQARTRIMNQLQAVALNEGLRCKKRLWRERGRDQLEAFVLAPWANQRRRDLLELLDRLNPTIAKLTQSIEQEVEKSPEARRLQTHPGVGPLTALAFVLILGKVDRFQCGKQIASYLGLVPMEDSSGNRRRLGHITKQGNSLLRFLLVEAAQVTVRSDPEWRSKYFHLALRRGRKIAKVAMARRLAVRMYWMLRKGWDYEQLNKFGSHAGQPGHRHGVQ

SEQ ID NO: 85688 - protein, 425 aa, unidentified
MSDTGIRLAARIGIDWADQHHDVSLQATGSNQVEAFRIRHTPADLTQWVGELRKRFPDGYVGIAVETSRGPLVHGLLEHDFIRLYPVNPRSLQRFRETFTPSGAKDDRPDADLLRELLVKHRDRLRPWEPDDEETRALGRLVQMRRGTVDQRTELIQQLGAALKEYFPLALTLAGADLSTEMATDFLLKWPTLSALQRARPKTVRQFYYDHSCRRREVVDRRLDQIRSAVPLTTDPAILETSTLLVQALARQLKALALSIAQFDQEIARRFAAHPDAYLFESLPGSGDVLAPRLLTQFGSDRDRFEGAADVQKISGIAPVTERTGKQKKGWVHRRWSAPTFSLQSFHEFARSSIQQSAWARAYYTQQRERGNDYHTAVRALAFKWIRIIYRCWKDRTPYDEDRYVRSLIQRGSPLAARLGHTTAA

SEQ ID NO: 85689 - protein, 418 aa, unidentified
MNEEYAVLVGLDWADQKHDLCWVETDTGKTHTLVLEHRPERINEWVCELIGKYPGRRVAVCLEQSRGAVVYALMGYAEVDLYPVNPVTLSDYRKAFSPSGAKDDPTDAKLLLDLLLRHREALKVWSPDTEQTRLLAGLCADRRKAVDLRTSLGNGLRSKLKEYYPQALSLVGENLFSELCCAFLMKWPRFENLAAARSETIRRFYYAHHCRREQLIKERLDLIANSRPLTTDGAVVKTNRMYVEMIIGLIRSVNRSIQGYDEQIDTLFQEHPDAFIFKSFPGAGKQLAPRLVAAFGTDRDRYKTAVSASTYFGVAPVIERSGKQVWIRWRWHCPKFLRQSAVEFAASSIGFSPWAKLYYQEQINRGKKHHAAVRALAFKWVRILFRCWQNRTPYDENKYLAALERHGSWLAAVVKAAA

SEQ ID NO: 85690 - protein, 313 aa, unidentified
MVESIGIDVSKGKLDVGLINSDQTTENLQCGNDHKSIPSLVKTLQNRQEVRDIPIVIEATGGYHYGITFALIEKGFKRVFVINPIITKKHLSSQIRKIKTDKKDSILLAKIGLLENLHTYAETKQEVLFKRNIRLFHFLKKQLQQVNNRLSSAMSLNIENDFEQEMLKETKKNFEIQLKKVKQVIITGITVEIPPIKGLSELHLKAIISELGNINRFKNHKQIVAYAGLDPSIRESGSSVRGKSKLSKRGSKTMRYFLFQSAWGVMMHNEKYKQYHQKKRAENKHYYTCLSAIARKLLCEIYHNLKEHPYCIN

SEQ ID NO: 85691 - protein, 441 aa, unidentified
MAMRARDEEIVFPNAAGIDVGASSHWVAVPRHAADDPVREFGAMTDDLNAMADWLLACGVDRVALESTGVYWIPVYEVLEQRGLKVWLVDARQMKYVPGRKSDVQDCQWLQKLMSLGFLRAAWRPDGQVCVVRAVARQRDVLITEQASWVQRMQKALVQMNLQLTEVLTDVMGVTGQAIIRDIVAGERDPKALARHRDRRVKASAAEITKALTGNWRDEHLFVLHQALAMYDDIARHLGECDAKLQALLTDLGQSTVDLGKAPRAGSKLRQEFDARQILANWAGVDLTRINGLGLSVVMKILSEIGPDLSRFETVKHFCSWLGLCPGTKISGGKVLSAKTKRSANRVRQALKMAAMSLSHSDSALGAFYRRLCSRMDKPQANTAVAHKLARMVYFMLTRGEDFVDQGQQRYEEQQRQRSVAALKRRAAALGFEINPTTAPA

SEQ ID NO: 85692 - protein, 332 aa, unidentified
MENFYFIGVDVLKKKLNFCVMFEGKVVHEEETSNHQGAIMSLLHHLEEDYGIASGQMLVCAEHTGQYTFPLACACKAVECRLWLENAAEIKYSSGVQRGKSDKVDAKRIAIYASRFQDKVRYYERPTEDIERLKQLESERTLYVTDFAKYKGQMKDQKEYMPKSLYERKMKRLQALMDDLEEAIQSITDEMDEVIASCPVLSRQRELLMSIDGVGRVVATNMIIATEAFTRFDDPRKFNCYAGVAPFSYSSGSSQHSKARVSHRADKVMKRLLHLAAVAVTHRIGGELKKYYERKVAEGKNKMSVINALRAKIVARMFAVIKRNERYKPILS

SEQ ID NO: 85693 - protein, 467 aa, unidentified
MDGKSKSDTQENRKRSHRSLETIQPNAAGIDLGSREHWVAGPPTEDGGPNVERFNTTTPDLYRLADWLKEQGVETVAMESTGVYWIPVFEILDSRGFDVLLANARQLTHVPGRKTDMLDCQWIQLLHACGLLRGSFRPSDDICRLRALIRERNTMVSQRSDWVRRMQKSLDQMNICVHHAVSDITGVTGMAIIRAMVEGERDPHVLAGLRDRRCRNSEKQIAAELTGNWRPEHLFNLRQALKMYDQFCTVVADYDEEILSYVQTLQPDDDKDSPVPPPPSKTKAKEIAKRGQEPLRQALYRFSGFDLTTIDGIGVDIAADIVSELGLDFTVFPSEDHFVSYLRLAPNLSISAGKKVPGKFKAMTCTRISTALRMAALTLRNSKTALGAFYRRIAWRKGASVAVFATARKLAQLVYRLVRYGQAYVDVGARAYEERFNQRRLKSYTRALNEMGYNVEPLPAAEACTVQ

SEQ ID NO: 85694 - protein, 483 aa, unidentified
MKPKRVGKNKKASCRPTPNKWHEMNRKQRREMTRKIQSEDLSLEVVHPDAAGIDIGNQSHYVAVPPTRDSQPVRRFGCTTSELKEMSVWLKQCAIRTIALQSTGVYWIAVYDILEQAGFEVYLVNANQTKNLPGRKSDVQESQWLMKLHTYGLLRNSFRPAQEIRTMRTYWRQRNDLVRAAGRHIQRMQKALTQMNIQLANVLSDVSGMTGQAIVKAILAGERDPYQLAALRNWRVKASGEQIARSLEGNWQEDLLFVLQQEQDGYEFCQKQMAECDQRLQQYLQRLEDRSHGAGLPEEKRKERLRKKKKGNAPQFDLRAELFRMTGTDLTQIDGIDVTTTMTILSEAGWDMSKWKTEHHFVSWLRLCPDNRISGDKIIGKGRLPTNNRVTNALRMAASTLRLNHSYLGAQFRRLRTKLGAPIAIKAMAAKLARLVYRMLRYGMQFVDRGADFYDAQHRQLQIGYLKRKAAQLGFQVIEAPAA

SEQ ID NO: 85695 - protein, 355 aa, unidentified
MSSTKYIGMDVHKESISIAVRNGTGKIVMECLLETKASTILQFFDGLRGDVHVTFEEGTWAAWLYDLLKPRVAKLVVCDPRRNALLQEGNQNDRVDARKLAELLHNNQLRSVYHGDHGLRTLKELVRSYLTITQNLSRVMTRVKAIYRSRAIPCSGKQVYASRHRAEWIAKISEPGVRRRAEFYYQQLDALRLLRQEIRRELLAESKKHKAWKLVCQIPSIGPIRAAILLGILQTPYRFRTKRPLWTYGGVGIETHSSADHGVVDGQLERKKKQVEIRGLNRNYNHDLKNLFKGAAIIATTKPGPFEEFYTTLLAKGMRPEMARLTLARKIATIVLIVWKRGVCFDAQHLKPQAA

SEQ ID NO: 85696 - protein, 410 aa, unidentified
MEPILISCAGMDVHEKKVDVCIAHGPFDKPPKFEIRTFSTMTSDLEELMAWLKKYEVTTIGMESTGVYWKPIFNVMEGEFAIVLANAQRLKAIPRKKTDIIDCKRIANLLRYGLLPNSFIPPREIRELRDLNRTRRKLVGMMTSEKNRLIKVLEAANIKLSSVVSKIYGVSSLALIRSLLEKDKLSREEISQLAKGKLKKKVDQLEKALNGKLTDHHRFLLGMHLENIDYLAKQIKKIDEEIQRKMVPFQKEAKLIQTIPGISEVNASAILAEIGVDMSQFPDAAHISSWAGVCPGNNESAGKKKSGRTQKGNSFLKGALTESAWAASKTKDTSYSAFYRNIVRRRGKKRALVALAHRMLIDIYYVLKSGKPYQDTGAEAVYEITMKRRERSMIRSLEKAGYSVAKAEAA

SEQ ID NO: 85697 - protein, 414 aa, unidentified
MNVIYKCCCGIDVHKMKLVACLKKGNRQEIKEFSAETKDIKEMSDWLLSKKCEMIAMESTASYWKPLVNIFEMKGLDFIIINAREYKNVPGRKTDVADSEWIADLLRHGLLKASYIPTREQRELREATRYRKSLTEERARALNRLQKMLEGANIKITSILSDVRGKTCRSLIEYVLENESDIDKEKAQELVTTNISATIEEVVDAMEGIITPFQRIMMKEVIKHIDELTNRIEDMNKIIDEYMKEYDKNINKLIKIPGIGKTTAQIILAEIGQDMNRFPTEGHISSWAGVSPGNNESAGKRRSGKTRKGNKILKSTLAQCAKSASKNKDSFYYSQYQRITIRRGKNRATIAVAHSMLISIYYMLRDDVEFEDLGANFYNQFNTEKKINSYLKKLKELGWEESKETNQPNSNKTQ

SEQ ID NO: 85698 - protein, 408 aa, unidentified
MLNAVGIDVSKGRSTVAVLQPGGVVIHKPFDVPHKSSDLRDLARYLGSLDGETRVVMESTGRYHEPIRNALSKAGLFVSTVNPHLIRNYGNNTLRKVKTDSADAKKIARYTLDNWVSLREYSVMDTTRTELKTLNSQFAFFMKQKTAAKTNLIALLDMTYPGVNKLFTSPVRPDGSEKWVDYADSFWHVDCVLDSGQKVFAERYQSFCKRHGYDYQSDRPEKLYAQAKELVPTVPKDPVYKEMIQDSIAQLNLVSKHVEELRRKMDELASSLPEYPTVRSMYGVGPSLGPQIIAEIGDISRFDHREALTAYAGVDPGKNDSGEVVHKSGHASKCGSARLRKALFQVMEAMLQLGPRDDDPVSQFLFKKKAEGKPYLVYMTAGANKFLRVYYGKVKECIRNLPASDSED

SEQ ID NO: 85699 - protein, 355 aa, unidentified
MTVTIVEEARPVTCRTAITGGVDTHADTHVAAALDPVGGLLGVEEFPATAAGYARLLGWLGGFGTVCLVGIEGTGSYGAGLARHITAAGIRVVEAARSDRQDRRRQGKSDPLDAVSAARAAQSGRARGAPKGRDGAVEAIRTLMVARRSAAGERTRTINQARALVLTGPDDLRARFARHKPAALITGLAALRPRPGDVAGHATRIALRELGRRAQFLDGQLVRLDELIIPLVTARAPGLLAIYGASPRTAALLLIAAGDHPERLRSEAAWAHLRGAAPIPASSGKVTRHRLNPGGDRQANHALWRIVFTRLGSDPATRAYAERRTAEGKSKAEIIRCLKRYVAREVYRQLRPAVG

SEQ ID NO: 85700 - protein, 337 aa, unidentified
MTDRNLIAIDLAKSVFQVCVFSPTGRVVTNRRHRRAELKTFMAQQRPSLVVMEACYSSHYWGRLLNGYGHEVRLIPAQHVKAFVRGNKNDANDAIAIGEASLRPNLRAVPVKTIEQQDLQAVHRIRARLMKNRIALSNQVRGLLSEYGIVFARGHKALVENLRGLIEERREDLSVRMQSELVELLEEYEQLCTRLRRIDRQIDQHAHGNALCVRLMTIPGIGVLVASALVAAIGNAAQFSSPRELAVWLGLTPRQYASGDRNHMGAITKRGDRYLRRLLIHGARAALHRRRHDDRLSRWAKAVAERRGNAKATVALAHKIARLAWVLLQREQSYRSL

SEQ ID NO: 85701 - protein, 386 aa, unidentified
MRSVGLDLGARHIAFCEVVDGVVVSRGTVRRLSELERLLGPQTEPARVAFEACREGWHVHDVLQSWGKEPVMLDTTRVRQIGVGQHGRKNDALDAEAIAMALDAGRVPLAHVLSPERRALRARLSVRSELVDMRARQVTVLRGLARAVGILLPTSSTESFLEKLEEAPLDAATRELMAPLVATLETAQKQLALVDDELAQLAKRDPVISLCATAPGVALIVSAVFVSVIDEAKRFRSAHAVGAYLGLVPGENTTGGKRRLGGITKHGNTHARAMLVQSAWQILRAGDKDDPLRCWAMHISKVRGKKIAAVALARKLAGVLWAMWRDGTVYDAGFQAQQSTKGLQGDAQDSVLRAQAMARAAKKIQRRERKPTTLSRREKTSRENTM

SEQ ID NO: 85702 - protein, 386 aa, unidentified
MKTVAGLDVHKDSVYLCILRENGEKIERVFGVLTPQLDSMRDFMAENEVSEVAMESTSVYWIPIWRVLVDSFELKLVNPYFIKQLPGRKSDVKDAQWIAECVMKELIRGSFIPPPLIQQLRLYDRRIFELNAELGRKYSKIDAILQRCNIRLSNYVSNTDCKSYKNVVKRISEGVTSPQELLMLVHKRIINKHGEDTILAALTGVVSEAETDMLAQYVAESALLEDNKNKCIEKMREICNREFEEQMKNLQTIPGVSERSAQTILAEIGPDVNAFPSAKHLVSWCGFNPRNDESNKKIKSNKITHGNRFIRVASIQCAWAASRTKECYFSKFYAFHTQVRKKFKLKVVVAVARKVLVCIWHILKFNVSYKDFEPQKSVTKDCTQFA

SEQ ID NO: 85703 - protein, 356 aa, unidentified
MSPLISNTGLARVLKFVKLGTTLLNTVEIQYMQTIYHICCGLDVHKDTVFACILKTSHSSKSTKKEEAIKEIREYKTFPDDLIMLRKWLESENCRNVAMESSGVYWFPVYETLESAFNGTMELLVVNARHMKNVPGKKTDIKDSEWIAKLHRFGLLKGSFIPPKNVRELRELTRYRKSIVQDITKQKNRIEKTLQMAGFKLSTFLTDIFGVSGRNLISILIKKGFITKSDVDSQTKRISAEKKAEIKRTLNSRLTTHQQNVLSIQITHLDSQYAHLNTIEQAIEKLLVPFEYAIKNIDTIPGISTTAATSIIAEIGNDMSKFLTAEHICSWTGLSPGDNMSAGKKKAHIFAMVTPT

SEQ ID NO: 85704 - protein, 494 aa, unidentified
MKTEQPGKNQKTQKSNNRSKQASSPSSPTPGKWGEMNRKQRRAMMRKMQSEDVTLEVVHPDAAGIDIGNETHYVAVPPSRDPEPVRCFGCTTAELKSMADWLKHCRIRTVAMQSTGVYWMAVADILEEAGLEVYLVNARDTKNLPGRKTDVQESQWLMKLHTYGLLRNSFRPSPEIRTLRTYWRQRLDLVQAAGEHIQRMQKVLTQMNIQLADVLTDISGVTGQAIIKAILDGERDPRELAAYRDCRVKASEEEIARSLEGNWQDDLLFVLRQEQAGYEFCQKQMGECDRQLEQYLQQMEDRSQGAALPEETRKGRRKKKKGNAPRFDLRALLFRMTGVDLTQIDGIDVMTAMTIFSEVGWDMSKWKTENHFVSWLKLCPDNRISGGKIIGKGRMPTNNRATTALKLSASTLRESKTYLGAQFRRFRSRLGPPVATKAMAAKLARLVYRVLRHGMKYVDQGAEKYEFQHRQHQINSLKRKAMMLGFQVIEAPAA

SEQ ID NO: 85705 - protein, 466 aa, unidentified
MMTKQVEEILDEPHEQIVQRVCAVDVGKDSGTVCVRVPAASGTGRRVSKVWDVPARTGAVLGLAAQLSDQGIEKVTLESTSDYWRIWFYLLEAHGLDVQLVNARDVKNVPGRPKTDKLDSVWLAKLTEKGLLRPSFVPSAQIRQLRDYTRMRADLTGDRTRYWQRLEKLLEDALIKVTSVASRIDTLSVRDMIEALIAGQRDPRVLAGMARGRMRLKHADLVESLTGQFDDHHAELARMLLHQIDTLTDQIDVLTARIEALLASLPAGHTPDPDRPAPDGQARPGTGANAPADEAAQRRTPPTAADMIKILDQIPGIGPSNAQVIIAEIGLDMSRFPTAGHLVSWTRLCPRTIQSGKRSTTGKTGKGNRYLRAVLGEAAATGGKTQTFLGERYRRLIKRRGKLKTIVAIARSILVIIWHLLANPGTTFHDLGVDFNDQRIDIGRRTRNHVRQLEALGFNVTLTAAA

SEQ ID NO: 85706 - protein, 373 aa, unidentified
MPKYSTAFGMDVHLRSTTVCALDADTGEAVTRRFPGNPWGEIAGWMDGFPGPSLAAYESGYLGFAPQRELAGLGVECVVAAVSKIPRSAADSASKNDRNDAARMAKAILAHDISPVWVPSPEVEGIRDLAGAYDGATARLATAKQRLLAFLARRGFVYGGTTPAGNPRKYWTYDFLRWLDKVRPEDDGGVRALTALRNEVEAAAEARADLLSEYRAAVNASPIAAEVAALQSIKGCAFALAAAFSAEVGDFTRFRSGRQVTAYFGLAPSQRSSGDSVRLGGISGAGNALVRKLAVEGSWCYAAARHQPKLMPRGTGVPLEIRMHGRKGSERLLRRREEMLARGMPAAKANAATAAELVRWLWALGMMCREGAE

SEQ ID NO: 85707 - protein, 360 aa, unidentified
MTVIGVDAHKATHTMVGVDIGGRKLAEITVKATTEGHLKALGWARREFGADLVWGIEDCRNLSMRLERDLLDAGQRVVRVPPKLMARTRASARSRGKSDPIDALSVARAVLREPDLPVASHDPVSREFKLLVDRHDDLVSHRTALTNRLLWRVHELDPLHAPKAGSLSRDKHQEALRIWLETQPGLVAEIARDEVAEIIAITEDVKVLERRIAARVQVAAPSLLTLYGCAALTAAKLVGETAGIARFRNEAAFARHAGVAPVPHSSGPKNVRIKAGKGGNRKINAALYRIAMTQIRHGAPGEAYYRARRETGDTHAEAIRRVERRIVRRAFRLLQHDQPRTFGVPHDLTPSPQQTPANIA

SEQ ID NO: 85708 - protein, 335 aa, unidentified
MKHYAGLDLSMESTQVCIVDDNGRKVVSEKVESSPEAIAMMLERYGPLERAVIETGRMSPAICLGLRELGVPVVCIDARQAHQSLKAMKANKTDPHDAAGLAQLARTCFYKEVHVKSPAAHGVRSVITARSHLVEARVRLDNTIRGLCATFGYRPGAGQGKAFLERIMQAAHIPGLGDAIVSLLSVRAELVEQIKEMDRRLRVIASQSQACEILMTIPGVGVQTSAAFAAAVDEAGRFRQSRNAGAYFGLVPRRHQSGELDWTGRITKQGDSTVRKLLYEAANSILTRSRETFALKTWAMKIAKRRGLKKARVALARRLAVIMHAMLRDGTLFQA

SEQ ID NO: 85709 - protein, 348 aa, unidentified
MQSKSQIQSIGIDLGKTTFHLVALGNRCQVVVRKKFSRQQLLLYTANLPSSLIGMEACVGSHFLGRALREQGHEVRLIPAQFVRPFVKSNKNDYRDAEAIAEAVERENMRFVPIKTEDQLDVQALHRVRERLVSRRTSVINQIRAFLLERGISFAKGPASLRRQMPEILENAEEKLTTRLRRLLDFLWQEWKHLQLQIESLSEDLELIASSDQACARLQQIPGVGPLVATAVVSAIGNGAAFHKGREFAAWLGLVPGQWSTGGKTKLLGISKRGNPYLRKMFIHGARAVVLRAKREGSYLGQWMKSLEGRAARNVVIVATANKLARISWAVLSSGENYHPMPAVAVAS

SEQ ID NO: 85710 - protein, 366 aa, unidentified
MEMYIGLDVHSKKTVYVTQDENGQVLGQGFFMTSEEGFINFLGKEHVQTGTKIALETGTQATWLAEILSRHGMVPFVIDAREVRIKAKRIRQKSDLRDAFELCDGLRRGIYTTIVWVPGHEIRHLRRVISRRRHFVNLSTSQVNAVKYILRSTGLAFPSLTTWHAWEKLINSLRPVDYQGHVAMHGEIWRMVQENINSLDRDLKKAVQPFSKVVERLQTVPGVGILTAATYVAVLGDPNRFPDSDHAASYIGIVSSSYDTGDKVRHGAITKRGSAELRAMLCEAAHHASNPRHPLNPYFRRVAAKGGYKKAVVSVAHRLARILFRMWQTGQDFRVEKLNVVADEHLRSKIVYFRIKRPAEQMASVS

SEQ ID NO: 85711 - protein, 340 aa, unidentified
MQYLKLVAGSDISKDKFTSRFGKLDIKTNQTITEEKEFPNNMKGFKQFLAWIKKLVSGLKQTELPELQFVMDATGVYYENLAYFLVENGMFVSVVLPNKIKYFIKTTNYKSKTDGIDALAITQYGLEKTLPKWRFPGVQFRRLKELTREYHTIVEDTTRLKNRLHAKNHSYDPNPGTKRRIMEQIKFFNRQKKEVLKQINEIIEKDEELKSKINKITATKGIGLITVVSTVMETDGFALVENQKQLTSYAGYDIVHNQSGQKSSKTHISKKGNKHLRRAVYMAAVSASYRNDIYKKFYIRLCKKKEYKRVGIVAIARKILLLIYTLWKNDAAYDPNYKRA

SEQ ID NO: 85712 - protein, 372 aa, unidentified
MNYNTVYVGMDVHKESFSLCAYTIEAEKASHYQRTEADYKKVLNYLEFLRTIYGDDANFICGYEAGCLGYTLYHQLTANNVKCIILAPTTMLEQRSKKRIKTDKRDAEIIAKCLAQHNYSPVHIPTAKDEETKEFLRMRDDHKLALKKVKQQILAFCLRHNYRYDGNSHWTAAHLKWLKALTPEALYKEILDEYLLTYQTLSDKLERLDKRIEELATQDEYKEAVKKLCCFIGVKTHTALSVLVEVGDFKRFASAQHFASYLGLVPGEDSSGDDQNRLGITKAGNRHVRLLLTEASQCYARGQVGFKSKELKARQSGNTPAVIAYADKTNERLRRRYYKMVLNKCKKHNVAKTAIARELACFMWGMMTDNIA

SEQ ID NO: 85713 - protein, 316 aa, unidentified
MDIASRSLEARVGQQGAAGSFANNPEGIAALEAFCRAHQVELVAMEATGGYEQQSFAQLSEQGLPVAILNPRAVRQFAQSMGSLEKTDRIDAGMIAWYAEVKKSRPVCPAPERQQHLRALVTRLRQLTEMRVAQVNQQRLVTDRAVQSSFKKLLAVLARQIRELEQRIAALLDQEPLWRELNQAFRTIKGVADRTVARLMAEMPEIGVLSNKTISKLAGVAPLARDSGQHQGRRAVRGGRATVREILFIVASVVGRYEPDFIAFQQRLRAAGKPSRVIRIALAHKLLVRLNAKAREVRQRLQLSNPLPPAVPAGSL

SEQ ID NO: 85714 - protein, 408 aa, unidentified
MKILHRRCAGVDVHSANVVACIRVMTKGKIRHEVRQFATSTRDLLALRDWFEVEKITHVAMEATGVYWKPVWHILEEKFTLILANAAHVRNLPGRKSDVNDATWIADLLAHGLIRASFVPPAPVQELRDLTRTRTQLTRDGARHIQRIQKTLEDANIKLTEVISDIVGPSGRRILKAIVAGETNALKLAALGSKRLKCSRSELIAALEGHVTDNHRFLIGQHLGMLEDLERRIEVFDKRIADVVAPFCHLVALLLTIPGVSRVSAEIILAEIGFDMTLFPTAGHLLSWAGMVPRLDESAGKRRSTRVRHGAPWLKPVLAQCGWAASRSRGTYLQAQFFRLRARRGPKKAAIAVAASILTAVYHMLKNHVPYHDLGPDHFVKRNPARIAAKLAQRIKDLGSEVQYSAAA

SEQ ID NO: 85715 - protein, 356 aa, unidentified
MIKRNKLDFTGQPIYVGLDVHKKSWSVSISTKYGQYKVFSQPPETDQLVHYLRNHFPGAQYYSAYEAGYCGFWIHDQLKEKGIGCLVVNPADVPTKNKERKTKRDRIDCRKLSRSLRNGDLEGIYVPPRGRLEDRSLIRTRLSMVRKQTRCKNQIKALLLFYGVVIPEEREMGHWSRRFIRWIEGIGMERASGDMALQIHLEELCHLRQIIAKLDRAILALSRTEEYHPWVSLLRTVPGISTLTAMILLTEIGEISRFPSIDELTSYVGLIPDTEASGEKEHIGGVTQRSHPQLRWLLIEASWRAVQKDPALMMAFDGYCKRMRKTKAIIKIARKLLNRIRYVLKNRSEYVPAILE

SEQ ID NO: 85716 - protein, 401 aa, unidentified
MPTIWAGIDAGKRTHHCVVLDQTGSTLLSTRVDNDETALLALIDVVVGIAAGGQLCWATDLNAGGAAMLIALLAAQDQQLLYLPGRIVHHAAATYRGDGKTDAKDARIIADQARMRTDLQPVRRADPIATDLRLLTARRTDVVCDRVRAINRLRETMLEYFPALERAFDYSKSKAALTLLSGYQTPESLRRIGVARLTAWLKARGCRNSAAVAQAAVDAAHAQRSALPTQRVGALLVARLAAEISAIDDELKQIETDITDRFARHRSAEILTSMPGFGPVLAATFLAQIGGDLEGFDSVDRLACVAGLAPVPRDSGRISGNLHRPRRFNRRLLRTCYLAALSSLKNSPASRAFYDRKRAEGKSHKQALIALARRRINVIWAMLRDHTHYQEPQPANAVLAA

SEQ ID NO: 85717 - protein, 323 aa, unidentified
MERVVVRKAISRQKFLEWFANLEPYLVAMEACSTAHYWGRKLHALGHEVRLIAPQFAAPYRKGGKHVKNDRLDAEAICEAAGRPYMRFVAVKTPDQQNVLVLHRMRAGFVEERTALVNRLRGELVEFGVFLPQGIDAFRAHFVEALEDGATELNGVARTALARGWEHLQALDQQIAWCDAQVATHVKHDSNAQRVMAVIGIGPLTASATVATVADARLFKNGRQFAAWLGTVPKQASSGGKTRLGRITKQGNTYLRTLLFQGARSAVTSAHRRTDRLSRWIVQLQARVGWYRTLVAVANKHARILWAILAKGERFDPSYVSTP

SEQ ID NO: 85718 - protein, 343 aa, unidentified
MKKKLFIGIDFSKETIDVSFFDEEQAQKEEFHYSKFENSKDGFTTMLKWIKSLSAVNVQEWVFCGEHTGLYSIELASFLVKKKFFIWLENPLQINRSSGIKREKTDEVDSLDIAWYAYRFRDRAKEYQLPDKSFFALQNLLAFRERLVKNKVSLQVSANETRRVHKRDKTASYIYEHSMREIERLDKEIQNAEKQMLEIIEKDEKLAENYYLVKSVKGIGMINTVTILVHTQNFTTFENSRQFASFAGMAPFEDSSGTSRKRGKHIKRLGTNKEMKALLTQAARSAVVYDEELRNYYQRKLAEGKLQKVVINNVRNKLLHRIFAVVAKKQPFQKNYMNPLSVA

SEQ ID NO: 85719 - protein, 363 aa, unidentified
MKNETACVVGIDVAKRKFDIALLINNKIKTKVFDNTAAGHKAFEDWLIERSAMPGQTHLCMEATGPYSEVLATKLVTDGWQVSVVNPARIKGFAQSELARNKTDRADATLLVRFCMAMRPNLWTPPPIEWRELRGWVDRLQALKEIHQQESNRMEAHLASEQMQLVQDVQIHLDWLSKQIKELERSINDHIDRHPDLKRDAELLGSIPGIGDTTVAKVLAYAGNIRRFASAKALAAFIGVTPRQRLSGSSVKGRTMMSRTGHGDLRRALYMPGMVARRHNPVLKIFGDRLSAAGLAPKAVIGAVMRKLAHLIYGVIKSNPLMQTLIIQHLQFKTVSDPICAIAPKAARLNFLMRRVEFLLKAA

SEQ ID NO: 85720 - protein, 375 aa, unidentified
MKEKVRFLGLDVHAETIAVAVAERDGEVRSLGTIANRAESIRKLVKKLGPVEQLKACYEAGPTGYVLYGQLAELGVACEVIAPTLVPMKAGDRVKTDRRDAERLARSHRSGDLTAVWVPDEGSEALRDLVRAREAAKADQLRARHRLSKFLLRTGRRPETKIKLWTGVPMTWVRQLRFEHPAQESTRLDYLHEVEHIAERVLRLEQAISDAIKLATPEMQEVIRGLQALRGIAEISAVTIVSELGTLSRFENARQLMGYSGAVPSENSSGKRVQRGSITKAGNAHLRRIAVEAAWSYRLRPGIGPRLRKRQENVPEEIKEIAWKAQIRLTKRYARLAAAGKDQRKIVTAVGREPLGFIWAIGIKAESAAMQKVAA

SEQ ID NO: 85721 - protein, 318 aa, unidentified
MTQDLFIGIDISKAKLDVAASPGEHSWSVSNTEEGIQELIAKIRQIGTPKIVLMEATGGFERRPLAMLGAAGLPVAAINPRNARDFAKSLGLLAKTDKVDAKALALFAEKIQPPCRPLPDAQTRALQDLIVRRRQMVDMISAEQSRLAIVENPKVRRELVQHIAWLKKRIHIADYDLDQAIKNSPAWQPKSDLLKSVPGVGPVTTSTLLALLPELGALTNKQAAALVGVAPFNRDSGTMRGRRCIWGGRTSVRNVLYMATLAATRFNPTIRAFYQRLCKLGKLRKVALVAAMRKLLGILNAIVRDQTPWRSDNVEISS

SEQ ID NO: 85722 - protein, 348 aa, unidentified
MKILALDLGKYKTVGCAYEATSGRHRFQASFTTPTGLAQLVSEVKPDRVVIEVCNIAGWVCDLLRGMGVEVQVANTSEDAWRWRKVKKKNDRCDALKAAQLSAVNQLREVHIPHIEVRQWRALIAFRQQLVRRRGKVKNHIRDLLLSEGQILPRGAKCWTQLGLEKLTALAKPFSEIGLHELWRGQLDIELRQLRELQHEIDQVEEKLDVIAKADPRVALLRTIPGVGPRLSEAVVALLDQPERFHKAREVSAYVGMVPKELDSGETERRGRITKHGSRLVRSLLVEVAWAGLRYNPWVRATFRRISGGKKSRKKIAIVAVGRQLLVRCWAMLRDGTSWRPPALPGIV

SEQ ID NO: 85723 - protein, 401 aa, unidentified
MISVGVDVSKGKSTVCVLKPYGEIVCSPFEVLHVEKELEGLDSLLQKLDGEIRVVMEATGVYHLPILSFLQEKGYFVSVINPYAMKKYAKDNSIRGAKTDRLDSTMIANYGIEKWYKLQKHESDEEIYAELKLLGRRYRYYMELHVKALQELTHILDYVMPGIKKLFNSWDEASGKDKLSDFVERFWHFDLITSMSLDEFVDEYLIWAEEKRYHRSKSKAETVYELASGGIPTLSSSTPSTKMLVQEAVTVLRAVDNSLSLILSRMQELAKSLPEYLTVRAMGGVGDVLAPKLIAEIGDVRRLHSAKALIAWAGIDPPPYESGQFVGSRRRITKRGSSTLRKVGYEVMRVLKSHKAPKDDTVYNYILKKESEGKSKKHAKIAGLNKFLRIYYARVMEVYQQ

SEQ ID NO: 85724 - protein, 358 aa, unidentified
MTNLAEKLDFSGHTISCGIDVHLKSWTVSLYLGKQYLKSFVQSPPSVEGLWNFLLTNYPEAHYECAYESGFCGFWIQRAFAARSISCIAVNAADVPRTDKGTKNKNDRNDSRRIAAALQAGQLEGVYVPDPELEADRQLVRLNERYSNDLTRSKNRIKGLLRLMGIEIPQKFGKANWSGAFVKWLKAVSCGEPSIRAVLDRQLSIMEAIKVQKLDTLREMRKLMGKVRYRTISGLLCSIPGIGPVTAAVLIVEIGDISRFEKFDRLNSFVGLCPMQHSTGENDRKGSITTRQHRRLRYILVEAAWVAVRTDPALTLCYSRWTARVGSRRAIIKIARKLLSRIRHVWVGGATYVTGLVK

SEQ ID NO: 85725 - protein, 418 aa, unidentified
MSKNRAVVIGVDPHKLSVTIEVVDGDATLLGQGRYRTDKAGYAAMRRYVSQITSRVEDRTGAVEGANGAGRSLAQRLLADGEIVVDVPAKLAARARLLNTGHNRKTDAVDAHSVAMVAVRTEVGAGGLRVLSVDGELEALRMVSDRYTELSKRRIQTVNRLHRLLAELAPGTRKKDLSALQAKAILARVRPRDLAGKTRRRMAVEEVADLVRVDAQIKAIKAELKTAVKDRGSTLMDLSGIGPVGAARILADVGDVARFADRNRFASWTGTAPLDASSGEQIRHRLSRAGNRRMNHVLHVAAIVQLRHDTPGRAYYRRKLAAGKTPLEAIRCLKRRLSDAVYRQLLTDAGQRAGAGRGEGEGAGPGGHCGATLQSSAVDLHPLIDTSDQPLPGPAEPTLQPPADARKTSARRQLATPA

SEQ ID NO: 85726 - protein, 355 aa, unidentified
MESVKYIGFDVHQTTISVAVLNAEGQLVMQSVLATHAAAILDFLHGLRGTLHLTFEEGTHSAWLYDLLVRQVARVVVCNPRKNALLKAGNKSDTIDARKLAELLRAGLLSPVYHGESSTMTVKQLGRSYAALTEDTTRVMSRLKALYRSQAIACAGKKPYGRRHRGAWLAQLREAGLHRRAERLYQQFDILQQLRREAKQELIVECRKHEAAKWLRTVPFLGPIRAALLIGRVQTPHRFRTKRQFWAYCGLALETRSSADYRFSDGQLMRTKKPVFIRGLNINHNHDLKNLFKGAATAASAMEGPFRLFYEGLLGKGMLPAMARLTLARKIAAIALPVWKKGEVFDAERLKPQAA

SEQ ID NO: 85727 - protein, 442 aa, unidentified
MKKEDAEASPFIDRSRPLSRRSGCFSAWPYPPLSPGSFYSGVVRGDIFAGSSEGMTLNLGGVVQAKNHLPPKEVLSMPSSNVKYIGLDVHKEAIAIAVLNGAGKLVMESIVETKASTLLDFLHGLRGELHVTLEEGTWAAWLYDVLKPHVAEIVVCNPRHNALLKEGSKSDKIDARKLAELLRSGMLRAVYHGENGLRALRELVRSYEVVSKDVRRVMSRLKALYRGWGVPCGGIQVYGRRHRQQWLEKIREAGVRRRAELFYQQLDALQDLRHTVRGELFVESRKYQAVKILRQIPFIGPLRAAELVALMQTPQRFRSKRQLWTYSGLAVVTHDSAQYRYVHGQLQRAKKPQQVRGLNRNHNHAMKEILKSAAESASRRAGPFQDFYQGLLAKGIKPELARLTLARKIAAIILTPRRSRDWAGCKSHYIVLSKRNGRSVFS

SEQ ID NO: 85728 - protein, 445 aa, unidentified
MVRKAKKQHLRVIHPRCAGIDIGSREHWVAVDPERCQDSVRCFTTFTDDLLQLAHWLNSQEVEVVAMEATGVYWIPLYELLDARGFDVQLVNSRATRQVSGRKSDVLDCQWIWQLMSHGLLKGAFRPGEAVCALRSFVRQRAGKVQEQSRCIAHMQKALTQMNLQLDNVVSDLMGKTGTAILRAIVAGERDPQKLAQLRDRRLRADEATVARSLHGNWRKEHLFALTQALAHYDFLNEQIGACDQQITQALSALPALSKEEAPKPLKPLRSPHRTAAQQKELHQALHAVMGVDLCAIPTLGIDTVLVLAGEIGADLSRFPSEGHFCSWLSVAPPTNISGGKTLSGRKPKVFNRAGQALRQAAANARRSESYIGACHRARLARMDSAKAIKATAHQLARLIYAMLTKGQAYVEKGIETYETLSKDRQLRALQRKASKFGLTLSEAA

SEQ ID NO: 85729 - protein, 341 aa, unidentified
MKSFIRIGIDLAKNFFQVHAIEREGAPAVARKLSRGKVLGFFAQAAPCRVGMEACGSSHYWAREIQALGHEVVLIPPAYTKPYVKRGKNDANDAAAICEAMSRPDMRFVPIKSADQQAVLMLHKTRELLVKQRTMTVNALRGPLSEFGLIAPKGIHRVKELLALALADETLPEEAKQASAMLASHSGGLDEKIDDLEKTIARASGKNQTSQLLDEIPAFGPLIASAIAALIPDPSVFRSGSDFSASLGITPSQHSSGGKDKLGAITKKGNRYLRKMLVVGCTSVLRVAHKHKGALAEWIVAMRARKPERVVAVALANKLARIAWAMMSTGESFRTELYTKA

SEQ ID NO: 85730 - protein, 479 aa, unidentified
MPATVFAHVEKEGHSMAAVMIGIDPHKASHTAVAIGAAEEPLGQLQVRASASQAERLLGWAAAWPERAWAIEGAGGLGHLLAQQLLAAGERVLDVPPKLGARVRLLATGDTNKNDPNDARSVAVAVAALRSAGVRAARRDDHAAVLRVWSKRHRDLGRTRTQVVCRLHAVLCDLVAGGASKHITAAHAARLVELITPSGAVEAARCELAAAFTEDLRGIDDRIRRTRKKLAIAVQAAGTSLTGLFGVGPVIAAAVIGDVRAVARFPGRDHFAAYNGTAPIEVSSGDRKVYRLSRRGNRRLNHAIHMAAVTQIRHRHSEGRAYFDKKLAEGKTRKEALRALKRQISDAIFARLQADARRAAAGVKGPGGQPGNDSDSSAAGSHPAHRLFGQATPGPRHHPTTAARIRGRAGRSPAAATLPPATPQVQVERPQRSEDERPGGAARRRPHSAAGKATRPSSAVKPQRSKTTSRAAKKTGQTP

SEQ ID NO: 85731 - protein, 353 aa, unidentified
MKITRVGLDLAKRVFQVHGVDELDRAQVRKQLSRADVLEFFAQLPPCIIGMEACGGAHYWARELTKLGHTARLMAAQFVNPYRKSGKNDINDAEAICEAVGRPNMRFVPIKSDEQQSVLTMHRARTLSVSNRTAQVNQIRGLLGEFGLIVPVGIKRLRKQLPEILADAENGLPHLARQILADLLEEWHHFDERIEHYDSELAQLASHSEPARRLMALDGIGPITATAVVASVGNAQVFKSGRQFAAWLGLTPRQYSSGGTTRLGRITKRGDRYLRMLLVHGARARLRFVARKTDPKSAWARRLKERRHVNVAAVALAAKHARIMWALLAKGTSYCSAGVNDCRMSACALNEMV

SEQ ID NO: 85732 - protein, 414 aa, unidentified
MEDILECCCGLDVHKESIVACLLKGPVRAELKPQSEIREFGTQLKDLIALRKWLEKHECHYVAMESTGIYWQPVYAVLETALSDEMRLLVVNARHMKNVPGKKTDMRDAEWIATLLRAGLLKGSFVPERDIRDLRQFTRYRKALIRDITSQKNRIEKLLQSNGFRLSSFLSDIFGSSGLAIMHQLVQVGSISSQSMDLCLKARARQKAYEILSSLNGTLSVPQRKLLKMQLAHLVDLQANLQEVEEEIHDGFSQFQSPIELLDSIPGIDLTAAYAILAEIGKEMSAFPTAQHICSWAGLAPGNHKSANKQKRQRVTQGNNYLKTILCEVAWVIASHKKLYLSGWYWRLKQHTDAKRAIVALARKLLVIIYTMLKSNQPYNEQKFVERKNASEQKRVKRMVYELSQLGYAVSLAA

SEQ ID NO: 85733 - protein, 421 aa, unidentified
MLGVGIDWAEEFHLVALGSPGAGVISVLRVEHRPAAVSALMERIAGLEADPAEVRVVIETRHGLLVEALVEAGYTVLPVNPELVSRRRGPARKKDDAEDARICCLLALDRHAGLRQLIPHDRLGGELRSIARDDERACRDERRLLNRLRADLIVTFPAALAIAGEDLGATRILRLLERWPTAATLAAASREEIIEFGRAQRTGYLQRFADRIAAALAEDHFTAPEHLVRAKIDTIRLTARQLLLIDAQRRAWEKQMGELLLGTPGQLPEDQPGQAFPGGGIYLSFPGLGYRLAARIAGEIGEHIEQFTTPNSLQCYAGRAPVTRRSGKRDLVVAHRLACNRYLADAVHKWAFASLRRSAWAREFYDAQRARGKNHHAALRALGNRWLEVLWHCLTKNLPYDETVHAANRNRALSATIPTAA

SEQ ID NO: 85734 - protein, 381 aa, unidentified
MTTAATHHEHENTTEATLFVAFELSEKTWKLGFTTGHGQKPRERTVTARQQERVLDEIAHAKRRMGLPESAAVVSCYEAGREGFWLHRFLQAHGITNQVVDSSSIEVNRRRRRAKSDGLDVRKLLSMLMRYHHGERQVWQVVKVPSVEAEDQRHLHRDLETLKQERASTMTRIEGLLSSQGLRVTSLTKLPEQLDALRLWDGSPLPPGLRRRVLRVYAQYTFLSEQIAEVEAARRAQLQTSSEASIDKVRQLMQLKGIGINGAWLLVMEFFGWRAFKNRREVGALAGFTPTPYQSGESAREQGMTKSGNRHVRWMTTELAWSWVRFQPGSALSCWFRERFGGGGKRLRRIGIVAVARKLLIALWRFLETGVLPAGAVLKEG

SEQ ID NO: 85735 - protein, 325 aa, unidentified
MDPDHKHGIAEKMSDNLPQTIGIDISKASLDCHVHPVGAERQFANTAKGHKALIAWLRQWPVERIAYEATATYHRALEAALADWPCVKLNPERARRFAQATGTLAKTDRIDAMLLARMAATLQPPVRPARSAQQAQMAELINARDGLVRDRTALKNREKNLTIAFLKRQCRQRLEQIDRHIEALDTEIANLIAADAALARRHEILTSIAGVGTLTANQLIATMPELGSLENKQAASLAGLAPVARQSGQWKGKSFIRGGRANVRQALYMPALIAGRYNPDRKAKYQQLVTAGKPAKIAITAVMRKLVVTANALLKADRCWTQSPA

SEQ ID NO: 85736 - protein, 349 aa, unidentified
MDRFIGLDVHMTSCTVAVVSASGKRLRDFPVETHGETLIDAVKGVAGKRHLVLEEGTQSAWLYDLLRPHVDERVVTSVRGSRGPKSDAKDAYGLAEKLRIGGLDRIVYKAPSEFRSLRQLAVVHRALTGDLVRVRLRIKSQYRSRGIPSPGKDVYGKRHREEWLAKLPPSHCRSTKRLYTHLDFLIELKAEAEKDLIQEAHRQPVARLLETAPGMGPIRVARLLPIVVTPHRFRTKRQFWSYCGLSVVTRSSSDWVSSGRGWVRAPVQQSRGLTREHNRVLKDVFKGAATTVVIGGGDDPMYQAYRELTSNGTKPNLAKVTLARRIAATVLRMWKDEEVYQPKRVHSAG

SEQ ID NO: 85737 - protein, 347 aa, unidentified
MEFKHFIGIDVGKTELCAASIDQAAKAASQALRHPNTREGIEGLIASLAGTAPGEVLVLVENTGSYCELVVETLHAEGFFVWLAAPDILQKGLLKLNRLKDDPHDARMLAMVACTHCKDAVRWEPVPEDVKRLRSLHRRRSQIIRDHTRKCCQLHAESSRAHPDPFIVAQLKEDIKHEGICIQQVNEEINRLAAGSPLIHRLVTLLVSIPGIGRENALNIIIITECFTKIISFKQLAAYICTAPYAKVSGTSGRQSRRVSKVGDRKSKSLLYLGVVSTATRSNGFWHQDYIRYTKAGKHHLVAINNIINKVIKIIYAIVKHKDRKPFDKELYFKNRRLSTAPHLHLS

SEQ ID NO: 85738 - protein, 384 aa, unidentified
MSLDRTDTPAIGEHATVYVSFELSKAKWKLGVILPGSEKMSRYTIAGGDLAALQARLAAARAKAERGGRPARIVSCYEAGYDGHWLHRWLTQQGVVNHEIDPSSIEVNRRARRAKTDRIDLEKLMRTFLAHLRGEPRVCSVLRVPTVEDEDRRRRTRERERLINERTAHTNRIKALLHGQGIRDAMPLKAGFVASLNELRTGDGRRLPPDLKAEIVREHQRLCLVVKQFAELEAKSAAERRTAEAASAPAKVVHLAKLKGLGAVSAQVLVNEVFYRSFDNRRQVGSYLGLTGTPFDSGASRREQGISKAGNSRARATAIELAWLWLRHQPDSELSRWFRQRVGDVKGRLRRITIVALARKLMVALWRYVETGVVPTGAVLRPSC

SEQ ID NO: 85739 - protein, 436 aa, unidentified
MTLINFVAANQKYYAFNLLSVFIMVFWSVQYLLQHLLVQTQVSHQLLQPLILILQLPQTPQFRHARPGKFFLPVNGMDYFLPLRLTVRNVLTRRITMNIVFLGIDLAKNVFQLCGLNQAGKPVYTKRTGRKELLQTLANIPACLIGIEASTGAFYWQREFEKLGHKVKVISPQYVRPFVRGQKNDGNDAQAIAVALMQPTMQFVPPKSPEQQDIQALHRARQRIVNHRTATVCQIRGLLLDRGIPIGSAVSRARRAIPLILEDAENGLSSRMRRTIAELYDLFNDLGRRIHFFDKEIETVFRQSEACPRIAKVKGIGPKTATAVVAAIGKGTEFKNGRHFAAWLGLVPCQHSSGDRQVLMNMTKKGDKHLRTLFIHGARAVVRVATNNNDGHMNQWVNQLKERRGFNKTTVAVANKNARIIWSMLRNDTGYQVVCN

SEQ ID NO: 85740 - protein, 433 aa, unidentified
MQDVQDEPLFCERVAGLDIAKAGAEVTIRVPSDTTAGRRQQETRAFATTRAELESLGDWLTCWGVTRIGMEATGDYWKPVFFVLESRGFDCHLYNAAQVKALPGRPKTDRADSIWLARITERGTVCSSFVPPEPIRRLRSRTRYRRHLTQARTAEKQRAEKLLEDGHLKLSSIISDIHGASGRDMLDALAAGERDPKVLAQLARGTMRAKIRRLEEALDCAFFTSEHAGVLAMMLTTIDHYTTQIDSLTAKIEVLTRPYLHQIAQLDEIDGVGTICAQDIIAETGTDMTVFPTAAHLVSWAKWSPQVKQSAGKRKGSNATGRGNPYLGAALGEAAISAGRTQSFLGAKYRRLTRRMPKKKALVATGNSMLTIIHALISDPDARYQDLGPGYYEQRMHVRRQARNHVLGLQRLGYKVTIQPVNPDTGELLAATA

SEQ ID NO: 85741 - protein, 412 aa, unidentified
MNQDKLYVGIDVSSKNNVCYLMQSDGSKQSSFSVPNNRNGAKLIVDRVTSVLLLQDIPQVVIGMEATSVYGDNLMRFLRESGSLGRFDRHLYMLNPKQVKKFRDAYSDLPKNDYVDSFVIADHLRFGRINKEVYMDDYKYQALKMYTRARHQLVQELTREKQRLLNNIFISFSGLAQEKIFSDKFGATSMALIEEFSSLDELAYMSTDELADFIRKEGKNHFENPEEIAEAVQRAAKNSYRPPQVIADAAKQMLAISMTTIRLLQKQIKEYDKAIEKMLEAFPQTLTSIKGIGNIYAAGIIAEIGDINRFPSQASLAKYAGLVWTQHQSSDFEAEDKRMIQGGNHHLKYYLCEAANALRRCDPEFKRFYALKYKEANKHNHKRALALTARKLVRLVYTLLKTNRLYIPPEEY

SEQ ID NO: 85742 - protein, 348 aa, unidentified
MEKLIRIGMDTSKSVFQLHGVDSVEQPILRRKLRRGQVLPFFSDLPPAQVAMEACGASHYWARELQALGHEVVLIPPQYVKPYVQRGKSDAADAEAICEAASRPKLRKNFVPIKSTEQQAAQMLTKLRAQFIGRRTQLANSIRGYAAEFGLTAPKGLSRLRELLADIRADATVPDLAMELVEALAGELTRVDDQIATLDKKLMQLHRGNEMSRRLAGIPGIGPVGATLLSIKVTDAHSFKSGRNFAAWLGLTPKNHSTAGKNRLGVITRAGDEMLRSVLVAGATAVIGDLRRGGNRIWPWLKALIARKPPKLAAIALANKMARIAWKLMISGERYRPIGGSAPMAMPT

SEQ ID NO: 85743 - protein, 407 aa, unidentified
MKATPTNSGYAGIDWSWQHHALCIVDDDGQRIEEATLPHTRPGLAKITTLLRRHGVDRVGIERGDGPVVEHLIRDGFEVVVISARQVKSLRARYCSAGNKDDRFDAFVLADALRTDAGRWAIVRPDSDETIALRMLVRARQDLIGHRIAVHNQLLAVLQHNFPGAIGLFSQLDNTISLAFLRRFPTEAKAAWLSEVRMGHWLKANSYCGRHTPTRLVEHLHDAASGRVTGPAAEASELIVLTLLDLLTNLREDQSALEARIEEALLAHPDGPIFASLPRAGTVRAATLLAEIGDCRARFPDPAALAAAAGVAPSTRQSGKHLNVAYRRGCNKQLRHALIDWAQDTPRANAWARDTYDRARARGCRHPHAARILAQGWTRILWRCWHQHQPYNPDLHGRLNTLQQEAA

SEQ ID NO: 85744 - protein, 358 aa, unidentified
MDRELYIGVDVSKKTLDLAYYDGETIDWKNAHIKVSNDDAGFKKIGSWVAKVGKDFDTFLFCMEYTGLYNQNFRLWLESKEYIYGMVEPRKMHHFEPDLDDDQRSLDRIKTDELDAFRIAIYCEQNHKKILRNPSKLPSPVYFKLKRLLVERKQNTKQSTLYKQQLHDICAYDTDLSVERKKLLLKNMQENQKAIDKEIDSYMNEDASISKNYDLLTSIPGIGRIIALETIVLTENFTAISNPRKYACYIGIAPFKKESGTSVRKKTGVSKKGFSEAKADLSIAVLSAITYNPAIRGYWIRKKKEKCGGIVLNAIKFKLVLRMFAVIKRGTPYVETDAYKNREYSKSELKLFPDQNYH

SEQ ID NO: 85745 - protein, 392 aa, unidentified
METIVRCCAGLDVHKDSVEACVRRMEQDGKLYQQIRHWGTTTRELMAMADWFKAEGVTQVAMESTGVYWKPIFNILEGNFEVLLVNAQKLKHVPGHKTDVLDCQWIAQLLQHGLLKGSFIPPRWQRELRDLTRQRAQIIGEHSRISNRIQKVLEDANIKLGSVASDVVGVSGRQMLQAIIRGENNPAQLADLARCRLREKIPQLQEALYGKITEHHRWMLGLLWDQLAATEEFLVRLDERITQLTRPQQPALEKLDAIPGIDRRVAEVVLAEIGPDMSPFPSDAHLASWAGVCPGNHESAGKRRSGKTTKGSRWLRQALVQAAWAASHKKDSYFQAHAQNLMRRRGRKRGLVAVAHSLLLVIYLSSMTLPSTTISAETFSIAFAENILFAIT

SEQ ID NO: 85746 - protein, 334 aa, unidentified
MNYQFVIGMDISKHSFDVAIFSTDNSENISHSSFTNDSNGFNELLAFINEAMPGFDIAKSLFCMEATGLYCNALLEFFQKQLANVWVENPVQIKRSLGIKRGKTDKVDSISIAKYAFKNAELVRLWKPSNVVLEKIKHLATLRERMVVTQKRLLVPIEELRQAGQEKMADLLYKSIKKSINAIEKDLKNIEVKIMECLKEDNSLHHLFSLVTSVVGIGFVTAINLIIHTQGFNAMCDSRKLACYCGVAPFPYQSGISIKGKTRVSNMANKKLKTNLHLAALTAIKYDPELKAYYERKVLEGKPKMSVINAVRFKLLARVVAVVNKNEEYVKKAA

SEQ ID NO: 85747 - protein, 339 aa, unidentified
MKLYVGSDLHANNNFIALVDRKGKRVDQKKLPNDLFVIRDFLKPYQKDIVGIAVESTFNWYWLVDGLMDSDYKVHLGNPSAMQQYSGLKHVDDKHDAFWLAQMLRLGILPEGYIYPKEDRPIRDLLRKRRHLVKLRTSLLVSLQNIISRNCGVKFRANEIKRLKEDRVSPLLESNQDLALVGLASKEMIDQLTRQIHKIEGTVIQRVQLKEAYRYLVTLPGVGKILSLTIMLETGPIGRFADVGHYASYCRKVPSRWTSNEKTKGKGNQKNGNKYLAWAFSEAAEFARRFDGQARAYYTRKMRKTNSMVAYSALAHKLARAAYYLMKDQVPFMPEKLFS

SEQ ID NO: 85748 - protein, 453 aa, unidentified
MKKHKQAEAKTKSEALKPLREQEPDAAGIDLGANEIWVAVRAERDQKAVRQFGAFTRDLMAIVQWLVQCGVRSVAMESTGVYWIPLFQLLEEAGLKVCLVNARHVKNVPGRKSDVRDCQWLQYLHSVGLLLGSFRPVQSICAVRSIYRYRQNLLSMASQHVQHMQAALDQMNIKLHHVIDDLTGVTGQAIVGAILSGQRDPVQLAKLRDKRIQAPEATIAKALEGDWRKEHLFVLAKAWAQYQQVQKQIQDCDQELWNYTRELEACTKVIKPAKVMRLKPELVGAELLSTPPTKKRARKKTSKNQPEGPWKEELERFFGVDLTAIPGISVLTGLTLMSELGHDLSTFRTEHHFASWLCLCPDNETSAGKVLRRRTRRSQNRVRQALRMAASSLHHDKSYFGDKYRRLRARLGAPKAVTAMAHQLARIIWTLITRQLPFDLSVFAYHEKVHQQR

SEQ ID NO: 85749 - protein, 343 aa, unidentified
MNSTTIAVDVAKAVFEVAVSEHAGQVRERHRFSRERFRRYLGEQPPATILMEACGSAHYWGREAQTRGHRVVLLPPHAVRPYVVRNKTDRTDAKALLEATRNDEVRPVPVKSETQQALAALHRLRSTWLATRTARINTVRGLLREFGVVIPIGARHVVPALGSLEDDDGGVPSLLRPALAEAAREIRELEGRIRTVEHQLDAVAEQTPVVSRLCSIPGVGLLTATALVAAVGDVQRFPSARHFASYLGLTPRERSTGQRRQLGAISKRGDAYLRMLLIHGARAVLCHAKTKTAPAPDRLRAWALHLERFRGHNKAAVALANKLARIAWAVWKYDTDFAAAPAA

SEQ ID NO: 85750 - protein, 337 aa, unidentified
MSEISILAIDLAKNSFQVCGVKADGVAVFNRSVSRTRLIQLLSDQKACIVAMEACATSHYWGRMAQAHGHEVRIIPAIYVKPFVKRQKNDFADAAAIAEAASRPSMSFVAVKSAEKQGRAVAFRTHQSFVRQRTQLINALRGHLAEFGLVAPKGPAYLKVLQSALNGPQVDLPTVVREMGQLYLRQIDQLTEIITRLADELEAATKTDCELRRLCTVPGIGPVTAGAIAAFAPNLETFDSGRNFAAWLGLVPRQHSTGGKTRLGAVSKMGQCDIRKLLIVGAMSVIRWVVRRGGSTSRWLANIVARKPRMVAAVALANKMARMVWAMTTKGEDYRIT

SEQ ID NO: 85751 - protein, 341 aa, unidentified
METVYFTGIDQHKRTSFLTTLDRDGDIVRSRKLKNNPDSIRAYFRTLPGEHHATVETTTGWYWMSDLLFSEGVDLSLAHAKFVKAISYAKVKTDKVDAMTLAQLLRVGLIPEAHKISPDMRDVRDTLRARLHLVEKHTSAINSVHRVFEKFNTDSLGDLPELFRLQADMHTERAALITEQIKTIDSTLNHLLLDSEDIQRLLWIPGIGRLNAFSIYLEVDGIERFPTVKNFYSYCRLVPGAHNSGGKTRHRTSKEGNKYLKIAFSHAATRAIQYFPVVKKYYQRMARKKGAPIARALVAKEIAKSVYFVLLNQEPYNRVFKSMKLEKTKTPAWPRRASPDS

SEQ ID NO: 85752 - protein, 406 aa, unidentified
MDITYERCCGIDVHKKMIVACLICGGKQQLRQFGTTTKELRDLSAWLVDAGCQMIAMESTASYWKPLYNIFELSDLNAMVVNAQHMKALPGRKTDVKDAEWIADLLRHGLLKASYIPDREQRELREISRYRKSLIDERSRELNRLQKMLEGANVKLSSVVSAINGKSSRRLLESIVQDKKLDEDEILRLLHPSMHAKLNEIMACVDGIISPLQRRLLRNVLDHIDDMTKRIEDMDKLIKDYLNKYEEAIAAIDEIPGVGRISAETILAEIGLNMNRFPTERHISSWAGVAPGNHESAGKRKSGKTTHGNTTLKAMLVQCAKAAQKTKGRFFSAQYQRIAARRGKSRAAVAVAHSILIAIYYILKAKVPYRELGSEYYNQFNREKKIQSYLKKLAALGWERPTTATT

SEQ ID NO: 85753 - protein, 340 aa, unidentified
MTITTVGIDLAKNVFAVHCVDQNGKAVLVKPKVSRAALSELIAGLPPCVIGMEACSGAHYWARLFRQYGHDVRLMAPKFVSPYRMAGKTGKNDAADAIAICESVQRPHMRFVPVKDESQQAMQCLHRTRQGFIQERTATYNRLRGLVSEFGVIAPQSTDALRHAVSDQKETLPVQVRLCIDDLLAHVTNIEEKIAEYDRVLSRVAKTDHRSQQLMELKGIGPTTASALVASIGNAHDFKNGRQLAAWLGLTPSQYSSGGKSKLGRITKAGDAYLRTLLVQGARSVMVGAENRTDSFSRWVCSLIGRRGYWRAVVAIAAKNARLCWASLHYGDDFRLYSTT

SEQ ID NO: 85754 - protein, 421 aa, unidentified
MTSMTSPPPLSQDEFELESLIAGIDTHKHTHHVAIVDHLGRPVTDQQFDTTPAGYKEIVDYLHTAGTVSVVGVEGTGSYGAGISRVLTAAGFKVAEVARPNRRSRRLRGKSDPLDAHQAALSALSGTGTALPKSSDGAVEALRMLLTERKSASKTRSQTMNQIHALLITSPDSVRDDYRTLGSAALITVLSRTRPGPGADPTSTVRRVLKRLARRHIALTEEIVLIEQEMEPLIRAVNPALFSLSGVGVVTAATLLVAAGDNPERLSTMASFASLTGVAPIPASSGQRTRHRLSRGGNRGANHALHRIVLLRNRHKEPRTEAYFARRRAEGLSDRDIMRCLKRHIANEVYRALMNPGLENPAGQELRAIRQEAGIPITVLADTLAVPYQRLRRLEIGVRADPQLEAKAKAALALLTTPKTA

SEQ ID NO: 85755 - protein, 346 aa, unidentified
MRMIGCDYHPAWQQICWLETSTGETGERRLEHASGEAEKFYRQLVEPAVIGMESTGNCQWFVDLLTTLGHDVWIGDAAKIRASDVRQQKHDRRDAALLLKLLLEGRFPRIWVPSSAEKDLRQLLIHRCKLVRIRVQVKNELQHLAMNQGVTRKGALWSKAGEKMLRALPLRPWAGRRREDLLQVREMLTGQIAQLDRAVMEAAQQNEQARLLMTQPGVGPITSLAFVLTMGDVSRFPRGKQVASYLGLIPREYSSGGHQRLGSISKQGNRFMRMLLVEAAQSAVRYDPQMRSEYLHRCHRKAKGVAKVAAARKLAIRLYWMLRTGIGYPEVVRAESSPRVPLVSAR

SEQ ID NO: 85756 - protein, 428 aa, unidentified
MKYNTQNAKIKSITEKTLIVGIDVGSETHFARAFDWRNYEYSKKPLEFSNTEAGFMTLKAWMADFAEKYGKNVVIPGMEPTGLYWFNLGAYLQDNGMKPVHVNPHHVKKSKELDDNNPNKNDRKDPKTIAALVNEGRFSYPYIPTGIYAEIRSLSNLRLQTQEEITRIKNRIARWFSIYFPEIKDVYRNPDSVSGLMILKEAPLPQDIVKLGVDGINKIWRDAKLRAAGLKRAKTLVTAAEHSIGSQEAPDSARIELKNLLNDYEIYKNREEDLMSLTEEKLSEIPHIDKLLEIKGVGLKTVSGFVAEVGDITRFDNPKQLQKLAGYAIVECSSGKHKGESHISYRGRKRLRYVLYEAAISLIARNEEFKEVHRYYRTRKENPLKKMQSVIAVACKVLRIFYTILTKGVTYDGAKMMQDIKRPQMLAA

SEQ ID NO: 85757 - protein, 370 aa, unidentified
MSQSSTLFIGMDVHKDSIAVAYVAQDHGAEVASLGTIGTRQCDIDQLIRKMQSKAKHLVFIYEAGPCGYWLYRYLRKKDYDCWVVAPSLIPKKAGDRVKTDRRDAVQLARLARSGDLTAVYVPKVEDEAIRDLTRAREDTLSDRKDAKFRLKAFLLRHDIRYTGRANWSPAHLRWLSEVSCPTPAQQIVFQEYVRAVHEHTERLQRLEQELQDHVQAWRLHPVVEALQALRGVQFTVAVIMVAEIGDLTRFDTPRELMKFLGLVPSEYSSGERRQQGSITKAGNTHARRALVEGAWAYRYPAKVSRHLQLRLEKQPKIIQDISWKAQVRLCKRSRRLVARGKHANVVTVAIARELVGFMWAIAKEIPVKP

SEQ ID NO: 85758 - protein, 344 aa, unidentified
MEYFAGIDVSLKGSSICVVDAAGRIVREAKVASEPEALIAWFGGLGLAVTRIGLEAGPLSQWLHGGLTGAGFEAVLLETRHVQAALSAMVVKTDRKDARGIAQLLRMGWFRPVHRKSADAQEVRALLVGRKLLQSKLRDVELSIRGILRGFGLKVGEVSKGRFAARIRELVAGQAMLETVTGAMLTAREALLAEFMRLHRRMLAIVRADAVCRRLMTAPGVGALVSITFRTAVDDPGRFRSSKAVGAHFGLTPKRYQSGETDVIGGISKVGDAMVRTALYEAANAVLSRSTRFSTLKRWAMEVAKRRGLKRAKVALARKMGTVLHRMWVDGTEFRWGKEAPVAA

SEQ ID NO: 85759 - protein, 322 aa, unidentified
MERRGFVGIDVSSGRLDVAFRPGTELFQVRNEPRGIARLVRMLERRQPELVVLEASGGYEIAVLERLLAKEVPVALLNPRQVRQFARASGRMAKTDAIDAEVLAHFAEVMRPHPRRWADLETRQLRALVNRRHQLVQMVTAESNRRRLALAVVRDGFGATLRCLKLQITAINKQLSALIRQIPTLRQKAELLRSVPGVGEVATATLLARLPELGSLDRKKIAALVGVAPFNRDSGRFNGKRAIWGGRGDVRTVLYMSTLVGVRRNPSLRDFYQRLRGAGKTPKMALTACMRKLIVTLNAIVKHETHWYCPLSLSGKASPNAT

SEQ ID NO: 85760 - protein, 410 aa, unidentified
MVKENFIYVGIDLHKETHTAVMIDCYNQKLGEITFPNRPAAFPKLVTKVKKCNTDGKEVVYGLENAYGYGRALAVWLIDKGYLVKDVNTAISHRQAKHRGAMYRKSDSDDAKAIALATLNMLDKLPDACPNDAYWSLGQLVHRRDNIMKQRTRLVNQLHEQLCIAYPSYKQFFNDISRPTALYFWEHYPSRKYLKGKSVEDLRAELVPVSHNKCSTKTCEKILDAVASDKVKNNAYQDARDMVTLSIVSDLQHYDSQLTEVDKMLEQMYKMLGCTLTTIPGVNVITAVKILAEIGDIKRFSNANKLAQFAGIAPLHLSSSGKGKDLATKQGNRRLQATIYFLAIQMVQISSKGTPRNPVVRAYYEKRKAEGKTSQQALICISRRLISIIYGMLKSGTEYRMPVVENAGEK

SEQ ID NO: 85761 - protein, 329 aa, unidentified
MEQLTTVGLDLAKDVIAACVLDVHGAVIERRVLRRGAFERWAEQLPSCKVAMEACGSAHHWGRWFAARGHTALLIAAEFVVPFRKGGKNDTADVEAIAIAARQPTMRFVPIKTVDQQSILAWHSVREGWKEERTALLNRVRGLLAEYGVVIGRSSDRLLTTLPELTEDYRLPDAMRAMLLEARERASELLGVGPVTASALAATVPDARVFKSGRQFGAWLGLAPRQHSSGGKTRLGRISLRGNVYLRTLLIQGARSTLQAAINAEPLRANRLQRWIIALYGRKGYYKTLVAIANKHARILWAMLAKDEHYDAAAWQRHPVHQPPLAGNA

SEQ ID NO: 85762 - protein, 343 aa, unidentified
MQTITTIGLDIAKSVFQVHGVDAAGAVVIRRQLKRRSVLGFFQKLPPCLVGIEACASSHHWSRDLQALGHTVRLMPPAYVKPYVKRQKNDMADAEAICEAVTRANMRFVPTKTPEQQSCLMLHRTRHLFIRQQTAVINSIRAHFAEFGIVAPVGRRGVTELLHIVADPSDKRVSEVARACLAALGAQLLRLKQQIVEFDRMIMAWHRSNQASKRLHYIPGVGPMLATALVASVADPSTFRSGRNFSAWIGLVPKQHSSGGKDRLGSISKQGDRYLRSLFVAGALAVIRYAKIHGTGHRPWLTALLGRRPTKVAAIALANKIARMAWAMMAKGERYRNPVALAR

SEQ ID NO: 85763 - protein, 343 aa, unidentified
MKHYAGIDVSLEVSHVCVVDETGAIAREAVVASEPEALSAFLQGLGLALERVGLEAGPLSQWLYAGLQAAGLPVVCLETRQVKAALSAMTVKTDRKDARGIAQVVRTGWYTAVHVKSQASQETRALLQARQLLIEQIGAVNSSIRGLLRNFGLKVGRVGRSGFPGRVRELLESRPSLAPVIEPLLTARATLLRQCAQLDRRAIETARPDPVCRLLTTATGVGTVVALIYRSGVDDPHRFAKSSAVGAHYGITPKRYQSGESDRIGHISKVGDEMVRRALYQAAHTILTRPVKPSALKAWALRVAKRRGMQRAKVALARKLAVILHRMWVDGTEFRYVRQDVPA

SEQ ID NO: 85764 - protein, 353 aa, unidentified
MHQKEKRSMDHFAGLDVSVKETSVCIVDDTGKIVREVKVASEPEALLAVLKNPAYHFKRIGLEAGPLSQWLFSALAEAGLPVVCVETRHMQAVLKAQINKTDRNDARGIAQMMRVGIYRPVHVKTLRSQKLRMLLTHRKLLQSKAIAIENDLRGTLRNFGLKVGIVGRVRFEARIKELVENLPDLAVLVEPLLLVRRTLREQTMILHRRLLAVVRDDEVCRRLMTIPGVGPVVALTYRATVDVPARFRKSRAVGAVFGLTCSKYQSGEIDMSGRISRCGDEMMRVMLYEAAQSMLRSKKWSWLKAWAMQIARRRGMKKAIVALARRLAVIMHRIWVDGSEFRWTREQAAAAAA

SEQ ID NO: 85765 - protein, 351 aa, unidentified
MPCKKDVAVVRTIGIDTGKNTLHMIGLNEKGAIVLREKVSRDRIAARLVNIPPCLIGIEAGMATHYMSRDLLALGHEVKQVPPAYAKPFRQGHKNDFRDAHAVAEAVQRPSTRCVPIKTDDQLDLQALHRVRSRLIGDRTAVINQVRGFLLEHGIAVRQGPRSLRQQLPQILATRTEVLSPRMLRIIGDIVDDWRYLDDRIERVTDEIEGLARTDVNCGQLISVPGIGPIIASATVAAVGNGTAFAKGRDFAAWLGLVPKQMSTGDRTILGRITKRGNRYLRMLFVQGARAILLRPKSWAKYSFGPWLTAAARRLHRNILTIALANKLARIALTVLVQGRSYESRIVPAAV

SEQ ID NO: 85766 - protein, 434 aa, unidentified
MRPTVERQESEALMQVLYQRCAAVDIGKDVIAVAVRLPGDGPDHRQTIRRTFKTFYGVLKLAARWLTEQQVTHVAMEATGIYSMPVYHALIEHGQFEKVLVCNAGHVRNVPGRKTDLSDAEWLVQLLECGLLRGSFIPPAQIKAARDVIRYRTKLTESRTSELQRLGNVLQDAGIKVDSVASKITTQSVRAMVEALIDGEHRPLVLADLAKGKMRAKIPDLQRALEGRFDDHHALMCRLHLDHLDHLEEMIARLDAQIEDMMEPFQTQRELLTTIPGIGPFAAAAVISEAGADIAESFPSARHFASWIGVCPGNHESAGKRHSGKPRKGNQHLQHVLVECGWAASRTPGYLQSLYRWHVRKFGGSRSPTAKNKAAIAVAHKLSVIIWHVLATGKPYRDLGADYLDRRVDPETETRRLVAKLQALGHTVTIEPAA

SEQ ID NO: 85767 - protein, 367 aa, unidentified
MKKVSTVAVKASRKISQSKLTVGLDLGDRCSWYCVLDEAGRVLLEQRVSTTPKALREVFGGMPGSRIALETGMHSPWVSRLLSEVGHEVIVAHARKVRLIGESRKKDDRLDAQTLARLARIDPELLCPVKHRTAKAQADLTVIRARAGLVRARTALVNTARGLAKSYGERLRGCNVRNMNPEKAEGLSPELQAALQPLLGALESLSEHITEYNERIEKLAKESYPQVALLKQVKGVGTLIGLTFLLTLEDPRRFRKSRDVGCYLGLQPGRRNSGQSQPQMHISKEGDPYLRTLLVQGAQHILGPFGMDCDLRRWGLKLAERGGKGGKKRAIIAVARKLAVLLHRLWVSGEVYEPLHNSRQSAMPAAA

SEQ ID NO: 85768 - protein, 330 aa, unidentified
MNINQEVYVGLDAHRETIHGTALNKEGEVICSCNFPANKEAIEEFMKFFSIGNTHIAIEACNHWKFAYNILHEKGYEVMLANPEKCRQISKDKKTDEVDSRIIADLRRINYLPSVTILSDEILKLRDLCRHKSNITRMKSKVQTKIKSHLSRNGIPYEKNLWKKEKIVWLKSLKDLEIDSFLRVYDLLRNEEMLAKKEVIKIAMTNQDIILLKTIPGVGHYGAVMIYEEIGDINRFKGPKNLHAYAGVVPGIYQSGNKSRTKTRSQVNYWLKWIAGQCAGSIFRRKNNLQRYYLKMKAKKGSKIARKATARKILTIAWHVLIEKNPYKES

SEQ ID NO: 85769 - protein, 410 aa, unidentified
MPEGACAGVDWAKDTHDVFVADADGERLWAETIAHTEAGIEKLCRTLVTFGVCRVAVERPDGLMVERLLDAGLTVLAIHPNMVAAARPRFRPAGGKSDRFDAFLLCELARTDHHRFRALSPDSDQTKALRALTRGREVLVEQRVAMCNQLRAELERFWPGAAQIFSDLDSPISLAFLERYPSPVDAQRLGEKTLARFLARHHYCGRKDPAELLAKLRSAPASRAGEIEADARRGLVLALIAALRPIVEQIRLLTSEIAHAVQTHPDGHIFLSFFKRPDSVICAATLLAEIGDDRNRYPTAEHLAADAGMSPVAVESGRKKVACFRRGCDHRLRDATSTLADATRKWHPWAQDHYLRARGRGHDHPRAIRTVGRAWTRVLWRCWQDHAAYDPDRHHGLQKHTKIVIPQPRG

SEQ ID NO: 85770 - protein, 377 aa, unidentified
MAQLLVGIDPHKRSVTVGVIDPVGVAVSTASFDNCSEGIAALLAWVARLPGQVLRVGVEGSAGHGRHAAVALVGAGYDVREVPARRTAQRRRARRRPKTDIEDAVAIARATAAEPSLGPVKPGRSHSAAHEELAVVRAHRTMLVGRRQVMLNHAEAVLAALPHEYTDTLPAAKKVWPRLTALTALAGPTASRLGRSASASASAAVAAQLALLVELHGDIGELDRRIRKLDKRMAELITACGSTLLDEHGIGVVGAAALLVEVDDPTRFRSESAFNRWWGGAPVAVSSGEGHQTPVRHRLDLLGNRTINQVIYTMSITQSRTHPDARDYLARKRGEGKTPKEARRAHKSLLGRRIIRRMWNDHHRQHKTPTTPQPDAA

SEQ ID NO: 85771 - protein, 338 aa, unidentified
MAILMGLDQHRAQITAEWVDTSTGEVSRARVAPADPAGVRRFLARFRGQQLEVALEATTGWRFVVEELQRIGAVVHLAEPADTAALKGNKKHAKNDRADARHLRELLMAGRLPESWIPPAHILDLRARVRLRHTLSEQRGEWQQRIQSVLYHHGCPQRGDLINQAGLAWLAAQALPACAREQVTAALAMIDALERQLAPLDKELRRYARRQPGCKALMRHYGIGALTAVTILAELGDPTRFSSSREAVRFAGLDITVHASDQRRAPGHLSRQRPPALRWAPFEAAQCARRPNSPDHTYYQEAAKRLGGNRACLSIARKLLKRSYHTLRELGEEALQPA

SEQ ID NO: 85772 - protein, 464 aa, unidentified
MTEKKLWRNRKERKEWGRRLQSEDPGLEVVHSHAAGIDVGNGMHYVAVRPDRDPQPVRRFECFTADLHCLAEWLQRCGVKTVAMQSTGVYWIPIYEILEERGIQVYLVNARHTKNLPGRKSDVQESQWLLKLHTYGLLNNSFQPPSEIRVLRTYWRQRAEHVHGAATCVQRMQKALTQMNVQLANVISDVSGLTGQAIIRSIIAGEHDSRKLAELSDPRIHASREEVAKSLEGHWRPELLFVLQQEVVMYDTYQQRIAECDQQLQKHLASFADTIPLLPTAEEPKRKKSKPAKNAPRFELRSELQRITGVDLTRIDGIDVMVAQTLISEVGLEMSRWKTEAHFSSWLGLCPDNRTSGDKVLARGTRRVVNRAATALRMAAVTLMRSRTYLGAQYRRLRTKLGAPKAITAMAHRLARLVYRMLKYGQHYVDKGAEYYEHRYRRQQIEFLRKKATKLGLQITLTQT

SEQ ID NO: 85773 - protein, 345 aa, unidentified
MSYFCGIDLGAKRSQVCIIDNNQKVLVNRKVANDIEVIHRLIRPHGRVPTVIESTFNWYWIVDGLQDRKVPVTLAHSLKLAAISSAKVKTDKRDALVLAQLLRANMIPTSYIYPAEQRPLRDLLRQRWDAVALRADEYRKMRGRLYREGITTVGANEVKLMGAEEVNELIDHPLIRRQMMANIERVELLTRQIKTFEKDLLAQVKVRPDFINLKTIPGIGDILALTLLLEIGDISRFPKARQFASYCRVAPGCADSGDSHRRGRGNKQGNAYLKWALTQAAEYSRRFDRQFADHFDAVLRKHPGASGTIITHCIVAHRLSFAVYHVLKDGVPYNPEKLFRSNPES

SEQ ID NO: 85774 - protein, 338 aa, unidentified
MNIYVLGIDVGKNVFHLVGLDQRGQVVVRKKLSRTQLLVYTANLSVNMIGMEACAGSHFLARALVAQGHNAHLMPAQYVRPYVKSNKNDFVDAEAIAEAVQRPTMRFVPIKTNDQLDVQALHRLRERWIGRRTAVINQIRCLLLERGFTVPQGPTHLRERLPGILENEDGRLSRIVITLIRELCGEWQELEGRIDRTDEQISQFARDNDACQRLQTIPGIGIVTATALVAAIGNGKAFRKGRDLAAWLGLVPKQHSTGGKPKLLSISKRGNPYLRQLFVHGARSVFACLKRDRHQFGRWLDQLQARKRPSVSIVALANKLARIAWAVLTTSQPYRATA

SEQ ID NO: 85775 - protein, 335 aa, unidentified
MYHVGLDVHWKTSTLCILDENGKRVKHMTIRGHWQKLLAECRRISEPFAVCFEASCGYGYLHDELSKIARKVVVAHPGQLRLIFRSRRKNDRVDSEKLAKLLYLDEVPTAYVPTRNVRQWREMIEYRQRLVAKRVRCKNGLRALLRSRGVVAPRGLWTVKGVAWLASLDFGEELANLRRTMLLEELSVFDRQILEVTKVLDRVGSRSSGVTVLRTIPGVGPRTAEAVMAYVADPNRFRRSKQIGAYFGLVPSQDSSAGKNRLGHITRQGPATVRKLLTEASWQTIRRCPRIKEMFERIAQGKPDRRKIALVAVAHHLVRSMLTMLKTGEVWRETA

SEQ ID NO: 85776 - protein, 428 aa, unidentified
MNNQEIIRREQYCQIVKEVTGSDQYMVVGIDVGKDKHHAFVGTARGICLFKKLIFENNLAGFARLLTTVDQLKAQNCLEKIVYGLEPTGNYHKPLARHLISGGCNVVLVTGQAVKNNRQLIDGRWDKNDTKDAANVADLVSRGRCLYYDCPSPPINELRGLLSLRRRLKREEHSLRMRIRNNLLAQYFPEMDKFYSACESESLAIVKWCLDPDKISVMEFDKFFNMVTKTGRGIAQTLRLRNIHNLAVESIGCPMGPAAEYEAELLVEKRQQVAKEIQKTEDLIEDICREFPEYSYLLTIPGFGPYISAKVLASIGDPFRFDNRKQVIKMAGYDLSAKRSGKTSDQAVPVISKKGNGELRYALYQAANVAAARTDLFRAYFTKILRGRERERGIKTKMRVKLAAKMLVIAWTLMKTKQSFDPEHLNID

SEQ ID NO: 85777 - protein, 394 aa, unidentified
MLSESQCIEENTNIVVVPAERSEAGTTTTADDRSMALGSGDAETVGKQDRRRSLGRSPNSRQSRLTLATSSSYLQGRDTSKMDFACVIGIDVAKAKLDVANGQDSPIQQFDNDASGHQQLLKTLPKQKTCLVVLEATGQYEKHIVMELVNAGHLVSVVNPRQVRDFAKAIGILAKTDKIDARVISHFGQLVRPRTVAQTHEKQDELDQLVTRRRQLIATRTAEMNRQSMATSKVVRKSVQQHVDHLKKDIRKIDVEITRLVKSDEEWNGKSELLQSAPGVGPVTASTLIAELPELGKISRQKISSLVGIAPFNRDSGQFRGRRMIFGGRRTVRSVLYMAALTARRHNPVIRAFADRLEAQGKLPKVIIVACMRKLLVILNTMVKTNTSWNPQSA

SEQ ID NO: 85778 - protein, 330 aa, unidentified
MFFIGADIDKRKVHCVLLLDPVTGKKRNKTVANTPAGMEQLLAWGGKQTGGPIGDLHVIMEATGPYHETAAYTLHEAGAVVSVVNPKQLKDYAKGIGHKAKNDPQDSLALADYGANQHPRPWQPPPPEFRQLQALLQRLEALEKDLQRERNRQEKATLGHASAQVLASLERSIEFLEQEKKRLLHEIDDHIDGHPHLREDRHRLLSIPGVGPVLSRWALMLLQHGQRFASAAQFAAYLGIAPEEHRSGATVHKRPRMSKTGPAHLRAKFYMAAMVAARYNPVVRAHYERLLERGKCKMSALGGAMRKLAHICFGVIKNQTDFQHPTPQEA

SEQ ID NO: 85779 - protein, 334 aa, unidentified
MGMDVHKNYLQVAVLDEKGKVLDNSRVDNDLTKLNEFFDSLHPNSKTKVVMESSGMWYNIYECLNKRHLDVRLSNPAKTRAIASAKIKTDKLDAVKLADLLRGGYVAECYVPNKRIMGLRDIVRHRAALVRMRTKLKNKVRCITVMKGIDDASNVERTGTFTRRHMDKLEEYDDYRINGCLRVIKSLNDEINTVSKKILLLAKEDELAKLLMTIPGIGYYSALLIVSEIGEINRFPDSYHLCSYAGLVPSTHSSGGVTHYGSSITKAGSRYLRWIMLECVHAHIRTEKNSNIAQFYYRIAKKKGNSKAAVAAAAKLLKVVYWIMKERRTYARLG

SEQ ID NO: 85780 - protein, 467 aa, unidentified
MAARKQKQKRMSAQVVEDEDYQLRYEIVAGIDVAKESAVVCVRMPPAAGRKHRTSHLQAVPATVPAIGELAAELTAAGVQMVSMEATSDYWRVWFAVLEEAGLAVQLVSSSQARNLPGRPKTDKEDARWIARLTEMGMLRSSFVPPPEIRALRVYTRHIWDLTADRTRYWQRLEKLLEDALCKLTSVVSRLAGHQTARAVIEAMIAGERDPRTLAALGRGKMRNDKLPALAEALTGMRFGPQHAHAAASLLRAIDLLDAELRDLQERVTGHLAAIPASWGVDADGVTGPAAGRAGDAAVLAAADRLDEIPGLGREAAAALIAEIGLDMSRFPTPQALVSWAGLTPTARQSGPVKGRGKKGRGNTYAKRIAVLAAYAAANTDTFLGERFRRLASRPGGGGRKKAGCAVGRSILVIIWHLLNDPAARYRDLGPDWHATHTDRSRKARNARRQLEALGYDVIITLREDAA

SEQ ID NO: 85781 - protein, 412 aa, unidentified
MRRVIGMDIHRTFAEVVIWEQGQLRRAGRVDMTRTTLEGFGKSLQASDEVVVEATGNTMPVVRVLSLFVARVVIANPLQVRAIAHAHVKTDKIDAGVLASLHAAGFLPEVWTPPAETERLRRLVARRNQVVRHRTRIKNEVHSILHAHLVPRCPHADLFGRLGRAWLKRQILPADEIAAIDRHFRELDRLAEDLELLDREIAQSGLEDPSIKRLLTIAGVNVTVAAGLVAAIGDIKRFSSPQKLVSYIGLNPRVRQSGLGFAQHGRISKSGRSHARSMLVEAAWAAAKAPGPLHAFFVRIRAKRGHQIAAVAVARKLAVLCWHLLTKEADYLWARPALVAKKTRDMELASGQPMKKGGKPGSAYAYNVKTLRNQEKTIAENAEHAYEHLVGAWQTRRPKNAVRGRLKTTRHE

SEQ ID NO: 85782 - protein, 338 aa, unidentified
MAILYVGIDLAKSVFAVHGVNDAGKAALVKPSVPRGKLLELVAALPPCVVGMEACTGAHHWARLFMAQGHVVRLMAPKFVAPYRLSGKRGKNDAADAAAICEAVQRPNMRFVPVKSVEQQARLMVHRARQGFVEQRTATLNRIRGLLSELGIVLPLKAATVRREATQVLEDLPARANLVIGDLLSEVHRLDERIEQYDRQIVLMAREDDRAKQLMRLSGVGQTTATALIAMIGNGHEFKSGRQLSAWLGLVPGQYSSGGKTRLGRITKAGDPYLRSLLVLGARAVLHAAKGKSDSVSRWAVQLAERRGYWRAIVAIAAKNARMAWAVLTRGDRFVMPA

SEQ ID NO: 85783 - protein, 397 aa, unidentified
MIAVGIDVSKGKSTVAILNGDGSIRAHPYEMNHSKAELEALIKYIKAVDDHPIILMEPTSHYHYPVLKAFRDAGLSPSLVNPYLLKKYGDAELRKAKTDKKDAMRIARYALEKWYSLVPYSPMDQKYEDLRFLSSQYRQRISMVVKSKNQLINLLDESMPGITRILALKSRNPEKCMLLQFIKRFHSFDYINSIGKTRFMNSYTTLARKVGERNAAAKGLAIYELSKACITTRSNSDYMDIALDQCVDILSDSQRAADEIMLQMQNIAETIPEYKVLLSMNGVGDRLGPVILAEIGDIRRFHSGKALNAYAGNDAPPYQSGQFESRNRHISKRGNPALRKACFEVMQALKLTKPQDDPVYLFMMKKEQEGKPYNVAKMAAVNKFLRIYYARAMELYK

SEQ ID NO: 85784 - protein, 349 aa, unidentified
MGEVSTIGVDIAKSVFQVHGVDADGTVVIRRRVGRAKVLEFFSKLRPCLVGMEACATAHHWARELKKFGHDARLMPPTYVKAYLKRGKNDAADAAAICEAVTRPSMRFVPIKSVEQQSTLMLHRTRDLLIRQRTQLINALRAHLAELGLVAAKGREGLRQLVTVVTECGDERLPSNARFACQAIVGQLHAVQTQISGLDKRITQTHRANPDSKRLDAIPGFGVILSTAVVATMTDPKAFKTGREFAAWIGLVPRQNSTGGKDRLGSISKQGDRYLRRLLVVGAISIVRTARMWPGKYPWVIELLGRRPAKVVAVALANKMARVAWAVLAKGETYRAPTRLSNAAITAAA

SEQ ID NO: 85785 - protein, 346 aa, unidentified
MKISTVGLDLAKNVFQVHAVDEAGEVVVRKALRRRQVMPFFERLEPCLVGMEACGTSHYWGRELSALGHEVKLMPPAYVKAYVKRGKTDAGDAAAICEAVTRPSMRFVAIKSPDQQSLLAVHRARDLLIRQRTQLVNMIRGQLAEFGIVVAKGIHHVLNLVARLLDGEALGIPALAAKVVITLAEQLRDLQARIGDLEKDLVSWSREDPVVKCLQSIPGIGIITASALAASVTDPHQFTSGRQFAAWLGLTPRANCSGGRERLGRISKMGDQYLRRLLVNGMTSRLRWLHRHPETHPWAAKLLRRKPAKLVAVAMANKTARIAWAVMTRGEIYRAPQPSSQQQAAA

SEQ ID NO: 85786 - protein, 330 aa, unidentified
MKCHYVGVDVGAKELVVSIERSGTRESGIVFTNDAVGHRTLIRWATMKGATARVLLESTGVYGLDLAFALHRAKRVEVMVANPRAIAAFAKASLQRSKTDALDAETILEFCMRMPFVPWNPPSPSILELRALSRRIEAMSKTVTQEKNRLHANQQSKELSDFVKQDIRELIELLEARIDRLRKQALLVIEQSTELTQAFGHITSIKGIAVAAGIQLLAELGTLPEDMTTRQWVAHAGLDPRQHQSGTSVYKPARISKTGNAHLRRALFLPALVASRWEPNVKAFYEKLLAKGKTKMQALVAVMRKLLHAIHGMLRHDQDFDGEKFFAVKA

SEQ ID NO: 85787 - protein, 324 aa, unidentified
MTDLPALGLDIAKKTFQAALLVGDKLRHKQFNNDEAGFAALSAWLTKHGVTHTHVCLEATGSYSDAVARYLHAQGHTVSLLNPARVKAYAQSRLARTKNDKVDAGLIARFCAEARPPAWTPPAPELSELQALVRHLDALSETRQQLRNRLTDGPQVASVLESLRTLLAQLETEMAAVEQKIKDHLRAHPPLQAQADLLDSIPGIGPLTAAKLLGELTQLAHYQRAAQVVAYAGLNPKERQSGTSIKGQARLSKTGNAQVRKILYFPAISALRHNPQIKALGERLRQRGRCEMAIIGAAMRKLLHLIFGVIKTGKPFDENHACTA

SEQ ID NO: 85788 - protein, 366 aa, unidentified
MEKYKFVGLDVHKATIAVSVAEANGGEVRYFGEIANTPEAVVKLVRQLKKGDATPTFCYEAGPCGYVLYRQLKALGLECLVVAPSLIPTKAGDRVKTDRRDSLNLARLYRAGELTAVWVPDGAQEALRDLTRAREDMKHFEKQAKQRLLAFLLRHGKSYGGETNWTKMHFRWFETVKFEHPVQQIVFQEYVDTVKAMTRRVEGFDGQIATSAAESVFWPVIQGLMALRGISLLAGTIIVAEIGDLRRFASAPQLMAYLGVVPSEYSSGPTKVRGAITKTGNGHVRRILVEAAWTYRHPARKTEYLQRRAKHAPEKIQEIAWDAQKRLCGRYRLLEAKGKLKQKVCTAVARELAGFIWAIGQALPQQ

SEQ ID NO: 85789 - protein, 414 aa, unidentified
MEEQTTSAGIDWAKDEHALCVVEEASGRVLLQRRFTHQEGAIEKLCRTLVGMGVERVAIERPEGVLVERVLEAGIVVIAIHPNQLKASRPRFRASGARSKSDAFDAFCLAELARTDHHRFRALVPDSEETKALKVLTRAREDLVGTRVALANQLRSELEAFWAGAAILFSEIDSSISLAFLERYPSPKDALRLGEKRLEGFLSKNRYSGGKSALELLERIRKAPKGRAGKAEIEARREAVLALVGTLKVLLERIKVLEEKIARAVRAHPDGQIFLSLFVSPNTTLTAATLVAEIGDQRGRYPTNEALAAAAGMSPVAVESGRRKVAVFRRACDKRLRRAVAILAESTRQHNPWAKDIYQRARQRGCDHAHVIRVLGRAWVRVIFRMWQDGQPYDPSRHGGLQHFRSAGGLPQGV

SEQ ID NO: 85790 - protein, 416 aa, unidentified
MDVLYPRCAGLDVHKDSVVAGIRLAANGMAKTAVRRFDTTTPGLLALSGWLAEQGCTHAAMEATGVYWKPVWHILSDGDISLILANAAHVKNVPGRKTDVADALWLAELLAHGLIRASFVPETATQEMRALLRTRKQLVREQASHVQRLQKTLEDANLKLASVLTNIIGVSGRAVLTALIAGETDPDKLRELIQRGVKAPPERLRAALQGRTSDHHRFLLRLHLRQVEALDAAIAEIDAEVEHELDPFRGAVRLLRTIPGVSDLTAQVIVSEIGIDMSRFPTAGHLISWAGLCPRNDETAGKRRSTRLRKGAPWLKTTLVQCAWAASHKKLSYLQAQFQRLRYRRGPKKAICAVAASILTAAYHMLRDGTFYHDLGPDHFVSTPPEVRVKQLVRQIAKLGFTCQIAPATHVAAVSV

SEQ ID NO: 85791 - protein, 390 aa, unidentified
MALYVGIDVSKDKFDACGIGESGKKVFSLTSTMDRNGFEKLVLHLKNIQSPLLGLESTACYHIALFSYLTAQGYRVVIINPLLISNFVKLQLRKTKTDKKDALTIAQFLMLKREALEERVCSADVMELRDLARRRERLTDQVTKLKGNMKRILSVTFPELEHLTGVFAKSILQLLIRFPSAAALRNATVDEVASIVVPRSWGRKSKAWVETLVATASSSIGVSSPAKELVLKQDAEQLLYIQEQIKEVTKLLMSLCTESMKKDIQILTSLQGIGASTALQFLIEMGGDIRLYKNDKKLIAAAGLDPSTYQSGTYQGKSRISKRGNRHLRRVIWIMAKNVIFSNELFRSYFYKRRGEGLPYKMAVLATAHKLIRVMFSMLMHQTYFKEGGK

SEQ ID NO: 85792 - protein, 316 aa, unidentified
MYLGIDVSKLTIDCYLIADGQNHQKKFPNNKGGFEQLIKWLQSHKVTDKLHCVCEATGTYYEALAEYIYSRYTITVENPRKIKGYAIAELQRSKTDTQDAKLIAQYCQDRKHKLKAWQPPAKEQKQLQEIARYLDYLKQQRATEKAKQHEAPDYIKSHIQTTISNLTAQIQTVKKQLLQFYKDNPSYNNLRKRLKTITGIGEQATAILLSTYKRHEFKNAKQFTAYLGLDPRKYQSGTSVNGKSRISKIGSSELRKSLYMPAVVAYRCNAFPDFVGRLKNKGKHIKLILIAIMRKLAVIAFTLLKNGQDFQAERYK

SEQ ID NO: 85793 - protein, 409 aa, unidentified
MERQLERCCGLDVHKATITACVRLGGRTGKAEQHVQTFGTTVGDLLVLHDWLAAHGVTHVAMESTGVYWKPVFYALESDFTCLLVNAAHIKQVPGRKTDVKDCVWIAQLLEHGLLRGSFVPPAPIRDLRDLTRYRKALIHDRTRVANRLHKALEEAGIKLASVASDILGVSGRAMLTALVQGTTDPAVLADLARGCLRRKLPALRQALVSRFRPHHAFVLGQLLAHLDYLDEAIATLSTEIERVMTPFAEPLRRLDTIPGINQRTAEVILAEVGTDMRVFPSARHLASWAALCPGQHESAGKHRSGKTRKGNRWLRTALIEAAAGASRAKNSALQARFRRVLRHRGPKKAVVAVAHALLRMVYHVLADGTVYREAGADYYDRHHSQRITRRALQTLERQGYRVTLEPAA

SEQ ID NO: 85794 - protein, 418 aa, unidentified
MNAELYARLSRRYLALDIHKHYSVVAGVNFESQVIVDPVRIEHADLENWLAKNIQSTDFVVIESTTNAWHIYDLLEPLAEKVLVANPIKVKQIAQARVKTDIRDTLILARLLAANMIPEVWVPPAHVRDLRYLLSQRRHLVGMHTATINRMHSVAHRHHLSHARGKRFNKKNTKWQGDEELSDTEKFQLELDMSTKEHLAEQRDKITKKLARMSHEKPWAEDMMYLMQLPGFGVITGMAVLAAIGDITRFESPRHLASYSGLIPGLDQSGVKLRGKKITKEGRKDLRWAIVEVAQRAVKSDPLWKHRFNELQRRMHKNQAIVVIAHRLLALVWYVLSRKQAYRHFSHERIAYKYLTWSWQLGDADRDGLTRQQFTRYYMMKLGIGHDLEQIELNPRYPRRLASEAEVLALRPELKQTE

SEQ ID NO: 85795 - protein, 409 aa, unidentified
MNVMHPRCAALDLGKDVLVAAVRVQEETRVERDCRTYGTTSHQLLELSSWLSSHRVTQVAMEATGSYWKSVWHVLEGQFELVLAHPASIRNLPGRKSDVNDATWMADLLAHGLVRGSFVPPAEISALRELTRTRKQFVREVARHTQRIQKILDVGNLKITGLITDVLGASGRAIVKALIAGEADPERLADLAHPRLRVKRERLVEALHGRLTLQQRGLLGMHLNLIETIEASIAQLDQDIERVVTPFRGIVERLKAIPGLSQVSVPALLGEIGVDMSRFKTHGHLVSWARLCPRLDESAGKVHSTRTLKGAAWTKTLLIQTAWAAVKTKNSYLQAQFLRLRARRGAKKAIVAVAASILTIVYHVIRDGTDYRDLGANYFQTRDRSKVARRFVARLQQMGYNVQITEAVA

SEQ ID NO: 85796 - protein, 346 aa, unidentified
MMIIGCDFHPSWQQVSWLDTETGECGERKLVHAGGDAKMFYQQLAAPVLIGMEATGNSQWFIELVEDLGHEIWIGDAAQIRASYVRKQKTDKRDAAHILKLVVEGRFPRLWTPDREQRDLRQLVLHRHKLVEIRSRVKNELQHLSLNKGMQRKAKLWSQAGQKMLRELPLKPWAACRREDLLGLLSMLNQQVDQLDTAVQHAAEENPQARLLMTQPGVGPNTALAYVLTIGDVSRFPRGKQVASYLGLIPREHSSGGRQKLGVITKQGNRMLRSLLVEAAQIAVRFDPEMKKQYLHRCHQKPKGVAKVAAARKLAVRLYWMLRTNVAYPEIVRIESSPRVPLVGAS

SEQ ID NO: 85797 - protein, 358 aa, unidentified
MVDKVTEAAVVGGVDTHKDLHVAAVVDQNNKVLGTQYFSTTRQGYRQMLAWMTSFGTLKRFGVECTGTYGSGLLRYFQSAGLEVLEVTAPDRMERRKRGKSDTIDAECAAHAAFSGIRTVTPKTRDGMIESLRVLKTCRKTAISARRVALQIIHSNIISAPDELREQLRNMTRMQLIRTLGSWRPDASEYRNVTNVYRISLKSLARRYLELHDEIADLDVMIAAIVDELAPELIKRNAIGYESASQLLITAGDNPQRLRSESGFAALCGVSPVPVSSGKTNRYRLNRGGDRAANSALHIIAIGRLRTDAKTKEYVARRVAEGHTKMEAIRCLKRYISREVYTLLRNQNRRINSIPITA

SEQ ID NO: 85798 - protein, 355 aa, unidentified
MKNQAIHYLALDVHQATVVASMRNEQGVVVMRATVRTEAQAVVGLVRAAGGRVHVAFEEGTQAQWLHDVLEPHAERVIVCNVRGKNEVANKSDRLDADDLSERLRLGSLKAVYHGTPSVLTLKELVRNYNSIVEDATRVMLRIKALFRARAIRTPGRSVYRPAQRHEWLDQLTTPGARVRAASLLEQLDLLLELRSKAKAAMIAEARKQPGWKPLRSMPFLGVIRVSQLLAIMATPHRFRTKRNLWPYAGLAVVTRSSADQEFAGGKLRRRARAARTRGLNRNHNPMLKSIFKGAATAAAAKAGPLKDSYDACVARGTKPELARVTLARKIAAIALRLWKKGELWDPAKLTIATT

SEQ ID NO: 85799 - protein, 391 aa, unidentified
MKEAITKPLKGQEKAKAKGKTDARKAVSRREGVPPRAKVLSDGTTVVGIDIGERHVNLCEIDSDDAVTETRLGNTPKKLREQFEGKAKRRIVLEAGAHTRWIAELLGELGHDVLVVDPRRTKLISGSLYKDDRVDAQTLAMLGRDAPTLLKTIPVRPLESQVVLTLVRARAGAVQGRTRIINAVRGLLKPYGYTTTKDSRGAGFTAHIRATLDPILLRLVDSLLVLIDTFNAEIKRYDADIELVLPRFAPDAVHVTSINGVGALTVLYFVALVGNPGRFEKTRDVGPYLGLCRRRQDSGDYRSELGITKAGDNLMRALLANCAAYILGPFGQDSDLRQWGLKKVGGGSRAEKKKAKIAVARKLAVLILTLWKTGRVYTPFRKPANEATKAA

SEQ ID NO: 85800 - protein, 325 aa, unidentified
MQGKLMSTDSAEAVYAGIDVSKDWLDVYLHPAGVQMRLANRLDGLRRLRRQLQGLAVERVVLEPTGKYHRMAHRTLSTWGYPVAVVNPWRARRFAEARGVPDKTDRLDARLLALLGQSLSPSPTAPARPELEELQELVNARSAAMAEAVAVGNRLEAAQSGFLRAELARRRKSLAAHLERLSARIARCIQADPGLAARQAILCSIPGIGPVVAAALLAGLSELGQGSGKAAARLAGLAPVADDSGNRKGQRHIHGGRMAPRNALYMAALSAARYEPGLKACYDRLIARGKAKKLALTAVMRKLVVLANTLIAANRTYSKTPPQNP

SEQ ID NO: 85801 - protein, 359 aa, unidentified
MQRNKISFKGQKIFVGIDVHKTTWEVAVLTESGLLRRHSQESSAKVLFDFLRKHYPDGEYHTVYESGFSGFATYYALKEFGIECTITHAADVPTTQYEEVMKTDRIDAEKLARALKNGEIKRPVYIREKDNIDDRAVIRIRKTIQKQLSGYKARVKHMLHCNGVEIPECYSKPSQYWSRAFITWLMKDVKLLSSTRRSLDLLIRQVEVIRGTLLEATRELRKLSQTERYKHRFELLMTIPSIGQHVSMCILTEVWDVDRFPNERAFAHAMGLVPTCHDSGPHKSNGEQTFRGNRYLGPMIIEACWVAIHKDIGLGACYAYHKQRSNPQKAIVRVARRMSNIIYSVLKNDKAYEPYQWDK

SEQ ID NO: 85802 - protein, 430 aa, unidentified
MKSNTQNKKIEAITEKTLVIGIDVGSETHYARAFDYRGIEFSKKPFKFSNSEAGFEMFKAWILDIKEKHEKDKVVPGMEPTGHYWFNLGKFLQDNEMKPVLVNPHHVKKSKELDDNNPTKNDRKDPKVIAGLVKEGRYMIPYLPEGIYADLRTASNMRFQIQSELTRVQNRISRWFNIYFPEYKTVYGKPDAISGMMILKKAPLPEDILTLGVEGVNQIWRDAKIRAVGKKRAQTLVEAARHSVGTKEGATAARIEIRMLLEDYESRNNRLQEVMFLIEELVKQIPMAEKLMEIKGVGIKTVSGFLAEVGDITRFSSPKELQKLAGLALVENSSGKHKGQTTISRRGRKRLRYLLFEVAMSLVGKNPEFGTLHHYYTTRKVNPLKKMQSLMAVAAKLIRVFYAMLTKGVEYDPSKMLGDIKRPAEYMQAA

SEQ ID NO: 85803 - protein, 356 aa, unidentified
MKHTILNFINQHFFVGIDVHLKQWKVTIRSAGIELKTFSMNPFPQELYQYLQNHYPGGTYHLVYEAGFCGFWIQRTFTELGVQCIVVHPADTPTSAKEKVHKTDPVDSRKLARELEHGSLKALYVPQVASEQLRSLMRLRFRLVQQQTRTKNRIKGFLRVNGISIPAVHLTNPRWSGAFILWLKGVHPVSVAGGFTLDNLILQLEQTRLHLSGVLRQLRREATSKNLAATVEAINTAPGVAFITTMTLVTEIIDVRRFSRFEHLCSFVGLVPSIYSSGDTTYTRGMSFRHNQYLRPLLIEAAWTAVRKDPAMTLRFNELCRTMSKQMAIIRIAKKLLRRIFHLWKQQDRYAYALVA

SEQ ID NO: 85804 - protein, 359 aa, unidentified
MQRNKISFKGQKIYIGIDVHAKTWEVCVLTESGYKERHPQQASAKTLFDFLKKHFPDGEYHAVYESGFSGFSTYYALKEYGIDCVVTHAADVPTTQYEEVMKTDKVDAAKLARSLRAGDIRPIYIREKENIDDRSVIRIRKTIQKQLSGYKARVKHLLHCNGVEIPDRFVRPGTHWSRAFIKWLKEDVVLLSSSRLSLDLLVKQVETIRQTLLDATKSIRRLAQTDRYRNNYELLMSIPGIGVSVAMCILTEIYDVKRFRNENQFASYLGLIPTCHSSGENTASGEKTFRGNKHLGPMIIEAAWIAIYRDYGLGMAYAGYKQSMKPQEAIVKIARKMSNIIFSVLKNSRKYEPYRWNKE

SEQ ID NO: 85805 - protein, 390 aa, unidentified
MTITNSTDDFLRLIAILRESGLPVRIGFEATGNYHRVLMYHLGVASFDLKLVSSVALARTREALHNSWDKNDPEDAKVILHMLQIGDLQIFQDPMVAGRNDIQELSKAQDAVSRAKTALWHRILIHYLPLYFPEADRFRRSSRTDWFLAFLEMFPSPQMILALTKEESIKAAWEVVGRKVEKSLMLSDIYETAKMSAGLPVSPNSDAIRMFRMMLAERRSLIRQRNAIEDRAVELLSASADYQQLRIIPGIGPINALTILAEAGDLRRFRRHRQFLKFCGMNLATVQSSMFRGRSKISKYGNARLRCTLWLAGQTAVLKKTNSFRDKFERYIAQDRHNPDLRRKAYTAIAAKMAPTIQAVIKSGEPYRPFFEGVSPDGRTPLCKAMEAGS

SEQ ID NO: 85806 - protein, 353 aa, unidentified
MEKIIKQVVGIDVAQDELVVCIGRMYAGVTVELYSHKAFPNTLKGFNAMVEWSAKLSDSGIAMRYVMEATGVYHESLAYFLSERGDKLSIILPNKISNYSRTLDVKTVTDKTASEAITRFGLERALDNWEPPKGIYKILRQLTRERDQVVETRTVAKNQLHAEESEAKPNKTSLARTKKHIAFLDKQEKEIKEELAQLIKENAEVKRIVIILCSLPGIGLLTAVTILGETNGFDLIRNKRQLASYAGFDVKEKQSGTSVKGKPRISKRGNKYLRKAMHMPALTAIRHDERFKAIFARIVSKHGIKMKAAVAVQRKLLEMTYTLYKKQEKYDNAYLTKNDLVIEGYVHELNIKN

SEQ ID NO: 85807 - protein, 334 aa, unidentified
MEQITTVGIDLAKNVFSLHAVDGAGRVVLKKTVRRDQLVHVVLGLPPCLIGMEACSGAHEWGRRFQALGHAVRLMAPKFVAPYRKGGKNDGNDAEAICEAVTRPSMRFVPVKSVEQQALLTLHRVRQGFVVERTATINRLRGLMSEFGVVLPLRSVNVRRLAAAAAEALPELARQAISDLLEQLRLLDERLDAYDRQILAQARLSEPAQRLMKMRGIGATTALAIVATVGDAREFKNGRQFAAWIGLVPGQYSTGGKMRLGHISKRGDAYLRNLLVQGARSVLQSAASHQDRLSRWALELLPRRGYYRTLVAIANKNARIAWALLAKNETLRPT

SEQ ID NO: 85808 - protein, 369 aa, unidentified
MRFYNERHAFYCGVDLHARSMYLCIRDHAGQTVFHDDLPAEPDAFLAAIAPFRDGLVVACECLFCWYWLADLCAQTQIPFVLGHALYMKAIHGGKSKNDRIDSEKIAHLLRGGNLPIAYAYPKGLRETRDLLRRRMYLVHKRAEVIAHLVNTNSQYNLPPFGKKLIYARNRTALNIPRRFTDLSVRKNVEIDLALLDSLDELIGDVELYLTRTVKVDDADAFHRLRSIPGVGKILALVLFYEIHDIRRFASEGDFLSYARLIRPVKTSAGKVTAGGGGKIGNAHLKWAFSEAACLLARESDQAKRFLARKEKKHGKPKALGILAARLGRAVYHMVRQKRAFDVKRFWNGDPNVNAAEAKKAPARPRRRA

SEQ ID NO: 85809 - protein, 354 aa, unidentified
MPCLPVEVILGVDTHRDTHAVVLVDLVGRLIATATFPTTRPGLRALIKWAQQRGNVRRAGVEGTGSFGAGLTRALHHEGIEVVEVTRATRVGGRHRGKNDTRDAEAAARSVLSGQATAAPKARDGIVESIRVLRNTRASAIKARTQAILHIKNLIVTAPDELRETLSPLTNRQLVKHCARMHRSSRRDSLAATRHAMRSLARRHQDLDCEIAELDELLGDLIAQAAPRLLKQPGIGPEIAARMLLVAGDNPTRLRSDAALAALCGASPIEASSGKTIRHRLNRGGDRQGNSALWLIANNRMIHHPETREYVKRRTTDGKSTKEIRRCLMRHIARGIYPLILADLHDTHQQSALT

SEQ ID NO: 85810 - protein, 423 aa, unidentified
MKFKSQDKQNQLIEKITAQHLVIGIDIAQQLHVARAVNFRGIVIGHPLSFTNDEDGFQNLLRWIHSLQAAHSLSTAIVGMEPTGHYWLNVSRWLAERQFEVVLVNPHLVKKNKENRDNTPSKSDKKDALVIADMVKNGYYSFVRNTPEAFEELRVYLSNRESVVTRLVSAKNQIHRWVDVVFPELRQVFKSLMCTGALATLRLFPIPEELCKQQPKDIIEGWKSLMKRHSGERKARALIALASSSVGSKQAIQAYKLHLQQLLDEHDLACQQLKTVEAEIIAVLDRIPFAKSMLAIKGISAISLAGILGEAGDLSSFVHGNALLRHAGLNLAEASSGKWTGQMKISKRGRSRLRRFIFMMAMSLVANNPEFKAMHTHNVQVRKMKKMRSLMKLCGKLARILVGMARRREAYNPQKTLPLPLAA

SEQ ID NO: 85811 - protein, 369 aa, unidentified
MDVHSTNFTLCAMEPVLGGEDRIFANIQVTPDYKNIILFIEDLKMKLGISDSYDILCGYEAGCLGYSLYNQLTNVGIKCVILAPTTMLSPQGVRIKTDARDALMIAQCLAYGGYRQVYVPTEEDDSVKEYLRMRDDHKLALKKLKQQINALVLRHGFQYSGTKWTNAHWKWLRLLELSPLYREVLNEYMSSFEEYTAKIERFDKRIEELAAQQKYQLNVKKLECFLGVKTHTALSLVVEVGDFHRFAKGNVFAAYLGLAPGENSSGEHIHRGGITKAGNSHLRLLLIEAAGGICKGVIGHKSKELRGRQNGNTADVIAYADKANTRLRSRYYKFIRHGKKRNVAVAAIARELACFVWGMMTGNIEPRLA

SEQ ID NO: 85812 - protein, 347 aa, unidentified
MRFYTHQHKHYCGIDLHAKAMYVCLLDQHGTKLVHKNLPTTPEAFLRVVAPYRDDLVVGVECIFTWYWLADLCAKEGIAFVLGHALYMKAIHGGKAKNDKIDAHKIAVLLRGGMFPLAYVYPAEMRATRDLLRRRCHLVRKRAELLAHIQNTNSQYNLPEIGKRLAYQANREGVEDHFPDPSVRKTIAVDLSLINHYDQLLGEVELYLTRSAKVHDVQTFARLQSVPGIGQTLALVLLYEIQDIRRFPRVQDFVSYCRLVKCAKESNHKRLGTSGKKIGNVHLRWAFAEAAVLFLRHNQPGKEYFTKLEHKHGKAKALTVLAHKLARAVYYMLTREQAFALTRFVTA

SEQ ID NO: 85813 - protein, 336 aa, unidentified
MNQITTLAIDLAKTVFQLHGVDGRGVAVLRRQLRRAQLLSFIAQLSPCLVAMEACGGAHHWGREITRLGHRVKLIPPQYVKPFVKGNKTDRNDAEAICEAALRPRMPEVAVKSVEQQGLLAIHRMRQLLDKQRKQLGNQLRGLLLELGIAIPCGVAALRRAIPEVIEGVTPSLRPSLRQAWERLLELEDAYATHTRQIEQYAKDNALCRRLMQERGVGPMIASAYIATVGDPARFRNGRQVSASLGIVPRQHSTGGKPLLLGISKRGDGYLRMLLIHGARAVMSHVPGQEDALSRWLQQLAHRRGVNRASVALANKTARRLWAIWRAEGAALAIAA

SEQ ID NO: 85814 - protein, 345 aa, unidentified
MLADDVLFVIGVDTHADTHTLALIDARAQRTRATMTIPATRRGYRQALRLAERQAPGSRAWALEGSGSYGAGLARLLTERGEQVLEVERPSREGSRGRLKSDELDAERAAHAVLSGKAGATPRQGKQTQALRALLVTREGAVVACTAALNELRALIVIAPPELRERLQQRSEAALLTACLRLRTGPDPERAAHVLALRSLAARVRQLRAEAKTLETELSRRVQHLAPDLLARPGVGPISAAALLISWSHPRRLRNEAAFARLAGTAPIPANSGKTNRHRLDRGGDRRLNRALHTIALTLRRTDPTTQHYLDRRTSEGKTTREATRCLKRYLARSLYRQMETMPTA

SEQ ID NO: 85815 - protein, 318 aa, unidentified
MPPAAAVFVGIDVAKAELVIAIRPSGERWTASNDDAGIQGVVARLREAAPALLVLEATGGYERAVVAALATARLPLVVANPRQVRDFARATGQLAKTDRIDADILAIFAERMRPDPRPLPDESAQALDALLTRRRQILGMVGAERNRLEHAVPAVRRGIVQHIRWLERQLRDVDADLDRTIEASPVWRAKENLLRSVPGVGPVVSRTLIGDLPELGTLPRKQIAALVGVAPLAHDSGTLKGKRLVWGGRAPVRAVLYMAALVATRRNPVIRDFYQRLLTAGKPKKVALTACMRKLLTILNAMLRANTLWRHTASPGLT

SEQ ID NO: 85816 - protein, 396 aa, unidentified
MVVACLLKVGRKEVRTFSTMTEDLLRWLDWLTQAGCTHVAIESTGVYGRPVFNILEGAMEVLLTNARDAKGYKARKTDVIDAEWLADLLRHGLLKPSFIPPLPIRELRDLTRYRESLVREQTALANRVQKLSESAHIKLGQVASAALGVRGKLMLRALAAGETDAEQMSHLAQRTLKRKQPQLQQALEGRFTPAQRWILGQLLDQYAHGEAALQSVAERIRQEVDSSADPFVPEAVKLLDTIPGIGETVAQIIVAEIGVDMERFSTANHLASWAGMCPGNNESAGKRKSGKTTKGSRYVRAALVQAAWAARQQKGTYLAAQDKRLVRRMGKKKALVAVGHSILVIAYHVLQNRTPYQDLGGDYFERRNVDKQRKRLIRQLESLGVKVTVEEVKEAA

SEQ ID NO: 85817 - protein, 339 aa, unidentified
MDSHKDTLAVSDVDQAGRQQQTQTFPNTRHGHRRLLVWLQGQPGVVRVGIEGAGGYGRAVAMCLVQAGLVVVEVTPSLTVRERRRLRQRGKADPTDALAIARVVAREQDLPPVRRQDLSEDLRLLVDYREQLLGERTRIANRVHADLVALRPGYQRQLPELRSQRAAGLVRGLLRGQVSVRAELVRRRLDQLDRLDAEIRALKARIGDLVQATGTSLVQVHGVGPLVAARILGEVGDVRRFANRHKFAAANGTAPIPASSGRTQRHRLNRGGNRRLNRALYTVAITQARSDHPGRAYLAGKQRQGKTRREALRCLKRRISDAIYRQLLADLQPDPSPAI

SEQ ID NO: 85818 - protein, 375 aa, unidentified
MTADLQVKSYENAAVLYMAMELSNAQWRLAFGDGTRTRQVTISAGNVTELMARLDKTKQKWSMAAEVSVVSCYEAGRDGFWIHRQLAELGIDNRVVDAASIEVPRRARRAKTDRLDARVLLEKLIRYERGERGVWRVVRVPPPEWEDLRQLHREREQLLTERTRHRNRLGSKLVAQGVRIRIDGKFPERLDAAKLFDGSPVPPHLKGGLIREWARLQVVNTQLRALESRIREQIQTHGPLKAVGSLMLLSGVGWVGAWILVLELFGWRELANRKQVASLAGLVPSPYNSGNMVRDQGISKAGNRRVRALMIQLAWLWLRYQPHSKHSRWFEAHFGGGSKRQRRIGIVGLARRLLIDLWRFVDAGVVPEGARLKVA

SEQ ID NO: 85819 - protein, 489 aa, unidentified
MSTTGKQSRKKKDSTLNARASKRNARASHSQQGKGSQRRSKLTIANPHAAAVDVGSQVHYAAVPEGRAEQSVRSFGAYTAQLDELVKWFKDCEINTVAMESTGVYWIPLYQKLEEAGFEVLLVDARQVKHVPGRKSDVQDCQWLQQLHSYGLLRAAFRPEDSICRLRTLQRHRKNLVECGAMWIQHIQKALNEMNLHLHHVLTDISGQSGLAILDAILAGERNPEKLASLADHRVKKSQAQIQAALTGNYRPELLFVVNQALHDYRQMQQQIAQCDLSIEKQLATIATCTVRKRGPEQTPPPQGGAAVKARTRKPKDPLELSLAGHLKRILGVDLTTIPGLNVLAVLSLISEIGTNMAKWRNDKAFVSWMGLSPNNKVSGERVLSSRTRKVNNRAATTLRLAALLLGRTDTPLGSFYRRKRAHLGAPKAITATARKLGCLIYRLIKDGQAYQGPDLHTYELKYKNQILRSLRKRANGFGFDLVELPKAA

SEQ ID NO: 85820 - protein, 343 aa, unidentified
MRIVEVCGGVDTHADNHVAAALDHNGGLLGVESFPADQTGYEGLLVWLVGFGPVIEVGVEGTGSWGVGLTRFLTAAGIEVKEVDRPNRQNRRRVGKSDPTDAISAARAALSGEASVTPKSRNGPVEEIRVLLVARRSAREQRIQSLNQLRHLVFTAPEEIRNRFKDRPKTGLVSEAANMRPRKGSDPVTFTTYVVIRNLARRIKGLNAEMRSIDQTLRLLIEETAPSLVALHGVGTDTAASLLAAAGDNPDRLHNERSWAHLCGVAPLPASSGKVTRRRLNRGGDRQANAALYRIVLTRMSSHPETKAYVTRRRNEGLSTPEIMRCLKRYVARQTYKHLPHMI

SEQ ID NO: 85821 - protein, 321 aa, unidentified
METVDFEQVINRGCGIDVHKKTVVATIDGEGLKRSTREYETFTSSLTELKDWLLGNGITHVAMESTGVYWKPVYHILEPSGIKVWIVNARHVKNVPGHKTDKKDSAWLCKLLLAGLLKPSYIPPKEQRELRDLTRYRKKLIQDIASNKNRIIRILEDCNVKLSSVLSDTSGVVSNKLINKLCDGKPITMSDIDEVYHKKIAATKQELWEACNGIVSEHHIYLLQTIRTNSRHIESLIDELNDKIKKMLLPYENALGLLQEIPGLSRKTVEDLIAEIGLDMEVFPNEKHLCSWVGVSPGNNESAGKKKVDGQLTVTNKQNPH

SEQ ID NO: 85822 - protein, 392 aa, unidentified
MLYLGIDIGKRTHVASLLDEKGKILFKAFSFSNTTEGGEKLLSNLNNFINSSDEVEIGMEATGHYWLSLFSFLLEQSFTVYVVNPIQTDGWRKGTEIRKRKTDIIDSMLIADLIRYGDFLEASLSDEDTLSLRNLSRFRNYLVNSSSDLKRKAVAVLDQVFPEYESVFSDIFGKTSKELLLHFSCAADFDDITSEQLKTALENIKFKHLAAKKLDALSDLASRSFAIKYATDSFSLQIKMIIEQLNFIENQIAQLNQELKLLLDKINSPISTIPGIGPVNEATILGEIGDINRFSTPSKLVAYAGLDASISQSGEFTSPNSKMSKRGSPHLRKAIYQAAFIASVNDPVFKAYYLKKRSEGKHHIVAVSACARKMCNTIHAIMKKNIPYKPQI

SEQ ID NO: 85823 - protein, 346 aa, unidentified
MLYVGLDLSRKRLDFHALREGGELVERGAVPADREGLARLVYLLGGHDLHVGAVIESMNGARFVHDQLELAGFEVEIADAQRVKGLAPLACKTDKIDAWVLAELARRDLVPAIWLPDPAVRGERERARFRIHLVRQRTRLKNRVHATLIAHGHPCPVSDLFGTRGRKLLERLALPEPWRGTLEASLRLIDQLEGEIDACERELRSLGADHRYVPLLMSCPGIAWVLGYTIASELGDIARFASPRKLAGYTGLCPRVEQSGERDWRGPLSKNGPRYLRWALIEAAQHAGSSTYYRDLAQRKRAQYPGPRGSKIAAICVARKLAEAIWHMLTRNEHFAPAGATRPLTA

SEQ ID NO: 85824 - protein, 309 aa, unidentified
MKEELVYLGVDIAKSYLDAAIGNEKRRFANERIGHRELIKWVKQLKAPVQVICESSGGYERALVQVLARAGVKTSLVQANRVGQFARAAGILAKTDRIDAEVLCEFGEVMRPQTLTGGKLEQEQLRELESQRRHLTHLLVMEQNRGARLSDASVQRFNRSLLNQIKKQIDQLDLLIERHIEQSQELSAKAAKLTSISGVSARTAALLLAQLPELGQLNRREVAALVGVAPFNRDSGRMRGKRAIYGGRRPVRHGLYMAAMVAARHNPILRGFYRRLRAAGKPAKLALTATMRKLLIMLNSALKTDLNYA

SEQ ID NO: 85825 - protein, 317 aa, unidentified
MNFVGIDVAKDSMEVMVHESSKHWNFINDETGLHKLIAKMKRLSPCLIVLEATGGYENTVATGLQCKGFSVAVINPRQIRDFARSIGTLAKTDILDARVIAHFAAKIQPAPRILPTEEAKRLGAILMRRRQIVTMLTAEKNRLLQATPAVRERVKNHITWLKQELSDISKELKQKVQGDPEWKEKDKIIQSVPGVGPNLSATLLADFPELGNLNRKQIAALGGVAPFNRDSGKMRGKRTIWGGRGVVRTAIYMAAFAAIRCNPLLTSFFNRLVATGKPRKVALVACMRKLLCILNAMLKNRTRWTCYSPQLVGPCYC

SEQ ID NO: 85826 - protein, 431 aa, unidentified
MEDVDDEPLFVERVCGLDIAKAEVEATIRVPSDTGSGRRQMETRTFGSTRAELLALADWLRCWGVTKVGMEATGDYWKSPYFVLEAEGFDCDLYNASQVKALPGRPKTDRADSIWLAKNVERGSISASFVPPEDIRRLRTHTRYRRHLTQARTAEKQRVEKLLEDGHLKLSSVISDIHGVSGRAMLDALVAGERDPKALAQLARGSMRGKIARLEAALECCFFTAEHAAVLSMMLVTIDHHTTQIDALTAKIGVLTAPYLHQIEQLDEVAGIGVICAQDIIAEIGADMSVFPTAAHLVSWAKWSPQVKQSAGKRKGSNATGRGNPYLGAALGEAAISAGRTQSFLGARYRRLAKRMPKKKALVATGNSMLTIVHALLGDPEARYTDLGADYYETRMNTRRQARNHVKSLERLGYQVTIQALTTDTPLTATG

SEQ ID NO: 85827 - protein, 382 aa, unidentified
MQASTVGTPTSGHCGTIFVAIELSQKTWLVTLHSPERDRISRHKLEGGDHAELLALIERTRARVAEKLGSAPRVVSCYEAGYDGFWLHRLLEAAGITNFVFDAASIAVEQRARRTKTDRIDGELLLRTLMAYLRGEPRVVRIVRVPSVEAEDARRASRERDRLVTEQTAHTNRIKALLRLLGMAVGNPRRRDWLAWLARQRDWQGQVLPAHLLAEAQREHARLMLVREQLAALEEAQAAQTLPVPAPTAERRDLLLRLKALGPAFTATLVNELFYKDFRNRREVASYCGLTPSPWKSGGIDREQGISKAGNRRARHKAIELAWLWLRHQGDSALSRWFRTRTANAGKRAKRVAIVALARKLVVALWRYLTTGLVPEQATMKA

SEQ ID NO: 85828 - protein, 415 aa, unidentified
MDVVHERVAALDVSKKDAKVCVRVPGARKGTFTREVTTWGSMTGQVLELREFLLDKNVTLVVMEATGDYWKQFYYLLEDALPVQLVNAAHAKNLPGRKSDVNDAQWLAQLAAHGLLRGSLVPPPPVRELRDLTRLRSKLTNDRSKEHQRLEKLLEDAGVKLSVVATDILGVSGRLMLGALCAGTAGPEAMAELAKGRMRSKIPELREALTGRFTSHHAFLTRLHLQVIDGFDAAIAELEARIEVVMEPFRPLIDLLLTMPGIGEKTAQVMVAEAGAVIDCFPSAACFASWAGLAPGSNQSGPKTKPARTRHGNTYLKGALGIAALSVSRSRGTFLSARYHRIATRRGPMRALVATEHSMATAMWHMLTQGVPYLELGGDYYTRREPERAKARITAQAEALGLAVTFSPIEPDTAA

SEQ ID NO: 85829 - protein, 363 aa, unidentified
MQYRTNNELSSLEETRCEFNGGTGVIKLGIDMHQDFYVVVEQLGGSNPKPPQRFKKEAFVLWAAKLKKQGNQVHAVYEACGFGFGLQRQLSALGIDCHVVCPQKLDEQNRRVKTDGLDAKALCLKLDRFVQGNGAALARVRVPTEKEEQLRAIHRQREQLVKARKRLEAQGRSLMVNYGVEPIQQWWKGRAFARLRVPTWMKELLATSQPILLALEEKIRALTVQLQNAAEPNQPRGIGALTSVVIDREIGNWQRFNNRRQIGSYTGLCPGEHSSGNTRLQSCVTKHGNPRLRAALVELAWRLVRFQPNYKPIVKWRATLAKGALATGAARKKAIVAVARQLAVDLWRIRTGRLQAQELGLIN

SEQ ID NO: 85830 - protein, 320 aa, unidentified
MRNAVGLDISKLTFDASAIVGNAEYSAKFDNDSKGLDQFSDRLKSLGCQNLHICMEATGNYYEEVADYFAQYYSVYVVNPLKISKYAESRFKRTKTGKQDAKLIAQYCRSAQESELVKRQKPTDEQYRLLRMTAAYAQIKSECAAMKNRHHAAKDEEAAKAYAQIIKAMNEQLEVLKEKIKEQTEKPNCKEGVKRLETIPAIGRMTAAVLFHHLTSSKFETSNKFAAFAGLSPQQKESGTSVRGKGKLTKFGNRKLRAVLFMPAMVAYRIRAFPGFIKRLEEKKKPKKVIIAALMRKLAVIAYHVHKKGGDYDPSRYKSA

SEQ ID NO: 85831 - protein, 476 aa, unidentified
MSRRHQKQKRASQGGAVPSLSCIEPNAAGIDVGATEIFVAVPQDRDPSPVRSFETFTEDLHQLKNWLQQCGITTVAMESTGVYWIPLFQILERAGMEVCLVNAHHVKHVPGRKSDVIDCQWLQYLHSVGLLRASFRPEERICAIRSLLRHRDSLVQMAAAHVQHMQKALTQMNLQLHHVLSDITGQSGLAILDAILAGERNPAVLAQLRHARVQASEEVITKSLVGDYQREHLFTLRQSLQAYRYYQSLLTACAQEIEEQLQNLDSRTPPDASPLPPERYPHRPRKNEFRFNMRSELYRIYGTDLTAIPSINALTGYTVLAEVGTDWSKFRNGDAFASWICLCPQNKKSGGKILSAHTRRSANRVNRALRLAAQTLERSTSYLGAYYRKMRARHGAPVAITAAAHKLARIIFHLVTTGEAYDESLFAAEEQRQRKRMENKLKRSAQQLGYRLIPLEQIVCRRRTTSAQTNGKQTQT

SEQ ID NO: 85832 - protein, 422 aa, unidentified
MAGLSTGFGCVNGSARVALRQKIWIGIDVGRIGHHVCVVDENGKVCWSGKLANDQRAIEAVIDRARKTGIESQWAIELTSPLAALLITVLLAAGESVVYVPGRMVATMTGVFRGEGKTDAKDAHVIADTARMRGDLQPVTAPDELVAELTQLSSYRSDLMGDWVRGVNQLRAMLGAIFPALEAAFDYSARSPLILVAGMCTPAEIGDAGIDGVTAHLTENGAWRKGIDAMAAAAVAAAGTQDIAVPGEATTAILIKRLAVKLLELDREIKDLDKQITARFREHPPAAIIELLPGMGPHLGTEFLVSTGGDAVAEFHTPGRLASYAGLVPVPRDSGRISGNLHRPKRYNRRLRRVFFMAALSSIKNEGPSRTFYQRKRTERLIHTQALLASARRLVDVLWALLRDNRPFDTKPPSITGVPAAA

SEQ ID NO: 85833 - protein, 379 aa, unidentified
MDLSTVALPPVSEKPATLFVALELSKATWLVALHSPAADKVSLHRLAGGDTQELLTLIARKRDQAQTALARPVHVMSCYEAGYDGFWLHRLLCASGIDNRVLDAASILVDRRSRRAKTDRLDAAALLRTLMALDRGEPRVCRVVRVPSPEHEDERRRSRERARLVNERGQHASRIKGLLMTQGIRDFAPTRRNWRERLAELRTADGRALAPCLTAEIERECRRLWQVIGMIAEVEAEQVHAAEKAATGAVQLSRLRGIGLTSASILANEVFFRSFQNRREIAGYLGLASSPWNSGSVSRDQGLQRSGNPRARRTAIELAWLWLRHQPESDLARWFQERVGAGKGRIRRTMIVALARKLMVALWRYVTQGLVPEGAVIKG

SEQ ID NO: 85834 - protein, 415 aa, unidentified
MPNPLFVGIDVSSRDNVVYCLSNDDEKRPLSRFIVLNNRPGILELKQRISQLVQKHSFDQILFGLEHTGCYSTHAAMYLQHHLDFGCEDVNVYLFNPSLIKEFKKAHFLDAPKNDRVDAWYIASKLMAGHLPHPFTWSEPLMALQRLTRARYHLMQALVRESNFLMTNLYLKCSDYTLVFDNKLSATSLAVMEEFESAEALAEASLDKLTWFLVQHGKNRFDDPQAVAKELQKAARSSYRLPKAMADSVNLAMASSIRVIRTLQEQLKSLKKAIEDHLDTIPQTLDSVPGIGPIFASGILAEIGDINQFDSHKQLAKFAGLAWTQHQSGNFTANNTRLIRSGNRFLRYYLIEAADSVRMHDPVFAQYYALKKAEPKQYAHKRALALTARKLVRLVFYLLKTNQLYQPGGRNRHDS

SEQ ID NO: 85835 - protein, 354 aa, unidentified
MIVIGSDPHKRNFTFAAVEHATGELLGQRETAAQAEQFDRVLRWARELDEQRVWAIEDCRHVSGRLERFLLARGERIVRVSPKLMAGARKSTRQPGKSDAIDALAVARAVLREGVESLPCARLDERALEIRLLLDHHDDLVAARTRDQGRLRWHLHDLDCPIEVPVGGLDRRVWLQRLSRWLARQPQTARVRVARRLLSAIRAATRQITGLVGELGGLVAAYQPELLEQPGCGPLTAAKLIAEIAGAERFKTDAQLARTAGVAPIPASSGRKDRHRLDRGGNRQLNLALHRLAVNAGRHDAPTAAYLARKQAQGKTRMEALRCLKRHLARRIFHLMTTNTPTPGKTPTPALALT

SEQ ID NO: 85836 - protein, 427 aa, unidentified
MPYKIAGIDVHKRMLHVVVSDVQVDGEYDFTRRVFGSLPEALRSLAAWLVEQQVEEVVMESTAQYWKPVWGTLERYWKRICQTREGALATSGTLHLALALSNRGRRGRKKDFRDAERLVKRLVAHELTLSFVPDVEQRLWRTVVRTKYQLTRNRVQLQNRLEALLEEAHIKLSSLVSDLLGASARRMLEAIAGGETNRETLAALADRGLRATQEQLQDALGVCQELNPVYRRLIKMVLDEVASIDKRIEQLNQEMANLLRPHEDQVKRLAEVPGLGVDSAQQVIAEVGATAATFPSEKHLSSWVGACPGAEESAEVNHSRRSPQGNRHMRRILNQAANAAAKHKGSIFQILYGRYVPRLGHNQTIGIIAHKLCRLVWKILHRGIRYEERGPEVSKASKQKRTRKMIRQLSRLGYRIEPSPSQSAITA

SEQ ID NO: 85837 - protein, 376 aa, unidentified
MAQTDVQYPTIHLAIELSRSAWLVAARLPGVEKPSLHRIEGGDTAALLALAAALRARAAARLGTPVRVACCFEAGRDGFWLHRLLTAEGIAAYVLEPTSILVNRRARRAKTDRLDALGMLRVLAAYLGGDRQACSMVRVPTPEEEDAKRPHREREELVRERVRLENRIAALLATQGVRERPSLRSWERDLAALRTGDGRPLPPHLRAELDRLRRRLVLTLGLIREVEAERDAALAAGPRDAAGRKLAALCRLRGVGANFAAVLTREVFYRAFDNRRQLAGYVGLAPVPHQSGEADRDRRISRAGNARARTTLIQLAWLWLRYQPDSAPARWFRDRVGALRGRTRRIAIVAMARKLLVALWRYVETGLVPEGVEVAA

SEQ ID NO: 85838 - protein, 385 aa, unidentified
MVYIGIDIAKFRHFASVVSSDGKVIVKPFPFENSRKGFMKLIEEIENFQDCLIGLESTGHYAENLIQFLYERDYSIAVINPIQTDSLRDSNIRKTKTDKIDTMLIVQCLMLKKYSLVSSKNIDMIKLRRLSRFRLEMVQQQTRIKTQLTACLDIVFPELAHFFKGNLHLKVSYALLAKYSSAKAIRSARIDGLTNLLYNNSHGRYNQEKALELKTLAKESVGLDNPAIELQIQCLIKQLHLYQEQIQDIDLSIMTLMEIINSPILTIPGVGYTLGAMIISEIDDIKKFSNPSKLLAFAGLDPVVKQSGNFQSDSLKISKRGSTYLRYAIYRVAFLIIYNNETFHNYYIDKRSQGKNHRVALGHVCNKLVRIIFKLLTDDIPFNLS

SEQ ID NO: 85839 - protein, 346 aa, unidentified
MPIYCGVDFHSRQQTIAWCDTRDGEIHFDKLAHQLDDVRAFYARFEGEVIVGLEASGYSNWFEDLLSELHHQVRVGNPAEVRARARARQKTDRRDAELLLDLLLKDEFPQIHRPSAASREALRLLRYRQRLVQLRTKTCNNLHAIALSAGVSLKAKLLTKAGRRRLNELTLSTEHRRQREEWLELIDQLQTRIQRADQELARLAADDDRVTRLQTHPGIGVQTALALVHTLEPLRRFANSRKVAAYVGLEPREYSSGDRQRFGRISKAGPRLLRYLLIEAAHHAVRHDPDLKRLYWQLLQKKNKGKAIVAVARRLLIRAYILWRDEIDYAEFLRRGVEVQSARKSK

SEQ ID NO: 85840 - protein, 317 aa, unidentified
MEGIWIGIDVSKKKLDAAVWVVGKKYRTLKVDNDAAGFAALLLWSRALASGLELRFCMESTGDYGFALALYLVEEGEWVSVVNPAWIKHYGRALGRLNKTDTADAKLIAQYALERKPHEWTLKEPGLRNLFRLHRRREQLKTMVAMEDNRTECPQAVGPACMASVKRVLKALKAEQRDVEKQILQLINEHSKLKTDVQLIHSLPPLAQNSAVAILAEMPDVNECQAAPNYAAQAGVNPTLAQSGSSVRGSSSMSRGGRKVVRAVLQMPEVKAIYDRLRARGKKHRQAMVAAMRKLLMIVYGVLKHRRPYIPNFNLNT

SEQ ID NO: 85841 - protein, 339 aa, unidentified
MEPATIGLDLAKHIFQIHASDAAGQTLQSKRLSRKDVLPFFSALSPCLVGIEACASGHYWAREISKLGHDVRLIPPSYVKPYVRRGAKNDAADAAAICEAVSRPGMRFVSIKSEQDQAFLMLHRARGLLVRQRTMVACAIRAHLAEFGLIIPQGRHRVDGLAIAFEEVREAIPFEACFAIDSLIGHLGELNTRIGAIDERLAQIHRNHPVCRLLASIPGIGPITATAFAATIPDPSMFRSGREFAAWLGLTPRQNSSGGTCRLGGITKQGDRYLRHLLVLGARTVVRYPKARATLDGSWIESLLQRRRPMIVAVAVANKLARIIWAMMTTGELFRSARV

SEQ ID NO: 85842 - protein, 305 aa, unidentified
MGSSGKVRTYKNTVAGIKKLLKLVGKFENAHIILEATGTYSKRLVYGCLQADVPLSMLTPSQGKSIGLVLGKSNKTDAEDARSLARYGEMANPSVYKHPSEKEEHNRQIIKYISYLNKEKTRISNKLHALSFEQYPNSYVVKELEEELVKREQQIKEAMEELENLQGDELQEAIEKAETVVGIGRKTALCLILLTGGLRDFETPKQLANFLGICPALYESGSSVRKRANISKKGNKMIRSLLYMCARSATQHNPSCKALYDRLRKKGKAHKLAMVAVGHKLVRQIFAVVKNNVDFDKQYKNEKFA

SEQ ID NO: 85843 - protein, 338 aa, unidentified
MKLYGGIDLHSNNSVLAVLDEAERLVCRRHLPNEAGAVLEALAPYREALVGVVVESTYNWYWLVDALMEAGYRVHLANTAALVQYTGLKYSDDDSDARWLAQLLRLGLLKEGYIYPKQERAVRDLLRRRSRLVQQHTANLLAVQNLLARNRGYAMSANEVKRLSAETVNRLLPDPNQALAVEGTLLTMRAQEAAIDRLERAALAQVRLRPAYRHLLSVSGIGQVLGLTIMLETGEIGRFAQAGHYASYCRCVGSERLSNGKRKGRGNTKNGNKYLAWAYVEAANFAVRYNAVINRYYQRKRARTNGVIAIKTVAHKLARACYHMLREGSDFDVERAFA

SEQ ID NO: 85844 - protein, 453 aa, unidentified
MEQEEKISMEIVNPKAAGIDVGSRSHWVAVGQQESDIKEFGVFNQDLFEMADWLHQNNIKTIAMESTGTYWQNLYAVLIAKGFHVILCNGKFTKNIKGKKTDVKDCQWIQKLHSLGLLSSSFLPDGKTEQLRTYCRHRTNLIHNAASTSKKMQKYLRLLNLRLDVVVKDICGLTGLLIIRAVCKGETNPQTLAALRHGNCHKSEEDIAKALQSNGRKDYLFALQQELDTYDHLQNKIAQCDKMIEEMLNEIIDDDENKKQHHIDSKPYKRINKNTPKNIDMNLKSYQMFEGTDLLAIEGMSYSTVLALMSEVGIEGIKKFPSAKHFCSWLRLAPNNKISGGKVLSSKVPKGSNRLKIALRNAANAIGNLKDSTPLRDFFQRINFRKGRVSAVSATARKLAVVIWNMVVKGVQYINPEGYLFLDQKRKLGIVKRIQKQITKFGLTNDDLSFATS

SEQ ID NO: 85845 - protein, 344 aa, unidentified
MDHFAGLDVSVKETSVCIVDGAGKIVREVKVTSEPEALLAVLKNPAYRFKRIGLEAGPLSQWLFSALAEAGLPVVCVETRHMQAVLKAQINKTDRNDARGIAQMMRVGIYRPVHVKTLRSQKLGMLLAHRKLLQSKAIAIENDLRGTLRNFGLKVGIVGKVRFEARIKELVENLSDLAVLVEPLLLVRRTLREQTIVLHRRLLAVVRDDEVCRRLMTIPGVGPVVALTYRATVDVPSRFRKSKAVGAVFGLTCSKYQSGEIDRTGRISRCGDEMMRVMLYEAAQSMLRSKKWSWLKAWAMQIAKRRGMKKAIVALARRLAVIMHRIWVDGAEFRWTREQATAAA

SEQ ID NO: 85846 - protein, 458 aa, unidentified
MRKPDKKQLQVKRPEKSGLGLLNPNAAGIDVGAREHYVAVPADRDPQPVRCFGAFTQDLHRLAQWLLQCGIKTVAMESTGVYWIPLYQMLESYGLAVKLVNARHVKHVPGRKTDVQDCQWLQQLESFGLLSNSFRPEAKICVLRSYMRQREMLIRNAGRYIQQMQKALTQMNLKLHHVISDLSGQTGLRIVRAIVAGERDRLKLAGLKDRRVKSDVSTIARALEGDYRAEHLFALKQGLELYDYYQQKIAECDTEICKEMQTLETRSNASAVLKRKPRSRHATGFDSQAELYRVLGVDLTSIDGLNESTAQLIVSELGLDICQKWPTEAQFTSWLGLCPNNEISGGKLLKRGTRKVVNRVANALRMCAQSLLKSKSALGAYARRMRSRKDTPVAITAIAHKLARLIYRTLKYGQEYVDTGSDLYEAKYKATMVKSLQRKAKLLGYQLVSSQTLDAVVP

SEQ ID NO: 85847 - protein, 342 aa, unidentified
MEKVTIIGVDLAKNVFQLHGATADGSVVFRKKLSRLQFCKFMAGQPTCVVAMEACAGSHYWAREMAQLGHQPKLIAPRYVKAFIKRQKNDAADAEAIVEAAQRPTMRFVEPKTEEQQSRSIMFRTREQLVNQRTELVNALRAHLYEFGHIAPQGIRYLKRLECFVEDENVNLPDLAREICRDLLDRIYQLTGRIDALMKKIDALSREAEGSRRLQTMPGVGPIAALAIETFAPPMETFRSGRDFAAWLGLVPLQKSTGGKQRLGKTSKMGQCDIRRLLIIGAMAVVRWASRKGAPEDSWLARMMAKKPRMLVAIALANKMARGIWAMLTKEEDYRNPATVPA

SEQ ID NO: 85848 - protein, 310 aa, unidentified
MGVCIGVDVAKAHLDWALGRNGKVERIANSPLGVRRLVKRLHQLEFDLVVLEATGQYERLLYEKLAEEGIPVVRLNPVRVRRFGQGMGVLAKNDVIDARMLALFGEKAEPPRRPQRTSRERLLGDLAARRRQLIGIITAEKNRLEHASSCVSGDLRSLIRILENRVEKLDQKIDGVISEDEKQKGDFERLQTVPGVGPKIARALLIDLPELGTLDRRRISSLVGLAPYARDSGQRSGSRRIHGGRAAPRTALYLAAMVGSRFNPELKEMYERLRRNGKPPKLAFIALARKLLTILNAIVRDQSEWKSMSA

SEQ ID NO: 85849 - protein, 340 aa, unidentified
MEQIIGIDLAKRVFQVNIVSAQGEKKANKMITREKLTAFIVQQPPSRIVMEACGSANYWSRQFRQYGHEVKQISPQYVAPFRMGSKNDKNDAAAIVEADSRPGMRYVPEKSIEQQDIQCMHRVRQRLMKNKTALINQIRGLGLEYGIAIPEGAYKIMTHLPEHLEDAENELTTLSRELFHEMLQELQDNQQRIKTLDLRLALISQQNEDTLRLKSIPGIGPLGASALTVALGDSADFQNGRHFASYLGLVPKEHSSGGKVRLLGITKRGDGYLRGLLIHGARSVVYRVINLPEERCGGLQRWLKGIIARSGVNKAVVALANKNARIAWALINQKTEYIVK

SEQ ID NO: 85850 - protein, 344 aa, unidentified
MSTMQPITIGVDTHTDVHVAVALDGLGGRLGTRSVSTDRKGYEELLRWAGTLGQVGRVGIEGPGSYGSGLTRWLRARGIDVVEVDRPDRGTRRREGKSDPLDAEAAARAVLAGRAVGQPKSASGAIEMIRVLRVARRSAMKARTQAVNQLYGLLVTAPDGLRDQLRSLPTTRLVSIAARFRISPITTPTHATKHALRSLARRHLALSEEIGRLDDEVARLVREVAPDLLAVAGVGVDVAASLLVACGDNPERLHSEAAFAHLCGVAPLPVSSGRTDRHRLSRAGDRDANRALHMIVISRLRWDDATRRYAERRTLEGRTRPEIIRCLKRYVARQLFPVLVPSTG

SEQ ID NO: 85851 - protein, 339 aa, unidentified
MSQINFYTIDLAKNVFELHGYPEHGKRLLRRRLNRSRLAGFFERDAQPGATVVMESCGSAHYWGRWLQARDFKPVLLPPKHVRAFVRGNKTDTADAHALALAWRVGDLHPVPIKSQTQQIIQLQHRMRDRQMAERIRVTNQIRAMLREFGVAVAQGDAALKRATLAHLEADASVPVTLQSMLSELYEEWRRLQDAIARSDRELERLYRASEPCRRLGEIPGVGVITATALIASIPDIHRFKRGRSLAAWLGLTPAEHSSGDKRNLGGITKRGNTHLRTLLIHGARSAVNQAHRYSDATSRWIVQLEARRGRNVAVVALANKNARIVWALLAHDAQYQPS

SEQ ID NO: 85852 - protein, 322 aa, unidentified
MSVSNQRCAGIDVSKSTLDIAISSIARRFTVPNEDGGFNQILKELKQNETQLILMEATGGLESGVAGYLQSEGFDVVVINPRQARDFARAMGYLAKTDQIDARVLLQMAKVINQHPEREKYIRPLPDVHRQLLAAMVVRRRQLTIMLTAERNRLHPSHPQNHESIRFIISVLKSEMARIEAEMLAYISKNFSELSALLSAVKGVGAATVAVLLAEVPELGTLSRREISALIGVAPVNRDSGTMRGRRTVFGGRASVRTALYMSALVGTRHNPVIKEFYTRLVAAGKPKKVALTACIRKLLTILNAMLKNNEAWDPLYHQHAS

SEQ ID NO: 85853 - protein, 316 aa, unidentified
MGEVFVGIDVSKARLDVAVSPSGEVWSCANDEEGFAALLERLRPLRPKLVVLEATGGYQAPLAAALTVGGIVVAVVNPRQVRDFGRATGQLAKTDVLDAQVIARFAEAVRPEPRPLPDDETNALRGVVARRRQLVEMITAEMNRLPSAVATVRHDIEEHIQWLRRRLKDVDKDLYDGLKRSPLWRVKEQLLRSAPGIGPVTTCTLIADVPELGRLNRKKIAALIGVAPFNRDSGTLRGKRTIWGGRGEVRRTLYMATLAAVRRSPSMRAFYERLANDGKPKKVVLVACMRKMLVRLNAMLRDGATWLEPVQVITAA

SEQ ID NO: 85854 - protein, 318 aa, unidentified
MSTFDVVGIDVSKHTLDVCLILNKKKQQARFDNQKAGWKKMLTWVRRYTSEPWFCMEATGSYSEGVAEFLLAEQQSVSVVNPLQIKSYAKSILSRNKTDPQDAYIIARYAKAADLRIFIARTPEQKALREHTQLLDQLTAQKIQLKSQAQHFADPDARRFVAKQIKQLEISMERLKSKLNALVEEDARCKQAMQLLLSIKGVGAATAYSILAYLPDISNFKCAKQLAAFIGVSPTQKQSGQFVGRTRLSKFGNPRLRKALYMPALVMKQYNEHLKPFIKRLERKGLKPKAIVGAIMRKLAHIIFGVLKHQQPFNPNLC

SEQ ID NO: 85855 - protein, 321 aa, unidentified
MKIKNLVGVDTHKDSLACFCNGKFKEFKTNKVGFKQAINWAKSSHWAIEGAYCFGQAFSNFLIKNGCEVYEINPLLTKSWRTALKVASPKNDFGDAKVISIFANMDNMNKVSFETIKLKEKLTTRKALIKQKTQITNHLKMLFYTRGEELPFKALDTQKAIKWMLEQDDVIVKTNGKILESIMAGIKSLEEEIEKEMPEPAKALTKMEGISTITACTIYAETKGKLTSKSQFASYCGVAPIDCSSGQTTRRRNNKGGNRVLNSIFYSLSIAQKRYNKKAKAYYEKKLSEGKSPRHARKCLARQLTNIVFKTLKDATEKRKP

SEQ ID NO: 85856 - protein, 372 aa, unidentified
MLAESHDDEQIIARVAALDIAKAELVCCVRVPASAGGKRRLQEVTTYSTMTQSLTELANRLVEMGVQRVVMEATSSYWKPVFYLLEAHGLDPWLVNARDVKHLPGRPKTDVLDAVWLCKVAERQMLRPGFVPPWPIRRLRDPTRYRTDLVSARTAEKNRVEKLLEDACIKLSVVASDIFGVSGRAMLAALVAGERDPKVLAQRARARMRGKIDRLEQAFDGHFADHHRFLLSRMLARIEGLDADIAAVDAQIDVQLAPFAEAAARLDEIPGIGPVAAAAIIAEIGVDMSRFPTAGHLCSCAKFAPGINSSAGKPQGSASSGHGDPYLARVLGEAAVGTTKTDTFLAARYRRMRGPDAVDNPGQWSPSVAPSW

SEQ ID NO: 85857 - protein, 311 aa, unidentified
MTETNIGIDISKDHLDVHRLPGDERRRFDNSKAGHKALIRWIGDTPARVVYEPTGYYHRALERALAAAGMPIAKVNPRQARRFAEATGNIAKTDALDAAMLTRMGAVLSLEARPVPSGIINDLRDLRTARNALIKDQVAAQTRAKAITLPLLKRQNAARLKQIEAQREAVDAEINALIQGDPDLAQRFAILCSIPGIAEVSAAMLLIEMPELGSLDEKQVAALAGLAPIARQSGNWKGKSFIRGGRQQVRQGLYMPALVAIRFNADLKAKYEQLIKAGKAPKQAITAVMRKLIILANALLKKGRQWQTRVA

SEQ ID NO: 85858 - protein, 402 aa, unidentified
MRRCIGLDVHREFAQVAIWEDGVVWQAGRIQTTPEALREFADSLCASDEVALEATGNTYAIARLLERQVGRVVVSNPQKTRAIAEAKVKTDKVDAAVLAGLLAADYLPSVWLPDDQTHALRRQVTRRAHIVRQRTRLKNQVQSILHRNLVPRCPAADLFGRKGRAWLAAQDLPQDEQQAVGALLRQLDFHGQELRIVDAELGRVALERAEVRRLMTIPGVDATVAVAIVAAVGDFGRFSSPQRLVSYLGLNPRVRQSGGQPAQHGRITKQGRAHARGMLVEAAWVAAKIPGPLRAFYERVRARRGMQVAVVATARKLATLCWHLVVGEQDYAFQRPSLTDKKLRALQLRAGMPPRRGQKGTAAAYSLKEVRRRERALTEQAEVAYRQLVAGWQPKRPATKPQ

SEQ ID NO: 85859 - protein, 372 aa, unidentified
MREYSTDTIWVGLDVHQSSVTAAVLHEGSEKPQVVHLPGEVNAVRKLMRRLSKEGAPRSCYEASGAGYVLKRALDRDGFDCEVIAPSLIPRKPGDRRKTDRLDAIRLAELYRGGYLTPVAVPDKDHEAVRQLVRTRLAVQQHITRVKHRIVKILAAQGHRFTGTKSNWTLKHRAWLERMRRELTGPQQTVVSIHLEHLEYLETEQRSLDAEIERISRMAPWRASVAALRCFRGIETLTAMTVALEIGDIRRFRSPRRLMGYTGLVPSERSSGDVERRGRITKSGNAHLRRVLIEAAWHYRHRARADQRLERRRLGQKPEVVAIAVKAQHRLSKRFWSLAARKHPNTAVTAVARELSGFIWAALNAVAQEREV

SEQ ID NO: 85860 - protein, 485 aa, unidentified
MEYTSAGLRIFNCKTLNVSNQTFEPAEVTLFKTHTQGLSRTDFYKTCEKRVLSHSVNYFTPWRCLMKEPVINDFAAVIGIDWADKKHDVCEIPNKTQICQYNVIANKPQALNDWAISLAKRYPGQSVAVGCELKKGPLIYALSKFEHITLFPINPTTLAKYRKAFTTSGAKNDPADAFLQADILIRHWDNFSPIIPESAEIRILAQLLEYRRKLVQDRVGLSNSITAYLKNYFPQVLDWFKEKDTIIFCDFLSNWSTLDAIKKAKKRTLFNFFNKHNSRYSDVNEKRFSDIKAAVTLTDDRGVIEPNRIMVEVLILQFKLLIGSIDRMDREIRQVYKTLEDKNIFSSFPGAGPQIAPRLLVAFGQNRERYQSASDLQKLAGIAPVIEQSGQKKWVHWRYSCPTFLRQTFVEWAGLSIRYSFWAKAYYEQQIAKGKPHNTVIRALAFKWIRIAFRCWKNNTTYDESTYLNALKKQGSPLLRYAVDG

SEQ ID NO: 85861 - protein, 385 aa, unidentified
MTDVIETERGPAMPSMIWVGLDVHKNSTTAAVLEDDARDGEVLRLSADLNQLRKLFRRLGARGPVRACYEASAVGFVVHRVLERDGFSCEVIAPSLIPTKPGERRKTDRRDALQLARLYRSGHLTPVQVPAEEQEAVRALVRTRFAFLLQAKKCKQRIHSQLLRQGLVFRDGKSYWTKKHRTWLAQVRRQAEGAVATVLQTELELLEYLETQIRSLDGEIARFAEQPPYRPVVAALECLRGVQTLTAMTLATEIGDIQRFASPRALMSWVGLVPSENSSGDRERRGPITKAGNAHLRRVLVEAGHNHRVKGGSALILERRRQGQPAEIVAIAVKAQHRLSKRYWHLVLKKHHNVAVVAVARELCGFIWAIMRAAAPDRGLAGKAA

SEQ ID NO: 85862 - protein, 387 aa, unidentified
MTEFFDAHRPATAFDHDSTLVVAMELSGKSWQLGAVIPGVSRRPKTGVKARDMNEVLRVVDRWKAEAVRAGKTIARIVVAYEAGRDGFWIARELTEQGIEAHVMQPASIPVERKGRRAKTDRIDLDMLLRTLLAWLRGEPRVCTMVRVPSVEEEDARRPGRERDKLVRERVGLENQIQSLLCLQGIGDFRPRLKKAAEKLEKLRARSGAALPAQTMAQLRRLMKRHSVASEQIVEIDASRVAEVDAPDPDRGIGMIRLLVAICGMGLETATRLVREVFSRPFRDRRGIAAFVGLTGTPFQSGGMEREQGISKNGNTRVRCLLLQLTWRWLRFQPDSALSRWFFGRVGEGKGRIRKVMAVALARKLLVALWRYLETGVIPEGVRLADA

SEQ ID NO: 85863 - protein, 411 aa, unidentified
MDVVYSRCAGLDVHKATVVACVRVPGAAPGERRGETKTFATTMRGLTELSGWLGRHGVTEVAMESTGVYWRPVYAVLETTVNVILVNARHVKMVPGRKTDVRDCEWLAQLLECGLLKASFVPPQAVRDLRDLTRLRKALIRERAHHVNRIEKTLELAQIKLGCVVTDLMGKTGRAILHALSEGRDDPDQLADAAQGLLRKKRAALREALEGRLTPHYAFLLQQYLALIDTLDAHIARLDARIDELMAPFADAVALAQSMPGVATRAAQAILAETGVDMTAFPTAAHFASWARLCPGTHESAGKRQPVSTGQGATWLRATLQEAAWAAIHTKKSYYRVLYHRLKARGSAKKAIVAVQHAMLIALWHMLKHRVPHHDLGADYFERRNTERTRRHHVHRLERLGYDVVLVEKVA

SEQ ID NO: 85864 - protein, 374 aa, unidentified
MYGLLPLTGDLRYKVKSIHSNQLLPGVHTMEQCNVIAIDLAKDIFQVCIMTTHGKIIVNKAMNRAKLKEWLAKQKLSLIAMESCGGAHYWARFSQSLGHKVMVIPPKQVKPFRTGQKTDANDAVAIAVASRAANIKPARILSVEQQGLQSIEKMRSLIDKQKLQLSNQVRGLLLEFGLVINKSIKSFKERIPEILEDAENDLTFPMRKGLLQMWELYSRLEDDFEEINNELIQLTAQDSDCQKLMKLESVGPITAVRLKIQLGNGEHFNSGRQVAACIGLTPKQHSSGGKVKLGSVGKGSCDKPLRSCIFLGARAVVSKLKNRPAKTEKERWLKALIERRGVNCASMALANKTARTAYALLKNNTDYKPVLIAA

SEQ ID NO: 85865 - protein, 320 aa, unidentified
MMAQDDLVVVGIDVAKNKVDACIRALCVRRTFPSTAQGRRKLVCWLRKHKASAAVMEASGGYEREWAKVLREKAVEVRIVDPKRVRNFARSAGRLAKNDVIDAEMIAWFAGTFAEASSQGHDAAREKLAHIVNARCALIDLQIKLQNREEHPAPEPVQKMQARLLRQLAREIAELEAAIAAMIKATAHFAELAEIIESVPGLGPITSAGLIAAMPELGQVSNQAISALLGVAPYDDDSGKRRGERQIKGGRRKMRNLFYMACLGAATRHNAVLKAFYDRLIAKGKERKVALVACMRKLIVILNTMIARRQKWDASRYAVS

SEQ ID NO: 85866 - protein, 344 aa, unidentified
MDHFAGIDVSLEQSSVCVVDATGKIVREAKVASEPAALVRFFGELGFPVVRIGLEAGPLSQWLHAGLSAAGLATVLLETRHVKAALSAMVVKTDRKDARGIAQLLRMGWFRSVHRKSADAQEVRALLVGRKLLQSKLRDVEFSIRGILRGFGLKVGEVSKGRFAARVEELIEGHAMLEEVVGAMLTARAGLHSEFMRLHRKMLAIVRTDEVCRRLMTVPGVGPLVAVTFRATVDDPARFTSSKAVGAHFGLTPKKYQSGETDVTGGVSKVGDVMVRTALYEAANVLLSRTTRFSTLKRWALDVAKRRGVKRAKVALARKLATVLHRMWVDGSEFRWGKEALVTA

SEQ ID NO: 85867 - protein, 396 aa, unidentified
MDVHRSFAQIAVVEDGRCRDEGRIGVKPEDLREWAMTLEPDDEIALEATTNSDAIATMLRPLVAHVVVSNPRKTRAIAEAKVKTDKVDARILAQLLAADFLPETWVADDQTRMRRRLVARRTQLVRQRTRLKNQVHGILSRNLVPTCPHADLFSGVGRKWLSGKDLPADEWRSVEALLRQLDFHGDELAAVERDIAIDALDDPVVARLMTIPGVDVTVAVSVVAAVGDFSRFPSPDKLVAYLGLNPKVRQSGNSPAMHGRITKAGRSQARGMLVEAAFSAARAPGPLRAFYNRIKTRRGFQVATVATARKLTVLCWHLVTKNQDYAFARPSLNAHKRRKLELAAGATSRRGPTAGPSRDYHLKQLRDAEQAIVEQQERAYEVLVAHWHAKRPAANG

SEQ ID NO: 85868 - protein, 391 aa, unidentified
MVCVGIDVAKDKHDCCILDSDGMVRADCFTIPNNMDGFKQLLQTIRNCTKKSDKIKVGLEATGHYSYNILGFLLDNDLAVYVMNPLHTNLYRKSLSLRKTKTDRVDARTIATMLLSDVDLKSYTDTAYHNEELKSLTRYRFDKVRERAKLKQSVSRLVTILFPELEKLVPSLHIASVYSLISEYPGAKQVSEVHLTKLTNLLTTASKGRYGKDKAIQIRDAAKTSIGSVMPAKSLELKHTIKLIKELTSEIDEIEDSIQQIMDELHPPILSIPGVGIQSAAMILAEIGDFSNFESPDKILAYAGCSPSTYQSGKLTNCYAHMEKRGSRYLRCALYNATKYVCHWNPVFAEYLAKKRAEGKHYNVALSHAMKKLVRLIYALQKSGKAYLTAA

SEQ ID NO: 85869 - protein, 385 aa, unidentified
MVNHNDLSRSLVAFEQDNTIIAVIEMSLNSWLVAGIVPGIERHPLKKLSFDEQMLLQLLYRWRDEAVKAGRTITRMVVAFEAGRDGFWLARWLRARGIEAYVIHPTSVAVSREHRRAKTDRLDTELLKRAFLGWLRGEPDHCSMAAIPSLQEEDAKRPTRERENLVGERTRIVNRMKACLVRFGIRNFNPTLSRATERLNALCTPEGVSLPPNTLAELRRDMARLRFVMDQIKEIEAARLQRLERAPAEGPHAMVRLLARVIGVGLETADMLVHEILSRKLRDRRAVARYAGLTGAPDESGSKRREKGLAKAGNARVRRGMIQLAWRFLLFQKNSALSQWYRTRTESAGKKRKTMIVALARKLLIALWRLVTTGEVPAGVVLRAV

SEQ ID NO: 85870 - protein, 495 aa, unidentified
MARSPSSSHVPWADTPRPVTTIDSATFDVFPETVGRDETAAQLNESADAFKSEDLPISPSPLGRRRVRKPMKTTTTYAAFVGLDWADRSHQVCLRPAEGDRDEQSKLAHEPLALRTWASTLRARFPVGKIAVALEQTKGPLVYALSMHAHLELFPINPAMLAKYREAAKAASGTKNDPLDASLLCELLRVHRDWLRSLPAVPTATRELQILLETRRGLVDQRTGLCCQLGAALKGYYPQALALVGHDVGTPLACAFLRRWPTLSAVRRARPETLRNFYHAHQVRSEERIEERLAVVRSAVALTDDAAVLATLPVLVASIVAQLEVLAPAIADYDRRIAASFAPQADAALFESLPGAGQQLAPRLYVAYGPDRSRYTSALQLQQYSGIAPVKEQSGKTEVTHWRWHCPKFLRQSFHEFAGCSIPQSRWAKAYYDEQIARGKPHHRVVRALAYKWQRIMFRCWQNHEPYDEERYLAALRRHHSPLISRIDSTRVEAA

SEQ ID NO: 85871 - protein, 367 aa, unidentified
MKKLTTTMMQRTLNKQDEHLTIGLDLGDRSSCYCVLDEAGEVLLEQKVSTTPTAMKEIFGAMPGSRIALETGTHSPWVSRLLKELGHEPIVAHARSVRLIGESRRKDDRLDARTLARLVRIDPELLCPVKHRSAEAQADLTVIRARAALVRTRTMLVNAARGLTKSYGERLRGCNARGMNPKAAQDLSPELKGALEPLMREIESVSERICEYDQLLESMARNRYPEAERLKQIKGVGTLIALTYMLTLEDPHRFRKSRDAACYVGLQPGRRNSGQSEPQMHISKEGDPYLRSLLVQAAHHVLGPWGVDSDLRRWGMRLAEHGGKRGKKRAVIAVARKLAVLLHRLWVSGDVYVPLWPSGRATLPAVA

SEQ ID NO: 85872 - protein, 485 aa, unidentified
MVSIGIITVEAVAGSQAGPHWSFEPAEQSGSDADTYPELLPPWSGSTWSRVFCPSASPGGSPPWRRYTVDTIYSSVAGLDVHLKSIQCAVRCRQETGKLVHQARSFGTMTRDLRALADYLQSLGVTHVAMESTGVLWKPVWNILDGRFTLLLVNPRHIKKLPGRKSDVSDAEWIAQLLQHGLLRGSFVPLRAVRELRDLTRHRAQLAAEHTRVANRIHQVLEDCNIKLDAVASDVLGKSGRAMLQAMLRGQQDAEQLAELALGVLRKKLPQLRLALEGHCTEHHRFLLERLLSHLDYLEEQTARFSTQIAAGLERLLPAAEQQRLDTIPGVNRTTIENVIAEIGPDMTVFPDEHHLCSWTGICPGNEESAGKRLRSRTRKGNRWLRRALAEAAWAASHAKDTYLAAQYRRLAARRGKKRALVAVGHSMLVIIYHVLKNHVEYHELGADFFDRLDPERLRRSLVRRLQHLGYEVVLTTKESEQAVA

SEQ ID NO: 85873 - protein, 389 aa, unidentified
MLKQENEYREGERTAVGIDPCKEFLQLAILSPDGKQEFKKLPLLPSITAEIVRSTVPERTQIGIESYGSYGKLFVFELLKKGYDVREVNPSISKKLTDLITEDHSDCLDAVSIAKALLLIPDLPKVSFTEKKLMLAKLSRLRKRLVKDLNGYLNRLHIALTESYGAVYRSLFQTIFTGKALGYFERYPTINDAFSQRRKVIAIIGEEKWDLLEQAGQWEKSIYLGLLKIEIRCLIRIIKALQASKKELEEKLKEVGAEDEDVKLLKSFPGIDYITAATLLSEIGNIERFEKEGCLSSYCGVSPVMWQSGTAKVKTKRRKRYSRRLKGILYFISLSQIRLNPESKDYYWRKRREGKTHWQAMNALSRQLIKIIYYMLKNRECYQRETVVH

SEQ ID NO: 85874 - protein, 458 aa, unidentified
MSNAQGKKAGRSRRRLSTINRDAAGIDIGATVHVVAVAEGRCDSPVRSFRTFTSDLRELADWLAEVGVKTIAMESTGIYWIPVYELLEERGFEVLLVNARDVKNVPGRKTDVNDAQWLQQLHQYGLLRGSFRPREALLCLRAILRHRERMVDYAASHIQHMQKALMQMNLQLHHVVADITGLTGMQIIRAICQGERDPEALAQFRDRRCKASEDEIREALNGHYRPEHVFTLRQALDLYDTYQAKISECDREIEKALAELNRDRSPAEEPLPKRRDAGGRNEPRSDVRAALHTLLGRDLTQIHGLGAYTVLRLVGECGDDMTKWRTAKHFTSWLALAPGNKISGGKLLSSKTRRSSNRGAALLRIAAVNVGRTQTALGAFYRRLAARAGKAKAVTATARKLAVLFYNAIRFGRTYLDPGADYYQERYRKRVIRSLHRRAAQLGFILTEAPASAESGVS

SEQ ID NO: 85875 - protein, 347 aa, unidentified
MGNSITDLSSVTTVGLDLAKHVFQVHCVDASGRVIVAKALRRKDVLSFFAQLPRCLVGLEACGSAHHWARELIKLGHDARMMPPAYVKPYVRRQKNDAADAAGICEAVTRPSMRFVGVRTLENQAALMHHKAREMLVAQRTQLINALRGHLAEIGVIAAQGLKNARELARVILAEGDETIPACVRAALAPLVRQLHVLDQEITRSDRTIAAMARGDEMARRLMTIPGLGPVTASAMAASVQDVSAFSGPREFAAFLGLTPRQNSSGGKERLGRISKMGNRYLRKLLVVGAHAVLYHRKPHEDALRSFAKKLMQTKPFKLVAVALANKMARIAFAIMRGKTTYCAVSA

SEQ ID NO: 85876 - protein, 343 aa, unidentified
MLTNNVIAIDLAKNVLQACHISVHGELLSNKPLSRQKMKEFLAKAKPSIVAMEGCCGCHYWGQLAEKHGHQVRIINPKKVKGYLEGHKTAHNDALAIANAAIQIGIKYSRPKSLEQQSMHSLESSRRFLSRSVVSLGQHIRGTMLGYGVANPRGEKGLKASVQTALDGETSIPANVVSVLSMLWNQYKELKAQLIAFEKEKNALTRQIEPCQRLMEIEGVGETTAAMLYTTLGDGKQFKNGRQASAFVGLTPKQHSSGGKVFIIGIDKCGGVKELRSLLYLGAMSYVGRLAEKPKTQKDAWLRSLIDRIGFKNACIALANKVVRTAWAMLRYETEYKPVLLAN

SEQ ID NO: 85877 - protein, 339 aa, unidentified
MSIVMGLDQHRGQITGEWIDTGTGEVQRARVAPADRAHVRKWLERFRGRELEVALEATTGWRFVVEELRRVGAVVHLAEPAETAGLRGPKKRAKNDRADARHLRELVMVGRLPESWIPPDHILDLRARVRLRHTLSEQRSEWQQRIQATLYHQGCPQRRQLMTADGRAWLAAQPLPAAAREQITVATLMVDALELQIAPLDRELRAYARRQAGCKALMAQYGIGALTAVTILAELGDCTRFSSSRQAVRYAGLDITVYQSDQRRAPGHISRQGPPALRWALYEAAQVARRGERSPDREYYLDAKDRIGGGRACISVARKLLKRSYHTLRELGEEALAPA

SEQ ID NO: 85878 - protein, 483 aa, unidentified
MKPQQLKKNKKASCRPTASNWHAMNRKQRREMTRKIQSEDLSLEVVHPDAAGIDIGNESHYVAVPPTRDSQTVRRFGCTTAELKAMADWLKQCKIRTIALQSTGVYWVSVYDILEEAGFEVYLVNARETKNLPGRKRDVQESQWLMKLHTYGLLRNSFRPSQEIRTMRTYWRQRNDLVRTAGRHIQRMQKALTQMNIQLANVLSDVSGMTGQAIVKAILGGERDPYQLAALRNWRVKASEEEIARSLEGNWQEDLLFVLQQEQDGYEFCQKQMAECDQRLQQYLQQQEDRSHGASLPEEKRKERLRKKKKGNAPQFDLRAKLFRMTGTDLTQIDGIDVTTTMTILSEAGWDMSKWRTEHHFVSWLRLCPDNRISGDKIIGKGRLPTNNRVTNALRMAASTLRLSNTYLGAQFRRLRTKLGAPVAIKAMAAKLARLVYRMLRYGMQFVDRGADFYDAQHRKLQINYLKRKAANLGFQIIEAPAA

SEQ ID NO: 85879 - protein, 376 aa, unidentified
MKKELYLGLDVHKDCIITAVAQEGRKGEVRDTGVISNDLHALEKWVGRLRKAHGSDVVLRACYEAGPCGFGIARRLKQLGVECEVVAPSLTPKRAGERVKTDRRDARKLARLLRAGELSPVYIPESTDEAIRDLCRARTDAVDDRCRSRHRLKGFLLRHGYHYQGKSSWSAAHERYLRELVLPHPAMKVILEEYLQGIAAAGERIARCEEAMRALLEKWHLRPAVEALMAMKGFRTVAAMILVSELGEVHRFSHPRQVMAYLGLVPTENTSSDRRRQGHITKCGNAHARWLLVECAQHYATPPKVSKELSRRQEGQPQEVRALSWKAQHRLHARFARLSARRLQRNKALVAIARELCGFIWELLHMQPCYQAQPPS

SEQ ID NO: 85880 - protein, 342 aa, unidentified
MFHYGLDVHIKYTSYCAVEDRGRQVAEGRVSNDREAFVQLFREHPGPKRAVMESCIAWPHVYDLMADLVDEVQLAHPLAAKYLAWDRIKTDRLDARALALLLRGDLVPQAYLPPAEIREARNLVRHRLTLLHQRVACKNSVHFLLFRTGHRRPVSDLFGRRGRSWLEGLPLGRVDDAMLGQKLEAIDMLTGLVKQADRELREFFLAHPAFALLQTIPGVGPVVAAICIAELGEITRFPSAKQVVSYAGLVPREHSSGGKIRRGHITRVGSKLLRWAAIEAATGYARAVPSAAARHQRLYEARGAGVARVATAASVLRTVHGVWKSGRPCRAGSVPPVPSLVS

SEQ ID NO: 85881 - protein, 372 aa, unidentified
MRDNSEVYVGLDTSKLKISVAVAAAGRDGEVRFFGDIDSTPEAVERLVRKLAQRHQRLFFAYEAGPTGYGLQRQIAALGHDCAVVAPSLIPKRPGERVKTNRRDALALAKLHRAGELTPVWLPDPAHEAIRELVRAREAAMEDLRAKRQHLQSFLLRHGRVYGGRSAWSRAHTRWLCELQFAHPAQYMVMAEYRQAIADAEKRLERLSEQVAELVPSWSMAPVIAAYQAMRGIAFLTAVTFVAEIGDVRRFESPRQLMAYLGLVPSESSTGEQVRRGGITKAGNSRARRVLIEGAWTYRFPARKSRLLEERQAGLPKAVCDIAWKAQLRLCGRYRKLMAHGKQRAVVIAAIAREMAAFLWAIGREVEPAHAS

SEQ ID NO: 85882 - protein, 423 aa, unidentified
MDIVHERVAGLDVHQKSILACVRVVVDGKVHREVRTFDTTTAGLEALLAWLREMRCSHVAMEATGVYWRPVWSILSDGDFELIVANAAHIKNVPGRKTDTNDATWIADLLACGLIKASFVPDERFQELRALLRTRKQLTNEQTRHAQRVHKTLEAANIKLASVISDILGVSGRRMIEAMIEGQRNPCKLADLADGRIKASRKALYDALHGRLTDHHRFMLRLHLGQYDTTAAAIEAIDQEVDALVDQMDAEVEDAGATFRSLTYLLCTIPGVGRLAATVILAEIGRDMSRFPSAGHLLAWAGLCPSQNESAGRKKSSRLRKGAPWLKTMLVQCAWAAVKKKDSYYKARFNRLKVRHGAKSAICAVAASMLTAIYHMLKNGTVHHDLGAGHFDRRTNAVKAKRLVDQLKHLGYKVDLQSVDQAA

SEQ ID NO: 85883 - protein, 354 aa, unidentified
MADEIAVVGGIDTHTDLHQAAVIDSIGRHLATKRFETTPEGYRRLLDWLRSHGEVLAVGVEGTGAYGAEIARFLTANGVAVVEVDRPDRKARRDNGKSDPIDAYGAATAVLSGRAGGTPKARNGIVEAIRALRVVRKSAVKVRTQTINQIRTLIVTAPSVVRDKLRGLSTRELIDTLARSRPAGELDDPACAVKTVLRRLARRYQALDEEIKDADKEIGPLVTKAAPRLIALPGLGPETAGQLLTSAGDNPDRLRSEAAFAHLCGAAPVPASSGRTNRHRLNRGGDRQANNALHTIVLVRMKYDQRTRDYVARRTAEGMVKKDVIRCLKRFVAREIYRHLPHVIHTTKPLPQTA

SEQ ID NO: 85884 - protein, 482 aa, unidentified
MKKTNIYQNQSQELLHLFKDAGSNNKVMCVPMDYAKNDHLVMFCNGNGDILRKPFSVKNTQAGIAYISDQVTRSCRKRGIKKKHVFLGGEDANSFAKNFVSSLRGKGFLVANVNAHDAKKQRGNVQASTDRIDLMGIASMLLNCRANCNPAQSGIYRNLRTLVRHRRRLVQMLTEVKNRVHGIVDELFPGFLNEKNSGIVPFTQSSLYLMEDRFSPKQIRRRKRQKLIEILKRFGTSNAEKTAAKLQQYAAKVLHAPVEYVDTMQVSLAQHVKHIRCLKESVSQMEKEIALNLAQTQGAFLTSVRGIGLVLAAGVTAEIGDPNQQKALNNLASYAGIIPRVKQTGGLDGRTYTGPVAKRCNRILKDYVVKSAYHIGLHGPPDLMADYKRRDASGQHADFGIGRRYLRLAIGLMRTSQVYHPPHLLKGDCTSEQSASYYLMSWSYLRDKWKRVGAHEAAFAKNRPLGIWRQFVQGFYGIKLKL

SEQ ID NO: 85885 - protein, 375 aa, unidentified
MKSITKFVGLDVSRDKIAVAVAEREAGAARYLGVYPNTLEAVRKLLNRLGRPEELHVCYEAGVTGYGLARFLRGLKIECMVVAPSKIPLVPGPRVKTDRKDAVMLAERLRTADLVSVWVPDEADEALRDLVRARKARMEDLKRAKQRVNMLLLRHGITKPEKTTPWSERYRAWLRGLELPQKNSQAVLQEYIIAVEEVEQGVRRLELLIKDTAANSPHAPVIQALQALRGVQVIAAATIVAEVGDFTRFAHPEQLMAYAGMTPRESSSGDRVSRGAIMKTGSAELRWICNQIAHSYRYSPKVAGDLARRLEGLSPEIQAIAWKAQIRLHKKLVRLMAKGKCRQVAVTAVAREFLGFAWAIGQKVCFETALGKRSA

SEQ ID NO: 85886 - protein, 339 aa, unidentified
MQITTIGLDIAKNVFQVHGIDAEEKVVVRKQLRRGQVLRFFEELSPCLVGLEACATSHYWARELAKLGHDVRLMPAKDVKAYVKRNKNDAADADAICEAVRRPTMRFVQMKSAEQQAQLMQHRARDLLMQQRTQLINAMRSHLAELGIIAPQGREGVKELLAIVASGKHLPNDARASLLVLAAQLQALQTTIGAIEKRIMVQHRANKESKRLQTIPGIGPIGASAIAATVTNPKIFRSGRDFAAWIGLVPRQLSTGGKAKLGPISKQGDRYLRRLLVVGAVSTLRRAKLKPERFPWVTRLLARRPFKVVAVALANKMARIAWALMINGKTCRSAWFAAA

SEQ ID NO: 85887 - protein, 407 aa, unidentified
MRTIGMDVHRDFCEVAIIEDGAVRSAPRVRTAPEDLLVFAQSLAPTDEVVLENTGNARAIAAIVQPHVGRVAIANALSVKLIAHARVKTDKIDARVLAQLLAAGFLPEVFFGDEDTRALRRRISRRAALVKQRTAAKNEIHAVLQRNLKDRPPASDLFGKRGRAWLAMQVLVPDEAETVTGCLRQIDMLDTEVASMDAALATSALGSADIRRLMTIPGIDMLTATAVCSAIGDVKRFPTPRHLVSYLGLNPTVKQSGIAPARTGRISKAGSSVARSALVEAAWAAARSPGPLRAFAERVGARRGRNIAAVAVARKLTVLSWHLLSKEQDYAFARPSLVRGKLRRLELTAGEPSKRGQRGSTGTHVSADVRSAELAAARQVEDAYRRMMADWKATGKRGAGAATGARI

SEQ ID NO: 85888 - protein, 344 aa, unidentified
MIISDCQLFGSGSLEDTHICIIDAEGKTQSRLVAATEPDVLAQAIKEHAPDVQTIILETGGQSAWLQQGLASHGLPVVIVDARQAKKALSARLNKTDTNDAEGLAQLARTGWFKQVLAKRPVTRRIRSIMMARELIVRQRRDISNQIRGLLRGFGLKMGAVSHLRFEARVYALAEAEPALLCALEPLLRVRDVLGVQLARLDKQLGSMAHKDADARRLMSVPGVGPMTALAFMTALDQPGRFTRSADVGAYLGLTSRRYQSGEVNWSGRISKHGDTLARAMLYEAANALMTRVKRWTPQKAWAVRLAARRGGAKARVALARKLAVILHRIWVDGTTFKWSNKPA

SEQ ID NO: 85889 - protein, 403 aa, unidentified
MNAVGIDVSKGKSMVTILRPFGEIVSSPFEIKHTSSDIHSLIKLIHSIEGESRVVMEHTGRYYEALAHQLSAADLFVSAVNPKLVKDFNNDSLRKIKSDKADSVKIARYALDKWQSLEPYSITDKLRAQLKVMNRQFHFYVKQKTAMKNNLIGLIDQTYPNANTYFNSPTRSDGSQKWVDFVSTYWHVDCIRKMSLNAFVEHYQNWCKRKKYAFNKSKAEEIYTKTKELVPVFPKNEITKHIIRQAIDQLNSTSVTVETIRTLMNETASKLPEYSIVMQFKGIGPSLGPQLMAEIGDVTRFTHKGALTAFAGVDPGVNESGSYAQKSVPTSKRGSSHLRKTLFQVMDVLIKTMPQDDPVYQFMDRKRTQGKPYYVYMTAGANKFLRIYYGRVKEYLSVLPDPS

SEQ ID NO: 85890 - protein, 344 aa, unidentified
MKISTLSIDLAKNVFQVAGFNSNYKRECNKRLNRAKLNAFMANTPPCRVVMEACYSSHYWGRVFSSYGHTVDLIPAQHVTPFVRGNKNDSNDALAIYEASLRPHIKFVPIKTEAQQEILMLHKIRERLLQNRIAATNQLRGLLVDFGYVFPVGMKALEQGIIALESDSELRPQLRIMVSDIYTEYKTLVKRIKAIEAMLTAHVERDTNAKILHSIPGVGVLNASAYAASIGNGQAFKNAKELGVWLGLTPKQYASGDKSKMSGITKRGNSYLRKQLIHGARALIARSHHKTDALSQWINQLREKKHFNCVVVATAHRLARLMWILLTKQTLYSPQYVQNTQKDA

SEQ ID NO: 85891 - protein, 404 aa, unidentified
MQEFNAAAQQIETASSPIALSALRAIGEAKQHAAYIGLDVHKETIAVAVAEPGRDEPIYRGEIANTPKKIEQLIVKLSEAYDGGVLLFCYEAGPCGYGLYRQLIASGHDCEVVAPSKIPKAAGDRIKTDRRDALKLARLLRSGDLTAVWVPDQEQERMRDLSRARDDLKAQERKARQQLNAFLLRHGQHWPKGKSRWTPAHENWLAGLKMDDAWQQVVLQTYIDAERAAGERVAQLTDQLMRALPDWSLAPVVDSLVALRGIDKLAAIVLLAELGDISRFDSPKQLMAFLGLVPSEHSTGGRRRQGAITLTGNSHARRMLVESAWSYRFPARQTKHLKAKAANASPEAKRIAWKAQVRLCGRYRSMTRAGKNTKLVCVAIARELAGFLWDIVRREMPQPAQHGA

SEQ ID NO: 85892 - protein, 403 aa, unidentified
MNAVGIDVSKGKSMVSVLRPFGEVVAKPFEVCHTAGELRALADYLKSLDGETKVILEYTGRYYEPVAQLLHDAGLFVSAVNPKLIKDYGNNSLRKVKTDKADSRKIARYGLDNWVELRQHTPMDTIRYQLKTMNRQYGLYSKTKVSMKNNLISLLDQTFPCVNTLFSSPAREDGSQKWVDFAASFWHLDCVRGLSLAAFTQRYQKWCKRHGYNFSSRKAAEIHEGAKNQIALLPKDAMTKMLIHQAIEQLNATSKTVELLRTEMNRLAQQLPEYPVVMAMGGVGKSLGPQLMAEIGDVTRFAHKGSLAAYAGVDPGANQSGTREAKSTPSSKSGSPELRRTLFLVMSALLQTSLADDPVFQFLDKKRAEGKPYYVYMTAGANKFLRVYYGRVKEYLLSLEPTD

SEQ ID NO: 85893 - protein, 358 aa, unidentified
MSKLTQNNVVVGLDLGDRFSWLCVLDEDGEVVEEGRIRSTEVGFRGWFGGRDAVCVALEVGTHSPWVSRLLKELGHEVIVANARHVRMIYAGDRKSDRLDAEALARLARLDPGLLHGVEHRTVQAHEDLAVIRAREALVRTRTRLINHVRGAVKSAGHRVPRCSSASFHKTAADSIPSGMRPALDPLLGMLEQLTQEIRAYDRQIGKLVSEAYPETGALLQITGVGDITALAFVLTLENPDRFARSRAVGAYLGLCPGERQSGDRDAQCRMTKAGNEMLRRLLIQAAHYQLGPHGVDSDLRRWGLERAARGGRISKKKAVGGVARKLAVLLHQLWTSGEVYEPLRNIGGPDEPTAQAA

SEQ ID NO: 85894 - protein, 366 aa, unidentified
MTSMPIERPPVTVTVGVDTHKDVHVAVAVDAIGRRLGQVPVAASASGYRELLAWAHQLGEVNAFGVEGTGSYGAALSRYLRGERQQVIEVNRPDRSTRHRLGKSDPIDAEAAARAVLAGTATVTPKHGDGPVESIRLLRLTRDSAVKAQTQATNQLKAVIVTAPVDLRESLAGLPLVALLERCAGLRPADLTTVAAVTKHALRLLARRALALRAEAKELHAHLQTLTSAVAPALLELTGIGPDSAAALLISAGDNPSRLRSEAAFAALCGTNPVPASSGKTTRHRLNRSGDRTANAALHRAVVTRMHWHEPTKAYLARRTAEGKSKPEIMRCLKRYLAREVYRALVPARPAPAAHTTSKKDLDLAA

SEQ ID NO: 85895 - protein, 344 aa, unidentified
MLYVGLDLSRKRLDFDARLGDGELVERGAVPPDADGLAGLVRRLGDAQVLAVIESMNGARYVHDRLELEGWDVRIADAVKAKGLAPLACKTDKIDAWVLAELARLNLVPEIWLPDPTVRGERERARFRLHLVKHRSALKNRIHSILIAHGVASPSSDLFGASGRRMLERLSLPEPWRSTSAASLALIDTLDEEIERCERELRLLGADHRYVPLLMTCPGIAWILAFTIASEIGDIARFRAPVKLVGYSGLTPRVEQSGESDRRGPLRKNGPDHLRWALVEAAHSASRHALYRPILERNRDRHGRKRGTKIAALTIARKLAEASWYMLTRNQPFAPAGATRPLAA

SEQ ID NO: 85896 - protein, 462 aa, unidentified
MSKKKRKSITDIKPVDPLSQINPNAAGLDIGAQEIYVCVPADRDTEFVRAFPTYTRDLYALADWLTACSIESVAMESTGVYWIPIYEILESRGFEVCLVNARHLKNVPGKKTDVLDCQWIQQLHTYGLLRASFRPPEEICALRALVRHRDNLVRYRSAHIQHMQKALQQMNVQLTQAVSDITGVTGLSIIRAIVAGEHNPRVLARLRNTQCKKSEAEIAAALQGNYRFEHLFVLKQALAQYDFCDRQIRECDAQIETMYASLPASEYDDDDVPPPPKPTRRKPRKNQAHFDLATSLYHMVGVDLTAIDGIDALLAQKIIAEIGLDMSRWPTVKHFASWLGLSPQNKKSGGKILSRRTKKTKNRANAAFRVAAQSLSRSHSALGGFYRRMKAKLGAGQANVATAHKLARIVYYMLKYRKPYQDPGEAYYDQQWRERAIRNLNRKAASLGLTLASPSPVAADVS

SEQ ID NO: 85897 - protein, 323 aa, unidentified
MTEPNHPDNVTPQVIAGIDVAKHTLDVWIDSLHISFTSSNGPSGHRNLVKRLQKHGVNFVVFEATGGYELDAASAVDKAGIAIAIVNPRQVRDFARSTGQLAKTDTIDAKVICQYAQRNQPRKTELPDENTRALQELIGRRRQLIEMRTMESNRQDRARQKLVRKGIQEHIDAINQQIGEVEKAIRQRVDDDDRWSQRKEILTSVPGIGDVIANTLIAELPELGKLNRGQIAAIVGVAPHACDSGTLKGKRMIRGGRASLRCVLYMGVRRAITGNPLFKTMYDCMLAKGKPYKVIAMAIVRKLVVMLNVMVRRNEMWRTPCPA

SEQ ID NO: 85898 - protein, 373 aa, unidentified
MKKRSSSRQNPKRATKAKGAQRSVTIGMDLGDRNSRYCLLSDEGEILREGQVATTKTGMIETFSSLGRARIAIEVGTHSPWVTRLLQSFGHEVIVANPRQVKLITESSRKDDRLDAQTLARLARIDPQLLRPIRHRSEKAQTALMVIRVRAALIAVRTSLVNTARGLAKAMRERLPKCDADQMGVLQAESVPAKLRQLLEPLLKEVESLTERIKDSDREIEQIAREDYPETALLQQVGGVGPLIALTFVLTVDDKNRFQKSRDIGCYVGLRPRRSDSGQRQPQLRITKEGDPYLRTMLVQGAHYILSRRGPDTDLKRWGLRLAERGGKRAKKKAVVAVARKLGILLHRLWVTAEVYEPLRNQNLRQLQKEVAA

SEQ ID NO: 85899 - protein, 400 aa, unidentified
MNKQENIVAWVGLDWADEGHQICEYDVQTGTKQHYAIVHSAESLQEWVNQLRIRYGGKHVAVVLEQARGGLIHALMSTDFIKIYPVNPQSLAKLRKALYPSGAKSDPADAELLEEMVRQNPGHFRSWIPGDEVTRRLQLLTEGRRKFVEDMTALTNQLTSALKTYYPHALDWAGELHSEQACAFLEKWPTLTDLQKSRAFRVREFYVKYGRPRHEVLNERVKQIQGARALTEDPAVVIAGVMMVRTLVAQIASLRIAIAKYDQEIERIFHQHPDRAVFNSFPGAGKVLAPRLLAAFGADRDRFQSALEVQQFSGVAPVTERSGKAIWVHRRLACPKFMLQTFHEFANQAWKFCAWSKLSTGSSVREATTTTRPCERLPTNGFVLCSGAGRIGHLTMTAST

SEQ ID NO: 85900 - protein, 350 aa, unidentified
MENGITVGMDMGDKKHNICILDAEGEVQSRETVTNTATAIRKYFGKLESCRVAMEAGTHSAWVSRILDELGHEVLVGNPRKLRVIWDSDEKNDDRDAEMLARIARFDPHLLYPIHHRGAQAQCDLAIIKSRDILVKSRSTLVSHARGIVKSAGERISKCTTETFHNRLRDEMPTALEPALEPIMKSIEDLTQRIRHYDRLINKVSEEKYPETARVRQICGVGPITGLAFILTLEDATRFRKSRDVGPYIGLTPKQNQSGQIDMQLRITKAGDAHLRRLLVGCAQYILGPFGPDCDLRRFGLKLAERGGKNAKRRAVVAVARKLAVKMHHLWKSGESYEPLHRESIKKKAA

SEQ ID NO: 85901 - protein, 419 aa, unidentified
MRAVALDIHREFCEVAIVAEGRLRSAGQIKTRPEELELFAQSLDRSDWVALEVTGNAWAIAGILEPHVARVIVVSPNDTGIRQARAKTDRLDARTLAKLLWAGELDGVWTPDERVRTMRRRLARRAQLVRARSRVKNEIHAVLMRGLKDRPPSSDLFGVKGRRWLADQQLALCERETVESGLRQVDFLDAEIAAVEQLIAAEALSWPEIKRLMTVPGVNVIVAATFMAAIGDIRRFGDRRKLTAYLGLDPKVRQSGIGPANHGHISKQGSGSARHALVEACWSTVRQPGPIAAFYQRIKAKRGHSIAIVAAARKLACLFWCLLTRGEDYAFAQPSLTTKKMRRLELTAGAPRRQGGRDVWSTNSAMRHAERGLALQAQRAYERTVADWQAAAKVGASATPGRASQQPSKGQAARQTTSP

SEQ ID NO: 85902 - protein, 387 aa, unidentified
MPASGPRPGQVAVQISLAAIFVSLELSRSTWLITSLVPGGGDKMSKHSVRGGDIAGLLDHFTKLREKAHARAGASFPIIAIQEAGLDGFWVHRVLERAGIESHVVDAASILTSRRRRRAKTDRIDGEALLRTLLAYKRGEPRVCTMVRAPSPEEEDRRRLCRERKTLVAERVAHVNRIKGLLFAQGIADYEPLRSDRRSRLETLRTGDGRPLPPYLRAQIGRELDRLELLLEQLKAVEAERNALLEPANDAAPVAVQALAGLRGIGPEFTAMLWSECLFRSFSNRRQLAAYAGLAPTPWQSGSVQHEQGVSKSGNPRLRSTMIQLAWLWLRHQPASELSLWFRERVTRNGGRGKKTAIVALARKLLVALWKFSSSGVVIEGAMMKTA

SEQ ID NO: 85903 - protein, 408 aa, unidentified
MQVLYPRCAGLDVHKDTVVACVRCVSEPEHHETRSFATTTRGLLALGEWIVEHGCSHVAMEATGIYWRPVWHVLEGQAELVLANAQHIKNVPGRKTDVNDAMWIADLLAHGLIRSSFVPPQPIQELRDLTRTRKQVVREIGQHSLRIQKVLEDANLKLGSVLSEVLGVSGRAMLGAIIEGESDPHRLADLAQGTARRKHDELVEALHGRIRPHHRTLLRLHLNLIVALEHTVGELDAAAGKCLEPIHQRTRLLTTMPGISDVSAEVIVAEIGTDMTRFATPGHLISWAGLCPRNDESAGKRRSTRLRKGGTWLKTTLVTAAWAAVRTKTSYLRAQFQRLKARRGARKAIVAVAASMLNAAYFILRDGVPYRDLGPTHFDRQHRDRTVRRLMRRLQDLGYSLPHQITPA

SEQ ID NO: 85904 - protein, 429 aa, unidentified
MKDTFGFETALVVGVDPHRESLDAVGVRFPEVIVLDEVFDNTQAGHQSLWSKAQDLAEELGLTLVFGLEDGSNYGRSLSRYLVAAGSRVKEVNPLKTNRQRDFYGEDKTNHLDALATAAVVFRAYERLPDMVAIHEAVQATYDLSRYREKLVKQQTAAVNRLHSYLANQYPAYKDYFNEVNGVTALNFWATYPTTAHLRGTSVEELAALFYEKSNHCLSAAACTDKAQRVLASLDDAPDHTLDLLTEVQGEIISDLARQLLALKRSIKRMESRLAETLPQTGQKLESIEGMGTVLAAVFVGETRDTARFDHDQNKFARYNGSGPATRGTGPHLRQLQNRWCNRRLKAALVRLALGACHREPLSAAYYQACLDRGLQPHQARIRLMRRLSDVIFAMMRDKTAYDPEIHRLKQERNKTKKGESVAPASDDG

SEQ ID NO: 85905 - protein, 344 aa, unidentified
MDHFVGLDVSVKETSVCIVDDTGKVVREVKVASEPEALLRVLTNPAYHVQRIGLEAGPLSQWLFSALAEADLPVVCVETRHMQAVLKAQINKTDRNDARGIAQMMRVGLYRPVHVKTLRSQKLRMLLTHRKLLQSKAIAIENDLRATLRNFGLKVGLVGKAKFEARINELVGNLPDLAVLVEPLLIVRRVLREQIVILHRRLLAIVRDDEVCRRLMTTPGVGPVVALTYRATVDVPARFRKSKAVGAVFGLTCSKYQSGEIDRSGRISRCGDKMMRVMLYEAAQSMLRSNKWSWLKAWAMQIARRRGMKKAIVALARRLAVIMHRIWVDGTEFRWTREQATAAA

SEQ ID NO: 85906 - protein, 523 aa, unidentified
MATVTKTRLAKITRNRFIGKPHGQIQDRVRKVGPEHFGVISVDCAKRRSKWMLCDFYGRVIIEPTIVEHNAGSLKAMTDLARITCQEQALTDSIVAVEMTGIYHRPVQRAFRKAGFDTRTVHPFASKHYRRPLHPDCKTDDNDLEAIFHAAINGYGLATLPVDEDYQSLQLLSRHRRNLVKQRARLQVQIRRFIHQTMPGYADLFDEDHFYSKSIAIHVALKFPSPALIRKAASDGIAAALKKSKIRFQPRTIDRIVAWAATADEPAALASLLTQQWQQLNSMRVTLSEQIEEIEREMAHFLVRTPYVLLLSVTGINVVSAAGLAGEAGPIEHYATARALNGRAGLYPSRYQSDEVDHADGGLVRQCNRKLRAAAMLIAENLIKCHPHYRGLSALWMTQRIDPRDRRCRIANRAMRMVYQLVGGRQLWHGKGVDREYLLHKLHEFHRVHGTPIMRSIADLQAAFQWLPKSAYEAESVPLVKLASKRTRGPQQIGDLMLPLLIRLGVRSASEVESSSSEARSSE

SEQ ID NO: 85907 - protein, 389 aa, unidentified
MSKPNELSRSLTVLKGDTTLIAVVEMSLSSWLVAGIVPGVERQPLKKLEVHESALLKLLNRWREEAKKAGHRIERIAVAFEAGRDGFWLARWLRARDIEAHVIHASSVAVPREHRRAKTDRLDTELLKRAFLGWLRGERDHCKMVAIPTIQDEDAKRPNRERENLVGELNRIINRMKATLIRLGIRGFNPKLKKAADRLEGLRTPDGEPIPPNTSAELRRDMQRRRLVNEQIRQIEQARLERLKQSPSDGRHAMVCLLARVIGVGVETADMLVQEVLSRKLRDRRAVARYAGLTGSPDESGKRRREKGLARSGNARVRRGMIQLAWRFLMFQKNSALALWFRTRTENARGTRKTMIVALARKLLIALWRLAHEGVVPDGIVLRPASRGR

SEQ ID NO: 85908 - protein, 377 aa, unidentified
MSEGTTFVGLDVHKETIAVAVVTAGGGEPRSLGIIPNTPATVAKLVRKLGATATLRCCYEAGPCGYGLHRQLTGLGAECVVVAPSLVPTKPGDKVKTDRRDALKLARAHRSGDLTAVWVPDEEHEALRDLTRARADAREDRHRARQRLGKFLLRQGLRPPDGVKPWTVRHRTWLTGLRLARPAQQAVLREALHAVDEAGARLDRLEDELVEVAQSGPQAALLTGLQCLRGVGLVTAATLVAELGDVTRFDHPRQLMSYAGLVPSEHSSGGRQRRGGITKTGNAHVRHVVVEAAWHYRHPPRVGGVLKRRQLGQPTAVTELAWKAQVRLHKRFGRLLGRGKLPQQAVVAVARELLGFVWALARAVATTEAATVVPIAA

SEQ ID NO: 85909 - protein, 352 aa, unidentified
MADNETAVIGGVDCHLDTHHAVALDQHGRRLGDHEFRATLAGYGQLLKWLRQFGGVEAIGVESTASYGAGLTRFLTAAGTRVVEINQPHRHLRHRRGKTDAIDAEAAARKVLSGEAAAIPKDTTGIVESIRQLRLVRAGAIKARSAALAQIGDLIATAPTELRERLTRKTLRGQASVCARLRPDQARMNEPIQAAKLALRTLSERIVILDAEVATFDRHLESLVAKAAPRTIALLGVSTGHAGQLLVTAGQNLDRLYSEAALAHLCGAAPVPASSGKTTRHRLNWGGARQANSALHMIAVVRLRYCSRTRAYAERRTSEGRSKREILRCLKRYIAREVFLSLRVDLTAPRPT

SEQ ID NO: 85910 - protein, 422 aa, unidentified
MSYCPVAGIDVSKQFSDMCILSPDNKIFAQEKIYHDEISINRANALLQKAERLFFSKPVIVMESTSHYHLILFQFFSEHGYDVIVVNPLQSNSMKDFSIRKRKTDRVDAFKLAMMYRTKTLRPSQIPQTATRALRQLCRHRAELLNDVSSYKNRLTALLDQTFPGYDKVFSDVGGVTSCAVLVRFPTPTILLVEEESELVEVIAAASKSGYSFAKKKAGLLISAAQKAQTLGIHSCADETLIVCTIQMLRTLSESVLQIETAIDNLLAQIKEMRNNVSLLQSIPGVGSHSAALLLGEIGDISLFKKPKQLAAYFGLDPTERQSGSFRGTKNKLSKRGSPYARAALHMGVVNSICKRGKDSAANPVLLSYYEKKCKNKPAKVAQAASMHKLVFIVFAVLRDQKPFELKTPEQHAVEQGFVKAA

SEQ ID NO: 85911 - protein, 355 aa, unidentified
MDHIGIDVHKKESQICMLAEGGELIEQRIRTEPERFAAVLGKRPRARILLEASTDSEWVARCLEGLGHEVIVADPNFAPMYATRTRKVKTDRRDARALMDACVLGAYRPAHRLSDAQRHVRGRLGVRDALVRTRTRYISLIRALLRQHGYRVPSGSAEGFLHRVDALALPGPVLSLIGPLLAVMLPLNRQLAYSDEVIEHVAAQDARVQRLRTVPSIGPVTAAAFVATIDDAQRFRRAHQGEAYLGLVPCEFSSGESQRRGSITKAGPGRARWLLIQAAVSILRRHPPEAAALRTWALRIAARRGKPIAVVALARRLAGILYAFLRDGSVFEPRHAVGLPRAVTALNNRAARSER

SEQ ID NO: 85912 - protein, 345 aa, unidentified
MEYYAGIDVSLDTVSVCIVDGTGKIVREAKVATEPDALVSWFLGIGLVAERIGMEAGPLSQWLHEGMREKGLAVELLETRHVRSAFKTMPVKTDRKDARGIAQLMRLGWFRPVHCKSFPAQEVRALLTTRKLVLNKRIDVEMGLRGILRGFGLKIGPTTPRTFETRVRELVDGHPTLLVVAEALLAARVALATQLKGVEKRLISLARDDRRARLLMSAPGVGVIVALTYVSAIDDPTRFRSSKAVGPHFGLTPKRYQSGETDVSGRISKMGDAGVRAALYEAANVILTRPVKGSTLKSWAARLAARSGMRKAKVALARKLAVVLHRMLLDGTSFVADKAAARAAR

SEQ ID NO: 85913 - protein, 346 aa, unidentified
MEHYAGVDVSLELSSVCVVDAQGKIVKETKVSSEPEALVSFFKGLGFPMKRIGLEAGPLSQWLHAGLAQAGFETVLLETRHVKAALSAMTVKTDRKDARGIAQLLRMGWFRAVHAKSIGSQEVRALLVARKQLLGRLIDVELSIRGILRGFGLKVGPVTRKEFEARIRELVMGQATLERIADAMLSARAALKAEYEKLHKAVLAIVREDAVCRRLMTVPSVGPLVAITYKSAMDDPNRIVKSKAAGALFGLTPKKYQSGEKDVTGGITRTGDEMVRTALYEAANVLLSRITRFSKLKRWGIDVAKRRGSKRAKVALARKIAVILHRMWVDGSTYRWTETQPIAAQA

SEQ ID NO: 85914 - protein, 334 aa, unidentified
MSVVTAGIDVAGKSLVVDVLCDGIRAKRGKPFSVDNTPDGHGQLIEKLRDLAVTRIVCEATGVYHLDLAIALVEAGLPVMVANPRQVKAFIQARLRNSQDDPIDAHELAQFGLRMDFRPWQAPDPSHYALHRIARSLHGYVEQATAAKNRLHAAHAVAQTPKLLLKVIKEEIAFLDRIETRLRTEALKIIDHNAKLKRHFDLLISVPGIGQTSAVQLLGELCVLASDLSAKAWVKLAGLDPTRKQSGTSVLGKAHISRRGNAKLRGALFMPAMSARRHDPGLKHFADRLVQNHKTPLQAIVAVQRKLLHGIHAMFTLDQPWNSSALVPQTQNQA

SEQ ID NO: 85915 - protein, 369 aa, unidentified
MEQGIKLYVGLDVHKDSIAIAVAEAGRSAGRVVGQIVHDVPKLLKALARLGEPGALHVVYEAGPTGYGLQRALSAKGYRCEVIAPSLIPKRPGDRIKTDGRDCLRLAELSRAGELRAVWIPTAGDEAIRDLSRAREDAVNSRTQARHQLKAFLLRHEIRYGGKSAWTKAFHRWLGELNFGDANSQTAFTEYHLAVQAADQRLERLTQALTASVAGWRFEPVVQALQALRGIDKVSAISLVAEIGDFARFDHPRKLMAYLGLVPSEHSSGDRLRRGSITKTGNAHARRLLTEAAWNYRFSPRIGRAAQARQENLSEPIKAIAWKAQRRLSGRYARLNGRGVHHNKVCVAVARELAGFVWAIAQASSAQPQ

SEQ ID NO: 85916 - protein, 413 aa, unidentified
MEQIHERVAGLDVHRDSVSACARLPDLRGGAMVDKARFATTTAGLAELAEWLADREVTVVGMEATGVYWKAPYYALEGRFEVWLCNAQHVQNVPGRKTDLADAEWLADVVAHGMVRPSFVPPPPIRELRDLTRYRKRQVDVHAAEVQRLEKVLQDAGIKLTSVASEVLSMSGRHMVEALITGQQDPATLAQMAIGRMRNKLPELKEALTGHFGAHHAAVARQILDHIDFLDARIAAISEEVAVRILPFDAAMQRLIDVPGISQISAEVSIAETGGDMSRFPTPAHLASWAGLAPGNHESAGKRRRVGTRPGDRWLRRVLIEAAHAAARTKGSYFGAQYRHIAQRRGPNKAAVAVAHSLLDLVWHLLSTSEQFEDLGADYFQKRHDPEREARRLVRQLERLGHRVSLTPAPSTA

SEQ ID NO: 85917 - protein, 387 aa, unidentified
MPHPNDLSRSLVALEQDATLIAVIEMGQSSWLIAGIVPGLERQPLKKLAADPDTLLQLLHRWRNEAMQAGRSIKRIALAYEAGRDGFWLARWLRARQIEAHVIHPASVPVSREHRRAKTDRLDAELLKRAFLGWLRGEPKHCTMAAIPTLEDEDARRPSRERESLVGECTRIVNRVKAHLARLGIRGFRLTLARASEHLKSLRTPEGAAVPQHTLAELRRDLARLSFVKQQIKEIEASRTERLEATPGEGRNAMVHLLARVVGVGVETADMLVQEVFSRTLRDRKALARYAGLTGAPDESGRKRRERGLAKAGNARVRRGMIQLAWGHLLHQKGSPLAEWYRRRTADARGGTRKTMVVALARKLLIVLWRLATTGEAPAGLRLRPAA

SEQ ID NO: 85918 - protein, 343 aa, unidentified
MYFIGLDVHKKTISYCVKDVAGHVHREGKIGSTRRELDAWIKTLPQPRLMAMEATIFTGWIYDHLLPHAEKVKVAHPLMLRAIAAAKKKNDKIDAAKIADCLRCDFLPECHMASTEIRDRRRVLRYRNLVVKQMVQMKNRVSGLLMETGVSYNKQRLHKVGYFGELMSTNEDISQAVRPLLNLSRGMIRRSGKLEYDLVSSLERDPLLRERLRRLRTVPGVGSITALTWALEIGDYTRFSSNKQAISYCGLCADEKSSADKVMRMPLSKQRNKHIQRVLIEAAKLAPRESPELAMIRARELERGNPNRATLAVARKMVCYMMAVERRQQDFVTAGELVPTEAA

SEQ ID NO: 85919 - protein, 393 aa, unidentified
MFFVGIDIAKKSHEATVIDSNGNYSVKPFKFANSIDGLTKLLNALSAVSESISDFEFGMEATGHYWLNLYTKLTELGATVHVINPVQSDALRGLYIRQTKNDAKDAFIIAELIRFGRYSETSISDSDLLCLREMTRQRFYLVDCISDAKRKVISCIDKLFPEYQSVFSDTFGATSVELLSTYTSPDVIAELDTELFATFLKSVSRGRFGLAKAQELQTLAKNTFGSFLFADSASLAIRQFLQQIKLLEEQVDELDEFIAEKFAQFDNQLTSINGIGNTLAASLLAEIGDINRFDAPEKLAAFAGIDPSVKQSGEFNGTKCHMSKRGSPYLRKTFWLAAVAGIKFNPAFRALYDKKRAQGKAHNVALSVVMRKICNIVYVILKTNKPYRIVLPN

SEQ ID NO: 85920 - protein, 345 aa, unidentified
METMYYIGLDVHKKTIDYCVKDGSGRIYAAGSIRATRLELDMWMKTLPRPWTAAMEATIFTAWIYDHLQPHAAAVKVAHPLMLRAIAVAKKKNDRIDAKKIADCLRCDFLPECYMASTEIRERRRTLRYRNLLVRQAVQMKNKIAVLLMEAGVSYNKQKLHKVGYFRELLATNQDIDEGLKPLLRLCRETVVRLGKTESALVRSLERDSLLVERVERLMTIPAVGPITALTWALEVGDVQRFSSIKKAISYCGLCGAERSSANITMRTPLSKQRNKHLQTVLIEAAKMAPRNSPELAMVYDQEKQKGNANRATLAVARKLVAYLVAVDRRQKEFLTVERENRTAA

SEQ ID NO: 85921 - protein, 397 aa, unidentified
MIAVGIDISKAKSTVAVIDSDGTVLASPFTMAHTQPEMEAFVTYLKGLGEPTTILMEYTGHYHYPVLKKLQDEGFPVCIVNPYQMKKYGDVEIHKAKTDKKDALRIAAYALEKSYKLVPYSSMEQKYEDLKFLSRQYSQRITYVAKLKVQLIALLDQTMPGITRILPLNSRNPEKCALLLFIKRFKSFDEIQRIGKARFLASYDVLAKKASERSASSKGLSIYELAVDSITTRGEDPYIWLSQNQCVDLLSTTQNAADEIISQMRNIAETIPEYKVLRAMRGVGDRLGPIILAEIGDIRRFHSGKALNSYAGNDAPPYQSGQFESRNRHISKRGSSTLRKACYEVMQALKLTKPQDDPVYLFMLKKEQEGKPFNVAKMAGVNKFLRIYYARAMELYK

SEQ ID NO: 85922 - protein, 313 aa, unidentified
MNNTITYLGLDIAKRTLDLSPHPSFTQRSFPNDAAGHRTLIAALCLVSGPIQIICEATGGYEHHLLVALHEAQVPVTLVNPRQVRDFARAKGLLAKTDSIDAAVLAEYGRLFTPAATVALSLVQQRLGQLVTRRQELLGFITQEQHRTEHHHERFVVRQAARLLATLRRHLKQLEEEIAQLEKSDATLAGQVQRLTGIQGVGQRTAWLLLAALPELGTLQRGQAAALAGLAPYNHDSGPLRGQRHIAHGRALARTALYMAALVASRCNPVLKPFYERLRAAGKPGKVALVALMRKLVELANLLLKNSSWKLSE

SEQ ID NO: 85923 - protein, 454 aa, unidentified
MKKQDSYDYYVGIDCAQNKHDFAMKNNQDKFLIKRGHFSNTLQGYEKFLNTVLSKCLNKDKILFGMEVTGIYGTNLYERLKSDGYHVVMISPDSVKNYRDYKRLNKTDKIDSGCIAELLLNGDAQIVHVAKNGYTDLKAYIRRRNALKVTCTQETNRFLAKVCLCFPDLLKVFPSGRATLKAIFSIYPTPYSIIEADFDELVSVLQKASKNKFGVDKANELIHAARNSIVVRKSISDGELYNIHSLIDSIDSLESEIRNLEKIIDSKAEEFPAYHVLLTLTGCGKITAATIVAEIGDIPRFHKASQIVSLAGLYGDNSKSGSSVNKRGKISKKGSRYLRHAIYMVAEFARRNNPIFKAYFTRKKNGDRTKHTLAVNAVANKLCKVIYSLMKNQSTYIIQYRDLVKLSESTQNEFFQNAETDFSAKTRRKKYLYEDEYGELHEFVFKSIKTALIE

SEQ ID NO: 85924 - protein, 358 aa, unidentified
MNYFGIDVHSTYHKVVGLTADGEPLEFDIPNTREGREELQELMLQHKPCAVAMEACSGAYKIYDLLQPVVQRIQLLHPADLKEMFGKKSRKNDRIDAAMCCRAAKYEMEGIWVPDEETRQRRALSARRVSITQKRTASKNSVKSAFREYHIQLAENPWSDKGMKVLRERLKKLPATVALGVELELNHIEVYNRSIEQLDHRMAELAWGNEQIELLMSVPGISYYSAFVIMAEVGDIRRFESAKQLTAYAGLCPSFNQSGKKQTRHGPITRKGRSRLRWITVECAHVGARYAPKLQRLKWRLKKRGKHGNIATVAVGRKLLELCYHILKSGKPYSESIPEKHEAKLRKLEGKAKVREAA

SEQ ID NO: 85925 - protein, 348 aa, unidentified
MTMVCGLDLHRRQITFDALEVESGEVWTGRVWQPDRERFRRWLRDDVTERARGGSVSMAVEGCTGWRYVVEEVVAAGFEAHLAEPADTQAARGRKRRAKTDRSDCRLLRELLADGRLPASWIAPTIVLEWRERARLYKTLVDQRSTSVQRIHAELYQHGVTLPETSIRWTKTRELLEDDGLEISPAGRQRVLTAYRMIDAITIESRPLKADLQRFGRRQPGCRALVEHQYGIGGLLAVTMWSELGDCQRFARSEQVVRHSGLDVTVDQSDRRRAGGFISRQGPQTLRWALYEAAKNASHQRSPDHDYYADVKDHLNGKLATISMARKLARRCFHVLRAVDPDVVYAEP

SEQ ID NO: 85926 - protein, 430 aa, unidentified
MRIKLSAHIRTGTIMELQRNKVCGIDVHKRFLIATILCRDGKKDTQRFSVTLEDLLKFRDWVIENGCEQVAIESTGIYWHPVHSVLEGKIDLIVANSYKIKHTPGRKTDVSDSEWIAELCLNGMIEPSRIFPKDDRELRRLTRAREGYVKQMTQEKNKIHQSLDSACIKLASVISDIFGKSGMYLLNCVLEGREIDDIIDGIPSGRLKKKADQIKESIKSRLDVSQVILIRGSLSLMKSIQERIDELDGEISARIQYRKNDLAIAMSIPGTGFVSATAILAEIGNYTDFEKPEQLAAWCGLVPSLYQSAEKTILGGITKQGSKHIRRMLIQVAYAISRTKDSKLKKFFLRIQAKKGSKVAAVALARKVLCILHHLLINQEMYLEDRDKKNMHHKPLIPPSPIEMSIQEMIDYIVRAGYVVTKSDSIGGFG

SEQ ID NO: 85927 - protein, 416 aa, unidentified
MSLLHWVGRAIGLDVHRDFCVIAICEDGVVRSAGRVPSTPEALQTLAESLLPSDRVALEVTGSCWEVARILEPHVNRVIVVSPDDTGITQARAKTDRLDARALAKLLWKGELEAVWKPDERCRVMRRRLARREQLVQARTRSKQEIHAVLHRRLQGKPPVSDLFGVKGREWLAGLKLPLEERESVDAGLRHVEFLEVEIAQVERLIAQQALDWPEIRRLMTVPGVSLICAASFMAAIGNANRFLTSRKLVAYLGLDPKVRQSGEAPARSGRISKRGSASARWVLVEAAWITVRQPGPLHAFYERTRARRGHGKAIVASARKLAVLFWCMLTRSEDYAHQQPSLTAKKLRQLELKAGPSKHTKAAAGVWSANRAVRHAERALAEQAEVSYKRMVQDQQAGAPARRVGASATLEHASK

SEQ ID NO: 85928 - protein, 371 aa, unidentified
MRIGMDTSKSVFQLHGVDAAERPVLRKKLRRSQVLEFFRALPPTRVGMEACGAAHHWARQIGALGHEAVLLPPQLVKPYIPRNKNDAADADGICEAMSRPRMRCVPVKTAEQQAALMLVGVRDQLVARRTQLSNSMRGYAAEFGLVAAKGLDKIEPLLARIAADARLPELAKEMFTTLGADYAALGMRLSRVEARLRAWQRQDETSQRLMEVPGVGPIAAALLVMKVPNPHAFRSGRDFAAWLGLTPKDHSTAGKQRLGVITRAGDEALRRTLVVGATAVIQQMRRGRGRASPWLTGLVARKPPKLVAVALANKTARIVWKLMVSGECYDHGRAARARAERSAALTEGFALRSALAATALRGDAAATVRKP

SEQ ID NO: 85929 - protein, 371 aa, unidentified
MKQQTKSSNITVGMDLGDRRHRFCALDERGEVVEQDSICNDRVSLRKLAGRYHGALGVMEAGAHSPWISRFLEALGWRVVVSNPRKVRAIYQHERKSDQRDALMLARIGRMDLALLYPVRHGTAEAQQDLLRIKLRDSLVRARVAVINSVRFTLKSLGYTVRNPSSERFHKVVMEEVPESVREMITPSVQALAELTARIKMLEREINTLAQMKYPQSAQLQQIPGVGPITALYFVLKIEDPNRFAHVRDVGAYAGLCPRRDQSGESDPQLRISKRGDAYLRRLLVSAAHYILGPFGPQSALRAYGLMLAADGTARAKKRATVAVARKLAVLLLSLWKSQQPYQPFPGACLNGEQEDRRSGTIALHRMEATD

SEQ ID NO: 85930 - protein, 340 aa, unidentified
MEKRYIGIDLHRNRFTCCIRLENERTYVTEWPLEALGRFVKKLRASDEVAVEITSNTRLFHDAVAPHVARVVVVDTNQFRVISQSVKKTDPNDARLLSLYLSKGLLPEVRMKDKERAQLASLTQTRDTLVKQRSALKNKVNNILSARGLNLAKEALSSEKKLTEVMELPFDEIVRIELRVIVEQIRSLNKSIVELEKTIGEEGSKLEGYQGLSSIKGIGKITGAILLSVIGDVNDFADEGRLASYFGIVPRVSNSNDTERSGRIHKRGTKLGRTALVQSALIAANYSPYLKRFYEQVKARRGAGKAIIALARKFLGIIYRTLKNKWVFEDFPNFVLTEES

SEQ ID NO: 85931 - protein, 351 aa, unidentified
MMIIGCDYHPSDQQIAFVDQETGECSERRLNHSEGEAEKFYRDLQQRGVSVRVGMEATGHARWFERLLAELGFELWIGDPAEIKTKRVRKQKTDREDARLMLKLLLEDRFPRVWVPSPENRDLRQLLWHRHRLVQMRTRIMNQLQAVAMNEGIRRKKALWSKSGRVQLESFSLAPWSSRRRQDLLELLDRLNPTIEQLSAAIAQEAEKRPEVRRLMTHPGVGPLTALAFVLIIGSPERFRCGKQIGSYVGLIPCEDSSAGHQRLGHISKQGNSLLRFLLVEAAQIAVRHDPDWRRRFLHLAVRRERRIAKVAMARKLAVRLYWMWRKGWDYQQVLQFGSHAGQPVKAHGVQ

SEQ ID NO: 85932 - protein, 370 aa, unidentified
MNKPATLFVGLDVHKDSIAVAHAPDDRRAEVTYVGRIGTRPADVDALIRRLKAKAERPVVAYEAGPCGYVLHRHLTSKKITCMVVAPSLIPRKPGDRVKTDRRDAVTLARLLRSGDLNPVYVPTVDDEALRDLARAREDVVVTLKAAKFRLKSFLLRHGLHYTGRADWNDAHRRYLARVVCPTPAQQIVYQESLHAVDEQVGRLRRLETELRDHVATWRLAPVVRAYQALRGVQDTVAITVAAELGDITRFDNPRQLAAFLGLVPSEYSSGNSRRLGGITKAGNGHARRVLIEGAWSYRYPAKVSAHIQKRLEGLPKPVRDIAWKAQVRLCRRFRRMVARGKNPNVVVTAIARELAAFMWAIAREVPITA

SEQ ID NO: 85933 - protein, 356 aa, unidentified
MEQSKNYFIGCDAHRNYSVFVLMDERGHTGSANTVPHDRSSYRYYLSTLPPHSPIALESVGNWYWMIEEMEQAGHQPFLAHPKKAKLMMGLTHKTDKLDARGLALLLRNGTLPSVWIPPGELRDQRELTRMRMAFVRVRTMLKNRIHSALAKYGIRIDEVSDLFGLTGRELLKERSAALPPETQRSVQEHLELLDQLLQQIERAEKRIKERIEVTPEMKLLMTLPGVGPILTILIVLEIGDIRRFPDAPQLASYCGTVPQIKSSGGKTFYGKVRPDVNRYLKWAFIEAANSIVLNQMRMSDRQVVRLYQRIMKRKGHPKAIVAVARHLAEATYWMLTKKEPYREPIGSRRISPTQK

SEQ ID NO: 85934 - protein, 359 aa, unidentified
MSTQSKPFSFKGQKIFVGLDVHLRSWSVTVLSEQAVLKKFTQDPSPAALSKFLTSTYPDAEYYSVYEAGFCGFWIHWELHNLGINNIVVNPADVPTMAGERLRKTDAVDSGKLARSLRSGELKGIYVPDSITTEIRSLIRLRDSLTKDQTRHKNRIKAHLRYLGIDIPEEFCRPGRTWTNRFVLWLKSLELETAYGKKTLDLLIAQYEDLRGQQLKMMKELRILSRTERFDEPLRFLMSVPGIGQLAGLTILSEVDDISRFRDAAHFASFVGLVPMCYSSGEHEGTGNITVRRHAKLRWLIVEAAWIASRKDPVLSAAYVEYCRSMKPSKAIIKIARRLVNRIYFVMKHQQPYVNCYVS

SEQ ID NO: 85935 - protein, 339 aa, unidentified
MENNNNPYYKHYLSIDWSQQDVSIARMRAGSNQPETKMFPADIKKIKEYLKGLQGKKILTIEETTGSHWLYVELLESVDKILICDPYRNSLLSEGAKNDKIDARKLCLLLRSGLLKEVYHTSNEDYKIRKLASAYIALVKSGVRIKNQNSALYRGEGLKYKKDKIKKGEEILSFVEEQQKRAIKLYEEEKKKYEEVFKELKKKNEVIKMLCQVSGIKETSAVKIYSVVIEARRFENKYKYWAMCGLVKHDRESGGKNYGKKNPRYSRILKNVYKSAALAAIGGNNDIREYYEVLLQKGYPIPEAKNQIARYIAKVTYAVMKNKKPYKAYQWRELNKQKS

SEQ ID NO: 85936 - protein, 404 aa, unidentified
MKGPIVSIDVSKGKSDYQAFKEMNVKYTGSRSIKHTKEGFDEIVSLVREMEKKLETEVCVVYEATGVYHRVLKKVLEDNNIKQFIINPLLSAKTRKNDSLRSPKTDKLDPKSIAKTYYSHSLHNSHKPETIYHELRELSRYYEDILVHLRKDKVAFRAQLDVVFPGYDTLYDDLYGPVALAIIEKYPHPEMLQKKKINTVSKVIQSKTCHRQAMSDTMADKAIEYSKTIYSGCDKDDIEVLILQRFIKKLKEDMAEAERTIGEMIKLVQELPDFSIIKSIPGIGDNLAARIIAELGDMTRFKKKNELVAFAGLDPRISESGQNDGDHMHITKKGNKRLRCLLYLAVTCSIRLKRDDNSIKDFYIKKKQQSNPMCSKAAKTACASKLVRIIYSMCKTGELYQYNK

SEQ ID NO: 85937 - protein, 342 aa, unidentified
MSIVYVGLDLGSSNFQQVALNHDGVSRVNRDFTTSETNLVKAFSDLKGEIHVHLEAGELAPWAASVIGPLVTRVVCSHPQSNAWIAKDADKCDRIDAYKLAELLRLNRFKEVHYAPDQPRRNFKQLVQHYDELTAQQARLKTKLKARLRMQGVIVTGERLFSATGRKEVLARVESRDLQTAIKQLYEVLDQSVTAQEQARLLMLRAAQAFREIKLLRTVPGVGPIGACRFSAYIHTPNRFSSKRKLWKYCRLSVSHRSSNGKPLRRPRLDRSGCGRLKDVSRKAFEVAVRSRQDNGFKRTYQRALETTHDATHARLTVQRKIVSTLRAIWINQTPYCDELMR

SEQ ID NO: 85938 - protein, 391 aa, unidentified
MINIGIDVGKFKHCATVLDDSTGEVLIKPFFLTNDRKGFDILYSKTKQFIHRKHSVGMEDTGHYMINLTNYLLDKKFTVKYINPRATCLRRKGLGISAKNDRKDALLIAEMLSEKRFWRSISVRSIENSKFRDITRLYHQLQEQQNQDMNRLQRALDIVFPEVNSLSWTRYSKAYMKFLSTYPSASSIALEDIRILRKALKTEGRGRQCKVTAEEIRELAKNSVGEDNISIDLEVTSIIAIINTREEQIRMLEKKIEEFSHKLNSPIISIPGISHISGMTILAEIGDINQFQNTGNLISFAGMDPLVYQSGKYDAAHMPISKHGSRYMRKALYQAVFTVCKYSPTFHDYYTKKRNQGKSHRCAQGHCARKLLRVIYKLLSTNSLYDQNHIQ

SEQ ID NO: 85939 - protein, 347 aa, unidentified
MKKIFIGIDVSKEKCDATAIYAEKGLTEVKKLDYFVFENRPKGFSSLLSWAKKLKADVSLESILFVCETTGAYDRALCDYIYSKGLDIWRESALQILWSSGVRRGKDDKADSLMIAEYALHHMDKIHLYESPDSRILEIRALFLYRRKLEQEKTSKLVRIKELEATAGKSKTISFILRDAKKSVRQLEKSIKESEEKILELVDEDEMLRKSYQHLDSVKGLGIVNITALIVYTNNFRAFKTSRKMASYWGVAAFRSKSGSSVDKRADVRNLSSSMLKSYLTQAAMHTIARGGIYHDYYQRKISEGKTHSIALNNAKNKLLHLAMSLVIHDMDYEMNHELLKVQRATN

SEQ ID NO: 85940 - protein, 353 aa, unidentified
MKKYYVGMDVHKVTIAIAVLDASGKLVSQSIIETSTQAVKDFLHSLRAEVHVTFEEGNHAAWLYDIVEPLVKRVVVCNPKHNHHLMSGSKSDRIDARKLAELLRLDAVKAVYHGEHGTRTLKPLMRSYECFVSDITRVKNRLKGLYNSQAIVQRGRELYHTRKRQVWLEKLTNAGQRTRAELLFLQLEELKKLKRVAQKAMVAESTRHEAHRILSQVPELGPVRVAQIIATVDTPFRFRTKRPFWNYLGLAVESRTSADHEVVDGRVQKRKKVIQTRGLNEDYNRRLKSIFKSAAVHASGCGAYKEYYEGLLQGGMREEMARLAVARKLAATVLAVWKSGEAFDAGRIMSKAA

SEQ ID NO: 85941 - protein, 345 aa, unidentified
MTTMNYIGLDVHKKTISYCVKDVSGRIQQEGKIGSTRRELDYWMKTLPQPWTVAMEATIFSGWIYDHLLPHATQIKVAHPLMLRAIAAAKKKNDQIDASKLADCLRCDFLPECHMMPRAIRDRRRTLRYRHLLVRQMVQMKNRVSGLLMETGVEYNKQRLHKVSYFRELLSANGEVPPSIRPLLKLSRETIERCQKTEYALVSSLQRDPVLADRIKRLRTVPGVGPITALTWALEIGDVSRFGSIKQAISYCGLCGDERSSADRAIRMPLSKQRNKHIQRALVEAAKLAPRQNHEMAVIYDQERQKGNSNRATLAVARKMVAYLLAVDRQQRDFVPAEERRTAAA

SEQ ID NO: 85942 - protein, 342 aa, unidentified
MDSLYVGIDVAKASFVAAAHGPAGESLWGEFANTPAGFAQWRARVRAAVDEQPAPTVVVVLEPTGAYELALAGFAAAQGWQVSRPNALRVHDWANSQGRRAKTDRQDARILARYGAAQPLAAWKPLPRAYSELESLLQRQDDLEIILQQERNRQAALALQAGAARVVAASLAAVLLSLETAQREIQSAIKAHLKAHPALKAKKQRLLSVPGIGRQTVLHVLVLLARWETLTEGTGRAKGLVAYTGLDPKTHDSGSSVHKPARISRMGHGPMRRRLYLAAFGGVRARGGPLRHFYCRLVGRGKAKKLALIAAARQLLVWAWAVYRTETDFDPQRHTKPEAQTA

SEQ ID NO: 85943 - protein, 340 aa, unidentified
MNLIAVGLDIAKSIFQVHGVAAHGRSPLRKQLRRSEVLRFFAKLPPCLVGIEACHSSHFWGRELSKLGHRVRLIPTQYVKPYLLGGKNDANDAAAICAAVMRPDMHAVAIKDAEQQSLQSLHRMRQRLVLERTAKSNQIRSMFAEEGVVFPVSITHLRRSVSNAIGDPRSAITPILRRLGTMYLEQLAALERWLAELNEQLHQIATERDDCKLLTSIPGIGPIVATALIGTVGDPRQFRNGRQFAAWAGLTPRQRSSGGKISLGGITKRGDVYLRTMLNQGARAVVRFVTRRTDRQAVWLQRLMQRRHKNVAIVALANKIARVAWAVLTRRTAYSLCQQA

SEQ ID NO: 85944 - protein, 405 aa, unidentified
MKVYIGIDWSENKHDICLMHEDGEVLRVLQIRHTITGFRELDMARQSLGVAIRECVVGLETAHNLLVDYLWDQQYTQIYILPPNAVKSAQKRFRQSGAKDDPWDARLIADILRTDQSRYSLWKPDNALTRQIRAEVRFANQLGQELVRDSNRMRSLLLRYYPAATQLFSHLDSLVSLAFLQAYPTPQQAESLSFEDLKGFLRQHHHTQTRSWATVYARLHADQPQSNPEVQAVYMPLSLAQARILEQLVKSRSECLERLKRLYFQHPDHEIYDSLPKVGTILGPALLSKLGDDRERYPTPAILQAVAGTCPVTNRSGKHLRVYFRQACDHEFRYFVQQWARLTLEVSPWAVAYYSSVRPHCKNDSDAIRRLANRWLGILWRLWIDRKPYDETLHLKQHALRSKSR

SEQ ID NO: 85945 - protein, 358 aa, unidentified
MPVYIGVDFHARQQTISYLTTEDGEIKRLRIDHDPEDPRQQQVREFYMQLTGEVIVGFEAGGYSQWFETMLAEIGHQVWVGDAHEIRLLARRKQKNDKRDANHILDLMVSGRFPRLFRRSAHSQEILRQLGYRHKLVKMRTMAKNSLQAISLGAGLSLRSRLHSERGRSRLKQLNLTPATACQADKLIELIDYLTAEADRVEKWLGEQAKSDERTALLQTHPGIGLLTSLALVHTLEPVERFANPRKVTAYIGMDPVEDSSADRKRIGAISKAGSRMVRFLLTQAAQVAIKTDDELRSLFNRIMKRRNTPKAVVAVSRKLLVRSFIMLRDRIDAEEFLRRGVEARSSRKAHGPLMPEP

SEQ ID NO: 85946 - protein, 393 aa, unidentified
MRKPKKHKKPLNDLSRSLTPFDPNQTLIIVVELSKKSWVVAGIIPGVERQPLKKLAPDENELLKLIERWCAEAEKAGHKITRIAVAFEAGRDGFWLARWLRTRGIAAHVIHAASIPVPREHRRAKTDRLDTRLLKRAFLGWLRGERGHCKMCAIPTFAEEDARRPHRERETLVGEQTTIINRIKATLARLGIRSFDAKLEKTPERLEQLRTPEGEAIPPNTLAELKRDIERKQLVAEQIQQIEKARLEQLKQAPEARPNLMVLVLMRVIGIGIETADMLVKEILSRNLRDRRAVARYGGLTGSPDESGSRSREKGLSRSGNARVRRGMIQLAWRFVRFQNESALAKWFEMRTKNARTSRKKMIVALARKLLIALWHLVRDGVVPEGVVLRPAH

SEQ ID NO: 85947 - protein, 330 aa, unidentified
MERWNVVLGVDVSKKTIDICWSEQKLSLHADNNSEGFSKFKKWCKDHGIDLSKTFIVLEYTGGYEYRFIQFCESQCIDYRRVPGLEIKKSQGMVRGKSDKADAYRISQYGEERIKRLEPSKKLDKNILELKNLLSFRKRLVREGAGYQNTVKERKHMYEPGDQDMIIAMANAKIAANIDYVKEVEARIMELIRNDQQMYFNYQVITSIKGIGQVNGWMTIAYTENFTSFPDARHYAVYVGVIPFEHSSGTSIKGRKRTSYLAQKELKQELNQAARIAILYSPEMRVYAERKLKNKNYKLVLNNVKFKLILRMFSLVKRGETYVENYKRAA

SEQ ID NO: 85948 - protein, 355 aa, unidentified
MTNIAQITPTRVVIGVDTHKDVHVAVALDGLGRRIGSTTVPTTTAGYRKLVDWAEAAGEVEAFGVEGTGSYGAALARHLRATDHHVVEVVRPNRQARRRNHKSDPADAEAAARAVMSGEATGIPKSGDDLVEMIRVLRVARSTAMKARTQALNALKSLVVTAPVELRDQLRGLSTAGLVATAGRLRSGREATTTAANKTALRALASRYQALDTEIGTLDNQLTDLTTEASPKLADTFGVGPDTAGALLVAAGDNPDRLRSEAAFSMLCGASPVEASSGKTSRHRLNRGGDRQANAALYRIVLVRMRHHAPTRAYVERRTAQGLSKPEIIRCLKRYVVREIYGILRERSSRRHSAA

SEQ ID NO: 85949 - protein, 331 aa, unidentified
MNKVGLGTCFQGARVMSKVVLGIDVAKRKLDVALMFDNKVLVKKFDNAVTGFKLLQGWLMSLHHEQVHVCLESTGAYSEAVAEFLHERGHSVSLVNPLRIKGFAKSDLQRNKTDTADARTIAAFCLAKDPEQWHPLPPAIKQLQALTRRIESLQGILNSEQNRLEVAEPGVQPSLKRVIRTLEKEIELVQCLIKEHIDDHPDLKGQSDLLQSIPGIGEKTAAILLGELEFAAFGSARALAAQAGLTPQKFQSGTSVDRTRLSKLGNGRIRKALYFPAMTALKYNEIVKKFASRLSQNGKTPMQVICASMRKLLHIAFGVIKHNRPFDPNLA

SEQ ID NO: 85950 - protein, 347 aa, unidentified
MKILALDLAKNKTVACDYERESGAHRFKTAFSTRAALQQLVAESKPDRVVIEVCSMAGWVCDLLRELGVEVQVANTSDDAWRWRKVKKKNDRCDALKAAQLSAVNQIREVYIPGIEVRQWRALIAFRQRLVRRRGRMKNHIRDLLLREGQILPSGGKCWTQKGVAWLEALAQPLSGVEMPELWRGELAIELRQLRAVQAEIEVAEEKLDAIGAADPRVQLLRTIPGVGPRLSEAVVALLDRPERFGNSSEVSAYIGMVPKELDSGETQRRGKITRRGNRLVRSLLVEVAWAGLRHNPWVRETYQRISGGKKSRRKIAIVAVGRRLLVRCWAMLRDGTSWQLPATKAA

SEQ ID NO: 85951 - protein, 322 aa, unidentified
MSFVGVDIAKRTFDIATPLANGKVRTKARLTNDSNGFQQFEAWLQTYAEPGAWVVMEATSVYHEALAEYLHARDYRVCVVNPASIAKFAVLELRRVKTDKADAKIIAAYAKHKGDSLRQWAPESEAQKRLRALVRRLDDLKEMQQMEQNRLEVAPLAVQPSITAVIGHIADEIKKTCEAIKQTINDDPDLRGRRDLITSIKGLGDTTAALLLAELGDPLKYKSPASIVAFAGLNPTVHQSGEKVGQTAISRVGSSRLRAGLFMAGTVAMRYNPVVKALADRLEARRKAYKQIVCAAMRKLLYLVYGVVKSGKPFDPQIALVK

SEQ ID NO: 85952 - protein, 412 aa, unidentified
MQTLVEHGCGLDVHQATVVACLLIVSRNGKVCKQMRTFGTTTRELVSLRTWLLAEGCTHVAMESTGVYWKPVFAILEGELEMVVANAQHVKKVPGRKSDVKDAEWLAELLCHGLLRSSFVPPKPIRELRDLTRYRRKLVESQTAECNRLLKLLETANIKLSSVVCDVFGVSGQLMLKALLEGEASPQEMAQLAKGRLRKRIADLEPALEGKLEAHHRFLLKLQMDRLQAVEQDLNTLERHIQEKLQPYAAQLALLQEIPGVDWTLAAVIIAELGVDMSVFQSVSQLASWAGVCPGTNESAGKRKSSRVPKGNVYLKTGLVEAANAASRARGTYLRDKFYRLKARRGYKRATMAVAHKILVAIYHMLAQQVSYNDLGDLYLDKLNKSHLTRNLVHRLERLGYVVTLTPQQQEA

SEQ ID NO: 85953 - protein, 320 aa, unidentified
MLSEVILGIDVSKKTLDAALIFENRVFCKQFQNSCDGFKELAAWLTSLQIERLHACLEATGIYGEAVALFLHECGHLASVVNPLRIKGYAQSNMRRNKTDRLDARLIADFCLTQKPDVWQPPLKEVKHLQLLVRRVEVLEEMLQAEENRLANAALEIKPSIERIITLIKEEIKGLQQQTKRHIDRHPHLKEQSALLQTIPGIGARTAHLLLSEIEFERYSSARSIAAQAGVVPRKRQSGTSLKQTSLSKLGNARIRRALYFPAIVARQHNEIVKEFAKRLKKNGKTPMQIVCAAMRKLLHIAFGVLKHKRAFDASLAFSA

SEQ ID NO: 85954 - protein, 329 aa, unidentified
MKKMHIIGVDISRNTIDFHCYGHSVTADPVANNLKGFGQFQKWIRQQVSKTKEEVMIVMEHTGIYTYNIERFLHAKGWSYVKRPALDIKRSVGIQRGKSDRTDARMISKYGWMNKESLAPMEPVNDNRVNLQQLMSYREKLVTDRTAHQVRIKELQGQMGNKLCDQIRRSTQRMIKLLTIEIEKIEEAVKACLAKEASLQKNYELLITVSGIGFVTAVSLLITTENFTRFDNHRKFACYCGVAPFTHRSGTSIRGKTRISQLANKPIKSLLTMSALSAVRNDTELKAKYEQKCKEGKAKMSVLNIIRAKLIERVFSVINRQTPYLKAAA

SEQ ID NO: 85955 - protein, 321 aa, unidentified
MANVNKIIGIDISKETFDACFSFHPCGYSSRSYTYNAEGIKSFLKNVPSDSVCIMEATGVYHLRLAYALNKVGVFVSVVNPLSVKNFSRAVMCRTKTDKADARQLVDYARRMELAEWRPTSDNYIRIQQICRSIELFLVNITQTENQLEAIDNSPVADTRLCRMLRKHIKTLHKQIALLEKQIEELIAEDDETVVEHISSVPGVGKKTAIALLTATKGMHGFDDYRQVSSYFGLCPRIYDSGKSVHGKAHICKMGMGWIRKLLYMCAVSAARYNRACASLYERLRQKGKAVKIALIAVANKLLKQIFAIVKNNCAYNEFYA

SEQ ID NO: 85956 - protein, 341 aa, unidentified
MNHYAGIDVSLESSSLCVVDWQGRIVREGKVASEPAALIGWFSSLGFEVERIGLEAGPLSQWLFAAMREAGLAVELLETRHVRNAFKTMPVKTDRKDARGIAELIRMGWFRPVHCKSMSAQETRAMLTARKLVQSKLHDVEMSLRGILRGFGLKVGKTTPTGFAGRINELVTGHSSLQVLAEALLRVRAVLLKEFNGFEKRVRTMARHDARAQLLMSAPGVGAIVSLTYASAIDDPGRFRSSKRVGAHFGLTPKKYQSGETDITGRISKIGDSAVRTALYEAAHIILTRPIKGSALKRWAARLAKRAGMQKAKVALARKLAVIMHRMLVDGTTFDFAAAAA

SEQ ID NO: 85957 - protein, 339 aa, unidentified
MKKSYSPTYLGIDVSKGSLDCCLYNGTEHKTRSFNSNKLSTVQKIISHFKISPDSCRVVLEATGVYHSAAFIGFTSQGFDVAVENPLRIRSFATMKNLLRTKTDPVDAKTIAEYGFINKPVSTKPKEAYQCKVVARLKLIGFFKKLIAQNRNYIEALNNNSFECNATSLITHVKNEINHLNVTINEIKSDIEKILTKHCPELYKQYKSIPGIGPTVAGAIICFYGDFSGFSNSKKAAAFAGLCPKVCKSGSSVDKKGSISKKGNSMLRTLFYMAALSAARCNDTCQEAYLRLRQAGKPAKVALIAIANKLLRQAMALARKGESFIENYKEISPCAAKTT

SEQ ID NO: 85958 - protein, 391 aa, unidentified
MVCVGIDVAKDKHDCCILDSEGTTLVDCFTIPNNMDGFKSLLQTIQDCSQKSDKIKVGLEATGHYSYNILGFLLDNDLPVYVMNPLHTNLYRKSLSLRKTKTDRVDAKTIATMLLSDVDLKSYTDTAYHNEELKSLTRYRFDKVQERAKLKQSVSRLVTILFPELEQLVSSIHGTSIYALLSEYPGAKQISEAHLTRLANILVKTSRGHYRKDKATHIRDAARISIGSVMPAKSLELKHTIKLIQELTSEINEIEDAIRKIMDELKPPILSIPGMGFHSAAMILAEVGDFSNFNSPDKVLAYAGCSPSTYQSGKLTNCYAHMEKRGSRYLRYALYTATKYVCYWNPVFTEYLTKKQAEGKHYNVALSHATKKLVRLIYALQKSGKAYLAVT

SEQ ID NO: 85959 - protein, 404 aa, unidentified
MSVHAAPVTSSTIVVAIDVGKTSAMLSVSDGARRRVLGPVEFAMTRSGLGATVDRVSAVVPACAQVKVGIEAAGHYHLPVLDYGWPPGWEVLELNPAHVAEQRRVAGRRRVKTDVIDLEAVTELVLAGRGRVITEREGCLGELAAWATHRSQRVATRTATKNQLLGQLDRAFPGLTRALPDVLGTKIGRLVAAEFADPARLSALGVNRLIRFAAARDIQLRCPVAERLVSAARDALPTRDGAVARRVLATDLGLLAELDTQIEDAERELAALLPASRYGTLSSVPGWGVVRIANYAAALGDPNRWPGSRQIYRASGLSPMQYESAGKRRDGRISREGSVALRRALIDLGLGLWLTDPSAKAYAAELKSRGKPGGIIGCALAHRATRIAYALVRDHTIYNPSRWV

SEQ ID NO: 85960 - protein, 342 aa, unidentified
MKDTMIGVDLAKNVFQLHGASMTGEVKFRKKLTRPQFMAFMADHPAAVVVLEACGSASYWARELSKAGHEVKLIAPQYVKPFVKRQKNDAADAEAIVVAAQRPEMRFVPPKTEEQQARAVLFRARERLVHQRTELSNALRAALYEYGHAVPQGSVHLKRIVEIIEAETCDLPDLAREEARDLLEQIAEKTVRIEAKTRKIAAQAALTPTARRLQTMPGVGPMTALAVEAYAPAMATFKCGRDFAAWLGLVPRQMSSGGKERLGRISKAGQSDIRRLLIIGAMSRLNWMGARSIREGSWLDRLRARKPKMLVAVALANKMARMIWAMLTKQEDYRDPVPAGAT

SEQ ID NO: 85961 - protein, 378 aa, unidentified
MTAVLQQKDSTMSHVLYLTFELSNKKWKLGFSNGQKKRIRTLQAGDWPTLLAEIKQAKARLNCTEDSTVVSCYEAGRDGFWIHRALVAEQIKSHVIDSASIEVNRRKRRVKTDKIDVAAMLRLLMRFMSGEKEALHTIRVPTVLEEDQRRLNRERDRLIKERGAHSARIKSLLIAHGIRLEKMSDLPRLLATAKAAVIGYDLPEDLKSELMREYERYDLVAQQIKKQEQLQIDRAESQDIPAMKHIQHLRSLKGVGWQSSWVLTMEFFNWREFKNARQLGACAGLTPTPYDSGDSIKEQGISKAGNKRIRKLMVELSWLWLRYQPASHLSQWFNRRFAQGGKRMRRIGIVALARKLLIALWRYLDQGVLPEGAILKIV

SEQ ID NO: 85962 - protein, 417 aa, unidentified
MKLFIGLDVSSTKLDTCFLTSESTVLLEMSVSNDLTGAYEIKARVLDYLKQFDFTRIVIGLEATGQYSSLPALFFHEDEELRSFGVETTVENPRNVHRFMKVFTEDKNDRLDAFHIADYLRLERFHTSPIKEEQYIALQSLTRARFDLIQDMTRTKQHFLNILYMKCNVLQRELKSDSGSTSVFSSTIIELFTTDYTLDEIGYMPLEELVDLLQEKGRGRFREPENLAKRLQKAVRNSYRLSKTVQDSIDSVLASQVRIIRTYQDEIKALDKAIVDILEIIPESKSLLSIPGIGPVYTAGILAEVGQIDRFADQAKFAKYAGLYWPKSQSGQFKKESTPLSKQGNRYLRYYLIEATNSVRRHVPEYSDYYQKKYKEVPKHQHKRALALTARKFVRLVDKLLRDHQLYTPPRRDIEHS

SEQ ID NO: 85963 - protein, 345 aa, unidentified
MKKTDYLSTLFVGIDIGSRTNVVSAIDFSQDYFIRMKSIPNAQGGAEQLESMTADVLEKNHQFQYLIIAMESTGFYGVHIANYLSTCGKLAAFSTHVYCLNPKEVKGYKKSFNSLDKNDGIDSFVIAGFARVGRINVKPWRGSQYLALQRLTRHRMHITECIAREKTYMLNNIFLKFSESAMLGKEEHPFSNKYGAAAEAILTEYKTNEELVSTSLEDPAAFISGKSRGRIADPQGTARLLQTAAKNSCRLDKCLYDPLTTSISCSFNCISSFEKELKAIDAAILKTVRGLSETDYTVMNSMPGIGKVYSAGILAEIGSIRCFPNDDALAKYCGIVWRQNQSGTF

SEQ ID NO: 85964 - protein, 351 aa, unidentified
MWIIGCDYHPSVQQIAWLDTETGEIEERRLKHSGGEAERFYRELKEEGFSVRVGMEATGHARWFERLLGELGFELWVGDAARIRAKQVKKQKNDRQDAQHLLQLLLKDDFPRIWVPSPENRDRRQLLLHRHRLVQMRTRVMNQLQAVAMNEGIRRKRGLWTRQGRAELEALSLPTWTSRRRQELLELVDQLDPSIDQLSQAIEQEAEQQPEVQRLMTHPGVGPITALAFVLVLGTPQRFSCGKQAASYLGLVPSEDSSGNRRRLGHITKQGNTLLRHLLGQAAQSVANSDEEWRRQYAQLAMRRNRSIAKVAMARKLAVRLYWMWRQGYDYQQWASSVRTWGKLEIAHGVK

SEQ ID NO: 85965 - protein, 346 aa, unidentified
MMLIGCDFHPSWQQVSWLDVETGETGEQKLVHAGGEAKQFYEQLAAPVLIGMEATGNSQWFIELVEDLGHEIWIGDAAQIRASYVRKQKTDKRDAAHILKLMVEGRFPRLWTPDREQRDLRQLVLHWHKLVLIRSRVKNELQHLSLNKGMQRKRRLWSQAGQQLLRELPLKKWAACRREDLLGLLTMLDEQIGKLDGAVEHAAEENPQSKLLMTQPGVGPNTALAFVLTIGDVGRFPRGKQVASYLGLIPREHSSGGRQKLGAITKQGNRMLRSLLVEAAQVAVQHDPGLRKQYRHRCHQKPKAVAKVAVARKLAVRLYWMLRTNVAYPEIVRIESSSGLPLVGAS

SEQ ID NO: 85966 - protein, 372 aa, unidentified
MYYNTIYVGMDVHKSSFTLCSYTIEAEKASHFQRTEVDYKKVLKYLEFLRTVYGDDARFVCGYEAGCLGYTLYHQLTEHHVECVILAPTTMLEQRSRKRIKTDKRDAEVIARCLTQHNYSAVHIPTATDEETKEYLRMRNDHKLALKRIKQQILAFCLRHGHIYGGKSNWTISHLKWLKELELNSMHREILDEYLLTYTTLTDKLERLDSRIEEIASKPEYNESVKKLSCFIGIKTHTALSTLVEVGDFHRFAAASKFASYLWLVPGEDSSGDDQTRLGITKAGNRHLRLLLTEAAQCYARGQIGYKSKALKARQSGNPPEIIAYADKANERLRRKYYKMVLQERKTHNVAKTAITRELVCFIWGMMTDRIA

SEQ ID NO: 85967 - protein, 394 aa, unidentified
MIYAGVDIAKMDHVIGAVDERGAEMCRPMPFKNTEAGLERAVAWLEGLAESPSDVVVGMEATGHYWMACYSFLVARGYSVAVINPMQVKAVRKLKGLDKVKNDRVDAGLIAEALRIGQYDETRLATDEVASLRSLSRYLQSLRGMIAELKTQCICLMDAHFPEYAGIFSDMFGAGSRAVLSKSPLPFELARRRADSLARDIAEASRRGGRSAGYAAEIKAAARSSIGVRLGQEAASFQVKSLIRQIEFAESECAKVEARVRALLDEVEPLVLTIPGVSYVTGAQIVSEIGDVSRFRNAPALVSYAGLNSSVSQSGQFDSGGGPITKHGSPYLRRALWLAANRARQCDPGLRAFYEKKRAEGKPHRVAVTAVARKLCHIVFAVMRDQAPYDPERE

SEQ ID NO: 85968 - protein, 318 aa, unidentified
MKKVRFLGLDVHADTIAVAVAEPDGEVRSLGIIPNREESVRKLVKKLGPAEQLQACYEAGPTGYVLYWQLTALGVKCEVVAPSLVPVKAGDRVKTDRRDATKLARSYRAGDLTAVWVPNQEHEALRDLVRARETAKQDQLRARHRLSKFLLRHGRRVPLGIKVWTQRYQDWVKEQVHFEQPAQEYTLLDYLHEVEHMGDRIRRLDQAIAEAVKLAPPRMQEVMQSLQALRGIAQISAVTIVAELGKISRFDRARQLMGYSGAVSSEHSSGKRMQRGQITKTGNAHLRRIAMEAAWAYRHRPAKRRSQRNRLESATPAT

SEQ ID NO: 85969 - protein, 408 aa, unidentified
MRIIGLDIHRAFAEAVAWKDGRLSRLGRVIMRREALEEFAKQLSNSDIVVIEATGNAASVAAVLAPHVSRVVIANPKQVRLIAHAKIKTDKIDAGVLAQLYASGFLPEVWIADEATQALRRQVTRRNQIVRQRSRLKNIIQSILHAHLIPSCPHQDLCGPMGRAWLSAQILPGDERLAVERHLREFDRLTDDLKVIERDLAQSALADDRATRLMTIPGINMVVALALIAAIGDIKRFAKPEQLVGYLGLNPSVRQSGPGPAYHGRITKQGRGHARGMLVEAGWVAARCPGPLRSFFLRVQSRRGQHVAAVATARKLAILIWHLLTKNENYLWARPALHARKLRDLELRAGHRAARGQKGTAHAYNLKSHRDQEQRWVEQAETAYARFVAGWNARGPKARTGAAKEERQ

SEQ ID NO: 85970 - protein, 407 aa, unidentified
MELSALYKCVIGLDVHQSQITACALIQQPDGGVRIEQRQFGGFMRDRRELAQWAASLNPDEVVMESTGIYWKSPYAALEAVGIRAKVVNARHVKHVPGRKTAVGDAHWLAMLARAGLLRASFVPPAALRELRLIARQRQKLVGQLASEKNRLHKVLTDSGIRLGVVVSDLHGQSARAMVKAIIAGHAPQQVIKLASRRLKASREELLDALQGELSASHRFVLDELMQHIEEIEARISRFDARLLEGLESERDTLALMQTIPGIDQIGAAMLLVEIGADMDAFGSADRLASWVGVCPGNNESAGKRKSGHTRKGNPYVRRLLCEFAHAASRTTSMFKSKFQALVVRRGYKRAIIAIGHKMLRTLFFMLKRREHYRDCATDYEALSVQRNAPRWIKALTRFGFITPASA

SEQ ID NO: 85971 - protein, 355 aa, unidentified
MNQERYIGMDVHQATISVAVMDSSGKLIMECILETKAATILEFLDGLRGSLSVTFEEGTSAAWLHDLLKPHVSRLVVCDPRKNALLKDGSKSDRIDARKLAELLRGNQLHPVYHGEHGVRTLKELARSYLTLTQDVSRVMTRIKALYRSWAIPCSGTTVYTPRYRAEWLAKIPQPGVRLRAERFYQQLDLLQPVRQEARRDLLSESRKHPAVKLLRQIPAIGPIRAAMLVALLQTPHRFRTKRQLWAYSGFAVETHDSGEYRYVQGKLRRNRERITVRGLNGNHNHDLKNLFKGAALSASTRPGPLYDFYVALLEKGMRPTMARLTLARKIAAITLTIWKKGVSFDAKQLHRQAA

SEQ ID NO: 85972 - protein, 418 aa, unidentified
MSEDGNTRGSRRYIALDIHKKYCVIGGVDREGRVVLQAVRVEHADLEGWLKKNLRSTDHVVFESTTNAWHVYDLLEPLVERVVVANPAKVKQIANARVKTDVRDTFILARLLAANLVPDVWVPPAHVREMRQFLSQRRQLVETHTQIVNRMHSVAHRHHLQHERGKRFNEKNTVWQKDKRLSKVEQFQLELEMENRAYMEKQISRIGKEVAKMSHQKPWAQSMTYLMQLPGFGVITGMTVLAAIGEVQRFGTPQHLASYSGLTNGLEQSGTKLVQKGITKEGRKELRWAMVEVAQRAVKSDPLWKHRFEELQKRMHRNQAIVAIARRLLELVWYVLTRRQPYRHFSQERIAYKYLTWAWQMDEAARDGLTRQQFARYYMMRLGVGHDLTRIALDPKHPRKISSEAELLALRPELNHIE

SEQ ID NO: 85973 - protein, 485 aa, unidentified
MAVMLAVVLGLLILEVAMSQRKPHPTSPDPASLALLQTLHPHAAGIDVGAAELWVCVPPGAVAVPHPPAVLPAHVRRFGAFTADLHAIAAWLRQCGVTTVAMESTGVYWIPLYDVLESAGFEVLLVDPRQVQRAPNRPKTDVHDCQWIQRLHSLGLLTAAFRPEEKIRVWRSYQRHRTNLIEDASRHLQRIEKALEQMNVKLTEVVSDITGVTGMSIVRAMVQGERDPKALAKLRDHRCKESMETIAQALQGTWQPEHLFALRQSLELYDYYHQQIRDCDRVIEAHLQGMALPEVTPLEPTRRVRRRKDNEATFDARQRLHHVAGVDLTAIEGIEESTALVVLSEIGTDMSRWPSEKHFGSWLGLAPNPRKSGGKVKSSATRPGVNRAAQALRLAAKNLQRSRSALGAFFRRIAARRGLAKAITATAYKLARIVYALLKYGTAYVTQGLEAYETAYRERVVRQVKRKAMELGLVVVEREAVAQPS

SEQ ID NO: 85974 - protein, 324 aa, unidentified
MQVSVPSHPASPHLIGVDVSKGELIICIHAQDACLSVANNCTAITEWLRSVPAGSLLAMESTGPYHQQLAHLAAAQGLRVFVLNARDVYFYAKALGSRGKTDRVDARVIARYLAEHHHKLHPYQAPSAAQLQLQQLIRQRWAVVSKRVALRESLKATEPGIAQVALRLDEGFAALLRAMDERITALIQADEQVQRTRSLLQSIVGVGPQSSALLAGLFWRMSFASADALVAYSGLDPRPNDSGRSRGRRRLSKRGDPGLRHQMFMAAMSACHTKTFKAIYQALRARGLQTTEALVVLARKLLRIAFAVWRSGKPFEPQRFAQSH

SEQ ID NO: 85975 - protein, 350 aa, unidentified
MLIIGCDYHPSFQQIAFVDSQGGEFGERRLLHREEAEQFYRQLREQDVAVQVGMEASGHARWFERLLQELQFELWIGNAAEIRTKRVRKQKTDRQDAQLLLQLMMEKRFPRIWVADAENRDLRQLLWHRHRMVQMRTRVMNQLHVVALNEGRRRKKALWRSAGREQLQALALAPWASRRRQDLLDLLDQLTVKIQELTRALEEEVEKRPVTRQLMTHPGVGPLTALAFELVIGTPERFQCGKQIASYVGLVPSEESSGERRRLGHISKQGNALLRFLLVEAAQVTVRTQSQWRSKFFHLAMRRGRKIAKVAMARKLAVHLYWMWRQGWDYGQLAELGSHAGVPGNPDGEQ

SEQ ID NO: 85976 - protein, 383 aa, unidentified
MRKIQETLQAQSTTTQDIMYIAFELSNSTWRLAFSDSNKKRHVTIKARDLKQLEIEITKAKKRFCLKDDIQIKSCYEAGRDGFWIHRYLLSKGIDNLVVDSSSIEVNRRKRRAKSDRLDAENLLRLLMRYHGNERQVWKVVTAPTVEDEDARHLHREIETLLRERTRYRNRIKALLVQHGLDVKNPSRKNFLKVLNTLRTWDGQALPESMKARVVREHERLKMIEDHIKLLKKEREQKVKSKETASLRQVAQLRGLCGIGVNSSWVFVMEFFGWRKFRNRREVAALAGLTPTPYDSGGSQREQGISKAGNKRIRTMAVEIAWCWLRFQPHSKLSRWFNERFASGGSRMRRIGIVALARKLLIVLWRYLEHGVIPEGAIIKNAS

SEQ ID NO: 85977 - protein, 319 aa, unidentified
MNTIGLDISQKTIDATLKKSDGSAYHIKISNDSEGFQKLKAWIKTNRVRKTVIGMEATGIYYEAAADTLSETHTVYVINPLKIKNYAESQFSRTKTDKADSNLIAEYTKRHIDKLTAYRKPDNRYLQKLLSLKNQLKEQQKQIKNRLHSSESETIKTIHEDLIQTYQEKIDQAQTAIEAEIDRQEDKNTHYRNLQTISGIGKETAAILYAQLTDKNFQTANKFISYIGLSPQIQQSGTSVNKKGKLSRYGHRRLKSALYMPALVAYRTGAFPQLVRNLTNAGKHKMIIIVAIMRKLAKLAYFIVKTGKPYDATRHKSAA

SEQ ID NO: 85978 - protein, 356 aa, unidentified
MSYDVKYIGMDVHKEAIVIAVLNEGGKVVMESVIETKASSILQFLHGLRGELHVTWEEGTWAAWLYDLLQPQVQHIVVCNPRRNALLKEGSKSDKVDARKLAELLRSGMLRAVYHGENGLRTLRELGRSYQTIGKDLTRVMNRLKAVYRGWGIPCAGTRVYAARYREEWLSKLPQAGVRRRAELLYQQLDGLQALRREVRPEFLAESRKHKAAKLLRQIPCIGPIRAARLIGLMQTPHRFRSKRQLWTYSGLGIETHDSAQYRYVGGQVQRSKKPQQIRGLNRNHNHEMKEIFKSTATRASCGTGPFHDFYAALLAKGMEPEMARLTLARKIAAITLTLWKKGERFDAEKLKTQAA

SEQ ID NO: 85979 - protein, 448 aa, unidentified
MKILALDLGKFNTMCCFFDSKTRKHSFLNAATDRQFLATLFKKHKVDLVVMEACGPSGWIFDLAQNAGHKTIVCSTNEDAWKWSNVKRKTDKDDALKLARMASMDELKPVHMPSESHREFRSLVKYRKTLDQRINKMKCTIRAWFVNHGIAIDTGEKAWCTGRTRINSFRKPLVDCEPHELWKGELDIELTQLDALSEQLNLVVKKLEAIGKQDSRIQRIQTIPGVGPRTAEILVACLDDPHRFKNGRQVSAYFGLVPRQFQSGETDRNGRITKRGNPLARTILVECAWASLRYNPWAKAVYERICGKQKTRKKKAAIALARKLAVLAWAMMRDQTDWKPSHMLKVTKSFSKTTNSIQDVLDAMKPKENSDQRQKRLRKEARVAKQAHSSTESNKATAVAKKVTKKSTSKERPDKPQNEKLLESKDSMRNKSATPRKPRRAREPAAAV

SEQ ID NO: 85980 - protein, 430 aa, unidentified
MKRGVVGNQEFSIYVGLDWGTEFHRACVLDASGEVVRECQVDHSGPAITDFVRLLNAMIHGKPERIAVAIEVPRGPVVEAFLEGGFAVFSINPKQLDRFRDRYSVAGAKDDSRDAYVAADSLRTDQHCFRRVAVQHPDVTRLRELSRTEENLSGDLRRIVNQLYQLLLRYYPQLLQLNSTPEEPWIWALLEAAPLPQRGARLTVARLKQLLSKHRIRRWTAEQLHDVLVSPPLPLAAGSADAISEHALLLLPQLRLLYRQRQDIRDRIETLLDGMVAQGREGSEFQEHRDVGLLLSLPGVGCLIAANLFTEGSDPLAQRDYLALRAHSGIAPVTRQSGKTRQIIMRRGCNERLRNAMYHWARCSVQHDPLSKVHYARLRQAGHKHGRALRGVADRLLAILIAMLKSGKPYEASRRQNGRSHDAASPANNP

SEQ ID NO: 85981 - protein, 408 aa, unidentified
METLHRRCAGLDVHQKEIVACRRIVSGRKVRSELARFATTTQGLLALSAWLAEAKVTHVAMEATGVYWKPVWHVLCHDFELILANASHIRNVPGRKSDANDAAWIADLLAHGLIRASFVPPQPIQELRDLTRTRRELTREIVRHTQRIQAALEEANIKLASVISDILGLSGRRILKTIVAGESDPRRLAELGHPKLACTREDLAAALEGRLRDHHRFLIGQHLKTIEQVEATIGEFDARIEAALAPFRDAAGRLKDIPGVSDNVAQTVIAEIGADMNAFPTAGQLVSWAGMCPRLDESAGRKRSRRLRKGAPWLKPVLVQAALAAIKVKNSSLRARYFSLKPRLGHKKAIIAVAAAMVRIIYHMLKDGTFYQDLGPDYRRPRNPQRAARNLANRIRSLGYVVDIKKAA

SEQ ID NO: 85982 - protein, 428 aa, unidentified
MLKINPLSTLYVGIDVSSKSNFVCALDFYKNKYINSSFANNQPGADELAKKILECLKEHPDLNTVVAALEATSVYSIHIANYLSSCEKLISFKPYVFVVNPKCTANYKKSYIGVGKSDPIDAFVIADYARAGNIETQPCRGSQFLALKRLTRHRLHLVKCMTREKAYLVSNLYLKFSELQMLEKDDQPFCDIYGATSSGVLTQYLSPEEIIDSSEEELVAFLAEKSRNRIKDISKTAELLKKAARDSYRLDKALYEPLNVSIASSFNCIETFKKEIKVIDAAIEREIKGLNPNAFIILQSIDGIGPVFAGGIIAEIGDIAAFHSSDALAKYAGLMWKSNQSGDFDGDDTPMSKAGNRYLRYYLGEAANSMKKHNVEYGAYYRKKYNEVPKHQHKRALALTSRKFVRLVYGLLAKNQLYSGVSLDKSTE

SEQ ID NO: 85983 - protein, 463 aa, unidentified
MEKSTTRQKKRKLNIIHPYAAGIDIGSRSHVVSVPPDLDDEPTRTFNGFTDDLKLLVQWLIGLGITTVAMESTGIYWIPLYELLSNAGLEVYLVNARHVRNVPGRKTDVNDAQWLQQVHSYGLLQASFLPDRDIAQLRSYMRLREQLTRARASIQQHIQKALMQMNLQLQHVVSDVMGVTGRNIISAILLGVRDSNELAELRDERCKNSKEIIEKALCGNYESDHLFELQIAFDIYNIYSSKIEATEEKIAMALFQLSKTAQKPLTGFDKVDILRSLSSIPTKRRKKALSFDPGPMLQAITGRDVLQIPGLGDGTILTIISECGTDMSRWKTSKHFTSWLGLAPQNKITGGRVKSSRTRGGAGRAATAFFMAAMRVNKLDSALGAFSRRLAARAGRGKALVATARKLAVLFYKMMSERFTWNDMGSEAYEEQIRERRVKSIIKKAESLGLRILDDSLEAAPAS

SEQ ID NO: 85984 - protein, 417 aa, unidentified
MDTLFLKVAGLDVHLKTVQAAVRCCQPSGKLFKQVRSFGTMTRDLRALADYLAALGVTHVALEATGVLCKPVWNLLEGRFTLLLVNPRHLKKVPGRKTDVSDAEWIAQLLQHGLLRGSFVPPRAVRNLRDLTRHRAQLVGEHTRVANRMHKLLEDANVKLGAVASDVLGKSGRAMLRGLLRGEQDVQKLAELAQGVLRKKIPQLKLALEGNCTEHHRYLLGRLLSHVGYLENQTDKLSERIAARLDELLAAADRERLDRIAGVNRTTIENLIAEIGVDMTVFPDEHHLASWCGICPGNEESAGRRLRSRTRKGNRWLRRALAEAAWAASHVKDSYLAAQFRRVAARRGKKRALLAVGHSLLVIMYHVLKHQVEYRDLGPDYFDRLEPQRLRRYLVNRLQRLGYNVTLSPMTDDDRAA

SEQ ID NO: 85985 - protein, 371 aa, unidentified
MDERIKFFVGLDAHKDSIAVAACEAAGREPARFVGTLGPDVNGLLKLLAKAGDPAQVGIVYEAGPTGYGLHRELCRRGYQSQIVAPSLIPRRPGVRIKNDRRDCVRLAELSRAGELKPIWVPDEAHEAMRNLWRAREDAVGMRLKTRQQLQGFLLRHGRRYPGKTHWSRGHERWIAEQRFEHAGDRIVLAEYQLAVQSAEQRVQRLSTALLEATRGWKFEPIAAALRALRGVDSLCAIGLVTEIGDISRFATPRQLMAYLGLVPSEHSSGNSIRRGSITKTGNAHARRLLTEAAWSYRFPARISQHLRQRSESLAEPLRNHAWKAQQRLCGRFARLASRGVQINKICVAVARELAGFVWAIARQATHAQAH

SEQ ID NO: 85986 - protein, 345 aa, unidentified
MEIRTIGIDLGKTVFHLVGLNARGEVVVRKKCSRTQLLRFTSKLRECLIGMEACGGSHFLGRALREQGHDVRLMPAQYVKPYVKTNKNDYIDAEAIAEAVTRPTMRFVPIKSDDQLDLQSLHRVRERWVVRRTAVINQIRGLLLERGITMRKGRKHLEASLPGILEDPDNKLSGALRVLLHELRREMQYLDQQVEECDQLIVRIASELEPCRRLIAIPGIGPITATATIAAIGNGAAFKKGRGFAAWLGVVPGEHSTGGKQQLTGTSRRGNKYLRKLFLLGAHTVLLQRTKQSSGLSTWLASLSARKRKQVTTVALANKMARMVWAVLCKGEVYRPPLVPQIDAA

SEQ ID NO: 85987 - protein, 365 aa, unidentified
MSGASPSRRRPSVVNTRASQSKTNDKGGPNVERQYVGIDLHRRRSVIVRRTPAGETLETVRIANDPVALALELAKAGPDPEVVLEATYGWYWAADVLQASGANVHLAHPLGNNWGHRRVKNDERDATDLVDLLRMGRLAEAWIAPPELRELRELVRYRAKLVALRSGLKAQVHAVLAKEGVRVPMTDLFGVAGRALLDTCELGRAYTTRVESLRDLIELFDREVGTLEGLVNRQLAGHSGYRAVQAIAGVGPVLGAIFVAEIGDVHRFPAAPQLCSWAGLTPSHHESDTSVRRGHITKQGSRLVRWAAVEAVQRQRGGTFLQAHHHRVADRRGKGIGKVATARKLLTLVYYGLRDGEIRCLAEAG

SEQ ID NO: 85988 - protein, 306 aa, unidentified
MQVTTVGLDLAKNVFHVDGVTEDGEIAFNRPLCRAQVLAFFERLNPCLVGVEACASSHHWARELSKLGHTVRLMPPMYVKPYVKRGKSDAIDAEAICEAVTRPTMRFVEIKSEDQQALLSLHRARDFVVRQRTQLINMLRSLAAEFGVTIARGVARVIDFAKGIIEGGHPELPKLAKDVLRVLSRQLVDLHNRLGWYEITMRIQARLSRQAQLLQTIPGVGPVTASAVAATIGSGHQFRSGREFVAWLGLTPRNHSSGGKERLGKITKMGDRYLRQLIVVGMTPRVRQVANHPERADSWLADLLQR

SEQ ID NO: 85989 - protein, 346 aa, unidentified
MLYAGLDLSRKRIDFHALRDDGTLVESGAVPADLDGLARLVHRLSAHDRDVSAVIESMNGARFVHDQLELAGFEVELADAQRVKGLAPLACKTDKIDAWVLAELARRDLVPAIWLPDPAVRAERERARFRLHLVRQRTRLKNRIHATLNAHGHPCPVSDLFGQRGRALLERMSIPEPWRETLEASLVLVDALDQEISGCERELRRLGARHRYVSLLQTCPGIAWVLGYTIAAELGDIRRFASPVKLTGYTGLCPRVDQSGERDLRGPLRKNGPRYLRWALIEAAQHAARSPHYRQLAERKRAQYPGARGTKIAKICVARKLAEAIWHMLTRDQPFAPAGATPPLAA

SEQ ID NO: 85990 - protein, 385 aa, unidentified
MRSEATRAGETIVGGQVLYMALELSERTWKVLFASPAGRRRERSVAARDVAALVGEIAAAKRRLGLPAQARVVSCYEAGRDGFWLDRALRANGIDNLVVDSSSIEVARRARRAKTDRVDLVKLMGLLLRWVAGERKVWSVVRVPDTQAEDIRQLSRSIERLKGEHGRHVTRIKALLATQGLKLARIGGADWGKRVGELRCWDGSALGTWLQRDLVLEGERLAVVAEQLAALKAERDRLVKEGREAAAVKARELARLGAIASESSFVFATELFGWRTFSNRRQLAGSVGLTGTPYNSGQSAREQGISKAGNKRMRTMLVEIAWCWLRYQPASALSRWWRERFANTGGRARRIAIVALARKLLVALWRYLERGVVPQGAHLKTRAAA

SEQ ID NO: 85991 - protein, 356 aa, unidentified
MNKRSKLDFSGQPIYIGLDVHKKSWSVSIFTQHGEYKTFSQPPEAEILSQYLRHHFPGAQYRSVYEAGYCGFWIHDELKDKGIQNIVANPADIPTRDKERRTKRDQVDCRKLARGLRGDEIQGIYTPPRWKLEDRSLTRTRLSMGRKQARCKNQIKSMLLFYGVVIPERREMGHWSRRFIRWIEGIRMERASGDLALQIHLEELCHMRQILAKLNRAILALARTEQYRSWVSLLKTIPGISTLTAMILLTELYEITRFRSVDELCSYIGLIPDTQSTSEKEHVGGMTQRHNSQLRWLLIEASWIAVRKDPVMMEAYQEYCKRMRKTKAIIKIARKLLNRIRYVLKNQAEYVTGVIE

SEQ ID NO: 85992 - protein, 318 aa, unidentified
MSHGYDVYVGIDVAKESLEVFGLPPGSPSQFENTAEGRAKLLSLLPPAGASLCVVEATGGYERDLAAEMAVVGQHISVVNPRHVRDFAKGLGLLAKTDRIDAAVIARFAETTRPIPKGFCKQQEQLRELIVRRRQLVDHRVAEKNRCEKAQSTLVRNSVRKLIETIDKDLKRIDKAIIQLVESNDDWRGRYEQLKSVPGVGAQTAATLMAELPEIGRLNRQQVASLVGVAPFNRDSGQFRGRRTIRGGRATVRSGLYMAALSAKKHNPVIRAFAARLLAKGKPPKVVLTACMRKLLVILNAMLHSGEAWGPRLATVTE

SEQ ID NO: 85993 - protein, 356 aa, unidentified
MNKAIKLNFEGQDFFIGIDTHKKDWKVSIRHNNMQIRRFSMNPSPEELYRYMERNYPKANYHSVYEAGFCGFWIHRRFTELGINNIVVHSPDVPTSDKEKQTKSDRVDAGKLSRELENRSLKSIYIPDEKHEQLRSLFRLYHRCTASSTRVKNRIKGHLYLHGINPPSNIEMSHWSGKFIKWLQDLDFSYAPGKCYLDLCLEELLQHRQRRLTILRNLRGYCREYKINGVIKNLCTLPGIGFKTAIALYTEVVDINRFPSLDHLRAFAGLVPSLRGSGDHIINNGIAKRRNKYLRHLLIEASWIAVRHDPALLEAFDRLARRMKKQDAIIRIAKKLLNRIRHVWKNNTPYVPGVVE

SEQ ID NO: 85994 - protein, 334 aa, unidentified
MEKITTVGIDLAKAVFSLHGVDGAGRVVLRRTVRRDQLLEVVAGLSPCLIGMEACSGAHEWGRRFQGLGHTVRLMAPKFVAPYRKSGKNDGNDAEAICEAVTRPNMRFVPVKSVEQQGLLAMHRVRQGFVVERTATINRLRGLLCEFGVVLPLRSVTVRRQAAQAAENLPELARRAIGDLLEQLRSLDERIGGYDREIEAQARLCEPAQRLMKIRGIGPTTALAIVATVGNAREFKNGRQFAAWIGLTPSQHSTGGKPRLGHISKRGDAYLRNLLVQGARSVLNSASRHPDRMSRWILELQPRRGYYRTLVAIANKNARIAWALLAKNETLRAA

SEQ ID NO: 85995 - protein, 405 aa, unidentified
MFYVGIDVAKEKHYVCILDDTREIAVKPFWIYSDILGLRNLVTKLAELSLNNDDFIIGVESTGAFSENLYEYLTDADYKVILLNSYQTAKFRDFSTGRKIKNDSIDAYVIAELLSTGKYKESFISNDDYQSLKVLGRLKASLMDKIKTIKREVSTVVATVNPEITKVFPNIFTKTAIVIIKAYPTAVDISKATPQKLTKIFRHIKGNNFNDEKAKFLIELSKSSIYGGRAQEARALMIRTNIKILELYCQEKDEIELQINSLLYNKIETIDSSIENLKSIPGVADKTISALLGECGDIKRFPSVKSFIGYLGLYPTQYQSGNSMRVGRLAKRGIPIAKHALYMAAVASVMHNEQLRKIFRDKVSAGKSKKEALVIISKKLAAIIYSVFKYNKPYEPSRVFIPRKR

SEQ ID NO: 85996 - protein, 406 aa, unidentified
MTAVMIGVDPHKGSHTAMALDEHELILDVMRVRSSTDQAQRLLTWARRWPTRTWAIEGAAGLGYLLAQQLVAAGEKVLDVQPKLAARVRLLENGDVNKNDPNDARSVAIAALRSKGLTQVTKEDHTAVMKVWVRRRRELSRSRNRVANRLHALLLELVPGGLEKEISAARVAKLLETIEPTDAVGQARKQLAEEQLSDLRRIDAQQKEVDTRLGDVVAASRTTTTDLFGVGPVVAGMVLGMTGNVRRFSSCGRFASYNGTAPIEASSGPHKVYRLSRRGNRQLNHAIHMAAVTQIRHRHSEGRAYYDRKIAEGKSPKMALRALKRRISDALYTAMVSDAQRDEQEQDQKGSGGQKGNGSVSSVTSSHPRRRFFGQATPEPASTVGRSAKRVTTRPNPASSRRRRAS

SEQ ID NO: 85997 - protein, 452 aa, unidentified
MAKKKKRNRKKTVKHLHVLQPNSAGIDIGATEIYIAVPDERASKAVRRFDTFTDDLHDAAKWLKKCGIESIAMESTGVYWIPIFQILDIYGFEVILVNARHVKNVPGRKTDVIDCQWLQYLHSVGLLRGSFRPAQDICAVRSLLRHRDNLVKAAASHIQHLQKSLTQMNLQIHNVISDITGVTGLAIIDAILAGERDPKILAELRDPRIKADKQTIVKSLIGDFRSEHVFTLKQTLQSYRNYHQLIQGCDREIENHLKKFESRVDLDSLPPLPPGTPKRKPKGNEPDFDLREHMYRLLGTDLTQIDGISSLTAHVFFTEVGPDLSMFKNVKHFCSWLGLCPNNKISGGKILSSHTRPGSNRFAHSLRLSANSLWNSKSYLGNYFRRMRSRHGAPKAITATAHKLARVIYHLVKNQKMFDDTVFAEQEKNHQKRFEKRVLRQAKALGFQLVPA

SEQ ID NO: 85998 - protein, 480 aa, unidentified
MKAKTAQKILKRHTAGSRPGIRPAKILPIIKRHAAGIDVGATEHSVCVPEDAVPAGESPVRQFGAFTAQLDQLVEWLRKSQVATVAMESTGVYWMPLYTKLIVAGMEVVLVNAKHLKRVPGRKTDILDCQWLQQLHSYGLLNGSFHPSEDIGCLRSYLRHRSNLVAGCGEQVQHMQRSLDQMNIHLHHVVSDLDGETGLRILDAILGGQQDPKELVKLRDERVRKSTVEEMEAALLGDWREEHLFVLRHSLETYRSLHRQIAQCDLAIEKALKGVVANASLVPEEQRPKNPVANPTLKKEKKKRRGGNAPKQDFTAELVRICGVDLTKIIGLNVLSVLMIISEIGVDMSKWANVKAFCSWLGLCPGSKISGGKILSSRTARVPNRVSILLRTLATVIGRTDTWLGAYHRRMRARMGPAAANTATAHKLASLIYHLLKYKEEYIDVDRLVYEERFRRCRLGRLRKQAEELGYELVEYKKAA

SEQ ID NO: 85999 - protein, 332 aa, unidentified
MTVVSTLGIDLAKNTFSVHGVDAQGVVTVRRTVSRAKLGELVARLPPCLIGMEACSGAHEWARRFSEAGHTAKLMAPKFVTPYRKSGKNDGNDAEAICEAVGRPNMRFVPIKSVQQQCDLSLHRVRLGFVEERTATLNRIRGLIAEFGYVVPLGTERLRREVRDLLEQLPARAASCVRDLLEHAERLRSKALEYEREIRSSLQHNELALRAHTRPGIGPITASALVATVGNGHDFRNGRQFSAWLGLVPRQYSTGGKTRLGHITKRGDPYLRTLLVMGARSVLQRAYRETDPLSRWALALQQRRGYHRACVAIAAKNARVAWALLAKGAAAA

SEQ ID NO: 86000 - protein, 402 aa, unidentified
MNCVGIDVSKGKSMIAVMRPFGEVVVSPFEVRHTANELSELAGLLKSLDGETRVVMESTGNYHAPVAWLLHDAGLYVSVVNAMLVHDYGNNSLRRAKTDKKDAVKLANYGLDHWLTLPRYIPEEDTRLMLKICYRQYQQYSKVQTMLKNNLISLLDTTFPDANRLFTSPPRADGSEKWVDFVATFWHCECVCGRSEKAFTTQYQKWCRKHGYNFSEDKALDIYASACRHFGVIPKTDTAKLLVEQAISQLQTTSSALAALKQEMQSLAASLPEYPVVMGMFGVGPTLGPQLIAEIGDVRRFHSKKALVAFAGIDAPPYQSGQIDVRSRSISKRGSASLRRTLFLVMGVLLQCAPMDEPVYQFMNKKRSEGKPYRVYMMASANKFLRIYYASVKAYLESLEHD

SEQ ID NO: 86001 - protein, 427 aa, unidentified
MNNTQNAKIAQVTNDTMVIGIDIGSQKHWARAFDNRGMELSKKAFGFNNTAAGFASFEVWYEGQRRAAGLKRIMVGLEPTGHYWFNLNQFLSENGIKVVLVAPQHVKHSKELDDNTQRKDDLKDPRVIAKLVTEGRYFLPYRPTGVYADLRDGFNRRCGIVESMTQAKNRLHRWFCINFPEYLEAYGSVAAKTGLMVLKEAPLPKDIVALGVDGIVKIWRDAKMRGAGKKRAMTLVALAEQSIGEKTANEAARLELWQLLEDYEHYAHQYEVIEKMLERRVHEVPNADKLLQIPGIGYFTVIGFFAEVGSIERFDDPKQIQKLAGLSVVENSSGKRKGLPGISKRGRDRLRWVLFQAAMSAVKNNKEFREIHLYFTTRKDNPLKKMQSLMAVAGKIIRVFYGMARTGSDYDPARLMRDIRRPEKAAA

SEQ ID NO: 86002 - protein, 370 aa, unidentified
MLDTTTFVGLDVHARSIKAVSLDVMTGEERAATFGYDAGAVAEWVRSVDPEARCVYESGVTGFDLQKRLSGLGVDCVVGAVSKMIKPSADRRRKNDRNDAEFLARMLSVGNVVEVWVPDDECEAARDLTRALEDARDDLSRSKQRLSKFLLRHGLVFDERTPTGRRKGNWTRAHWSWIESIRFAEGADNDVLAYYVDAVRRAAEDKARLEGLVEAETRKPRWRKRVDSLRCLKGVDTATAADLVFEAGEFSRFRNARSFAAWVGLTPSEHSSGESDRRGAITKAGNKHLRKTLVEAAWHYLTCSGRPKDLAKGQAPDRGARRHAAKGVRRLVERREALLARGVHGNKANVATARELACWVWAVGLMAEEA

SEQ ID NO: 86003 - protein, 401 aa, unidentified
MPFHGGLDWGVTSHAACVVDGAGQIVARVEARHDAGGLAELLARLRAVAPPAELPVAIERPSGLIVDALVAAGHPVVPIHPNVVKACRPRYRAAGGKSDPGDAYMLADVLRTDGHRFRPLTPVSDEIKALRALVRARDDLVTQRVALANQLRSLLEGFWPGAAAIFAAIDSPIALAFVGRYPTPESAGRLGEKRLASFMAQHGYCGRRSAAELLARLRAAPTGLAGEAEAEAKGEIARALAGLLERLVAEIAKLSSRTERAVADLPDGRIIMSFPRAGRLCAAQILAEIGDVRERFPTEDQLAAEAGVCPVTHASGKSRGVVFRWACNKNLRRAITCFADNSRHASAWAAAVYGKARARGCQHAHAVRVLARAWIRVLWRAWQSGSPYDPQRHAGATKIAT

SEQ ID NO: 86004 - protein, 353 aa, unidentified
MITIGVDAHKHVHMAVALDERGHVIGQWQGENSAVGWNEVTQWAQALGDEQRWGIEGGGGYGRGLAQHLVGLSEVVYDINPRLTATERRRSRRMDKSDAFDAQAIAQVVQREEDKLPHVAAEDETVALDLLTAERDDAQAEATRLRNRLHHLLLQLDPEYQAQVPALTSVAGVQAAEAYTTTSASLVQQERAAVVRRLAGRLRLAMGQVAELGGRIEALAQDRYAPLTRLCGVSLLTAGSLAGILGPGRRFASEAQLAAYAGVAPLETSSAGRVRHRLNRGGNRRLNAIVYRIALVQARWSPEAKAYLARRVADGKTKREAFRALKRYLVRAIWRLWHACLSPASVQPAYHAT

SEQ ID NO: 86005 - protein, 340 aa, unidentified
MRELYAGSDLHGNNNLVGIIDGEGEKVFKKRLPNDPQLVREVFEPYKEQIVGIVVESTYNWYWMVDALMNEGYRVHLANPAAIQQYSGLKHADDKHDAFWLAEMLRLGILPEGYIYPKEERPLRDLLRKRGQLVRLRTSLILSLQNMLSRNLGVRVRVNDVKGIREDRVSGLLGGDEDLALAGKVSKETIDFLTHQIHQIEGVVEKRVRLKEAYRYLLTLPGVGKILSLTIMLETGPISRFATVGEYASYCRKVPSQWMSNGKKKGSGNSKNGNKYLAWAYSEASDFARRDYPEPRAYYQRKRQKTNAAVAHSALSHKLARAAYYVMRDQVPFRPEKLFR

SEQ ID NO: 86006 - protein, 429 aa, unidentified
MIMGFTKPIEHFNSQRKKVITMNTLYVGIDVSSKSNVVYLMLPNGDKHSNFSVANSHEGSTQLVKRILSALTSHSLDTVLIGLEATSVYGDNLVYFLREDATLASFNRKIHVLNPKQVKKFHDAYNDLPKNDYVDSFVIADCLRFGRINKEVYMGDYRYKALQNLTRARFFAVQNLVKEKQRFMNVLFKKYSTMTQEKVFSDTFSTSALAVYDEFESAEALANMDLHELTDFIIEKGKNRFPDPDAVAKAIQKAARSSYRLPKTVNDSVNQVLSISITSMKALESQIKEFDKAIKAQMELLPNVLISIPGIGPVYSAGIMAEIGDINRFNSQAALAKYAGLAWKQHQSGSFESEVTRLIPSGNRFLKYYLCEAAFSLVRCDKEYSDFYHLKYKEVNRCQHKRALALTARKFVRLVFRLLKDNRLYCPAK

SEQ ID NO: 86007 - protein, 342 aa, unidentified
MEKVSIIGLDLAKRSFQAHGALAEGGVAFRKKLSRAKVVAFFAEQPRCVVAMEACGSAHHWGRAIRDLGHEVRLIPPAYVKPFVKRQKNDAADAEAIAEAASRPTMRFVAVKTEEQQARAMLFRTRDLLVRQRTQLINALRGHLSEHGVVAAQGPANVKVLEEAVEDQGTSLPLLVVELARVFLDQIEGLSKRIAELEKVTAHEAACGEMPRRLQTMPGVGPITALAIETFAPPMDVFKRGRDFAAWLGLVPRQHSTGGKQVLGKISKMGQRDIRRLLIIGAMAVVRSALRKGAPEGSWLQRMLARKPKMLVAIALANKMARSIWAMLAKKQNFRVPVVAAS

SEQ ID NO: 86008 - protein, 365 aa, unidentified
MKHDTTYVGVDAHKKDLFIAMLIGDRSTPVTWTVANEPNAVRRLVRKLEREAPGPVRCCYEAGPCGYALQRQVTTPRVSCQVIAPALIPRKPGERIKTNRRDARKLAELLRAGLLTEVRPPTLAEEAVRDLCRARDDAREDLQRCRHRLGKLLLRRGLHYSGRNWTRAHRRWIDSLEWTQPSERIVVDDYLLAIDHVEARLIELDTQLTKLAQTEPYREPVGWLRCFRGIDTLTAMLILAELHDFRRFPNARALMAYLGLVPSEDSTGEHHRRGPITRTGNALVRRLMIETAWHYKHRPSVGVALTRRRKGQPGRVIAIADKAQQRLCRRFRSLAEHHKPAPKIVVAIARELAGFLWAALHQRQH

SEQ ID NO: 86009 - protein, 340 aa, unidentified
MEFKFVLGVDISKGWFNYCLMSEDFEIVKEGEVENRPDAISLFISELFVAEGLADMGGTALVMEHTGLYVRHLADGWLGAGGRLSIVPAMKVSRLLGGQSGWDEKSDVIDARRLAEYGFRYSDMLTPWKLPDDAIRILNALNATRKRLLNALNMLKVPLGESRLFDGAEVAEAIGEGCGRAIAALGDDLKRVEEKIRNLVRNDGRLGKLFDLITSVEGVGPVTATEVIIATEGFEKFRPDQAKAFARYSGVAPLKKQSGKVSRRNRTGKRANRKIKTVLTMGATSLIGTKSMLGQYYERRIGEGKPHFSVVNAMRNKIILRIFAVVRNQVTYDKNLNFIN

SEQ ID NO: 86010 - protein, 356 aa, unidentified
MVIVGLDLHVRNSFLSAMDLETGEVLDQRRIPNTREAIRGYFGQFDGQEVKVTLEATTNTYPMVSLLRQMPKVQVVVVHPRKMKIIAEGLCKTDKVDSEVLVELGRGPYRLPTSYIPNAEVHDLRCELRTRARLVAMRTELKNRVHGLLTGEGFFEHPAALFGKRGREWLSQVELSEGARRRLDRFLRLLDRFEAELVEISQVLREHYARAPLWEEDVKLLTSMPGIGLLTALTILSELGDWRRFKRPESVVNYAGLVPWVDRSNEKSHYGHLTKQGPRFLRWILAEAAQVARRKVPRYGRLYDRVARKSGAGKATMAVARTMLEHAWLMLLRREKFHYEVTEKMVPGGEPVVGMA

SEQ ID NO: 86011 - protein, 412 aa, unidentified
MEVLYPHCAGLDVHKDTVVACVRHMATGSVEREVRTFKTTTKDLLALSDWLAEHGCTHVAMEATGVYWKPVWHILSDGDFVLVLANAAHVKNVPGRKTDVNDATWLADLLAHGLIRGSFVPDEQTQEMRNLLRTRKQLVRECSRHIQRLQKTLEDANIKLDSVISDIMGLSGRAMIEALIAGESDPERLAQLAHRRIKAPPEALCEALRGRVTRHHRFLLRLHLKQIDAVNAAIDDIDQEVDAQIEPFRTAIQLLITIPGVSELSACVILAEIGHDMNRFPTAAHLISWAGLCPKNDESAGKRRSTRMRKGAPWLKTTLVQCARAAARKKASYFQAQYHRLRARRGDKKAIGAVAASILTTAYHMLKYGTLYEDLGPDYFDKRGKGKHVHRLINRLQNLGFAVQITPVEAAA

SEQ ID NO: 86012 - protein, 319 aa, unidentified
MSPNTSNIMPKNKPAVYVGLDIAKVTLQLHLPDGQHPLPNTAAGHARLVQLLSSVCDAHVICEATGGYERGLVAVLHASNVPVSVVNPAQVRHFALAQGQRAKNDPIDAALLTAYGQALCPAATPAPQSALSELRDLVQWRDHLKEQLTRARQVAEHAMRPFIRRQQVKEVAHLEKQMSAVEKEIAAALARAPQQKAQVEQLAKLDGVGTLTAVTVLSQMPELGQINRGQTAALAGLAPWTRQSGPWEGQRHIGGGRARVRRALYMSAVALARQTQTVLGKFYARLRAAGKPAKVALTAVMRKLLIQMNLTLKNHALQS

SEQ ID NO: 86013 - protein, 343 aa, unidentified
MQIRSVGIDLGKTTFHLVALGASGKVLVKKKFTQKQLLAFTANMQTSLIGLEACSGAHFLGRALRQQGHDVRLIAAQFVKPFVKSNKNDFVDAEAIAEAVERKNMRFVPIKTDDQLDLQAIHRVRDRLVSRRTAVINQIRAFLLERGMVFAQKPAKLKAAMPDVLENAENDLTPMMRTLMDRLWGEWKLVEEQLKELGDELERISAADAGCTRIRQIPGIGPVVATAIVAAIGNGAAFRKGREFSAWLGIVPRQYSTGGKAKLLGISKRGNVYLRKILIHGARAAVLRIKRDRVPIGAWLDRLDSRAPKNVVVVAMANKLARIAWAVLSSGEEYKPANVGLAA

SEQ ID NO: 86014 - protein, 341 aa, unidentified
MKHLYLGIDWGKNFSQLFGFDQDGEVVIEERLKTLDLSAWRKKLRSLKDYSIHAAFEIGAHYDWLYDLLTEYCGEVAVIDPAQFAVICKSQRKTDKIDAQKIAEGLRRGDLPLVHVPDKQTRADRRLVAFTHWHSQQAASVKGKIRSLLLAQRLECPYSNITGMAALEWLNEQAPQMSDDAQLFLRLLLAEVELLRQQRQELDARVAIRVKRYKQVAVLDSIPGFGQLTILAVLSSIAGVARFSRPEQLSSYWGVCSSVYQSGATLRLGSLTRRGNVHVRWLLSQALQHLHRKDARARKRYLKLKRKKPRGVARAAQVRWLTQIIWHLLKKDEPYRIKAAA

SEQ ID NO: 86015 - protein, 355 aa, unidentified
MNDAKYIGMDVHTATISAAVRDSAGNLVMEATLETKAETILEFVHGLRGSLHVSFEEGTCAAWLHDLLKPHVTEVLVCDSRKNALLRVGNKNDREDARKLAELLFLNKLHPVYHGETGIRTLKELARSYLTLTRDLTRVMNRLKAIYRGWGIACAGQQVYAPRYRAEWLAKITEAGVRRRAEIYYQQFDVLVALRQEVRRELLAESRKHPAMRLLRQIPSIGPIRAALLIALMQTPHRFRTKRQLWAYCGLALRTYDSGDYRFVGGQLKRSKKAVTIRGLNKNHNHDLKNIFKGAATRAAAAAGPFQNFYEARIANGMKPPMARLTLARKIAAITLLVWKKGVRFDAEQLKQQAA

SEQ ID NO: 86016 - protein, 430 aa, unidentified
MGLIEPTPMPPERDEQATSYNWYVGIDWGSQQHQVCVLDRDRHVVGERVVDHDGSSLAQLATWLWALSAGHPQRVAVAIEVPRGAIVEGLIERGFHVFAMNPKQLARFRDRHTMSGAKDDRRDAFVLADSVRTDQPSFRRLQLDAPQLLLLRELSRAEETLLEAFRRSANRFRDQLHRFSPQMLHLCSGADAAWLWDLSDLAPTPAHAALLSQEQRQRVLKAHRLRRVKATEVLTCLQASALPVAPGAAEAAQAHGAFLLPCRRVLAEQLRSCAQQAEALLHTLAEAPDETGGPSDVAMVQSLPGVGRKITAWLFAEAAQPLTERDYQVLRTQGGVAPVTKQSGKRRQVVMRRGCNPRLRHALYHMARVAMQRDAYFGGVYEALRAKGQRHGQALRNIGDRLLRILIAMLHDRTCYDATRSRREPVVQMG

SEQ ID NO: 86017 - protein, 415 aa, unidentified
MKKHNNSPKKSEPTSKRAKSRGPVQRDPKEVLAELLGKLREKLDPKVVAGSAGEEHPRGELRPNSDRLTVGMDLGDQWSHYCILGLAGETLAEGQMRTTQQDVAEFFEGLNAARVVVEVGTHSAWVREVICGYGHEVLVANPRLMEGSKRRKRKNDRIDANKLARLGRVDPQSLHPMQHRSPEVRQDLVMLRARDALVAARTELINVTRGLVKSMGSRLPQCSSPSFAHKAEEAVPVAIREALLPLVRMTAALSDGIQGYDEKIAKLASEKYGHTTLLRQVKGVGPITALAYVLTLENPERFAKSRDVGPYLGLVPKQEDSGESQPQLGISKAGDTMVRRLLVGSAQYILGPFGPDTDLRRYGLRLCERGGKNAKKRAAVAVARKLAVLLHRLWVSGEVYEPLRHAMSVPIAAAA

SEQ ID NO: 86018 - protein, 360 aa, unidentified
MFTERTSVGLDVHARSVVAAAIDGVTGELIQARLTPSHDHIRSWIEDLPGPVAATYEAGPTGFGLSRTLNGAGVRCVVAAPSKLQRPSGDRVKTDAKDAVHLARLLRLDEVTPVVVPTVEQEAARDLVRAREDCRGDLMRARHRLSKLLLRQGIVYSGGQAWTGAHNAWLRRQRMENEATQMAFESDYDVVLTVKARRDRLDQAIGVMAADSEFTPIVRRLSCLRGVSTLTGFALAVEIGDWERFTGNTIGSFVGLVPSEFSSGRSRVQGPITKTGNTHVRRLLVEAAWHHRARYAPGKAMRDRWELASPAARARGDEGNRRLHGRWVRFNQRRKRHVVANVAVARELAGWCWSLAVLEE

SEQ ID NO: 86019 - protein, 337 aa, unidentified
MYYVGLDVHRDTSFCVIMDKAGDTIAERNLENDVLEFANFFAQCDQPMEAAMEATTDAYFIQALLTELGISVRLAHPAKLRLIAESSSKTDRSDAHLIADMLRMGRLPEAYLAPAEVRQLRELTRGRQSLVRTRTGLKNRVSALLRTYGQKCPLKDKFGKAGRAWLESLQLPTMAAMMLDIYLAVVDVLSAYIAQCDSKLREISRRDERIRRLQEIPGIAEVFGPMIIAEIGEVSRFWTKRRFVAYCGLAPIVRQSADKTYIGPLRRDCNHWLRYAFIEATHSCVKAPGRYRDYYQRKAQQHNKKVATVATARRLCRLVFALLWSGEHYQSDHAHAA

SEQ ID NO: 86020 - protein, 456 aa, unidentified
MTVKYDFAISPRDAPELCLNVPPSSIKGHRECRAPVAPAASCAKCRKHTSASPQVHRNSGIPCAMVLTVSFALLCLKNLAECANGRFSPTARSLELSPFVLEGHRAWRGAWDSSGVFLNPNSCMGLEPEPSKEGSWMMAQDDLVVAGIDIAKDKVDVCLRSPSLRRTFASTAEGRRELASWFRRQKVGKAVMEASGGYEREWANALRDGGIEVRIVDPKRVRSFAQSAGRLAKNDTIDAEMIAWFAETFDEAPGQAYDAKREELHQMVNARQALKDMQAKLTSQGEHAVPAVVQRIHARISKTIAVELVKIEAAISTSVQATPRFAELAEIIESVPGLARTTSAALIAGMPELGHANNKIVAALLGVAPYDDDSGKRRGERQIKGGRRRTRNAFYMACLGAATRHNPVLKAFYDRLVAKGKEKKVALVACMRKLINILNIMIERRQKWDPSRYAVN

SEQ ID NO: 86021 - protein, 414 aa, unidentified
MLKIVYRVCCGMDVHKSFVVACIASTNEQGVTTYKSKRFSTFTGDLRRCAAWLSENNCKDVCMESTGKYWIPIYNILEPTCNIVLAHPKYVKAIRGKKTDKRDAKWIADIFKHDLVAGSFIPPADIRQLRDLFRYRWKLTSFTTGEKNRAQNCLTVSNFKLDDVFSDVFGKAASAITSRILENPTEKITDVSGFRTKGMKATNEQVLAAVDGEMCEEQAEKLRIIRSHMDSLELCKLNLESLILSTAEKYLPQLNLVMTAPGIQSFAAIGIISEIGVDMSVFPTSKHLCSWAGLTPQNNESAGKKKTTRISRAGAYIKPLLVQCALNAIRAKKFPEVRNRYLALKKRRGHKKAIIAIARMLLTAIYNMLKKNEPYNPELYRKGDRPPAHREVSVEEAIFILQRQGYLVTAPSTS

SEQ ID NO: 86022 - protein, 362 aa, unidentified
MQYIAFDAHKHYTLASVEREDGRLVREQQIPHERGALQAFLQGCDPGSPVAVETTGNWYWIVDEIEGAGCLPRLVHARKAKLMMGMINKTDKLDARGLNRLQRAGTLPAVWIPPTALRDQRDLPRTRMVLVRQRTRLKNRIHAALAKYGVSRSDVSDLFGRQGTRWLQEHLGQLPPQTAYAAQRVLEQIETLDRQVAQLEQRMSELFTPTAQLELLRSLPGVGFILGVVILLELGDVRRFPRSAQLAAYSGTTPRVHASGGRTRYGPLRPDVNRYLKWAFVEAANIICRRRARAPDRHVCQLYARIARRRGHQTAIGAVARHLAEATYWILTKEQPYREPQSRPPQGPAAGIVHGGVSAPMP

SEQ ID NO: 86023 - protein, 456 aa, unidentified
MTKTTRRKKPSTRTLGQVHPNAAGLDVGATFHVAAVPPDRDPEPVRSFKSFTGDLHRLADWLKAAGITSIAMESTSVYWVPVFEILEARGFEVLLVNARDVKNVPGRKTDVKDAAWLQQLHEHGLLRGSFRPREDVARLRALLRHRERVVEYAASHIQQMQKALMLMNVQLHHVVSDITGVTGMKIIRAILDGNRDPKRLAAHRDVRCKESVDTICRALDGNYRSEHVFTLRQALELYEFHHAKIDECDVEIEAALRALNHDRQPPDAPLPKVRSKTRPRNEPNFDVRAGLYTFLGADLSQVHGFGPYTVLRLVAECGDDMTKWPTAKHFTSWLCLSPGNKISGGRLLSSKTRRSSNRAAVLLRIAAVNLGKTHTALGAFYRRLAARVGKAKAVTATARKLAVLFYNALRFGMKYVDPGENHYEKTYQDRVLHHLHRRARQMGYTLVRENSDVGVS

SEQ ID NO: 86024 - protein, 416 aa, unidentified
MRRVIGIDTHRTFGEVVFWEEGRLRRAARVDMTRTALEGFGKSLLATDEVVIEATGNCMAVSRVLSPFVKRVVIANPLQVKAIAHAHVKTDKIDAGTLANLYAAGYLPEVWMPDAATERNRRLNARRYQLVRHRTRIKNEVHAILYAHLIPKCPHADLFGRLGRAWLARQPLPDDERAAIERHIRELDRLSDDLKVLDREIAEGALDDGAINRLLTITGVNLTVAAGLVAAIGNIARFKSPQKLVSYFGLNPRVRQSGLGPAHHGRISKVGRSHARAMLVEAAWAAAKTPGPLHAFFVRIRAKRGHQVAAVAVARKLAVLVWHMLTKETDYLWARPSLVAHKMRGMELQAGKPQKKGNRRGPAYAYSVKELRNREMRVAEQAQKSYQHFVEAWRPRPPKGQAKGEARERLNPARNE

SEQ ID NO: 86025 - protein, 411 aa, unidentified
MPKIVHPICCGIDVHKSFVVACIATTDEKLVTTYSKPKRFSTFTGDLRRLADWLAQNNCRDVCMESTGKYWIPVYNVLESTCNLVLSHPKYLKAIKGKKTDKRDAKWIADMFKHDLLNGSFIPPADIRQLRDLVRYHTKLTSYTTGEKNRAQNCLTVSNIKLDDVFSDVFGKAATAITDRLLENNEPFDVTPYLTKNIKASTEEIQAAVDGIMCAQQAEKLRIIRSHMDSLELCKLNLESEILSVAQIYLPQVNLVVTAPGIQAFSGVAIIGEIGVDMSVFETSRHLCSWAGLAPQNDQSAGKKKTTRISRAGVYIKPLLVQCANAAIKSNKHPEIKNRYNSIKKRRGHKKAVIAISRMLLTAIYNILKKNEPYNAELYRQSNKPPVQREVTVEQAIYILQRQGYLVTASA

SEQ ID NO: 86026 - protein, 419 aa, unidentified
MTKSDCFLGIDVGKFEHQASLIDEKGNLIGQSMRFENNLSSFQEFVSEIKKRLPLSTIPEVGLESTGHYWFNLKNFLNQAGFKSIDVLNPITTREKAKQRIRKVKNDRIDSLIIAQIIREKAKTNRQTKSFAWSVELRELRNLTRFNAKLKSQEKFIKREMVNLFELIWPEFEGFFSQLFLATPRLIMVNLKKLGKIKEEDFIVLLKKSSRSRLKEQKIKEILVSFRSSIGSAMRDQSAYLRTEMLLANLNLLQGQISQIKKRINQLANFNFPEFKELTVIKGLSDHLAAVCLAEIGSIERFSSADKLTAFAGLDPSVFQSGNYCRKNGNHISKRGSPYLRQALYYAAKTAIIFEPTFRTYYQEKKRQGKHYNLIVIAVARKILGQIYHILKKQKRGNPESLPPNFIPNFIPKSILTVS

SEQ ID NO: 86027 - protein, 317 aa, unidentified
MTESVKVNVGIDVSKDFLDVHVGNVALRRVPNRSSGLSVLKRILSRYSVSLVLCESTGGYENLAVTYFQSLGYDVCVINPRQARDFARSMGRLAKTDRIDAQILCRLADVIDVSPERTRFVKPLTDERRQRLVSMVRRRRQLCDLMISERNRRAKTDSYGSESINTVLDFLTAEIARIDRDISAHVGSCFSDISSLLQSFTGIGPVTASTLLGELPELGKLNRRQITALVGVAPFNRDSGYMRGRRRISGGRSGLRNVLFMAVLSAVRFNPVLKAFFARLVAAGKPKKVALVACMRRMVCILNAMLRDGSRFEVAPG

SEQ ID NO: 86028 - protein, 414 aa, unidentified
MSNPLIVGVDVHRKTNTFCLMDASGQEVRPRFTLDNNRPGTQAFVQRVAELMEADGFSELQVAAEATGWYWFHFFQSLQQDALLASWPVDLHALNPRLTANFKKSYVDVDKSDLIDAFVIADRLRWGRDIGTPFEYDETYLGLRFLTRYRYHLVHNLAREKAYCTALLYLKASEYSREGKQPFADLFGAASRAVIQEFTSIEEIAAMPFAELVEFIDVKGKRRFPDPSQNARLLQQVAQDSYLLPQALQPPINLVLSLSLKQISALEHQAEQLNTAITERLAAIPNTLQTIPGFGPIFTAGILAELGNPQRFNFDQAKVAKFAGFKWRKTASADFTADETRMTRTGNPYLRYYFCEAAFSVQRCDREYGAYFQRKLIEVRKHAHKRATVLTARKLVRLVMRLLATNQPYQPRRL

SEQ ID NO: 86029 - protein, 385 aa, unidentified
MTTQRKACKFIPRDYDVFAGLDVDKRSMSVVFADHDGAQRALRMANKVTPLLNYVRKHYPGQRVAFAYEAGPTGFGLHDELMRQAYTCVVAAPSKVPRARGDRVKTNRLDSRKLAESLRGGQLPGIHVPAPIYRDLRHLVQLRDTHVRQLMASKLRIKSLLLYEGIPFPDPQEKWTARALRELQRLPCSQTVRFKLDDLLETLHFHFQAAARVTKQIRQHCLHDPQLQQSIDLLLSLPGIGWIVASHLTARLGDPQLIKNGKQIAGFLGIVSSEHSTGEKENRGEITRSGDSRLRNKLIQSAWTAIRKDPELRAFYRRIYQRHPQKVAARKAIVAVARKLTQRIYVVLKEQRPYVIRPDSSIAPLTAEETVGPRDRLDGAQNDQP

SEQ ID NO: 86030 - protein, 355 aa, unidentified
MDNLRYIGLDIHRDTISAVVLNREGQLIMQSVLPTRAPALLDFLHGIRGTLHVTFEEGVHSAWLYDLLQPRVARVLVCDPRKTRLLKSGNKGDLIDARKLAELLRNNSLSPVYHGEMSTLEVQQRTRCYTMLTEDTTRIMSRLKAVYRSQAIHYQGRSVFRPDRRESYLAQLPTAGLRLRAELLYKELDAVHRLRLRAKREMLAECRKHPAIKSLRSVPFLGKVRTAVLIGRVQTPHRFRTKRQFWSYCGLALETHDSAQYHVVHGQVERKPRSVQVRGLNWNHSHELKDVFKSAATMAAHRDGIFREFYTGLLNRGMRPEMARLTLARKIAAITLKIWKEGGTFNAEYIKPQAA

SEQ ID NO: 86031 - protein, 364 aa, unidentified
MFPSSRSAVRRGRSRPSWTIMIATLWPGEQVPATERIANEEAAIRRFFGRLGDSSVLRSCYEAGPGGYDLYWLLESMGVACDVVAPSLIPKGGSDKVKTDRRDACRQARLLRAGELTAVRVPTRDEEAVRDLVRVRAALLADRKRAQQRLTAALMRHGCIWTQGSYWTAAHRAWIAAQRFGEPALAAAIAHYRGALDTRETELAAIEAALAPWALREPLAGPVARLGCYRGIAELNGLTLVSEIIDWRRFACARAFMSYTGLVPAEYSSGERTRRGHITKAGSEPVRTALTEAAWAYQHAPAIGATLRRRQAGADPGTLARSWKAQRRLYARYRALTGRGKAPAEAATAVARELAGFVWAEMTA

SEQ ID NO: 86032 - protein, 425 aa, unidentified
MNSKENTKINQVTEQTLVIGIDIAKYNHYATFVDERGRVLKKAFLVKQTRKGFEQFYQEVLEGMKEFKKSDVLVGVEPTGHYWMNLAYFLEDYGIPLVIVNPMHVKRVKELDDNLQTKNDKKDALTIARLMKDGRFSHPKLLRDLAADIRSCFTLEQALIDDRTTLKNKIHRWVDKYFPELFQIFSDFGAMVLGVLETTPLPAELVNMTPEELADQCAKASHMKQRRPKLAADVIKVAQTSIGINVAPWGAKREIQCLIRQYRLIEEELAMVEQETESLIIQTADYEYLASFPGISRGTITGLLAEIGSFNDFESPRQLIKLAGLTLRENSSGTHRGEKKISKRGRRRLRALLFKAMRPILRNNLAFMKLHQYYTQRPKNPLRKKESMVVLCSKLLKILHALCTKKRKFNGEQMLADLPCLQLVA

SEQ ID NO: 86033 - protein, 353 aa, unidentified
MQTQSKRIDFSGQNFYCGFDTHKKTWTVTIETDEIALKTFTQNADADLLVQHLRKNYPGGNFIAGYEAGYFGYGIQRKLESMGVHCLVINPADIPTTNKDKDQKRDPRDSRKIAKALKNKEVSAIWVPPVALEEDRQLLRTRYALAKDQTRTKNRIKAFLQIHGIKYPEIFSQNGSHWSARFVKWLQAIQLTEPSGTEALQSFVRHLQFLRTEILVVSRKIRVLTKSSRYEKTYNRLIKIKGIGMITAMTLITEIGDINRFKNPDNFRSFIGLIPSSKSSGEKEYQGRITNRANSHLRYLLVEATWIAIRNDPYYLHHYKEYRKRMKDNNALIRTAGKLANQIFYSMKNTTEK

SEQ ID NO: 86034 - protein, 320 aa, unidentified
MPQSGRIVGLDVAKLKADGCIRSLQQGLSQPSTPEGRAAMVAWLRAHDVETAVMEASGGYERSWAEALRKAGITVRIVDPKRVRHFAKSAGCLAKYDALDAAMIAWFAETFPDLPALPHDPDREELDALVTARKALVNLVTQLGNPGEHRQPRAVRRAYAAILRNVAAQLARLEAAIAVKLAATPGFAARADIIQSIPGLAAQTVAGLIAWLPELGHIGNKEAAALLGAAPYDDDSGKHKGERHIKGGRQEIRNLLYMATLGAATRHNPILKAYYQRLRAKGKPAKVVLIACMRKLIVILNTMLARGEKWDPARCQASPA

SEQ ID NO: 86035 - protein, 310 aa, unidentified
MVVYSTGEIRHFGNNDAGIAEATTWLKQVNPAITVMEATGGMEVSLYIALQETKLPVAVINPRQIRDFAKSMGILAKTDKVDAKVLARYACAIQPEARPLPDEAARQLKTLVTRRRQLVEMIIAESNRAKMTRDKAMKQRIYTHIDWLKPELAGVDKGISQMMKENPIWREKDKFLRSVPGVGPVLSATLIAELPELGSLNRKKISALVGVAPLNRDSGKHHGERSIWGGRCSVRQPLYMAVLTAVRFNPNIKSFYERLLANGKTKKVALTACMHKLLMILNVMLKHNSYWSCNYAIFNNTCIPSTKTVA

SEQ ID NO: 86036 - protein, 464 aa, unidentified
MNSISRPENCPADRRLSKARLRGKRKGNFLQPKAIEVCDEIIGTSDVEEAANITSVSSAGNASFIGKDVIPALLVSSCSTEADETPLPGAALRKYSKQKEGLQMGAVTIGMDIAKGSVQLFGEGLKKKLYRPEVLTYFGKLEALTVALEACSGSHYWGRELAKLGHTVRLMPPQYVKPYVKRNKNDAADAEACWEAAQRPSMRFVPVKTAAQQAALQLHRERERLICERTKVVNQVCGFLLEFGIALSRGVSKFAMNVREALSKHTERIPPLSSNMLNRCVGDFNRLVERIEECEELIKTQLRNDPVAQKLDTIAGVGPIIATAARASVPDIGHFKNGRHFATSLGLVPLQASSGQTIRLGKMSKRGNPYLRKLLIQGAHAVLNTVGRKDDAHSRWLQELVRRRGRCKAAVALANKNARIMYVILAGKAERFSPDAAHQPRENEKPALGAGPRVDGQEGVTMAA

SEQ ID NO: 86037 - protein, 354 aa, unidentified
MSNKSTPIVATMGIDIGKNSFHVVGLDERGAIVVRQKLSRGQIEARLANMAPCLIGMEACVGAHHLSRKLQAQGHDARLMPAKYVRPYSKGQKNDFRDAEAIAEAVQRPTMKFVATKTVDQLDLQALHRVRERLVSQRTGIINQIRAFLLERGVAVRQGLRFLQRELPGILATRSDVLSPRMMHVIEDLAGDWHRLDERIEGLSTEIAALADQDPACERLMTVPGIGPIISSAMVAAIGNGSVFSKGRDFGAWLGLVPKQISTGDRTILGKVSKRGNRYLRVLFVQAAWVVLIWPQSWERYGLKSWIEAAKKRLHRNVLAIALANKLARIAWAVLNKERNFECLRTRAMSSQPA

SEQ ID NO: 86038 - protein, 353 aa, unidentified
MVVVGSDVHKRTHTFVAADEAGRKLGEITVKAEPKGHDKAICWARERFGAELLWAIEDCRHLSARLELDLLDAGEQVVRVPPKLMAEQRRTARTRGKSDPIDALAVARAALREPDLPVATHDEASRELKLLVDRREDLVGERTRMVNRLRWHLHRLAPGDPDADPAPKSLNAARTRRELAGWLADREGIDARLARDILADIDRTTPVINDLAREIAALVRAQAPDLVALPGCGDLTAAKIVGETAGITRFAHEAKYAMHAGVAPIPVWSGRTKGRVRMSKSGNRQLNAALHRIAVTQIRLGGLGRAYYDRRLAAGDSRTEAIRALKRRLARTVFQTLKNNPSTTSATGLAAAA

SEQ ID NO: 86039 - protein, 340 aa, unidentified
MNHYVGIDVSLEASSLCVVDANGKIAREGKVASEPDALIAWLRRLKLELTRIGLEAGPLSQWLFAAMRQAGLAVELLETRHVHTALETMPVKSDRNDARGIAQLMRLGWFRPVHCKSMAAQETRALLTARKLLQTKLHDLELSLRGILRGFGLKVGPTTPARFAERIRELVAGHPSLEVIADGLLAARVALRREFDRFEKQVRDAARCDTRARLLMSIPGVGAIVSLTFTAAIDDPARFKSSKQVGAYFGLTPTKYQSGETDIDGRISKIGDAWVRAALYEGAHIILTKPLKGCTALKSWAMKIARRSGMKKAKVALTRKLAVIMHRMLADGTSFRNAAA

SEQ ID NO: 86040 - protein, 355 aa, unidentified
MKGSKVSNLDQFFAASFGHRVWIGVDVHKRSYSVAVCRDDGVMVSWKTAADNDALVRQLVAHGMEIKALVYESGPTGFGLARTCHNAGIPAIVAAPSRIIRPVLPSAKTDNLDCRKLAELAAKDMVRAIAVPSEEEEALRTLERRRHQLTDSLRKTRQRIRGFLLFHGLQEPAGLDSWSNTAIAALVAMPIHPVLREVLDDYLEELRHLRGKMTRLESLLVKHTAALHQRRLACLQSVPGVGRIVACSFLSELFRPERFQRGEEVTAYLGLAPFIKHSGEKTPAGRLRPTGHARLRSLLVEAAWVWKGRDSGVQTFYARMLRNTGLAQKAITAVARKLAIILWRLACEVRAYRPA

SEQ ID NO: 86041 - protein, 350 aa, unidentified
MIIIGCDYHPGFQQIAFVDTETGDYGEQRLEHSEGAEKFYRDLAGQSKKVRVGMEASGHARWFERLLAELSIELWIGDASEIRAKRVRKQKTDRQDAQHILQLLMENRFPKIWVPSGENRDLRQLLWHRHRLVQMRTRIMNQLQAVALNEGLRCKKRLWRQHGREQLESFRLAPWASRRREDLLQLLDRLNPTITDLTQVIEQEVEKCPEARRLRTHPGVGALTALAFVLIIGRAERFQCGKQIASYLGLVPLEDSSGNRRRLGHITKQGSSMLRFLLVEAAQATARSLPEWRSKYFHLVMRRGRKIAKVAMARRLAIALYWMWRKGWNYEQSRKFGSHAGQLGTGDGVQ

SEQ ID NO: 86042 - protein, 312 aa, unidentified
MTASQDVFIGIDISKDRLDVHVRPLGVGFSVSNEAAGHAALIARLRPLRSKRIVLEATGGYERALWLALSEAGLVAAVVNPRQVREFARAAGRLAKSDRLDAAVIAHFAETFAPRPGKPDPVADRLGEHVLYRRSLQEEIVSLEHQRRRLETPALRERAGRRHAALRAEVKEIEREMRAIVDGDPGKKALFACLTALKGVGLVLACTLIANMRELGSLTRHQAAALIGVAPLNHDSGVRRGYRAIAGGRRRVRNVLYVATLSAVRSNPVIREFYRRLSAGGKPAKVALVACMRKMLVMLNGRVRDHLATATA

SEQ ID NO: 86043 - protein, 459 aa, unidentified
MSKNSKKKKRVAAGRAAKKMERFELLNPRSAGIDIGSMLMVVSYTDREGMINLREFDSFTNSLYQLAELLQGEGVEKVVMEATGPYWESLYNILEKHGMEMFLVNPSHYRNVSAQKTDINDAQWLHQLLAHGLIRNSHIAPELYRQLRQYLHEREIYRSHKSDTLNRIQKTLTLMNIKFQHLISDIEGVSGMKLLRAISSGICDPETLLALIDVKKLKASPEDLLSSLQGDYKEHYIHILSGTLKSYDFFKEQMLTYETYIEQTLGELLACDTAQKVVPIKRKTGLVRKNQYSFNLKDYLLAIFGVDLTEIEGLDEIGLLTILSVTGTNMKKWPTAEHFVSWLNLSPRPKISGGKIIGYEKRISNNPATQAFRLAAHCLWQSKGPMGQQYRRLAATKGSKKAIKAVARKIAVIFYQMVLHKQVYDATRIQPDLEQQMARKIARLQKEAAKLGLSIQKAA

SEQ ID NO: 86044 - protein, 476 aa, unidentified
MNGKSKEAKNQVNQANIFEREELVKKADAIMQDLKAHTWHELETKGKFDKNAKLSFINDEMLIIGCDIGSEMHYARAIDTRGRELSRKAFAFSNTAEGFASAKAWMLELAAANDKKQIVLGLEPTGHYWFCLTAWLVANGISVVQVNPYAVKQTKELEDNSQLKDDRKDPKLIANLVKDGNYGMPYLPEKVYADMRRLSMFRDQLTEDRIRCLNRLHRELTICFPEYKDALGKVDGAFAMELLKAAPFPEDLKEIGAEGIREIWKGAKLRGRGYSRAGEILRYAEQSVGLKDGAGISKEAVKWFAEKILELDRKLSDVEAELLDRCRAVPAAENLLEIPGIGRNILSGILSEIGDISRFDDAKEIQKLSGLGLVACSSGKHKGETKISHRGRKRLRYWLFQAAKSAVVHAEEFRRLHEYYTTRRDSPLKKMQSLIVIACKLLRIIFTILRDGTKYDAARMLNDIRRIDKQAVPAVA

SEQ ID NO: 86045 - protein, 344 aa, unidentified
MLHAGLDLSRRRLDVCLIDDAGEVVEHTAAPPDGDGLRHLAERLRGQPVRAVIESMTGARFVHDTLEELGWEVLVADAQKVKGLAPLACKTDKIDARVLAELSWRDLVPAIWLPDPSIRRERELARYRLHLVRHRTTLKNRIHATLMTFGHPCPVSDLFGHAGRLLLDRLAIPDPWRRNVDASLELIDDLELQIAQLTVELRRQGADHRYIPLLVTAPGFGWINAFTVASEIGDIERFASPTKLCGYTGLCPRVYQSGASDRRGPISKQGSRYLRWALFEAALHACNHPVYAERYQRTKKRLGRQRGPKVAQIDLSRKLTEAIWHMLTRNQPFAPAGARFRLAA

SEQ ID NO: 86046 - protein, 432 aa, unidentified
MIKINTLSTLYVGIDVSSKSNVVYAMDFEQNKLLSDSFPNNQPGAEKLANAICKCMLSHRNLNTIVFALESTSMYSIHIANFLSASEILMPFHPYVYCLNPKITANYRKTFIGLSKTDSTDAYIISDLARVGKIKSSPWRGSQFLALKRLTRHRLHLAECITREKTYMISNLFLKFSELEILDQESQPFSNIFGTTSAAVLTEFFSVQDIVDASEEELLQFLAKKSRNRITNLAETSKLLKKAAQDSYRLDKRAAEPLTIALASSFNCIESYKKEIKAIDHAIEKTVKGVNPNAYMILRSIPGIGPVLAAGILAEIGDISAFRSADSLAKYVGLTWRKSDSGDFVAEETPVFRTGNTYLRNYIGEAANSVRRYIPEYAEYYAKKYAEVPKHQHKRALALASRKLVRLVFGLLVKNQLYAGGKLNAEQNNDFK

SEQ ID NO: 86047 - protein, 374 aa, unidentified
MREPTTFVGMDVHKQDIAVAMLIPDATSAVEWRVANEPAAVQRLAKRLQRESGGPVHCVYEAGPCGYALQRQLLAAKLSCDVVAPSMIPIRPGERIKTDRRDARKLAEMARAQLLTVVRPPSEDEEAVRDLCRGRDDARLDLMRARHRLGKFLLRRGRVFREGAHAGWSQRHRTWLGTQAFEGTAERVMFEDYLLAVEQVEARKRLLEQHLEDLAHESRYAEPVAWLRCFRGIDTVTAITLLAELHDFRRFRSPSQLMAYLGLVPSEYSSGPRQQRGGITRTGNRHVRRLLIEAAWHYRHKPRVGEKLALRRHGQPAEIIALADRAQLRLCRRYRRMERRGKHTSKIVVAVARELVGYLWATLTPAARTASATR

SEQ ID NO: 86048 - protein, 374 aa, unidentified
MNTIYIGVDFHARQQTICYLKIETGELVTCELKHQDKAQVRAFYKQFQGHVIIGLEASGYSPWFEAMLEQLGCEVWLGHATEIRRRARWRQKNDRRDAELILDLMLHNEFPQLHRPTVQSREVLRMLRYRQKLIKVRTMSKNSLQAIALQAGLAKGSRLFTTAGQQELRTAEMSPVLQWQRDHWFELLKPLNQQLLETMVWCKAQSKGDAAITRLRTHPGIGLLTSLCLLHTLQPVSRFRNARKVTAYAGFDPVERSSAERQHFLGISKAGSRLLRYLLVEATHTAVRHDEDLKRFYKRLAERRGRPKAKVAAARKLLIRAYIMLRDEIDYAEFRRRAVAARLARLGQRPEVPEVLIGQPASAGCQEQTHASEK

SEQ ID NO: 86049 - protein, 416 aa, unidentified
MSLALPPAEFFVGVDWAAEVHAVCVINIEGKVLSQFTVKHSADGIALLVHRLAKFGEPIDIPIGIERPDGRLVDLLLEAGHPVVPVSPNAIKTWREGEVLSGAKSDAADAAVIAEYLRLRRHRLTAAAPYSSETKAVRTVVRTRDDLVHMRVAAVNQLAALLEAYWPGANAIFADLESKIALEFLSRYPTPTAAAHLGEKRIAAFCAARGYSGKRPAAELLTRLRAAPAGTTDPHLSVALHDAVLALVEVVKAVNTAVKDLDKSVAARLGEHPDGKIFTSLPRSGQINAAQMLAEWGECRQAYETPDSIAALAGCTPVTKASGKRKAVHFRWACNKRFRVAITTFADNSRHASPWAAKIYNDARTAGKDHPHAVRILARAWIRVIWRCWHNNTPYDPTKHRAAHALTAQSSVDLAA

SEQ ID NO: 86050 - protein, 342 aa, unidentified
MFYAALDVSLRSVAICIIDQDGKVRMERSVPSDVPDVVRCLCEFGEPIHQVGLEAGTLTQHLTYGLKEAGFDVVCMEARQVKAALSAMRNKTDKHDARGIAQILRSGWYSRVHVKSVESHYIRALLSSRKVIQRKCIDLENEIRGLLKVFGVKLPMRLSRGSFDAAVRDTIESDPALSNALLPMLQARQMLFETFLELDRRVRRAAREDAICTRFMGIPGVGEITALSFKAAVDDPTRFKSSRTVGAHFGLTPRRFQSGEKDNPGRISHAGDADVRATLYAAANAMLMRSIAWSSLKAWGVRLMKTKGRRRAIVAVARKIAVVLHRMWRDGTEFRFGSEAAA

SEQ ID NO: 86051 - protein, 341 aa, unidentified
MSIEARITQGWALSRKGQSMSTRAIFVGIDVSKAHLDVAVRPDEIEWRSPNTDAGAREAANKLKDLDPDLVVLEATGGMEIPAASALAVLGVPIAVVNPRQVRDFAKSTGRLAKTDALDARVLAHFAEAVRPEPRPLPDEQARQLSALLSRRRQISEMLTAERNRLQSADSTVRRRLKVHIRWLERELSDIDDDLNRAIKESPVWRVKDDILKSVPGIGPVVSFTLLSELPELGRINRKQIAALAGVAPFNRDSGTMAGRRTVWGGRSRVRAALYMAALVASRYNPVIRDFYLRLCAAGKPKKVALTACMRKLLLILNSMVKNNVRWNASAAEVRGTLISA

SEQ ID NO: 86052 - protein, 402 aa, unidentified
MNAVGIDVSKGKSMVAIMRPFGEIVSAPFEIKHTASGINSLVELINSVEGESRIVMEHTGHYYEVLAHQLSEANLFVSAINPKLIKDFDNDSLRKVKSDKADAVKIARYALDKWQNLKQYNVMDELRNQLKTMNRQFGFYIKHKTAMKNNLIGILDQTYPGVNTYFDSPARSDGSQKWVDFASTYWHVDCVRKMSLNSFIDHYQNWCKRKKYNFSQSKAEEIYGKAKELVPVLPKDAITKLIIKQAVDQLNSASTTVESLRTLMNETASKLPEYPVVMAMKGVGTSLGPQLIAEIGDVSRFTHKSAITAFAGVDPGVNESGSYEQKSVPTSKRGSSDLRKTLFQVMDVLIKTHPQDDPVYQFLDKKRAQGKPYYVYMTAGANKFLRIYYGRVKEYLSSLPES

SEQ ID NO: 86053 - protein, 464 aa, unidentified
MTDKKPWRNRKERKEWGRRLQSEDPGLEVVHAHAAGIDVGNGMHYVAVRPDRDPQPVRRFECFTADLHCLAEWLERCGVKTVAMQSTGVYWIPIYEILEERGMQVYLVNARHTKNLPGRKSDVQESQWLLKLHTYGLLNNSFQPPSEIRILRTYWRQRAEHVHGAATCVQRMQKALTQMNVQLANVISDVSGLTGQAIIRSIVAGEHDPRKLAELSDPRIHASREEVAKSLEGHWRPELLFVLQQEVVMFDTYQQRIAECDQQLQKHLTSFADTIPLLPTAEEPKRKKSKPAKNAPRFELRSELQRITGVDLTRIDGIDVMVAQTLISEVGLEMSRWKTEAHFSSWLGLCPDNRTSGDKVLARGTRRVVNRAATALRMAAVTLMRSRTYLGAQYRRLRTKLGAPKAITAMAHRLARLVYRMLKYGQHYVDKGAEYYEHRYRRQQIEFLRKKAAKLGLQITLAQT

SEQ ID NO: 86054 - protein, 410 aa, unidentified
MQTLVERGCGMDVHQATVVACLLVVLKNGKVQKQIRTFGTNTRELLSLREWLLSEGCTHVAMESTGVYWKPIYAILEGAFEIVVANAQHVKKVPGRKTDVKDAEWIADLLCHGLLRSSFVPPQPIRELRELTRYRRKLVESRSAERNRLLKLLETANIKLASVATDVFGVSGRLMLQALVQATATSQQMADLAKGLLRKKIPELELALEGKVEEHHRFLLSVQLRRLQAVEEDLGLLEQRLQEKLKPYAMQLALLQEIPGVDWTLGAVIISELGVDMSVFGNVSQLASWAGICPGNNESAGKRRSSRIPKGNVYLKTALVEAANAAAKAKGTYLRDKFYRLKARRGYKRAAVAVAHKILVAIYHMFSHQVCYNELGDLYLDTLNKHHLTRNLVHRLERLGYAVTLEQKAA

SEQ ID NO: 86055 - protein, 354 aa, unidentified
MNIKYIGMDVHKETISIAVMNSDGKVVMESIIETKASTILQSIQGIRGDLHVTFEEGTWAAWLHDLLKPHVTELVVCDPRKNALLKDGNKSDKIDARKLADLLRGGYLRSVYHGENGLRTLKELARSYLTISKDLTRVMNRVKALYRSWGILCVGQQVYAPRYRAEWLNKIGEAGVRRRAEFFYQQLDALRALRQDVRRDLLAESQKQSAMKILREIPTIGPVRAALLIALIQTPHRFRTKRQLWTYSGLAVDTRDSAQHRYVAGQLQRSKKPQQVRGLNKNHNHDMKAIFKSAATMASSREGPFHDFYQGLLTKGMKPAMARLTLARKIAAITLILWKKGAHFDAEHLKLQAA

SEQ ID NO: 86056 - protein, 366 aa, unidentified
MKRLVLKEGGKQAQRAQPRAPAVGEVVILGVDLSRSKWVYACRWGGHEQRRFGSPGELTHLQAVVREYQQRGCDVHVVYEACGFGYQIAWWVEAHNARVIVVAPSCVEKAPGAQVKTDGLDAGSLALKYERGMLKGIYIPTREQHEYRQLSRTYGQALKDRSRQQVRLRLLLQEHGYTPPAAGSSWGALERWVSTQQFAPPLGLCVTELMGLRTSAGSSARRLANELRAVGRLPQYVELGKALAAQSGVGRFTAIRFMLEVGDIHRFATADSLPNYLGLAPKEYSSGDMVHRGRIRKCGPGSLRAWLVQCAWAAVRADKDGPLVECFKRLEPRVGRKRAIVAVARKLALRLRARWLAFEEEVQQAA

SEQ ID NO: 86057 - protein, 320 aa, unidentified
MMSQNDPGVVGIDVAKDKVDACIRAFKLRQTWPSTAQGHRKLVGWLRKHQVNKAVMEASGGYERAWARVLREAGIEVRIVDPKRVRNFALSAGRLAKNDSIDAEMIAWFAETFSEAPSQTHDAAHEELQALVKARLDLIDFRMRLVSRSEHAAPGLVQKAHAHILKSLTSEIAKLEAAISAKIKSTPDFAERAEIIESMPGFAETSSANLVAGMPELGQVSDEIAAALIGIAPYDDDSGKRRGERHIKGGRRWVRNAIYMPCVGAATQNNPVLKAYYQRLLAKGKEPKVALIACMRKLIVILNTMIARRQKWDPSRYALS

SEQ ID NO: 86058 - protein, 315 aa, unidentified
MKKASAEIFVGIDVSKSWLDVAVHEQEEVLRTGNDDPGIASLVKRLKKWKPTLIILEPTGGFEMLVVAELTQAGLPVVVINAKRVRDFARATGRLAKTDKLDAKVLAHFAAAVRPPLRNLRSEEAEQLTALLTRRKQVLEMITVEKNRLVTVRTKMRSDIQAHLQWLSKNLKELDKEIEEFVENSPVWKEKDALLQTVPGVGRVTSATLLGMLPELGQLNRQEIAALVGVAPMNKDSGKKHGKRRVFGGRADVRSVLYMAALAAKKFNPVIRKFYERLLKHGKEKKVALTACMRKLLVILNSMMHTNLPWRTQPA

SEQ ID NO: 86059 - protein, 340 aa, unidentified
MKHIGMDVHNTTTDVCVRNGRGVVIRRCRIPTSKTELQKLVLGIAGPKRVALEESQSADWVTRVLLLGVDEVIRCQPQYNKLISSSEDKCDRRDAESLSELLYLNRLKRVHHPAMTYRTLREAVRAYWIASRELTRAKNRVKGWYLFNGVHKSGDRVYSARNRNGQLKELEGEGRNTELARLLYERMDHCRQLKAKHIGVMREAARPVQEPVRLLRTMPSVGPITAYTMVGFLEEGQRIPNKRKLWRYAGLSLRQHESNDKGVQGASKSGNRLLKHVVMSAAITVVSRGERNALLKLWERDIRQNVNPKRARRNLARRIVVIAQHLLRSREEYNDERIKI

SEQ ID NO: 86060 - protein, 405 aa, unidentified
MNEFSAEGRKHAGSVAGLGGVMSALEQASDVYAAYIGLDVHKETIAVAVAECGRGAPEYDGPIAHTPQKVAKLIERLSARYGGERLLWVYEAGPCGYGLYRQIVTAGHACEVVAPSLIPVKAGERRKTDRRDALGLARLSRAGELTAVWVPPPEQEAIRDLTRAREDMKKLELKARQTLGAFLLRHGKVYGGKSRWTQEHYRWLETVTFDSPVQQIVLQEYLEAVLAAQRQVARLEQQMRSALPQWSLAPVVEGLMALRGISLVSAMTVLAELGDISRFDSPRQLMAYLGLVPSEHSSGPRRRPGAITKTGNGHVRRILTESSWNDRFPARKTRVIQQRAEKTSVTVQAIAWEAQKRLCGRYQHLLRAGKVKQQVTTAVGRELAGFIWAIACEVMGKPHGSRATT

SEQ ID NO: 86061 - protein, 416 aa, unidentified
MLYVGIDWAAESHTVTLLTRPGEVLKPLAIANTLKGFLALLDAIRQYVGKDKPAPTPGDVLFIIEDRNQRLVDFLLAQDFTGYLMEPSRMPGYRLRYRSSGNKTDPDDAFIMADVLCRDRDQLPTIDPMNATVQTLKTLLMDREGFVRDQTRLTNRLTACLRQYYPEALELSGDVAGKTALAFLAAYPDFAAAHRLNREQVRLFLVEHHCNRADRLERMMVVLGQEPIAVPAVVIETKRRMALHVIQQLQAVQTTVAEYDAEIQRIGAENEEVQRFKGLPGAGPQIAGGLYTLMGDDRTQTRFRCATALQSLVGTAPRTIQSGKMRAVCFRFGCNGFYRSQAQQMALGALRVSVWAKQYYRGKRAEGKRHQHALRCLANLLMKIAFAIWRDKTTYDENRYLAQIMRHQLRQKSSTA

SEQ ID NO: 86062 - protein, 363 aa, unidentified
MPTTNLENSIDFGGQEFYVGIDVHKKSWAVTVRTLNLEVDRFTQPPNVQDLANHLFRRFPNGTFLSAYEAGFCGTTYHSKLHQLGIRNIIVHPADIPSTDKQKKTKNDLHDSRSIAYYLEKHMLHGIYIFPKAQQELRSLFRLRQSKVKDVTRSTNKIKSFLQYFGIRLPKGNTNNQITHKDIDWLNNLIFDSPAGSSTLQHYISDLQYNRKQLLDATSALRKQIRKIYPDQLNCLLSVPGIGPIMGMAFLAEIGDFSRFKDPDEYSSYLGLIPWEKSSGESLSTKGMQPRCNKFLRPLLIETSWAAIRHSTELLAYYRKHAVKNNKHAIVKVARKIALIARAVVLQLKRYNPEYNCRSHQVA

SEQ ID NO: 86063 - protein, 364 aa, unidentified
MLIIGCDYHPGFQQIAFVDTDTGELSERRLGHREEAEQFYHELKQRDLAVRVGMESSGHSRWFERVLHELGFELWIGDPAEIQTKRVRKQKTDRQDAQLLLRLLIEDRFPRIWVPDAANRDLRQLLWHRHRLVQMRTRVMNQLHVVPLNEGLRRKKALWRPAGRKELESIALARWASRRRQDLLDLLDQLTPKIQELTRALEEEVENRPVTRLLMTHPGVGPLTALAYELVIGTPERFHCGKQLASYVGLVPEEKSSGDRRRLGHISKQGNVLLRFLLVEAAQVTVRSQQEWRSKFFHLAMRRGRKIAKVAMARKLAVHLYWMWRQGYDYGQTQKLGSHAGEPGHPDGVQSITDVMIGHPAPSK

SEQ ID NO: 86064 - protein, 305 aa, unidentified
MKHFAGLDVSLQETAICIVDEDGIVISEGKTASEPDELARWIATTGLTITRVGLEAGPLSPWLHTELRAAGLPAICIETRRMKGATAAMSVKTDRNDARAIAHAMRVGWFTIVHVKTAESQELRLLLSNRRTLLEKRIAIDNEIRGTLKAFGLKLGPVTVASFEARVLELLASRSRLLGMVKPMLTARTALRQQCDVLHRMVLKTVRANAVCRRLLSVPGVGPIVALTYATGVDDPARFAHARDLGPHFGLTPRKYASGEIDRNGSITKAGDGAVREALVQAALTLLTRVQRWSVLKAWGPARSL

SEQ ID NO: 86065 - protein, 420 aa, unidentified
MKTWTELTHYAGFDWAGDHHDVAVVDQGGKLVLEFRFEHNAEGWSEFRSKIQPYAALGVAVETSSGAAVEELLRSDCTVFPVQPMAAARYRERKSPGGVKNDRLDAWALADALRMDGRMWRTLATEDPLIQELRLLCRDEVALIEQRTALINQLRAALREYYAAALAAFDEWTLPAAWALVVQFPTPQALATAGKRPWEKFLHRHKLWRPETAQRRLDLFAHALDWPRSEAVTRAKSRLAVSLARMLQTLEQQLDDYRAAIVERFQRHPDHNLFGSLPGTGPKLAPRLLGELGEDRARFHSAQALQGLAGTAPVSFQSGQIHRVKMRRACNTHLRHAVHLWADRSRTSCGWAQAYYQTHRAKGKSHACALRCLGHRWLDVLWKMWQDRTLYDGDLHARNQQKHGSWVFKILTPSATSTSE

SEQ ID NO: 86066 - protein, 336 aa, unidentified
MFQLGIDVSKKTLDLCLLREGVKGSVKTRKLQNDINAVNAVIAWLSKQHCKPEDVHIIMEATGVYHESLAYGLHKAGGRISLANPHRAREFARGMGMLTKNDRVDAYMLACYGALKAPEPWLPPPEEVRHLSALLRRRDALVADSTREKNRLEKYLATDTPSVIAESVEAMIGQLNAEIKRLDRLIRSHLNQHPELKKDFDLLTSIKSVGYQLGLNMLVILRSHDFATAEQAAAFLGVVPVEKYSGTSVRGCPKLSKIGPPEIRAKLYLASLCGLRFNPLMKAMYERLCLRGKGKMCAIGALMRKLMHWCYGVLKTQKPFDVGYLSSYARSACKAA

SEQ ID NO: 86067 - protein, 441 aa, unidentified
MSKEKLATTAEPEPQWAAFVALDWADQKHYWKLVVAGSQKQEEGELENTPEAVAAWAADLNVRFGGSPVAMCVEQSRGSLVYMLLKFPQFVLFPVHPKMSASMRKALYPSGSKSDPSDTGVLLTILLHHRDKLRRLNPDTVETRLLQRLAEQRRLMVNEKTRQSNRLTACLKLYFPQILTWFDDPASPLVGAVLEKWPSLEQLQRAHDGTLRKFFHQHNCRSEERIQERIDAIRQAVSATTDAAVLGAESIAARSYGALIATLRTIIAEYDEQIAKVFAAHPEVALFDGLPGAGAALAPRLLVAFGTDRQRYATAHELECYSGIAPVRSASGQSQWIHFRWACPKFLRQTFHEFAGHSIVKSKWARAYYDLQIGRNKSHHAAVRSLAFKWIRILFRCWKNGTPYDEQVYMQSLQKHNSPLKAWLPSWKDVAGFQKPSENPA

SEQ ID NO: 86068 - protein, 319 aa, unidentified
MDTLFEQVVSRGCGIDVHKKVVVATIGGKGLRSQTREFSTFTSSLTELKEWLLANGVTHVAMESTGVYWKPVYKILEPGGLTVWIVNARHIKYVPGHKTDKQDSAWILKLLLSGLLKPSYIPPKEQRELRDLTRYRVKLIQSIASEKNRIIRILEDCNIKLSSVLTDTSGVVAIKLIDMLCETGKVNMSDIDKVYHGQIKASKEELFEACTGFVEEHHIYLLQIIRKDIAQTEALISDLSQRIKDKLSAYEDVITLLDKVPGLNTKSIEDLIAEIGVDMNAFPTEKHLSSWAGMSPGNNESAGKKKVAEPPTGTNRLSN

SEQ ID NO: 86069 - protein, 397 aa, unidentified
MYIVGIDIAKRKHEAAVIDGEGTVIIKPFSFTNNCSGYNRLLAMLAKAKLPLDEVSFAMEATGHYWLALFTRLQKEGFRVQVINPVQTNSIRSFYIRQAKTDPRDALLIAEVIRFGHFSESTLHPENIYELRELCRGRHAIVSMQADVKRKVVALLDQVFPEYETAFTNMFGDTSMAILQTCPTPKELSEMPFEELCHLIEVSSHKRFRMAKAQELQELARNSFGFAMAGDIFSTMIRLYAKHLDFLKQQVREMDCKIAEIMDTLDTPITTITGIGPTLGAYILSEIGDINRFSSSAKLAAYAGIDPTMRQSGEYNGVRNRMSKRGSPYLRHAIWLAASSAVLHDPALKLYFQKKRDEGKPYMASVGHACRKMVSIIYAVMRDNKAYTPCIPNEISA

SEQ ID NO: 86070 - protein, 355 aa, unidentified
MDDSANKINVAVLHGLEDQIREEFVVTNDDSGMGRLAKHLKGLPGEVHCVYEAGTNGYHIHRFLKKHQLCCDVAAPSLTPRRAGQRVKTDRLDAKRLAFLYRAGQLTRITIPEKEQESIRDLLRAREDALEDLQRARHRLSRFLLRRGLKCRTGKAWSRGHLQWIKALRFEDAQDQMVVEEYRLALDEEMDRLHRFDEKVEELAQQPQYKKLVSYLMALKGIKTLTAMTILVEALDLRRFVDAPAFMSGIGVVGSEYSSGDKEQRGRITKTGNAHMRRVIIESAWHYRHGAVAGKTLKKRREGLPAEVIEIARKADRRLNKKYWHLVNRGKRTQAAAVAVARELAGFIWAIGQVA

SEQ ID NO: 86071 - protein, 415 aa, unidentified
MALKIVYKICCGIDVHKTFVVACIASTNDKGITSYERHRFSTYTSGLKTLLQWLLDRNCKDVCMESTGKYWIPVYNILESDCSIILAHPKYVKAIRGKKTDKKDAKWIADMFKHDLVAGSFMPPADIRQLRDLMRYRFKLTCFMSSEKNRLQNCLTVSNIQLASVVSDTFGKSSQRILDKILENPDDTSFDIEPLIHGSMKKKLPELELAIDGFITPEQAGKLKVIKKHFEDLESRKAELEKLILALASPYQQELDLILTAPSFKNKFTAIGIISEIGVNMEAFPSAKHLCSWAGLTPTNNESAGKKKSVRVSKAGCYIKPLLVQCANAVVASKKHPEIRNRYLRLKKRRGHKKAIIAIARMLLTVLYHMLKNGENYNAELYQKSDLPPVDREITVEQALMIARNQGYKIKSATA

SEQ ID NO: 86072 - protein, 320 aa, unidentified
MTAFTPVGIDIASKKFDAAIWIEGKKYKNKVFANTPTGFHAFLLWLAPYGPCHICMEATGAYSLPLATYLYDAGYPVSVENAARIHAFGQSELIRNKTDKGDAKMIARYCHLHKPPEWKPVPVNERKLQVLINRLNALKEMKRMEENRALTSEAIVQDSIQKVIAALDEEIKEIEQAIKKHIDNDPDLKKNQALLESIPGVGEILSTTLLGYVGDMSRFSSNKALVAYAGLNPMLKESGCWKGSTKLSKKGNALLRKALYMPAITALKYNPVVAALCNRLKEKGKRGKCLVCAAMKKLLQLAYGVLKSGKPFAAEIPLAR

SEQ ID NO: 86073 - protein, 374 aa, unidentified
MKTNTTKTSPTTSVVSTSTPAAVSGFTLGLDLGDRQHHVCVLDVSGQIVREASLPNTRPALAQLLADFPRATVAIEAGTHSPWISRYLTDLGARVLVANPRKLHAISRNERKCDRRDAQMLARLARVDAALLHPIQHGSAQAQHDLLGLKLRDALVRTRVSLINAVRFTLKSLGHPVRNPSSESFHKNVLADIPADCLPVVQPLLTVLVHVTEQIKTMERDLVQRSKQDYPVTQRLQQIAGVGPLTALCFVLKIGDPERFSRGRDVGAYLGLCPRRDQSGGTDKQLRISKCGDGLLRRLLVSAAHYVLGPFGPACALREHGQRLTGTGSAREKKRAVVAVARKLAVLLLSLWKHGTDYEPRVTTARPALVMTPA

SEQ ID NO: 86074 - protein, 343 aa, unidentified
MTEVSTIGLDIAKSVFQAHGADAAGRQLFSQRLTRAKVLEFFAKQPRCLVALEACGSSHHWARELAALGHEVRLIPPAYVKPFVKRQKNDAADAEAICEAARRPNMRFVAVKSEEQQASGLVFRTRDLLVRQRTQTINAIRGHMAEYGWVAPKGPSWVVMLGELIEEDLGTSLPAAARDMFRVMIGLLEQLNERIDELDKEIARRAREDTIARRLMTIPGIGPIVATAIAALAPSMETFSRGRDFAAWLGLTPRQRSTGGKPRLGHISKMGDRTLRRLLIIGASAVVQQASRRGAIEGSWLAGMLTRKPRKLISVAQANKTARIVWAVMTRQEDYRAPVAVSG

SEQ ID NO: 86075 - protein, 393 aa, unidentified
MQRDTKEVLAELVGKLKEKLDPKKMAATSAGEQHQRGGLRPNLDRLTVGVDLGDQWSNYCILGLEGETLAEGQLRTTQEDIAEFFQALNAARVVFEVGTHSAWVQEVISGCGHEVLVANPRLMDGSKRRKRKNDRIDANKLARLGRVDPESLYPIQHRSREVRQDLVMLRARDALVAVRTEIINTTRGLVKSMGTRLPKCSSRSFAHKGEEAVAVEMREALLPLVRLAATLSADIKEYDKKIEELGREKYGHTALLRQVKGVGPITALAYVLTLANPQRFVKSRDVGPYLGLVPKQEDSGESQPQLGISKAGDTMVRKLLVGSAHYILGPFGPDTDLRRYGLGLCERGGKNAKKRAAVAVARKLAVLLHRLWVSGEVYEPLHNAMSAPIAAAA

SEQ ID NO: 86076 - protein, 415 aa, unidentified
MEIVYQRCAGLDVHKRTVVACANTLDADGKLAKQRCTFGTMTTDLIALRDWLKAHGVTHVAMESTGVFWKPIYNLLEGHLEVMVVNAQHIKAVPGRKTDIKDAEWIADLLQIGLLRPSFIPPAWQRALRDLTRSRTSLIEERSRTIARLQKGLEDANIKLASVASDLMGKSAQQMLHALVQGTLTPEQMAQFARGKMRSKREQLTQALTGYLQPHHRFMIAEHLTHLKALEQAITRLSEEIAEQLGPYEPILARLETIPGIKRRLAEVILAEIGPDMRRFPSAEHLASWAAMCPGNHQSAGKRLSGKTRKGSQWLRTALVEAAHAASHCKDCYLSAHYHRIAARRGKKRAAVALGHSLLIIIYHVIAEEKEYQELGGNYFDKLDQQGKEQRLVRQLKKLGFDVTLTPTASDPISA

SEQ ID NO: 86077 - protein, 338 aa, unidentified
MSIYAGLDVSDKTTHICVVDVDGKVLRRDVVASDPDVLAKWLNKHCTDLVRVVLETGTLSTFLYHGLVERGVAIECICARHAKGVLSARVNKSDVHDAEGLAQLARTGWYKRVHMKASATHIDRAALRIRAQLITARTSMANQLRGLLKLFGLRMGTARTPGRRAERLAAFYAQRPDLRALFAPLIASMEAIEEQLRAYNRLLNDRAKADQVCARLMSVPGVGPITALTYTSTIEDPRRFARSDDVGAYAGLVPRRSQSGERDVSGHISKAGDPMLRKALYEAANVALTQVKRPFALQAWGRKMAEAKGARRARTAVARKLAALLHSLWLNETEFRWA

SEQ ID NO: 86078 - protein, 437 aa, unidentified
MNFNAAGVDVSPKELQVCVPSDRDEKCNRTFGVYTKDLHEISGWLRRCGIDTVVMESTGVYWLPLFRVLKADGFEVMLVNPKDAKNYAGKKTDEADAHWLMVLHTYGLLKPCFQPENITRQIRTLSRHRDNLIRSSSREVLHLQKEMEQMNLKIDNAFSDILGKSGQAIIKAILEGERDPERLASLADRRCKKSKEEIMQSLEATWDEDHLFVMRQCQDLYEYYKKQIAEVEAEINRLVSQYTAQVDTEKAGKMERSKKQKQLHNEVSFDIEQHAYGLWGVNVMRMPAMSKNSLLRLVAELGAEFTDKFPDARHFQSWANLVPDNKISGGQLLSSRVPKRKNPVGQVFRQCANALCRSKEPLGDRFRQIKARSGHKQAMVAVGKTLAGIFYTMVKEKKEYDATIYTKHRKQVLDRSIERLQAKILRLQNESAACAFS

SEQ ID NO: 86079 - protein, 346 aa, unidentified
MEHYVGLDVSLKLTAICIVDRTGKIEREGVVTSDPETIAAFVKSHAPHVARIGLEAGATSTWLWTELNKMGLPVICIDARHAKAALKMQINKSDRNDAVGIARIMQCGWYKEVRVKDLDSHAIKALLVSRALLVKIKRDIENQIRGLLKNLGLVIGRAKMNVFAVRAAELADARPAVAAAVEPLLKAREAVGRQIADLDRKVLRLARNNAQVRRFITVPGVGPITALCFLATIDDPTRFKRSRSVGAYAGLTTRRYASGEIDWTGRISKCGDKMLRTYLYEAANVLLTRIAKWSALKAWGVRLAKRSGLRKAKVAVARKLAVILHRMWIEGTEFKWSSKEAANQPA

SEQ ID NO: 86080 - protein, 276 aa, unidentified
MAETHVCVVTRNGAVIHQAKVPSTPADIAAELAQVPTCRRILFETGRMAPMLYHGLSQLGLPVVCVESRQAYQALKSLATHKTDRNDARGLAHLARTGFFKPVHVKSLSAHAVRSLIIARKKLVGQRVTLENQIRGLAVIFGVRLPRALSPAFIKQALQASEGIPGLSAAMRGLVAARAAVLAAIVAIDGDIRRMARASDVCRRLMSIPGVGQLTALAFTATVDDPKRFRRSRDIGAYLGLVPRRYRQARLTTSAASRSAAIDGFARYCTRPQTLC

SEQ ID NO: 86081 - protein, 316 aa, unidentified
MGERSVFVGIDVAKAQLDLAQRPEGPRLSAANTESGIATVVAHLRRVKPTMIVVEATGGLERPLVRAVVDAALPVVVVNPRHVRDFAKATGQLAKTDALDAQVLARFAQAVRPALRPVPDAPTQELAALIARRRQVVEMLTAEKNRLDGTPKRVQKRIQVHLNWLTTELARADDDLDQAIRTSPIWREQEDLLQSVPGVGPVVTRTLLAELPELGTLNRKQIAALVGVAPLNRDSGTLRGKRMVWGGRAQVRAVLYMGAIVAARFNPVLRMFYQRLRAAGKAKKVALTACMRKLLIILNAMLKHRTPWRPEMAQCA

SEQ ID NO: 86082 - protein, 424 aa, unidentified
MKEEQKSSVIRYIALDIHKHYSVVAGVNREGEEILAPCRVEHLDLDGWLPKHLLQTDRVVIESTTNAWHVYDLLEPLVAEVQVANPIKVKQIACARVKTDKKDTLILARLLAANLVPTVWVPPQHVRELRQLISQRRRLVGMHTQVVNRMHSVSHRHHLGHPKGKRFQEKDMGWREKLGKQERFQLDLDLATKQYLKGQIDQITKELGRMSHEEPWASQMMYLMQIPGFGVVTGMTVLAAIGEISRFETPKKLASYSGLIPGVEQSGVKLRGKSITKEGRRELRWAMVEVAQRAVKADPHWERFFQELERRMHRNQAIVAIARHLLTVVWSVLSHRTSYHHYSEERIAYKYYTWSWQLDEIQRKGLTRPQFVRYYLTLAPPARAGVRLGIGSDLQRVALDPKHPHRLASEAEILEVMADLQPPG

SEQ ID NO: 86083 - protein, 329 aa, unidentified
MDTQVRQKVVGIDVSKDTLAACHRVDEKAQHVEVENSKAGFKQLVRRCGSDSLYVMEATGIYYLQLAYYLVEQGARIVVVNPVIIKRYIQMHLGKGKSDRKDAQWIMRYGEQNQGVCWQPEEPVIVECRQLEQVIEQLIKQKTMIINSLEALERQPVVSALAVKSLKQTLKLLDKQVRQMEDKMVHALEAVFKIEMELLSSIPGIGRKTAGMLLLFAGGFRNMDNYRQLIAKAGLSPREYTSGTSIRGKVRITKMGGGLIRSKLFMCSFSAKKSNAACKALYERLVARGKNGKLALIAVCNKLLKQAFAIVKSGIPYQADFSKIKACKA

SEQ ID NO: 86084 - protein, 420 aa, unidentified
MKVVYQTCCGVDVHKSFLVATIIKTISGVEPSYQKKRFSTFNNSILQFKNWLIENQCRDVCMESTGKYWVPVFNLLEDDINVTIANPKWVKAVKGNKDDTKDSKWIGDLFRLGLVPGSYIPCKPIRILREFTRYRYKLTSCRTSEKNRYQNALTVCNVALDSVVSDIFGKSATSVIDYLIERSDNSINHEEIASRLLRSLKKKSDSVIESIEGYQMTDSQKYRMRLVRAHLDYITSTINDIDTMLDSLIAPYENAVQLLCTIPGVDRNSAITVISEIGTDMTPFSNSKRLCCWAGLTPGNNESAGKKKSVRITRAGVYLKPALVQVAHAAVKSDKSPYYKQKYERIMKRRGKKRAIIAIARMILTAIYQMLFSGEAWNPTDLYKIDIPEPLKEKQKEKAIKQAKKLLIREGILSESQLAS

SEQ ID NO: 86085 - protein, 342 aa, unidentified
MTVLYAGLDVSLELTNVCIVDEHGRLVRESRVGSDPELITAELQRIGDSFVRVGFEAGPLSQWMFFGLKEAGLPAVCIEARHAKAAMVAMNRNKNDRNDARSIAHLIRSGWFKAVHVKSVVSQELRSLLVAREFFVNKLRDHENEIRGLLRPFGLKVGRVSASGFDARVRDLVDGNPQLGLCIGALLDGRAAMMARLSVLHRELLRVTANDELCRRFMTIPGVGPVTALAFKTAIDDPARFRRSSDVGAHLGLTPRQYQSGETDVRGRISRSGDAFTRTALFTAAHVMLTRSCQWTSIKAWGVRIAKRSSLKKAKIAVARKLAVVMHRMWRDATPFRWGAPA

SEQ ID NO: 86086 - protein, 351 aa, unidentified
MLIIGCDFHTRYQQIAMANDETGELLLERRLDHESGEAHTFYRNLQGPVRVGIEATGPIHWFERLLAELGHELWIGDAAKIRASEVRKQKTDERDAALILDLLLAKRFPRIWVPTPAERDLRQLLWHRHKLVRLRTMLGNQIHFLAMSQGLCRKQKLFTKKGRVELAGLALGPWASRRRAELLKLLDQLESPIAELDRAVLEEAERREDAVRLMTHPGIGPVTSLAFVLAIGPITRFRHSKKIASYLGLNPSEESSGGKRRLGAISKQGNTMVRWLLIETVHHAVRQDPELRQDYQRLKFRRGHAVAKVAIARKLAVRMYWMLRSGADYAQLVRRQGSPGPTLVDASPSLG

SEQ ID NO: 86087 - protein, 338 aa, unidentified
MDKFCGIDLHSNNSVVVISDEADRIVYQRRLPNDLTQIRAALAPYREELVGVVIEATFNWYWLVDDLMKDGYQVHLANPAAITQYEGLKYSGDFTDAAHLAQLLRLGLLPEGYIYPAEERPVRDLARKRMQLVRCRTAQILAIENLMARQTGSRMTSEMIKRLDEGQVDGLGFSPDVALAMKANLAVMQTLQSEIGILEKRLAERVTLRPEYSLLKSVPGIGPILATTIMLETGTITRFADVGNFSSYCRCVQSRRESNSKKKGEGNTKNGNKYLAWAFVEAANFAIRSCPEAKRFYERKKRRRNVIVAIKALAHKLARACYHMLREQKPFDVARCFA

SEQ ID NO: 86088 - protein, 412 aa, unidentified
MRIIGLDVSRSVAEVAYLENGRLRPGGRIGLKRAELEQFASGLGVEDHVVLEATGNTQAIVQVLEKYAGRVTVANPLQVRLIAEARVKTDKIDAAILAQLYASGFLPEVWIPDEATQAMRRQVARRAQIVRQRTRLKNEIHAVLIAHLIEPCPATDLFGRTGRAWLSHQPLPGDERIAVEQRLCELDRLGGYLQTIERTLAQSVLQDERLDLLLSITGVNTTVAMGLLSAIGDIKRFPKPEKLVSYFGLNPSVYQSGLQPAIHGHISKRGRSYARAMLVEAAWSVAQSPGPLRAFFLRLRERRGQQVAAVATARKLAVIVWYVLTRKERFAWERPALTTRKMRTLELQSGMTPCRGGRKGTAAAYNLKSVRDQERATAEQAERTYRRLFARWKQSGPTQPIRKPAWPPKPVL

SEQ ID NO: 86089 - protein, 413 aa, unidentified
MSPDLLLREVPAERLVVAIDPGKVSNRVWLTTGERGLIGEPVSLPVLRDGVDELDRLIAASGVSGPPVIGIEATGALHRAWATEVERRWPGSLRLFAPSETQAARGQLGSRRFKTDDRDCAALVWLLRQGAGRPSAPSAIEALLGAVRHRRQLVDARRVLQQRLHDQLNALCPGLSAPAGHGRVLELENPSGRAVLACAVAFAGRAPSVRSLLARSPGRLTEANAQFWAGRWKRLLAPPVDAELRAHRLGRDLERWLGLREDITALEGQLAELLAGTDGQILTTLDGVAVVRAAAFAAHSLPIERWASPEQLYSATGLAPASYQSASVTRRGRISRQGLAEHRDALMGIAWGLSQHSVAFAERDREYRARGFRPIQARVALARHACRLAWRLMISQQPYDDRRYDRARHRRGR

SEQ ID NO: 86090 - protein, 403 aa, unidentified
MNNVAGIDVSKGKSMVSVLRPFGEVVAKPFSIGHTGSELKELADYLKSLDGETRVVMEHTGRYYEPVARFLHEEGVFVSAVNPKLIKDYGNNTLRKVKTDKADSRKIARYGIDNWAELRQHTPMDTIRMQLKTLNRQQSLYAKTKTMMKNNLIALLDQTYPGVNALFDSPVREDGSQKWVDFATTFWHVDCVRNMSLTAFAERYRKWCKRHGYNFSQSKAVEVHTGAQDLIAMLPKDALTKTMVRQAIDALNAVSASLERLKAEMQALAAQLPEYTVVMAMHGVGDSLGPQLMAELGDVTRFTHRNAITAFAGVDPGADQSGTHEAKSTRVSKSGPPELRRALFLVMDCLLKTQPQDDPVYRFMDKKRAEGKPYLVYMTAGANKFLRIYYGRVKEYLASLEGN

SEQ ID NO: 86091 - protein, 466 aa, unidentified
MENNYILYVGMDSSKGKADAAILKVSDRRSVKPKFLRKKLSFKFVKSEVTSFLETVRSYSDDNCTSICFALEVTGIYSTNVYNFIKDNLNDNESIKFLNTDFVNQWRNAHNIAKSDPLDAQTISTIIGTDSDVQYVNDNVFENKNGYQDLKALVHRHYQIKKIYSQEINRLIAQCDCLFPELQYVFEPKSAAFIAVLSSYPTTHDIINTSRLEVFNVVYEATKHRCSMDKIDKLFDLCHDTLVPDNISSYGRSIILDLVENIKNIKGQLKMIERYIRDVASLNPAYKLLLTITGCGPLTAATVIAETGDIKRFRNADCFVSYSGTSPRNKRSGTSVETMGKISKKGSRYLRHAIYMIAEFARRHNPVLKHQFERIKNGNKKRHKLANIAVANKIARYIYSIMKNESSFVIFHEHIMRLPEETQNTFFNSISLDFPKNTRKQIYQYSDINGEAHKFVYTKLEETMIV

SEQ ID NO: 86092 - protein, 357 aa, unidentified
MIYVGIDYHKKYSQVEAMDKEGKTLARAKLLNDEQTLKRYFSSLPEPCEVVIEACRNWQLMYDILEEIDEVKKIHVANPLKVKAIAAAKIKTDTIDAHTLSHLLRANLIPCVYVPKKETRNIKDILRQRMFLVRMNTRIKNRIHALIEKYRISMPDVSDLFGKTGLSFLKKCNLPYPGNLLLKQDIEILEALNALIKETEKEVLNLLNEDERYEIARTLPGLGAILAGVVILEIDRIERFPNAKKLLSYAGLVPTTYASGGKCYHGHLIKQSNKWLRWAMVEASWAAQRVSPYFQSCYRRYLHKGSNTAICVLARRFLEILWPMLIYRRPYEERPIVKIHYSPSPSQKNRLKASCQV

SEQ ID NO: 86093 - protein, 403 aa, unidentified
MNNVAGIDVSKGKSMVSVLRPFGEVVAKPFSIGHTGSELKELADYLKSLDGETRVVMEHTGRYYEPVARFLHEEGVFVSAVNPKLIKDYGNNTLRKVKTDKADARKIARYGLDNWAELRQHTPMDTIRMQLKTLNRQQSLYAKTKTMMKNNLIALLDQTYPGVNALFDSPVREDGSQKWVDFATAFWHVDCVRNMSLTAFAERYRKWCKRHGYNFSQSKAVEVHTGAQDLIAMLPKDALTKTMVRQAIDALNAVSASLERLKAEMQALAAQLPEYPVVMAMHGVGDSLGPQLMAELGDVARFTHRNAIAAFAGVDPGADQSGTHEAKSTRVSKSGPPELRRALFLVMDCLLKTQPQDDPVYRFMDKKRAEGKPYLVYMTAGANKFLRIYYGRVKEYLASLEEN

SEQ ID NO: 86094 - protein, 414 aa, unidentified
MKLFVGIDVSSQELEACFMNSDGDKLETLTVKNNLEGASYLRDRIVAAADKHVSSEIHIGLEATSVYSWHPAMYMHQDAALQKRKAKVFTINPKLVSKFREAYSDLDKTDRLDAWVIADRLRFGRLTTTVVMQEQYVALQRLTRMRFHLIHNLTREKQYFLQNLFYKCNAFTTEVESSVFGHALMEMLSEKYSLDDIATMEVADLADYLRDKGRNRFPDPENVARCIQKAARASYRLGKVVEDSIDLVLGTSIQAIRSIQSQLKDLDKAIERILDGIPGAKCLRSIPGIDRVYAAGILAEIGDIDRFGDQAAVAKYAGLTWRRHQSGPFEAEDTKRIKSGNRFLRYYLVEAANSVKNRDEEFGAYYRKKYKEVPKHQHKRALVLTARKLVRLVDVLLRNGQLYTPRRKVTPAKD

SEQ ID NO: 86095 - protein, 352 aa, unidentified
MLIIGCDFHPRFQQIAYLDKESGEYGERRLNHPEEASQFYRGLVGKSVQIGLEATGSYRWFRRLVSELGHEIVVGDPSAIHATIPRRQQTDKRDARHILKLLVEDRFPAIWLPPVENEQVRQLLVHRCRMVQLRTRLKNQLDAVAKDECMLDPRVWQQKHRLQVEALPLTGWRAEQRNDLLGLLKELDKRIQPLNKAVRKLADENTEACRLMTHPGVGPIVALAYVLTIGDWQRFPRGKQVASYLGLIPQEASSAGKRQLGHISKQGNGMVRWLLTEAATIAQRHDPSWHRQYVRLSMQKHHGVAKVAIAHKLAVRLYWMLRSGNDYEQVKERGSHAGQSGYPTGCSLQPKG

SEQ ID NO: 86096 - protein, 352 aa, unidentified
MDRYVGLDAHAETCTLAVMGPTGKRLTSRVVETNGHALLEAIRGIPGRIHLCLEEGTQSSWLYEILEPQVSEIVVAVPEESRGAKDDLRDAWSRADELRTGRIRTRVYKAPKHLTALRSAACAYRMATQDVVRVKNRLKAVFRSRGILAESDVYLPRSRSKWLKQLPVGHRELAEWLGRELDTLVPLREEAEQRLLKEAKTHPITRKLGTAPGMGPLRTAQLVAIVATPHRFRTSRQFWSYCGLSVVTRSSSDWVRDKHGQWVRAEVQQTRGLSRKRQPVLKAIFKGAATTLLTQLVGHPLHADYQRRLQAGIKPNLAKLTLARRIAAIVLSMWKHEEVYDPLRLKVVTDKP

SEQ ID NO: 86097 - protein, 392 aa, unidentified
MYIVGIDIGKNHHEASIVSPEGKQIGRSLRFATTHKGADSLMSFIFKNIGNSPCVFGMEATGHYWYPIYSFLKAKGYTIYVINPIQSDSLRKMYIRQTKNDSIDSFLIAEVIRFGQFGTTSMADENILAMRQLCRYRDSVISSRTEIKLRIGTIMEQIFPEYEKQFSSLWVSTSIGILEKYLTPENIENAPIDELFEIIKDKSHNRLTKAKAISIKEAAADTFGIKIAQDAFSFQLKQLIDRMNFLDKQIEALDIEIMKYYEQFDCYLHTIPGIGIIGAATILAEIGDISRFKNSSALVAFAGIDPTVRQSGEFNSTHNHMSKRGSPYLRHAIFLAATTCSFHNSPLNAYYKKKRDQGKHHLTATGAVARKLTTVIYAVLRDSKPYEPKKFC

SEQ ID NO: 86098 - protein, 438 aa, unidentified
MTDSIIRYVGLDVHKRVVEACIVDQAGKVVHRERFALNRSTLETFATEVLRPTDHVALEATTNCWAVSDALRPHVARVLVSNPMATKAIAQAKVKTDKVDANVLAQLLRCDFLPEVWQPDEATRRLRELTGRRSALVGQRTMMRNRIHSVLAMRLVEGPSRLFNAEGLDWLATVQLDAQGRLLVDSDLLQLEFLQNEIHSLDDELARRGQASAEVKLLMTLPGADVATAEALLAAWGDVKRFPDGDHAASYLGLVPSTKQSANQCYHGPITKRGNSHARWMLIEAAQHLDTHPGPLGHFFRRLAKKKNRNVAVVAAARKLAAIGWQMLVTGAPYRYAVPRSTETKLSRLRVRATGRRRKSGPCKGSKRIAKLPGGSRTIKALAEVCRAEGLPQPKGLSPGERRTVDEADCAAFVAAIAAAQVVPRRAGRKVKEAATHG

SEQ ID NO: 86099 - protein, 378 aa, unidentified
MLNYSKYIGMDVHKDTISVAIAQAGQEEPRFYGRIPNSPPAIGKLLKKVCPGGEAMLFCYEAGPCGYEVYRFLTAAGQDCLVVAPSLIPKKASDRVKTDRRDALSLARLLRAGELTAVWVPDQEQEAMRDLTRAREDFKATERRARQRLNAFLLRHGLTYTSGKSKWTLAHRRWLQSLKLESPIQQIVFQEYLDAIDQASQRVADLESQMQGSLLTWSLAPVVEGLMALRGLSLVAAMTVVAELGDITRFDSPKQLMAYIGLVPSEHSSGAARRQGAITKTGNGHVRRMLVESSWSYRFPARKTAHLQRRAAATSDSIQAIAWKAQKRLCGRYRKMTQVQGKLPVVACTAIARELLGFIWAIAKEVKRSDALRVCSTP

SEQ ID NO: 86100 - protein, 418 aa, unidentified
MEVLHERCAGLDVHKKTVVACVRLARDGGVEKEVRTFQTTTADLLALGEWLDGHDVNHVVMEATGVYWKPVWHILDDGDRELVLANAAHVKNLPGHKSDVSDCDWLSDLEAHGLIRGSFVPNRQTQELRGLLRTRKQKVRERSSNTLRLQKTLEEANIKLDSVISNVIGVSGRRMIEAMIGGETDPVALAALADRRIKAPPEVLCEALRGRVTGHHRFLLGLQLEHIDALDGMIDKIDQQIDASVEPFRAAAGLLTTISGVNQLAGRAIVSEIGIDMSRFETAGHLISWAGLCPRNDESAGKRRSTRIRKGAPWLKDILVQCAWAATRTKATYLHAQFVRIRSRRGPKKAIIAVAASILTAAYHMLKNGVPYRDLGPQHFHSRNKQAQAKRLLARLRDLGFTAEFDSLKPIPDAVVSY

SEQ ID NO: 86101 - protein, 350 aa, unidentified
MIIIGCDFHPGFQQIAFVDTETGDCGEQRLEHCEGAQKFYRDLATQGKKVRVGMEASGHARWFEQLLEGLNIELWVGDAAVIRAKRGRKPKTDRQDALHILNLLLTGDFPQIWVASWENRDLRQLLWHRHRMVQARTRVMNQLQAVALNEGLRCKKKLWRKHGREQLEAFRLAPWASRRREDLLELLDRLNPTIAELTQAIEQEAEKCPQAQRLMTHPGVGALTALAFVLIIGKAERFQCGKQVGCYLGLVPLEDSSGDKRRLGHITKQGNSLLRFLLVEAAQVTSRTIPEWRSKYLHLTMRRGRKIAKVAMARKLAIRLFWMMRQGWNYQQVMKFGSHVGQPGYGPDVQ

SEQ ID NO: 86102 - protein, 478 aa, unidentified
MDDRRLVGIDLGITSAHTVRVLSGEGATVCRRKAAPTLHGLAEVERAALAGAAPATRLEVVIEPTGPAWLPIAVFFCSRGHTVYRVSSAKAHDLRRFLHRHAKSNGIDADTLARLPLVDPAGLHPLELPDAERAALDRRVRACDRLTQQAATHKRRIKDLVRQLLPCSPLVGELGMADLAVLERYADPHALLAAGRARLARVIVKASGGHLGAARAEQWLQAANAALDLYGDHPAVAFKDLAAEVATEVRLLRVTQAELAAHATQREACYHWVDPLALARSLPGLAEIGGPALTATMGKASRFPAASKFRAFTGLAPRASETGQTDRKPQPISKAGNRLLRTTLVRAADNARHIDPQLARIYYVQMVQRGKDHLGAVCVVAAHLAERAWTVMDRGMPYVVCDTDGVPVTPQQAKAIIAEHWTVPEEVRRRRRSRKGKAPQQVLQGHVTGAQGATRRPSPSPASLGRRAGRVKQARART

SEQ ID NO: 86103 - protein, 356 aa, unidentified
MQHQPYRGTHMNTTKVYAGLDIHATNTVIQSIDREGTIMSGQELPTRAEALIRWAQSYPHHHQVQVILEQGTHARWVANALAPWVERLVICDPAENALIHQSENKNDRVDAYKLARLLRLGEYKPVWWQPMEDRHVFKSRMKMYLRQRKAKAAGIQRLIGWLRHIGISIPTGQSRFSFKRADQWIGQIASKDHQDLARQKLKFICFHHEQSLDIFREVRRQGCQYWEIPEFVKIPGIGQVGSHLFSAILEDPHRFQRRSQLYKFCQLAITSRRSSGVPVGPERLDKRGYGELKAMSQRAWLGAMNTNEDNEVKRFWRASCRRSASKRNARLNTQRKIIGAMWSLWKHGKPYNPNQF

SEQ ID NO: 86104 - protein, 351 aa, unidentified
MPRKSSVCTVTAIGIDMGKTTLHMVGLDSYGAIVLREKVSRGRIASRLANLPPCLIGIEAGMATHYVARELTALGHDVKQVPPTYAKPFRQGHKNDFRDALAVAEAVQRPTTRFVPPKSNEQLDLQALHRVRSRLVSQRTAVINQIRGFLLERGIIVRQGLRFLRQLLPDILAKRTDVLSPRMVRIVSDLAGDWRQLDDRIEIVTDEIETLAKADDSCRRVMTVPGIGPIISSAMVAAIGNGSAFSKGRDYSAWLGLVPKQMSTGDRTILGRISKRGNSYLRMLFIQAARVILLRPANWPKHGFGAWLVRAIQRLHPNVLAAALANKLARIAWTVLAQERSYEARVTKAEA

SEQ ID NO: 86105 - protein, 341 aa, unidentified
MKNLFIGVDFSKEKVDVAIIFADGLVETAARVFKEFKTTVSGYRQLVKWVEQNSCGIDSSLWLFCGENTGDYSKGLCNFLYGKGYDMWLENAKSIKDASGLRRLKSDRADASMIAEYAMRNYDKAVMYEPLSESLAQLRELFLYRQMVVRHRCSFQVRRGEKRLTMEKSPVKTMISQSGRHIVSELNKEIEKIDKRIVELIKSDEELTEVFTIVTSVPGIGTQNAVCLMVYTDNFRRFNYDSRKIACYYGIAPFGKDSGTSVHSDPRVHYMANRQIKAMLTQATLAAVKFNPVMARYYMRLVERGKKKQVALNNVKNKLVHLITAMVRNRQLFSPEYKISA

SEQ ID NO: 86106 - protein, 347 aa, unidentified
MTLVGCDLHSRDQQVAVLDTATGEVQERRLVHEGDTIEQFYTSLTGPVTVGIESTGYALWFHALLQRLGHEVVVGDAAQIRAMVVRKTKTDRRDATHLLDLLKHGRFPTIWLPDPAVRDQRALVTHRMRLVRMRTMVKNGMHAIALNHRLALGPSLFTRSGVSQLQALSLPPHTSRRRCESLKLLSWLNTHIKGLDDQIEEAAHAHPDARRLMTHPGVGPLSALTTVLVLGPVTRFPTSKHVVSYVGLAPAIESSAGKHRLGRITKQGNALLRYLLGQAGQAAIKRDADLKRLYYAVLHRRGRSRAKVAVARKLLVRLYVMLRDEVDYRTFLDRAPAARRKEMSATP

SEQ ID NO: 86107 - protein, 347 aa, unidentified
MMVVLGTDAHKRSHTVVAVDEAGAQIGELTVAATSDGHLRALCWAGQFDSRRWAIEDCRHLSRRLEADLLAAGEWVVRVPPKMMAGVRRSARTRGKSDPIDALATARAALREPGLPVARLDGPSREIKLLVDYREALVRERTATQNRLRWRLHELEPGFDPPTGSLNRYKTLDAIDQFLNGHDGVVATLAAREVARIRDITQQARQLERDIAALVANVVPSLLALPGCGTLTAAKLVGEAADITRFRDRNAYAMWAGAAPIPVWSANNERFRLNRGGNRQTNAALHRIAVTQIRMHPDAQAFMARRLANGDTKRQALRALKRRLSDVVYRTMIQNTQTLQAAQPQAA

SEQ ID NO: 86108 - protein, 347 aa, unidentified
MRFYTKQHKFYCGIDLHAKTMYLCILNQEGKIVLHRDIKTDPDTFLKTIKPYRKDIAVAVECIFTWYWLADLCTKENIPFVLGHALYMKAIHGGKAKNDKVDAYKIAALLKGGMMPMAYVYPSDMRSTRDLLRRRNHLARKRAELLAHVQNTNHQYNLPAIEKNLGKKGNREGVAKRFPDACVQKSIELDLGLIDHYDQLLHRIEHEISLIAKVDDADSYFRLRSIPGIGRILGLVILYEIHDIDRFPRVQDFVSYCRLVKCAKESAGKIIGASGKKIGNAHLKWAFSEAAVLFLRRNPQAVAYRNKLARKHGAAKSLTILAHKLARAVYHILKRKEVFHPEVFFAK

SEQ ID NO: 86109 - protein, 412 aa, unidentified
MQVIHERCAALDIGKSVVVACVRRPHKGGGREQEVRTFEAFLDALERLRDWLTAERVTHVAMEATGPYWRPVWYVLEDAGFELVLVNARHVKAVPGRKTDVKDAVWLAELLECGLLAGSFVPPPVIRELRDLTRYRKRLIQDRTREAQRVDKVLQDAAIKLGSVASETLGVSSRAMIEALIAGERDPQVLAGLAKGRLRVKIPDLVRALHGRFGAHHAMLLRLHLDHIDHLDATIAALDDRVDEVMDPFATSVLELLVTIPGVGKRVAEVIIAEIGVDMSVFASAAHLASWAAVCPGNNSSAGKHYSGATRQGNVWLLDALTQAAWAAGRVKDDYLSAQFWRLARRIGKKKAVVAVAHSILVIVYHVIATGQPYHDLGSDYFSARVDPERRARHLARQLADLGYQVTLSKAA

SEQ ID NO: 86110 - protein, 408 aa, unidentified
MNAVGIDVSKGKSMVTALRPMGEVALLPREFLHTEVGLEQMAYAIITLGEDTRVIIEATGRYHEPVAAALHEYGIYVCVLNPLYIKQSGGGSIRKVKTDKADAMKIAKYGLDNWVDLREYTPMDTVRQQLKLCSRQYNLYMKTVVSLQNNLISLTDKTFPGVNELFSSPERADGHQKWVDFVMTFWHCDCICRVSEKAFTERYQKWCKRKGYHFSTEKALDRYAGSCGHFTTLPKNDNTKLLITTAAQQLLAGKMTLAALRAEMTRLAMQLPEYNTVRAMYGVGETTAAQLMAEIGDVRRFPRRSSIVGFAGVDPGVDDSGKHSAKSVPTTKRGSPHLRKTLYQIVCTYLRKAPTNEPVYQFLDKKRAEGKPYFVYMTAAQNKFLRIYYARVKECLAAFDAQQETAQS

SEQ ID NO: 86111 - protein, 283 aa, unidentified
MTIDESTIANSQPALKSGPSAPRVGFEATGGQEWALWKALVGAGINAVQLPPAQIKAFARSHGIRAKTDRIDAKLVASFMAFRPEAGRALPTEKLQILRTLTTRLAQLVGMRKRLVLQISARTRQAIPAHVDCMEDELNALLDAQILELESRIERVITQGKTLDDKAVRLRSIAGIGPVSAAMLIAEMPELGKMTSGEAAAMTGLAPVPYDSGTMRGKRMIAGGRRALRHVLYQAALAAAYHNPVLKSVAQRLKERGKPHKLVIVAVARRLVTIANAILKSGA

SEQ ID NO: 86112 - protein, 409 aa, unidentified
MDQLIERCCGLDVHRDTVVACVRGPGPNGRRQHEVRTFGTTAVELLALRDWLEAHAVTDVAMESTGVYWKPVFYVLEEAFTCLLVNAAHIKQVPGRKTDVKDCMWIAQCLEHGLLRGSFVPPAPIRELRDLTRHRKVLIQERTRAANRLHKLLEDAGIKLASVATNILGVSGRAMLAALVHGTTDPAVLADLARGKLRKKLPALRQALAGRFRPHHAFLVSQLLAHVDYLDEAITTMSEEVEERLAPFAAQLTQLDTIPGINTRTAEVIIAELGVDMSCFPSDRHLASWAGICPGNNESAGKHQSGKTRKGNRWLRMTLIEAAGAAIRTKDSALGARYRRVMRHRGHKKAVVAVAHAMLRAVYHLLAEGTTYREPGADYSDRHHTHRVTRRAIQLLERQGYRVVLEPAA

SEQ ID NO: 86113 - protein, 361 aa, unidentified
MGSIVSERYQYVIGVDTHAATHTLAVLAAPSGAIVDQDTFPTTPSGLGLALSWIARRVGEASVLVVVEGTGSYGAILAERLELAGYRVVEAARVPAGGQRGVGKSDTLDAARITRAVLGLSEDQLRTPRTLSAGDDASGGARVAHRVLVVARDQMAGERTRAINSLTALLRTVDLGMDARKPLTAAQLTTIAGWRDREENLARRTCRAEAVRLARRITTLGIDLATNKRGIAELIDDAAPELLQLPGIGPVVAAAVLIAWSHPGRVRSEAAMASLAGTCPIPASSGNTVRYRLNRGGDRRLNRALTTTVIVRMRIDPATRAYVARRRAEGRTSKEIMRSLKRYLTRKLYRTLAAAHPVAAT

SEQ ID NO: 86114 - protein, 353 aa, unidentified
MISELTASPKLYIGIDIHKKTWSVSMRTDLFDHKTFSIPPDSHNLFHYVESHFKYHEVHVTYEACCCGFVAARDFLNFGWRVTIVNPADVPTSDKHHYQKTDSIDSRHLCKQLSLGNLRPIYIRTEQEDLLRSLLTQRDQITKQLRKVKTHIKSFLLLHGIQVPEEYDNSNWSKGFISWLKCLEWTHSTGLISLQSKLRSLEFHHKEYLLIGNELRSYCRKYHKKDYYLLKSIPGIGGFLSAAIIAELGDIRRFQNESQLASYIGIIPGIRQSGNSETKLGITPRSRELLRSYLIEAAWIAIRKDPEIQSYYRKHAHKNPKSVIVKVAHKMVRRILSIIKQEKTYEINTNQKD

SEQ ID NO: 86115 - protein, 366 aa, unidentified
MDTIYIGVDFHARQQTICYLKTETGELVTCELKHQDKQKVRAFYGQFGGPVIVGLEASGYSPWFERLLEELGCEVWLGHATEIRRRARWRQKNDRRDAELILELMLHNEFPRLHRGSVQSREVLRMLRYRQKLIKIRTMSKNSLQAIALQSGLARGSRLFTKEGQQQLSTAEMSPVIHWQRAHWLQLMEPLNQQLIETMVWFKAESKGDVRVMRLRTHPGIGLLTSLCLVHTLQPVSRFRNTRKVVAYAGFDPVERSSAERKCFLGISKAGSRLLRYLLVEAAQTAVRKDEDLKRFYQRLADRRGRPKAKVAAARKLLIRAYIMLRDEIDYAEFRHRAVAARLARRGQGPSNVPEVLIGQPASPEQ

SEQ ID NO: 86116 - protein, 351 aa, unidentified
MIIIGCDFHTRYQEIAWLDTDTGEIHEQRLEHAGDEVRTFYAAWSGAVRVGIEATGYSQWFERLLHELGHEFWMGDAAAIRASVVRKQKTDSRDAAHILELLVTERFPRIWVPTPAERDLRQLVLHRVKLVQMRTKVQNQLQAMAMGQGLCRKKKLWSVRGRVELESLPLDQWGQRRRQELLQLLDQLDGSIRELHGAVEQQARQHPQAARLMTHPGVGPVTSLAFVLTLGPVSRFARGKKVASYLGLNPSEHSSGGQQRLGSISKQGNSTMRWLLVEAGQTAARYDPALGRMYQRLKFRRGSAIAKVAVARKLAVRLYWMLRSQSDYAHLVRMSGSSSSAVVPEVQGSGR

SEQ ID NO: 86117 - protein, 361 aa, unidentified
MKRALKDNQEAFAGHEFYIGIDVHQKQWTISIQRNQLPLAKPLTIDPSARSLSSYLKRQYPGGKYHAVYEAGYSGFWPARDLLTHEIDTIVVNPADIPTMHKERSTKTDSVDSRKLARSLENKELRAIYIPERKAEEYRLLNRYRSQLVRDETRIKNRIKAILAEFNYRVPVDLEGNRWSGAYLRWLQTITFETPYAQIAYNERLEHLAESRKRLAKVLRELKLMATQEPAIASLVKLLQTVPGVGFLTAILLVVELIDMHRFKRFDNLVSYIGLAPSIHQSDEHSYSRGLTKRQHKELRFRMLESAWIAVRKDPALTMKYGQLCKRMNKNKAIIRIAKMLLSRIRTVWITQTPYVYGVIE

SEQ ID NO: 86118 - protein, 328 aa, unidentified
MCTLGIDVSKNKIDLCLLTAGPGGKKKHKVLTNEPAVARKVVDWLNAQKCVPESVTVVLEATGIYHENLAYGLHEAGVSVCMANPCRVREFAHGMDILNKNDAVDAFVLACYGELKSPAVWVPPSPEVRKLRALLRQRDALREDVQRTVNRLEKANSTSTPQEVIRSLERTKSWLNEELARIEKLITDHTDNDPGLKADLDLLKSIKGVKDQVGREMLALLKDGMFKSASQVAACLGLTPVEKTSGSSVRGRPHMSKTGPSGVRAKLYVAALTASRWNKQAKAIYERLVAKGKAKKAALGAVMRKLVHLCFGVLKTRLPWDENYVATA

SEQ ID NO: 86119 - protein, 386 aa, unidentified
MIYVGVDVAKNTHYACITDDKQQLLAKSFAFTNDEAGFAKFRGSFQKYPKAKVIVGLESTSFYGENLIAFLAGLGYRVALINPIVISDSRKNRIRNAKTDPIDAKLICKYLATEEYRLLQPRELQMLSLRALCRFRQTMKKSKNRLKTQLVSYLDLCFPEYATAFSNVHGKGAYAALLEYPSAGEMAKASVIRLSNVLRSASHGRLGRERADLLKRLAKHSVAAKSNDMSVQIRHTIPQIQLIESQLAEVERRIEKTFDELDSVIRTVPGIGAINGSMILSEIGDIRRFSTPGQIIAFAGLDPVVRQSGKFRAKTTRMSKRGSSTLRYALMNAAWNVSLNNQTFGDYFAEKLVQKNRHYAALGHVAGKLTRVIFKMLKDNVAFDLP

SEQ ID NO: 86120 - protein, 329 aa, unidentified
MDISKATLDASVLSPTDISTIYYQQFANNPKGFTLLLKWIKQKSEGVPVAGWKVCMENTGIYSLELNCFLHEKGIWQCLENALQIKRSMGILRGKNDKADSKTIALYAYRFTDKLRPYMFPGKVLLRLKALFSQRERLVNMHRQVQLGMESLNGYDQKLVADIRKQSDALLHSLAAQIKDIDQSLQQSLKEDAALSKKAELMQSVPGIGLQTAVYMLIASKGMQAFDSPRQFACYSGCAPFEHRSGVSIRGKNKVHFIANRKIKSLLHMAALSAIAFNAELKAYYRRKVDAGKNKMSVLNAIRFKLICRTFAVVKRGELYQLNYNKLVA

SEQ ID NO: 86121 - protein, 338 aa, unidentified
MKLYAAIDLHSNNSVLVILDEMDRTVLQRRLPNNREQICQALCAHREAIEGIAVESTYNWYWLVDGLMEAGYRVHLVNTAAVKQYEGLKHKEDVDDARWLAHLLRLGILPVGYICPKEARGVRDLMRKRNQLVGQRSRQILSIENVLSRDTGGRASANEIKRWQETDVDQLALGESSRLAVKSHVAVMHCLNEQIERLEAEILKKAKLRPDYQGLLTVSGVGKVLALTIALETGEVSRFATVGDFSSYCRCVGSEHLSNGKKKGSGNVKNGNKHLAWALVEAANFAVRYEPAIKRFYQRKCARTMPVVAIKAVAHKLARACYHVMRDRVPFDVQRAFA

SEQ ID NO: 86122 - protein, 278 aa, unidentified
MASVSHLVPIHLGLDVHKDTISVGILDPDQQVPDVERISHDEPSIRRFVARFAEPRALRACYEAGPTGFELARLLSSMGVGCEVIAPSLIPRAPGDKVKTDRRDCRRLARLHRAGELVAVRIPTVGEEAVRDLCRTRADMVEDLTRARNRLGKFLLRHGRPWRGSSTRTQAYQAWLRSQRFDQPAMAQTFGHYLAVVEVRNQALDAVEADLVGWCQRPPFDWQVARLAAYRGVTRLGALTLAAEVADWRRFATAKAFMGFCGLVPSEYSSGHTVHRAG

SEQ ID NO: 86123 - protein, 370 aa, unidentified
MNENTTVLGLDVHKETIAAALLPAGAGMVRDLGVMANTPEVMRKLLRRLRPHGDLVAIYEAGPCGYTTQRQLAALGVPCAVIAPTLTPVRPGDRVKTDRRDAAKLARLYRAGELTEVQVPSLAEEAARDLVRAREDVVANRLRARHRLGKFLLRLGHMWREGRAWTVKHLAWLRAQRFEEPLQQQTFDAYGRGLAEADAHLATISQQVTDAAQGLPWRPVVAALRCLKGVDTLAAMTVAVEVRDFARFATAPAFMAYTGLVSREDSSGSRIRRGGITKAGNAHIRRVLVEAAWHYRHVKNAVSPALAARRAVVAPAVAGLAQRAQDRLQRKYWRLVSRGKSTQVAVVATARELAGFMWALARAATAEAKP

SEQ ID NO: 86124 - protein, 427 aa, unidentified
MPYRIAATDVHKRMLAVVVSDVEVAEEFEFERRQFGTSPAQLRLLAEWLVERQVKEVVMESTAQYWRPVWEALEQYWKPICQKWEGASAAWGALHLAQAQSNRGPRGRKDDFADAERLVKRLVASELVLSLVPDPEQRLWRTVTRTKYQLRRNRVQLQNRLEALLEQAHLKLSSVVSDLLGVSAWRMLKGIADGETDPAVLAGMAEASLRATPKELYDALSPAQELHPVYRRLVKMALDELQLIDQQISELDQEMAGLLRRHQDQVQRLAEVPGLGVDSAQQIIAEVGATAATFPSPGNLSSWVGACPGKEETAGVNHSRRSPKGNRHMRRLLNQAALAAVKQQGSIFQILYRRYVPRMGHQQTIAVIAHRLCRLIWKILHQGVRYQERGPDVTERSQRQRTARMIRQLRRLGYRVELVSPPSPVPA

SEQ ID NO: 86125 - protein, 324 aa, unidentified
MKYIGLDIHKKHTQACVRNEDGEILCEERIRTDAADIDSFFEKLESGQDGGLAVAMEATGFYFWIYDRIAAREHKVLVVHPGKAKPLMRAKAKNDRNDDAALSELLRSGCLEGIYVPPKDVQEMRELTRHRETLVRKKGDLKREILSALMRLGIAVPEEFRSNFTKKQVIWMRSLEVFVISERLDMLEQTARKIENVEALIAERWGADEGMRIIRTVPGIGLVTAAVIRVEIGGVRMFASPERLATYVGLTPTTYQSGEKKWSGPTRRGNSRVKHVLIEALLSHVWHCPDSRISQYDRRKRDAIGRKKALVASARKLMEAFHAH

SEQ ID NO: 86126 - protein, 429 aa, unidentified
MSNFFNDFVVGIDVSSKSSVITILMPGGEAYGKKISITNDLKGFDKLLLILTDITGNFSKRPKIFMESTGLYHIPLLNYFSKNNFECYVINPIHTKNFAKQSIRKVKNDKVDSLRIAQLAQSPTFSNESFFDEDIFLLKKLCREYDSLVSHRAHYKKKVLSSLNLVFPKFNDIFSDTFSAVPLAILSNYPTYKDFLSAHKSDVVALMKSTVSHSTEWADKKYKLIYSSAKEAEMLKLPTTCLGTELACFINIIKTFSKSIDDLKEQILIFHKQIPNFEDNAKLLCTHPEVGLLSAISFLAEIGDIQNFSSPKKLVAFLGVDTSVSQSGAFTSTHNKLTKRGSNLARKILYNLAIASIKTLRNGASANPVLLTYYNKLIKSKPKKIAICAVMHKLINHFFAILRDKKEFELRQPEVHKQLYLNKNLRVVI

SEQ ID NO: 86127 - protein, 404 aa, unidentified
MTAAVEEDTVGQRVFGGVDSHADTLHIAVISDNGGHLADAEFTTTAAGYAAALAFLNAHGHVSAVGVEGTSSYGAGFTRTARRQGLHVIEVNRPDRAERRRIGKSDPIDAYAAARAALSGRAHAAPKDDAIAGIRALHNAARSAVKARTAALNQIGHVLISAPEAIRAKYGRLTGRARTDALARLRPAGNAVNVAVLTALKSLAQRVKELTDEHKALTKALDADVTAHNPGLRATHGVGPDTAAQLLVTAGGNSDRMRSEASFAALCGAAPVPASSGKTNRHRLSRGGDRAANAALYRIALVRMSSDPRTRDYVTRQTTAGRTKKEIIRLLKRAIAREMFRCLTTAVLVPGTDDLRPLRQSKNITLTAAAGHFGVWPATISTLERGLRRDDALAHAYRDWLKAA

SEQ ID NO: 86128 - protein, 346 aa, unidentified
MEHYVGIDVSLELLSVCVVDGRGKIVKEAKVASEPEALVYFLKELGFPVNRIGFEAGPLSQWLHAGLTQAGFEAVVLETRHVKAALSAMPVKTDRKDAFGLAQLLRMGWFQQVHAKSIGSQEIRALLVARKQLLGRLLDVELSIRGILRGFGLKVGQVTRKTFEARIRELVTGHTTLERIAEAMLSARATLKAQYEKLHKAVLAIVREDAVCRRLITVPGVGPVVAVTFKSAVDDPSRIAKSKAVGALFGLTPRKYQSGEKDVTGGITRTGDEMVRTALYEAANVLLSRITRFSKLKRWGMDVAKRRGSKRAKVALARKIGVILHRMWIDGTTYRWAEAKPIAAQG

SEQ ID NO: 86129 - protein, 427 aa, unidentified
MSETNCNKQAERRQKISKSTLIVGMDIGSEFNAMALMNETGEVLGRYPKVFNSREGFEYFERSIEEIKRRKGLKKVLIGMEPTGHYWRKIAYYAKEQGHEVRFIRTTALRHQRELDESSSAKTDIRDAVTIANVVREGKYIDTVIEDGIYRQLRMLAHVRENIQRYNVGTKHRLAAVLDDYYPELKEIFWSMKAKGLWAVLEECPFPEDVIKRSVEQIAELIGKSSKRKGKALEKAKKVYQGAKETIGLKNVSEADRYRLRSCLEEIKRCEEQMKEVEGQMEGLLGQIPASEILMSIRGVGMITTAVFLGELGDPKNFSNPKRIIKYAGYDPQENDSGKSVGRKRISKKGRWLLRKYLYFMGLRVLYRNTFFRKYYERKLKVKNCWGQLLKKKEAICAVVIKLIKVIFALLRDNRKFTSARPVAVAV

SEQ ID NO: 86130 - protein, 411 aa, unidentified
MEVVHVRCAGLDISKKDAKVCVRVAGAGRRKTVETVTTWSSMTSQILALREHLIAERITCAVMEATSDYWKPFYYLLEDAGFDVLLVNSRHVKNLPDRKTDVADATWLAQLGAHGLVRASFVPPAPIRQLRDLTRTRTAITRERSREVQRLEKLLEDAGIKLSAVASDIVGVSGRAMLESLIAGNSDPAALADLAKRRLRSKIPALTEALSGRFTDHHAFLARVHLDLIDQHTAAIDEITIRIEQLIAPFHGFRDLICTIPGVSTLTADVIIAETGADMTRFPTAAQLASWAGTTPGNNASAGKVKSSRTRPGNPYLQGALGAAAMSCAQNPRTYLGARYRRIASRRGPQKANVAIQHSILIAIWHMGTNGCLYDDPGADYFNRLHPDRAKKRAINQLEAMGYQVTLTHAS

SEQ ID NO: 86131 - protein, 411 aa, unidentified
MDKVYDKCCGIDLHKKLIVACFKQGNRQEIRDFGATTRELLEMADWLKEGGCEMVAMESTASYWKPLYNILETCGLKAMVVNAQHMKAVPGRKTDVKDAEWIADLLQHGLLTASYIPDKDQRELRELVRYRKSLVGERARELNRLQKMLEGANIKISGTIRDINGKSARNILEHLLSGKQIDSAEYDILYEKKVIAHNLKATKEQIIDDLNGVMSALQKKMMRIILNHLDELNAHIRELDDDIDNFMKPEEKEAAKVIQDIPGIGNTSAQAIISVIGADMSRFPTDAHIASWAGLCPGNNKSANKRKSGKTRKGNGLLRDTLIVCAHSAVKNKSSYFHAQFARISAHRGSKRAYVAVAHSMLVAIYHILKEGVAFKDLGADYYNQFNRERKINAYLKKLKALGWEVPVVAA

SEQ ID NO: 86132 - protein, 454 aa, unidentified
MAPRHQKTKQKNHTQLPTFHPHAAGIDLGAREIWVAVPPGSDPKPVRGFDTFTDELLKLRDWLLACGVQTVAMESTGVYWIALFQILEAAGLEVCLVNARHCKNLPGRKTDIQDCQWLQYLHSVGLLRGSFRPPEHICALRTILRHRSRLVRCAADQVRLMHKALTQMNVQLQHVISDLVGVTGEAIVQALLAGERDPVQLAKLKDHRIKASHDTIARSLRGDWRPEHLFTLSQSYQTWQHYQKQITACDEQIELQLAHWDARVDVQAQPLPAPRTTHRTAQRNEPQFDARTECYRVLGVDLTQVPAFQTPTVLLLLAELGPDFAGKFPTAKHFASWLGLCPDNRITGGKIMSSATRDVKSRVAEALRLAAQSLWHAQNYFGELYRRWKARLGGPKAITAMAHKLARILWHLLKFRQAFNPDVFRKEEEKMRRKKLARLQNTAAALGYRLIASQ

SEQ ID NO: 86133 - protein, 397 aa, unidentified
MYIVGIDIAKRKHEAAVIDGEGAVIIKPFSFTNNCSGYNRLLAMLAKAKLPLDEVSFAMEATGHYWLALFTRLQKEGFRVQVINPVQTNSIRSFYIRQSKTDPRDALLIAEVIRFGHFSESTLHPENIYELRELCRGRHAIVSMQADVKRKVVALLDQVFPEYETAFTNMFSDTSMAILQTCPTPKELSEMPLEELCHLIEVSSHKRFRMAKAQELQALARNSFGFAMAGDVFSTMVRLYAKHLDFLKQQVREMDRKIAEIMDTLDTPITTITGIGPTLGAYILSEIGDISRFSSAAKLAAYAGIDPTMRQSGEYNGIRNRMSKRGSPYLRHAIWLAASSAVLHDPALKLYFQKKRDEGKPYMASVGHACRKMVSIIYAVMRDNKAYTPCIPNEISA

SEQ ID NO: 86134 - protein, 438 aa, unidentified
MSNKVIFNLDELFISVGIDVGADFSWMSIALPNQQFVGKPYKILHNSIDSLTTAVSKIKEAEELYSLESRIFLESTGIYHYPLFCYLRDKGFNCSVINPIITKNSTNINIRKVHNDRFDSKKAALVGLKPDLKVSLMPSDLALNCRNLCREYYDLIDNRSAYVNKLQGELRMAFPQYLGIFSKVTINTSLTLLETYTSPSAFLKADKQEIIDIIKSTARFGLTYAQNKYNAIIQAATDANQFGYIIDSNIKRIRLYISFIRKYDEEINSILESLHELVDANEDSDFVKQIHLIETFKGAGFLSAVSIMGEIGDFSAFSKPKQLFAYFGLDPSVKQSGKFEGTKVQMSKRGSAIARRVIHTLTLQSISISRNREAKNPVLREYYLKKCDSKPKLVAMGAVSHKVCNMIFAILRDNKPFKIIAPQEHIKQYNAAKCDIAA

SEQ ID NO: 86135 - protein, 317 aa, unidentified
MEGLSPIHRRVAGIDVHRMLHVVTVLIEQPDGSIERMSREFGGFRRECRALADWLTDLQVALVVMESTGIYWKSVFSHLERAGINAWVVNAHFIKHVPGRKTDMADSEWLAVLARFGLVRGSFIPPQDLRELRLVSRYRRKLSAMLTSEANRLHKILDDGGIKLGAVVSDVKGVSARAMVKGLIEGQSQSELQAHARGALKRKTEELSASLEGDLSGRHLFVLGQLSRHIDALEHQLAAIDAELLAGMQAYAWAHRLLQTIPGIDQIAAATIIIEIGDDMARFGSPERLACWAALSPGNHESAGKRKSGRTRCYVPH

SEQ ID NO: 86136 - protein, 325 aa, unidentified
MPTYVGLDVHRSVCQATVISEHGIKHVRLPNERQALRRFFTSLEGTEVAMEATYCWQPIYELLEELGHRVRLAHPTRTRIIASARIKTDIRDSEALARLLELDWLPEAYVPPKPIRDLRELVRLHAFLTCEATRLKNKVHAELAKLGLRYGSNPFTKRGRCWLRGLSSRTINACLDVLDAVERKLRELKDEMRARAGDHPEAELLQTIPGVGLYTALTIVAELGEVTRFPSEKHVSSYAGLVPSVYQSADKQRTGSITKQGSALLRWALVQCAWMHVMHAPDSKLTRYFWRIAKRKGKCVAIVATAHKLLIVIYHMLLRGEPFRG

SEQ ID NO: 86137 - protein, 458 aa, unidentified
MGKNKLKGATMKRFYVGADASKGYCDFIVLDENLKVIEEHFQLDDIYEGHKVLLRIIKNLFRIHKQLTVYFGIESTGGYENNWFSLIWELKDEYNIKLIRLNPKNVYHQKKASQNKITTDKQSAKSIAEYVKLHENKLRFNQDQQYTDLRKLWSHLKMSKKQFCQSTNQLEKYLYSANPEILSYCKHNESDWLYKVLKRYPTAVKLSRARIKTLCKIPYVTEQKARELVNRAKNSVASFTSELAERLIVRMVDEIILLRKVIKEMEEEIIKICNIPEVNLLKSFSGISDVSGCGLILEIERIQRFKSAKKLASYFGVHPVFKESGDGVSCPKMSKEGRSEGRRILFNVVKSAIVHNKWIKQLYEEYQKKGKSKLSAMGILMHKILRMIYGMLKNKTKYNPDIDKRNRKRFFKMKEKNNNRKVDKTRRFQSENDNSPISRRQYKKRKEQNAASPNDFDH

SEQ ID NO: 86138 - protein, 401 aa, unidentified
MSASHERIWVGIDAGKGHHWAVAVDADGEILFSTKVINDEAQILALIETAREKAGEIRWAVDISGRASTLLLALLIAHGQHVVYVPGRTVNRMSGAYQGEGKTDAKDARVIADQARMRPKGFTRLTTPPELVSTLQVLTNHRADLIADRVRLINRLRDLLIGICPALERAFDYSAAKGPIVMLTEYQTPAALRRVGVKRLTTWLERRKVRGADTVAAKAVEAAQSQLTELPGEKRAAKLVRDLAHQLLALDERIKDNDREIRETFRTDERAEIIESMPGMGPILGAEFVAIVGDLSGYLDASRLASHAGLAPVARDSGRRTGNYHRPKRYNRRLRHIFYLAAQTAMMRPGPSRDYYLKKRGEGLLHTQALLALARRRVDVLWAMLRDKRLFTSVPPVTQAA

SEQ ID NO: 86139 - protein, 362 aa, unidentified
MNATTYGMDIAKNVFQVHWVDGNTGEICRKKLPRGKVTEFFAVRPAGRIAMEACGGAHHWGRTLGPLGHQIELLPTHQVRPFISGNKDDAADARGIWLAAQHGDIRRVAVKSSEQQAMLSLHRMRTHWVSVRTATVNALRGLLYEFGVTLPRGRHSGLRQLAQQRAEINDAVPAVMVRLVDDQLLALADIERHVQAMEEEISLMLKSQESARRLRDTPGIGVLGATALAATLGDGTSWRNGREFACCLGLAPGHRGTGGKVRIGSISKRGNAYLRTLLINGARALASREHPAPWIVALLGRRPFNVVVVAIAHKLARIAWALVAHGRAYEASWKATAPRQRVQARCKPVLHDQRRGDAPQCA

SEQ ID NO: 86140 - protein, 346 aa, unidentified
MLYAGLDLSRKRLDFRLLDEAGETVAIGAAPPDADGLRGLAVRIARFQQPVRAAMESMNGARFVHDQLEQAGWEVEIADALKVKGLAPLACKTDRIDAWVLAELSRRQLVPAIWLPDPEVRAERERARFRLHLVRHRSSLKHRVHALLLAHGRPCPLSDLFGASGRALLERLALPEPWAGTLRASLRLIDELEQEIAACEHELQRLGADHRYVPLLMTVPGIGWVLAYTIAAEIGDIARFPAPHKLAGYTGLCPRVYQSGESDRRGPLAKQGPKYLRWALIEASTHASEHPLHRQRYQRTKTRLGKQRGAKVAQVELARRLAEAVWHMLTRNQPFAPAGATNPLAA

SEQ ID NO: 86141 - protein, 343 aa, unidentified
MQTTTANTLYAGADLHGNNVVLAVIDEEGTTVFRRRVKGNIKAVNAALDPYWDRIKVLGVESTFNWYWFVDGLRDQGRNVKLGNPAKMEQYNGIKVTNDLTDAEWLAEQLRLKIFPECYIYPKKLRTVRDALRGRQLFVRRRTQVLLSFQGLIERYGMKSPSAYNAAKWKNSDVHDLGLEPFVELKLEALLSSIHHSDMLAKRIEKQVLKTIKATDQYKLIQQVPGIGIVLGMFIALESGDFKRFASAGRFASYCRTVKSTRTSNNKSKGKNNAKNGNKFLSWAFIEAATAAARSYPEINSWYERKKRRRNTSVAKKALACKLAKSVWHVMNGKDFDMKLMFG

SEQ ID NO: 86142 - protein, 405 aa, unidentified
MLYLGIDLHLKQITVSLRNEGGDVVLRRQVSTRWPKLAEFRTQLAEAAADDEKYVAVVEVCGFHDWFVKWLRGDPRCHMVLLVQPLGRSAVKTDRRDAHALSELLWINRERLLRGERVHGVRTVHQPDEDQQADRRLTQLRERLVWRRTQTINQVHKILRRNNLEWDRPTKTFQTCKVIRWLRSMQLNSMDRLAMNQLLVQWKLWEEQLLEVDTRMTSRFLANRDAQLLATIPGVNTYIALAIACRIAPIERFPHGRSLANFLGLTPGCRSSGETERPGSITKVGSRMVRSLIAQVILHLLRKDGAVRTWYQRIKRRRGSRIARVAVMRRTAAIMQRMLSKGEPWRAEKVDSATSETENKRRRVQPRQRRKTVPSALAERRTESPSSSTGSSSLLTGEEVAQCPV

SEQ ID NO: 86143 - protein, 425 aa, unidentified
MDVMHERCAGLDVHKATVVACVRTVTGGKVNRECRTFDTTTAGLLALLAWLTESGCTHVAMEATGVYWKPVWNILSDGDFELMLANAAHIKNVPGRKTDVNDAMWIADLTACGLIKASFVPGEATWELRSLLRARKQQTREQTRDIQRIQKTLEEANIKLDSVISDILGLSGRRMIKAMIAGVTDPSKLADLADRRIKATREELRDALHGRLTDHHRFLLGIYLKQYDALDALIMEIDRRVDASVARLDEETKAQAGQCPFRSLIELLCTIPGVSTLGAMIILSEIGRDMSRFPTAGHLVAWAGLCPGQNESAGKRRSSRLRKGAPWLKTLLVQCAWSASKKKDSYYKAQFHRLKAKRGPKTAICAVAAAMLTAIYHMLKDGTEHQDLGARHFDHRSTKLKANRLVAQLSKLGFKVEIQPIAEAA

SEQ ID NO: 86144 - protein, 411 aa, unidentified
MEVIYKRCCGLDVHKEIVVACLVVREGGKVLKEIRTFLTMTVDLVVLHDWLKAHQVTHVAMESTGIYWRPVFNLLEEDFTVLLVNAAHIKTVPGRKTDVKDCEWIADLLSHGLLRGSFIPPEPIRDLRDLTRYRKTLTDERVREVNRLQKFLEAANIKLSSVATDVMGVSGRAMLEALTAGSTDPQVLSELAKGRLRKKLPELKKALEGRFRSHHRFMVAEILTHLDFLDEAMERVSQEVSSRIAPFSKIVESMDLIPGINERVAEGVLSEMGVDMSCFPTDGHAASWAGLCPGNNESAGKRKSGKTRKGDQWLRRYLTEAAWAAIRKKGSYLSALYHRLVVRRGKKKAIVAVAHRLLVIIYHMIKDQASYRELGSDYFNKLNAAYVQRHHVKRLESLGFKVTLEPLAQAA

SEQ ID NO: 86145 - protein, 319 aa, unidentified
MSATTTKVYAGVDVSKGHLEVFVAPTGERFSVPNDDSGVDELLARLDEPSPALVVLEATGGFERPVAAALVASGLAVAVVNPRQARDFARATGRLAKTDRIDAESLAHFAKAVCPAPRAILDEEARALGEILARRRQLVGMLTAEKNRLLTATTKRLKKRIEAHVRWLEKELTRADRDLQEAIEESPVWRENEELLRSVPGVGPVLARTLLAELPELGELKNKQLAALVGVAPLNRDSGILRGRRAIWGGRSGVRAALYMGALVATRCNPAVKVFYERLLAAGKPKKVALVACMRKLLVILNAMLRNRTPWRPSHALTP

SEQ ID NO: 86146 - protein, 428 aa, unidentified
MNETELSRVKEFRQLKKRIQGSENHLVVGIDVAKDRHHAFLGTATGKTLVKKVIFENSASGFSELLARVEAVRAQSGLSGVVFGLEPTSNYHKPLGRYLISKGCHVVLVGGKAVKNNRELLDERWDKHDTKDAANIADLVSRGKCFYYDRPSGQIEELRELHSLRARLKKEEHSLNLRIRNNLLAKHFPELDSFYTASERETLAIVRWCLNPQQIAGMPFDEFFKRVAPNARGIGQKLRLQKIHRLAHESIGCPVDSAVQLQAGLLVEKIKQVREQIVQVEQVIQQLCVQFPSYEHLLSIPGFGPYVASKVLATIADPRRFDTAKQVIRTAGYDLCADRSGKSSDQSVPVISKKGNSQLRYALYQAALIASSRHRFFMAYFARMLQGRERERGIRTKMRVKLAAKMLVIAWTLMKRGELFNPEYLKVQ

SEQ ID NO: 86147 - protein, 388 aa, unidentified
MLDEAGHSVSQLHSAHSPGGLAHLLQTFEQVVGSEPKEQMGCVIETKQNLLITALLAAGWPVYPVNPKSVDRWRSPAGAKSDQLDAYYLAKIGRSDWSQLVRLQPDSELISELKQLTRDQQRLLSQQTRLINQLKACLKAYYPAALHCFPKLAQKSTLAFLRAYPTPEQAAQATEQELVQVLKQAGHTTATRVAPRVRHQLQQPALRADAATSRAKARLLLALVPQLQVVLEQMAAYEQAIEELWQQHPDHEQFASLPGAGERLAPRLLAELGDDPASFEDPQRWQRLAGSVPVLKQSGKQRSVCQRLACVKPLRDVLYLFALQTIKHEPWCKQYYRKKRKEGKSHAHALRALASIWLRIICAMRRNGTCYQREVFVASQHRHQCPAA

SEQ ID NO: 86148 - protein, 371 aa, unidentified
MNNYIMVGCDLHDKNMLIKAAHNREDPFQQSFNNTPGGRKKMVSILKEKSKEADNARIVFAYEASFLGFGLYDELTDAGINCYVFAPTNIPRSVKHRRRKTDARDAQRVFEVIRGHFLAGNKMPSVWIPDHQTRDDRELVRMRLGISKKATAIKSQINILLKRNKFRKPGNIGDNWTKKHRIWLAKSAGSESALPSGTRCALNSLLRQLMAMEDEIVYLDKQIRILAQINRYALPVRELSKLKGVGILTAMVYLTEMGDLSRFKNRRQIGAYLGLVPSSHESGDKNDRKGHITHQGSGRVTGVLCQASWSRVRTDPIEKAAHERVVKRNPKHKKIAVVASMRRLGVRMWHDGLKAQLLAGSFTPQTHQTTA

SEQ ID NO: 86149 - protein, 344 aa, unidentified
MSEVSTIGLDIAKHVFHAHGADERGRAVFSKKISRGKLLDFFAAQPSCTVALEACGGAHHWARQLIQLGHEVRLIPPAYVKPFVKRQKNDAIDAEAICEASQRPSMRFVAVKSEQQQAAGLVFRTRDLLVRQRTQLINAIRGHLTEYGWIAPKGPSHVTMLADRIEEQEMASSLPEAAQVMFRLMLDLLASLNSKIADLDKEIARRAREDEVSRRLMTIPGIGPISATAIAALAPPVETFAKGRDFAAWLGLTPLQRSTGGKQKLGATSKMGERTLRRLLIIGSSAVVQQASKRGAPKGSWLEQMLARKPRMLVTVALANKMARIIWALLVKQENYRAPVAAKA

SEQ ID NO: 86150 - protein, 450 aa, unidentified
MEEPQEVQDEEYERVWERVAAVDVAKASGVVCTRVPDEARPGRRRTKVWTVTATLSAVTELADHLRCHQIEVVTLESTSDYWRIWWVVLEAAGLTVQLVNAVKNVPGRAKTDKKDAVWLAKLTERGMLRPSFVPPYDIRRLREFTRLRADLVHERTRHWARLEKLLERALIKISAVASSLDTDSCRAMIEALIAGQRNPKALAGLAIGRMRPKRAALAEALDGRFEDHHGELARILLDQIDALTGQIDQLTARITELIAAIPAAQGIDADGATGPGAGTGPGAPVLPAVMRLDEITGCGVIAAQAIIAEIGLDMAVFGTPGRLVSWAKRCPQTRQSGTKTTSGKAGKGNPYLNGVLGEIAASAGRTDTFLGERYRRLARRRGKRKAIVAVARSILVIIFHLLADPEARFRDLGPGYYDTHIDRQRKIRNHIRQLEALGLDVTTAPRHGAA

SEQ ID NO: 86151 - protein, 365 aa, unidentified
MQKAELSCEADSENDLGGSSETMYSIGLDVHKRTISYCVKDAAGRVHMEGKIGSTRRELDSWIKTLPQPRTIAMEATIFTGWIYDHLLPHAEKVKVAHPLMLRAIAAAKRKNDKIDASKIADCLRCDFLPECYMTSTEIRDRRRTLRYRGLLVKQMVQMKNRISGLLMEKGVTHTKRRLHKVGYFAELMGGNEEIDQSIRPLLKLSREHIVRAQKLDYALVSSLERDPLLVERLKRLRTVPGVGPITALTWALEIGDVARFRSIKQAISYCGLCGAEKSSADKMLRTPISKQRNKHIQHVLVEAAKLAPRQCHELALIYEKEMQRGNRNRATLAVARKIVAYLLAVERREKDFVPTEEFGGTAAA

SEQ ID NO: 86152 - protein, 312 aa, unidentified
MPLQESPLFIGVDVAKLTLAIQFPDHLWSIANTPAGHATFIAKLSALGAVHVVCESTGGYERALVLGLHAAGIAVSAINARQIRDFARACGRLAKTDDLDAAIIRDYGCRIQPSRDPAPAPGEPEFAELIRARQDLVALITDEISRREHACLPPLLRPSYARQRQLEKQLVTLDALIDAHVAAQADLAAKTERLQQVSGVGRVTALTVVALMPELGTLRDNEAAALAGVAPMNRDSGQHRGQRHIHGGRAALRRVLYMAALTATVHNPILKAFYQRLRQNGKPAKLALTAVMRKLIILLNRLVKNPAFNLVS

SEQ ID NO: 86153 - protein, 310 aa, unidentified
MSVFTNTIGIDVSKDKLDVHDYKLNKHHIFNNDKVGFKKLLAWVKSEHQDRVKSLLFCFEHAGIYSLGLSVFMEENELFYKIIPGLEIKRSTGMARGKNDQIDAFKIAQYAYYRRDELNPSKLPAAELLKLKDLLCLRERMVKQRSGYRAHLKELTRFSNRENNNLLFESQERMIKELCKEIKLVEKEMEQIIKENPAIQVQYKLAITVKGGGLILGGSLIVYSDNFSRFKNWRQFASYVGIAPFDYESGSSIKRSKQVSHMANKRLKALLSNAATSSMVHSPEMRLYYGKRIKEGKNKMLIQNIINSSC

SEQ ID NO: 86154 - protein, 322 aa, unidentified
MLYIGIDISKNTFDVAVLDNDIYKHEQFLNHLKGFKNLERWIKSFKDKPLFCMEATGIYGLALAKYLFQQGYNVIVANPLKTNHFAKMEMSRNKTDKADSMSIARYCKHLENNGQIKKSLFTPKSESYEALQYLNTRLEQLDKLRTQENNRLSVSLNKIAKQSVKSVLKSLEKQVITIKKEMSTIVKQDDNLQEQVNLLTSINGIGEKTAWSILAYIGDISLFSNANQISSFVGLNPQVMQSGTSINKTGLSKKGNKYLRKSLYMPSVVAIRYNPLLKDLYERILSKGKPKKVALCAVMRKLMVLAYGVLKSGKVFEPSYQK

SEQ ID NO: 86155 - protein, 354 aa, unidentified
MMIIGVDYHPSFQQIAFWMEETGEYGERQLNHSDREAERFYRDLHERGILVRVGMEATGFSRWFERLLAELGFELWIGDPAEIKAKRVKKQKYDREDARLLLRLMREDNFPKIWVPSLENRDLRQLLWHRHRLVQMRTRIMNQLQALAMNEGKRRKSKLWSAQGRAELEKLALGPWASRRRKELLELLDRLNPSIEELTIAVEQEARKRPDALRLMTHPGVGPITALAYVLIIGTTERFQRGRQIGTYVGMIPSEDSSAGKQRLGHITKQGNSLLRYLLVEAAQAAARINPHWRRRYMHLAMRRHKSIAKVAMGRRLGIRLYWMWRNGCEYSPSFEFGSYAGQLGIGHGVTTAP

SEQ ID NO: 86156 - protein, 359 aa, unidentified
MKIVGCDFHPSYQQIAVLDTETGEVQEKKLMHAGGEAEGFYGELPVPAMIGMEATGNSRWFELLVEKLGHTLWIGDAAKIRASYVRKQKTDKRDAAHILKLLVEDRFPRLWLPDAQQRDMRQLLTHRHKLVSVRTRLKTELQHLALNQGVQKKRKLWNEQGRALLASLPLQGWTQQRRKDLLDLLRVVEPQIEQLDKAVEQAAEADPQAVLLMSQPGVGPITALAFSVTIGDVSRFERSKQVSSYLGLIPTEHSSGSKRRLGSISKQGNIFLRTLLVEAAQSVVRHDPGFRKEYQHRCHHKLKAVAKVAAARKLAVRLYWMLKSNKSYTELVLNGGSPRHPVAAKANAVRLNGHPRISQ

SEQ ID NO: 86157 - protein, 429 aa, unidentified
MNYNTQNAKIASITEKSLIVGIDVGSETHYARAFDWRNYEYSKKPFAFNNDEAGFAAFKAWMEDIAEKQGKEVVIPGMEPTGHYWLNLGAYLQEQGMKPVHVNPHHVKKSKELDDNNPNKNDRKDPKTITGLVNEGRFSYPYIPTGIYAEIRNLSNLRIQTQEELTRIKNRIARWFSIYFPEIKDVYKNPDAVSGMMVIKKAPLPCDIKGLGVDGVNQVWRDAKLKGAGLKRARTLVSAAEHSIGSTKAPESARIEIRNLLNDYEVYKNRMDDLMREIEAKLSEIPYIDKLMEINGIGLKTVSCFIAEVGDIRRFDNPKQLQKLAGYAIVADSSGKHNGESRISHRGRKRLRYALYEAAISVIGKNKEFREIHDYYRTRKQNPLKKMQSVIAIACKLIRIFYTILTKGVDYDGQKMLSDIVRPETVMAA

SEQ ID NO: 86158 - protein, 361 aa, unidentified
MPNAKISSVSRQVVGGVDTHKDLHVAAVVDEQDRILASESFATTRQGYKQMLTWMRSFGEVVRVGIECTGTYGAGLLRYLEQAGITVLEVTAPDKSYRRKRGKDDTLDAGNAAHAAFAGVRTVTPKKRDGMVESLRVLKVCRKTAIQARRVTLQLIQNTIVSAPDDLRESLRTLTRMQLIRTLAAWRPDLSSYRQVTSAYRIALKSLGRRYLELHDEIADLDVMIAALVDDLAPELVARNAIGYESAAQLLLTAGDNSDCFRSESSFAALCGVSPVQASSGKVTRHRLNRGGDRAANSALHIIAIGRLRTDARTQAYVSRRLSEGHSKLEAIRCLKRYIAREVYGIIQRRNSVINQSTVST

SEQ ID NO: 86159 - protein, 373 aa, unidentified
MYQYSKYVGMDVHKEKIMIAIAQADRRAPVYYGEIANTGDAIAKMLKKVVGQGDGAFCYEAGPCGYDLYRQITAMGYRCDVVAPSLIPKKSGNRIKTNRRDALSIAGLYRAGELTSVWVPDKQQEAIRDLTRAREDMKMMERHSRQRLGGFLLRHGKVYPGRSKWTQAYFRWLEGIKFETAAQQIVLQEYIDMVKHAQGRVEAMEDEMRKALDGWKLKGVVEGLMSLRGIDLIAAMTIVAELGDISRFKSPRQLMAYLGLVPSEHSSGEKRKQGGITKTGNSHVRRVLVEGSWSYRLPARKTAHLRRKAKNASEAVQGIAWKAQKRLCTRYWYLINKGKLPVESCTAIARELVGFIWAIACEVTGKSTVSARS

SEQ ID NO: 86160 - protein, 428 aa, unidentified
MNERELSRVREFRQLKRAIQGSKTHLIVGIDVAKERHHAFFGTATGKTLLKKLIFENSASGFSELLARVEAVRAQSGLSEVVFGLEPTSNYHKPLGRYLISKGCHVVLVGGKAVKNNRELLDERWDKHDTKDAANIADLVSRGKCFYYDMPSGQIEELRDLLSLRARLKKEEHSLSLRIRNNLLAKHFPELDSFYSACERETLAIVRWCLNPQKIAAMPFDEFFKRVAPSARGIAQKLRLQKIHRLAHESIGCPVGSAVQFQAGLLVEKIKQVRDQVVEVEQAIQQLCVQFPSYEYLLSIPGFGPYVASKVLATIADPRRFDTVKQVIRTSGYDLCADRSGKRSDQAVPVISKKGNSQLRYALYQAARIASSRHRFFIAYFARMLQGRERERGIRTKMRVKLAAKMLVIAWTLMKKGESFNPEYLKMQ

SEQ ID NO: 86161 - protein, 374 aa, unidentified
MTMMHHRQIRYIGLDVHKATISAAIAEQSGAPTSYGRIPNDPAAMRTLMTRLGGPQVELRVAYEAGPTGYALHRQLTSMAIACMVVAPSLIPKQPGNKVKTDRRDALKLARLLRSGDLTPVWVPDEAHEALRNLVRARADAKADQLRAKHRLSKFLLRQGCWPPIGVRNWSKRYFTWLHQLEFEHLPDQVVFADYLAEVTAEGERIKRLEAALHQCAQSSRQVALIRALQAFRGIAFLSAVTLVAEAGDLRRFRTAPQFMAYAGLVPTESSSGGKQQRGSITKTGNSLLRHVLGEAAHHTRHAPRVSGTLKQRQADLPREVVDVAWRAQLRLHTRYRHLSLRIGSRKALTAIARELAGFIWAAGQVLQEVPAAA

SEQ ID NO: 86162 - protein, 388 aa, unidentified
MNKIIYIGMDVHSSNFTLCSFEPGYDFEADKIFGQTQIKEDIFNSTVKYINKLKSMRPDVDVVCGYEAGCLGYSLHRKLKAKEIESVILAPTTMAVARNSSKKNNDYRDAITIAKCLASSAYKAVYLPDEKDEDVRDFIRMRDDHKTALKQIKQQLNAFCLRHGHHYDKTKWTGLHLNWLRKLELSKLQRETVEEYLATYEALTSKIAALDVRIEDIASEERYSEKVNKLKCIKGIKTHIALSFICEIGDFNRFKSADKFSGFIGLVPGECSSGNTERMLGITKAGNRHLRRLVVEISNTYRRGAVGRKSAALKERQKDMPKDVVAYADKATNRCQRKYQRMMFKGKNSNQAVAAVARELCCFIFGMMTGHYSRTAQAEASLYRSELD

SEQ ID NO: 86163 - protein, 348 aa, unidentified
MTTVADQFEHVVGIDTHARTHTYCLVETRTGGTIDTATFPTTTAGTNRAISWIARRSHGTATLAAIEGTSSYGAGIAAALSASGFEVTEIRPIARPSRVRTGKSDPIDAEAAARSVIREDIDKLAQPRRNGDRTALRVLLAARALVDQQRTANRNALTALVRSIDLSVDARKPLTDTQIATIAAWRTNRDDATTRVFREEARRLARAVLEQTDALRENHRQLAQLTETQAPGLQSVPGVGAVTGAILVAAYSHHGRVRSEAAFAALGGIAPLPASSGNTTRHRLSRSGDRQLNRAVDVVVRTRLSYDPATREYASRRRAEGLSNREIRRCLKRYVCRALYRELRTRMT

SEQ ID NO: 86164 - protein, 355 aa, unidentified
MKYEIITAVGIDVSKGKSTVAVRRPGGEVVLTPFQVNHDAAGLFSLVKTLQDVGGNIRVVMEHTGMYWRPIALALKEAGFFVSVVNAMLIHDFSDNSLRKVKTDKADSMKIANYALSFWAELRDYSPEDETRQMLKMQNRLYLRTQKSSVTLRNGLISLLDQAFPGVNTLFDTQPKRSNGHFKWVDFVKRFWHRDCVAGVSLAAFSDAYRKWCARSGYRFSPSDAEKLHTAARNAVTTFPKNDSTKLLIAQAVDSLNAVYDALYILRGEMLRLASLLPEFDVVMAMQGAGEVTGPQLMAEIGDVRRFTHKGALVAFAGMDAPPFQSGTFDSKSRRISKRGSPNPVSYTHLTLPTT

SEQ ID NO: 86165 - protein, 352 aa, unidentified
MEQITRVGVDLAKRVIQVHAVDASERVVCRRALPRTKFIAWCSRLPAGCVVAMEISSGAHHWARRLAALGLVPKLMSAQLVKPYRSEGSTGKNDANDAAAICEAASRPSMRFVPVKSVEQQSMLCVHRLREGFKAERTACINRIRGLLAEFGLAFAQGPEELRRVLTDALEDASNEMNALARRVIQRAQAHWGELDEQIAWCDERIAQHARDNPAVRSAAQLMGIGVVGASAVVATVDDFSQFKNGAQFGAWCGITPSQHSSGGKTVLGRITRRGDTYLRSLLVQGAKSAVFTAHKRSDPISRWASALRERSGWQVAAVALANKNARILWAVMTKGERYDPNHVSVKPTMTH

SEQ ID NO: 86166 - protein, 376 aa, unidentified
MVTGVGSRHRPRRDRKPAAVSDVKPRMSLELRSLLPYPNSCPGTSPHQQGRDTKMPMLSYCGIDVSKDRLDVAVLPDGECFSVRNDAAGWAELVERLCSFSIAAIGIEASGGYERGVMRHLLAAGMPVRQVNPFRLRQFAKASGVLAKNDPIDARMIASFVAIMPTRPAQRHAPALERLTEILAIRRQLSAEKVAAENASRLLENAMLRRLSRRRIARLTADIDSLDKYLLEIVVSDAALGHRYELLTSMPGVGPLLACTLIALLPELGTMSRKQVAALVGVAPYAFESGTLKGKRCIWGGRAPVRHMLYMAAMSASNWNPALRAFHARLKGAGKLPKVAIVAVMRKMIIALNAMVRDDVAWADRHRGRHPMPTAR

SEQ ID NO: 86167 - protein, 387 aa, unidentified
MYYIGIDISKFKHDCAVIDDSGEIVTPSWSFTNDAKGFSQLKLLLNSLDTETRIGLESTGHYGMNLKLFLESNNFSFMEFNPLLINRFVKSKSLRKTKSDSIDCMMIAHYLMTVEYKPYPSSFYHTEKLKSLTRFRDSLIRLRSRQLVELTNILDNVFPEFKPFFGSRFSVTALYILSNYSSPEKIANMNSKSYEALRKLSRGRFSTVDFAKLKQLAKNTIGTTEDYLLLQMQIVLDIYRQLDSKIDETEVSIKECVSDMNPPMLSVPGIGIESAAVILAEFGDFSKFKNASQMLFFAGLEPGYFQSGTSETTGKMVKHGSSYLRYALMNCAQTVVNYEPTFAMFYSKKRAEGKPHRVALSHVVKKLLRVIYTLQTKNIAYDADFVR

SEQ ID NO: 86168 - protein, 340 aa, unidentified
MHIKTLGIDLAKSVFQLHGVDAGGTIVLQKKLRRGVVLDFLSKLEPCLIGMEACATSHFWAREIAALGHEVRLIPPAYVKPYVKRQKNDAADAEAICEAVTRPNMRFVPVKTEEQQGVLVLHRSRDLLMRQRTMILNAIRAHFAEFGIVTAQGPRKVAELVSRLRDENTLCVPQVARSALLALAVQLDNLIAEVRNIERQLMAWHRQSAASRRLETIPGVGLITATALAASVPNPTAFKSGRQFAAYLGLVPRQNSSGGKDRLGHISKMGNGYLRRLLVVGATSVTRRAPTTETQTGAWVRSLLERKPARLVTVAIANKTARTAWALLAKGESYKATPAT

SEQ ID NO: 86169 - protein, 400 aa, unidentified
MNSVGIDISKGRSTVAVMRPFGEVVISPFEVRHTDSELSELARQLKSLDGETRVVMEATGNYHTPVAKLLHDAGLYVSVVNAKLVHGYGNNDLRRVKTDKKDSVKLANYGLDRWLALTRYVPEEDTRLLLKNCYRQYSKVQTVLKNNLISLLDTVFPNVNRLFSSPAREDGSEKWVDFVAEFWHCRCVSEKSEKAFANKYQRWCRKYGYNFNEAKAHTIHAEASGHIGVMPMSETTKLLVEQAVAQLRATSTALAALKHEMQALTSMLPEYPVVMDMFGVGPTLGPQLIAEIGDVRRFYSKKALVAYAGLDAPPNDSGDVTGRHKSMSKIGASSLRRTLFLVMSVYLQTAPLDEPVYQFMDRKRAEGKPYRVYMMASANKFLRIYYATVKAYLESLEHTA

SEQ ID NO: 86170 - protein, 398 aa, unidentified
MFFGIDWSDDHHNLCIRNAQGTIISHVEFKHTLKGFLRLDDERRKLGVSPSECLVAIETAYNLIVDFLMDRGYRIYLIPPQATASYRNRHRSSGAHTDVSDAALLSSILLTDLDSHRRLRPNSALTQQILAQVRLIETLRGSIQLRALLSRIYPQALNLFGKLKAQINLQFLMAYPTAQEAQALSRAEFEAFCRQHKYRRHDLISRRYAHLMEPVPQANPIAVAAYREPIRVLAELTLIHVRHRATALSCLAQIFAQHPDAFLFDSLPGAGQILAPALLAKFGDHRDRFPTANSVQALAGTCPVTQQSGKRKIVFFRRGCNREFRRIVQQFARASINQSGSASAYWHQVRPRCRSDSDAYRRLGNRWLAIIWKMWQDGKAYDETYHLQQRAQRRRPKA

SEQ ID NO: 86171 - protein, 348 aa, unidentified
MRRYIGVDLHKNTFTVCYLSKKSQELKSFKVSKNEIEAFKNTLGKRDEVAVESTGNTGYFVREIKRLVKAVRIINPTQFKIISHSVKKTDEKDAEIIAKYLSKGLVPEVRMKSKEDAQLSSLIGTRDKFVKLRTMLKNKIHNILNANGIVTKKEIFSSKKGLEKVLDNDLDQASLFELRIVIKEIRSLSESIVEIDNELKDRGSKLKGYKNLTSIKGIGDISSTILLNTIGDINDFDGDHKLAAYIGIVPRVQVSNETSHYGRITKMGNKLARTALVQSTLVAIRYNPYLRDFYMKLKAKKGSGKAIIATARKLLTIVYRTLKNDWVFEDFSNFKLKSVKKVYHLSPA

SEQ ID NO: 86172 - protein, 367 aa, unidentified
MEKSSTAYVGMDVHKESVDIAIADGREARLFGRVGGDAAAVERAVRKIRSVHRDVMFVYEAGPCGFWLYRRLAAQGLRCMVVSPSMTPRRSGDRVKTDRRDALMLARLARAGELAPIYVPDAKDEAIRDLVRAREDAVCMQRQARQRLQALLLRNEIRYVGRSAWTQAHRRWIAHLKLPDPAQQIAFEEYVTAVEEGTRRLERLEGSISAQLAHWRWRPVIEALQALRGVSSIHAVRIVAELGDLSRFESPRKLMGYLGLTPSEDSSGGRRRQGGITKAGNSSARRAFIEAAWAYAHPARVSWVIARRHTGLAKSVTDLAWKAQLRLCARFRCLAARRLPRNKVVVAIARELSGFVWAIARQVKPLA

SEQ ID NO: 86173 - protein, 340 aa, unidentified
MEKRYIGIDLHRNRFTCCIRLENGRTYLREWALKDLARFVKELRAGDEVAVEITGNTRLFHDAVAPHVARVVVVDTNQFRVISRSVKKTDPNDARLLSLYLSKDLLPEVRMKDKQLAQLASLTQTRDTLVKQRSALKNKVNNILSARGLNLAKEALSSEKKLAEVLELPFDEIVRIELRVVVEQIRSLNKSIAELEKTIGEEGSKLEGHKNLSSIKGIGKITGAILLSVIGDVNDFADEGRLASYFGIVPRVSNSNETERSGRIHKRGTKLGRTALVQSALIAAHYSPYLKRFYEQVKGRRGAGKAIIALARKFLGIIYRTLKNKWVFEDFPNFVLAEES

SEQ ID NO: 86174 - protein, 344 aa, unidentified
MDHFAGLDVSVKETSVCIVNDTGRIVREVKVASEPEALLAVLKNPAYHFERIRLEAGPLSQWLFSALAEAELPVVCVETRHVQAVLKAQINKTDRNDARGIAQMIRVGLYRPVHVKTLRSQKLRMLLTHRKLLQSKAIAIENDLRGTLRNFGLKVGMVGKVRFEARIQELVENLPDLAELVEPLLIVRRALREQIVILHRRLLAIVRDDEVCRRLMTTPGVGPVVALTYRATVDVPARFRKSKSVGAVFGLTCSRYQSGEVDWSGKISRCGDEMMRTMLYEAAQSMMHSKKWSWLKAWAMQIARRRGMKKAIVALARRLAVIMHRIWVDGTEFRWIREQAAAAA

SEQ ID NO: 86175 - protein, 316 aa, unidentified
MVPSPLFVGIDVAKATLDIAVRPTAETWSASNDATGIDALVLRLGALAPTLIVLEATGGSQGPLVAALVAAALPVVVVNPRHIRAFAQAVGILAKTDRIDARVIAHFAEAVKPAPRPLPDAETQELRALLVRRRQLVEMVSAERARLDTVPPRIQDAIQAHIAWLTTQIAGLDDALTRASQTHPVWQAKDDVLQSIPGVGPVLARTMLGQVPELGTLGPKPLAALIGVAPFNRDSGTLRGRRTVYGGRAEVRAVLYMGALVATRHNPVIKTFYERLLAAGKAKKVALTACMHKLLTIMNAMVRDLKPWQPQEVPSA

SEQ ID NO: 86176 - protein, 311 aa, unidentified
MERCVGIDVAEAELVVVAEPEAAATRWPNDAAGHAALVAHLAALAPVLIVLEGTGGVERAVAAALAEAALPVAVVNPAQVRQFARGLGRRTKTDPIDAAVLARFAAVVRPAVRPRPGAAQRELAALVARRRQVCALRVTEQHHQRRAEPCVAASLAHVLAVLAAEQAELERRIAEQLALDPVLRAKAAILTSVPGIGPVAAATVLAELPELGQLSAKQAALVGVAPHLQQSGRARGQAAIGGGRRPVRCVLYLATVTAVRCNPVLQPFYQRLRAQPKPPKLALVAAERKLLTILNAMLRDGVCWQAEAAMA

SEQ ID NO: 86177 - protein, 356 aa, unidentified
MNKRNKLNFSGQAIYLGLDVHKKSWSVSIFTKYGEYKTFSQPAEAEVLIQYLQRHFPGARYHSVYEAGYCGFWIHDQLREKGIDNIVANPADIPTRDKERRSKRDRIDCRKLARGLRGGEIEGIYTPARWKLEDRSLIRTRLSMGRKQARCKNQIKSMLLFYGVALPEQREMGHWSRRFIRWIEGIRMERTSGDLALKLHLEELCHLRQILAKLNRSILALARTEQYRWWISLLKTIPGISTLTAMIVLTELYEITRFRSIDQLCSYVGLIPDTQSSGEKEHVGGITRRHHSSLRWLLIEASWIAVRKDPAMMEAFNEYCKRMRKTKAIIKIARKLLNRIRYVLKNQAEYVTGVIE

SEQ ID NO: 86178 - protein, 317 aa, unidentified
MDAKTQADRFIGIDVSKARVDVHVRPDGIVFCCATDSDGLAELVRRLTPLRPTLAVLEASGGYEGVVAAALAEAGLPVAIVNPRQVRKFAGAIGRLAKTDAIDAAVIAHFAEAVRPAARPLPDDLSIRLAELMARRRQLVVMINAEKQRLARAHDRIAQSSFRAVLKRLEAERARIDKTIDKLIEASPVWCAKQDLLKSVPGIGDVVARTLIAELPELGQVDRHQIAALAGVAPMNRDSGRYRGKRRIQGGRVEVRAPLYMACLVAIQHNPPLKRFYCRLREAGKPARLALVAAMRKLLTILNAILRDHKPWAPAQS

SEQ ID NO: 86179 - protein, 291 aa, unidentified
MKRILRIGMDVHSTNYTLCAMEPIIGEDDRIFANIQVTPDYKNILMFIENLKMKLGLDNEYDIQCGYEAGCLGYSLYNQLTAAGVKCVILAPTTMLTPQGQRVKTDARDALMIAQCLSYGGYHAVYIPTEEDDSVKEYLRMRDDHKTALKKIKQQINALCLRHGYHYEGTKWTIKHAAWLRKLELSPLYRETLDEYMASYDEQTAKIERFDKRIGELASGESYEEKAKKLGCFLGIKTHTALSLLVETGDFSRFAKGNTYAAFLGLAPGESSSGDKVNRTGVTKAGNRYYK

SEQ ID NO: 86180 - protein, 416 aa, unidentified
MSVALPQALFFTGIDWASAEHAVCVLDAAGKITARFTIKHSAEGIASLVRRLARYGDPAGLPVAIERPSGRLAGLLLEAGHPVVPVSPNAIKTWREGEVLSGAKSDAGDAAVIAGYLRLRYHRLAPAAPYCDETRALRAAVRTREDLVQMRVAATNQLSALLEAHWPGARAVFADVESPISLEFLTRYPTPAAARHLGHKRMAAFLVKHGYSGRRPAAQLLARLHGAPAGTAGRALTEALQDAVLAVVAVLRALNGAVKDLDRSVAAHLGEHPDGPVFTSLPRSGQINAAQMLAEWGDCRQAYDGPDSVAALAGVTPVTRQSGKHRGVEFRWACNKRFRRAVTTFADNSRHASPWAAQIYAEARAAGKDHPHATRILARAWIRVIWPCWVNGVPYDPARHRAAAALAGQTPSQPAA

SEQ ID NO: 86181 - protein, 392 aa, unidentified
MDSPPPRHHSATVAFKEANGSEGETMKKHSSKHDPLSSTDVELCTTLCVDLAKQVFQLAGEDATGRVIYENRIKSRQNFHDFLIKLPVTVTVLMECGPGAQAWARLLQAKGNPVRILPAQRVAEHRSGAKNDRNDAHAILRAGRDTSIASISIKSTTALAIQALHRVRRGNIKRHTALGNQIRGLLLEHGVSMPQGDAAINSHVPRALEDASLPLPDLLRELLDELLTDWLSLGERIATLSRRLEATAQEDKVAQRLITIRGVGPIIATAIVAKQTEPSRFASGRMYAAFFGIVPDQHSSGNKIRLGRMSKRGDGYIRSLMIQGAHAVLSQLRPDSDQPDDHRLLRWLSRLGRKEAAIRLANRNLRIIWALLQSDQVYQRKPNSNSEAAMSL

SEQ ID NO: 86182 - protein, 384 aa, unidentified
MASRRRGPGPSSVLITPDCAGNVVGVDPHKRTVSASVADPRGGIVATEHFRVSGDGHRALEVWAGQFGPIARWGVEGASSWGRHTAIFLIARGYDVRDVCANRTPRSDRARQRGKSDQLDSERIARETLAHPLLPKAFKRAGQDRGPDEHHELLALRHNQRRSILTSRQHLINEAEHLLSSLPLELSEQLPDSTAVRPRLAALAHRNRRRRYDRPTALRLTLLDDYRTQIARLDDEDQQVTRELAVLVRASGSTLGALCGLSTVLVSELLVEVGDPRRFTIGGFARFNASAPLAASTAEGPGEPVRHRYNPGGNRRVNRALHLMAVTQLRCEPRAQALYENARARGHTKKEARRILKRHLSDVVYRRMIRDLAERAADRPLLAA

SEQ ID NO: 86183 - protein, 453 aa, unidentified
MPKIIPANPQNLTRMNPGAAALDIGSTMHMAAVNPESDDMPIRAFGTFTHNLHDLATWFRSCGVTSVAMESTGVYWIPAFEILEQHGFEVILVNARYAKNVPGRKTDVSDAAWLRQLHSYGLLRGSFRPQAQVATLRAYLRQRERLIEYSAAHIQHMQKALMEMNLQLHHVVSDITGVTGMKIIRAIVSGVRDPDVLASMRDVRCHSSAQTIRASLIGNDRDEHVFALSQSLELYDFYRQKMLECDRRLESAIGAMSAEVEAPLLPLPNVRTKTKQVNAPSFDVRAALYGLVGTDLTQIHGLGSSLALKLIGECGTDLRAWPTAKHFTSWLCLAPGNKISGGKVLSSRTRRSSSRAAALLRLAATTLGRSDTALGAFYRRLAGRIGKQKAVTATARKIAVLFYNALRYGMVYRDPGAAAYAERHRGRVIANLQRRARSMGYDLSPMAAGDCVS

SEQ ID NO: 86184 - protein, 351 aa, unidentified
MLIIGCDFHTRFQQIAMVDTTTGELVKRRLEHSTGEAERFYAALPAPARVGIEATIATQWFEKMLTRYGHVLWFGDAAEIRAAMVRKQKTDDRDALHILDLLMQNRFPRIWVPSAAERDVRQLVRHRHKLVRMRTSVMNQLHALAMGQGLCLRKKLWTTVGRQKFESLTLDPWASFRRRELLQLLDQLDPSIEELNRAVISEAESRPTAVCLMQQAGVGPVTALAFVLTVGPVSRFANSKKLVSYLGLNPSEESSAGRQQLGAISKQGNSMMRSLLVEAAQTASIYDPELRRDYQRLKFRRGHSGVAKVAIARKLAVRLYWKLREAARPVPLAPMQGSPAVAVVGENLSCF

SEQ ID NO: 86185 - protein, 340 aa, unidentified
MEQQRQYVGIDLHRRRSVIVRMATDGTVLDTVRIENDPIALAAEVAKAGPGPAVAMEATLGWYWAADVIGECGAQLHLAHPLGIKAFAYQRVKKDESDARILADLLRMGRLPEAWIAPPEIRELRELVRYRHKIVEARANAKAQVHGVLAKQGVKVPVSDLFGVAGNMLLDKVALDDAYLVRVESLRDLVALHTREVVMLDRLIAGRLKGQAGYEAVQAIPGVGKVLAAVFVAEIGDVRRFSRPEQLASWAGMTPRHHESDTTVRRGRITKQGSRLVRWAAVEAAMLPRSNSWLKSDYHRIAARRGKKIAAVAVGRKILTLVFYGLRDGEVRCLAEGDAA

SEQ ID NO: 86186 - protein, 351 aa, unidentified
MPSKKDTTVIRAIGIDTGKNTLHMVGLDEKGAIVLREKVSRNRITARLVNMPPCLIGIEAGMATHYMSRELVALGHKVKQVPPAYARPFRQGHKNDFRDAQAVAEAVQRPSTRCVPIKTDDQLDLQALHRVRSRLIGDRTAVINQIRGFLLEHGIPVRQGPRFQRQQLPQILATRTDVLSPRMVRIIGEIVDDWENLDERIERVTDEIEGLARADVSCGQLMTVPGIGPIIASATVAAIGNGTAFAKGRDFAAWLGLVPKQMSTGDRTILGRITKRGNRYLRTLFVQGARAILLHPASWAKHSFGPWLTSAARRLHRNVLVIALANKLARIALTVLVQGRSYETRVEPAAV

SEQ ID NO: 86187 - protein, 334 aa, unidentified
MGNVTTCGIDLAKNVFSLHAVDGQGAVVLRKTVSRARLAAVVAQLPPCVIGLEACSGAHEWARRFAQHGHTVKLMAPKFVAPYRKSGKNDGNDAEAICEAVSRPSMRFVPIKSVDQQAMLTLHRVRLGFVEERTATINRMRGLLAEFGVVLAQRAVEVRRGAATAIEQLPALAARALTDLLEHLRVLDGRIGEYERELEQHARHDERARRIQQLSGVGPISASAIVSSVAEGHEFRNGRQFAAWLGLTPKQYSTGGKTRLGRITAHGDPYLRTLLIMGARSMLQTALRRSDRMARWAIAVRARRGYHRACVAIAAKHARIIWAMLSKNESLRLG

SEQ ID NO: 86188 - protein, 338 aa, unidentified
MEPTTIAIDLAKRVFQIHFVEPGTGVIHSKALKRAQLTPFFANRAQCRIVMEACGSAHHWARQLAALGHDVRLIAAQFVRPFVKSNKNDAADAAAIWEAAQRPGMRFVAIKSEDQQAMLALHRMRQQLVRFRVMQVNQLRGLLYEFGVILPQGRRASIDAAKASLASIADQVPAMLIDSLQDQLSRLLALDEQILHIEQRITEWHRGDEACRRISEIPGVGLLTATAAVAVIGNAHAFRSGREFAAYLGLVPRQNGSGGKVKLGGISKRGDVYLRTLLIHGARSVISSSKHLPERMRSMLARRPTNVVAVALANKVARIIWALLAYGRTYQCPTAAPA

SEQ ID NO: 86189 - protein, 360 aa, unidentified
MNTLPESEGLVTGGVDTHRDLHVAAVIDAVGRVLGTEAFAVDADGYEALLTWMRSFGTISSVGMEGTGSYGAGLFRHLTSHGVAVLEVIRPNRQARRRRGKSDPADAEAAARAALCGEASGTKARNGAVEAIRALRVVRCGAVKASTQASNQLKDLIVSAPEALRARLMGLSTPKRVELAIRFRPGTIEDPTEATKAALRSVARRWVALQCEITEIDRQLAVVVTTAAPEGLLAKQGVGFDVAGALLVAAGDNAERLGSEAGFAALCGASPIDASSGKQVRHRLNRGGDRQANVALWRIVMTRMACDPRTAAYVARRTAQGMTKKEIIRCLKRYVAREIYRELVIEAPHVVTGFSPPLAA

SEQ ID NO: 86190 - protein, 462 aa, unidentified
MLGREERETSEKSRRQLEGLPVIRRGVAGIDLGSEQHWACAPTLDRSGREVAHFGATTAELIRMAEWLKARQVESVAMESTGVYWIAPHEVLEGQGLQVLLVDTRQLAQVPGRDKKSDPTDCEWIQRLHSCGLLRGSFRPEEAVCMLRTLVRDKANLVAESGDWLRRMQKSLDQMNVRVHRAVSDIDGVTGMAILRAIVGGERDAQKLAKRRDRRCSKTQQEIAEQLNGHWRDDHIFSLQQALKMYDAVQERMAAYEQEILRKLGEMEREEPHEPTAPPLQNASKARTIKKLGQEAKRQALYRMSGVDITQIDAIGVETVEVVVSEYGSDLSRFPTEKQFVSHVTLAPSVPKSGGKPVRKKKRNSASTRVAAALRMAALSLRHSQTALGAYYRRIAQRRGGDIAVFAAARKLATLIYRLLRWGQPYVDEGAAAFETRYRQHRIGRLAATAKELGYQLTPVPA

SEQ ID NO: 86191 - protein, 339 aa, unidentified
MNSMAVGVDIAKQVFQVHYVDRETGEIVNRQIKRAKFLEHFANRAPCLIGMEACGGAHHWARELTKLGHEVRLMPAAFVKAFNIRNKNDAADARAIWLAVQQPGKPVAVKTEMQQAMLALHRMREQLVKFRTMQVNGLRGLPTEYGEVMSKGRAALDKEIPAALGRIPASLPAALIDTLREQWNGLARLDEQIAEIERRMREWKQQDRAVKAISEIPGVGLLTATAAVAMMGDPKAFRSGREFAAWAGLVPKQTGSGGKVNLHGISRRGDTYLRTLLIHGARSVLTHTKEPGRWVEQMKQRRPMNVVIVALANKMARMIWAVLAHERPYRNDYVSVKPA

SEQ ID NO: 86192 - protein, 338 aa, unidentified
MHKLPQEVYLCCGIDVSAAELEVAVEGEGGRWRQRSFSNRASGHQALILWLQKSRVPVRVCLEATGLYSLDVALALHAAAGIEVAVLNPKMVNRFAATLCRSKTDPADAQVLAEYGRRMPFQSWHPPQRDALELRAVTRHIAALTKQHTQQSNRLHGCSASTTGSRWVQQDLKRSLRDLKRRMEKMRHCALTLIAQNADLHSRFALLLSLPGIGEISALNLLGELTLLAPGLTVRQWVAHSGLDPAHHQSGTSVQQRSRISRAGNRYLRRALYMPALVAVRHDPHLRAFYQTLCARHKAKLQALIAVARKMLHAIFGMFRAGCHYNGSRLFPTLVMAP

SEQ ID NO: 86193 - protein, 353 aa, unidentified
MAYGAIDLHKKESQVRILTDAGEVIDRRISTRRESFTQLFGDQPPMRVLLEASTESEWVACHLERLGHEAIVADPNYAPMYGGRSRRVKTDQRDVAALSTACVHGTYRPIHRRSPARRAIQAQLNVRDELVHTRGRVISMVRAMTRAEGLRIRSGSPETFLRRLVAVEVSPSLAATVEPLCHLMACVNDQLRMADLRVRDLVTQDPAIARLTTFPTIGPVTASAYVAALDDVHRFRRAGQVANYLGLVPREYSSGERQRRGHILRSAHPRVQALLVQAAWRIWLSRRDETAALRTWARLLARRRSTPIAIVALARRIARILFAMWRDEREYQGTRCAERATGRAPASMDAAVS

SEQ ID NO: 86194 - protein, 307 aa, unidentified
MDKYIGFDIDSKKTIACVVQKGKKDRFTTLKTDINRMKDFLNGQRRDGEKLHLTFEISGEAGYRHDALINLVDSITVSNPTKMTWIYRTAKKNDRIDSRKQAVLLSIGEVPKVYIPNREVRQWRVTIQHRRKMVSSITQVKNRIRMLLKANGFVKAAYRGSLWKVTNRVWMRGLCEQAEINSEELWRMNLIDMLEKLWLLEGQLKRTTKYLDGYLDKQPGGELLMSIPGVGPRTTEAVLAYTDDIRRFGRSKQYCAYFGLTPRLDESGSSRRLGHISKQGPSVVRWLIVESAWRAIKKSPGLRAFYE

SEQ ID NO: 86195 - protein, 386 aa, unidentified
MGKESSTLFVGLDVHKDSIDIAVADAPRDAEIRHIGSIKSDLASLDKAIRKLVSRGQPLHIVYEAGPCGFVIQRHLHAQGLHCEVVAPSSIARPPGERIKTDRRDAMLLARLARSGDLHVVRVPDSVDESVRDLVRAREDAVREQRNGRHRLKALLLRNGIPYAGKSSWTAAHLRWLATVKLAHTAQQIAFQEYLHSITQAGERIARLEQALRDALPDWGLLPVVQALQALRGVQLIAAMTLVAELQDFLRFESPRQLMAYLGLVPAEHSSGSKRRQGAITKAGNSAARRMLVEVAWHYRMEPRVSPIIAARQDGLPEAVTQIAWKAQTRLCHKFKRLSARRLMKTKAVVAVARELAGFVWAIGREVQLSGWAGIKPEPTAPARAA

SEQ ID NO: 86196 - protein, 350 aa, unidentified
MVVVGADVHKRTHTFVAVDEVGRKLGEKVVEATTVGHRQALRWARASFGAELVWAIEDCRHLSARLERDLLTAGQQVVRVPPKLMALTRKSARTRGKSDPIDALAVARAFLREPDLPVASHDEVSRELKLLVDRREDLVAQRTSTINRLLWRVHELDPARAPKSASLDLAKHRHLLSEWLATQPGLVGELARDELADITRLTEAINALAKRIGKRVREVAPTLLVMPGCGELTAAKLVGETAGVTRFKSEAAFARHSGAAPIPVWSGNTAGRVRMTRSGNRQLNAALHRIAVTQIRLPGLGQAYYRKRLVAGDSTTEALRCLKRRLARVVFHHLHTDHQNRQQPCQPAAA

SEQ ID NO: 86197 - protein, 413 aa, unidentified
MRLFVGDDWAEDHHDVELMDSAGQRLAKARLPEGVAGIARLHAMIGEQLGEDADEDDAGQVAIGIETDRGPWVAALIAAGYTVFAINPLQASRYRERHGVSGAKSDTADAHVLADMVRTDSHQLRPVAGDSAQAAAIKVVTRTHKTLIWERTRCTQRLRHALRDYFPAALEAFEDLDAADTLELLGRAPDPASAARLTTAQISAALKRARRRDIAAKVERIQAVLRAAHLGQPDIVAAAYAASVRALIAVLATLNEQVKTLQGQVEAYFGQHPDAEILLSQPGLGPVLGARVLAESGDDPSRYISAKARKNYAGTSPITRASGKKKTVTARHVHNDRLIDALISQAFTALRTSPGARAYYDHQRARGAGHNPALRQLANRLTGILHGCLKTRTLHDEATAWPQHTATSEKTAA

SEQ ID NO: 86198 - protein, 305 aa, unidentified
MFVGIDVAKDRLDVHVRPAGESFVVARDGEGIEELAKRLNAVTPTLVVLEATGGFETVVAAGLAAAGLPVAVVNPRQIRDFARATARLAKTDTLDATVIAHFAEAVNPPVRLLADPQQRLLGELMARRRQLIEMIVAEGNRRRLLTARRTLKTVDRVLATLKAQLEEIDHDIDIAVRGTPAWREAEDLLISVPGIGHKIARTLLAEMPELGRLDRRQIAALTGVAPFNRDSGTLRGRRAIAGGRIVVRSALYMSVLVSIRRKLPLAQTYHRLRASGKPAKVAIGMRKLVTILNAILRDKKPWATA

SEQ ID NO: 86199 - protein, 337 aa, unidentified
MGLYCGIDLHSNNHVLTVIDEADRRVYERRLPNRLAITKAALEPYRAELVAVAVESTFNWYWLVDGLMEAGYTVRLVNTAAVRQYEGLKHTDDEHDAFWLAHLMRLGILPTGYIYPKSERGLRDLARQRMRLVQHRSSLITSVQNQVWRSTAVRLRSETIKGRGKQPWPEISDPDLALSVKVGRAAIDTLTVQIERLEKLILKRVDLSPQFRMLKTVSGIGPILAMTIALEVGDIGRFTAVGEFASYCRCVDSQRLSNGKKKGEANRKCGNRYLAWAFMEAAHFAIRVLPAAKRFYERKRRQRHALIAVKALAHKLARACFDVLRDQVPFAPERLFA

SEQ ID NO: 86200 - protein, 387 aa, unidentified
MIYVGIDIAKQKHFAAAMTADGEVLISPFGFTNDAEGFKLFLSKIKSFKKESTLIGLESTSHYAENLICHLFDLGYHISVINPIQTSTLRKTNIRRTKTDKVDCLLIIKSMIVNKPRLYSKTDIDSLRLKSLCRFREKIKKAKAKLKIQLVTFVDIIFPELQYFFKSGIHTNTCYQLLKKHSSPDDIAALHLTYLANLLQKASHGRFGKKEAIALKGLAKSSVGTGNTDVSIQITQSIAQIELLEQQLADIDRIIESIMLEMDSVILTIPGIGFLNGAMILGEIGNISRFSNPSKLLAYAGLDPTVNQSGKFNAKSTKMSKRGSKLLRYALINAAWNVSLNNKTFNDYFNLKRSQGNNHYAALGHVAHKLVRIIFKMLKDNVAFNLD

SEQ ID NO: 86201 - protein, 461 aa, unidentified
MKKTTAAGKRKESVQKKVDWKALEIVHPDAAGIDVGGSEHWVAISPDRDPEPVRWFGCFTADLREMAGWLVEKGVRSVAMQSTGVYWMPVLEVLEQHGLEVYLVNARHTKNVPGRKSDVQECQWLLKLHAFGLLNNSFQPTDEIRVARALWRQRGNLVADASSTILRMQKVLIEMNIQLSNVLSDISGVSGMRMIGAILEGERDPQTLAALVQPGVKATPEDILKSLEGNWRKELLFVLRQQVELYRVYQEKIQDCDQQLREHLESFGSVVDLKAQPIGPKPKGKKGSKNAPQFDLRTELYRITGIDWAQVNGIDVLTAQTVIAECGADLSAFPSEKQYTSWLGLVPTNEQSGGKILRRRTRKVVNRAAAAFRNAATTLLRSGSYLGAQYRRLRTRLGAPKAITAMARKLACLFYRLIKHGQQYVDKGNEYYETKYRQQQIRALAKRAQKLGVQLVIPTTA

SEQ ID NO: 86202 - protein, 392 aa, unidentified
MRRARVAPGWPTPSLTHRGRSMQETSRVFVGLDISKLKISVALAEEGRQGEVRFLGDIDNTPDAMKRLVRKLSGKYLQLLFCYEAGPTGYGLHRQITALGHDCSVIAPSLIPKRSGEHVKTNRRDALTLARLHRAGELTTIWVPDLGHEAIRDLVRAREAAMEDLREKRQQLQSFLLRHGRLYPGLRSWTLVHARWLSSLIFEHPAQYLVLREYRQAIEDAEARLKRLTQQVADVVSTWSMAPVVEAYQAMRGVAFLTAVTFVAEIGDVRRFETPRQLMAYLGLVPSERSTGEQVRRGSITKAGNPRARRVLIEGAWTYRYPARLSRPLQVRQESLPEVVRAIAWKAQVRLCARYRRLMAAGKRQTLITTAIAREMAAFLWAIGHEVQPCSA

SEQ ID NO: 86203 - protein, 489 aa, unidentified
MNDKRRLVGIDLGIASAHTVRVLDGEGNTVAKRKAWPTVESLTDVENAALAGCGAGTRLEVIVEPTGPAWMPIAVFFSARGHVVHRVSSAKAHDLRRFLSRHTKTNGIDADTLARLPLFDPAGLQPLVLPGVERAALDRRVRATDRFTQAGAEHKRRIKDLVRQVLPMTPLTGDLGVADLAVLERFADPNTLVRLGLKRLTALIAKSSKGHLGVERARQWLDAAESSLELYAGHPAVAFVDLAAEVATEVRLLRAVQTELAAHATERERCYRWVDPTGLARSLPGVADIGGPALVAAIGDPARFKRGKQFRSFTGLVPKASETGDTDRKGQPMSKAGSSLLRTTLVRAADTARKQDPQLARVYYVQMVERGKDHLGALCVVAAHLAERFWAVMHRAMPYVICDTDGRPVEPDEAIAIIAEHWTVPAEARARRRSKKVGKAPQNVLAGQSKPHAPSAGTRGDLPQQASSPPRNGPVKHHRPDAGADDAVA

SEQ ID NO: 86204 - protein, 289 aa, unidentified
MRIIGCDLHARQQTIAMLDTDTGELEEKTLEHEGETVREFYSALRGPILVGIEATGSMQWFLELMEELGIECRVGHPAKIRKAETRKQKHDRRDARLLLTLLAENRFPTIWMPSTQQRDLRTLLRHRHQWVRMRSRVQHTLQSIALNHGFRRGHALWSQANQHALRALPLAPHASERRAALLTLYPHLQGSIEELDKEVCEEVQQHPQARRLLTHPGVGPITALATEVFLGDPKRFIDGKALASYIGMIPSEHSSGRRQRLGAMSKQGNTLLRYLWCEAAMTRSSGIRS

SEQ ID NO: 86205 - protein, 370 aa, unidentified
MAQPSMPHLERTRVTVGVDTHKDLHVARAKDQLGRPLGENIIPTTPAGYRDLLDWARTYGDVEAFGVEGAGSYGAGLSRFLLSQGQVVIEVNRPSRQARRRNGKSDPADADAAASAVLSGDANATPKAGDAHVEMVRALRIARQTAIKARTQAINATKALLVTAPSELRESLRGKSTTMQVRTCARFRPGELAGPTAAVKIALRSLATRCETLEAEIVCLERHLDGLLAEAAPDLLARFGVGADSAGALLVAVGDNPDRLRSEAAFSMLCGSSPVEASSGQQTRHRLNRGGDRQANAALHRIVMARLRWDERSKDYLERRTKEGMSKREIIRRLKRYVAREIYGVIKVLQANDTTVAAAAVDEMSRSPGR

SEQ ID NO: 86206 - protein, 420 aa, unidentified
MSKIVHPICCGIDVHKKFLVAAIAITDKQNVTTYIKRRFSTFNSDLKNLEKWLHNHNCTEVCMESTGKYWIPIFNVLENSCHVVIANPKYVRAIKGKKTDDKDATWIADLFKFGLVPSSFIPPKEIRRLRELFRYRFKLTGHRASEKNRLQNALTVSNIALASVVSDSFGKSASAIVDYILSCDTFDPEHCKSLLQKKLKEKADEIIQSIIGYELSNDQSVKMKVCTKHYDYINECVDDLDKTISSMAEPYTDFINYAVTIPGISKNSATYIIAEIDTDMSVFKSSKHLCSWAGLTPQNNESAGKKKSVRISRAGVYLKPLLVQCANAAIKDKKNPYFKIKYDHIKKRRGHKRAIIAIARMILTCIYHMFLNKEAFNPSDTNYSDIPEGLYKKLKMQFIKNAIKLLEKEGCVITPPAASA

SEQ ID NO: 86207 - protein, 310 aa, unidentified
MDTFVGIDISKDSLDIGIEPGDEVLHLAYDDKGIAQVVARLMQVAPTLIVMEATGGLEVRLASELAAKGLPVAVINPRQARDFAKATGQLAKTDAVDAAVLARFARAIRPAVRPIKDVDTRELDDLVTRRRQLIDMRVQETLRLGTASKIQRKSVAAHIAWLDKRIGDLDDDLTKRLRASDLWRTKDDLLRGIPGVGAITSLTMLAKCPELGDLSRREIAALVGVAPRANDSGKHRGKRFVWGGRADVRAVLYMATVSAIRCNNDIKAFSARLKQAGKPAKVIIVACMRKLLTIMNAMIKNKAQWRPKIA

SEQ ID NO: 86208 - protein, 338 aa, unidentified
MQVARIGLDIAKSVFQVHGVDEHGKVVVRKQLTRSKVLTYFAQLPACWIGMEACGSAHYWGRELQKLGHEVRLMAVQLIKPYRTKPKNDRNDAEAICEAVSRPQMRFVPIKTVEQQAVLTVHRARELLVSERTAVANQIRGLLLEYGIAIAAGIQRLRRELPAVLSAEDETLPALVRTVVTELQARLQELDERIAGHDRQIAQVAKQSEAAKRLMQVEGVGPITATAMVATVGDAKAFSHGRQFAAWLGLVPKQFSSGGKSVLGRITKHGNVYLRTLLIHGARAVLQSTAKRTNAKSVWVEALRQRRGDNIAAVALAAKHARIVWALLARGQEYRVAA

SEQ ID NO: 86209 - protein, 426 aa, unidentified
MKCNQNQRILQVSESKMIIGIDVASEIHYARAFDNRGIEQAKVFRFSNDREGFEAFVKWADAIRVKSGKKDTIVGLEPTGHYWFNLAQHIKSESMKIVLVNPFAVKRSKELDDNNPTKNDRKDPKTIAMLVKDGRYMEPYIPEGVYAELRVGMNTRWQIGKNLNSIKNQIDRWLRIYFPEFLQVFADWEGVAALIVLHEFSTPAQVVKKGALGIVERWKQDKIRAVGIKRAERLVEAAKASTGITEGLVAADMELKILLEDYDRKMAQYNTLMDMVEKLMPQIPGVAEVLKIKGIGLVTAAGFIAEVGDISRFSHPKQIQKFAGLNLRENSSGKHKGKSGISKRGRKRLRAILFRAMMPLVAKNKEFKAIHGYYTTRQNNPLKKIQSLILLCCKLIRVMYAILAKAVRYEPEKLLSDMRKDELLAA

SEQ ID NO: 86210 - protein, 362 aa, unidentified
MEYFAGLDVSIEETAICVVGDDGKVVLETAVATEPALIGKALERYVGRLRRVGHEAGSLSPWLHAGLLEIGVPAVCLETRHVRAALSAQRNKTDAADALGIAHIMRTGWFRQALIKTESCYRIRLLLVQRRNLKRKFLDLENAIRHSLKVFGIRLGKVSRGGMEKAVREAVAGDAMTAGLMDCMLRARAALWAEYLVLNKLAVQLAMRDELCRRFMAIPGVGPVTALSFSSAIDDPSRFRRSRDVAAYFGLTSKRWQSGTSIDVKGRISKAGDPDVRRTLYEAASAMLTRFKGRDTIKSWGLHLAKTKCHAKARVAVARKLAVTMHAMWRDGTFYVGDPDTAEQEIAARNAAKVQRLAAARS

SEQ ID NO: 86211 - protein, 410 aa, unidentified
MVLFVGDDWAEDHHDVEVQDDAGRRLVKARVPEGVAGIARLHELIAGFTGEDTSADQVWVGIETDRGPWVAALVAAGYRVFAVNPRQVARYRERHGTSGAKSDAGDAHALADMVRTDAHQLRPLAGDSPLVEGIKVVARGHQSMIWERHRHMLRLRSSLREYFPAALEAFDDLTAADALDLLGAAPDPQRAARLSRSRIAGALKRARRRDVEAKAERIQTLLRADHLTQPPELVAAYAATTAATVAVIIAFTTQITTLQGQVEASFGRHPDAEIYRSQPGLGEILGARVLGEFGDDPDRYQGARARKNYAGSAPITRASGKKTVVLARFVRNQRLAGPLQWQAFCALRASPGARAYYDQLRARGAGHQAPLRQPSHRLLGILHGCLKTRTLYNEHTAWGHHQPQDQQNAA

SEQ ID NO: 86212 - protein, 402 aa, unidentified
MEKVCGVDVHRDLLVATILLDQSKETRHFENNVDNIEKLKEWLKTQGCKRAVMESTSVYWVPLHLALEESGFEPVLANAHHVKAIPGRTTDQSSSEWLAHLLRGGLIKPSYVPEKRLRELRELTRLRVKYVQNRTAFKNRCQKVLNRVNIRLRSKLSDVFGKSGMEILNGLMAGKTVEYILEHTESKRLKRRCDEIKAVAKGALSENDIFELKKLTETINHLNEQIHDLEARIEMLANKEDVGIVSSVPGVGPRSAAAILAEIGDAKRFSNSKQIAAWTGLVPSLHQSAGVCVLGSITKQGSKWLRWNMVEVAHAAVRVRDSRFRALFLRVVAKKGKKTAYVAVARKMLTVIWHLLVNGEAYVEEGFEKKVKRCKVAYGGHVPLEEMAEVLRSAGYTVVANG

SEQ ID NO: 86213 - protein, 313 aa, unidentified
MKTMKDSIGIDISKAHLDVYRPDPGTSARFSNDPVGFRALTRFIGPKQPDLVVYEATGPYHARFEQVFSRRLPLVKVNPLQARRFAQACGTRAKTDAVDARMLAQMGSALDLVPDEPAAEDQNELKELQIARMALVKDRTRLKNRLKTQTLGFTRRQTKARLAQIERQLEALQSEMASLINACPKRTRAYAILRSIHGIGEVAAAAILIECPEIGTLGKKQAACLAGLAPMTRQSGTWKGKAFLQGGRKHLRDALYMPALVASRFNPDLRDKYQAMINAGKPAKVALTTIMRKLIELANALIRHDRKWKAKLA

SEQ ID NO: 86214 - protein, 393 aa, unidentified
MFYLGIDIGKNTHVASLMDEKAKIVFKAHSFSNTSEGAATLLEKITPYASELEIGMEATGHYWLSLYSFLVENHFVVHVINPIQTDGWRKGTEIRKRKTDIIDSVLIADFIRYGDFIETSLADEDTMSLRNLSRFRNYLVGSISDLKRKTICVLDQTFPEYHSAFTDIFGKTSKELLLQFNSPSDYQDVTSEQLDELLSQVTLKGFATKKLKDISSLAKTSFGITFCVDSFSFQLKLLIEQINFIEQQVSDVESQISELLKKINSLITTIPGIGDVTGATILGEIGDINRFSNASKLVAYAGIDATVSQSGEYESTNNRMSKRGSPYLRKALFRAAFVASNHDPVFKAYYQKKRSEGKHHNVALGAVARKLCHTIYAVLKSNVPYEVQIPREK

SEQ ID NO: 86215 - protein, 399 aa, unidentified
MRYAGIDVGSQTHVVAIVGPDGDVLVKPTSFSENAAGYDKLLELLGPPSKLIVALEATGHYGKNLCAFLRHRAYGVAVINPIRTNRFAQENLARAKTDTIDALGIAHFALQKTLTPQPPIDTKAAELKELVLFHERLVQDFTDRVRQLHRLVDLGFPEFRTLVRTLDSRLATTILREYPTAAAFDQSCRRRLARLRYDKQRRVGPLRACRLVESARSSIGQHHTPAFQERVRYITQDLDRLRDRIDSLKSDIETVVGDLPLACLLTSIPGIGSLTAARIIAAVEDPARFRSAAAFAAYVGVVPATRLSGLHRPTRARITSLGNARLRKALWMPVLSSVRHNPWLRDYYQRLRERGKLPKVALTAVMRKLVTAIYSVAKHQRPFTHPPPGPTRSRLSPPT

SEQ ID NO: 86216 - protein, 315 aa, unidentified
MSKDTLDANCARGQRKQARTFENNPDGWKRLLSWLKAMGGKQAHVCMEATGRHSLGVALALHDAGHVVSVVNPAQIRDFARTKLGRNKTDKVDAALIREYAALFKPGRWTPPSPAMRRLCELQTMRAGIVKNRTEWKNRIGSGLGDSTATKLAAATIEHFTQQLEAVDQAIGETMDQDGALRGRRDLLLTVIGVGETLAASLLVEMPEPEVLRRSGEMVAYAGLNPSHHRSGSSIDRPTRISKIGNATLRSSLYMPALSAMRYNPAVAALVARLQQAGRLTPKQIVIAAMRKLLVICFGVLKTSTPFDPAIAMPA

SEQ ID NO: 86217 - protein, 417 aa, unidentified
MLNKVTKQSVLWIQHHFILYSGGIIMVCVGIDVAKDKHDCFILNSEGVVLADVFTIANNREGFELLLQKIRSCTHPADNIKVGLEATGHYSYNLLGFLLDCGLPTYVINPLHTNLYRKSLSLRQTKTDRIDARTIASMLMSDVNLKSYTDIAYHNEELKSLTRYRFDKVQDRAKLRQSVSRLVNILFPELESLVPTLHMASVYALLSEFPGAKQIAASHLTHLKSILYEASKGHYDRDKALVIREAARQSIGCCMPAKSLELQHTIRLISELDKEIAEVERAIQSILDEMAPPILTIPGISYRMGAMILAEIGDFSRFDSPDKLLAYAGLSPSTYQSGKLNATGAYSHMEKRGSRYLRYALFNAAKYVCHWDPTFAAYLAKKRAEGKHYNVALSHAAKKLVRLIFALQTSGRSFQPA

SEQ ID NO: 86218 - protein, 357 aa, unidentified
MKKRLNADTINVNGKTVNVGIDVHKLSWHVTALVEGVIVESATIKPSYRVLKKLLAQYKGARIRIAYEAGFSGFNLYDELTADGIECIVVSPSLIPVESGNRVKTDKRDSRKLAQYLENNLLKRVYVLSKQERAHRQFVRTRRQLSDHRTDVMRQIKSLLLFHGLPSFDGNRGFWTRPVLRALRSITPDEYVSRSLNTLIDLYEYLTQQVKNLTREVRKLARTEKYARRVELLTSIPGVGVLSAMEVLTELQDVSRFATADQIAAFLGLTPAQYSSGQHVRMGKITHTGNHRLRTRMVECSWIAIKKDPGLNKTYQAIKMRRGGKRAIVAVSRKLIIRIRRILLDEVTYRKECAIAA

SEQ ID NO: 86219 - protein, 342 aa, unidentified
MDHFAGLDVSVKETSVCIVNDTGRIVREVKVASEPEALLAVLKNPAYHFERIGLEAGPLSQWLFSALAEAELPVVCVETRHMQAVLKAQINKTDRNDARGIAQMIRVGLYRPVHVKTLRSQKLRMLLTHRKLLQSKAIAIENDLRGTLRNFGLKVGMVGKVRFEARIQELVENLPDLAELVEPLLIVRRALREQIVILHRRLLAIVRDDEVCRRLMTTPGVGPVVALTYRATVDVPARFRKSKSVGAVFGLTCSKYQSGEIDRSGSISRCGDEMMRVMLYEAAQSMLRSKKWSWLKAWAMKIARRRGMKKAIVALARRLAVIMHRIWVDGTEFRWTREAAAA

SEQ ID NO: 86220 - protein, 322 aa, unidentified
MKEKRATKSVGVDVSKKYIDVCYRQSPGVWAYKTINNDLAGYRELVKITGRASHYVMEATGIYHLGLAFYLSKKGIKLTVLNPLIIKRYRQMQLGRVKTDKADSKCIAEYGESQPLEIWKGPSELLLKLHQEDTLLSMLQAQRIQLINQQESLKHQPVRSKLAEKIVKLQLQSLEKEISGLEKSIVEQMESEYKEEMNLLSSIPGISRRSAALLLIVTRGLKDFESSKQVSSYAGLTPMLSESGSSIRKKGRISKMGSSRLRKQLYMCSWSAIRFNDQCKQMYERMRLAGKPGKVIMVAVMNKLLRQAFGVIKNKESYRIAA

SEQ ID NO: 86221 - protein, 368 aa, unidentified
MIVHIITYERSTLVNDEKYIGLDVHQATISVAVMNATGKVVMESILETKTSTILEFFAGLHGTLWVTFEEGTWSVWLYDLLNPRVDKLVVCNPRKNALLKDGNKSDRIDACKLAELLRGNQLKQVYHGETGVRMLRELSRSYLTIVKDLSRVMNRLKAVYRSWAIPCAGRDVYYRRHRAQWLAKIREAGVRRRAERLYEQLDMLQHLRQQARRELLAEGRRHAITAKLRQIPYLGPIRSVLAVALIQTPHRFRTKRQLWAYSGLALETRTSADYRYVEGQLRRSKKLVSIRGLNKDHNHDLKGLFKGAATMASVRPGPFQDFYQAALAKGIKPTMARLTLARKIAAITLTLWKKGENFDAEKLKSQAA

SEQ ID NO: 86222 - protein, 403 aa, unidentified
MICFAGLDWGSATHAACVVDDKGTAVARIEVTHTAEGLKKLLSALAKLAPASEIPIAIERPGGLVVDTLVDAGHPVVPIHPNALKACRPRYCAAGGKSDPGDAYILADVLRTDGHRFRPLRPASDEIRALRALVRSRDDLVAERVAVANQLRAMLESFWPGATTIFADIDSPIALAFVEAYPTPSRARSLGPKRIARFLARNRYSGRRSPEALLERLRSAPTGLVGPLEEEARGEAALDLVAVLTTLVARIRRLTSTIEHTVAQLEVGEVVMSFPRAGKVNAAQIVAELGDDPERFQTEAQLAAEAGVAPVTHASGKSRGVVFRYACNKRLRRAITTWADNSRHSSPWAKAVYARARARGCDHPHATRILARAWVRVLWRCWRDGKRYDAALHGAARPFIEAA

SEQ ID NO: 86223 - protein, 401 aa, unidentified
MKRLSRGIDIGSESHHIIILDEEDNVLYNQKVSHKLSEFTKNIKLFKQIEKQEGGKLSFALEGKNGYSAPLDRILLDQGFILYNVDNLKLKRFREAFAGEWRDDYRDSLMLSKMLKLKDYINSEREKVFIKIEKPSPLTESLKLLSRHQQTLIDEKVRLINRLGKKLLEVCPQILKLGKLKNKKIIAILAKYPDFSKYKRITLKSLLKIKGIGKKGAFFLLKRLNNIEYMPGLTDIYKTIILSYAQRILELQKEIKDIDKSLDEIGEKNKEVKHLKTIPGVATKLASRLIGEIGDINRFPSEKQLAIYCGVACVDNNSGKVTKARAVYKANKICKKTLITMAGGSIRFSFQCKAYYLKKRAEGKSHNHALRCMARQLIKVIYKMLTEDRDYIVRKELKKVA

SEQ ID NO: 86224 - protein, 344 aa, unidentified
MVTFGVDAHKRTHTIVAVNDRGTPLGQTTVGTTSQDHLVLLRWAARFGAERRWAVEDCRHLSRRLERDLLAAGESIVRVPPKLMAHVRDSARTYGKSDPIDALAVARAAQREPNLPLARLDGPDREVRLLVDHRESLISERTRLICRLRWHLHELDPAWEPKARSLDAQRTLDEVRGRLQDHVGVVARLAVELTERCAELTITIKALEKEITELTTQLAPALLDLPGCGALTAAKIIGETAGVDRFKSRDAYARFNGTAPLPVWSSNKARHRLSRTGNRQLNAALHRIALTQARWHPPAKEMIERRKSGGNSGREALRVLKRRLSDAVFQALLHDQTAGLTLAA

SEQ ID NO: 86225 - protein, 410 aa, unidentified
MSHRVAGIDVHKKVLMVVVIDNHDAGWAMKRKRFGTVCSQLRLLSEWLREQGVEEAVMESTAQYWKPVWYELEREMRLHLAQAFSNRAPKGRKHDFRDAERLVRRLLAGELTLSLVPTGEQRSWRTMTRMKTHLTQDQSRLQGQIECLLEEMRIKLSSVVSDLMGVSGLRILTALAAGQSDARKLAGLRDEHLRASEETLVDALSGYFHPYQQQLLGFYLQRYQLIQQQIQQLQIMIGQAMEQHQQAVRRLVQVPGFGVNSAQQVIAEVGVQASTFASAAHLASWVGTCPGKEESAEKNKSSRSAKGNRYLRRILNQVAHAAVKKQASHFQIVFRRLLPRLGYKAALWAIAHRICRLVWKILHDQVDYIEKGGQGDPKTKQQRARKLLRALRKLGYDATIANLHPAQADL

SEQ ID NO: 86226 - protein, 405 aa, unidentified
MEILVDRACGMDVHKATVVACIMGTGIKKEIRTYTTMTNDLLRLKDWLTDNRITHVAMESTGVYWKPVFNILEDSFDVILANARHVKNVPGRKTDAEDSGWLCKLLRSGLIRGSFIPPKEVRELRDLTRYKRKLIQTITSEKQRVEKILEDANIKLSSIASNTFGASGKRIIEELMKGELKPEAMAELTKGRLRSRKAEMKEALVGNMEDHHRFMIQAHLTHIAMMEGLLSTVEQKIQETIDRHFKEGFELLKTIPPVKDSASVVIAEIGVNMDLFPTEMHLSSWSGMSPGNNESAGKKKPGVTTHGNKHLKTILTEFGWIASKMKGTYLWSKYHSLVGRRGKKKALVAVGHKILIMCYHILKYKVPYKELGPRHLDERRKDRIAKSYIKRLSSLGYAVTVKEAA

SEQ ID NO: 86227 - protein, 326 aa, unidentified
MTMTSRYARVIGVDVSAERLDINDSMTTSKARIAAELPNSVAAVSKQMVAKLKGHDSVLVICEATGGYEHILVDAMHEAGIDVCVANPRQVRDFAKGHGYLEKNDRIDAAIIRKFGEDVSVNLTSPRPAGEKSQQAMVRRRCQILQLIAAEQNRLGQTSDEFAIELIEESISHLKTQQKTIDERLAEMLRERAKKDPIVEILQSVPGIGVVTVSTLVAELPELGKLNRAQIAKLAGVAPLVNQSGKSDKKRSTRGGRSQVRCVLYMATLVATKHNPVIRRFYQRLLSHGKLKMVALIAAMRKLLTILNGMVRNGEPWRLQPASPTN

SEQ ID NO: 86228 - protein, 414 aa, unidentified
MLFVGDDWAEDHHDIELMDASGRRLARARLPEGVAGMARLHALIGEQLGEDADETAEQVVIGIETDKGPWVQALIAAGYRVCAVNPLQASRYRERYGMSGAKSDGADAHMLADMVRTDSHQLRPVAGDSAEAAAIKVVSRAHKSMIWERTRHMQRLRHALRDYFPAALEAFEELTTPDALELLAKAPDPASAAKLTLTQIRTALKRARRRGDIDTKAGKIQAALRAEHLGQPAVVAQAYATTIRAATAVLATLNEQIKTLQGQVEQHFGQHPDAEIVLSQPGLGPILGARVLAEFGDDQHRYTSAKARKNYAGTSPITRASGKKKVVAARYVHNDRLIDALLSQVVPAMTASPGARALYDELRARGTDHFAACRHVANRLVGILHGCLKTRTLYNEETAWAHRSAKPEEAAVAA

SEQ ID NO: 86229 - protein, 410 aa, unidentified
MQALVERGCGLDVHQATVVACLLIVRKDGKVQKQMRTFGTTTRELLSLREWLLSESCTHVAMESTGVYWKPVYTILEGALEIVVANAQHVKKVPGRKTDIKDAEWIADLLCHGLLRSSFVPPKPVRELRDLTRYRRKLVESQAAERNRLLKLLETANIKLSSVATDVFGMSGRLMLRALVEGKATPQEMAELAKGKLRKKIPELEPALEGKVEEHHRFLLRLQLDRLEAAEKDLAVLEQRIQEKLKPYEAQLTLLDEIPGVDWTLAAGIIAEMGVDMSVFGSVWQLASWAGVCPGNNESAGKRKSSRIPKGNVYLKTALVEAATSAAKAKGTYLRDKFYRLKARRGYKRAAVAVAHKILVAIYHMLSHRVCYNELGDAYLDKRNKHQLTRNLIHRLMRLGYTVMLEQKAT

SEQ ID NO: 86230 - protein, 371 aa, unidentified
MNNNAYVALDVHKNTIVAAISPKAGESTILGDYTNSKSGLKQLLSRLSKLSSDYEEIRICYEAGPCGYEVKRILEKNKYPCEIIAPSLIPQRAGDRIKTDKRDALKLARLYRAGELTAIAVPTELQESVRDLVRCREDISRALLAARQKANHFLIRHGCFYEGRNWTKGYFAWMKGIEFENRYLKETLNQYITHIEHLYFQLEDIDREMAKIAESDEYKTKVDALKAYRGINTLSAMVLITEVVSFRRFGKARELMSYIGIVPSEYSSGGTIKKGALTKCGNKRVRRILVEAAWHNRHDAKVTYPMKVNLKKIDAELRNPPLKALKRLNKRYYHLIFAGKPKSKAAAAVARELAGFIWHSMVIVESRLCNN

SEQ ID NO: 86231 - protein, 334 aa, unidentified
MDKVTTVGIDLAKSVFSLHGVDGAGRVLLRRTVRRDQLIQTVAALSPCLIGMEACSGAHEWGRRFQALGHTVKLMAPKFVAPYRKSGKNDGNDAEAICEAVTRPSMRFVPVKSVEQQALLTMHRVRQGFVVERTATINRLRGLLCEFGVVLPLRSVTVRRQAAAAAEKLPELARRAIGDLLEQLRVLDERIGGYDREIEDQARLCEPAQRLMKIRGIGATTALAIVATVGNAREFKNGRQFAAWIGLVPGQYSTGGKTRLGHISKRGDAYLRNLLVQGARSVLHSASGHQDRMSRWILELQPRRGYYRTLVAIANKNARIAWALLAKNETMRSA

SEQ ID NO: 86232 - protein, 357 aa, unidentified
MQSQNNNLDFSKHEFYVGIDVHKKSWNVTIRSNSIVLKTFSMNPESEGLKNYMEKNYPKGKYYSAYEAGFSGFNTHRELKQYGFNSIVVSPTDIPTSGKERVTKTDKVDSRKISRELENGNLKGIFIPSLLQQEIRSISRLRYQQVKKQTRIKNQIKSYLDFYGHKLPATPEMKRWSRKFIEYLQNLEFQYSMGKEQLEIYIEELLVIRNRIVQIMLSLKKHCTQYGLDKDIKLLRSVPGVGPITAVTIATEIIDINRFSNSEKFASYFGLVPSTNSSGEKERVLGLTFLFNSYIRSLIIEAAWISIRNDPALTLAFNNFSKRMSKQESIVRIAKKLLNRIYFVLKNNTEYVYAVVK

SEQ ID NO: 86233 - protein, 308 aa, unidentified
MAKNFIGIDLSKARLDIHDPQTGKDSCCPNARTGLRRFVRGLGPDDIPVFEATSGCDRLLIEELTLGKRRFVRVNPLHAWHYAQSLNLPKTDRVDARMLARFGTERQPAPTPLRDPARDELAELTGRRDHLKRMETEEKNRLARTANPIAARDIRASIKTLAQRIARFDAEIRACIAHNPKLSETARLITSVPGIGPVVAAGLMAWMPELGTLDRRAVASLGGLAPKARESGMYKGHRRLGQGRCHVRRMLYMAALSLWRNPGVVGDMVPRMRERGKPNKVILIALARKILTFANAVLRDRKPFQSNA

SEQ ID NO: 86234 - protein, 403 aa, unidentified
MSNYFAGLDWASKTHALCVIDERGGVVERFDIDHDAGGLTELRRRLRRFGSPPVAIERPSGLLVDTLVDADFTVVPIHPNAVKASRPRYRSHGGKSDACDAYVRADLLRTDGHRFKALTPQSDEIRALRALVRGRDDLVATRVHLANQLRTLLESFWPGAAAVFADIDSPIALAFIERYPTPESASRLGPKRMAAFCAQHAYCGRRSPDDLLARLQEAPSAVSAETEMEAKGELARCVARTLTRLVEQLRLLSSRIEHLVASLDDGRILMSFPRAGRICAAQILAELGSVRERFATDAQLAAEAGVAPVTYESGKSKAVTFRWACNHRLRAAITCLADNSRHVNAWAAHVYANARARGCDHPHAIRILARAWLRVIWRAWTDRKTYDPMQHRAAQLLLKAAGG

SEQ ID NO: 86235 - protein, 400 aa, unidentified
MQESGVVAGIDWAAELHAVCILGGDGGVIEHFDVTHDSQALRVMVSRFRKAGVAKVAIERGDGPVVQVLIDAGLAVFVVPSRQIKALRTRYGSAGNKDDRLDAYVLADTLRTDGHRWRPLREDHPETKALRAMCRARKDLVETRVQVMNQLRANLELAFPGALGLFSRPDSPITLAFLRRFPTAAKAAWLSPARLDRWLRSAGYSGGIAAQTLYRHLERAAPGLDGVEAEARGEITIGLVATIETLSAEIARIEAQIRKLFDAHPDQKIFASLPRSGMVRAATLLAEIGDCRERFPTDDALAALAGASPSTRQSGKHEQTVFRWSCNKKLRGAVMDFANGSRLGDEWAMQVYQRAIARGCRHPHAIRILARAWIRIIWRCWHDEIPFSPQVHTSRKLSAA

SEQ ID NO: 86236 - protein, 340 aa, unidentified
MNATTYGLDVAKRVFQLYWVDAHTGEIVNRRFGRDELIGFLAQRPAGRVALEACGSGHWWARKIRALGHQVVLLHAKFIRPFVQTNKTDAADARAIWTAVQQPEMRTVAAKTEEQQAMLALHRMRALLVKFRTMQVNQLRGLMYEFGVTFRSGRLAGLAEMRARMAELEEALPAMLFEGLQDQLQRIDRLEHDIDQLEKRIGAWQKQEAACRAIAAVPGIGRLTATALVATIGDARTFKSGREFASFLGLVPRQTGTGGRIRLGSISKRGDPYVRTLLIHGARSVMYHAKVPTPWLIEIQARRPANVAAVALAHKMARTAWAILAHGREYQKDYVSAKPA

SEQ ID NO: 86237 - protein, 361 aa, unidentified
MLYRTSIGLDVHARSIAATAFIPETGEIVQKAFPYDAGKVAEWAKGMPQPARCVYESGPTGFDLKRKLDKAGVPCVVGAVSKMLRPSGDRVKTDRRDATFLARMLAVGNIVEVAMPTEAMEAARDLARAREDCRHDLMRARHLLSKFLLRKGIVYPGKTAWTKAHREWLGRLEFADPCERLVFGEYLESVRSLELRRARLDRAIEERAAGEDMAPAVSALRCVRGISTVTAFSIAAEIGDFSRFPDARSFMSSVGLVPSEPSGGESVSRGRITRTGNIHVRTLLVEAAWQHARPLRPMSAAAMGDAAGVPADVAEAAVRESCRLHSRAAHLRGRGKPASVVNAAIARELAGFVWALARMAG

SEQ ID NO: 86238 - protein, 395 aa, unidentified
MSAEGEAIRSNDYRKDTTVKAPSTRPAAVLGLDVGKSSHWACLIDRDGEVLSSAPVRNREAELDALFASVPTGTLVVVDQFRNIGSLAVRRARAAGLGVAHLPGLAASRAAGLFAGEAKTDERDAAVIARTALGVPDSLSGVPGRGEALEAARALSSQRDHVVACATRDKNRLRAVLLESCPALEAAVDLSDRRWLELLAGFGGAWGIARSGAEGPRAEAAGEAAAASTAPPPALIEAENRQVRFLAARISEALDEAGALEAETAALLEGDETYACLLTVPGIGPRTAAQLAVSVDIGRFPDHDHLASYCGIAPRVRSSGTSVRSVRASRRGDARLKSLLIFSCNSLVRSSGRYGEYYRACRARGMGHGRALKAVARKRLRAIYAVMRDRVPYRE

SEQ ID NO: 86239 - protein, 367 aa, unidentified
MKDSITVVGLDVHKNSTTIVTADAFGDMEVRHFGTIGGTIDALERAVRKLVSRGTTLHFVHEAGPCGYEIYRHLTKKGFLCKVVAPSKTPRKSGDRIKNDRRDAETLARMERAGELTAIHVPSEEDEAMRDLSRGREDAVRALRTAQQQLSAFLLRYGKRYPGKKPWTPVHMRWLSDLSFPHRSQQMVLEEYIGTVREGTERVARMTDQILQLLPEWRWNPVVKALQALRGVAPIVAVTTIAEIGDLSRFENPRQLMAYLGLVPSEESSGESTYRGSITKTGNGHVRRALIEAARAYAFPARVSRHLLKRQEDLPEPVRAIAWKAQVRLCGRFRRLSARGKLSNKVVVAIARELSGFIWAIAREVRV

SEQ ID NO: 86240 - protein, 352 aa, unidentified
MSEITTVGVDLAKDVITICAADKTGRPAYSRQFTFYGFAQWAATLSQVTFAMEACSSAHHWARWLNARGHMAKLIAAEHVAPFRMSRGAKNDRTDAQAILAAAVQPTMRFVSVKSVEAQAMLAVHTMRRGWTAERTALVNRTRGLLAEFGIWLGRSTSRLERELPALIDSETVPPLVRLLLRQARAQLDALDQQIGDCDRQISDHARHSDAAQRLQAVADIGPVTSSAIVATVAHAADFRNGRQMAAWLGLVPRQSSSGGKERLGKITKRGDTYLRGLLTQGARSTLQVALQRPPDKRSRLQSWIVAVHDRTGYHKTLIAIANKHARILWAILAHGDKYNPDAWQQYAGAAA

SEQ ID NO: 86241 - protein, 438 aa, unidentified
MSNKVIFNVDELFISVGIDVGADFSWMSIALPNQQFVGKPYKILHNSMDSLTAAVSKIKEAEELYSLESRIFLESTGIYHYPLFCYLRDKGFNVSVINPIITKNSTNINIRKVHNDRFDSKKAALVGLKPDLKVSLMPSDLALNCRNLCREYYDLMDNRSAYVNKLQGELRMAFPQYLGIFSKVTINTSLTLLETYSSPSAFIEADKQEIIGIIKSTARFGLTYAQNKYNAIIQAANEANEFGYIIDSNIKRIRLYIGFIRKYDEEIKGILGSMHELVDANEATDFVKQIHLIETFKGAGFLSAVSLMGEIGDFSAFSKPKQLFAYFGLDPAVKQSGKFEGTKIQMSKRGSAIARRVVHTLTLQSISVSRTGEAKNPVLRDYYLKKCGAKPKLVAMGAVSHKVCNIIFAILRDNKPFEIITPQEHIKQYNAAKCDIAA

SEQ ID NO: 86242 - protein, 395 aa, unidentified
MKKNNTTSEGKRTAKPSRRAITKASNAEQLTIGLDLGDRTSHYCILNASGEVIVRDKVSTTKVELTRKFNLSGRVRIVLEAGTHSPWVSRCLMKLSHEVIVANPRKVGLITGSRRKNDRIDAEKLARLGRVDPKLLSPIVHRGEQAQEDLVQIRARHELVKARTALINSARGLVKSSGSRLAQCDADQMGPAQAAELPAGLRNSIAPLLETVAQLTAQIQAADQRIHEIAGRYPEIELVTVIYSVAELTALTFLLTLDNVSRFGKSREVGPYLGLVPGQSQSGDSDPQQCITKEGDRMVRWLLVQCAHTLLRHGAPDSDLRRWGLDKLEQEKQKPGKADKKSAGKKKVLVAVARRLGVLMHHLLATGEVYDPLYGAKQQAAQAAARAKKAARRAA

SEQ ID NO: 86243 - protein, 354 aa, unidentified
MKRTTKYVALDVHQATTLASVREESGRVIARSILPTDGPALTEFFRGMRGAIHVAIEEGTQAQWLHDLLAPHVDRLIVCDRRGQPRQGNKDDRHDADALSEQLRRGGLRAAYHGGGTGAGLKELTRCYQNLVEDTTRVMLRLKAVFRARAIQTPGRAVYRPARRAEWLAQLPPGGARVRAEALWAELDALVALRPQAKTAMLATAAREPGWAGLRTIPCFGPVRVALLLATMQTPWRFRTKRQLWAYAGLAVVTRSSADYVLVDGQAVRRRRAPLTRGLNRNHHRLLKHVFQSAATAARARPGPLQDLHRALVARGLREPLADVTLARKLAALTLRLWKKGERYDPTQLTQQAR

SEQ ID NO: 86244 - protein, 409 aa, unidentified
MVVGIDIGSTTQYARAFDWRGIELGKVFTFSNSREGFESFKAWMQHLQDKYKKLDAIVGIEPTGHYWFDLGAYLEDEGILLVMVNPYAVKQTKELDDNSQSKNDRKDPKVIAKLVTEGRYSAPYTPDGVYADLRIMVANRKRLIREMTQIKNRFARWFAIYFPEYTDVFGDYEAQSSMLLLKKTCTPEAIVELGAEKINQIWRDAKLRAVGMKRATTLCETAKRSIGLKKGSSAAQYEMKLLLEDYEYKKAQLDAVMEEIEKLCRKIPESEQMLAIKGIGVITVAGFLAEVGDVRRFESPRQIQKLAGLSLRENSSGKHKGQTTISKRGRSKLRAVLFNAAIPLIAKNPEFKSLHEYYTTRANNPLKKKQSVIAISCKLIRVFYAILAKGVTYDAQKLISDIHRQPQVA

SEQ ID NO: 86245 - protein, 402 aa, unidentified
MNSVGIDISKGRSTIAVMRPFGEVAISPFEVRHTDSELSELARRLKSLNGETRVVMEATGNYHAPVAKQLHDAGLYVSVVNAKLVHGYGNNDLRRVKTDRKDAIKLANYGLDRWLTLPRYIPEENTRLLLKNCYRQYRQYSKVQTVLKNNLISLLDMTFPNANRLFNSPARADGSEKWVDFVAEFWHCECVSERSLKSFVNKYWRWCRKHGYNFSEEKAHAIYDEASGHIGVMPKSETTKLLVEQAVSQLSATSAALAVLKQEMQSLSSQLPEYPVVMDMFGVGPTLGPQLIAEIGDVRRFYSKKALVAYAGIDAPPNDSGDVIGRHKSMSKVGASSLRRTLFLVMSVYLQNSPPNEPIYQFMNRKRAEGKPYRVYMMASANKFLRIYYATVKAYLEILEQI

SEQ ID NO: 86246 - protein, 297 aa, unidentified
MNYNTVYVGMDVHKETFSLCCYTNEKEQAEYPQKVDAHYSKVLNYLEAMRFHYGDDVMFICGYEAGCLGFMLYHQLTSHNVKCIILAPTTMSKPTGKKKVKTDKRDAALIARCLAHHDYSPVHILTEQDEQVKEYIRMRQDHKLALKKIKQQILAFCLRHNYRYDTTKSHWTQAHLTWLRSLAPEGLYQEILTEYLVTYDQLTDKLERLDQRIEELASKEDYQENVSHLSCFLGVKTQTALSTLVEVSDFKRFASAQQFASYLGLTPGEDSSSGDQNRLGITKAGNSHIRTLLVEAA

SEQ ID NO: 86247 - protein, 525 aa, unidentified
MAQVARRRKSVRRQVDSPSPRSAGELTARVREVGVDRLAFVCVDPAKHRSRWMLVNFLGDHLIQPTTVEHSAGQLRALVDRVRLMVQQADLRTVWVIVERTGQYHLPVKRAFAEAGFETRIVHPFATKQYRLVGDPDIKTDDTDLVALHRAAIAGFGLVELPLDENYRALRLLARHRRDLVEKNASLRCQIHEHLHLVMPGYARCFDDLWDSPIALPIARRTGTPQAVLDIGPVHLAQSLRDDKVRYRDSTLDRILVWAREAPTPACDASLHQRIWTTLDDDRRARSLEIQALERDLAAILVRTPHLLLIAIPGINVPSAAELAGEMGPIAHYANPNAITGRAGVYPSRYQSDQTDLPNGRLVRCANRRLRTALLRIADNLVVNNRWFKASADLKRKTGADERAIRVRAAKKFTRLAFVVLAARQVLRHPCCQPGDAVLAKLSQFHRVHSTSAAQLMTDLQAAVEQFPQEAYTHEADALSALSTKLANNVRRRQGPSPLGELLPALLSRLTKTTSRKSSEEQASL

SEQ ID NO: 86248 - protein, 344 aa, unidentified
MENYAGIDVSLELSSVCVVDAQGKILKEAKVASEPDALVEFFETLGFAVKRIGLEAGPLSQWLHAGLKRAGLETVLLETRHVKAALSAMTVKTDRKDARGIAQLIRMGWFRPVHAKSVDAQEIRALLIARKQLLGRLIDVELSIRGILRGFGLKVGPVTRKNFEARIRELVAGQATLERIATAMLSARSALKAEYGRLHKAVLAIVRDDAVCRRLMTVPGVGPLVAVTYKSAIDDPHRIVKSKAAGALFGLTPKKYQSGEKDVTGGITLAGDEIVRTVLYEAANVLLSRITRFSKLKRWGMDVAKRRGSKRAKVALARKLAVILHRIWVDGTTYRWTEAGPIAA

SEQ ID NO: 86249 - protein, 482 aa, unidentified
MKRKSIFKNNSQNIDAAFIEAGLPEKVLLVPLDFAKSTHYACFCDGLGRYLRQAFTVKNNKEGLDYLVERIEATRKSRAIRDKRHVIVGGEDSASYTRNFMQRLGELGYLAVRLSSCEVHRQAESVDSSTDRTALRAIAKTMLNRDARPIDGHDVYNELRALTRQRRRIVHLNTAVKNRIHTHADRLFPGFLAKDSALAPFSRASLELMSKPSFGAVSISRKNEKTLEQLLKRHGTPRSVEVASALKQQARDSIPADKDSARLSAYILAGELELFRALESNLQTLDKECARLLARTPEAFVTSIKGIGITLTSSVCAESGSLAQVTRADSLNAYAGIVPKVKQTGGPESEAKIRGRRRSFNRVLKDYTMQAGNHLYLHGPEELMQDAVRRKLVGKAVDTAMARRFLRIARALCKNHFIYLPTHLRGQNASSQERVQYILDTWPALLVKWKRLGLHEEAFASENPLGQWRLIMQEIHDIDLPL

SEQ ID NO: 86250 - protein, 343 aa, unidentified
MQVIIGVDPHKASHTAVAIDAKECQLSAKKVRATRAQVSQLLEWAEPFPTRTWAIEGADGMGYLLAQQLVVTGEHVLNVPATLASRIRLLGTGHSSKNDPNDAFSVAVAALRTSGLRQVRPVGHGEVLRLLAKRNSDIGRQRCRVVSRMHALLLELDAGGIAKEIKASDVDRFLAAVQPTTPAEQIRYDVALELLADIRRLDEQLKTSHKRIATAVAASGTTVTDIFGIGPVIAAMLIGYTGDITAFANRDRYAAYNGTAPVEFSSGGRTVHRLSTRGNRNLNHALHLAAICQIRHAHSDGRAYFDRRVAEGKTKKEAIRALKRQISNSVYRHLVADTASTRG

SEQ ID NO: 86251 - protein, 385 aa, unidentified
MKRARRRGPGPSHLLMGPDHAGNVVGVDPHKRTLTATVADARGGILASAHFRVSGEGHRELEAWARQFGPIARWGIEGSASWGRHTAVFLIGRDHDVRDVCANRTPRSDRARQRGKSDTLDSERIAREVLAHPLLPKAFKRSGQEQGPDEQHQLLALWHNRRRSILTSRQHLVNEAEHLLCELPLSLRAQLPDSKAVRPRLRALAARNRRRRYDPPTRLRLQLLDDYQAQITQLDGEEKRIVSQLEALVRASGSTLSDLRGLSTRSVAELLVEVGDVRRFTEGGFARFNGSAPLPASTAEGPTEPIRHRYNPGGNRRINAVLHRMAVTQLRCEPRAQKVYANARAAGHTKKEARRVLKRHLSDVVFRRMLRDLAAAHPSQPLLAA

SEQ ID NO: 86252 - protein, 410 aa, unidentified
MELLHRRCCGLDVHKETVVACLRLVSDGKVTTEVRTFQTTTADLLHLSEWLAANGCTHVAMEATGVYWKPVWHILDDGEFELVLANAAHVKNVPGRKTDVNDAMWLAELLAHGLIRASFVPDTQTQEMRNLLRTRKQLVREQSSHVLRVQKTLEDANIKLDSVLTDLMGKSGRAMIEALIAGETNPVKLASLADRRAKASHEEFREALRGRVTKHHRFLLRLHLNQIDALDAAMATLDAQVEANLGPFRTAVDLIISIPGIKNLGAHVIVSEIGIDMSRFPSHAHLISWAGICPRNDESAGKRRSNRLRKGAPWLKTTLVQCAWAAVKKKNSYLQAQFYRIKARRGPKKAIMAVAASILTAIYHMLKDGTMYKDLGHDHFDRHSTDQQKQRLVKRLAELGYVVEIKPLAA

SEQ ID NO: 86253 - protein, 349 aa, unidentified
MRYIGVDLDKTNFVVCFLSEEDSYKLETFPLSKAGINRFTSELRKEDAVAVEVTQNIYYFYDRIKEFVERCVLVDTYRFAIIAQSKKKTDKADALALARFLKLDHLPEVPVPSEKVRQLRHLLQARETLVGMRTKLKNLGHAALTRSGIALSRSAFASSVARERLRTRDDLSAADKVILQSALRQIAELDKEIEQLEAEIVRLGKTLAGVKRLLQLHGLNLLSAISLLAEIGDIHLFETSKQLVAYSGLATSIRQSNQTTRQGHITKQGRKRLRTVAIRAVLSMVNRTNTPLMDFYFRKKREKGSGKAICATARKLLTIIFVMLKKELDYWYLEDRLYNRKLRQLNAAT

SEQ ID NO: 86254 - protein, 302 aa, unidentified
MGVDIAKSYLDAAIGNEKRRFANERVGHRELIKWVKQLKIPVQVICESSGGYERALVQALVGAQLKVSLVQANRVRQFARAAGILAKTDRIDAKVLCNFAEAMQPGTISASQLEQQHLRELESQRRHLTHLLVMEQNRAARVSDGCVRKLNRSLLKQIKKQIEQLDLFIKEHIEASPELSAKAQKLTAINGVGARTAALLLAQMPELGQLNRREVAALVGVAPFNRDSGKMRGKRAIYGGRRPVRHGLYMAALVAARHNPVLRTFYLRLRAAGKPAKLALTATMRKLLIVLNTALKPDLNYA

SEQ ID NO: 86255 - protein, 368 aa, unidentified
MDNVITAFVGLDVHKDSIAIGVAEPGRAAPRFVGTTGPQLPELVKALSHLGRPEQTLIAYEAGPCGYALARQLLARGYRCEVIAVAKMPRRPGERIKTDRRDALMLARYLRAAELTPVVIPDERDEAIRDLSRAREDAVHARLKARQQLKAMLLRHGHRYTGKSSWTAAHERYLAAVRFDHPAQDIAYAEYRSAVREAVDRAERITSSLREQVTAWRFAPVVAALMTLRGLEFVAAVTVVAELGDLSRFVHPKQLMSFLGLVPSEYSTGESRVQGKITKTGNAHVRRVLIESAWAYRYPARMSRELVVRNEGQSKAVRDIAWRAQLRLCSRYRRMHARGVHQNKTCVAIARELTGFIWDIARQLPAVT

SEQ ID NO: 86256 - protein, 496 aa, unidentified
MSRLASRRPRVSEATQPAPSQPTSPPPESASPIPALDSPALLGLDVSQAEVVACLFLPDGKIAARWSEPNNQPGAQALAERLVSLGRQHGFRRVRIGLEATNLYWWHLACFLKGTPSLSTLSPEVYLLNPRLVSGLKKAYSDRGKTDRIDAWFIAERLRIGRLPAPFEADLLYAPLQRLTRFRFHLAKTLAREKNYFLTFLFLKFSAFSQVDPFGDSFGATSSALLEEFTTEELVATPLEELARFLDAKGRGHFADPTELAETLQRAARDSYRLDKLLDEPLSLILGTTMATIKTLQRQIQEVDKTIARELAALPLERRIIRSIPGLGPVWTAGLVAEIGNVHDLDNEASIAKLAGLVWHPSQSGTFQAEDTNLAKSGNAYLRYYLVEGANSVRQHCPEYREYYEAKYAQSPKHAHKRALVLTARKLVRLIDTLLRAGMAYQDPETRQDWKEASAGALARTGRFLLPRDHVSSRPNSLKLPLDFSPHVLRRDDGFW

SEQ ID NO: 86257 - protein, 379 aa, unidentified
MTKRSSTPADAVLVAIDMSKHHQEVLIERPEGGRRRRMTVMATKADYDRLATDLGDIGHPVIVGFEATGNYHRTLAHRLLAAGFELRLISSVALARTREALHNGWDKNDSKDAQVILHMLRIGATQRYVDPLAAGINDLQEMSKTHEAISKAKTQTWHRILTHYLPLYFPEIERFAGNSRSDWFLALLERFPTPASMTTLGQEGFTREAWSLVGRKVSKARLLNDIYETACASMALPVDEDSIAITMFRMVIAQARSLIRQRDEIERTAHSMLAENRDYQLLRMIPGIGPINALTILAEAGDLRRFAHHRQFLKFCGLDLATCQSGMFRGRTKLSKYGNARLRRTFWMATQGAIRQRDNSFRDKLGSGPIKSLALAMTN

SEQ ID NO: 86258 - protein, 418 aa, unidentified
MNTNWTQHAYFAALDWASDHHDVIVLNRQGAVQAEFRFAHTAEGWAEFTVKMQSFTGAPITLETSSGPAVDQLLQRGWAIYPVAPTAAARYRERKVPSGTKTDRHDTWALADALRTDGHAWRPLRPQDEATATLRALCRDEIALIEQRTALVNQLQAALREYYPAALAAFNDWTAPHAWALVLQFPTPGQLQGAGKRKWEKFLHTQHLWRPQTAPERLQLFADAQGLPASPAVTAAKSLLAVSLVKVLVTLQTQLDEYRRRITEAFRQHPDHDVFGSLPGAKAMLGPRLLAEVGGVREEYPDADALLCQAGVSPVSYQSGKVNKCRLRRACNKMLRATVHLWANSSRLTCAWAQAYYQTKRDEGQSHANALRCLGKRWLKILWRLWQNHEVYNEAKYLAQLQKRGALTWTKLQTLQTV

SEQ ID NO: 86259 - protein, 334 aa, unidentified
MKTPVIGMDIAKHVFQLHTVDVATGKVERVKLMRGEVADFFAKRERSLVAIEACGGAHHWARQLQKLGHEVRLIAAHSVKPFVLRNKSDAADARAIWTAVQQPEARFVAAKNETQQSILALHRMRAQVMKFRILQTNALRGILYEFGEILPEGYEPFTKAIVPAFARISERLPAMLVDSLREQWARVQAISEDIRSLERRLSNELRLSTECRRIADIPGVGLLTATATVAAIGDPATFRSGREFAAWLGRVPRQTGTGGRIRQLGLSKRGNTYLRMLLMHGARSVIARGARTPWIEDLLARRPFNVVVAAMANKLARTIWAVLSRQTRYEAPAH

SEQ ID NO: 86260 - protein, 386 aa, unidentified
MHHATTLPAPERTCSRGDCATLFVSLELSRSTWVATALAPGSSKMSKHTLVGGDGRKLLDLLARLKTRAEQRIDAPVKVVAIHEVGLDGFWIHRLLAANGVESHVVDPASIAVPRRHRRAKTDAIDGETLLRTLMAWQRGEPRVCAMTVPPNPSEEDRRRITRERAKLLQERIRHTNRIRGLLFGQGITNYNPLHKNRRQGLEELRTGDGRSVPAHLKSEILREIDRLELVLRQIGEVEAERDEMLRLAPASSPAALLMRLKGIGPEFATVLYLEGLFRQFENRRQLAAYAGLAPSPWKSGSIDQEQGISKAGNPRLRTTMVELAWMWVRYQPASALSCWFRQRVGSERGRIRRISIVALARKLLIVLSRYVSHGEIPAGAVMKAG

SEQ ID NO: 86261 - protein, 400 aa, unidentified
MRAVFGIDVSKTSSEVAILVNGEKVHGYTILNDAIGFNRLLGDLKTVHNPEIIFEATGVYSRRLQAFLEEYSYAYTRLNPLEAKKQLDSLRVRKTDKIDAEKLAKSQLVHNRKPTYVQEEVYQHLRDLSRFYQNMTEDLVRTKNRLHKVLQVTFPELETLLSTPTGEQYWNLVMAFPCKEFVLSLSQSNLCEIVRQSTSKRISEKRIAYLTDKLIKLAKQSFCAVKNTSPMLEEVRYYAQELLRLSERRQVVLNDMVALAQPLPEYDILRSIPGIAETTATSIIGELGDIRRFQSSNQINAFIGIDLRHYESGNFLAKEHITKRGNPYARKILFKCIHNIASASHTNPCHIADFYEKRKRQSTIASTKPHTIASIHRLIRTMYYLITHNKLYDYSLTQNR

SEQ ID NO: 86262 - protein, 348 aa, unidentified
MNYVGIDLHRDFFVSAAQDDSGNELFRKRYNNSIASVEELTLQFNSPPMIVVEATRNWMWFIIALQKRGYPVQLAHPLRTKATASARIKTDSIDAKTLCDLLRADLIPKSYIANPEELDNRELARGRINLVHDQTLYKNRIMAILGKENLRFKGRDLFGIKGKAWLKEQLLSNTKRQMIEVYMRRLSDVQVAINTVDSLIKQRSSGIPEVKLLTSIPSIGPTTAFLLVSEIGNITRFPNSKKFASYFGITPRLSQSGNHAYYGRITKLGNLYVRWSLGQAAHRLARMDPEYKKFVDRISYRGGKKKAIVALSRKLATIVYYVLKENRVYEKRTKQSLKVCPAIILERS

SEQ ID NO: 86263 - protein, 583 aa, unidentified
MASTPALDRIGVGIDTARYGHRVSFLRPDRNPAAKPLTGMENHAGYQSFKDVLLRLREQNPGVEFHVRIDAAGQYAQNLEQFLHSLDLPMTISVGEPKRNKDYRKAHFPKRTTDDTESQAMARFAIVEQPPATPAPSATMIALHEVAGRLQARVKQTTQAVNRLHNLLARCFPELATLTDDIAAGWVLCLLEKYPTAERIAAAHLTSLEKIPYLSSERAREVQKAAKQSVASLRGPVAEALVTDLVRQIRHCQIAERSMQKLLTKAFAELPGSAHTQLQTIPGIGQATAAVLVAKIVDIDRFDTPDKLVGYFGIFPEENRSGVDRFGNPLPPGTMCMSRKGCDLVRGYLWNATRVAICHNPAIRPLYRRLRAKGKRGDVAFGQCMRKLLHLVFAVWKTNRPFDANHYPWENPNDEVAQDLAASSVAATDSGNNKAEGHKQDKPAGKVVTSAHSTIEPAPPSVKPEHPPVAARPHVDFAFLRQQVSLEQVLAHLGLFDQLRGRGPQRRGCCPVHSHPGDQERTFSVHLAKNAFRCFQKDCGAQGNALDLWAAIHRLPLYDAALHLAETFGVPRNREEEPVKGTR

SEQ ID NO: 86264 - protein, 428 aa, unidentified
MNEEDRSRLEEFRQFRKEIRGSAEYLLVGIDVAKDKHYAFFGTATGKTLFRRLVFENNREGFRKLLVQAEAMKVQEGLKKVVFGMEPTGNYHKPLGEHLIRCGQGVVLVSGVAAHENRKTLDGRWDTNDTRDAANVADLVSQGKCLFYEFPMGALQDLRNLLSLKRRFKRQEHGYRVRIRNHLLAKYFPELDQYYKQSESTSLSIVHWCLDPSVIAGLEYKRFVEMVAPGKGRISRENRLQAIWKVAVDSIGCEAGPTVEFEAQVMVEGLKQIRDALRSIEEKIQEICSPFPEYEYLLSIPGFGPDVSSKVLGAIGDPFRFQNGKQVLKLAGLDLNAERSGKSSDLARPVISRKGKADLRYALYQAALIASIRDRHFIVYFTNQLRGREREPGIKTKMRVKLAAKLLIIAWTLMKKKEPFNPDYLTIA

SEQ ID NO: 86265 - protein, 319 aa, unidentified
MNHTPVTSVGIDVSKRDLTVALVSEHDAPHIKTVSNSERGVAALLALLNKHGTAVTVPCVIESTGDYHLRSALMLAEAGYTVNVINPIITKQYQRTSIRNSKDDSVDAVRLANIGLREPNLLSFDATKEQIALKKLVASIGKLEQCKQKLTAHLKQLETTTEFLGVPANTVTLRQGIAALDAQIATFEKATCVQASPDAKRIATSVRGVSQTSVAKLLTLLDGHTFSDRDKLVAFCGLDVAPRRSGSWRGNEHLSKRGNPHLRKILFQMAWGLKQHNPAYRTYYDRLRLDHKHYFTCLIAIARKFLRFLYADLYKNPIG

SEQ ID NO: 86266 - protein, 314 aa, unidentified
MSAEIFVGMDVSHACVDGAVHPGTAFQIAHDERGIAEAVERLHALHPTLIVLEATGGLEVPLTGALAAAGLPVVVMNPRQVRDCARATGQLAKTDRLDAQILARFAEAIRPPVRPVPDAQTQAWAALVARRRQLIEMLTAEKNRLRLAARPIQKRVQAHITWLEKELATTNTDLTATMRESPVWREKEEVLRSVPGVGPVLTTTLFANLPERGTLTRKEVAALAGVAPFPRDSGTLKGRRAIWGGRAHVRAALYMAARVATRRNPVIRTFYQRLCQAGKAKKLALTACMRKLLTILNAMLKSGMPWRVAASQPA

SEQ ID NO: 86267 - protein, 341 aa, unidentified
MDVSVLGIDLGKNSCSVVGLDATGKVVVRRRMRRDTVITYAAGLPACVVAMEACCGAHHMGRALARQGHAVRLMSPEYVRPYVKAQKNDDRDAEAIAEAATRPTMRFVELKTEEQLDMQTLHRIRDQLVGDRTSLMNQIRSLLLERGYIVPQGRAKLAVRLGEMLDGDEPVLGSRIHRLVSDMRLRWIALDDRIADLNAEFTEAARSDERTRRLLTIPGIGALNATALVAAVGDARTFGRGRDLAAWLGLVPRQATTGGKPRLLGITKRGSRYLRKNLIQGARAALPTMSKSDTRLGAWLRGLLSRSHHNTVVVALAAKMARIVWALLRHERTYDPAAQAA

SEQ ID NO: 86268 - protein, 361 aa, unidentified
MTGTMTSVGLDVHARSTHGAAINTVTGELSRVRFGPGNEAVIDWLGGLDGPVSAVYEAGPTGFGLARAAERAGISMIVCAPGKVPRAAGDRVKTDRKDAELLARLLRAGQLKAITVPPDWLEAARHLARSRENVRKDLGRARHRVSKLLLVEGRVYPEPTTWNTRHRQWLARQQFDQPATELAFIDLLAAVDGLTARRAALDERLSRIAQDERFWPTVSRLRAFRGVDTLTALMLHLELAGDWERFSSPRRLAAWLGLTPTLDQSGQSKTQGSITKTGSAIARRLLVEAAWHYARPPRIGATLRNRQQGQPDHVLQIAWRAQHRLHHVHHDLKARGKPGNVATVAVARQLSGFLWAAATAP

SEQ ID NO: 86269 - protein, 392 aa, unidentified
MFFVGIDIAKYKHDFAIIDEHGLVIVPPKTIPNSQEGFNDLLVVLSSLDRSQEIKIGLEATGHYGSNLKAFLTRHGFNYVELNPLKVSRFHQQISLRRTKTDKVDCIVIAQFISTKDNKAKSYHQPLYHLEALKSLTRLRETYVSQRSLILVKMTNVLDTVFPEFKAFFSNKLKSNTALYILKKYKTPLRISKWNEQDLIDVHNVSRRIPISKLDDLRKIASNTVGNSSPFLTKELLSLIRMYEALNEEVIAIEKEIVSIMSTIDSPTASIPGIGLVSAATIISEFGNFAKFDSQTQCVAYAGLDAGISQSGTKCFKGKMVKRGSSHLRYVLMNVVKMVCIHNDTFKSYWLKKKVREHKNMRVADSHTAKKLIRLIYHLETNQIKFDPLLSR

SEQ ID NO: 86270 - protein, 346 aa, unidentified
MLYAGLDLSRKRLDFCLLDERGERVETGAAPPDADGLRGLAGRVGRFGEPVRAAIESMNGARFVHDQLELAGWQVEIADAVKVKGLAPLACKTDRIDAWVLAELARRDLVPAIWLPDPAVRAERERARFRLHLVRHRTSLKQRVHAVLLAHGKPCPVSDLFGVSGRALLDRLALPEPWAGTVAASLQLIDELDSQIAGCEAELQRLGADHRYVPLLLTVPGIGWVLAYTIAAEIGDISRFPTPTKLAGYTGLCPRVYQSGNSDRRGALSKQGPKYLRWALIEATMHASRHPLYRDRYQQTKQRLGRQRGAKVAQVDLARRLSHAIWHMLTRNQPFAPAGAANPLAA

SEQ ID NO: 86271 - protein, 336 aa, unidentified
MKKNEFSHFVGIDVSKQTLDVCFILNKEINLSVHQQFSNDAKGIRRMLAHLKKQKEVSADNTLVCLEHTGIYSRELTYTLFEKQWCVWVETPVAILRSMGLQRGKNDRVDAKRIAVYAMKNNEQAKLWEAPRKEVATLRQLLNIRESLIKGRKALTMTLNEFKDTSNKKLFVTMEGLTKNTLKGMEKDIEKVDRAIDELIANDTALSGLVKLLTSIPAIGKITSAELICFTNEFKNYSEAKQLACYCGVAPFEYSSGISVRGKTRVSCMANKRLKTKLHLCAIVAIQHDAEIKKYYERKVNEGKNKMSVINAVRNKLVHRITAVVKRQTPFIKIAA

SEQ ID NO: 86272 - protein, 338 aa, unidentified
MGQVVTIGLDLAKSVFQVHGVDAAGEVVVRRQIRRAQLLQFFARQPSCLVGMEACASAHHWGRELVALGHEVKLMPAQYVKPYVKRGKNDAADAEAICEAVTRPTMRFVAIKTPEQQSAMMLHRVRLVLCRQRTQLSNAIRAHLAEFGIVAPAGRLGLERLLDVVADEGDARLPAEARGCLQMLVAQLGVVKTQILENDRRIMADARSTELGRRLMEIPGVGPLLASALVASVADPGIFSSGRDLAAWIGLVPRQNSSGGKERLGSISKAGHRYLRQMLVVGAMAVIRYADPSRRPWLAQLLARRKAKVAAVALANKIARTVWAMMTTGERYREPLAA

SEQ ID NO: 86273 - protein, 337 aa, unidentified
MMYSGIDLHSNNSVVAIIDDADRVVAQKGLPNDITKIVGFLARWQDQLIGVVVESTYNWYWLVDGLQDAGLHVHLANTAAIKQYDGLKHSGDETDAQHLAHLLRLGILPTGTILPREHRVVRDLARKRMQLVNCRTTHVLAVENIMARQLGERMTSNQIKQLTADTIDSLPLAADVGLAIKANVAVIATLQSQIEVLEKRLQERVKPRPQYGLLTSVPGIGQTLATVIFLETGPIDRFADVGNFASYARCVDSVHTSNRKKKGEGNVKNGNRYLAWAFVEAANFARRFCPEAKRFHERKKARTNNIVATKALAHKLARASYHILKEGKPFDATRCFA

SEQ ID NO: 86274 - protein, 327 aa, unidentified
MFFIGIDVSKAKLDCTLLTAEADKRKTKVVVNTAAGVQALLAWCAKHGAQPAQLHAILEPTGLYHEQAATALHDAQVRVSLVNPAQARDFAKALAMRSKNDALDSYVLARYGQTLSPALWHPAPLHARQLRALLTRREALGKDLLRELNRKEKSQFSPSAPLVDGSIDKAIAFLREQIKQIERAIDQHIDNHPDLKQDRELLNSIPAIGPQAGNAILAVMHNRRIDSAQTLAAYLGVVPVQRQSGSSLNGCAHLSKAGPSQVRATLYMAALVGTRHNPHIRALYQRLLKAGKSKKAALGAAMRKLVHLCFGVLKNRIPYQPNYAMNA

SEQ ID NO: 86275 - protein, 353 aa, unidentified
MPRNSTAIAVVGIDIGKNSFHVVGLDRRGAIILRQKWSRSQVGQRLANMPPCLIGMEACVGAHHLSRRLKALGHDPRLMPAKYVRPYSKGQKNDFRDAEAIAEAVQRPTMRFVPTKTMEQLDLQALHRVRERLVSQRTGVINQIRAFLLERGIPVRQGRQFLRAELPMVLATRSDVLSTRMLHMIEGLAEDWRQMDERIDNLSTEIELLAHEDAGAQRLMRVPGIGPIISSAMVAAIGTGATFSKGRDFAAWLGLVPKQISTGDRTILGPISRRGNRYLRVLFVQAAWVVLVRSKNWKRYGLKSWIEAAKKRLHHNVLAIALANKLARIAWAVLARGRNFEVRTSNELSHRPA

SEQ ID NO: 86276 - protein, 376 aa, unidentified
MERALAMNVTTFVGLDVHARSIKAVALDAMTGEVRSATFGYDAAAAAEWIRSIDPAARCVYESGVTGFDLQKKLAALGVDCVIGAVSKMIKPAADRRRKNDRNDAEFLARMLSVGNVVEVWVPDDGCEAARDLVRALDDAREDLKRQKQRLSKFLLRHGLVFDERTPSGQRKGNWTGAHWSWIKSISFGEKADNDAFAFYVDAVRQAEEDKRRLEKLVADEASKPRWKKRVDSLRRLKGVDVMTAADIVFEAGEFARFRNARSFAAWLGLVPSEHSSGEKVAQGGITKAGNKHLRKVMVEAAWHYLSASPHSKDLASGQAPDPAARRDASKGVRRLVERRAALLERGVHKNKANVATARELACWCWAVGLMAEKAR

SEQ ID NO: 86277 - protein, 342 aa, unidentified
MVPQTVVGWDLGKVSSYVTATNRDTGEIIREGKVPNTPGDIRAAVEGLPRPIRVVFEATGNWQATYELLEGHVEEMQMAHPLETKAIAHARIKTDKIDAATLAHLGRADLVPQSWIPPREVRDLREILRHRAFLVSLQTKVKNRIYTYLDKVGMAYPDVADMFGKGGMAFLRSVEIREPYRFLMNRDLNVYERLHGEIEEVSAKIRAMAQEDPRAKFILPMRGLGPFSVMLILSEIGDIGRFPAPEQLVSYAGLCPATYQSGKSIRHGSITKRGSKWLRWILIEATIHYTRAGGRLGLFYQRMLRRKGVKVARVALARELLHSIFWCLKKGVVFKEVFARGR

SEQ ID NO: 86278 - protein, 412 aa, unidentified
MEVIHARCAGLDVSKKDAKVCVRHAGAGRRKTVETVTTWSSMTGQILALREHLIAEEVTCVVMEATGDYWKPFYYLLEDLPGVEVMLVNARHVKNLPGRKSDVADATWLAQLGAHGLVRASFVPPAPIRALRDLTRARTAITRERGREVQRLEKLLEDAGIKLSAVASDIMGVSGRAMLEALIAGDRDPAGLADLAKRRLRSKIPELTEALTGRFSEHHAFLARVHLDLIDRHTIAIEKITARIEVVMEPFQGFHDLICTIPGIGTITADIIVAETGADMTRFPTAKHLASWAGTTPGSNESAGKVKSSRTRPGNPYLQGALGAAAMACSQNRSTYLGARYRRIASRRGPMKANVAIQHSMLIAIWHMGTTGTLYDDPGAEFFTRLHPDRTKKRAIGQLEAMGYQVTLNPAS

SEQ ID NO: 86279 - protein, 406 aa, unidentified
MDVVIERACGMDVHKDNITACILTPEGKENQMFSTKTVFLLQLVDWIKQHNCTHVAMESTSVYWKPIVNLLEAEDIEFLVVNAQHMKAVPGRKTDVKDAEWIAKLLRHGLLKASYIPDRNQRELRELVRYRRSIIEERARQHNLIQKVLEGANIKLGSVVSDVLGVSARDMLDAIADGEEDPEKLANFVRRSMKKKEELELALKGYINSHQSLMLKTILGYIDFLTEQIEILDTEVADRVSSHQEDVSRLDSIPGIATRMAEQILSEIGTDVKKQFPTAAHMCSWAGLVPGQNESAGKRKSAKTKKGNKYLRSALTEAAHSVRGSKNYLGALYRRTASRKGKKRAGIVVAHAMLRISYYFLTRKEMYVDLGEDNFDKQRQQYIVRHSLRRLESLGYTVTLEEPKAS

SEQ ID NO: 86280 - protein, 472 aa, unidentified
MSSTTPTRAKQHRQVRTASKPKVPLPPQLQRVNLNAAGIDIGSEEHWTAVPPGRDREGQDVRRFGAFSGDLCALADWLKRCEIETVAMESTGVYWIALYELLVERGFEVLLVDARRVKNVPGRKTDVLDCQWLQELHTYGLLRGAFRPADQVCVLRSYLRQRSMLVAYVSHHIQHMQKALELMNVKLAHVVSDITGLTGMGIIKAILSGERDPVQLAKLRDPRCKNSEATVARALEGHYREEHLFALQQALELVEFYQHQITACDRQIEACLQQFEDKSAPTPLTAHPRRRRRSGLTFDARSYLYRITGVDLTQIDSIEANTALTVIGEIGLDMSRWPTEKHFGSWLGLAPGSKISGGKRLSGRTKPSANRAAAALRLAAQSLNQSQSALGAYFRRLKARLGAPKALTAAAYKLARILYRMLKYGAGYVDQGETVYEERYRDRLLRNLKRRAAELGFQLTAINSSTDQPALT

SEQ ID NO: 86281 - protein, 332 aa, unidentified
MMAQNDRVVVGIDVAKDKVDACIRSLSQGQTFPSTAQGRRALIRWLRKHKVGKAAMEASGGYEQDWARALREARIEVRIVDPKRVRSFARSAGRLAKNDAIDAEMIAWFAETFTEAPGQAYDVEREKLVQIVNARQALLDLQTCLQNRSEHAAPDVVQKMQARLLKKIALEVAELEAAITAMIRATPHFAELAEIIESVPGLGKTTSAGLIASMPELGQVSDKVAAALLGVAPYDDDSGKRRGERQIKGGRRKVRNLFYMACLGAATRHNPVLKAFYNRLIDKGKEPKVALTACMRKLIVILNTMIARRQKWDPTRYKVSDPARLPPSACAT

SEQ ID NO: 86282 - protein, 445 aa, unidentified
MPGIGERAAIGLRILMPELGTLCVKKWRLLLGLRPHPCNLADAVGDSGRPAVAGGRPAHPGAEKPVARRGSHPPPELAEGRSNPNSRLGRKASPVAQGRVKTDAIVGGIDVSKDKLGIAARPGGAVFGTRRDAAGLDAVTGCLAPLAPAAVAVEATGGFEVEAAASLAAAGLPAVVANPAQVRSFAQALGKRAKTGPAGATVIAHFAEAAKPEIRPLPDDATRLLAGLAARRRRIVPTMAAGRQRQRRLVEKRLQKSVARLLKALEKELSPRDRSIDDAARGSPAWREKEDLLAAAPGAGPGIARALIAGLPEPGAPGRKRIAALAGLAPWTRQSGRWKGKSLIGGGRPCARAALFMGTLAAARTNPVLQGFEQRLIDAGKPRLAAIVAVARRLLTILDAVLRGKKPWRNVEQARAHATAPTTLPSADHPRLTRQSPSSSKDGYR

SEQ ID NO: 86283 - protein, 350 aa, unidentified
MIMEKTRKYTYFIGIDVSRDKLDCAVISGRKVVSHTTIVNETNEIRGFLTGLKQLPKFTFNKSLFGLEQTGIYTTHLLNTLKRSKANVVLEDALHIKNSLGKSRGKYDKLDAIRIATFLYKTKDDVRIWVQRRPIIDKLAHLSTLRTRLITLFNAMRTPLNEQNKFLESSFFVTMTNLCDRSMSALRNDIEQAEKLILTTVKEDVRTKRLFDIITSVPSVGPVTAIQIIITTNEFKDITDPKKYASYAGVAPFRHESGTAITKAKVSSLANKKIKTLLHICALSSISHPTELRDYFLRKTKEEGKSKMAVINAVRYKLILRIFACLRQDRCYQKVYTRPVTTGEAGKMSE

SEQ ID NO: 86284 - protein, 356 aa, unidentified
MVQSNKKDFSGQNISIGIDVHLRTWSVTVLTPSGFMRTHTQKASAKELFEHLNKHYPNGSYHAAYETGFSGFSTYYALTELGIKCTVVHAADVPTTQKEKVSKSDPVDSKKLAKALMRGELGSVYIHSKDSLDDRALVRHRATIVKLSGGIKSRIKHLLYNNGVEYPEEYFRSNRHWTRSFITWLQNDVRLLSDTRVSLDLLIAEVLHYRERLLDVNRRLRSLARSDRYAEKYGILMSVPGIGSTIAMSLLAEIDDIGRFSNQRQFASFLGLVPMMSSSGDKEYVGEKTFRGNKFLGPKIVEASWIAIRHDAELSAKFGALCTRGMKSQEAIIRIARKLSNIIFSVLKSNRRYECR

SEQ ID NO: 86285 - protein, 314 aa, unidentified
MVIIGIDPHPASLTLAVMEQTGEVLLTRTIANDGEAVPYTLELARGFPERRWAIEGAGNAYVTELVRALTTLNEHVTDVPPGLTSQYRSKRGRKKTDQVDAGIIAKAALANPALPRYTRDEANEHLKRLTRTRQRLAKHLQSERAALRALPLGSPLRQVVEGVVASLQRAIDDVTGRIEQQVQEIDPRILREHGVGPVVSGVVLAETGNVQRFRNADAFAAYCGAAPVERSSGQIKRVQLNTGGNRRLNHALHIAALARLRSHPESQAYVARKIAEGKTQRAAIRQLKALIARRLYRVLNEPNPPTPRLEPLAT

SEQ ID NO: 86286 - protein, 328 aa, unidentified
MCTHILGIDIAKKTFDVALRNEESSCTTGHFDNTQDGFQSLRRWLSNRKVDSVHACMEATGRYGHSLATFLLAEGYAVSMVNPARIRAYGQSKLLRTKTDKMDAILIADFCATQSPSLWEPPSDFQSELQSLTRYLDELKHARTREINRQQTDIPSRAVRRTIQEHIDFLNEKIKQVEGKIKQLTKNNDQHRKQIELLVSIPGIAETTAAKILAEVPGISNFPQARHLASYAGLCPRQHLSGSSVRKKSRLSKTGNSYLREAFYMPAVCVLRGYNPLLQPLVERMRSEGRKSIVIIGAIMRKLLHIAYGVLKTGKPYDPNYLSGSLSA

SEQ ID NO: 86287 - protein, 390 aa, unidentified
MILIGIDVAKDKHDCCIINSDGEFPEEVFSILNNREGYETLYKWICSLAVDFTKVKVGLESTGHYSSNLLAFLLDKHLTAYVINPLRVNLFRKGQSLRRTKTDKIDSRDIAHLLMTDSSLKPYSLSSYHMEELKSLTRYRASMVRERTKLKTSIARLVTILFPELEQMVSSIHIHSIYAMLEEFPGSAYIAAAHLTRLTALLLKASRGRFGRGMAIRIRDTAKQSVGAVSPAKSMELRHTIAHLRVYDQEIGEIESEIEKIMDDVNSPITSVPGIGMQMGAVILAEIGSFRRFDSPDKILAYAGMSPSTYQSGKLTGSYSRMEKRGSRYLRYALFNVTRYVCHYDPGFTAYLSKKRKEGKHYYVAISHAVKRLVRGLYAMEISGNWYQTA

SEQ ID NO: 86288 - protein, 369 aa, unidentified
MDHHSVAYVGFDTSKTKHAVAVAEGGREGEVRYLGEIEATPAAVERLLGKLERKYKTLHVCYEAGPTGYGLYRHIRALGHACDVIAPSLVPMRPGDRVKTNRRDAVTLARLLRAGELTAIWVPDEVHEAVRDLVRAREAAARDLRHKRQQVLSFLLRHGRIFTGHRHWSRAHLRWLAGQAFNHPAQQIVFQDQVDAVADAQARLERLDHQLAELVPTWSMAPVVAACQAMRGVSFLVAVTFVAEIGDVRRFESPRQLMAFLGLVPCERSTGDTVRRGGLTLAGNRRVRRALVEGAWSYRHPARITERIRSRLEGLPKAVREIAWKAQVRLSARYRRLIAAGKKAPVAVAAIAREMAAFLWAIGRVVEPA

SEQ ID NO: 86289 - protein, 450 aa, unidentified
MQFMKKKAGFPVLYPNAAGIDIASREHYVAVNPDAAEQSIRSFGSFTDDLHEIAAWLLQCKVDTVAMEATGIYWVSLYLILEEAGFEVVLVNAKHVKNVSGKKSDVKDAEWIRQLHSCGLLSKGFQPDHFTRTLRAYMRHRKNLTEMAATHIRMMQKALEQMNIKLQNVIADITGKSGQAIIKAIIDGEHDPQNLVKLLDGRIKATKESICKSLHGIWKTENLFELKQSFDLYHTYQEMIKECDLHIKGHIEEKASYCESDQIQSLYPVKKKYKTNKNNLNFDATDMLQKIVGTDLTEIFGITDTNATEIISEIGLDMSKWPTAKHFTAWLNLAPNNKVSGGKLLSSRVPRKRNKAGQIFKMAAFAVQRSKNWLAIFYNRIKMRSGTSRAVTATARKIAVIFYKLMKEKLRFCPLDRDQYLESFKVRQLKKLKQQATRLGLVLVPDNLVT

SEQ ID NO: 86290 - protein, 445 aa, unidentified
MFIQSQDDSQCCYSLFIKVVILMMKLKYSICCGLDVHKNVIVATIVTTNKDGISEYLQKSFSTINSDIQRFHNWLIENNCYHVCMESTGKYWIPIFNYLENDIDICLTHPKYVKAIKGKKTDKKDSKWIADLYKFDLVRCSFIPPKDFRQLRELSRYRFKLVCMKSSEKNRIQNCMTISNVGIASVLSDPFGKTATEIMSYLLEHTADSMDEKAVRKLIKKGAKSKSDEIIEAIKGYTIETDQAKKLELARGHLEYLDDMITQTEVELYVRIKPYYEFVEFVSTMPGMTELSSTIVLAETGVDMDIFDDAKHLCSWCGLSPANNESAGKKKSVRIAKAGDYLKPMMVQCALAAIKSKKQPYFAIKYGRIKKRRGHKKAIIAIARMMMVCIYHMVSEKKPFTPTDYEELMNPQNHVERVVLNENNVFAYLESLGYDSSKLVKRNDN

SEQ ID NO: 86291 - protein, 458 aa, unidentified
MPARTKRQAKVAALPAQLQRVNLNAAAIDLGATAHFVAVPPGRDPESVRTFGAHTADLHALAQWLKHCAISTVAMESTSNYWVPLFQILEQAGFEVLLCNSRHVKNLPGRKTDVLDCQWLQELHTYGLLSGSFRPADKVCVVRSYLRHRDNLTKAAAAHVQHMQKALTEMNIGLHHVLSDLTGVSGLTIIRSILEGERDTLKLASMKHPYVRQPVEEIAKALEGDYREEHLFALRQALALYEAYQQHLMACDQQIQAALRAVESLRPPAPITAEPAPPPPKPRKTAKAQADFALKAQLEGLCGVDLTAVPGMQVLSAQILVSEIGLDMSRWATDKHFCSWLRLSPGNRVSGGKRLRSKPHKGHNRAAQILRVCAQAAIQSKSALGAFGRRLRGRLDTPKAIKALAHKLARTIYRMLKTGQSYADAGEHYYEEKYRDHVLKALHKKAAFFGFQLTPATA

SEQ ID NO: 86292 - protein, 357 aa, unidentified
MVIVAIESHLGALYMQISTIGLDIAKNVFQVHGIDAAEKVVVRKRLRRRQVLEFFKALPRCLIGMEACATAHYWARELTKLGHEVRLMPAKDVKAYVKRNKNDAADAEAICEAVRRPTMRFVRIKSAEQQGQLMQHRTRDVLIRQRTQIINALRAHLAELGIVAAQGNNAGVKKLRAIVTDEQDTRLPIDARASVIVLAAQLEALESVIGAIEKRIKMQHRSSEASQRVEAIPGIGVIGATAIVATVTDPTIFRSGRDFAAWIGLVPRQDSTGGKQKLGPISKQGDRYLRRILVVGAIAVLRRAQENPGKYPWLTQLLARRPFKVVAVALANKMARMAWALLAHGGTYRAPELAETA

SEQ ID NO: 86293 - protein, 388 aa, unidentified
MLLDHPSDGPAAIRTQIGAIFVSLELSRSTWLVTSLSPGKGEKMSRHSVKAGDLAELLKLFAELKCKAQARTGESYPIITIQEAGLDGFWLHRALQQEGIESHVVDPASIATPRRRRRAKTDRLDGETLLRTLLAYKRGEVRVCAMVIAPSPEEEDRRRLCRERRTLIAERIEHVNRIKGLLFAQGIFDYAPLRRDRRKRLEALRTGDGRALLTHVKAQISRELDRLELLLSQIAAVEREQDALLAASKPSDEKAASNPAAMLLALKSLGPNFAAALWSEAFWRQFANRRQLASYAGLAATPWRSGGIEREQGVSKAGNPRLRTTMIQLAWLWVRHQPQSALTQWFKANSQRGRKRAIVALARKLLVALWKYVTAGVVIEGAEMKPIA

SEQ ID NO: 86294 - protein, 428 aa, unidentified
MDVIVEHCAGLDVGKKQVQACVRGPDGAGGRRSEVRTFDTFTDQLEALAGWLSAEGVTQVAMEATGPYWKPIWYVLEDAGFDLLLVNSRHVKILPGRKTDVGDAAWLAELLEHGLLRGSFIPPDQVRKMRDVTRYRKKLIQTHTAECQRIQKNLEDAGIKLDSVASDVLGVSGRLMLRALLAGERDPEVLAELAKGTLRKKISELQRALRGRFGEHHAMLITIILDHIEHLETSIAALDQQLDMMFAATDDTSEVDAETGEVIAPFAQARDHLDTITGVGKRVAETIIAEIGIDMDRFPTAGHLASWAGMCPGNNVTGGKNRSGRTTKGNMWLRDALVQAAWAAARTRDTYLSAQFWRLARRIGKKKAAVAVGHSILVAAWHILHDNVDYQDLGADWFTRKVNNDHRRDQAIRNLHELGYRVTLEQVA

SEQ ID NO: 86295 - protein, 326 aa, unidentified
MNSKLGVDISKAKFDVALLLDGKKYRSKVFSNDPAGFKALLEWIGSNVANGPSNVHICMEATGVYHESLALFLHDQGIDVSVVNPMLVKRFVESEGVRSKTDSADAKALARYAERMQPELWEAPSPAVRKLQALVARLENLKEMRQAEANRLDVAHDAVRPSLLEIIAQMDVNIEKVRAQIRQTIDDDPDLKSRSALLQTIPGLGEKTIPQLLAYIGRPERFKSVKALIAYAGLAPLIQQSGTSLNKKRGTHPLRKEALRHALYFPAMVAGKHNPAIAKFWQRLKAQNKPGKVIVVACMHKLLAIAYGVLKSGKPFEPGHSLAATA

SEQ ID NO: 86296 - protein, 399 aa, unidentified
MLHDHPCVGPTAIRTQFGAIFVSLELSRSKWVLTSLSPGNGEKMSQYSLTAGDIGGLLVRFADLKRKAKERTGSDYPIITIHEAGLDGFWVHRVLQNEGIESHVVDAASIATSRRRRRAKTDKIDGEALLRALLAFKRGEPRVCAMVVAPSPEAEDRRRICRERQTLIEERIIHVNRIKGLLFAQGISDYAPLRRDRRKRLEGLSTGDGRPLPVHLKAQISRELDRLELLIEQTRSVEAEQEALLAAESKAGIEKVGPEKAGPEEEPRNAVAMLLAVKGIGEHSAAILWSEGLCRQFSNRRQVAAYAGLAATPWRSGAVMHEQGLSKAGNPRLRTLMVQLAWLWLRHQPQSALACWFRARGERGRKGSIVALARKLLVALWKYVAHGVVIEGAAMKPAA

SEQ ID NO: 86297 - protein, 404 aa, unidentified
MYSIGIDAAKGKSTVCILRETGECVLTPRDFKHAKDDLEDLHQTIQKLTGGTDVRIVMEATGIYHWPVLLFLKKNGYFVSVINPLRMKLFAKSYNFRGIKTDKYDSTIIAAYGCEKWFSLQDYSFADNTRDELKRLARSYVSYQKPKIAVKQALDLKLEKCMPGIKKILTDDQKMYDFILYFRHYDKITSLSQKKFLERFDKWAKKKGYRFHSSTVTKIYELASSGIPTVPFDDSCVLIVESLVNTLVTIDKGLNDILTRMHQLASSFPEYDVVLNMSGVGYILAPLIIAEFGDIRLYRSKKSLVCAAGIDVPPYESGQFKASHRVITKKGNSNIRRHLYLVMNALYITKPKNDSAVYEFMIKKQAEGKLHKQVIVAGMRKFLHIYYARVKERYQELGLWETVS

SEQ ID NO: 86298 - protein, 344 aa, unidentified
MNKITVVGLDLAKNVFQVHGVDDVGQVVCRKQLRRAQVLPFFARLQPCLIGMEACGGMHFWARKLTELGHTVRPMAARFIKPYLKSNKNDALDAEAICEAVQRPTMRFVTPKSAEQQAALHLHHSRRLLVGQRTALINHMRGMLMEFGITVPVGPNTLRRRLPEILEDGDNELPMMARNLLATLAEQFRVLDERIESLEHQIEAWHRNSEASQRLAEIPGIGLMTATALAAAIGEGRAFRNGRELAAYLGLVPRQDSSGGRQRLLGISKRGDRYLRTLLIHGARAVVRHLRARTAAGKPPGNPWLARLLERRHPNVAAVALANHNARVAWALLTRQERYRPMAL

SEQ ID NO: 86299 - protein, 345 aa, unidentified
MELHTIGIDLGKTVFHLVGLNLRGEAVVRKKFSRRQLLQFTANLHVELIGMEACGGAHFLGRALREQGHEVRLMPAQYVKPYVKTNKSDFIDAEAIAEAVARPTMRFVPIKTDDQLDMQSLHRVRERWVMRRTAIVNQIRGLLLERGITLRKGRRYVDAALPGILEDADSKLSGALRVLLAQLKLELDQMAIRIDEADAVLNKAAHENEACQRLVEIPGIGPVTATALIAAIGNGAAFHKGREFAAWMGVVPREHSTGGKQKLLGISKHGNSYLRRLFIQGARAVLQQRTKQTPALSVWLAQLTIRAHQNVVAVSLANKLARIAWAVLAKEEQYQPQALTSLEAA

SEQ ID NO: 86300 - protein, 331 aa, unidentified
MFPVGTDVSKKNLDLCMLYDGIKGRIKTRNIQNNRHSVENILRWLRLQHCSPEDVHVVMEATGVYHERLATELHDAGFRVSLANPHRSREFARGMGIMTKTDKVDAYMLACYAFLKKPHRWEPPAPEIRYLGALLRRRDVLLGDALREENRLEKYLSTDTPADIISSCRRMAQLLREEVSNIERQIKAHIKASPALRRDYTLLTSIKSVGPQLGMHMLVVLRSHNFVSAEQAAAFLGVVPIEKRSGTSVRRRPRMSKIGPPQLRAKLYMSALCGKIYNKRMRNIYDEMCLRGKPKMVAIGALMRKLVHWCYGVLKTGTVFNDEDLKPVLST

SEQ ID NO: 86301 - protein, 411 aa, unidentified
MEAQISFPQIIERGAGMDVHRDTVVVTVMGTEIITETKTFTTYTNDLRSLCLWLKSFAITHVVMESTGIYWKPVYNILEDDFEILLVNAKHVKNIPGHKTDKKDSRWLAKLLLSGLLKASFIPPSEIRNLRDLTRYRKKMVQNSTAEYNRFEKILQDANFKLSNVISDVFGKSGRLLVEAIKSGNNNFEELLALCHGRIRKKSEILKESLQGKLTPHHKFMLDTIQLNIDNIQNKIALIDQKIDSLCQPFNEEINLLQTIPGINRISSAVLIAEIGVDMNVFPTTQHLASWAGICPGNNQSAGKVHSSRTTKGNQHLKTALVECAWAASHVKDCYLRKKFESLIGRRGKKRALVAVGHKILNAAYFIIKYKVPYFELGYDYIDSRRKQSQVQSYLDKLKNMGFEVEITQAH

SEQ ID NO: 86302 - protein, 353 aa, unidentified
MKRDQYMGLDVHQATTVVTVLDAEGKLILETTVSTEAKAIVRLLQSMSGPLHVTFEEGTQSAWLYDVVRHFVTEVIVCDPRRNKLLSEGSKADKSDSRKLAELLRVRMLRSVYHGHEATRKLQQLVRGYETLSGDMQRAMVRIKAIYRGCGIASKGRAVYQVQQREQWLKKLTEPGRRQRAEWLYAQLDHLRPLRKQAKQAMIVETRKHRAAELLKTIPQLGAVRVAVLVATIDTPHRFRTRQQLWSYSGLAVVTHMSSEYEIKDGRAVRRRKPIQTRGLNRNCNHRMKEVFMGAATGGSQTEPYRSYLESLEKRGIRREMARLTLARKIAAVTLAIWKKGETFDPKKLNWTT

SEQ ID NO: 86303 - protein, 349 aa, unidentified
MTSMTTTTSCVTGGVDTHGRTHHAAVLDHLGRQLGDREFPASPAGYAALLAWLRGFGDLERVGVEGTGTYGVGLARRLRAAGVVVVEVDRPDRRARRAKGKSDPLDAYAAARAALSGAASTIPKRRDGQVEAIRALRVARSSAVKARSQATNQIKALLVTGPEQLREQLRHLSTTALIATCAKLRPGADLENAEQATKLALRRLARRHQHLSTEIREADHDLDQLIGQTAPTLLALPGVGTEVAGQLLTTAGDNPERILSEAAFAHLCGAAPIPASSGRTHRHRLNRGGDRNANRALYVVVLGRLRYDPRTRAYVERRTHEGLSKPEIIRCLKRYVAREIYHALPAATG

SEQ ID NO: 86304 - protein, 373 aa, unidentified
MSEYSAFVGLDVHKDTIAVAVADAGRDGEVRFWGEIANTPDAVASMLRKLGGRHARIHFVYEAGPCGYGIHRQIMATEHDCEVVSPAQTPRKPGDRIKTDRRDAIILARLSRAGELTPIWVPDETHEAMRDLIRLRQAMVKDLRAARQRVKSFLLRHGRVFRGTSWKRGHRIWLGNQSFAHPAQQIVFQSYLNAVDQAQARRDEVDKHIRQFAAEWSMAPVVEALQALRGVAFITAVTVVCEVGDIRRFAKPRQLMAFLGLVPGERSSGETRRQGGITKAGNVLARAVLVEAAWSYRTPAKIGAQMMLRQEGIPQAAKEIGWKAQVRLCGRYRRLMARGKKSALAITAVARELVGFIWAIAHTVEPAGAKHAA

SEQ ID NO: 86305 - protein, 311 aa, unidentified
MPVSCGVGIDVAKDTLDVAWSTEPEARWRTTNDERGWAALIERLRALQPSVIVLEASGGYETGGASALSVAGLPVAVVNPRQVRAFAQALGRLEKTDALEAGVLCEFAVRMDPVPRPVADDVQADLQALVTRRRQLVEMLTAERNRVPRARGAVRKNLLAHIAWLEKQIGQTDRDLRTRIEHSPIWRVRDRLLQSVPGIGPTTAACLIAALPELGTLSHRKIGKLVGVAPLPDDSGTRVGYRRIQGGRADVRRALYMATVTAIVHNPPIAAAYRRWRAAGKLPKVALVAAMHKLLIHLNAVLKHQTTWQPT

SEQ ID NO: 86306 - protein, 313 aa, unidentified
MDIESVIGIDVSKDTLDLADWPESLEDQTANHEAGHRKLISRLPAPETCFVVLEATGGYEKRIVLALVDAGYFVSVVNPRQVRDLAKGLGILAKTDRIDARVIARFGFLVRPQTLAETHEKQDELNQLVTRRRQLITLRTAEKNRTDKATSKVVKKSLKKIVEYLVEEIETIDQEIARLVESDDQWKGKSELLQSTPGVGVTTAATLIAELPELGQLNRQKISALVGVAPFNRDSGQFRGKRTIFGGRRAVRSVLYMAALTARRHNPVIRKFADRLKAQGKLPKVILVACMRKLLVILNSMVRTNTQWDPQTT

SEQ ID NO: 86307 - protein, 381 aa, unidentified
MQRATSTATVSANTLNCALELSKKTWLLAIQFPAREQPSVYTIKGGDGAALVAQLIAARDRWAEVSGSPPSILICYEVGYDAFWLARFLMAHGIECLVIDPGSLEVKRRSRRVKTDRVDLKKLLRTLSAWCRGERHVWSVVRIPTVEEEDLRRSHRERSRLISERTAHSNRIKGLLFAQGIRVDNIKTLALEKLVTGDGRRLLPRLADEIARQMKRLAVVQEQIDEIERERDTAPTPCKETEKKRHLLLQLKSIGPTNAAVLSREVYYRHFDNQRQLGSFLGLTPSPFKSGEEERCQGISRAGSGRVRAAMIEAAWLWVQHQPKSALTIWFLKRTAGQSKRVRKIMIVALARKLAIALWRFVELGLVPDGAIFHPRVTAQA

SEQ ID NO: 86308 - protein, 350 aa, unidentified
MENIALIGIDLGKNSFHIHCQDRRGKAVYRKKFTRPKLIEFLATCPATTIAMEACGGSHFMARKLEELGHSPKLISPQFVRPFVKSNKNDFVDAEAICEAASRPSMRFVQPRTESQQAMRALHRVRESLVQDKVKTTNQMHAFLLEFGISVPRGAAVISRLSTILEDNSLPLYLSQLLLKLQQHYHYLVEQIKDLESQLKRKLDEDEVGQRLLSIPCVGTLTASTISTEIGDGKQYASSRDFAAATGLVPRQYSTGGRTTLLGISKRGNKRSELCWFNVRVFIQKLEHQSGKLADWVRDLLCRKSNFVVTCALANKLARIAGPNGTTANLCSITAEIHRFKELLIWFCEY

SEQ ID NO: 86309 - protein, 425 aa, unidentified
MSARPAGARLSDHEWKAPSIMTTESSVAKVVAGVDTHADTHHVAVLDAATGGVLADKKFPTGRAGYTALIAFVCAFGQVLRFGVEGTNSYGAGLSRHLRVAGHTVVEVVRPNRAERRLRGKSDPLDAITAARTAMAPERLPMPKTSDGVVEAIRVLLTTRRSAVKARTGAMQQICSILVSAPDTLRQQYEPLPAKSRLERLRRLHPGTDPTDVHAVTSRCLKQLATRCADLDREVDAIDASMRHAITDHAPALLAAHGVGVVTAATLLVTAGDNPERVTSEAGLAALCGVSPIPASSGKTTRHRLNRGGDRQANCAIHQIALVRMSSDERTRAYIAKKRAEGKSTKEAMRCLKRAICREVYRLLINPPEVPRIDDLRPLRQARGITLTTAAKHFAVWPAVISTLERGLRRDDNLATAYRQWLTAA

SEQ ID NO: 86310 - protein, 365 aa, unidentified
MPSVPPAAELIHLGMDTSVKEIVFGVLRPGEEIPAVDRIPNDEEPVRRLIGRLGDRRLLSACYEAGPGGYELYRLLTSMGVACAVVAPSLIPKGSSDRVKTDRRDAIRLARLHRAGELTAVRVPSPAEEAVRDLVRARADLLDDRKRMQQRLNAVLLRHGRVWRGAKWTYAHRVWVDKQEFGEPALAEALAVYRAGLEAREAELRAAEARLADWAGRDPLAGPVARLGGYRGIAQLTGLTLAAEVVDWRRFASARGFMGFAGLIPTEYSSGSRTRRGHITKAGPQAVRTALIEAAWAYRCRPAIGATLRRRQAGLEPETLARSWKAQQRLHAKYKKMIARGKPPGVAVVAVARELAGFVWAEMTT

SEQ ID NO: 86311 - protein, 424 aa, unidentified
MKPPPEVAFAAFVGIDWSDTKHDICLQAGNSEEREFAVVPHCPAAIDAWASALRQRFQGRPVAVCLELAKGPLVYALQKYDFLVLFPVHPATLAKYRQAFTPSRAKADPTDAELALELLLRYRAKLKPLTPQSVPMRMLLRLVEQRRRLVGEQSRISNRLTDALKQYFPDVLAWFPDKDTLLFCDFLSRWPTLKQLKRTRRATLQAYFHDHHVRSQSRIDERLHAIKSATPLTDDLAVILPNQLLVLALVEQLRVTLRAIESFDAEIASISQTLPDYSLFRALPGAGATLAPRLLAAFGEQRERYQSAAEVQRYTGIAPVTESSGKKHWVHWRLQCPTFLRQTFVEWAGATIPRSFWAAAYYRQQRAKGCSHHAAVRALAFKWIRILYRCWQTRTPYDESTYLNALKRRGSPLLASIAATAKNT

SEQ ID NO: 86312 - protein, 488 aa, unidentified
MAHSANTEFSSPAVAPARKAGRAHAHCARLRSPYAAQDKPFTSGSTNPDRKGCDILLKINYMSTLFVGIDVSSKSNAVYAMDFEENKYISSSFGNNQPGADELADMIAKCMQKHKNLDTIIVALESTSVYSVHIANFLSTCETLMPYKPYVFCVNPKATSNYRKSYIGMEKTDPIDAFLIADFARVGRTKKLEPWRGGQFIALKRLTRHRMHLSECITREKTYMVSNLYLKFSELQLLEGDNKPFSNIYGATSSAILTEFLSPQEIIDLSEEELLSFLAEKSRNRISDISRTSELLRKAARDSYRLDQCMYEPLNISLASSFNCIQAYQKEIKLIEQAIEKCINGMNPNAFLILKSIPGIGPVWASGMLSEIGDITAFHSSDALAKYAGLYWLKNDSGDFISEDNQVSKVGNPYLRYYLGEAANSVRKHVPEYTEYYAKKYAEVTKHQHKRALALTSRKLVRLVFGLLVKNQLYTGEKLDTQSNINKN

SEQ ID NO: 86313 - protein, 431 aa, unidentified
MHYTQNEKIAQVGKDSLVIGIDVGSEKQFARAFGPSQIEYTRKAFSFINSAEGFDQFLKWAQDIQLKKGLKKIIVGLEPTGHYWFNLADYLEEQGIEYVLVAPQHVKHTKELDDNIQQKDDCKDPKVIAKLVFDGRYFYAYRPKGIYAELRVGFTRRCEIMEHLIETKNRISRWFNIYFPEYLRVYRKVDASTGMKILRQAPLPKDIVGLGVDGVNQIWRDAKQRGAGKKRAMTLVTAAQSSIGSKQADQAARMDLWQLLDEYDLVEKQLQEINDLLLDLLASIPDAQRMLAIQGVGMVTVAGFLAEVGDVRRFTDPKQIVKYAGMAVIKFNDSGKHKGKGKLSRRGRKRLRTILVQAAMSLVKSNPDFQQIHQYFTTRECNPLKKIQSICAIANKLIHVFYGMITHDQPYDGEKMLRDIHRPMMAAAKAA

SEQ ID NO: 86314 - protein, 370 aa, unidentified
MKKNTTKSQSPKRARARQQGPITVGMDLGDKTSRYCVLGCTGEVLAEGSVSTTKKAMTQKFLEIGPCRVAIEVGTHSPWLSRLLTSLGMEVIVANARQVQLISASSRKNDRVDAHTLARLARIDPELLRPIRHRSEQAQTDLLKVRMRAALVETRTSLINTARGLVKALGERLPSCDADAMGVEKLEGLPAGLREALQPLAKPIEGLTEQIHELDRELEQIARTKYPETELLKQVSGVGTLIALTFVLTVEDRERFQKSRDVGCYVGLRPKQSESGERQPQLRITKEGDVYLRKLLVQGAHCILGRRGPDTDLKRWGLKLAERGGKNAKKRALVAVARKLAVLLHRLWVGGEVYEPLRNSQAAGSKKTAA

SEQ ID NO: 86315 - protein, 439 aa, unidentified
MKKRRERVCGADVHKDLIVATITGDEVPPIRENFGTTKSELKRFRNWLISNKCEQVAFEATGVYWIPIYDALSRTIDTIVANPLQIKTIPNDKSDSKDSKRIATLCLNNQIKRSRVFSDEDRDLRVLTRARTGYVKIRTQFRNRIHKYLSSSGIKLSSSMDDIFCKSGTHILKGLAEDKSIEEILKGIPSGKIRKKQELIREALANDLDDTSRMLVRDALEILDDIESKIEKISHEVLKKIQQRSKDLAIVMSIPGIGFVSGSVILSEIGNYRDFRTPEQLAKWGGLNPGENESAGKKRKCGITKRGSKHIRVVLVQAAQTISNMKNTRLSRFFKRLSKKKEHNVAIIAVARKLICLIHHLLINQELYQEVDCRKRRTSRDKSCQEPSFQEEHLTDKVAAIVDAFYGLSDSNRKKALMRALGDFSVNKPDQTRSSDGGG

SEQ ID NO: 86316 - protein, 422 aa, unidentified
MLSESQDEEQIIARVAALDIGKAELVCCVRVPAGGNPKKRLQEVSTHSTMTRSLTELANHLVDLGIERVVMEATSEYWKPVFYLLEAHGLEPWLVNARDVRHLPGRPKTDVLDSVWLCKVAERQMLRPSFVPPAPIRRLRDLTRYRIDLVGARTAEKNRVEKLLEDACIKLSVVASDIFGVSGREMMAALIAGEQNPKVLAQLARSSMRRKITELEEAFTGHFDDHHRFLLSRMLARIDGIDADISAVDEQIEVQLAPFAVAAERLDEIPGIGPVAAAIILAEIGVDMSRFPTAGHLCSWAKFSPGINSSAGKSKGNGSTGHGNRYLARVLGEAAVVAGKTDTFLGERYRRIARRRGKKRAIVAIGRSILVIVWHLLQDPEARFHDLGADHFSRHTNADTSKRNHVRQLEALGYTVTLTPAA

SEQ ID NO: 86317 - protein, 360 aa, unidentified
MEEPAMFNDSTLFVGLDLGDRMSDLILLDPEGELIEESRLPTSPASFQQKFSALPSARVALEVGTHSRWVSQLLEQLGHEVLVANARKLRAIYNNPRKGDRTDAETLARLARLDPSLLSPIHHRSAQAQADLAVLRSRDAGVRSRTLLINHVRGVVKASGARLPACSADSFSKKVGPSIPEPLRPALLPLLDTIASVTQQIRAYDRQIETLCQAHYPETRSLQQVSGVGPLTALAFVLTLEDPSRFPKSRDLGPALGLVPRRDQSGDRDPQLGITKSGNAFLRRLLVGSAHYILGPFGPDCALRRWGLELADRGGKNAKKRALVAVARKLAVLLHHLWKTGQTYDPLYQSQRSREPQLAA

SEQ ID NO: 86318 - protein, 359 aa, unidentified
MRKSISKFETVTTVGLDLAKNVMQVHAVDAAGNVVVNKPIRRGKLIAFFAALPKCLVGMEACSSAHHWGRQIAELGHDARLMPPAYVKAYVRRGKNDKVDAAACCEAVGRPSMRFVPLRSVENQAELMRHRAREMLSSQRVALLNALRGHLAEIGVIAPQGAQNAYYLKKLAETGHDENGEVLVPDGVRQSLAPLARQIDAIDAEIAAIDKILVKQAKSDPTARRLATIPGIGPVGATAFTATVLNVKAFANGREFSASLGLPPRQHSSGGKPRLGGISKMGDRYLRKLLVVGATAVLRHADGHNDALRGWAKELLARKNGPYKKKIAAVALANKLARIVYAILSSGGTYDDRPVRARA

SEQ ID NO: 86319 - protein, 363 aa, unidentified
MDNATRLGLDVHKETIAVALLRPNQETPDERVIPNTPEALRALVAPHRSRLIACYEAGPTGYDTYRQLRALGIDCEVIAPTLIPRRAGRRVKTDRLDARNLLRLHRAGELTAIRVPSSAEEALRDLIRVREDLKDDRGRTQRRVKSFLLRQGRRYPGTGSGWTDKYDLWVRSQHFAEPAAEAAFRYYLGAPDTRRSQEKAIQAEIESAAEAPPLAEAVGRLRCLRGIGTLFAVTIAAEVCDFRRFPSAASFMAFTGLVPSEHSSGARERRGSITKAGNAHLRWVLVEAAWSYRHRPGIGVELRKRSEGQPPEVVAYAWHAQCRLCSRFRRLAVTKDRNVAVVAVARELAGFVWGMMTDRTLVP

SEQ ID NO: 86320 - protein, 349 aa, unidentified
MRFYTMNHAHYCGIDLHAKTMYLCILDENGQILLHQNIKSCPEDFLAAIQLFRDDLVVAVECMFTWYWIADLCRKEGIEFVLGHALYMKAIHGGKAKNDKIDAFKIATLLRGGNLPKAYVYPAAMRATRDLLRRRLHLVRRRGNLLAHIQNTHHQYNLPTPKAKIAYKANRVGVVEIFSDPDARKSMEVDFLLIEHYDQVIRDLELHLVRRAKQHDPQAFHRLRSVPGIGKILALTILYEIHDIGRFDRVQDFLSYTRLVKCDHSSAGKKLGTGGAKIGNVHLKWAFSEAAALFLRNNPEGQKHLRRVAGRHGKAKALSILAAKLGRAVYFMLSKDRAFDMERFLARSN

SEQ ID NO: 86321 - protein, 364 aa, unidentified
MNEIIKQCVGIDISKDTFTVCVCRRDLSGKEYLSETVDFKNLKTGFNQLVKWSRKITDPSIETLFVMEATGVYYENLAYHLHRLNLPVSVLLPNKVKHFAKSLNVKTKTDQVDARIIARLGAERKLLLWKPPPEIFKLLKDLTREYAELIRERTAFKNRLHAMSSGYKPHPAIIRSNKAIIKKLTENAEKIKEEIEKLIYSEEWLGSKVNKVLTAKGVGLMTVATILAEMQGFEFVSNIRQLCSYAGYDVVQRESGTSVRGKTRISKKGNGRIRAALHFPALQSARHSPRMKSIYDKINQNKPSKMVGATAIQRKMLVLIYTLWKKDEEYVEDYENKAGRGLSNLPAQDELPTSSQKLSFVCEI

SEQ ID NO: 86322 - protein, 347 aa, unidentified
MAIVDSARLIVGGVDTHRDVNVAAVVDMNGGLLGVESFPTTGNGHKMLASWMSGFGTIERVGIEGTGAYGAGLARHFARASVTVIEVDRPNRQKRRRNGKSDRLDAVEAARGALSGRCEGFAKSGDGHAEALRALLVAKRSARSTRIRTIVQLRHLMFTAPDELRAKLGGLSAALLVSEAAKLRPRPGGDIVMHGVKTTAVILARRVQALDVELALIDAQIGPLVKAAAPALLDLFGVGIDTAAVLLVTAGDNPQRIVSEAKWAMLCGIAPVPATSGLMDGRYRLNHAGDRQANNAIWRIVITRLGQHEPRTVAYMERRLAQGKSKRYIIRCLKRYVTREIFLALPR

SEQ ID NO: 86323 - protein, 343 aa, unidentified
MQITTIGLDLAKHWFQVHGVDAAGKVVVKRRLRRAEVVEFFKTLEPCLVGIEACATAHHWARELIALGHEVKLMPPAYVKAYVKRNKNDAADAEAICEAVTRPSMRFVPVKDADQQSVLMMHRARNLLVRQRTMLVNALRAHLAEFGVIAAQGLRHVEQLIAAIEAESTALPELACSILRLIVSQLNDTQAKIQQVEAKLAQWHRNSRLSKLLATILGVGIMGASAITATVCDPNLFRSGREFAAWLGMTPRQNSSGGKERLGRTSKRGDKYIRCLLVAGAVAILRHARTRATKDAEWVRGMLARKPAKVVAVALANRTARIVWAVMKRGDGYKAKEIVGQAA

SEQ ID NO: 86324 - protein, 348 aa, unidentified
MLADQLDYIVGVDPHRDSHAIAVVHVQSGAVVFETRVVANSDGYANALKIVAEHASGRRAFAVEGTGSFGAGFTRFLTGRGEQVLEVGRLRRERRSGGKTDALDAVRAARSVLTSERPATPRAGGERQALQALVAAREGAVNAKRAGLCQLRDLLVTTPEPLRSELRPLTRARLLQRLAATRPQSRHDAELRGSMLALRSIARRVLQLTAEERELAAEIETITRKLAPQLLDQPGVGPHAAAQLVLSWSHQGRITSEAAFARLAGAAPIPASSGQTIRYRLDRSGDRKLNRALHMILVTRKRSHPATIAYIQRRIQEGKTRREANRCLKRYLARSLYRQLEHGAPLAT

SEQ ID NO: 86325 - protein, 429 aa, unidentified
MTIVQSTPEAVVWVAIDVAKDRHEVLIEAPGWRSRKRVRIQNGAEDFRSFAEFLHGLRFPVRIGFEPTSNYHRALAYFLHSEGFQLQLISSLALARTREAMHNSWDKNDPKDAQVILHLLKSGLTQHYHDPIVHNLNDLQELSKTHHQVSLEKTRTQHRLLTHYLPLYFPEIARYHCSARSEWLWALLVEFPTPRSMTCLSKAEFLRRAWPLVGRKVAKERILTDIYLTAQTSIGLPAEEPSETVAMLRVVLRQLLTLCQLRATIEERAEVLLENHTDYQRLRCIPGIGPITALTVLAEAGDLRRFSHHRQFLKFCGLDLATEQSGQFRGITRLSKRGNARLRAVFWMAASVAVRMRENSFRAKFERYMRANPGNADRKRKAYVAVAAKIARVAYALVRSGASYRCFPEVAVPSGRTRSARAVEAIPTS

SEQ ID NO: 86326 - protein, 364 aa, unidentified
MLADQVDHVIGVDTHRDSHSAAIVAALSGALEIDTTIGANPIGYKQLLRFARQHAPGRRVWAIESSGSFGAGLATFLLEHGEWVVEVERPARPARRNGAKSDELDALRAAREALTREHLAQPRCRGDREAVRVLLVTRRGAMRARTRAINHLKALVVTAREELRHQLRGLDTDELVTRCARLRTLPAHSVEHRATVIALRHTARRVLALEAEANDLETELDAIVARVVPGLLAETGVGPISAAQLYCSWSHRGRLRTDAAFAMLGGSAPIPASSGQTIRYRLNRGGDRQLNCALHTIVLTRLKHDPATRAYAARRAAEGKTPREIKRCLKRYVARRLFRLLEATGPHPTTSQRPPRTRTLGHCS

SEQ ID NO: 86327 - protein, 305 aa, unidentified
MDAIRERCAGLDIHQETVVVCLLSGPLEKKPRSVTETFGTTTRELLRLQEWLEQQGCTEIAMESTGVFWKPVWNILESTCTITLANPHHIRNMPGKKTDVKDAEWIAKLHRCGLIEGSFVPDEPIRDLRDLTRYLRKLKQNATQEKNRIHKILQDANIKLTTYVSDLFGVSGRALLDSMVNGEVLDVHEIRKLVHTRLKMKVPSLVEALNGRLRLHHRKMIRRHLEHLQYLESEIQTLEAEIEELVQPYMKEIELLDTVPGVSTDAAASIVAELGTDMSPFPSEAHLASWVGVCPANHESAGKKK

SEQ ID NO: 86328 - protein, 357 aa, unidentified
MIANKVSRKSNKDNSCSLTEIGSYDQYIALDWSGKNMAIARMGKKDIEPKVIDVPSDVKDLKLYLSKLSGKKILTIEETTTSQWLYVELYDYVDKIFICDPYRNRLLSDGPKTDKIDAGKLCKLLKNGLMKEVYHSTNELYELRKLVSYYDDEVRAGVRLLNQKSALYRAENKSWKKKEELEVNRVNKFITAHLDEKIESYHEKHKKYEKEFEKISQKNKVLRSLKSIPGLGPISSVTILSIVIDGRRFKSSNHYLVYCGLVKHEKLSGGRSYGKRIPRYSRRLKGVYKSAAVRVASTENPLREYYEYLLNEKKLPEYNAKQALARYIAKISLGIIKSGEKYKPYKWRENQKKKEAA

SEQ ID NO: 86329 - protein, 320 aa, unidentified
MAMSVLQSIIGVDVAKAEVVVYQIDTDELKIVPNIKSELKSWLKALPAGSAIAIEATNIYHLDTVNLAHSMGHKVYVVDGYRLNHYRKSTGGRAKTDASDARLLARYLKNEQAELRAWNPPPKIYTKLQSLLRRRAALVKMRVALNQSWAGELLLKASSKSVSACLERHEALIEKRILEAVTEAGLLHQIKRCQAVEGIGFLTAVALTMAFQRGEFQSADAYIAFLGMDLRVTDSGQMNGRRSLSKKGDGEIRRLLHNAASAGIRSEAWKPLYQQYLARGLKTTQALVIIARKLARIAFSLMKNQSEYQSKAVLRASPQP

SEQ ID NO: 86330 - protein, 463 aa, unidentified
MPKARKSRKKLALKVDVTAGLEALHHHAAGIDVGNAEHYAAVPVGRDPQPVQTFGSFTADLHRLAKWLKACRIETVVMQATGVYWIALYEVLEGYGLQVKVVNAKYTKTLPGRKTDVLECQWLQKLHSFGLLNNSFLPPEEIRVLRTYLRQRENLVAAAGACIQQMQKVLTQMNVQLANVSSDLSGMTGMAILQAILDGQRDPQQLAALADPRVQASRKEIAQSLAGHWREDLLFVLRQVHGLYFTYLESITACDQRIEAHLKTMPAKVDVVAQPLPEARPKDRLPNRKHIPQFGLREELYRITGVDLTRIDGIQVQTAQVFISEVGVDMTRWPTEHHFSSWLGLSPNNQITGGKVIRRGTKKVLNRAATALRLAAQTLHRSQSYLGAKYRRLRAKLGAPKAITAMAHHLACLIYRLLRFGTQYHDKGVEQYERKYRDTEMKWLQKQAAKLNMQLIPTGAITK

SEQ ID NO: 86331 - protein, 403 aa, unidentified
MQHVIAFDVSMGKSYMVIYNAQKQCIFESEINHSKPDFEELRKRIDQLMTENKKSPHILFEATGVYSRQLERFMQDNKFEYFLLNPLEAKLQCDSLRIHKTDRSDAHQLALTHFTASRREKTGTDNLFHQLKSLSRFYNELDDELSLIRSRMHKVIQLTFPELEQIFITKSDLFLNFVQLFPHPDFVRNLSKTVMKNQIRKNTNKNISIRVAEKKAMEVLEAARYSYPAVRQDDVLCEQLKSYAKRYQELLHQKEQCITKMVRLAESRTEYPIILSFPGIGPNTAIRLLAEIGDITRFKNNKQLNAFAGIDIRRFQSGKTFFKDKINKRGNKHLRKLLFLIIQNMIKLRRYGQNHIVEYYDKLKTQPYNKCHKVASIACVNKLLKLLFYLITHNIHYDYRLTA

SEQ ID NO: 86332 - protein, 340 aa, unidentified
MTLFVGLDISVKTTAICIVEAAGKGVAELTVDSSPEAISEQLQLQHEPIERVGLEAGALSEWIYAGLVDAGWPAICVETRHMHAVLAARINKTDRNDARGIAQMMRVGLFKAVHVKTPASRHRRLLLTSRKLLQRKIYDIENDLRGSLRTFGLKIGMVASSKFEARVRELVDRHPIIATIIEPLLEARAVLRAQFAKLHRMLLELVRADPVCRRLMSAPGVGPVVALTFRTCVDNPARFSRSKCVGAHYGLTPRVYQSGEVNRTGRISRCGGVMLRSSLYEAALVILTGRTRWNPLKAWGIAIARRRGIQRAMVAVARKLAIILHRMWRSDTDFRWTAAA

SEQ ID NO: 86333 - protein, 408 aa, unidentified
MHTPDEVEVWIGLDVGKEEHFADVLDDEGESLFARSVANDQAALVALLEQAARHGAPGLVIDQPGSIAQLAIAVAARTGVPVAYVPGLVMRRAADLYPGEAKTDRRDAFVIADTARTRRRSVHWLDTASDELLDQLRVLNGFDVDLAADLTRLTNRLRDSLVAISPALERAIGARLHQAGVRDLLAKFPTPTALRAAGRARIIATIKKRSPRVAAKVTDAIIAALDAQTVTMPAEVAVGRVIAELAIELDRLHTRRDALAEEIEGVFLAHPFGQVLVTLPGIGPRTGARILAEIGDGTRFANGSRLASYAGLAPVTRQSGTSIRGESQSRRGNHRLKNAMFLAAFASLRSPDSKTFYDRKRAEGKKHNAAVICLARRRCDVILAMLRNLEPYRAPTAPATNETTAIAA

SEQ ID NO: 86334 - protein, 408 aa, unidentified
MLVCVGDDWSEDGHDVWLMDESGARLAGGRLPEGVEGMARFHEMVAGLVSDPSEVVIGIETDRGLWVEALTGAGYQVYAINPRSVARYRERHSVSGAKSDTGDAKVLADLVRTDRHNHRQVAGDTPESEAIKVLARAHQNLVWERTRHVNRLRSALREYYPQALATFPQLAHRDALAVLAVASTPTLGAALSRTQIRAALRRGGRQRNLDTHIDRIHTGLRTQALAAPVPVTEAFGAVTKAEIAVISALNRQIDDLETGMAHSFEQHPDAGIYLSLPGIGIVLGVRVLGEFGDDPDRYADVKSRRNYAGTSPVTIASGKSLTVTSRWVRNNRLYDPLIRWAFCSLTASPGARAFYQQKRALGLTHHQALRALANRLVGILHGCLKTHTPYNEHTAWAHRQPTPQQDAA

SEQ ID NO: 86335 - protein, 370 aa, unidentified
MSVRRILAKTINTDLEYEAIGIDLAKNCVSVALLTTDGEVVCIDRLDYSELEKSAQVLCPTTFAMEPCTEMNYLVRKLEAWGHRCLVIGGKNVQNYVENHYSGQKTDLNDAQALAFLAQDTQLRTIKAKDMEQQKYASLTTLREQYIKQYRQTIVSLKGICQAWGLNISKGISGKARLKDLIENHAAFPEELKESLVDMVTHAQAAQKALNKITKTLELLAKNDKVCQLIQTIPGLGPICSCRLRATIGDIQRFKNLKDFPAYYGLVPRSIATGHNEKKGRITHRGDKTMRSLMVQGAGSVVNMATKGKLKSKQLTKWILKKQKEKMPWGKLVCAVAAKLLRIVRAVLISRKPYNPKIAGVAKCSLPKGT

SEQ ID NO: 86336 - protein, 415 aa, unidentified
MKVVYQICCGVDVHKKFLIGTIISTTKEIQPHYEKKRFSTHNGDLNRFADWLIEHNCYTVCMESTGKYWVPVYNVLEMRGLNVTIANPKWVRAVKGNKDDAKDSKWIGDLFRLGLVPGSFIPSKEFRILRELTRYRSKLVAMKSSEKNRFQNAFTVCNVALDHVVSDMFGKSASGITDYLLTTDNFDPEHCKSLLKGSLKKKAGSVVESIEGYTISPEQKARIQIVKEHLQQIEDAIKKVDAIIFSMIAKYLGIIELLCSIPGFDKRSAITVISEIGTDMSQFGNSKRLCRWAGLTPGNNESAGKKKSVRISRAGVYLKPALVEVAHAAVKSTTSPYYKVKYEQISKRRGKKRAIIAIARMILTAVFSMLSTGEVWNPSDLSRFDLSEQDAQKLKAVKIKKAIAFLSAQGINVSI

SEQ ID NO: 86337 - protein, 355 aa, unidentified
MDSAKYIGLDVHKESISIAVLNVAGKIVMECVIETKAITLLQFLHGLRGDLHVTFEEGTWAGWLYDLIKPHVTETVVCDPRQNALLKHGNKSDRIDARKLAELLRGGQLKPVYHGEHGVRALKELVRSYLTISKDLARVMTRVKALYRSWAIPCTGKQVYAPRHRAQWLAKISEPGVHRRAEFYYQQLDALRSLRQQVRRDLLGESQKHPAWKLLCQIPSMGPIRAAVLMGIAQTPHRFRTKRQLWTFSGFGIETHSSADYRHVEGRLERTHKQVSIRGLNTNHNHDLKNLFKAAAMIAAYKPGPFQEFYRALLAKGIRPEMARLTLARKIAAITLHIWKKGVRFEAHYLKSQAA

SEQ ID NO: 86338 - protein, 431 aa, unidentified
MNPFSVSPPANVAAWVGLDWADQQHLVCLYDVGTGQTELSTLEQKPEALQSWLGQLRQRFGGRPVAVVLEQARGAVIYALLSVDFLVLYPVHPQSLASDRKVYATSGAKSDQADAVLLMEMVRNSPQRFRPWKPDDADTRSLQLLTQNRRQLVDQCTAFTNQLTGWLKSYYPQALELAGELDSLQACDFLEKWPTLEALQQARPAQIRKLYLDYGKPRPESLEKRLEQIRRARPLTTDPAAVLSGTMMVRALIELIRPLLATLERFDQQIAALFRKHPDRLLFESFPGAGAVLAPRLVAAFGTDRDRFESAQDMQQLSGIAPVTEQSGKQRWVHWRWACSKFLRQSFHEFADHSRKWCGWAKALHQRLRRAGKGHHAAVRALAFKWIRILFHCWKTRTCYDEQVYLKSLEKRNPTLWAETQALPPRKPRAA

SEQ ID NO: 86339 - protein, 353 aa, unidentified
MEKIYIGVDFHARQQTICYLTTDSGELRLHQLKHEDKAAVRAFYAQFTGQVIVGLEASGYSPWFERLLEELGCEVWLGHATEIRRRARWRHKNDRRDAELILDLMLHDEFPRLYLPPRQSREVLRMLRYRQKLIKMRTIGKNSLQALALQSGLAKGPHLFTKAGLQELRTATMSPAMQWQRKQWLQLLEPLNQRLLETMLWLKQQSQADERISRLRTHPGVGLLTALCLVHSLEPVSRFANTRKVTAYAGLDPVERSSAERQRFLGISKGGSRVLRFLLVEAAHTAIRKDADLKRFYQRLAERHGRPKAKVAVSRKLLIRTYIMLRDEIDYAEFQRRAVAARPAPPAHGLNAR

SEQ ID NO: 86340 - protein, 397 aa, unidentified
MIAVGIDVSKSKSTVAILNGDGSIRAKPFDVHHVANELQALVDYIKRTSEPPTILMEPTSHYHYPLLKAFQEAELPVCLINPYQMKKYGDTELRKAKTDKRDSLRIAQYALEKSYSLIPYTPQAQKYEDLRFLSRQYSQRISTLTVAKVQLLSLLDETMPGITTILSLKSRDPDNCVLLRFIKRFKSFDVIRKMGKTRFLDSYQVLVKKTKDRFAGSKGLAIYELVLNSITTRGENPLSAMTQDQCVDLVSTAQKAADEINLQMRIIAETIPEYKVLRSMAGVGDRLGPIILGEIGDIRRFHNGKALNAYAGNDAPPYQSGQFESRNRHISKRGNPALRKACFEVMQALKLTKPQDDPVYLFLLKKEQEGKPYNVAKMAAVNKFLRIYYARAMELYK

SEQ ID NO: 86341 - protein, 457 aa, unidentified
MPQAKRPRGRQELSPVHPNAAAIDIGATMHVAAVGPDCDEQPVRTFQTFTADLHRLADWFAQCGVKTVVMESTGVYWIPIYEILEQRGFKVVLVNARDAKHVPGRKTDVSDAEWLQRLHEYGLLRPSFQPQAEMAGLRAYLRQRERLLDYAAAHIQHMQKALTQMNLQLHHVVSDITGVTGMRIIRAIVEGERDPAILASYRDVRCHASVETVRQALVGNDREEHIFALTQALELYDVYQAKVAACDGQIEAILTRLKSSAVPPTEKLPAARHKTHSTNAPAFEVREALHAILGVDLTQIHGLGPYLALKLVGECGTNLSAWPSAKHFTSWLGLAPHNKISGGKVLSSKTRRTSNRAATLLRLAAITVGRTDTALGAFFRRLSGRVGKAKAVTATARKIAVLFYNTLRHGMAYADPGACYYEDRYRQRVLSNLQRRAKSMGFVLQQVEPAGAQAGVS

SEQ ID NO: 86342 - protein, 382 aa, unidentified
MTRGRCGSLFLHRVILHSLHLTGFPGAQGAEHDDYRRRLPPELQTIAFLMEETGECGDQELNHSDGQAEKFYRDLKERGISVRVGMEATGYSRWFERLLAELGFEIWMGDPAEIKAKRVKKQKFDREDARLLRRLMLENNFPQIWVPGPENRDLRQLLWHRHRLVQMRTRIMNQLQALAMNEGYRWKKKLFSEQGRAQLEKLTLAPWASRRRQELLELLDRMNPTIEELTAAVEREARKRPEAMRLMTHPGVGPLTALAYVLIIGTPTRFQRGKQIGTYVGMIPCEASSARKQRLGHISKQGNSLLRFLLVEAAQAAARIQPDWRRRYTHLAMRRHKSIAKVAMGRRLAVRLYWMWRNGCEYSQSLEFGSYAGQLGIGDGVK

SEQ ID NO: 86343 - protein, 356 aa, unidentified
MSEGSWVGLDVHARSVVAGVIDATTGEVRSLRLPPGGEATVAWLQTLPAPVRVVYEAGPTGYRLARACADAGINCLVAAPSRVRAAADRVKTDRRDAERLARLLRLGEITPVRIPTLEEEGARDLVRAREDARGDLMRARHRLSKLLLRHGLVYDATAWTRTHDAWLRRQRFDGGPLAIVFDESYGRMIDAKSRRDALDNAIGGIATTPPYVDVVSRLVCLRGVSTLTAFALTVELGDWHRFRPESLGPFLGLTPSEHSSGERRRQGAITKTGNSHVRRLLIEAAWHQRSPSRRSVTLERRRDGKPLAVQAQAERSARRLHTRWHALEARGKPRSIVVVAVARELAGHCWALATME

SEQ ID NO: 86344 - protein, 349 aa, unidentified
MTESYDCRQVVGMDLHRHRSVLVRMTEDGRKLETARIDNSPAALRTVLARAGSSPRVVVEATYGWYWAADTLAAAGAEVHLAHPLGVKAFAYRRVKNDERDCADLADLLRLGRLAEAWISPPRVRELRELTRYRIKLVRMRSSAKDQVHAVLAKLGIPVPCSDLFGAFGLTWLDGLNLPQPYAGKVTSLRQLIAWLTAEAGMLDEVIADFLGGHPPYQAVLRLPGIGPVLAAVVIAEIGDVSRFPGPGQLCSWAGLTPRHRESDVKVARGHITKQGSPALRWATVEAIQRQPAGSPPRQLKDSIIDRRGKEARNIAKVAAARKLLTCVFYAMRDGEVRSLAPRTAAEAA

SEQ ID NO: 86345 - protein, 364 aa, unidentified
MQTFLRHCVGLDVSKDTLQVGLSVIDQTGKVTLKATTKVANKPAGFLTLLSWVARHRKQDLPLTYLMESTGVYHEAVAWFLHQQDQPVSILLPNKAKYYLKSLGYKSKNDKIDAQGLSRMGLEQRVPLWKPLSKNLYALRLLTRQHQRLQELRTQSTNQQHALKHSAFDNGFITKQLTNLVKVYDQQLTALEQAITQLINDDAVLKPRIEQLVKIKGLALLSVAVLVAETNGFEGFTNQRHLVSYAGYDVVENQSGNHSGKTRISKKGNSRLRRILHMPAFNAVRFNEPTCKALYERVYERSGIKMKAYVAVQKRLLLMAYALWRHGVAYDPLYLANRTGQAKKIVPTGGTTQDQVAEAELSYL

SEQ ID NO: 86346 - protein, 346 aa, unidentified
MEISTIGLDLAKNVFQVHGVSATGEVVIRKALRRSQMLPFFEKLPPCLVGAEACGTSHHWARELTKLGHEVRLMPAAYVKPYVKRGKNDAADAEAICEAATRQTMRFVPIKSREQQAALSLHRVRSLLIKQRTQLVNMMRSVLAELGIAIPVGIVKALQMAREIVDGESRLDLPTEATNVVAMLAGQLLQLHAQLRKLDLRLAALQRSDDRARRLATIPGIGPIGATALAASVTDPSQFSSGRQFAAWLGLTPRQSSSGGKERLGSITKMGDRYLRQLLIVGATALVRYAKEKPSTVDPRFVALLARKPARVASVAIANKMARIAWAVMARGGVFERGHAPMLAAA

SEQ ID NO: 86347 - protein, 424 aa, unidentified
MNFKMQDKQNQLIERISDKHLVVGVDIAQQLHVARAVNFRGIVVGDPLAFENNEDGFASLLKWMDKLQRLNKLDAAIVGMEPTGHYWINLSKWLFKQGIEVVTVNPHLVKRNKENRDNTQSKSDKKDALVIADMVKNGYYAFVRDTSESFEILRVLMSNRDVVVKRLVSTINQLNRWVDIVFPELRQVFKDITAKGAIATLRLFPSPMELRSLKPDDVVSGWKSIMKRQPGLKKAQLLLQLAKKSVGTRQALEAYKFHLEQLSEEYDLAFSQLERVEQEVKDVLKQIPFAKKLLAIKGISEISLAGILGEAGDLSGFSHGNSLLRHAGLHLAEASSGKWKGQIVISKRGRSRLRRFLYLATMSLVMNNTEFRAIHSHNVKVKKMKKMKSIMKLVGKLARIFVGIARRNEAYCADKVQPITELVA

SEQ ID NO: 86348 - protein, 416 aa, unidentified
MKISQTTREVQRYIALDIHKEYVLAGGMNAAQVWVLQPHKIEMGKFREWARKNLEATDAVVLETTTNVWDIYDIVQPQVGRAVVAHAGAVRQIAEARVKTDKEDVKRLIRLLIADIVPEVWVPPVHVRELRGLISYRRGLVKTGTMIRNHLQSLIHRHNLLLPKDGLLSKEWWDQQGVISALEKLQIHQELAMLEQIQKHKTEIDNELGRQSLGRVWGKQSIQLVQLPGIGIVVAMTVLSAIGDVSRFESTRKLVGYSGLGAGVHDSGKEHIEKRITKSGRKELRWAMVEAAWRAVRMSPYWKEQYEKYLRRMRRPNQAIVVIARKLLVAVWHVLTKEVTDVHASEEDLAYKMLVLSWDLDESVRMGLTYKQFAKYALMRLGVEKDVTRFVRRNVPRRLASREEVLTRMTELGLTV

SEQ ID NO: 86349 - protein, 390 aa, unidentified
MQFAADRLEASTAIRTDLCAIFISLELSRSSWVITSLSPGSGEKMSKHTVRGGDVAGLLKLFAQLREKAKGRTGKVFPLIVIQEAGLDGFWIDRVLQNEGIESHVVDPASIATSRRRRRAKTDGIDGEALVRALLAYKRGEPRVCSMVRLPTPEDEDRRRLCRERKVLTMERVQHVNRIKGLLFSQGVSGYEPLRRDRRERLDALQTGDGRPLPPHLKAQVRRELDRLELLLAQIKAAEAERDALLAAEQTKAPVPPAMLLGVKGIGPEFAAVLWSEGLSRPFENRRQVAAYAGLAPTPWQSGSVDREQGISQSGNPRLRTTMVQLAWLWLRHQPDSALALWFHDRVKRNGGRLRKTTIVALARKLLVALWKYVTAGVVIEGAVMKTKTA

SEQ ID NO: 86350 - protein, 378 aa, unidentified
MSKIRFVGLDVHADTIAVAVAEQGGEVRPLGVIPNRVEVIRKLVARLGPAKNLKVCYEAGPTGYVLYWQLTALGVACEVIAPSLVPVKAGDRVKTDRRDAVKLARSYRAGDLTPVWVPDANHEALRDLVRAREDARQDQMRARHRLNKFLLRHGQRPPADVKKSWTQKYMTWIKEQVHFEQPALEATLLDYVHEVEHMAERIQRLEKAITEAIEKLPPAMRAVVEALQGLRGVAQITAVTVVAELGTLSRFPSPRQLMGYSGLTSSEYSSGNRIQRGSISKTGNAHLRRVIIESAWSYQHRPWVGGFLRKRQQGLEQEVKDIAWKAQWRLHTRYKKLAAANKKKPQIVAAVGRELLGFIWAIAVKTERKFPSCTARAA

SEQ ID NO: 86351 - protein, 310 aa, unidentified
MIIAPGFIGIDVSKHHLDIFDAAAGGLIRQANTLAAAAELARDWAQRNAFVLFEATGRYDLDLRQALTEAGVRFSRVNPARARNFARAAGFLAKTDAVDAQMLAAMAQCLRPAAAEPSLAARERLALLNKRRDQLVANRQQERTRQRECSDPVSRQSIAAHLVWLDAAIEAIQAQIAASIACEPDLEHDRRLLSSAPGVGPVTAAVLLALMPELGRRSPKQLAALVGLAPLNNDSGTRRGQRSIRGGRKRVRDALYVAAFIASRHAPRFKTFFKNLVAAGKPRKLALIAVARKLLTVLNAMLRERQPFHA

SEQ ID NO: 86352 - protein, 330 aa, unidentified
MIQVHGVDERGKAVLKKQLKRNQVVAFFANLPPCLVGIEACASAHYWARKLQSFGHSVKLMAPQFVKPYVKTNKNDAADAEAICEAVSRPNMRFVPIKNGEQQAVLALHRARQGFVKARTAQANQIRGLLAEFGIVIPQGIGHIAKRLPEILEDGENDLPGAFRQLLDRLGDHLKELDRQVGELEVQIQLWHREHEASKKLAQIPGIGPITASALVASIGDAQSFENGRQLAAWLGLVPRQHSSGGKQQLLGISKRGDTYLRTLLIHGARAVIRVAERKAGHTDSWLARLMGRRNKNVAAVALANKNARTVWALLVHGRDYEADYKPAAA

SEQ ID NO: 86353 - protein, 386 aa, unidentified
MAIPEKIRIEQDTLPQPTLFLAFELGQDTWKLGFTIGMAQPPRERTIPAGALETLQQEITRAKQRFGLPEDARVVSCYEAGRDGFWLHRALVAHGVQNHVIDAASIEVNRRQRRAKTDRLDVRKLLTMLLRHSAGEKKVWSVVRVPSVEEEDRRQLHREMQTAKQDRTRVINRIKGLLAGHGVQLTLQGDVDAQLDQVQQWDGAPLPSALRTRLKRAWQQVGFLTAHIQTLEAERRALLRRREDPVIAQVRQLFTLRGIGVNSAWLYVMEFFAWRDFQTPKQVGALAGLTPTPYQSGQSRHELGIAKAGNRHIRAMAIEIAWAWRRFQPASALSQWYERRFGAGSARLRKLGIVALARKRLIALWRFVKTGVLPEGAVLKTAVPSR

SEQ ID NO: 86354 - protein, 365 aa, unidentified
MKTVTNTLKQELMKQGTQLDFSGQKIFAGIDVHKESWKVCIRSEHMELKTFSQNPSAKELSNHLKHNYPSASYQVVYEAGFCGFSHYREFVKEGINCMVVHPADVPTSDKDKQRKSDTVDCRKLGKTLSEGGLTGIFVPCIEQQDDRGIIRFYQQMIKDQTRFKNRIKGWLHFQGITITAGDKHWSNNFIQRLNALSLTPMARKHLDLLLQGYGQVRNMVLVATREVRVLSWQERYQKKIELIRTIPGVGEITALLFITEIGDINRFNGLDPFCDYVGLVPKIHGSGDKESVLGLTHRGHHQLREKLIEASWRAIRSEPVMTMAFNNYCKRMNKNKAIIKIARKMLNRIRFVMKSQTAYEAGVVS

SEQ ID NO: 86355 - protein, 388 aa, unidentified
MTNGYGVFLGLDVGKGNHHAVGLDPAGKRLHDGPLPNSEPKLRTLFDTLAAHGPLLVVVDQPATIGALPVAVARACGHQVAYLPGLAMRRIADLYPGTAKTDARDAFIIADAARSLPHTLRQVDVGDDALAELEVLVGFDDDLAGEATRLGNRIRGLLTGIHPALERVLGPRITHAAVLEILSRCGGPAGIRTTGRRKLSAIATKHAPRMGAKLVESILAALDEQTVTVPGTAAADTVLPRLADSLKAVLAQRKQVATEVEEILDAHPLAGVLTSMPGIGVRTAARILLEIGDASAFKSSAHLAAYAGIAPVTRTSGSSIKGEHPARTGNRKLKRAFFLAAFAALHDPTSRAYYDRKRTEGKKHNAALICLARRRCDVLRQSLETVET

SEQ ID NO: 86356 - protein, 423 aa, unidentified
MNTSTLCVGADVHLKEITLRAIDKLTEDEVIAPFNVTNNLPGAQSAASRLAEVAAQRGYTRIQIGCEATGMLWIPFHRFLSTCPLLEPFDLQQVCFNPKLVADFKDALVLRGPKDDDRDALDVAARVQVGHWPDSYVPDDFWQGLRRLTRYRFKLSRILVQEKTRFQAYAFLKCSDWKRAKPFSDVFGATSAALLTEFTAAELREMTHDQLADLIARRGRGRFYDPDATARAVQQALRTSYPIAPLMDEMVTATLATSWDHIHFIDRLTKRLDQHIARCIDPIPNPLITVKGLGPVITAGLMAEIVDVSRFPEHKHLAQYFGISWTKRSSAGSPIQNSRMTKVGNPYGRYYFIIGADRLRMYNLEYKAYYWRKYNEVPKHQHKRALVLTARKLVRLVHALLTKNVPYVRPQMTVDLGEADLLQ

SEQ ID NO: 86357 - protein, 420 aa, unidentified
MKSFVPVAGVDVSKRFSDLCVLSPDNNVLLRQKIYHDMVSMKLAEKKLHEIELECGARPVVVMESTSHYHLILFQFFTDAGFEVVVVNPIQSGALKNINVRKVKNDRVDAYRIAMLYRLKVLRPSQIPTSSLRGLRLLTRQRSELKGDVARFKNRLTAYLDQIFPGYGEVFSDVGGSASRAVLHMCPTPEKLLNADGSLLAKAICEAGNKGPKFGAEKAAKLREAAGSAQVIGVRSASNASLIKNVLDIIEGLLAAIQRIEREIKELVTQDTRLDEDVKLLCSIPGIGFSSAVVIVAEMGNISLFRKPKQLAAYLGLDPGERQSGTFKGRKNKLSKRGSPQVRAALHMAAVSSVSRKRDGTYRNPVLAEYYERKCAEKPCKVARVAVMRKLSNIIYAVLRDRKPFELRTPQEHMALLAAA

SEQ ID NO: 86358 - protein, 360 aa, unidentified
MSFNGTSVGLDVHALSVVAHAVDEESGLVERARLCPDHGEVLRWLGQLRGPLRVAYEAGPTGFGLARALAEARIECVVAAPSKLIRPAGDRVKTDVSDAAHLTRLLRLGEITPVSVPEADVEAVRDLVRAREDARADLMRVRHRLSKLLLRQGRVYSGGQAWTGLHQTWLRQQRFTHAHTAAAFDHHFDAVLSATAARDHLDEQIVGVAASPRWADTVDRLGCLRGISALTGLALAVEIGDWSRFTGASIGAYVGLVPTEYSSGASRVLGSITKAGNAHVRRLLIEAAWHHRASYRNPGPTMRARWAKVDPALKARGHAGNRRLHQQWSRFLERKKHPAVANVAIARQLAGWCWSLATLD

SEQ ID NO: 86359 - protein, 339 aa, unidentified
MNNSVIGLDIAKHIFHLFTLGADGKAIKKKLKRSELLAFFANYPASIIGIEACGSSHHWARELTKLGHEVILLNARFVKNYVVGNKTDFNDAEAIHEAVLRPNKRVVAIKTVAQQDIQLVHNIRKDLVDQRTALVNQTRGLLSERGIVINQGIEQLREQLPLIIEDAENSLTDLSRELFAEQYEKIKTLDAEIKAQDQRINRLCNANDLSKRFLDVPGVGPLTATIVAADIGDGGKGYKSSRDYAASLGVVPKQHSSADKQHYLGISKRGNRYIRTLLIHGARAVLKNCGKKTDKLSLWLQALVARRGFNKAAVALANKNARILWAMASNGKDYEALVA

SEQ ID NO: 86360 - protein, 423 aa, unidentified
MEVIHERVAGLDVHKDSVVACVRIMSGGKAKRECRTFGTTTAELEALRDWITSWECTLVAMEATGVYWLPIWKILLGGAFEMNIANARHIKAVPGRKTDMNDAMWIADLAAYGLIRASFVPDEEFHELRTLTRTRKQLVRDQTSHVQRIQKTLTEANIRLDSVISDIMGVNGRRMIEAMIEGIRDPGKLAALGDRRLKATRKELHDALHGRLTDHHRFLLKLHLDQHDALEKTIRVIDAEVERRIARLDKQAKAVETPLSRLIELLVSIPGVSYLSAITIISEIGSNMSRFPTAGHLIAWAGLCPGQNESAGKRKRSRLRKGAPWLKTMLVQCAWAAKRQKNSYYRAQFYRLQARRGPQKAICAVAASILTAIYHILKDGVPHQDLGIDYFDKRKPEAKVKRLVAQIAKLGFEATLHPIAKAA

SEQ ID NO: 86361 - protein, 349 aa, unidentified
MVIIGADTHKRTHTLVAVDANGRSLGERTVAATPAGHLELLRWAERFAERSWALEDCRNLSRRLEADLLRAGQRVVRVPPKLMAGVRVGGREPGKSDPIDALAVARAALREPELPMAQLDGPEREVRILVDHREDLVAERTRTQNRLRWHLHELMPGSEPASRPLNRAVVLDDLQRRLATESGIIARLAVELLGRVRELTAAINRLEREIATLVRPLAPSLLELTGCGPLTAAKLVGETAGASRFRSRAAYARHNGTAPVPVWSGNVTRHRLSRGGNRQLNAGLHRIAVTQLQRSGPGQLYLAHRRAAGDTKTEAIRALRRRISDEVYRRLRHDEQHASRQPASLVAAA

SEQ ID NO: 86362 - protein, 348 aa, unidentified
MNSVSLTDLEVAGGVDTHQDQHVAAVLDREGTVLGVEFFPTTRHGYLALIAWMRGFGALARVGVECTGSYGAGLTRYLALAGIPVWEVTRPDKSMRRAQGKDDTFDAISAAQAAVTGQRVQIAKDRNGQVEALRVLRTTRKTAIKCRRAALQQLHNTIVAAPDAVREQCRHETRMHLLRALAASRPDRVSFRDPNVATRIALKSLARRVLELNDEVADLDQFIEPLVGELAPALLAMVGVGVESAGEFLVAAGDNPERLTSEASFAMLCGACPIPASSGKTNRHRLNRGGNRQANSALYIVVLSRIRIDERTQAYMKRRLAEGLSKREVMRCLKRYVAREVYQVLTSK

SEQ ID NO: 86363 - protein, 442 aa, unidentified
MFRFRAATVRERCRAPLPHGRGSVTFGHVRRVAPLQRWYEKAGLPAGCVKLPMETHSKCKRRPAMRKHTTAKKNQKALTKTKGKQVRQMAVRQRLTIGLDLGDITSRYCILDEAGEVVSEGQVPTTKAGMNSLFEKMPSSRVALEVGTHSPWISRHLGSLGHEVIVANPHKVKLITQSVRKNDRIDARQLARLARVDRKLLSPIRHRGEQAQADLAVIRARGELVESRTGLINCARGLVKPMGERLKKCDADQVAEALAKPLSEVAQVVIGPLLKSVETISEQIVGYDQKIEEIAKRYPEVELLTQVYGVGTLIALTYILTIEDAERFQHSRDVGAFLGLQPKQRESGNSQPQLGISKTGDRLMRSLLVQAAHCVLRKGAPDSDLRAWGLGKMGQGGKNAKRRTIVAVARKLSVLLHRLWVTGEVYDPLYQRKSAPAAKAAA

SEQ ID NO: 86364 - protein, 362 aa, unidentified
MIYVGMDVSSKSFVVHAVNGKKKVVFKGEIASTRAGLRDLVRKRLGAETKLVVFEAGNQMKWIADSLKKEPTVMVHVVHPNQVKWIAESGGKKTDKVDAKKLAELARGDLLPRKVHLVEGKARQMRELVSARTNMMRKRVGLINTLRAYLKQEGVKLGEKFFGHADWQEQLAKKTVSVQLKAIIEAYRKAIDALREAEGELTERLTGIRDERTELLETIPAIGELTSRTVVSALDEVKRFDNKKAVSSYGALSPTIYQSGDDVQMGRVNRNGRHEVRRVMLQCAHTLVRMKSPEAAPLRRFYERIERKRGKKKAVVALSRKLLTVAYGVLKSGEPYDPRKLGARPTIQAPRVRTRRYVLRAG

SEQ ID NO: 86365 - protein, 346 aa, unidentified
MKNITTVGVDLAKEVIQVCVVTRGKVISNTEMTPQEFRCFLVKTKSCIIVFEACGTSNYWKQVSLSEGHDARLISAKLVSQIRQNQKTDENDALAIVQASQLTGVRFIQGKQFSQQELQSISRMRELALKHKTATSNQIGALLLEFNIRVSNRNGGLNGVVKATLEDAENDFSSEFREALYETWQGYLALVARIAKYDEHLNASVEKTPACKKLMALEGVAIINAVNLYISLACSEDSVFSSAKDASASIGVTPIQYSSGGRIKLGGIGKRVKNALVRSNLISGAMAVVKQVSQREPRTAKEKWLKALIERRGNKCAAVALANKTVRTAFAMLRDGTEYHAQALDA

SEQ ID NO: 86366 - protein, 342 aa, unidentified
MYYIGLDVHKKTISYCVKEANGHIYAEGKVGATRWELDDWMKTLPRPWTVAMEATIFTGWIYDHLLPHAAQVKVAHPVMLRAIAAAKKKNDRIDAGKIADCLRCDFLPECHMVSTEIRDRRRTLRYRHLLVHQIVQMKNRISGLLMETGVSHNKQKLHKVGYFRELLSNKSEVHESIRPLLRLSRETIVRLQKTEYALVSSLQRDPLLAERIKRLRTVPGVGPITALTWALEIGDVTRFRSIKQAISYCGLSSDEKSSADKVMRTPLSKQRNKHIQRALVEAAKLAPRQDHQLAVVYEKEKEKGHANRATLAVARKMVAYLVAVDRAKRDFVAKEDLNQAIA

SEQ ID NO: 86367 - protein, 288 aa, unidentified
MKSIIYVGMDVHKASFTISCFSVTTQETFATVKISPDAKAIKKYLDGVSLSRSEECEFVCGYEAGCLGYTLYHQLTAMNIRCVIMAPTTILRNSKRVKTDRIDAENLARCLAYGGYKSVYIPTAQDEAVRDYLRMRDDHKLMLKKIKQQINAFCLKHNKIYPGNKSKWTQAHLKWLNALEFDGYLQDAFNEYMITYRELADKVERLESQIEQLAELEEYRDKVKKLICIKGIKTHTALSLIVETGDFNRFQSAERYASYIGLVPGEHSSSEDRNRPSPKPGTGICGCF

SEQ ID NO: 86368 - protein, 470 aa, unidentified
MIRHRSDSVLLGPLASVRKPVSQPVIAAVRFMQVELPLHVRLIPQEIESAMRNAGIHANSLLEVRRMYNAVGIDVSKGKSTVAVLQPGGTVIRKPFDVSHTSQNLIELAHYLGSLEGSTKIVMECTGRYHEPMLKALYEAGLFVSVVNPHLIKNFGNNSLRRVKSDPADARRIARYTLDNWAELRQYSGMDNTRTQLKTLNSQFSFFMKQKVAAKANLIALLDNTYPGVNKLFDSPPREDGSEKWVDYAYSFWHVDCVRRIGLKTFTERYKAFCKKHHYIFQQDKPEKLFNASKELVAVFPKEKTYKLLIQQSIRQLNLASEHVERLRQEMNALASTLPEYSTVMGIYGVGKTYGPQLIAEIGDVSRFTHREALTAFAGVDPGVDESGQHKSKSNRASKVGSARLRKTLFQIMTTLLQNAPEDDPVYRFLDKKRAQGKPYYVYMTAGANKFLRIYYGKVKECLRNLEQAE

SEQ ID NO: 86369 - protein, 351 aa, unidentified
MPHKTAATVAHTIGIDAGKNTLHLIGLDDKGAIVLREKVARDRITVRLANVPQCLIGIEAGMATHYVARELSALGHDVKQVPPAYAKPFRQGHKNDFRDAYAIAEAVQRPSTRCVPVKTDDQLDLQALHRVRSRLVGQRTAVINQIRSFLLEHGIAIRQGLRFLRQQLPDILAKRSDVLSPRMIRIIEDLSGDWRRLDERIEHITAEIEVLAQGSESCRQLMTVPGVGPIIASAMVAAIGNGTAFAKGRDFAAWLGLIPKQMSTGDRTILGRITKRGNRYLRTLFMQGARVILLRPANWMKHSFGPWLTAAAQRLHHNVLATALANKLARITWTVLAQARNYDPRVEPGMA

SEQ ID NO: 86370 - protein, 457 aa, unidentified
MPAAKQPSSPRPKKARSTRGLRVIHPDAAGIDIGATSHYVAVPPDRAEEPVRSFGTHTADLHALVAWLKECRVTSVALESTGSYWIALYQVLERAGFGVLLCNARHVKNLPGRKTDVGDAQWLQELHTHGLLSGSFRPADEVCVLRAYLRHRDNLTKATGAHIQHMQKALIEMNLKLHHMLSDLTGVSGMAIIRAILAGERDPLKLAALKHERVKKSDAEIARALEGEYREEHLFALRQAVELYDFFLARIAECDTRIDLELRQWEAKADVAAAPLPGPARRRTAFAHSQHELRSQLYAVAGVDLTTLPGMEVLSVQALLSEIGTDMTRWKTEKHFCSWLRLCPDNRITGGKRQRGKPHKGHNRAAQILRVCAQAAIQSKSALGAFGRRLRARMDAPRAIKALAHKLARLLYRMLHDGTAYQDTGEHYYEERYRTHLISRLTKQAAHFGFHLTPATE

SEQ ID NO: 86371 - protein, 394 aa, unidentified
MKLVGIDVGKNSHHFCVMDKETGEFNVAPSSFSNNKEGFDFLINSLKPYSKKSILIGMEDTGHYHVALLKFLLSNGYTVALINPKTTDLTRKMEGGITKNDKLDTITICDVLDTPERKKQYRITKVDRFDLYEQRQLTRHHHNLKEELNVYCNRLQKSIDLVFPEFNTLFSSKYGIVYMNLLKTFGSAEAIASTDIRTIRKCFEVKGRGGRISLTPEKLKECAKNSIGISSEVETIQIKHLVNQITLIKEQIAEIDKKIEEFSITNNSPILSIPGISHFSGTSILAELGDIGNYSKPSQIIKFAGVAPYHYESSQYNAQHTAITKKGSKYLRKTLYQIILPVINNNPVFKKYYLLKISQGKGHRCAQGHCIRKLLRIIYHLLETGQSFDPALLR

SEQ ID NO: 86372 - protein, 450 aa, unidentified
MGCRYAGIDWATEKHDVRVADETGEKLLAATFAHDEAGLLALCRTLVKMEVDLVAIERPEGVLVERLLDAGVKVLALHPNKVAAARDRFRVSGGKSDRFDAFVLCELARTDNHRFRVLEPDSDQTKALRALTRAREDLVHTRTAVVNQLRAELDRCWPGPLRLFSHMDSEILLAFLERYPSPVDAQGLGIVRMQAFLKRECYSGRQKPEALLAKLRSAPEGRVGELELAARRQLVLTYVAMVRTLNGQIKGLERDIRTAVRAHPDGRLFLSLFKQAHSVITAAELLAEIGDCRARYPNRDALAADAGQSAVAKESGKRKTAQFRWGCNKRLRVAFSRLADSTRHWHPWAQAVYAQARDRGLEHPRAIRTLGRAWCRIVWQCWRSRTAYDPTQHRSLQRHITVTIPSPSGPITDPAATARMAADLSPAPGALEPSAQHLTTGLHPIIHNGG

SEQ ID NO: 86373 - protein, 379 aa, unidentified
MTSTDAAADTRETVYAAIELSKKTWVLGIAPPDRDRPSIHRVGGGNIAELVSRLRVACRNNRRIVVCYEAGYDGFWLARALVKIGIECRVLDPASIQVNRRARRVKTDRIDVLALLRALIATDRGERHVCAVVRVPSVEEEDARRSHRERQRLVRERTGHINRIKGLLFAQGIRDIKPKLRRTRIDFATLETAEGHPLPGRLRRELEREYARLALIETQLREVENERDTADSQDPMVEQKRQMLVALHGVGSTSAAILAREVFARSFASRRQLGSYLGLTPSAYDSGSTTRCQGISKAGNSWARRILIEVAWLWRKYQPASPLSNWYIQKTTGQSSRIRRIMLIALARKLAISLWRYVETGLVPEGVVITRSESQCALA

SEQ ID NO: 86374 - protein, 372 aa, unidentified
MNSIVYVGMDVHASNYTLSCYTLTNDECFATVQMEPEVKNILTYLKKVQRNLGGPCEFLCGYEAGALGFSLYHQLQKHGIPCTILAPSTMPTFHRNEIKTDRRDAMKIARCLAFGAFRPVHIPTKEDAAVKDFIRMRDDHKIALKKIKQQIQAFCMRYDLHFTEGRSYWTQRHLAWLKALALDDLLREVLDEYLVTLHQLADKIERLDARIEELAQGERYAENVKKLSCLIGVRTHTALALVAETGDFRRFAKAEQYAAFLGLVPGERSSGDKQSRTGITKAGNTHLRKLLVEASQCYGRGKPGYKSRLLKERQQGNTSEVIAYADKANERLRRKFYRMVLRHNKKHNVAVTAVARELSCFIWGMMTGHTAI

SEQ ID NO: 86375 - protein, 325 aa, unidentified
MVPERTEAYAGVDVSKERLEVCVRRAREASEGEHTFGVSNDPAGTQTLLARLLEERPALVILEATGGFERPVAAALAAAGLPIAVVNPRQARDFARAMGRLAKTDRIDAQILARFAQAVRPAPRPVPEEEAQALAEITARRRQLVGMLTAENNRLGAATTKTVRRRIEAHVRWLEKELSRTDRDLEEAINESPTWRKNEELLRGVPGVGPVLARTLLAELPELGNLPPKQLAALVGVAPLNRDSGVFRGRRAVWGGRATVRAALYMGALVATRHNPQIKEFYERLLSAGKPRKVALVACMRKLLIILNAMLKNRTPWRSPQTLAP

SEQ ID NO: 86376 - protein, 339 aa, unidentified
MKYTPVGVDIAKHLIQVHFIDEHTGEVIDKQLRRQDFLMFFSNREPCLIGMEACGGSQHWARELAKLGHKVRLLQARFVKAFVMGNKNDVMDARAIWMAVQQPGKEIAVKTEEQQSVLVLHRTRRQLVKFRTAQINSLHGTLLEFGESIHKGRAAMEREFPEALERMKERLPPYLITVLEDQYNRLNELDSLIDDVEKQLTSVARQNETCKRLLDIPGVGPLIATAAVATMGEASAFKSGREFAAYVGLVPGQTGSGGKIRLLGISKRGDTYLRTLFIHGARAAALLTREPGPWITELKKRRPASVAIVAMANKLARTVWAIAAHGRKYDRNHVSIRPY

SEQ ID NO: 86377 - protein, 343 aa, unidentified
MEIATVGIDIGKSCFHVVGFTRAGTIVVRRRFTRRQLVMYLVNLPPCVIAMEACCGAHHLGRLLITYGHDVRLLPPQFVRPFVKSHKNDIRDAEAIGEAAQRPTMHTVPLKTPEQLDLQALHRVRTRLVARRTAVINQIRAFLLERGITIRAGRRPVQRALPDVLADAGNGLSPRLCRLLERLRGEWDTLDAAIDDTDEEIRVVSNETETCQQLMTVPGIGPLTASAVVAAVGNGSAFRRGRDFAAWLGLVPHQHSTGGKPTLLGISKRGNAYLRQLFIHGARAVLLKRPRYRGQLRSWLDALSARAHPNVVAVALANKLARIAWAILRHQTVFRGELAIVSA

SEQ ID NO: 86378 - protein, 350 aa, unidentified
MMIIGCDLHTRYQQIAMVDTETGELVERRLEHESGEARTFYAGLKGAVRVGIEATGHTAWFEALLAELGHELWMGDAAKIRAAVVRKQKTDVRDAAHLLDMLCTNRFPTIWRPTLAERDLRQLLWHRQKLVWMWGAVKNQMHALAMGEGVCRKKKLFTAKGRTELEGLKLGPWASYRRQELLRMFEELQNSVKKLDQAVELAAQSQPLATRLMTHPGVGPITSLAFVLIIGPVERFDRSKQVVSYLGLNPQEHSSGGRQRLGSISKQGNPMMRSLLVEAGHTAARLDPQLQRTYQRLKFRRGAAVAKVAIARKLAVRLYWMLRSTADYAQLVRMRGSSWATLVEDSPSLG

SEQ ID NO: 86379 - protein, 360 aa, unidentified
MGQVRTWVGLDVHAAKVVAAIADSQSGELAVRRMGGATEQVAEFCAALPAPVRVAYEAGPTGFGLARALAARGIECTVAAPGKIERPAQDRVKTDRRDAERLARLLMIGGLHPVRVPTPAEEAMRDLVRAREDVRGDLMRARHRVAKLLLRHDLRFEGNNWTQRHLDWLGRVELPEPVAQSVLLDGIGSIDALLVRRESLEAQMASLVEGSPWEQQVAHLRCLRGIDTLSALGLCAEVGDFERFARPAQLMSYLGLVPSENSSGEKRRQGAITKSGSRHARRLLVEAAWHYRRAPRKGRELRRRQEGQPQAVCAISWKAQQRLHRSWVRLDSERGKRRTLCAVAVARELTGFCWAVATAD

SEQ ID NO: 86380 - protein, 319 aa, unidentified
MKISSNSTYVGIDVSGDQLAVHILPDEKFFVVATDHKSLKSLTKQLRELAPTIILLESTGGVEKPVVAALLQADLPVRVINPRHVREFARASGLLAKTDRLDARILARFAEAMKPAIRKLPDADQLHLAELMTRRHQLLDMRTADMHRMSRAASDKVKLSCKEHITWLEERLRDIDSEVKLLVDLSPVWSARDALLQSVPGVGDNLSRTLLASLPELGRLNRRELASLVGVAPFAHDSGTMKGRRSIWGGRAAVRKALYMAAVASVRCNPTLKSFYLRLRTSNKPAKVALVATARKLITILNTMVKNNSTWNYIQTQTA

SEQ ID NO: 86381 - protein, 456 aa, unidentified
MTTMKPQVIDDQEHERVHERVAAVDVAKDTGMVCTRTPHPSRPGARRSTVWTVKARMGAVRALGGQLKHDGIEIVTLESTSDYWRIWFFVLEACGLAVQLVHAAQAKNLPGRPKTDKLDAQWLARLTEMGLLRASFVPPRAIRDLRDYTRARTRLVQERTRCWQRLEKLLEAALVKVSSVASKLTTVSAQDMIKAMIAGQRDPHQLAGLARGSMKAKHDDLVEALNGMFDDHHGELAQLLLDHIAFLDGRIAQLGTRAAELAAAMPAAWGADADGTTGPGTGTGPDAPVLNAVARLAGIPGISEDLARAIIAETGLDMTRFPTAAHLVSWSGLCPSARQSGPRARAGKKGQGDTWLRGSLGQAAIGAARTAPSSANATPGSPAAAARPRPRSPSPAPSWSSSGTCSPTPPPGSPTSATATTRPAPTPTANSATTSGRSKRSASPSPSPGPPNLKPP

SEQ ID NO: 86382 - protein, 377 aa, unidentified
MLIGPLLMLWTAPPPASRCANIAVFWRTAKEEPSMEQISTIGLDIAKNVFQVHGIDENGKIAVRRQLKRRRVLAFFAKLPSCLVGMEACATSHYWAREIEKLGHEVRMMPPRYVKPYVKRNKNDAADAEAICEAVTRPTMRFVPIKTPEQQSVLMLHRTRQLFVRQRTTLINAIRAHMAEYGIVAGVGRNGVEVLLELIAKGEDDRIPPAARECLMALAVQLQLVKRQILEADRRVLAWHRASKVSKRLEAIPGVGPLVASALVASIPDPSVFRSGRDMSAWIGLVPKQNSTGGKEKLGSISKAGNRYLRKLLVVGALSVIKRAKILGYTRHPWLVRLMERRSTKIAAVALANKIARMAWAMMVRDEKYRTPLPQAA

SEQ ID NO: 86383 - protein, 330 aa, unidentified
MSLFCVGVDVGARELVVSIDRNGIRESGIVFSNDAGGHRKLIRWATKKGATAQVVLESTGVYGLDLAFALHRAKRVTVMVANPRAIAAFAKASLQRSKTDALDAETILEFSIRMPFVNWNPPAPSILELRALSRRIEALSKTVTQEKNRLHANQQSEKLSNFVREDIRELVELLRSRIDRLRKQALLVIEQNPGLAKAFRHLTSIKGIADAAGIQLLAELGTLPKDMTTRQWVAHAGLDPRQYQSGTSVHKPARISKTGNAHLRRALFLPAMVAVRWEPNVKAFYEKLLAKGKTKMQALVAVMRKLLHSIHGMLEHGQDFDGEKFFVMKA

SEQ ID NO: 86384 - protein, 402 aa, unidentified
MKKSSRMSVIHPHAAGVDIGAEFHVVAVPPDADAAPVRTFQRFTADLHRMSDWLKTCHITTIAMESTGVYWLPAFEIPEAAGFNVILVNAREAKNVPGRKTDVNDAQWLQKLHSFGLLRASFRPEHDISVLRSYLRQRERLTEYRAAHIQHMQKALMQMNVQLHHAVSDITGVTGLSIVRAIVSGERDPSVLIQYRDVRCKKTPEVLQQALTGNWQPEHLFAPEQSVAFFDFYQEKIRECDDQIETSLLQLSTGTEEPEGVLPSARHRTKQPNQLSFDVRPLLWKITGADLTQIHGFGPYLALKFVAECGTDMNRWPDASHFTSWLCLSPGNKISGGKVLSPKTRRSSSRIAAALRLAATTIGRSDTALGAFYRRLSSRIGKAKAVTATARELAILFYNALK

SEQ ID NO: 86385 - protein, 365 aa, unidentified
MTTIAHDEPCRVTGGVDTHKDVHVAAVLDELGRQLGTESFPTTRHGYRRLLRWLRSHGEVVAVGVEGCGSWGAGLARFLAARGVRVVEVNRPNRQNRRLRGKSDTVDAEAAARAVINGQSTVTPKAGTGPVEAVRQLRIARSGAMKARTAAANQLHSLCDTAPESVRSQLAGLTLKKKVAVAERWRPATTVTAETATRRAVATVARRWRALDEEARELSRHIKAVLDAVAAELLAAHGVGYETAGQLLVTAGDNPGRLAHERSFAALCGSSPVPASSGRTNRHRLNRGGDRNANSALWTIVLVRMGTHAPTKAYVERRTAEGLSKPEIMRCLKRYVARELFPLIQSIAAPPALEQGGARPPEIAA

SEQ ID NO: 86386 - protein, 340 aa, unidentified
MNTITIGIDLAKTSFSLVGMSKQGNITFRKTLTRKKLLPFIANHPISTIAMEACSGAHFWAREFSKLGHECKIIAAKFIAPFRKGVKNDNNDAEAICEAAQRPRIYTVPIKTPDQQALQAMHRIASLIIKEKNATVNQARGLLAEFGFVIPKGKKAFITQIPEILEDAENGLPDQARMLISHLLKHYKLLHEKTLEYDREFSRIGRENPKAKRLRTIPGVGDKTATGMVAAVPDPRMFTNSHQFAAWLGLTPKQFSTGGKIKLGGITKAGNSYLRMCLIHGARSYIKNIENKDDKVSRWIVNLIERRGYNRGLVAMAARNARLIWTLLIKEEDYRVPLCT

SEQ ID NO: 86387 - protein, 439 aa, unidentified
MSQRSCKTADTPAPEPLDPRVALNDVPRAEVRRSGYNALTHVQLVSPDMMRAPGCPGGLGRNPSLAAVTSMKPGLRARTLERCPTAAAVADRTGPRALRHARSPHFIRKVESLPQVLTEVAMDVVLGIDVGKADFHCALLVEDHQRSNSFPNSRLGFERLAAWLANRKVTQVHACLESTGGWSEELAAYLHERGHAVSVVNPSTVKAVGQSELSRTKTDKADAALIARYCRAMKPRLREPPSPSQQRLQRLGRRRVALLEMRVQETNRLQGPGIDAVRSSIEATIAFLDRQIEEIESEISTTINEDPTLRGKRELLKSIPGIAEGAATTLFGELPQLSEFRSSKALAAFVGLCPRQFRSGSSVAGSWLSKVGNAHVRRVLYWPAITAMRCNPVLKAFADRLRANGKRPKQIIAAAMRRLLVLAYGVLKSGRSFDPALHA

SEQ ID NO: 86388 - protein, 352 aa, unidentified
MYYVGLDLHKKYITGCALDSQGAVVATERRLPPVLATVLSWLAPVGQPAAVALEATLYWAWLHDRLTAAGYQVAVAHPQQVKLICHARCKTDPVDARKLADLLRTDLLPAIWIPDAETRARRTLLRGRAWVVRTRTRVKARIQAYLAAENERVPVSDLFSRGGRAWLATVALPPEVRSQVDRLLALVEQLDVQIAGQDRTVRALARATPEAEQLQTIPGIGPFGALLLLAEIGTITRFGSSHELAAYAGLVPSTRSSGGKTAHGSVGPAGSAWLKWLFVEAVQTLKRQPGPVRSKYERLLRAKGKQKATVAAARKLCCYVYWMMKEGRSYDEWLRQRQQREVRPIQAVASVA

SEQ ID NO: 86389 - protein, 338 aa, unidentified
MQKFSGIDLHSNNSMVVVSDEEDRVVYQRRLANDLAGILRALEPHRDELIGVVVESTYNWYWLVDGLMDAGYRVHLANTAAIKKYEGLKYSGDAADAAYLAHLLRLGVLPEGYIYPREARAGRDLARKRMQLVQYRTAQILAIENILARQTGGRLRSNEIKQLTAERLEALGLSADVTLALQANVAVMHTLQSQITVLEERLQERVRLHEDYALLTTVPGIGQTLATTIMLETGNIARFAKVGNFSSYCRCVDSLRESNGKKKGEGNAKNGNQYLAWAFVEAAHFALRYCPQAKRFYERKKQQRNAIVATKALAHKLARACYHMLREHKPFEVQRCFA

SEQ ID NO: 86390 - protein, 429 aa, unidentified
MRTESTPGARGPVFCGVDTHADSHWLCVLDWRGRKVLSRQFPADAAGYEALAGAIAAAGEPACVAMEGTSSYGAGLTRHLASLGMPVREALSPARMQRRRPGQGKCDEADAERAARAAMSGSKLGTPKSQDGWVDGVRCMLAARSGAVKARTSAINTARSLLTTAPEGLRSRFRGMGGPRLMEELPSVRAEGALGAALGALADLWEAARDAALDMERAIEASLEENCPALLAMYGCGPVSAAKLAVAAGDNPGRLRSEASFAAICGACPIPASSGKTVRHRLNRGGDRQANSALHEIARQRVMRDPETAEYAERARGRGKSDREVMRCLKRYVAREAYRALMHPHEIRRPEDASELVAARRAAKVSQVRAASILGTSEKYISMLERGQRELRPIRRAYEAWVEAGLPLDWDRQAFEAERKMDSKKHLAK

SEQ ID NO: 86391 - protein, 338 aa, unidentified
MGEITTVGLDLAKNTFHVIGCDVHGKEVKRQLLRRAQVMAFFANLPPCLIGMESCASAHFWARGFRNLGHEVRLIAPQHVKAYVRGNKNDYNDARAIAEAVCRPDMRFVTVKTVQEQDVQALHRLREAQVRERTALCNQIRGLLAEYGIVLPKGVSIVRKRLPELLEADGNGLSAFFRPLLANCYEQLQQLDAHIDFYTRELKRHAQRHEAVRRLQTVPGFGPILSSVFHAFLGDGQAFRKGRDVSAALGLVPRQHSSGGKAVLLGIGKRGDRYLRSLLVHGARSVVRLAAGKDDRLSRWINRLRSTRGYNKAAVALANKMARIGWAVLRQQCVYRTA

SEQ ID NO: 86392 - protein, 450 aa, unidentified
MSPLALDVVTKTGKTPVLGRMLSKYVGRKTSSIENDITKARNHSRQRGNIMRVVFGIDVSKASSEVAILINGEKVHGYTIPNDAIGFNRLLGDLKTVHQPEIVFEATGVYSRRLQAFFEDNSYAYTRLSPLDSKKQLDSLRVRKTDKIDAEKLAASQFILNRKPSYVQEALYQELRDLSRFYQNLTEDIVCAKNRLHKVLQVTFPELENILSAPTGEQYWNLVITFPCNSFVLELDDATLRAIIRQSTSKRISEKRVTYLVDKLTKLANQSYCAVKKTSPMMEEVKYYAGELLRLSEYRKSVLEEMVTLAQPLPEYEILLSIPGIAETTATSIIGELGDIRRFHSANQINAFIGIDVRHYESGDFLAKEHITKRGNPYARKILFKCIHNIGSASHSNPCHIADFYDKRKRQSQVTSTKPHTIASIHRLIRTMYYLITHNKLYDYTSIQNR

SEQ ID NO: 86393 - protein, 388 aa, unidentified
MTEILKRYVGLDIHKHYVVVGAVDGEQAVVMRPRRVSIEELGEWAAAHLQPTDEVVLEASTNVWPIHDLLEPLVADIVVVHPNHVKVIAESSVKTDQRDALALARLLAANLLSSVWVPPAHVRELRVLVAHRQWLVRQRVSVRNRLHGVLHTHNLTPPAGDPFCADKRDWWHDLPLASPIRLRLRHDLALLDHLSTLLQEAEEELARLSVSESWAEQVPFLMQLPGFGLRNAMTLLSAVGTVTRFPTPKQLVGYSGLWSRVHTSGQTHRTGRITKQGRAELRVVMVQAAWAAVRHNSHWKRQFESLAARIGRQKAIVAIARKLLVVVWYVLTEQTVDRHAKPQAVARKFLTWASRHRLATSLGLSRDRFVEHYMRQVGYSHEVISACA

SEQ ID NO: 86394 - protein, 425 aa, unidentified
MLGRPFFGRWAASPASRWPPLRLARLRCERESVCVVCPLVLPIVERVKGVVVRSIGLDVHRDFCEVALLDSCGGRARGRVETTPEALELFAGSLAPDDQVALEVTGNAWEIARIIEPHVARVVVVSPSDTGIRQARAKTDRLDAQALAKLLAAGSLDAVWMPDERTRAMRRRLARRAQLVTARTRVKNEIQAVLVRRLKGRPPASDLFGIKGRAWLAEQELPIEERETVDAGLRHIGFLDGEIAEVERLIALDALQWPDIRRLMTVPGVNVIVAATFVAAIGDIRRFPTARQMAGYLGLDPKVRQSGPGPATHGRISKQGSAPARHALVEACWSAVRAPGPLRAFYQRIRARRGHQIAIVASARKRACLFWCLPDPRAGLRLRPAVTDPQEAAPPRDHRRRTPLPVAGSPPRISYPPPRHGRAPA

SEQ ID NO: 86395 - protein, 368 aa, unidentified
MNRKSSKLYVGMDVHKESIDLAVAEESGEVRHHGQIGGDMNALWRAVRKLESSGRELVFVYEAGPCGFGIYRGLTGRGHSCWVVAPSNTPRRVRDRIKTDRRDSLKLAGLARAGELTPIYVPDVRDEAMRDLVRAREDAVVMQRQARQRLAALLLRNDVRYAGKTAWTAAHRRWIAELRLPQPAQRLAFEEYVQAVEEASARVQRLSQCIEQELAHWRWRPVVGALQGCRGIQLIHAVRIVAELGDLSRFSHPRQLMGYLGLIPGEDSSGEHRQQGAITKAGNSSARRALVEAAWAYQFSAKVSALIARRQADVPKAALDIAWKAQVRLCARFRRLAARGVNRNKIVVAIARELAGFVWAIAQQVKPV

SEQ ID NO: 86396 - protein, 339 aa, unidentified
MERQYVGIDLHRRSSTIVRMSPDGEVLACRKIPSQPFELAEAMAEAGEAPEVVLESTYGWYWAADLLKELGATVHLAHPLGNNWGNRRVKNDERDAKDLAAMLRLGRLAEGWIAPPPVRELRELVRYRFRVVGHRTSAKAQIHGVMAKNGILPARREMWGPGGNAQLDAISGDLPLAYGMRLESLRALIDVFDHEIELLDAHIHLELKDDPGYRAILQINGIGKVLGAIFVAEIGDITRFERAEQLCSWAGLTPKHRESDDKVQRGPITKQGSHLVRWAAIEAISKYRGGEKLRADFDRISERRGKFKARVAVARKLLTLVFYGLRDGEVRCLEAIQAA

SEQ ID NO: 86397 - protein, 401 aa, unidentified
MQENQQHSSVDVFVGVDVGKGHHHAVALDRRGKRLYNKALPNDEAKLRALITELKTHGQLLFVVDQPATIGALPVAVARDEGVLVAYLPGLAMRRIADLHAGEAKTDARDAAIIAEAARSMPHTLRSLRLADEPLAELTMLCGFDDDLAAQITQTSNRIRGLLTQIHPALERVLGPRLDHPAVLDLLERYPSPAELASASEKTLANRLTKLAPRMGKSLAADIVQALSEQAVIVPGTQAATIVMPRLAQQLASLRKQRQEVASEVERLVHAHPLWPVLTSMPGVGVRTAARLLTEVAHKAFASAAHLAAYAGLAPVTRRSGSSVRGEHPSRRGNKVLKRALFLSAFAALRDPISRDYYARKVQQGKRHNQALIALARRRCDVLFAMLRDGTLYQPKSAPTA

SEQ ID NO: 86398 - protein, 306 aa, unidentified
MTLWIGIDVSKATLAVHVLPTRQLLSVPNTDEGHASLCAMLKEQAVGNVLLEATGGYERAVMRALAAAEVPVTRINPRRARAFATALGKTAKTDPIDAALLARMAELVCAPGAAPEPEREALRELVQRREQLVQQRDDERRRLPQACTALVRDDLAAHIGQLRLRIRHLDKAIVHAQQHLDDQLSRKLQAIAGIGQVTAASLMAYLPELGRLDRRQIAALAGLAPYNVDSGQHAGKRRIRGGRAAIRRVLYMACWSVIRKQADFKARYQRLRQQGKAAKVAITACMRVLLIRLNAMVREQTEWRTS

SEQ ID NO: 86399 - protein, 423 aa, unidentified
MDKNDDSRLAEFRQLKREIRGSTQHLVVGIDIAKERHYAFFGTPAGKTLLHRLVFDNSKEGFEKLCFQTDILKTQHCLTKVVFGMEPTGDYHKPLGEYLIQKDHLVVLVGGSAVKNNRELLDGRWDRNDTKDAANVADLLTQGKCLFYEFASPPLQELRSLLSLQRRLKKQEQGYRVRTRNHLIAQYFPELDPYFGYSEGPAIVKWCLDPREITELPFEEFVRMVSSRNGGEKQRRRLQEIRQKAASSIGCEAHPSVAFEGRVLVEEVRHLQDLLRETQASIRVVCHHFPEYFFLLTIPGFGPDISAKVLEAIGNPHRFENHRQVLKLAGLDLSAERTGKKQDVTPVLSKRGKADLRYGLYQAAFVASTRNRQFMTYFTNKLKGREREKGIGTKMRVKLAAKMLVIAWTLMKKKEKFDPGCIA

SEQ ID NO: 86400 - protein, 353 aa, unidentified
MNSLADLREVVDVVIGVDTHVHTHAAAVVDAGTGGVLEETTVEASAEGYAELVEFANSHATLRAWAIEGTGGHGAGLSRHLLESSEIVIEVDRPKRAARRNGAKSDPLDAIRAAREAMSRPRVGTPRTGGDRQALSVLLAARRSAVNASTEAQQQVFSLVIAAPEPIRVRFRGQKLAAMLTTAANLRVHASCDTETTSTVVALRTLARRAHAMLKEARELQKAILAIIRSWRPDLLEEFGVGPIVAATVLCAWSHPGRIHSEAAFAMLAGVAPIPANSGQVTTRYRLNRYGDRQLNNALHTVVQSRIQYQPATRDYVTRRTAEGKTSREIKRCLARYVARDLYRLLEHPATTT

SEQ ID NO: 86401 - protein, 371 aa, unidentified
MVWTAPYGISCARMRLLRSQTREPSVDQIIRIGMDTSKNLFQLHGVDASERPVLRRRLRRNDLLTFFAKQPLTVIGMEACGAAHYWARELVKLGHEVKLIAPQHVKAYVKRNKNDGRDAEALCEAMSRPTMQLVPVKTEEQQAALMLIGVRQQLMTRRTQLSNAIRGYAAEFGLVTAKGLVKVEPLLAQIARDESVPALAREMFALQGRDYARLQVELKAVEARLMAWHRASADSCRLAKIPSIGPIGATALVMKATDPGLFPSGRNFAAWIGLTPKDHSTAGKTRIGKITRAGDEMLRSVLVAGATSVIQQAKKGRGRPSPWLVALLARKPAKLAAVALANKTARIAWKLLTTGESYDGERMPLASKPAA

SEQ ID NO: 86402 - protein, 418 aa, unidentified
MVRKDDSRIIEVVHSVCCGLDVHKDKVSAYLIFYDANGNEQSDVKEFGTFTDDLIRMREWLLAHACPVLAMESTGVYWRPVYNILEDYLRVILVNPRDMKNVPGRKTDISDSKWLAGLLKHGLLRGSFIPPREVRQWRDLTRMRRRYVQTASDYRRRTQKLFESANIKIDSVVADLFGVSGRHLMNLLVSGQEISLSAVQSCIQGRLKRSDMEIFRAIQGFFNDHHRFQLRSLLRMVQHLEDEIACISNQIRSLMSGHEDVLERLKETHGISEIASRDILAELGPTLEAFPTDAALASWSGLCPGNNESAGKRRSGKSPVFKHHLKTIMVEVAWAAVRTKGSYYKDKYHRLKYRIGAKKALIAVAHRILKAIYRIIKEGAHFRDLGEEYLTLRNKSKKVQRLKKQAQMLGFELVPQTA

SEQ ID NO: 86403 - protein, 399 aa, unidentified
MNGDYGVYLGLDVGKEGHHAVGLAPGGKRLHDAALPNTEARLRHLFDKLARHGRVLVVVDQPASIGALPVAVARACGHEVAYLPGLAMRRIADLHPGAAKTDARDAYVIADAARTLPHTLRSVDVGDEALAELEVLVGFDDDLAGEATRVSNRIRGLLTQIHPALERVLGPKVHHKAVLELLSRCGGPAGMRKAGRRKLTSIATVHAPRIGDRLVEQIMTALDEQTVTVPGTTAAETILPRLADSLRDVLRQRDQVAGEVERMLDAHPLAPVLTSMPGIGVRTAARILLEVGDGTAFPTPGHLAAYAGLAPVTRRSGTSIRGEHPPRGGNKHLKRAFFLAAFAALADPVSRAYYDRKRAEGKRHNAALICLARRRCDVLHAMLRDKIPYQPRPTSPATA

SEQ ID NO: 86404 - protein, 437 aa, unidentified
MSWQKAFRAARAARAAAGSTAWKVVVVVDVMFDRVAGLDIGKASLTVCVRTPGVGRGRHTETRTFKTTLGSLRLMRDWLLEQGVSIAAMESTSTYWKPPFYCLEEVMQVWLLNAAHMKAVPGRKSDVRDAEWIAQLLEHGLLAPSFVPPPPIRRLRMLTRYRVQLLGDRTRESVRLELMLEDASIKLSSVASSLSTVSARAMLAAMIEGERDPLVLAEMAKGRMRVKIPELAQALEGHFDEHHAQLAGSILHRLDLVEAALAELEETLRVEFAPWAHQLELLQTIPGVGEHVAQVIVAETGADMSRFPSAAHLAAWAGLAPGMYESAGKRRQVGKRHGNRWLTAMLVESAGSVGRMHGTNYLSTQHARLSRRRGMGRAQVAVAHSILVSAYYMLQRDEPYHDLGPEWFGRRDDEAHTRRLVAQLERLGHTVVIDPAA

SEQ ID NO: 86405 - protein, 403 aa, unidentified
MDTTVSDFMKGRYNLMIYVGIDIAKLNHFAAAVSSDGEILIEPFKFTNDYDGFYLLLSKLAPLDQNSIIIGLESTAHYGDNLVRFLISKDFKVCVLNPIQTSFMRKNNVRKTKTDKVDTFVIAKTLMMQDSLRFLTLEDLDYLELKELGRFRQKLVKQRTRLKIQLTSYVDQVFPELQYFFKSGLHQHSVYALLKEAPTPNAIASMHMTHLAHILEVASHGHFGKDKARDLRVLAQKSVGVNDSSLSIQITHTIEQIELLDSQLFHTELEMANLVTCLHSVIMTIPGIGFVNGGLILGEIGDIHRFSEPKKLLAFAGLDPSVHQSGNFQAKKTRMSKRGSRVLRYALMNAAHNVVKNNTTFKDYYDSKKAEGRSHYNALGHCAGKLVRVIWKMLTDNVEFNLE

SEQ ID NO: 86406 - protein, 377 aa, unidentified
MRAASSDAQGDEVRVTVGVDTHTDRHVGVALDQFGRRLGTRSVPTTPAGFAALLAWAGDFGVIERIGIEGTGSYGAGLTRWLRARGVAVIEVERPHRHDRQARRRRGKSDPLDAEAAARAVQAGTVIGQPKAGDGQVEMIRTLRLARRSAMKARTQAANQLHALVVTAPDDLRARLRPLPMAELITLVAAFRPVRTGTALGTPLAAAKLALKGLAIRYRQLGAEIDALDVHLEQLVASAAPELLAVKGVGTDIAGALLVAAGDNPDRLHSEAAFASLCGVAPIPASSGKTNRHRLSRGGDRDANRALYLLALGRMGWDPATRTYVTRRTADGLSKAEIIRCLKRYLARELYRLLVKPPASLAPPADGNEARPSTIAS

SEQ ID NO: 86407 - protein, 442 aa, unidentified
MNPIPNDPNPASTLVAAPALPRPEPAFAAFIAIDWADEKHAVALQAAGHTQIERTTLEQKPEALTQWIAGLRQRFAGAKIALILEQKRGALLWALQPHEHLVLYPINPQMSAKFRQAFHPSGAKDDPLDADLQLDILLHHRARLTAWQPDEATTRQLSLLVEGRRRFVADQVRATNRLRDALKSYFPQALALVGEDLSSRMACAFLKKWPRLASVQAVKPAVLRQFYYAHHSRSAELLAERLQIQAQAQPLTTDAAILAAQSLLVQSLAQALATLHPVLARYDQQIAQLFATQADFAIWESFPGAGPALGPRLAVAWGTQRDRFADRQAMSAYSGIAPVKEASGKALWIHMRWACPKFLRQTFHEMAKCSLQRCAWALCYYRMQIERGKGHHAAIRALAFKWQRIMWRCWQDRTRYDDAKYVASLKRSASDLYARLSAAPAR

SEQ ID NO: 86408 - protein, 335 aa, unidentified
MEFEFFIGTDVSKNELDFAVRMGKQLLFHREIANEPAAINAFLKELSKLPGFDLNKTVFCMEHTGIYNNHLLVCLHKKKANICLEAATHIKKSLGNIRGKNDKVDSIRIAEYAYDKREKLRMWAPKREVVQQLSHLSATRSRLIKIKKILKTPLKEASPFVKKSITKQNIKVCIGTLNAIEADLKKVEKEIDKIISLDPELKRLFNLVISVCSIGAVIATQVLISTNEFKDLTDAKQFACMGGMAPFTEESGIFKGKGRVSHMANKKIKTLFHMAALVAIQYDPELKLFFERKVNQDKKNKMSVLNAVRNKLILRIFACVNQNRKYEKNYARLVA

SEQ ID NO: 86409 - protein, 431 aa, unidentified
MDGSIATPEVVAAYLGIDWADQKHAIALRSAAEPSKIEHQLIDQKPEALMEWIGQLEQRFGSQSKILVCLEQSRGALIYHLMGYQFFELYPVNPLQLARYRETFSPGGAKDDRPDSDLLCELVYCHGDRLRALKPDSVLGRKLSFFNEGRREAVDYATGLSNAIKNQLKVYFPLALDLLDQDTSTALAADLLLRWPTLEAIQKQSAPTLRKFFYGHNCRGEKRMLHRLELVQKAKPLTKDSAVIEPAALRVQMLARQLKNLLPDIARYDDKIAQLFEAHPERFLFENLPGAGKVLAPRLASAFGSNPERWQSALEIATLSGIAPVRRASGLKSGKKGQRKASIHFRQACPKFLRQSFHEFAGCSIRYCQWAKAHYEVQRARGNGHHAAVRSVAFKWIRILFACWKHRTSYDPQRYLQALQHRGSSLASTCQ

SEQ ID NO: 86410 - protein, 272 aa, unidentified
MQIHSVGIDLGKTTFHLVALSAAGKVLLRRKFTQKQLITFTANMQISVIGMEACSGAHFLARALREQGHDVKLIPAQFVKPFVKSNKNDYLDAEAIAEAVDRQNMRFVPIKTDDQLDLQALHRVRDRLIARRTSVINQLRAFLLERGMTFAKTPAKLKLAMPEILENADANLTPRMRNLVSLLWNEWKDLEQQIVSMNAEVEQIASSDPACQRLRKIPGIGPLVATAIVAAIGNGAAFHKGREFASWLGLVPRQQSTGGKARLFGISKRGNS

SEQ ID NO: 86411 - protein, 331 aa, unidentified
MKIREIIGIDMSKLDFHACIHTTQVFASFENSTKGFKALLKWVAKNSPHKPSQTLFVLEHTGRYSHNISYHFSANEIEFALVPGLEIKRSLGITRGKDDKIDAAKIALYGYRLRDEIKPTKLPGKQLDKLKRLLTLRDRMVRQRAGYKASLKEDEHVFCEEEAREIIEHQEDIIKALSSKISQIEKQMDDIIKANKKLNKLFKLLTSIKGVGKVTARYTIVYTAAFTKFATWRKFASYCGVAPFPHRSGTSVKGRNKVSNLANKKIKSLLTMCVCSAIQSNSEIKAYYERRLNEGKSTMSTQNNIRNKLLARMFAVVKRGTPYVNTMKYAA

SEQ ID NO: 86412 - protein, 328 aa, unidentified
MTNVTPQEFAAFIGLDWADAQHDVCLQVAGSDKREGKTLAHQPEVIEAWVTDLRQRFEGQPIAMALELNKGPIVEALRQYDGLVLFHINPLMLARYRQAFTPSRAKDDPTDAELQLELLLRHRDKLKPLMPQSPEMRALAQLVEHRRRLVGDRVRITNRLTSTLKTYFPHVLQWFPHKDTMLFCDFLSQWPTLKAAQLARRRTLERFFHQHHVRDEQRIHECLAAIKSAVPLTTDEGVMMPNALMAQALMTQLRVCLAAIERFDHAIAERAQRHPDYALFEALPGAGPVLAPRLLVAFGEQRERYGAAEEMQQYAGIAPVLERSGKQS

SEQ ID NO: 86413 - protein, 402 aa, unidentified
MNCVGIDVSKGKSMIAVMRPFGEVVVSPFEVRHTANELSELAGLLKSLDGETRVVMESTGNYHAPVAWLLHDAGLYVSVVNAMLVHDYGNNSLRRAKTDKKDAVKLANYGLDHWLTLPRYIPEEDTRLMLKICYRQYQQYSKVQTMLKNNLISLLDTTFPDANRLFTSPPRADGSEKWVDFVATFWHCECVCGRSEKAFTTQYQKWCRKHGYNFSEDKALDIYASACRHFGVIPKTDTAKLLVEQAISQLQTTSSALAALKQEMQSLAASLPEYPVVMGMFGVGPTLGPQLLAEIGDVRRFHSKKALVAFAGIDAPPYQSGQIDVRSRSISKRGSASLSRTLFLVMSVILQCAPIDEPVYQFMDKKRSEGKPYRVYMMASANKFLRIYYASVKAYLESLEHD

SEQ ID NO: 86414 - protein, 456 aa, unidentified
MNQYFLGIDASKGYSDFVMLDAKKQTIIENFQIDDTFDGHARLYEVLHSFNKDYPEATIYAAVESTGGYENNWFQSLLKFQGSLPIKTAHLNPLGVSHNSKADLKRNNTDKISARNVAEYMIAHPEKVSYQHQDSLASLRKQWGFITMLTKQSTQLLNQLESLVYNANPEILTYCKDGAPQWVLKLLTSYPTALRLSRAKVKVLARIPYISVDRAKQLIATAKKSVASANDKVTEQLIVATVKQIVHLKKTIKVQSEILANECQIPEVALLKTFNGIGDYSAIGLMLQIQSVSRFLTSKKISSFFGIHPEYKKSGDGIYKYRMSKKGRKEGRQILFIVAMSAIQTNPLIRDVYQQAVERGMEKMSAMGLCMHKILRIVYGMLKHNKAFDPQIDLKNRQKTSSRKNNVVQDEDRRYQDFDSNAPISRRQKMKRKERKQSQNVSNVEYGISEASVPVS

SEQ ID NO: 86415 - protein, 366 aa, unidentified
MEKISTVQVLGNEILKEQKLTIGVDLGDRWSFYCVLEEAGKIILEQKVPTTPEAMKQTFSRIPQSRIALETGTHSPWVSRLLTELGHEVIVAHAQKVQLITKSNRKDDRHDARTLARLARIDPELLGPIRHRSVQAQIHLTVIRARAELVSARTALVNAARGLVKSYGQRLPKCGTQQVGRELAAALSTELRDVLEPLLKEIESLNERIKEYDERMEKIAKEVYPEVSLLKQVKGVGTQIALTYVLTIEDPHRFLKSREVGCFLGLRPGRRNSGESEPQKRISKEGDRYLRTMMVQGAHYILGPFGADSDLRRWGLKLAERGGKNAKKRAVVAVARKLAVLLHRLWVSGEVYEPLRNSQKAMRAVA

SEQ ID NO: 86416 - protein, 418 aa, unidentified
MNEEGNTRGTRRYVALDIHKHYCVVAGVDREARVLLQAVRVEHADLEGWLKKNLQATDHVVIESTTNAWHVYDLLSPLVERGVVANPFKVKQIAQARVKTDIRDTLILARLLAANLVPDVWVPPQHVRQVRQLLSQRRQLVETHTQMVNRMHSVAHRHHLQHERGKRFNEKNTNWQKEKRLSAVEQFQLELEMENRAYLEKQIGRIGKVVAKMSHQKPWAQSMTYLMQLPGFGVITAMTVLAAIGEIQRFDSARHLASYSGLTPGLEQSGTKNRGKGVTKEGRKELRWALVEVAQRAVKSDLLWKHRFQEMQKRMHRNQAIVAVARRLLELVWYVLTRRQSYRHFSQERIAYKYLTWAWQMDDEARDGLTRQQFTRYYLMRLGIGHDLTRIALDPKHPRRIASEAELLALRPALNHIE

SEQ ID NO: 86417 - protein, 357 aa, unidentified
MGIYQKCGKEINKIFVGADIHQKTWYITIISQDRELFHANIPSNWKYLKKLLERYREHWIEPENIELVYEAGYFGFNLYDEICEWGSKCIVTPPSLIPQEQGNRVKTDRLDSRKLALLLSKGMLKRIYVPNKQQRCHRNVLRRRRQLVRDRVRIQNRLKSELRFFGLDLPDIKGKWSKLYIENLRRINFGDSWQQESFSRLLDEYDFLDKQTKLQTVLLKKLSETKQYRENVKVLRSITGIGLITAMELLLEIGDFSRFRKGNRLAAYVGLTPSQYSSSDKIRMGRITRTGKDSLRGALIEASWLLIAKESKMRDKYNDIKMRAGGKRAIVAIARKLLLRCRHMILAEQQNITNKVA

SEQ ID NO: 86418 - protein, 414 aa, unidentified
MELLHERCAALDIGKKDLKACVRTPSPTRKRSRRQEIRTFATTTNALLELRDWLLGERVSLVVMEATGDYWRGAFYLLEDDLNVILVNAAHAKGLPGRKTDVSDAAWLCQLGECGLLRASFVPPEPIRQLRDLTRYRTTLTTERTREAQRLEKELEDAGIKLSSVATDILGVSGRAMLTALIDGERDPRVLAELARARMRPKIPHLVQALTGNFGDHHAFLCRLHLQRIDSRSAAIGELSARIEEQMRPFARQLQQLATIPGVGQSIAEVIVAETGADMSRFPSAGHLASWAGVCPGHYESAGRRRSGKTRHGNRWLVGALGTAAMAAARTKDTTYLGARYQRLAHRLGKKKAIVAVEHSILTAVWHMLTNDADYTDLGGDYFARLDPQRAMRRIVRQANILGFTVRFDPIQAA

SEQ ID NO: 86419 - protein, 341 aa, unidentified
MSDVALIGIDLGKHSFHLHGQDKIGREVFRRKSSRQQMMRFFGNLPACTVVMEACAGSHFIARELMALGHQAKLISPQFVRPFVKSNKNDFVDAEAIYEAASRSSMRFVTPRTEAQQTLSVLHRMRESLVRDRTKTANQMHGFLLEFGVSLPKGLAVMRRLPGVLTERPLPVRLSLLLQRLHAHFDYLDKQIRELDKEVAGQLASDDLGSRLLTIPCIGPITASLLAAEIGDGRQYGCSRDFAASVGLVPRQYSTGGKARLLGISKRGDKRLRQLLVQCARVYLQRLEHQRGALADWVRALRSRRHSNVVACALANKLARIAWSIAANHTQFEAGPDASAA

SEQ ID NO: 86420 - protein, 358 aa, unidentified
MNLTHAISSSKYEVFVGIDVDAKSYAVTYQDRQKKGRSFKMPASSQELFQYFQKRFPNKQLVYAYEAGGTGYSLHDYLAKQNQDCMMVHPPSIQKAPKDRVKTNRIDSQKLSDQLRSGELKGIRVPSETYRHLRHLVDLRQQYVRVATQTKQRIKALLLFENVQLPQDVESKSWSLKFLLSLRELSSKLKPVPQLKLTAYLDDLDHHRKRVLWSFKELRQFCKTNEEIQKNINYLRSIPGLGFVVSSYVLARIGDPQHLGRVDELASFAGVVPTESSTGDSINRGHITHMGDGLLRSLLVEASWIAISKDKELEQFYHRIRSKHPPQHGARIAIVAVARKLTQRIHCVLKEQRNYIVH

SEQ ID NO: 86421 - protein, 418 aa, unidentified
MKVVYPICCGVDVHKTFLVATLITTQGIVPHYSKKRFSTFNNSILQFKQWLIDNNCFDICMESTGKYWVPVYNLLEDTIHITVANPKWVKAVKGNKDDKKDSKWIGDLFRLGLVPGSYIPDKPIRILREHTRYRYKLVCCKSSEKNRFQNAFTVCNVALDAVVSDMFGKSASSITDYLVSSDSFDPVHCSSLLHKSLKKKADTVIESIEGYQMTQEQKERIVMVRSHLEFVQQSIAKLDEKLDKMVAPYESAISLLCTIPGVDRESAITIISEIGTDMSQFANSKRLCCWAGLTPGNNESAGKKKSVRITRAGVYLKPALVQVAHAAVKSDKAPYYKIKYERLYKRRGKKRAIIAIARMILTAIYNMFVTGEEWNPSDLYKIDMPQEMLEKQKEKAIKQAVKLLVSNGVIKATDISVA

SEQ ID NO: 86422 - protein, 361 aa, unidentified
MKKPAQHPIAEVPRRQAKVEMTIGIDLGDVWSHYCTLNQDGEVVDRGRFRTTPKAIEKWFTDVPAARIAMEAGTHSIWISEQLQELGQEVIVANVRELRAISHSDRKSDQVDAEKLARYARLDPNILRPIAHRTVAQQEALTLIRARALLVRLRTAAVDAVRGLTKSCGHRMPASATTCFAQRSLAVMPPGLAQALGPVLQQIAEITVKIKQYDRQIQQLGQTEYPETQALLKVHGVGHLTALTFVLTLGSKERFGRSRDVGCYLGLRPRRSQSGDHDPQLGITHAGNAYLRSLLIECSNHIPRPHGRDSALRQWGLHLAARGGKQAKSKAVVAVARKLAVLLHHLWTMQELYMPFYEQAV

SEQ ID NO: 86423 - protein, 326 aa, unidentified
MEHELHYIGIDTAKEKLDVDVLRPDGRHRTKKFANTTKGHDELVSWLKGHKIDHAHICIEATGTYMEPVAECLYDASYIVSVINPALGKAFAQSEGLRNKTDTVDARMLAEFCRQKRPAAWEAPHPLERALRALVVRHQALTDMHTQELNRTETAREVQRPSIDAHLLWLEAELKRLEKQIKDLTDDDPDMKHRRKLLESIPGIGEKTSAVLLAYIGLKDRFARARQFAAFAGLTPRRYESGSSVRGASRLSKAGHVSLRRALYMPAMVATSKTEWGRAFRDRLAANGKKGKVILGAMMRKLAQVAYGVLKSGVPFDASRHNPVAA

SEQ ID NO: 86424 - protein, 334 aa, unidentified
MQFDYFIGIDVSKVTLDFAVAKANQILFHQQVSNDPKGITQFLKELRQHTKATISQCLFCMEYTGIYNNPLLKALHQLSANIWVERAVHIQESIGLTRGKTDQVDAKRIALFAYKNRDEVRLWTPPRAVIVQLDRLTAQRARLVKVIKILQTPLTDSEGFIDKADRKANQQACSASLKSLKTDLKSVDKSITELAKQDPELNRLFERVTSVVGVSQTTAAEIIVTTNEFKAISDPKKFACYAGVVPFERSSGQRKGRPQVSHRANKKVKSLLHMGAMSAVQHCAQLRAYYERKVKEGKNKMLVLNNVRNKIVLRIFACVREDRNYDEKYTPTLG

SEQ ID NO: 86425 - protein, 359 aa, unidentified
MIHVGVDVHKGYCQACLKDEHGTILEEIRFQNNLEGADKLAVILGKHREARVALESTGNLWVKLYDRLDQEENIDVILTNPKKTRVIAEAKIKTDKIDARLLADLVRADLVARSYVPPIDIRMQRALLRERISLVESRTMIKNQIHALLDKYELTSSYTDLFGKKGMEWLRSLNLPGIDETILEVNLQRLEELEVHIEAYTCRIAREAVVKPEARLLMGFTGIDYYRAMLLASEIGDITRFPSAKKLVSYAGLAPGTRQSGDKTIHGHIVKEGNRRIRWILVEAAQHASRHDPRLRQFYLRILKRRGYQKAIVAVARKMLVSIYYVLSKQEAYRGENINLLERKLKRLEWKVSQSPHAR

SEQ ID NO: 86426 - protein, 422 aa, unidentified
MLHDSEDTEEIIERIAGLDIGKTELVACIRVPHPDKPGRRAQEITTYSTMTRSLLGLAQRLRELGVSRVVMEATSDYWKPVFYLLEAQGLDPWLVNAKDVKHLPGRPKTDRLDAVWLAKVAERQMIRPSFVPPPEIRLLRDLTRYRVDLVNVRTAEKNRVEKLLEDAQIKLSVVASDIFGVSGRDMLAALIAGERNPKALAQLARSRMRVKIPLLEEAFVGRFTDHHAFLLRTMLARIDEASADIAAVEARIEELIAPFAPAVDRLDEITGIGSAAAHVVIAEIGLDMNRFPTPAHLCSWARFAPGVKESAGKNKGRGSTGHGNPYLARVLGEAAVSASRTNTFLGERYRRIARRRGKKKAIVAVGRSILVIIWHLLSDPDARFHDLGADFYDNRTSPERKTRAHVRQLEALGFKVTLEPAA

SEQ ID NO: 86427 - protein, 322 aa, unidentified
MNGSIALGIDVAKAKLDCALRLPDGKFKNKVVENNPKGFKTLTEWLEKHGATTARVCMEATGVYWEAVADYLASEGMTVSVVNPAQIKAFGGSQLVRSKTDKVDARLIAGFCAERNLEPWQAPTPSEQALRAMALRLDSLQVMRAQESNRLEVARDAVKPGIVSHIEWLDKEIKALAKKIGEHMDGDADLKDKQTLLDSIPGLGERTIAILLAFFADLDRFGNARQAAAFAGLDPHHHESGTSVKMKPRMSKVGHAFLRKSLYMPAMVALYKTAWGIRFRERLAAAGKPPKLIIGAMMRKLVHVAFGVLKSGKTFDPALHGC

SEQ ID NO: 86428 - protein, 374 aa, unidentified
MSADTFVGLDVHAESITAAILRPGSEQPEVIKLSSDLMKVRRLFRRLSGHGPVRSCYEASGAGFVLQRVLAGDGFSCEVIAPSLIPRKPGDHRKTDRLDAVMLARLYRSGHLTAVHVPTEDNEALRRLLRLRTTYHQYITATMHRISGILRNHGFVFNEGKSTWTKKHRMWLARLRLTLQGPLSTALAMELQHLEYLETELHSMDTELERYAQSPLYRSKVEALCCLRGVKILTALTILCEVDDVYRFSSPRKLMAYFGLVPSEHSSGERQHRGSITKAGNIHVRRLLVEAAWNNRHNAGAALILNRRRQGQPPEILAIALKAQHRLTRKYLRLDQANHRHVAITAVARELCGFVWALLRTQHCYRQSTGGAAS

SEQ ID NO: 86429 - protein, 334 aa, unidentified
MKKPYFMGFDIAKASVDFCLLSRCGALLWRGRFDNEPQAIKEFLALVRRRGWKLSQIHFALESSGVYGKRLIAALHEAGLAVSVLNPAQVKFFAISVLRRTKNDRVDAEIIARFCLERKPLSTRPLRPVEEQLKLLVHERDSRVAEQTRERNRAKKDPFQIELPPLISRQRQHRMKQLQKEIAQMDEAINALIASDEYLSTQSKLLSSIPGIAQNTAAKILSEIAGKEFDSARQLVAYAGLTPSEFRSGARCYGKTHLSKIGNAFLRKALYLPAAVARRWCKPIKPWVSLLEERKLSDLAIRGAIMRKLLHIAFGVLKHQKPFDPSLVFMPKTV

SEQ ID NO: 86430 - protein, 346 aa, unidentified
MLHAGLDLSRKRLDFHLLDEQGETVEVGAAPPDADGLHHLAVHLRRHGQPLRAAIESMTGARFVHDQLELHGFEVEIADAVRVKGLAPLACKTDRIDAWVLAELSRRELVPAIWLPDPQVRAERERARFRLHLVRHRTSLKQRVHATLLTHGTPCPVSDLFGVRGRELLARLCLPEPWAGTVTASLRLIDELEREIAACEAELRALGADHRYVGLLTTIPGIAWVLAYTIAAEIGDIARFRSPAKLVGYTGLCPRVYQSGESDRRGPLSKKGPRYLRWALIEATTHASRHPAYRDRYERTKRRLGKQRGPRVAQVDLARRLAEAIWHMLTHNRPFAPAGATAPMTA

SEQ ID NO: 86431 - protein, 363 aa, unidentified
MRFYREQRRFYCGIDLHASKMYVCVLDDQGNVVLHRNMRAEPEPLKRALAPYRASLVVGAECMFSWYWLADWCRAEGIEFVLGHALYMKAIHGGKAKNDRIDSEKIARLLRGGTFPLAHVYPKEMRGTRDLLRRRTLLVRRRAELLAHVQNTHTQYNVPTTSGKGRDRVREGIAMSAFEDPSVQVMLDADIEVIKQFDETIARLETHVLKHAKVHDPARLHMLQTINGVGKVLSLVMLYEIRDVNRFENIGQFVSYARLVSCAKESAGKKQGSGGRKIGNAHLKWAFSEAAALMIRSSPEAKAFMEKMTRQRGKARAVALVAAKIGRAVYWMMKRKQPFDARKLWKSSLPKGVRTTEGAAMTG

SEQ ID NO: 86432 - protein, 364 aa, unidentified
MHYVTNTELSSHEGTRCQFNGGTGAIKLGVDVHQDFYVVVEQVGGGNPKPPQRFRKEAFLHWATRLKQKSGAQVHAVYEACGFGFALQRKLSAPGIHCYVVCPQKLDEQNRRVKTDGLDAKALCLKLDRFVQGNRDALAIVRVPTEEEEQARAIHRQREQLVKARKQLEAQGRSLMVNHGLEPVQNWWKPHTFAALPMPQWMKELLANSQPILVALQQKIAALTVQLQSAAAPDQPRGLGKMTSVVIDREIGDWKRFNNRRQIASYTGLCPGEYSSGNTRLQSCVTKHGNPRLRAALVELAWRLVRFQPDYKPIVKWRATLTKGALATGAARKKAIVAVARQLAVDLWRIKTGRLSAEELGLIN

SEQ ID NO: 86433 - protein, 332 aa, unidentified
MLLIGVDYHPSFQTIAFLMEETGECGDQELNHSDGQAEKFYRDLKERGISVRVGMEATGYSRWFERLLAELGFEVWMGDPAEIKAKRVKKQKFDREDARLLRRLMLENNFPQIWVPGPENRDLRQLLWHRHRLVQMRTRIMNQLQALAMNEGYRWKKKLFSEQGRAQLEKLALAPWASRRRQELLELLDRMNPTIEELTAAVEREARKRPEAMRLMPHPGVGPLTALAYVLIIGTPTRFQRGKQIGTYVGMIPCEDSSAGKQRLGHISKQGSSLLRFLLVEAAQAAARIHPDWRRRYMHLAMRRHKSIAKVAVGRVPGSLFAKKLMDQGNRD

SEQ ID NO: 86434 - protein, 323 aa, unidentified
MNIMNENKSTVYVGLDISKASLQLHLQNVQHVLDNDPKGYVALLKSIRAIPAVQIVCEATGGYEKGIVAALHAAAQPVSVLNPARVRHFALAQGQRAKNDPIDAAVITAYGVALRPEPTPPGEPVREELRALVQWRDQITDQLMRARQTVEHGVPAYVERQQKKLVAHLVKQMDAVAKECQRVLARAPHIQEQVRQLQELDSVGTITALSVLSHMPELGTLNRQEAAALAGLAPWVRQSGPWEGQRHIGGGRAPLRRALYMSAVGLARMKASTLGKFYAHLRAQGKPAKVALTAVMRKLLLQMNRVLKEHALQAQAKPQMQPA

SEQ ID NO: 86435 - protein, 344 aa, unidentified
MEQYAGIDVSLELSSVCVVDAQGKIVKEAKVASEPETLIGFFETLGIAVDRIGLEAGPLSQWLHAGLKRAGFEAVLLETRHVKAALSAMTVKTDRKDARGIAQLIRMGWFRPVHAKSIGAQEIRALLVARKQLLGRLIDVELSIRGILRGFGLKVGPVTRKNFEVRIRELVAGQAMLERIVAAMLSARAALKAEYAKLHKAVLTIVRDDTVCRRLMTVPSVGPLVAITYKSAIDDPHRIAKSKAAGALFGLTPKKYQSGETNVTGGITLAGDEMVRTALYEAANVLLSRITRFSKLKRWGMDVAKRRGSKRAKVALARKLAVILHRMWVDGTTYRWAEAEPIAA

SEQ ID NO: 86436 - protein, 394 aa, unidentified
MILVGIDIGKNQHTFSIIDKNTGEILSNPSFFPNNREGFLFLIKKLNTYSKSDLLIGMEDTGHYHFALLKHLLDSRYTVALINPTTTDLTRKLQGGITKNDPLDSLTICDVIGSNQHNKPYRITKVNRFDLYEQKQLTRHHHNLKEELNTYKNRLQKCIDIVFPEFNSLFRSKYGIVYMKVLKTFSSAEKIANSDIRTIRKCFEYNKRGKRISLSAEQLKAAAKTSIGMPSVAEEIQIRHLVCQIEMIEEQLSEIDKKIEEFSLQNNSPILSIPGISHFSGTSILAELGDICNYTKAAQIIKFAGVAPYHYESSQFNAQHTAITKKGSRYLRKTLYQIIFPVIYHNKVFNVYYNKKLAEGKGHRCAQGHCVRKLLRIIYHLLSTGQIFDPALLR

SEQ ID NO: 86437 - protein, 388 aa, unidentified
MAIYIGLDVHSQQTTYHVVNERKEKVVKGQVSTQAEALVQFSQDMLALDPEVHVAIESGGQSRWVTRILLNNGLDAHVFHATEVAAKRPKKEYKNDENDAKDLAHGMLHGLYEMEVYIPTDGAQQMRQDTVQRLHFVEMRSLSQILAKALLRGRSLPAPKCLDSHKAWQSLIREHAGTELEFFLDLHYQSYVHAEKMVDLIEARMHQSAVQNAAVAEDIDLLTTIPGVGFLTAYALVGVIGELSRFPSAAQLSSYLGLVPRSYDSGSRRQAGHITRSGPWYMRKLLCQCAQQARKGTNPLAAYYYAVLGRSGSAKKAIVAVMHRIARIAFQVLKTRRPFDTGRLRIHAELDPKTGKPFWRMERESAPRRRSVEPVSPESRPATAREGK

SEQ ID NO: 86438 - protein, 338 aa, unidentified
MGVTTIGLDLAKNVFQVHGINGDGKVLVRRQLRRGEVLKFFQGLPACLVGMEACGTAHHWAREIAALGHTVKLMPPAYVKPYVKRGKTDAADAEAICEAVTRPTMRFVAVKSIDQQAALMLHKTRDLLVRQRTMLINALRGHLAEFGIIAAKGPSGTKAAIETLHEAQDRLPELARRALHGLVDQLRLLGEEIDRLEARILEWHRASDVSRRLATIPGIGPITASAIAAAVPDGTLFRSGRQFAAWLGLTPKAHSSGGKERQTGISKQGDGYLRRLLVVGATAVMRLARQDNAARCWAAKLLERKPAKLAAVALANKTARIAWAVLTRGGTYAAPTAA

SEQ ID NO: 86439 - protein, 426 aa, unidentified
MEQVTRFAALIGIDWSDAKHDICLVETATGTQELSVVKHTPETLNEWARALRARFGGERIAVCLEQSRGSLIYALLKYDFLVLYPINPQMLSRFREAFTPSRAKDDPGDAEFLVELLIHHRERLKAWTPDDERTRTLQFLVEHRRRLVGDQTRISNRLTALLKGYFPQVLQWLPDIRTVMVCDFLLRWSSLDALKGVRRTTLEKFFREHNSQRTETVEKRLMAIKAAVPLTVDKAVINSSVVMVGALAAQMKTTLAAVREFDREIEALCQTHEDFELFASLPGAGRVYASRLLTAMGSNRERWKTADELLCFSGVAPVIERSGKSLWTRWRYFCPKFIRQSFVEYAGESIRHSEWAQAFYLSQKAKGKSHQAAVRALAYKWIRIIWKCWQTREKYDEARYVECLRKKGSKLVGEPASAEDRESELA

SEQ ID NO: 86440 - protein, 369 aa, unidentified
MPHVTSIGLDVHARSVAAAAFNPFTGEVVHRDFGTDAAEIAEWALGFEEPRACYESGPTGFHMARELRALGLDCAVAAVSKMQRPAADARRKNDRRDAEFIARMLATHNIVEVPLPDAAVEAARDLDRALDDATAEYRRARQRLNMFLIRLGYVWDERNADGTRKGSWTRAHWRWISGIRLEGPQRDVLEYYVTAARCAESDRRQLEKKVLALARTDRWRPAVEALSCIKGIDTLTAFRLAAEAGSFTRFRTAPAFASWCGLVPSERSSGETERRGGITKTGNRLARTALVESAWHYLTCTPRPKAPAPGADVPAAIRARADDCTARLCRRREALAAAGKSPCKANAAVARELACWVWEIGRRAEGTLG

SEQ ID NO: 86441 - protein, 339 aa, unidentified
MAATYCGLDVSDKTTHLCVVDVDGKVIWRGVCATDPEALATVLRKRCPDVERVVLETGALSAFLYHGLIERNVPAICVCARHAKGVLSTRVNKSDLHDAEGLAQLARTGWYKAVHIKDTATHMDRAQLAVRDQLIKAHGAMLGQLRGLLKLFGQRLGKVTTPGKRAERLEVLFAQKPQLRAILSPLIEALTALETQIRLSTRGLKARAAADPVCRLLMTTPSIGPVTAFQFKSGIEDPTRFERGDAVGAYVGLAPTRSQSGERDVKGRISKAGDRRLRSALYEAANVLLTRVKRPCALQTWGKALAATKGAKRARVAVARKLAILLHKLWRTNSNFQWA

SEQ ID NO: 86442 - protein, 344 aa, unidentified
MKRYLGIDLHTNSFTCCYLHTDGHETIRTWPLQGGGLEQFIQGVHAGDEVALEATGNAAYFCKTVEPFVARVVVIAPWQFEVIRRSVKKTDKHDARAIALFLSKDMLPEARIKSEAHVQLASLITTRDQLVKLRVSLLGKVHGMFVRHGLKIKREVLTSQAGFTREVAGHAWNPLEGVELAVIDDQMQSLHRNIKRLEKEIAAFAKTLPGYDNLISIKGIGPLSVAVMLTHIGAIEDFKNTGKLAAYFGIVPRVSQSNETSNSGHITKRGNKLARTTLVQCTLIAIRYSPYLRGFYESLKTRRGTGKAIIATARKLLNTIFHTLKNNWVFEDFPNFKLLACNQS

SEQ ID NO: 86443 - protein, 355 aa, unidentified
MTVTIVEEARPVTCRAAVTGGVDTHADTHVAAALDPVGGLLGVAEFPATTAGYARLLGWLGGFGTVCLAGIEGTGSYGAGLARYVTAAGIRVVEVDRSDRQDRRRQGKSDPLDAVSAARAAQSGRASGAPKGRDGAVEAIRTLMVARRSAAGERTRTINQARALVLTGPDDLRARFAKHKPAALITGLAALRPRPGDVAGHATRIALRELGRRAQFLDGQLVRLDELIVPLVTARAPGLLAVYGAGPRTAALLLIAAGDHPERLRSEAAWAHLCGVAPIPASSGKVTRHRLNPGGDRQANHALWRIVFTRLGSDAATRAYAERRTAEGKSKAEIIRCLKRYVAREVYRQLRPAVG

SEQ ID NO: 86444 - protein, 439 aa, unidentified
MILIREVADAPVIMGISKPADLKSPCGEVKIVNPLFVGIDVSSRSNVAYLMKPDGSKHSSFSVQNNLGGAKLLSERIVSALNSMRLSDVVIGLEATSIYGNNLVYALREDGSLGQFQRKIHVLNPKQVKKFKEAYPDLPKNDFVDAFVIADHLRFGRIAKEVYMDDYRYQALRTLTRARFDVIQNLTREKQRFANYLFLKCSGIAQEKGIQNTSATTIALMEHFETVDDLANADLDELTDFIAQAGRGRFADPDVVAKVIQTAAKGSYRLPKTVNDTVNQAMSVSIASMRALKEQAKVLDKAIEQQFEIIPNTLTSIPGIGKVYSAGIIAEIGDIHRFASQASVAKFAGLVWTQHQSGEFEAEHSRMIKSGNRYLRYYLLEAANSVRRCDSEFRRYYDLKFNEVNKYQHKRALALTARKLVRLVFRLLKDNRLYIPPEN

SEQ ID NO: 86445 - protein, 341 aa, unidentified
MKNLFIGVDFSKEKVDVAIIFADGLTETAPRVFNEFKTTVSGYKQLVKWVEQNSYGIDSSLWLFCGENTGDYSKGLCNFIYGKGYDMWLENAKSIKDASGLRRLKSDRADASMIAEYAMRNYDKAVMYEPLSESLAQLRELFLYRQMVVRHRCSFQVRRGEKKLTMEKSPIKMMISQSGRHIVSELNKEIEKIDKRIAELIKSDEELTEVFTIVTSVPGIGTQNAVCLMVYTDNFRRFNYDSRKISCYYGIAPFGKDSGTSVHSDPHVHYMANRQIKAMLTQAALAAVNFNPVMARYYMRLVERGKKKQVALNNVKNKLVHLVTAMVRNRQIFTPEYKISA

SEQ ID NO: 86446 - protein, 318 aa, unidentified
MAQLVRHVGIDTSKAHLDVMLVPDKTKHRVSNDAAGWAALAAWLPADGSVVAIGIEASGGYEREVVEHLRAQGYRVVVLDAQRVRLYARALGKRAKSDAIDAEVIARFVATVASDSLTRSAERRRLGELVDYRQGLIEERTRLTNAGAQVSEPTLKKMTQRRLAQIERDVERLEERMAALIDETPELAATAALLDTVKGVGPILIATLLAFLPELGQLTRRQIAALVGVAPYDRDSGTMRGQRHIAGGRERPRRVLYMATMSAATLHNSVLKGFYRRLLAKGKLPKVALVACMRKLLTILNTMVAKGEAWRDTTTAAA

SEQ ID NO: 86447 - protein, 347 aa, unidentified
MRFYTKQHRYYCGIDLHARSMYVCVLDSQGEILMHRNMTCSPELFLKAIAPYREDVAIAVECIFTWYWLADLCAQENIPFVLGHALYMKAIHGGKAKNDKIDAHKIAVLLRGGMLPMAYVYPAGMRSTRDLLRRRMHLMRKRSELLAHIQNTNSQYCLPQFGKKIAYKRNRQDLPEHFTDSSVRRSIEMDLSLIDHYDKVLSEVELYITENAKVHDVNAFQRLRSVHGIGRILALVMLYEIHDIKRFPTVQDFVSYARLIKCSRESAGKRHGSSGAKIGNVHLKWAFSEASVLFLRANPAGEKFVDKLSSKHGKAKALSILAHKLGRAVYYMLQRDKAFDMNKFFNS

SEQ ID NO: 86448 - protein, 407 aa, unidentified
MIHVGIDWAEDHHDALVMNDHGEVLARTRIADGLDGVGRLHALIADHAEAAEQVAVGIETDRGLLVTALVAAGYQVFAVNPKAVDRYRDRHAVSGAKSDRGDAKVLADMVRTDRHNHRQVAGDSDLADAVKVTARAHQNLIWTRQRQINQLRSSLREYYPGALAAFGTDLAHPDAIAVLTKAPTPDLGRRLSTAQIRSSLRRGGRQRHLDTRAAAIRDTLHAPQLAAPPLVADAYGDTTTALVGVIAALSAQINRLETALADRFEQHPDADIYRSLPGLGDVLGARVLGEFGDDPDRYADAKARRNYTGSSPLTRQSGNRRTVLARFIRNRRLGDAVTWWAFCSLTSSPAARAFYDRHRANGDTHSKALRALSNRWVGILHGCLRHHTPYDEHTAWKHQTNNHALAA

SEQ ID NO: 86449 - protein, 429 aa, unidentified
MNLRPIAGIDVGKFFSEMAVLSPSNEVVARMRIHHDSNADVKRAIRLLRKMEKDFASRPFVVMESTGHYHKILFHSLCRAGFEVSVTNPIQTDSIKNIGIRKVKNDKVDARKIALLHRFQELKSTNIPNEDIECLRSLCRQYYKLNDELTVYKNRLTGIIDQVMLNFKDVFPNAFSKAAIAVLEKYPTSEHILKASKGDLVSLIRENSRKSLEWSTAKYELLVSKAREFAPLSINNPSNVAMMGVYISMIKTLDENLTKILKAIRQLITEDMAKDTPMLSLTLELLQSIPGIGLLTAATILAEVGDFSAFSKPGKLVAYFGVDPSVMQSGEFIGTRNKMSKRGSKLLRRVLFTVALANIRTKRDKKPCNPVMMEFYKRKCQSKPKKVALGAVMRKLVCIIFAVLRDRKPFELRSPQKHAQMLAAKRKAA

SEQ ID NO: 86450 - protein, 392 aa, unidentified
MATTNATLINRHNAYLGIDVGKETHWAYVIDSQGTVLLSRKITNSEIELDDLMGHCPKDTLVIVDQRRNIGALVLRRARAAGKPVAYLPGSVEHDMAKAFPGIAKTDERDAQVIARTALGMPHTLRPVPKDDPELDGARIMSAQLTQVQKDRTACINALHSRLLESCPTFELACPIAAPWCAGMLAELGGPWNMLDAGRAKFCACSRKHGASPKNRDKLWNTISGERPSDQAVVAEKHYVMHFAGRIVSDNQAEVELRLEIDRALARNKDYLNLQTIPGIGPRTAAQLVVTVCIEDFKSHDKLASYCGLAPATQQSGKSIHFDKVSRSGNKPLKNLLIFSCNSLNRSNSYYGEYLRKCLAKGMGYKAALKATARKRVKVIHAVMRDGAPYSA

SEQ ID NO: 86451 - protein, 408 aa, unidentified
MEVVYRCCCGIDVHKKIIVACLDQGGEQSLREFGTTTSEIKSLATWLTESGCEIIAMESTGVFWKPLYNLFELMDLDAIVVNAAHMKALPGRKTDVKDAEWIADLLRHGLLKASYIPSREQRELREITRYRKSLTEERCRETNRLQKILEGANIKLDSVVKDINGKSARKLLEKIIEDDVPTSEEEISKMIHGRMRSKLGQLVTAIEGITTPLQRKLLAQVIDHIDDLNRRIADLDKLVQDYMDEYEAAITALCDIPGIARRSAEVILAEIGLDMSRFPSAAHLCSWAGVCPGNCQSAGRRKHGKTTKGNKPLKTILTQCAKSARSVKGSYFSAQYQRIAARRGKNRATLAVAHSMLIAIYHMLRNNVPFRDLGSDYYDSFNRDRKIHGYLKRLKALGWEPDALPGSA

SEQ ID NO: 86452 - protein, 373 aa, unidentified
MRKVEFGFAKGKIIFVGVDVHKKDWVVTVICEGEEVYHAVIGSSPEGLIKILKRFEAKEVHTVYEAGPTGYWLHDALVEAGFDSMVTPPSLVPRIGGKVKTDRRDSRKLASMLAGGFLRRVHVLTPEERAHRQLLRTRNQIEQHRRKTQNQIKSMLLFHGKRLPEGQKEHWSEAHLSWIKSIEWEYPVMKTAMESILKMYRELTEEYKHLTSEIEELAQTERYRERAGLLTQIPGIGTFTAMAILVEIQNIDRFRQADQLASYLGLTPSQHSTGEHTRMGHITRCGNREVRTRLVESSWTLIRYDAQAKMTYERIKHQTGSGRKAITAIARRLALRVRRVLLDKKPYHLVQGGHLADGKDKRREVRRYLLKRV

SEQ ID NO: 86453 - protein, 402 aa, unidentified
MWYVGLDWADTHHDVAVLNEAGKQAGVRRFSHSHDGLNDLKQLLLSFSSQPEELMCVLETTHGLLITFLLEAGLPVYPVNPKTIKGLRNVAGAKTDRIDACLLAKIGYLKQGELRRLAPDSPGVQELKTLTRDQDALVQMQTRLVNQLTACLKEYYPAALHLFDKLHQRCTLVFLQAYPTPESAQAASLEEIMATLRTGKHTNPRQAAARIVEELHQSHLIANAVTVRAKSRLMLSLTRQLLVVIEEIASYEKEIQALFLTQKDHEIWSSLPRAGKRLAPRLLAEWGDDRTRYTDASSIQMLAGTAPVPYQSGNYARAHKRFACVKPWRNDLYQFAWQSTLSEPWAASYYQRKLAEGKTHSMALRALANIWVRIMYRMWISETRYQTETFEAAQRTHARRVA

SEQ ID NO: 86454 - protein, 340 aa, unidentified
MDKPDLCGMDVSAKQLVVMVRRDGKTEAARSFANTKSGHQELKRYLTRQRTGVRVCLESTGLYGLDIALLLQADTRIEVMVANPRAVKDFARALMHRSKTDPLDALVLLEYAARMPFQTWQPPCTAALQVTALGRRIHALTQQCTMEKNRLHAVATTQTTLPLIVRDLRRSIASLETAIAKLSREAHKIIAANDLLRRRFLLLQSAPGIGPVSALQLLGELSLVPAHCDVRQWVAYAGLDPRQHDSGSSVHKKVGISKVGNSHIRRALYMPALTASHHNPHLQSFYLHLQTLGKCKMVALVAVMRKLLHAIFGMFKYDALFNGAKLYPAFSPKQVSASAC

SEQ ID NO: 86455 - protein, 413 aa, unidentified
MERLIERCCGLDVHKATVSACVRVTQRPRGKVEQEVRTFPTTTAELLALRDWLIEQRVTHVAMEATGVYWKPVYYVLEHDFELLLVNPAHFKQVPGRKTDVADCAWLAQLLQYGLLRASFVPPAPIRELRDLTRYRKSLTEERSRAANRLHKVLQDAGIKLSSVATDTLGVSGRSMLMALAAGTTDPALLADLAHGKLRKKLPELRQALAGRFGPHHRFMLSRLLADIDYVEEASRELSRRIEELLVPFAATVERLITIPGVQRRTAEVVVAEIGADMSRFPSAAHLSSWAGMCPGNHESAGKRRSGKTRRGNRWLRTALVEAGAAAGRTKHTALGARYRRLRAHLGHGRAVLAVGRHVLEIAYHLMAQPTTYRELGTDYFDRYRAERLKRRSLEQLRRLGYQVALTQIPTAA

SEQ ID NO: 86456 - protein, 391 aa, unidentified
MTKPKTKTVNDFSRCLDPLDMDATLIAVIEMSQSSWLVAGIVPGVERQPLKKLAIDEHALLNLLNRWRAEAEKQGHRITRIAVAFEAGHDGFWLARWLAARGVEAHVIHASSVAVTREHRRAKTDRLDTELLKRGFLGWLRGERGHCKMVAVPTLAEEDAKRPSRERETLVGEASRIITRVKAAFVRLGIRGFNPKLKAAATRLETLRTPEDEPIPPNTLAALKRDLERHQIVKKQIREIEQTRLDVLKKAPEKGPHAMVLLLARVIGVGVETADMLVQEVLSRSMRDRRAVGRYAGLTGSPDESGAKRREKGLARSGNARVRHGMIQLAWRFLLFQKDSALAQWYRQRTADAPSTRKTLIVALARKLLIALWRLARDGVVPEGVRMRPAA

SEQ ID NO: 86457 - protein, 359 aa, unidentified
MQTKSNNLFEDQSFFIGIDAHKKSWKVSIFGEQYEHKTFSQNPDPDLLASYMKKNFPGGNYKSVYEAGFSGFESCRKLNQHGLDCIVIHPADVPTSMKERLQKTDKVDSRKLARSLRAREIEAIDIPTKKLEADRALVRQRFRLVKDISRTKNRVKSLLFQFGIDIPEQFTSAQTRHWSKVYLNWLKELTIEEPSLKHVFDNYVHIGEILRKELLSLNRQVREMSREETYKNNYNLLISVPGISLMTGMTILTQLGDIRRFKRLDDLCNYVGLVPRMYGSGDKMRTGKMVKRGRKELKIMLIEASWQAIRKDPALMAKFNDLSKKMNKNKAIIRIARKLLNRIRYVLVNQHEYVLSVIE

SEQ ID NO: 86458 - protein, 324 aa, unidentified
MIDGVLGIDVSKNTLDASMSSCNKVRARSFANSPDGWRHLLDWLITQRVRRVHACLESTGRYSLGIAGALNEAGHVVSIVNPAQIRDFARTKLGRNKTDGVDASHIREYCELFKPKPWAPPSEAHRRLGELQTIRAGIIAGLTEWKNRKNSGMIDAVAQSLADVTISHFTSQLSAVDEAITRTIDNDSVLRRKRDLLLSISGVGETLAGVVLAELPGPDVLHSSAEVVAYVGLNPRQHQSGISIDRVTRISKIGNAVLRAALYMPAMSAMRYNPAIVALVARLKSQGRLKPKQIVVAAMRKLLVLCFGVLKTGKPFDPAIAMGC

SEQ ID NO: 86459 - protein, 340 aa, unidentified
MEYGAIDRHLRYSLIRLVDGTGEVVQQRRVPTTREALVSVFGGRAPMRVLVESGTESEWVAQTVEGCGHTVVVADPNYGLMYGHRPRGVKTDARDVAALSEACRLGVYRRAHRVSAAQRQRRRERRVREQLVRIRTQLINLRRAQLRQEGYRLPAGSAEAAVPRVARVVLPAPLQAALRPLVATREALAPLLATATTALETAARADTVVQRLMTAPGVGPITALTYRAVLDDVGRFADARGVSAFLGLVPREASSGTRHRKGAITKAGPGTLRVLLIQAGWVIWRGRGGSAALHAWVHRLAERRGKRIAIVALARRLGRILYAMWRDATNYRVAAVRPAD

SEQ ID NO: 86460 - protein, 475 aa, unidentified
MQQPIEVQVDEHEPIVERVVGIDVAKASGMVCLRVPHETIPGRRVTKVWSVKATTRALVELGDHLRCQGVQRVVLESTSDYWRPFYYLLEAAGLTVWLVNAAQAKNVPGRPKTDKIDAVWLAKLAERSMVSPSLVPTEPMRQVRDLARARFDLVADRARVKQRIEKLLEDALIKISSVLTDIHGVSGRAMIEALIAGQRSPKALAELAKGRARARSAALQEALDGRFTDHHARLARLLLDQLDELTARIDQVTALLEAAITALTPPQADTDTPTGDSGGDSGGDSGGDSGDSGDSGHSGDGAPAQPAPGRYARAVERLCAIPGGGPDSVRAVIGEIGLDMSVFGTHQRLCSWAKVAPRTVQSGRKTGRARTGRGNPYLKSALAQMAMGAAKTDTFLGERYRRLIKRMPKAKALVALQRSILVIIFHLLADPTAEFTDLGSDFYQRRIDRARRTTHLLRQLHALGYQVQLTETEAA

SEQ ID NO: 86461 - protein, 454 aa, unidentified
MNYVGVDLHKNIIQICVVQLEGAKRKVICQRRFDCRAVTAILEFFKGLGPFQMVVEATASYEWFVKLVEPLADQVLLAHPKKLRIIAESTHKTDKIDARILAELLAVDMIPRAYRPTPRQREYRVLVRYRYSAQRRIVSLRNRIRRILANYNADCKELFSAAGLSYLAKVEVSAADHFVLTELVQQWEASRRWLYEADRRLVEFGQDERMPCAEREAREILSSFPCVGPVTVDVVLSELADATRFRSQKKSVSYAGLAPGIRQSAGKTKELHITKEGSRLLRWALIQTAWRLVNKTAYWWKIFDGLRSRTGKKKAIVAVARRILCVMTAMLQSGQRYRFGGPQVACTQESAPGLAPEGPKVEEETYMAGAPPTEPTESERVAPGRSTKKRAASAASPRTEGKRRRADPGSAPRPPSGSAPALGSHPCVALSSGQAITNRAHNTGRVKPPGATPV

SEQ ID NO: 86462 - protein, 343 aa, unidentified
MQAVKTIGLDIAKSGFQVHGVDADGQVVFRRQLKRRNVLAFFQKVPSCLVGMEACATSHHWSRELQALGHTVRLMPPAYVKPYVKRQKNDATDAEAICEAVSRANMRFVATKTPEQQSGLMLHRTRHLFIRQQTAVINAIRAHLAEFGIVAPVGRNGLEQLLNVVADAGDKRLPEVARTCLMALGTQLRALKAKLLELDRMITAWHRSNETSKRLDAIPGVGHVLATALVASIADPKVFRSGRDFSAWIGLVPKQHSSGGKDRLGSISKQGDRYLRSLFTAGALAVIRYAKIYGTKHRPWLTALLARRPTKVAAIALANKLARMAWAMMTRGARYKEPVALAA

SEQ ID NO: 86463 - protein, 426 aa, unidentified
MNYKQNAKIEQVKESTLVVGVDIGSETHYARAFDYRGKEVSKRVFKFSSDLHGFTCFYEWLVENGKRAEKTEVLIGCEPTGHYWYTFEKYIREHGMKLVLVNPFSVKRLKELDDNSPKKTDHKDPKTIAKLIVDGRYCYPYIPEGIYADLREVVSSRDRIQKELNAASNRIQRWLKIYFPEYLKVYRKFDAQSGLQVLEKAPLPDDIIRLGAEGINKIWRTNKMRAVGMKRAMTLIEAAHNSVGIHGGAGARCELRLLLNDYETKKTQMETVTQSMVEVVMQVPHVEKLLAIKGVGIVTVAGFLAEIGDIRRFDSPKQIQKYAGLELVESSSGKHKGQTRISKRGRRKLRRVLFQVVLPLIGQNPEFREVYDYYSTRIRNPLKGHQAMIAVSCKVIRVFFAILRNGCDYSAERFRKDIRRPESKAA

SEQ ID NO: 86464 - protein, 353 aa, unidentified
MNITTIGLDLAKSVFQVHGVDETGRAVLKKQLNRHQMAEFFALLPPCLIGMEACGGAHHWARKLKAYGHEVRLIAPQYVKPYVKSQKNDAADAQAICEAVGRPSMRFVAAKTVDQQSVLALHTARSGFVKARTALSNQIRGLLAEFGVVVPKGLSSLAQRVPEALEDGLNELTGGVRLLIERLLEQVKQLDELVKRLELQIRQWAVQDESAKRLQQVPGIGPITATALVAALGDVSQFKDGRQVAAWLGLVPRQHSSGGKTVLLGITKRGDSYLRTLLVHGARSAILAAQRRQEGPPSWMSRLLERKHPNVACVALANRNARIVWALLTHKRDYEPQYGVKGADENLSLAQAL

SEQ ID NO: 86465 - protein, 344 aa, unidentified
MDITTIGLDLAKSIFQVHGVDANGRVVIRKSLRRAQMLPFFARLPSCLVGMEACGTSHYWARELIKLGHEVRLMPPAYVKPYVKRSKTDAADAEAVCEAVTRPTMRFVPVKSPEQQAALSMHRARDLLVKQRTQLVNMIRGLLAEFGINIPKGLERALLMARRIVDDEAPDVPIEAAKIVGTLSQQALDIHVRLRQIDRDLLVWQRGNDVARRLMTIPGIGPVGATALAASVTDPHQFRSGRQFAAWLGLTPLQKSSGGKERLGHISKMGDKYLRKLLIVGMTSLVRRAKYNPGKIDPRLADLLARKPTRVATVAMANKTARVIWAIMARGETYRTGHQPALAA

SEQ ID NO: 86466 - protein, 337 aa, unidentified
MINFFIGIDFAKTKFDVVILSRDDLVSKGEHKQFCNTKDGVKQLEKWLHLVCGRDVIVESVICGENTGVYSVLAAKILTREGYTVCLESALRIKRSMGISRGKNDKKDARDIAEYAARHYDKLVVYREPSQTSEALKTLFTQRRLLIKQRSDLQRRNKELTGLYKENPLLKKMLASDTRIINAIDAEIEKIEAHMKSIIDDNPEVRKVYDILTSMKGIALVNAVALIVYTDNFKRFDYDARRICSYWGIAPFANQSGSSINGKPHVSHFADHYLKSLLTQAAICAIRYCPEISNYAQRLIARKKHISIVHNNCKNKMIHILVAMVKNGTYYGEIQKN

SEQ ID NO: 86467 - protein, 395 aa, unidentified
MKDDSTVYVGLDVHKESITVAYAIDAVEVESLGKIGTTQTEIDRLCKRLQSKASHVRVVYEAGPCGYGLHRQLTQRGFESMVCAPSLIPRKPGERVKTDRRDAAKLVRSLRAGDLTAVYVPGVEDEAFRDLARAWAAVKEDLRQARQRLKSFLLAHGVGYTGRANWGESHRRWLSDYSFANAWQQLAFEEHRRTIEDRLVQCGRLEAALRDAVVNWRFYPVVLALQAMRGVQFVTAVGMVSELGDLSHFTHPRQLMAWLGVTPSEHSSGGKRRQGSITKTGNSYARKLLVEAAWSYRHVARIAPEIQRRHEGLPKAIIDRAWDAQLRLCRRYRKLVARGKNANIAVVAVARELAGFSGTSPDSRWRLHCRVACSPHETGDTLIWISDELIVQGVS

SEQ ID NO: 86468 - protein, 308 aa, unidentified
MIAQNYVGCDISKRWLDFFDETSGRLRRIDNQADAIAAYVAGLDPSRDFVVMEATGVHDRLLRHALAKAGVPFSRHNPAHTHHYSKSTRRRAKTDPLDARMLSGYGRRYNPEAEPAPSEEVEQLQSLAGHRDQLVGMRATLKKQLSEAFEEIVITSLEDLIADLDTRIKAFESQIAAVIRQNQDTARDHALMVSVPGVSKGGALSLLALLPELGQRSPKAIAALVGLAPFDNKSGKLNRRSQIQGGRSRVRRALYMAALTAIRTCERFKTFYTALAARSGSKKLAIIAVARKLLVVLNAIIRDKTAFA

SEQ ID NO: 86469 - protein, 342 aa, unidentified
MYDTMIGVDLAKRVFHLHVASMTGHVRDRKKLTPLQFRRYMTDAPNCVVVFEACGSAHYWARQMMELGHEARIIPAQYVKPFVKRHKNDRNDAEAIVVAAQRPEMHFTTVKSEQQQARAVVFRARERLVNQRTELVNALRSTLYEYGHTFPVGFGHVKRIAELLEAPECDLPALVVTECQDLLAQIAEKTDRITAKDKLIKQLAKESAVARRLQTMPGVGPMTALAVEAFAPDMEQFSCGRDFAAWLGLVPLQKSTGGKSRLGKLSKMGQVDIRRLLIIGAMSRIIGRARHTIPDDSWLGRKVAMKPKMLVGISLANKMARQIWAMLTKNEDYRDPALVGAA

SEQ ID NO: 86470 - protein, 479 aa, unidentified
MNAKTTRNKNQVTNSFSVINTLSAEERQSRIDELLKTMQAKTWHDLETTGKFDKNAKLSFISEDMLIVGCDIGSETHYLRAIDIRGRELSKKPFSFTNNEEGFEAAKAWMVELAAVNGKKQIVLGLEPTGHYWFCIATWLISNGISVVQVNPYAVKQTKEVEDNSQLKDDRKDPKVIANLVMNGNYGMPYLPEGIYADLRSLSLLRSQLTENRIRCANRMHRLMKIHFPEYKDAFGRVDGSFALEVLKIAPFPKDIVALGEDGIREIWHNAKLRGRGYSRAAELFRYASTSVGRNEGAEYDREAVRWFVEEMLSLDEKLTTIEAAINAKCMEIPHAENILEISGLGQNIVAGIISSMGDIDRFDDVKEIQKLSGLNLVACSSGKHNGETKISHRGRKELRTWLFQGAKSVVAHAKEFQLIHEYYTTRPKNPLKKMQSLIVIACKLLRIIYAILKKGVTYDPQKMLDDIKRFENAEIVAA

SEQ ID NO: 86471 - protein, 385 aa, unidentified
MKKSTLFVGLDVHVDTIYVAVAETGRDGEVRSLGVMANRPPSIRKMIKKLSKNNKLQVCYEAGPCGYTLYWILVEMGVSCEVIAPSLIPQKSGDRVKTDRRDAIKLARLYRAGELVSVWVPDPAHEALRDLVRAREAAKKDQRAARHRLGKFLLRNGVYKPTKMTNWTQKHIAWIKTLRFEEKSHEVVFMDYLHEVEHQRDRIKALESAIDTAIARSPEHIREIVSALQLLRGVAKITAVGIVAEVGNFSRFPKPAQLMAYAGAVPSEYSSGGPGKRKQGGITKTGNSHIRRLAIESAWSYRYNPSVNLRMQKCQDEISDEQIAEIKEIAWKAQLRLCGRYRALMNAGKSKQVAITAVGRELLGFIWSIAVYVEAKQVEKVQKAA

SEQ ID NO: 86472 - protein, 340 aa, unidentified
MTVIIGVDPHKGIHMAVAVDGDEQPLARLEVVAGRGQAQRLLAWAAPFEDRRWAIESADGLGKLVAQQLLAAGEDVVDVPPTLSARVRLLGSAKAAKNDSNDALSTAIAGLRHCGLRSVRVEDHVAVIQMLVDRYDDLTGLRTQAACRLHVALRELVAGGAPNRLSADRAGRMLRSVRPVGAAEIERKRLAGELLADVRRLDRDIATARARVTDAVAKSGTSLLELHGVGPVVAGFVLGQVGDAARFPTPERFASYNGTAPIEAPSGPVKRHRLNPHGNRKLNHAIHMASVTQIRHDTPGRAYYERKLTEGKSKREALRALKRRISDAIWRQLQVDLGRR

SEQ ID NO: 86473 - protein, 358 aa, unidentified
MNYIGCDCHISSLDFAVVNERGQETKKQRVNTGVKEFMEFVRNIPKPRTVIIEEGTLAGWLLEICTAYGEKLIITDPKRNRWIGRAGQKNDKIDANKLAHLARGGYIKEIHHPIGHRRRFRELVLSYHDTVKSQTRIKNKLKAKFRQNGIRCSGETVYSAKYRKEWRKKLPKDKIVQVIVEGLWQQLDQIHEIQEELLSHIRRQGRNYSEIKRFKKIPGIGPVHAATISAIMENPHRFAHKKKLWMYAGFGLAEKGSGGKVYSRNLTHDYNRFLKNGLKQATEAAIIAKDNQFRRQYLRLTIEKGTPSHRAKLTVARSILATLYGIWKSGEDYDPNIDRRRTESNKTQVRAYHLVRSG

SEQ ID NO: 86474 - protein, 410 aa, unidentified
MEVLYPYCAGLDVHKASVVACVRRTIGGKANSEVRTFSTMTGSLLELSAWLGAEQVTHIVMEATGVYWKPVWHILSDGDFQLVLANAAHVKNVPGRKTDVKDAAWLADLLAHGLIRASFVPDESTQQMRDLLRTRKQLVRERSSHTQRIQKALEDANIKLDLVVTDILGLSGRRILNRLIEGETLPQALASLAHRRIQASTDELEAALRGRVTSHHRFLLKLHLDQIDAIDAAIQSIDKEVEGNLEPFRAAQQLLSAIPGISQLSARVVLSEIGLDMSRFQTAGHLVSWAGLCPRNDESAGKRRSTRMRKGAPWLKTILIQCAWAAVRTKGSYFQAQFHRLRSRRGARKAICAVAAALLTTIYHMLNNGTCYQDLGANHFDNKAKAKHIQRLVNRLENLGYDVKILPKAA

SEQ ID NO: 86475 - protein, 385 aa, unidentified
MQKRHDDSKACLTAFVQDNTVIVIIEMSLRSWLVAGMIPGIDREPLKKITADPEVLLRLLYRWRDEAIKAGKEITRIAVAYETGRDGFWLARWLRDRGIDAHVIHATSVAISREHRRAKTDRIDTAMLRRGFLGWLRGERGHCSMAVVPTIAEEDAKRPHRERESLVKERTRTINQMKAILTQFGVRNFKTASRKAAEKIDDVRTPEGVPLPPNAGAALRRQIEHFRLINGQIKTIEKTRLQRLRQQPTDKFNAMVFLLVRIIGLGIETAEQLVHEILSRKLRDRKAVARYSGLTGSPDESGARRREKGLSRSGNGRVRKILIQLSWRMLQFQPDSSLVRWFKDRTANSQRSRKPMIVAFARKLIIALWRYVNTGVTPEGFKLAK

SEQ ID NO: 86476 - protein, 372 aa, unidentified
MNYNTVYVGMDVHKESFSLCAYTIEAEKASHYQRTEADYKKVLNYLEFLRTIYGDDANFICGYEAGCFGYTLYHQLTANNVKCIILAPTTMLEQRSKKRIKTDRRDAEIIAKCLAQHNYSPVHIPTAKDEETKEFLRMRDDHKLALKKVKQQILAFCLRHNYRYDGKSHWTAAHLKWLKALTPEALYKEILDEYLLTYQTLSDKIERLDKRIEELATQDEYKEAVKKLCCFIGVKTHTALSVLVEVGDFKRFASAQHFASYLGLVPGEDSSGDDQNRLGITKAGNRHVRLLLTEASQCYARGQVGFKSKELKSRQSGNTPAVIAYADKANERLRRRYYKMVLNKCKKHNVAKTAIARELACFMWGMMTDNIA

SEQ ID NO: 86477 - protein, 319 aa, unidentified
MSKPSIACAGIDTGKRKLDVALDGRRERLQVDNTPDGHRKVSEWLRQYRTMRVGIEASGGYEQAVVAQLRRDGFVVIVFQPAQVRAYARFHLQLAKNDKIDAALIAACTAAARKIHAPPDPRLAPFAEHQTLIEQITDDIARIKTRRESCRDPRIRGLWKQEIARLNGLIKAELKQLVAAIRQHPDLAERVDLIASVDGVGLRTAVAILVRMPEIGHLSREQAAALVGLAPYDRDSGDAVGARHIEGGRQRLRTSLYNAGFAAAFHWNDELKATYQRLTAAGKPHKVALVACARKLLIYVNTVVQRGTPWVSTKAIIAT

SEQ ID NO: 86478 - protein, 345 aa, unidentified
MDHFAGLDVSVKETSVCIVDDTGRIVREVKVASEPEALLAVLKNLAYHFKRIGLEAGPLSQWLFSALAEAELPVICVETRHMQAVLKAQINKTDRNDARGIAQMIRVGLYRPVHVKTLRSQKLRMLLTHRKLLQSKAIAIENDLRGTLRNFGLKVGMVGKVRFEARIQELVENQPDLAVLVEPLLIVRRALREQVVILHRRLLAIVREDEVCRRLMTTPGVGPVVALTYRATVDVPARFRKSRSVGAVFGLTCSRYQSGEVDWSGKISRCGDEMMRTMLYEAAQSMMHSKKWSWLKAWAMQIARRRGMKKAIVALARRLAVIMHRIWVDGTEFRWTREKAAAAAA

SEQ ID NO: 86479 - protein, 421 aa, unidentified
MNRKKSGPAGLQALYARACGLDVHKKLVVACVRILDARDGTVQSTLRKFGTMSADLLELRQWLAELKVTHVAMESTGVYWQPVFNLLEGHFQVWVVNAQHIKKVPGRKTDMKDAEWIAQLLQCGLLRPSFVPERAQRELRELTRHLTKLVQQRNSVDNRIQKVLETANIKLGSVASDVLGVSGRKMIEGLLAGEKDVKVLADLAHHKLREKIPELQRCLQGEITEHHRFLLRQLLGQYDFLQKEISNVSERLGAVAPPSFRAAVEQLDAIAGVGERGARALLAETGTDMSRFPTHKHFASWAGRCPGNHESAGKRQSGKTPAANRHLDAVLTEIAHAAVRKKNSYFKAQYHRLAGRRGKKRAIGAVKHSLLVTVYFMLRDNKPYKDLGADYFDKLNPQQRIRYHVRRLQELGQLVELLPAA

SEQ ID NO: 86480 - protein, 334 aa, unidentified
MDSVKYIGMDVHKEAISVAVLNFSGKLVMECTIETKANTILDFLKGLRGSLHVTLEEGTWAAWLYDLIQPHVTELVVCNPRRNALLKEGSKSDRIDARKLAELLRSNMVRSVYHGEHGVRTLRELARSYLTISTDLIRVMTRVKAIYRSWGIPCRGKQVYAERYRAEWLGKIQEAGVRRRAEFYYQQFDALRALRQEVRRQLLGEAQKHDAWKLLRAIPFIGPIRAALLIALIQTPHRFRTKRQLWTYSGFGIETHSSAEQRFVQGELQRAKKPASVRGLNRNHNHDLKNLFKSAARVWATSPPWNHGWHLATVLLCWSQNGLASSCRGDENRW

SEQ ID NO: 86481 - protein, 279 aa, unidentified
MNIHSQGGATQPGELPNVGIDVSKQHLDVCWDVQSARISNDRQGWEELTAKLKGQVGLVVVEATGGYERGIVVALQTAGVTVARVNPRQSHDFAKALGVLAKTDRLDARTLRDFADVLARHPERERYITAVIDERRELLVGLTNRRRQLLDMRVAETNRLEHAGTSVAVKSIKSVLRLLDRQIKQIDDDIDRTLEQHFKPQKKLLDSVKGVGAVTTLTLLAALPELGKLGRKPIAKLAGLAPLANDSGGRRGQRRIWGGRAQVRSALYMATLSAMRARM

SEQ ID NO: 86482 - protein, 444 aa, unidentified
MSDALPSETTEREWAAFAAIDWADQKHFWRLVPADSPHAEQGELENTPEAVEVWAAALERRFGGRPIAICLELSRGPLVYMLAKYAHLILFPVHPTTAARYRETFCPSGAKDDPSDTASLLDLLLRHRERLSPLQPDTTETRLLQFLVERRRQVVDEKTRQSNRLTDCLKSYFPQILRWFDDVAGPLVGAFLKRWPSVQDLHRALPGTLREFFHEHNCRGEERIDERIAAIYQAIPATRDEAVLEAGAITARGLVAVLATLRDNIAELDRRIAQLVACHPEAALFDSLPGAGAALVPRLIVAFGTRRERYDNACQVQCYSGIAPVKVASGKTQTIRFRRACPKFLRQTFHEFALHSLQKSEWARAYYQLQRDRHKSHHAAVRSLAYKWIRIVFRCWKDRKPYDEEIYLKSQRRRSATLGATVALATAAGWKKVAGFNKFSAIPS

SEQ ID NO: 86483 - protein, 344 aa, unidentified
MTTRHARIWVGIDVGKGHHWAVAIDGDGETVFSTKVINDEPQILALIETARERADDVRWAVDISGRASTLLLALLFAHSQQVVYVPGRTVNRMSGAYKGEGKTDAKDARVIADQARMRRDFAPLDTPPELVTTLRVLTHHRADLIADRVRLINRLRDLLVGICPALERAFDYSSAKGPVVMLTEYQTPAALRRIGVKRLTTWLERRKVRGAGDVAGKAVEAAQSQQIALPGEKSAAKLVCDLAHQLLTLDERIKDNDREIREVFRADDRAEIIESMPGMGPILGAEFVAIVGDLSGYLDAGRLASHAGLAPVPRDSGRRTGNHHRPKRYNRRCAGCSTCPPRPR

SEQ ID NO: 86484 - protein, 434 aa, unidentified
MRKIRTNAAGIDIGAKKVFVSIDGQPVKSFDTFTEDLELLGAYLVSHHIKTVAMEATGVYWVILYDILASHQLDVWLVDGRSTRQVPGRKTDVKDCQWIQQLHSYGLLNKCFIPDNLVQELRAYQRLREDHIRSSSMHINHMQKAMILMNIRLKEVISQIHGASGMRIIRAILAGERDAEKLALLCDSRILKTKKQWVIKSLKGHYSEAALFQLKQAVSCYDFYGEQIAGCDVKLEEVLQKMNTDKPQQPKSKNTRKAIRHNKPNIAHMGEHMLGIFEGKDATVLPGITDYNWMQLLSEVGTDLGKWKSEKHFTSWLGLAPKQHNSGKKNRNYKAKGTPKAGLIFKQAAVGLLNSKHIALGAFGRKIRAKRGGLVAIKAVARKLAELYWKLFVKGLEYVEGGIQKYQEKMMLNKQRAVTRMAKEMGLRVIPLRC

SEQ ID NO: 86485 - protein, 346 aa, unidentified
MKILALDLGKYKTVGCEYEAESGVHQFQRSLTTPAGLARLVQEVKPDRVVIEVCSIAGWVCDLLWGLGITVQVANTSDDAWRWRKVKQKDDRRDALKAARLSAVNQIREVYIPAIEVRQWRALITYRQQLVRRRTKIKNHIRDLLLREGQLLGRGSSGWSQQAIKQLTEQARPFSACGPAELWRGELQLELEQLKELQRQLAVVTAQLDQLGAGDARVQLLRTIPGVGPRLAEAIVALLDQPQRFRKASQVSGYIGMVPKAMDSGETERRGHITRQGSRLVRSLLVEVAWAGLRHNAWVRQTYQRLSGGKKARKKIAIVAVGRKLLVKCWAMLRDNRAWDWQPQIT

SEQ ID NO: 86486 - protein, 389 aa, unidentified
MLLLGIDIAKLNHVASLIDSDSGELIFSNFKFQNNMPGFFSLYEKIITSSIKDVIIGLESTGHYGENFINFFFQKGFKIAVINPLQTSHLRKANIRDTKNDHLDSVTIAKALLFDNHKFVSQKNISNFALKKLTRFRKNLVKQRTRAKIQLLSLLDIIFPELQYIFKSGIHTKTIYSLLKKYPSTEKIAALREKSLFSILNKASNGRYNLEHALQLKSHAISSVGVKDTSISMHIPQLIELIEMLDKQINLIEEEIKSSLNNEVSILTIPGISDVAAATIVGEINDIDNFDSPTKLLAYAGLDPKVRQSGNFNASSGRMSKKGSPYLRYALVFTAWNLVRNSKRFKDYYLSKRAQGKSHYTALGHVSHKLVRTIYTLLKKNISYQELIV

SEQ ID NO: 86487 - protein, 433 aa, unidentified
MEVGWWAGWFTGDMITANVHHEVGAALAVSGNEYQGTPGVIKLGVDVHQGSYVVVAQEDHATPRPAQRFAPAAFVPWVGRLVARGHRVFAVYEACGFGFGLQRALRALGAECHVVAPCRLDERRERVKTDGRDAAALCQRLSRFVDGNRRELAVIRVPTEDEERLRAEHRQRETLVRARTRLAAQGRALVVNHSGGPHRTAPVPARWWRAAGWKALAGALPAWLRERLEVLRPVLAVLDTQIAVLTGTLEAAAPPGLPSGQGKMTGTVLTREVCDWHRFNNRRQVSSYTGLCPGEYSSGGKRVTGSVTKHGNPRLRAALVEMAWRMVRFQPCYPPVARRLPILGKGAKATGAQRKKAIVAVARQLAVDLWRLNTGRCNAAQLGLRVNGGGQLAQAEEAVVDSGGTVPRIAAWPPRGFTPPPAPAPTHKRTSSN

SEQ ID NO: 86488 - protein, 416 aa, unidentified
MKTLHKRCAGIDVHKTEVVACLRVITHRKVEREVRRFPTTTHGLLELAEWLESARCTHVAMEATGVYWKPIWHILDGRFALILANAAHVKTVPGRKSDVNDATWLADLLAHGLIRPSFVPPAAIQELRDLTRSRKQLTREVAQHSQRIQAVLEEANVKLCSVITDILGASGRRMLKAMIAGEADAHKLAAMGSERLGCAPETLVEALTGRMREHHRFLLAQHLQTTEQLEKTIAAFDARIEEKLVPFRDTVERLKEVPGLGSTVTEFVIAEIGLDMSLFPSAGHLLSWAGFVPRLDESAGKSRSTRIRKGAPWLKPVLVQAAWGAARKKNSYFQAQFLRLKARHGAKKAAIAVAALILTTVYHMLRDGTCYQDLGPEYFTVATRRKPRPDWPIASAISATTLKLGLLHEAPDRVSS

SEQ ID NO: 86489 - protein, 387 aa, unidentified
MPQPNDLSRSLVALDQDSTIIAVVEMSQSSWLVAGMLPGIERQPRKKLEPSAERLLGLLHRWRDEAVKAGRKITRIALAFEAGRDGFWLARWLRAHGVEAHVIHPSSVAVSREHRRAKTDRLDTELLKRGFLGWLRGERGHCTMARIPTIAEEDAKRPNRERECLVRERTRIVNRMKGTLARLGIRNFKPTLRKAAERLATLHTPEGSALPPNVSAELQRNMARLGFVVSQIKEIEAARQKRLEQEPETEPHAMVRHLARVVGLGVETADILVNEVLSRPMRDRKAVARYAGLTGSPDESGAKRREQGLAKAGNARVRRGMIQLAWRFLRFQKESALALWYRARTADSRVGTRKTMIVALARKLLIALWRFVTTGETLEGVVLRPAG

SEQ ID NO: 86490 - protein, 330 aa, unidentified
MNYSHFVGLDVGKKSFDASLVSLDQELSHHTFPNTPEGIEELLHWIKQHGVEVETALFCAENMGSYVIDLCLSSYQYHFPLALECPLTIKKSIGLQRGKNDRIDARRIAQYASLHYRKLRLYELPDKDLVRLRNWLVIRDNLVKQKVSSLKLLELTRETSRLADLMVPMTFLENQICQIKEKISYVEEEMEKIITENITLSTNYQLLTSIKGIGPVNAIVLLCVTDNFQRFSAPRKFACYSGVAPFEYSSGTSIRGKTKTSHLANREVKVYLTRAAITAIAWDPQIKAYYKRKIAEGKHKASVINAVRAKIIARCFAVIKRKTPFVTLSA

SEQ ID NO: 86491 - protein, 309 aa, unidentified
MVTETQTLVYGGIDAHADTHHVAVVDHLGTALDDLQVPATSAGYRAALGFLNRWPQLGAVGIECTGSYGAGVTRAAREAGLDVVEVNRPNRFDRRLQGKIDTFDAYAAAEAVLSGRANAAPKGGDGLVESLRVLRTSRSSALSARTATTNQIKAMLISGSEQLRSRYRGLSNTKLMTALAASRPTRGPVSAEEASAYSLRLLARRWKHLTEQIEDLGRHMQRLLDDHTPELMQVFGVGRDTAAQLLITAGDNPARLRSEATFAALTGACPIPATSGKTNRHRLNRAGDRQANSALYHVVIVRIRYDQST

SEQ ID NO: 86492 - protein, 312 aa, unidentified
MNKTICGVDVSKEWLDSHVEPSGAAGRFRNDAAGIADLAAWCRSYDVELVVMEASGGYERLAFLLLWELGVCCGLANARSVRYFAEAMGFLEKTDRIDAAMIARYGMVKQLKAMPPPSAAQQRLKALVARLSQVGSDLTIQKQRKSAVADAETTASLDEVIALLMRQSRRLEGEIASLIDDDPLWACLDQAFRSLKGVASRTVARLMAQLPEIGIVSNRAIAKLAGLAPIANDSGKRSGRRPVRGGRAGPRGVLFLVASIVAKYDPHLAAFKQRLHTAGKEKMVIRIALARKLLVILNAKARDARNEFANAT

SEQ ID NO: 86493 - protein, 363 aa, unidentified
MMTSPVAGIDPHQETYTIGVVDPNGVELAHEAFPASAAGYLDGIELLTAHGVEQVGIEGSAGWGAHAAIALVAAGFDCREVPAQRSAAQRRSRRLDKTDAVDAVAAARALLAEPTLGPVQALEVYDPLVAKIEAVLEHRRMLVSVRTLVLHHVQDQLSKLPVEIRDQLTMNGKIEGRLRQLESIDASVVSTIAGEYRLSWLIPLVDHDRAARRQVRQLERDIDRLLDEHGTTLRDEPGIGPIAAATLLVEVGDPFRFDRESKFARWSGTGAVALSSGEGDGRPVKHRLDFRGNRRINSVLYIASITQHRDNTDAIAYLERKLGEGKTRREARRAHKRHLANRVIRRMWKDESRRRERPVTTAA

SEQ ID NO: 86494 - protein, 349 aa, unidentified
MAYFAGLDVSVKETAVCVVDDVGKVVCEQKVPTEPDDIVTLLFSIGEHYGRIGIEAGPLSQWLVNELTTAGLPMVCVETRHMKALLTAQQINKSDRNDARGIAQMMRVGLFKPVHVKTQLAQEQRMLLTSRKLLQRKLLDVECDLRGTLRNFGLKVGVVSTGKFEARIRELVTGSPRLALIVEPLLTVRQVLRQQFIVLDKMLLDTVRHDPVCRRLMTAPGVGVVVALTYRATIDQPQRFVHSRAVGAHVGLTPRRHQSGEIDYDGSVSKSGDTMLRTMLYEAAQSLLIHPGKWSWLKAWGLRVAQRRGMRRAIVAVARRLAVVLHRMWVDGTEFRWSNSTTAVAPQAV

SEQ ID NO: 86495 - protein, 343 aa, unidentified
MDHFSGLDVSVKETSLCIVDDAGRIVREVRVVSEPEALLAELTNPTWHFKRIGLEAGPLSQWLFNALAEAGLPVICVETRHMRAVLKAQINKTDRNDARGIAQMMRAGLYRPVHVKTLRSQKLRMLLTHRKLLQSKAIAIENDLRATLRNFGLKVGVVGTAKFEARIKELVESIPDLVLLVEPLLVVRRALREQIGVLHRRLLAIVRDDEVCRRLMTVPGVGPVVALTYRATVDVPSRFRHAKAVGAVFGLTPSQHQSGESNRTGGISRCGDEMMRAMLYEAAQILLVRSTRWSWLKAWAMQIARRRGMKKAIVALARRLAVIMHRIWVDGTEFRWTREVVAA

SEQ ID NO: 86496 - protein, 271 aa, unidentified
MDIAKSVFQVHGVAATGDVVIRQRLSRGKVLQFFPKMPACLVGLEACGAAHYWRRLGHDARLMPPSYVKPCVKRQKNDAADAEAICEAVTRPTMRFVEIKSDEQHSIMVLHRVRLTLMRQRIQLSNTIRGHMAECGLVAPVGRNGLAQLITIIGNCDDARVPDLARDCLAMLVSQLEMINEQILETDRRVRTSARATEVGRRLMEVPGVGPVLASAMVAAVPDPRSFKSSRNLAAWIGLVPRQNSSGDKERLGGITKQGDRYNCSWSAPLP

SEQ ID NO: 86497 - protein, 398 aa, unidentified
MTGTPTNVYAGIDTHQNTNHVGITNEIGKKLGDKEFPTTSTGYTALLNFILSFGTILAVGIEGTASYGAGVCAYLRSQGVLAKEVIRPNRQTRRGGKSDPIDAYAAAKTVAADLDDLPIPKLLGGAVDGIRLILKTRTTAVKARTAAITQTINFLTTAPTQVREKYADLKDPDLHTTLAKTRPAADDHLGIALRRLAKRVEFLTEEIDAANHQLADLTTQVAPALAATKSVGPISAAKLLVTAGENPERITSKAAFAALCGTSPLQASSGKITRHRLNKGGDRQANSALFDIVKSRMSSDPRTKEYVARRTAEAKSKREIMRCLKRYVAAEVYTLIINPPIVPAINDLRPLRESKKMSLRVVAEHFSVGQVKVSRIERAEARDDEFAAQYRDFLLQAA

SEQ ID NO: 86498 - protein, 329 aa, unidentified
MKLQHIIGADLSKESIDLVCYQLQSHFKITNSTSGFGQMLRWLKQQRINYSDSMIVMEHTGLYSYHLEKFLHQHQISFTKVSALAIKRSLGLIRGKNDKVDAQRIARYGFEKRNQLQAEKPMDKGFQRLQMLHSTRERLTKHRSSLICALKEYGIILYSTDPIMNSHKKLIKELSVQIKLIEEQIKQCIQTAESSISRNFKLLTGITSVGPVIATATILKTKNFTAFKDGRKFSCYCGSAPFDHSSGKSIRKKTRVSHLADKRMKTLLTLGARTAIQHDKELKEFYERRLLMGKSKNSTINIVRNKIILRMFAVINRQTPFVKQYSKAV

SEQ ID NO: 86499 - protein, 403 aa, unidentified
MVRYHVGVDVGKSRHHVSIRDVEGDTYRKAVAVANDREGFAELVSTLERISTDKAEFLVGIEACPYGLNLSYFLMAVGFSLVEVNPFRAGQFRKAQGRKAKTDRIDARSVAAILSLGGHKPLSIPDPILDNLKDLTRFRTDLVEEKAAMIIHLQEALSILFPEFERVFRQLDSASSLAVLAAFPGPEHLIEGGEERVGATLSSASPHKMGRGMARKLIAAAKDTVGVAQKQLALGVKVSILAKRIASLKSTIRDLDTTITDLFDCLPNRPQGFPVGHAPSLAAMVSEIGDVHRFATAKKFLSHFGWCPQTFQTGGYRMEHPKMSHAGNRFVRRLVWMLSVAAVRTVPRYREYFQRRVREGKAKMHILVAVGRKLLCMLYALLKRGVSYDPNWEESGRLALARH

SEQ ID NO: 86500 - protein, 369 aa, unidentified
MTDVITYVGMDVHKKDIHVALVVGADRTMVTWPVANQPDAIRRLVRKLERVAPGRIRCCYEAGPCGYALQRQLSGGRVSCVVIAPALTPRKPGDRVKTDRRDARKLAELLRAGLLTEVRPPTPEQEAVRDLCRARDDAREDLMRARHRLGKLLLRRGLHYPGRAWTRAHRAWIDALTWPAVEDQWVVEDYRLAIDHLESRLVELDARLTAVAERAPYREPVGWLRCFRGVDTLTAVMVLAEVHDIRRFTSARALMAYVGLIPSEHSSGGAVHRGPITKTGNQLVRRLLIEAAWHYQHRPGVSAALRRRRTGQPATVIGIADRAQHRLCRRFARLSARQKPRATVAVAVARELVGFVWAVLQRPVADAAA

SEQ ID NO: 86501 - protein, 412 aa, unidentified
MDVIYTHCCGLDVHKKTVVACLITSAEGLEPVKEIRTFRTMTADLLALADWLQQAGCTHVAMESTGVYWRPVYNLLEGQCELLVVNAQHIKAVPGRKTDVKDASWIAELLRHGLLRGSFIPSKPQRQLREFTRYRSTLVQDHARTLNRLQAVLEDANLKLASVVTDIYGVSARAMLEAILAGQRDVEALADLARGRLRAKRDQLKEALEGRVTAHHSFLLSEHLSTLEYLDEAIERVSGEIDQHLTAEQEAIALLDTIPGVGQRAAEILIAEIGTDMSRFPSAKHLASWAGMCPGNHESGGKRLSGKTRKGSRWLRQILVEIAHVASKTKNTYLAAQYRRIAARRGKKRALIAVGHTVLTIVYTLLTRKQPYQDLGTAYFDQREQHRVERRLVRRLERLGYEVALQPRALAS

SEQ ID NO: 86502 - protein, 421 aa, unidentified
MKNNAAKKVRQVPAGYMVVGVDPHKKRHAAVAITQDFAVHGKFKFNNSREGLEYLLQRVKAEMVKSDCRGIMFAIETGGHYWRNLAYFLDEVGIPFRFINQFTLKRRREGKDLNHRKNDYRDSEVAAQLLCTGEFIETRLQQGVYAELRAAYNAYRRLVKERTRITNLIKGLLDGLFPEFTQIFKDPCGLTALSVLSTCPIPGVIAGMTEEEFASTIKASHQGRLMRKKLCALRYAAETSIGIKAGAQPVSTELFFLVEKMRLIRCHIRSIDGTLVKLVDKAEEGKYLLSIIGVNYISVAGLLAELGSFKSYRSAKQLIKMAGSNPTESESGGKRGSHTPMSRQGRPALRNCAWTAVIPMLRFNPDFRAWAKELRERPVHKNPLAKREVVGAALNRLLRLAFTLVTKQTFYQTPHPVQVTS

SEQ ID NO: 86503 - protein, 404 aa, unidentified
MPAISGIDWADEWNDVRVADGDTGELLSEHRFAHDEQGIGDLIGLLLEHRVQRVAIERPDGLLVGRLLAAGVCVLAIHPNQVKAARDRFRAAAGKSDRFDAFVLCELARTDHHRFPALAPCSDETLALRALVRTREDLVEARVALANQLRAQLQAFWPGAKQIFADLDSPIALAFLDRYPAPDDARGLGPKRLAGFLHRHAYCGRRTAAELLQRLRSAPTAAVGELEREARRSAVIGLVAALHPIVEQISQLTSQIAGTVRAHPDGQIFLSFFRDPKSTITAAGLLAEIGDNRTRYPTDAALAADGGQAPVAIESGKHRAAAFRWACDKRLRNHLGVLADSTRHWHPWAHDVYARARGRGADHPHAIRILGRAWTRVLWRCWQDGVPYDPARHGNLNRLLPAGG

SEQ ID NO: 86504 - protein, 355 aa, unidentified
MNVNVNHYIGFDVHKKSISYCVKLADGRIVEEGKLAARRVTLCQWASKRAEPWHGAMEATLFSGWIYDTLKPFAAKLEMGHPARMKAIGASKKKNDKLDARTICDLMRANLLPACWVAPSEMRELRRILRYRNLVLEQAVRMKNKISGLLMESGVEYNKKRLHGEKYFHELLENLAAEVPESVKDLLKLSRGWLESFQATQQQLLVKLQKHPILMERLKRLKSIRSVGEVTALTWALEIGDPHRFSSIGDAVSYCGLTSALVESADKQKRGPISKQRNAHLQTVLIEAAKVAPRWNPQLAELHQAEIDSGNHRNRATLEVARKLVAYLLAVDKSGKDFAVRTPSGKSEGEVKPAA

SEQ ID NO: 86505 - protein, 356 aa, unidentified
MDSTKYIGMDVHKEATTIAVMNPAGKLVMESVVETKAATIVQFLDGLRGELYVTFEEGTWAAWLYDLLKPHVTKVVVCNPRKNALLKAGNKSDRIDARKLAELLRAGLLSPVYDGETGLRTLKELGRSYLAVSKDLTRTMNRVKALYRSWSIPCGGTSVYAPRHRVEWLSKITEPGVRRRAELFYQQLDGLQRLRQEARRDLLAESRKHGATNLLQRIPYIGPIRAALLIALLQTPHRFRTKRQLWAYSGLALETHSSGEYHYVQGQLQRSKKPLALRGLNQNHNHDLKSIFKGAATKAGSATGPFHDFYTALIAKGMKPTMARLTLARKIAAITLLVWKKGVCFDAQQLKQQVSV

SEQ ID NO: 86506 - protein, 415 aa, unidentified
MFKIFRKNCCGLDVHKTWIYACIGITDNNGRTEYKQARFSSFSKGLKELLNWLVKYDCFDVCMESTGKYWIPVFNILEKDCKVILAHPKYTKPQKGNKTDRKDAKWICDLFACDMIKPSFIPPAPIRHLRDLVRYRFKLTNMLSGEKNRAQNCLTVSNLKLDDVFSDVFGKTSMAITNYILEHPGETFDVALFVSKRCKTPVSEIQAAVDGAISQEQAVKLRTCLSHINQITESKEKITQEILRVAEPYSEALNLLQTVPGLGKNRITAISILSEIGADMSVFPTAKHLASWAGCCPRNDESARKIKSTRISRAGSYFKPVLVQIANALLKSKEHPEFGERYRRIKARRGHKKAIIAICRMLLTAIWHILKKHVPYSAEGFIEQRKVKPSKKLSLSQALHLLKERGYIIDIPLRE

SEQ ID NO: 86507 - protein, 392 aa, unidentified
MRERITEMQMMIEGQSHFQPFGLSYWGFDDLNKGVGSMTASYEYHIGVDYHKSYSHLVVQDSSGKTLRSGRVKNDRQSLGGFLERYHENSHAVVEATRNWMVMYDWLDDICDDVVLAHPLKVKAIADAKIKTDKIDATVLAHLLRADLVPEAWAPSERSRDLRVALRERMFYVRLRTMTKNRIVTVFDRYPEQTAQLKKLGDLFGKAGRVQLAQVNVSEIDRIQIDRGLAFIGDIDMRIKQSEATIRAMTKANANVKLLKTIPGIGEFFARLIDAEIDDISRFRHSKKLAAYAGLVPSTYSSGGKTFHGKIIKQGNKWLRWAFVEAVTPAIASDAQLRAQYEHLKIKGINKARVAIARKLLTIAFQILRDQRAYEPRGTATMEGASTISRLS

SEQ ID NO: 86508 - protein, 369 aa, unidentified
MAKSTTIIAFDQHAATTVAAVLLPGQRTPALHTLASESLTILRFIDRLQRQGPIQCCYEAGPCGFELQRALTARGIPCDVIAPALIPRRAGDRIKTDRRDAGQLAVLYRAGALTAIHIPTEQEEAARDLLRCREDIRADLLRARHRLSKFLLRHGRRFTATKNAWSKRHDVWLRAQTWPLAALDQTHRAYLRAVEETVARLRAVEEDLRGLLDLEPLRPRVERLRCFRGIDDLTALTIAAELGDARRFPNAPSTMAFVGLVPSEHSSGSKRVQGAITKPGNAHLRRVLVEAAWHYRHHPFVSDALRRRQQGVPPAIVAQAWTAQHRLHRRYARFAARGKPKQHIVTAVARELTGFVWAALTHASDRPTS

SEQ ID NO: 86509 - protein, 396 aa, unidentified
MNKIVHYIGLDVHKETIALSIAPQNSTEVRRYGIIGGTLDAVDKLVKKLAQENAELRFAYEAGPCGFVLCRHLRAKGIHCDVIAPSLIPKKASDRVKTDRRDADQLARLFRAGELTAVHVPDQEDEAIRDLVRARTSAMTDQRQARNRLKGFLLRLGFRYTGKSSWNEAHKRYLSSLVMPQPPQQIAFQEYIHAMDEATDRLQRLAQAVEAALPGWKWEPVVRALMSLRGVQVLTAMTLVAEVGDFSRFEDPRSLMHFFGLTPSEHSSSTKRVQGGITRCGNAHCRRVLTEAAWHYRLDPKVSQAIQIRQQGQSKEVRLIAWNAQQRLHKRFRHLCAKKKSVVAATAVARELAAFVWAIACKVKPAQKPAAPEIIRTCRGKVYQLDANKNFEKKAK

SEQ ID NO: 86510 - protein, 480 aa, unidentified
MESRPAEKAKKTTEAKHVHWNDMNRKQRREMTRKIQSADLSLEVVHANAAGIDIGNESHYVAVPPDRDSQPVRRFGCTTAELKAMADWLKQCGICTVAMQSTGVYWIAVFDILEAAGLKVYLVNARDTKNLPGRKSDVQESQWLMKLHTYGLLRNSFRPSQEIRTMRTYWRQRNDLIRAAVSHIQRIQKALTQMNIQLGNVLSDVSGVTGQAILKDILAGERDPHKLAALRDPRVKASEEQIARYLEGNWQEDLLFVLKQEQEAYEFCQQQMAECDRQLQQYLQQREDRSQGASLPQEMRKGRLVRKKGNKPMFALRPELFRITGTDLTQVDGIDVVTAATILSEAGWDMSKWEDEHHFVSWLRLCPDNRISGNKVLGKGRLPTNNRASIALRMAASTLRLSNTYLGAQFRRFRTKLGAPVAIKAMAAKLARLVYRMLRYGMKYVDQGAKLYEAHHRQRQIGQLKWNAAKLGFRVVEAAT

SEQ ID NO: 86511 - protein, 404 aa, unidentified
MGLDVHRDVIVACLARGELGTEPEIEIRSFSTLIPEMRKLRDWVLEVECRHVAMESTGIYWQPIYEMLEPCFDGQINILVVNARHMKNVPGRKTDMRDAQWIATLLRAGLLNGSFIPDKTFRELRHLTRYRKSIVHDITAQKNRIDKFLQSSGFRFTAFLSDAFGASGRNIIRHLMEYGDISREALDKCLKTQTRKRIDEILVALNGSLSEHQRSFLRMIFEHLESLERHRHTVEDAISEEIVKHEAALSLLCSIPGIDVTAAASIIAEIGTDMSAFPDSQHICSWAGLSPGNNESAGKRKSAHINKGDPYLKSMLCEVGWVISGKRTLYLSGWYWRVKQRKGAKRATIALARKLLTLIYTMLKTGTPYNEECFEIRRKQSERKRAGRMVNELQKLGYFVVAPD

SEQ ID NO: 86512 - protein, 372 aa, unidentified
MKKSTNETGSKAKTAAKMKQTIDWKRAVTIGVDLGDRFSHYCALDTAGAVVGEGRVATTPGAIELLFKTSRKRIAIEAGTHSPWMSRLLARLGHEVIVANSRKLRLIYENQHKSDRVDAEYLARVARLDPKLLGAIEHRSELGQCHLSLIRARDTLVRSRARLIQHVRSAIKSLGERIPSGTAEAFHKRAGASIPEGLREALMPLVAVIEQLTIRIKEYDQKVEQLAEDRYPDTAALTQVCGVGSLTALAYILTLEDEQRYRRSRSVGAWLGLVPGQHDSGESQPQRRITKEGDAYLRRLLVGCAQYILGPFASDSDLRRHGLLIAARGGSNAKKRAVVAVARKLAVLLHRLWRTREVYEPLHNAGEQTAAA

SEQ ID NO: 86513 - protein, 352 aa, unidentified
MRTSQKAAGIIATIGIDIGKNTFHLVGLDKRGAIVLQQKVSRGQLERRLANIPRCLIGMEACSGAHHIGRQLAAVGHDVRLIPAQYVKPFLKGHKNDYRDAEAIAEAVQRPTMHFVAIKTPEQLDLLALHRVRSRLVGQRTGVINQIRGFLIERGITVRQGPMPLRKALAEILSSDTGVLSPRMVGLVTDLVQDWRRLDERIAAVSAEIEALAEQDDGCQRLMTVPGVGPIISSAVVAAIGNGAGFKQGRDFGAWLGLVPKQESTGDRTILGKISKRGNKYLRTLFVQAAHVVLVRRPSAAMRSLWPWIEQASKRLHRNMLAIALANKLARIAWAVLARGRAYQPRNTVDAA

SEQ ID NO: 86514 - protein, 430 aa, unidentified
MIKEANMEIVHERAAGLDVHKDSVVACVRVMCGGEVNRECRTFDTTTAGLEALREWLIACKCTVVAMEATGVYWMPIFKILDDEDAYELIVANARHVKGLRGRKTDVNDATWIADLAAHGLIRASFVPHDDFHELRTLMRSRKQFVREQTGHVQRIQKTLTEANIRLDSVVSDIMGFSGRRMINAMIEGVSDPDKLAALGTRGLKATKEQLRAALHGRLTDHHRFMLRLHLKQYDALEETIRLVDQEAEARVARMDRDIKDKEAALSALILLLATIPGVSRLAAMTILSEIGRDMSRFPTAGHLVAWAGLCPGQNESAGKRRNGRLRKGAPWLKTMLVQCAWAAKRSKNSYYKAQYYRLKARRGSQKAICAVAASLLTAIFHIINDGVPHQDLGVDYFDKRKPEAKVKRLVSQIAKLGFEVTVQPIAKAA

SEQ ID NO: 86515 - protein, 318 aa, unidentified
MIKEFIGIDVSKGTLDATAYTSGKKWRVSNDDEGIDKLVKAIIGLTPVLVVMEATGGYETQMAYALYKAGICPAVVNPREVRNFAKATKKLAKTDTIDAQILAHFAAVIKPEPRPLSDEQSQELEALIARRRQVINMLIAEKNRLHMARKPVKDAIISHIEYLKKDLSQIDSELKGRIEESPVQREKYNLIQSVPGVGPNLAATLLIELPELGTLNRKQIAALVGVAPLNHDSGTKRGKRSPWGGRPQVRSALYMAALAATHFNPVISQFYKRLCSEGKAKKVALVACMRKLIIMLNTMIKYNTTWHIDQPVLAVVTA

SEQ ID NO: 86516 - protein, 368 aa, unidentified
MKQVTTYVGIDAHKKDLFIAMLMGQEKTPVTWQLANEPRAVHRLVRKLERETPGPIHVFYEAGPCGYALQRQMTTSRVSCDVIAPALIPRKPGERIKTNRRDAQKLAELGRAGLLTAVQPPTPEDEAVRDLARARDDAREDLERCRHRLGKMLLRRGLHYAGRNWTRAHRQWIDTLTWTHAAERVVVDDYLLAIDHTEARLLELDARLAETAETEPYREPVGWLRCFRGIDTLTAMLMLAELHDFRRFASAPALMAYLGLVPGEDSSGDKHRRGRITRAGNALVRRLLVETAWHYQHRPSVGVALARRRQGQPGRVIAIADKAQQRLCRRFRTLAAEHKPAPKIAVAIARELAGFLWAALQPVPVTVQ

SEQ ID NO: 86517 - protein, 424 aa, unidentified
MGKTIPICCGVDVHKKFLVATILTGDYLIPQCKQKHFGTSFRNLLAFKQWLLDNNCKDVCMESTGKYWVPVWNILEGVVNVVIANPKWVSAVKGNKDDKKDSKWIGNLFRMGLVPSSYIPGKNIRILREFTRYRSKLVAMRASEKNRYQNAFTVCNLTLDAVVSDMFGKSAMAIENYLLDTDAVDPEICVSFLQRNLKKKSAEIIEAVEGFNMTQEQKERVRIVQGHFADIDKRISQIDEIIGRLTAEHEGTISLLCTIPGIDRRLAITIISEIGTDMSEFGSSRRLCSWAGLVPGNNQSAGKKKSVKITRAGVYLKPALVEAAHAAVKASEKSPYFRIKFEKIMKRRGKKRAIIAIARMILTAIFAMVSTGEVFNPSDLQRFDMPEELQKKRTIAEAKDAVKLLVSLGVVPEGSISLEALLAS

SEQ ID NO: 86518 - protein, 347 aa, unidentified
MEDKVTYVGLDVHAETTVASWGSPREPVKRLELPTTREGFQLLHRRIGRKRLWGAYEASSCGFIPYEWLREMKWQVSVIPPTHLKRSSKSRKNKADAKDADMLREHVMSHGELGVEMAEVVIPDRELRDDRELTRERLHRGEKTSGVKAEVLQLLRRHGVDRPPEQKSNWTKQHLAWLRGLAGGKGALPPMARLVLAGHLRELDFLESETMALDQAIEALARKPRYEAALKRMRRHKGVGLLTAAVLLMEMGDPHRFANRQKLASFFGLTPIRHDSGKKVDRLGHITRMGSPQARKVLNQAAWAFLRSHSRWKAWFEQVAARRGKMRAIVALMRKLSIILWHEAAAA

SEQ ID NO: 86519 - protein, 358 aa, unidentified
MKKLYVGVDLHKRSCWVTVLDADGRLLESRRMGTGKQELEAYFGQLRKPAAVAVEATFNWYYFLNVMEPLGLELHLVHPWKTRAIAAARIKHDRLDSRVLAELLRTGFLAEAWIAPRRVREERQLLRYRVHTVQWATRAKNSIHGVLNRNGIRTPLRSPFGPKGRQFLKQVELARTDRWEVDGQMERLDLLGDQLAALDREIRQQAKASPVARALEQIPGIGPFIASLVMAEVGDIRRFPSAKHLISYIGLAPSLHASGEHRWGGPITKQGSSVLRWALVQAAHRAALHPRFYGFYQRQRERHGTSRAAVALARKLAVIAFYRWRHALRGAARPPQVERVRERTSGGAWSEHRPLMSD

SEQ ID NO: 86520 - protein, 361 aa, unidentified
MLGNPSEKGKVMDKITRIGVDLAKNVIQLHGVDSMERVVVRKAISRQKFLEWFANLEPCLVAMEACSAAHYWARKLRALGHEVRLIAPQFAAPYRKGGKHVKNDRLDAEAICEAAGRPHMRFVAVKTADQQNVLVVHRMRSGFVEERTALINRLRGELVEFGVFLPQGIDAFRAHFVEALEDGATELNGVARTALLRGWEHLQALDQQIAWCDAQVATHVKHDSNAQRAMAVIGIGPLTASAAVATVGDAHLFNNGRQFAAWVGTVPKQKSSGGKTRLGRITKQGNTYLRTLLFQGARSAVTSAYRRSDRLSRWIVQLQARVGWYRTLVAVANKHARILWAILAKGERFDPSHVSTPRRPL

SEQ ID NO: 86521 - protein, 370 aa, unidentified
MTFLGIDLHTNCFTCCYLDAKSGDKRIETFTLDDKGLPLFYKTLNRRTHVLVEATINTFAFVELFQHLVAEVVIANTYKLKIISETSKKTDKVDAEKLARTLKIQVLSGEQQVSPVLIPPKLVQDLRALFSTYTLIRKQITATKNRIHSLLKQNLFPFTKEYIFGKKTRPDIKAISSDPILTIQLGLLFDLLENLEHKADEFVDQILLTAAPFMKEIDILTSMKGVSVFTAAAIMSDIVTVDRFPNAKHFTAYLRSAPRVESSNEKTIIKSTNKAGRRMSITLLSQSLNHFRDANPKLSAWHDRLVTYKKKGIVRMGLCRRVFAEMYQMLKKQEYHYYCDSKNHEKKMTEYKALLSSHSIYGDQIFKKAS

SEQ ID NO: 86522 - protein, 412 aa, unidentified
MEGETVIAGVDTHKDVHVLCLLDGLGRKIWSGSFGADPEGYDRLAEAIGDPGSCAVVGVEGTASYGAGLTRRLVELGYNVVEVLRPKRDKVRPGEGKSDPLDAERAARKAASGRGCSVPKSQDGWVEAVRQLYVARRLAVATSTSCVACAKSMLTTAPSALRERFRGRERPKDLMPLLARGRKAGDALEESVLASLRSVAAVWKEARSQVESLDERIRALLEANAPALLGVEGCGTTTAAALVVAAGDNPGRLKGEAAFSMMCGASPIPASSGKTDRHRLNRGGNRQANWALYEIAIKRMAYDERTRRYVARRTSEGKSRREAVRCLKRYIAREVYHVLMDPNPDGAAPEGPELAKMRKAMRVTQKKAAAELGLSAATLGHLERGKRRSTKLERRYYELLCELERTLPQTAS

SEQ ID NO: 86523 - protein, 410 aa, unidentified
MSLDAVRTHCAGLDVHKKTVVAYVITPQAREMRSFGTTTEELCTLVEWLISLGVMDVAMESTGVYWKPVYNLLEASQLRPVVANAKHIKSVPGRKTDVKDAEWIAELHQYGLLPASFIPDRPQRELRELVRYRRSLIQERTREAARIQKVLEGANVKLASVASDVLGVSGRAILRLIVEGIEDPQVLAGQARGRLRDKHDALVRALRGLVGSHQRLVLGEQLSHLEELEERIARLSEEIGRRLGPFEKVLDEMDRIPGVGRRTAEDLVAEIGLDMSRFPSARHLASWAKICPGNHQSAGKRKTGRIGDGNKWLRAALTEGAQAAAHTKNSYLAAQYHHLAPRRGRKRAIIAVAHSILTIVYYLLRDGTTYSDLGPSYLDERTRDAIKRNALKRLDKLDFDVTITDRRAAA

SEQ ID NO: 86524 - protein, 350 aa, unidentified
MIIIGCDYHPGVQQISFVDTDTGEFQETRLQHREPAEQFYRELALRGVQVRLGMEASGQARWFERLLAELKMELWIGDAAEIRARRVRKKKTDREDARHILRLLMEDRFPRIWVPSWENRDVRQLLWHRHRMVQMRTRVMNQLQAVALNEGMRCKKRLGGERGRQQLESFPLAMWGSRRRHDLLELLDRLNPTIAELTQAIEAEVANYPAAQRLMTHPGVGALTALAFVLIIGETERFQCGKQIAAYLGLVPEENSSGESRRLGHISKQGSGFMRFLLVEAAQVTVRSDGQWRSRYFHLAMRRGRKIANVAMARRLAVRLYWMWRRQWDYEQWKEFGPHAGQPGMSDGVK

SEQ ID NO: 86525 - protein, 351 aa, unidentified
MEKQAFIGVDISKLTLDICLYDSEKYLLENYLTISNDSKGFSHFLKWLKSEHFKTNTIAVCMEHTGVYGLEFSRFLESSGIDFMFVPGHEIKYSCGLRRGKSDKIDARAISRYCYEKRDRHVYDKPKTAYRLRLQELLTERRAYVKERKRIKTYLTEHKNAVNASTGRYTRQLEQISILVKEVETDLLELIRSDEETFNNYNLLTTVVGISLVNAANILLHTDNFKAFDNPRDYACYCGVAPFGKQSGTSIKRADKVSQMANKQLKADLSQSALAAVRHDPELRLYFERKRASGKHRNNVLNAIKFKLIQRMFATVKRGSPYVKLGGYSTPKQSLNHSINHQTINSYENQN

SEQ ID NO: 86526 - protein, 361 aa, unidentified
MNASKEQPKMTAGLDIGDKYSYLCLIDQESGEVVEEGRVRTTPEALRRRFASEQPPMRIAIEAGTHSPWVSRVLEGCGHEVLVANARKLRLIYANKRKTDEVDAENLARLARLDPKLLYPLKHRGEDSQAHMALIRSRQALVGARTRLVNHVRGAVKSFGARLPKCPARSFHKRVPGHIPEPLLPALGPVLEQIGSLTERIRDYDRQLEAIAKERYPQETELLRQVEGVGALTALTFVLTLEDPYRFERSRSVGAYLGLVPATDKSGDRDPQRRISKEGDEMLRKLLVGSAHYVLGPFGGDSDLKRHGQKIASRGGKNAKKRAVVTVARKLSVLLHRLWVTGEVYDPLYNANRSQEREEAA

SEQ ID NO: 86527 - protein, 354 aa, unidentified
MTRYIGLDAHAASCTLAVVGPSGKHISCHVLETRANVLVDLIKTIARPRHLCFEEGTHSGWLYEILSPHLDETVVTGLMERRGRNGVKDDERDAFVLAEKLRTNSIETRVFKDVGRYGKLREISHAYGMLVRDSVRVQNRVRSLYRSRGIETPGDGIYDAERRAEWIAKLPPKSQPVAQLMVQQYDAVENLRADGEKQMRIEARQHPVTRRLETIPGIGPIRAAQLVPIIVSPHRLRTKRQLWKYAGLAIVTRSSSDWVKGKDGGWSRQTVQQTRGLNRTHNGTLKCIFKGAATTVIGRADADCPIYQHYRSMIDNKTKPNLAKLTIARQIAAIALAVWKKEEVYAPAKVKKSS

SEQ ID NO: 86528 - protein, 394 aa, unidentified
MIYAGVDIAKTDHVIGAVDERGAEMCRPMPFKNTEAGLERAVAWLEGLAESPSGVVVGMEATGHYWMACYSFLVARGYSVAVINPMQVRAVRRLKGLDKVKNDRIDAGLIAEALRIGQYDETRLATDEVASLRSLSRYLQSLRGMVAELKTQCVCLMDAHFPEYAGMFSDMFGAGSRAVLSKSPLPFELARRRADSLARDIAEASRRPGRSAGLAAEVKAAAKSSIGVRLGQEAASFQIKSLVRQIEFADSECAKVEARVRELLDEVEPLVLTIPGVSYVTGAQIVSEIGDVSRFRNAPALVSYAGLNSSVSQSGKFDSGGGPITKHGSPYLRRALWLAANRARQYDPGLRAFYDKKRAEGKPHRVAVTAVARKLCHIVFAVMRDQVPYDPERE

SEQ ID NO: 86529 - protein, 335 aa, unidentified
MKVFYLGVDVSKKKLDLCLRSNGKDILYDVIPNDLSSIKSWLTRTFEKFFLSEDSLVVCAEHTGQYTYPLVCATKSIGVYLCLEDAAKIKYCHGIPRGKNDKIDACRIAMYAERYNDCLQSYTASELIIQKLKNLSTERSMLVADRAKYQSQLKDQVDYMEHSIYIAKCNRVEGIINTFTDYIAQIDLEIKELINQAPVIAHQMDLLMSVDGVGERVALKMIMETDAFTSFTDPRKFCCHAGVVPFVYVSGSSQRSKNRVSNRADKSIKHLLHMAALSVSQVKNSPLKKYYDRKVEEGKNKMSVLNAVRAKLVTIMFAVIRTDAFFSRNYQNSLA

SEQ ID NO: 86530 - protein, 343 aa, unidentified
MQTITTIGLDIAKSVFQVHGVDAAGQVVIRRQLKRRYVLAFFQKLPPCLIGIEACASSHYWSRELQALGHTVRLMPPAYVKPYVKRQKNDATDAEAICEAVARANMRFVPTKTPEQQSCLMLHRTRHLFIRQQTAVINSIRAHLAEFGIVAPVGRKGVTELLHIVADPSDKRVPEVARACLAALGNQLLSIKEQIVEFDRMIMVWHRSNETSKRLHYIPGVGPMLATALVASVADPRTFRSGRNFSAWIGLVPKQHSSGGKDRLGSISKQGDRYLRSLFVAGALAVIRYAKIHGTKHRPWLTALLARRPTKVAAIALANKLARMAWAMMAKGERYKEPIALAA

SEQ ID NO: 86531 - protein, 369 aa, unidentified
MDEYSTVFVGMDVAKERHAVAVAEPGRQGEVRYFGEVNADAASVRKLVARLEKRHGKLHFCYEAGPTGYRLYRQIIALGHECSVVAPSLIPRKPGDRIKTNRRDALQLARLLRAGELTAVWVPDEAHEAIRELIRSRAAAVDDLRRKRQAISSMMLRYGRSYPGKTTWTKQYKQWLQTQKFEHAAQHLVLQDMILAAQHAQERLDQLEDVITEFLPSWSLAPMVQALQALRGIRLVTAATIMAEIGDLRRFETAGQLMSYLGLVPGEHSTGEHVRRLGITKAGNRRVRCALIEAAWTYRHLPKTSQLKSYVHEKVSPAVRDIALKAQSRLCARYRVLSNRGKMLTVAVTAIARELAGFIWAIGKAMQPD

SEQ ID NO: 86532 - protein, 404 aa, unidentified
MIYLGIDWAEAHHDVCLMDDAGGARGRARVPEGIEGLRRIHELVAENTEDPQTVLVGIETERGLLVQGLIAAGYRVYAINPLAVSRYRDRHATSGAKSDPGDAKVLADLVRTDAHNHRPVAGDTELAEAIKVLARAHQTLTWSRQRSVNQLRSTLREFYPAALEAFGTDLAGRDAVALLERAPTPSEGRALSLSKIRAALERAGRQRNLDSRAAEIQQALRSPQLQPPPGLARAYGSTVRATVRILAQLNAEIAALEAELAEAFESHPDAEILRSLPGLGVVLGARVLGEFGDDRTRYQDARARRCYAGMAPITKASGTRLVVLARVARNRRLADPLYLWAFSSLTRSPGARRFYDAHRRRGNTHHQALRALANRLVGILHGCLAQGTLYSEDVAWRSPAEAAA

SEQ ID NO: 86533 - protein, 425 aa, unidentified
MAESFANVGIDPGKYKGMAAVVDEHGKTASGPLRFCPTCEGIARLLSGVSNCAPGVELRFYIEACGWLWYAPAAILQELGYKVYLVNPAYTKAQRKMSSPGAKSDFRDAQALARAPFNMGDRAEHIADVPVGIRLNLQNLCRHRLSLRQDATAIQLRLIAWLGLTSPGLTAIIGTDLSEMDQSIIAQYPVISEMAGQDEETVQAFLTECANGRAVDPALAQELMGLAAEAYTPRDLDPKCIAIQVEIELARLELLQQQIARLDREIASLLKLCDPHGYAQTLPGFGPVIAAILVAEAGVDVSRFEDAAHFASWTGMVARAFGSSGKHVQGLPMTKAGRSDVKWALYMAAKTASTRDPLLKDFYDRLRADGKCHQEALVAVGHKLARWYWAIMNEQRPFERREPETQQPLAEPTPSEAENQQSVCA

SEQ ID NO: 86534 - protein, 343 aa, unidentified
MTKDTMIGVDLAKNVFQLHAASMTGQPKFCRKLSRQSFSNFMAKQPPAVVVMEACGSAHYWAREMIRLGHEVKLIAAQYVKPFVKRQKNDAADAEAIVIAAQRPEMRFVEPKSAAQQSRAILFRARERLVHQRTELVNALRASLYEYGHVVPQGIRQINRIAEILDAPGSDLPDLMREECRDLLEQIAEQTVRINTRTVKIKALAAEDETARRLQTIPGVGPLTALAVEAFAPPMENFQCGRDFAAWLGLVPRQFSSGGKERLGRISKAGQSDIRKLLIIGAMSRLNWLGRKSIPEGSWLARMVARKPRMLVAIALANKMARTIWAMLTRHEDYRVPTQAAAA

SEQ ID NO: 86535 - protein, 411 aa, unidentified
MDIVYARCAGLDVHKTTVVACVRKPGPQPDVRHAETQTFATTLRGLRALVAWLVAHGVTHVAMESTGVYWRPVFAVLEGTVEVRLVNARHVKMPPGRKTDVGDAEWLAQLLECGLVEGSFIPPAAVRDLRDLTRLRKALIRERSHHVNRIAKTLELANIKLGSVVTDIMGKTGRAILQALSTGLDDPAQLAARAQGSLRKKQAALREAIEGRLTPHYAFLLEQHLALIDTLDAHIATLDTRIEVAMTPFAEAAALVQTMPGVAERATQAILAETGVDMDRFPTAAHFASWARLCPGTHESAGKRRPTPTGKGATWLRATLQEAAWAAVRTKKSYYRALYHRMKARGGPKKAIVAVQHAMLVALWHMLKHRVPHQDLGADYFDRRNTARIRRHHVRRLEQLGYQVLLVEPAA

SEQ ID NO: 86536 - protein, 335 aa, unidentified
MEPTTIAIDLAKRVFQIHYVEPDTGTIRSKVLKRAQLVPFFANRPASRVVMEACGSAHHWARVLARLGHDVRLIAAQFVRPFVKSNKNDAADAAAIWEAAQRPGMRFVAVKTEDQQAMLAMHRIRQQLVRIRVMQVNQLRGLLYEFGVVLPQGRRASIEAAKLALASLADQLPAMLADSLQDQFSRLRELDEQIARLERRILDWRRNDDACRRISEIPGVGVLTATAAVSVIGQAKTFRSGREFAAYLGLVPRQNGSGGKVKLGGISKRGDVYLRTLLIHGARSVISAAKHLPERLRALLTRRPTNVVAVALANKMARTIWALLAYGRTYQPTPA

SEQ ID NO: 86537 - protein, 362 aa, unidentified
MDVHKNSINIAIAQQNRKGQVRYYGKIEGTLSALDKVVRKLVSKGDPLHFVYEAGPCGYQIYRHLTAQGFDCSVVAPSRVPKQSGNRIKNDRRDALMLARLHRAGELTGVYVPLIEDEAMRDLTRAREDAKGNEKKSKQRLRAFLLRSGHRYSGRSPWSRAYMRWLSDIKMPHQAQQIVLQEYIDTLSQCKARVQRLTEQIRQLLPQWQLFPIVSALQSLRGVSLIVAATTVAEVGDLKRFQDPAELMSYLGLVPSEYSSGENTRRGSITKSGNGHVRRVLVEAAWAYRYRARVSRALLKRQEDLPQHIRDIAWKAQLRLCSRYRHLWAKGKAKQVIVTAIARELCGFMWAIASEIEGPAAI

SEQ ID NO: 86538 - protein, 349 aa, unidentified
MLAELVEVVIGVDTHKDTHSAAVLAAGTGAVLAEITVCADPDGYTALLALGREHGVLRGWAIEGTGGYGAGLARHLAQAGELVVELDRPARPARRAGAKSDPIDAVRAARDALARARVTVPRADGERASLQIRLSTRQAAVDGVTEAKSQLHALVISAPEQVRAKFRGLSTTAMLRKASRLRPARSAADVHVFTALSALRALALRITLLQDEADAHEAEILAIVRSWRPDLLELPGVGPIVSATVLSAWSHPGRVADDGAFAMLAGTAPIPASSGRTIRHRLNRSGDRRLNSAIHTIAVSRMRFHPPTRAYVERRRTEGKTDPEIRRCLKRYITRQLYRQLEHPPAAGA

SEQ ID NO: 86539 - protein, 345 aa, unidentified
MLIVGGLDVHRKQITFDYLDTVTGEVQRGQIAPADRAHLRAWLARFVGCGDVAFAVEGCTGWRYVAEELAAAGVAAHLAEPADTAAARGRKRHAKTDKTDSRHLRTLLAEGRLPECWIPPAQILEYRALLETYHDLRAEHTAWLQRIHAVFFHQGAPRLGEGALRTGPGLAAVRAAAAAHLSPAGQLQVATALDMLAALEGRLLPLRRQLLDAARHLTGARVLAARLYGAGPVTALALTCWLAGEGRFSSSRKAVRFAGLDITVYSSDSKRAPGRLSRQGPPVLRWAAYEAGKTHARAAAPDHAYYAAVKDRCNGKRAALSEARKIVRQASHILAELGDDALAAA

SEQ ID NO: 86540 - protein, 369 aa, unidentified
MFVAGIDAHTRYVVAVVLDRFGECVLRPTRVKVEQRERLLELLAPYRPLDAVMETSSSWPWLSEVLTGAGIHFVLAHARRLRAIAEANYKTDAIDADLLARMRLAGLIPAVYPTPVAQREWATLVRHRTTLVVQRTALVNRIHAQLHRQGLYLARGRLLTRAGRQWVRTVAYPGFGLEQRALVRSHLRVIAGLRPLIRACDRHIAEVAATIPEAQLVATVPGIGPHRALVICAEALPIRRFPTPGHLASYAGLVPTSCQSGQRAVRHGAIPAGANRWLRGALVHAVVSHVTHAPASWLSAYYATQKARLGWPTARVATARKLARALHAMLRTNTPWQHDQHDQHDQHDQHDQHDQHDPARVSSTDGMPH

SEQ ID NO: 86541 - protein, 355 aa, unidentified
MAVHFIGLDVHCSFTEMAVVNSAGGLTRRQRCSTTIPALLAALAAIRRPRHLTFEEGPMAGWLYRNLQDSVDELVVCDARRNHLVAKDSDKDDPIDAEKLAQLLRGGYLKSVHQSGSLDRAIFKQHVGLYHDCVRDRVRIANLTLAQFRRFGVFASTPDLVDVEQRPALLERLPHKRLLRADVRLLCEAFDAQLQREDQMRRALIVYARQEAMIGRFMQVPGIGWVRAATFFVYIDTPWRFGSKQRLWKYAGLGLERTHSGAGPTHVHVAQYANRRLRGALLGAAKTAVRMGDNAFFNQYQHWTQEEGIAPRNAARNVARSLAATLWGMWKNESDYRPQESLRGGKTADTRAALS

SEQ ID NO: 86542 - protein, 351 aa, unidentified
MWIIGVDYHPSVQQIAFVNTDTGECGERRLSHSDREAEKFYRELKAAGCSVRVGMEATGHARWFERLLAELGFELWIGDPAKIKAKRVRKQKTDRLDAALLLELLLEDRFPRVWVPSPENRDLRQLLWHRHRLVQMRTRIMNQLQAAAMNEGVRRKKALWSKSGRAQLESLPLAPWAARRRHDLLELLDRLSPTIEELSAAVEQQVKHRPEVLRLMTHPGVRPITALAFVLIIDSAERFACGKQIASYVGLIPCEDSSSDQRRLGHITKQGNTLLRYLLVEAAQAVVRCDPDWRRRYIHLAMRRDKRIAKVAMARKLAVRLYWMMRKEWNYEQLKKFGSYAGESDLVHGVQ

SEQ ID NO: 86543 - protein, 355 aa, unidentified
MDSSKYIGLDVHKESICIAVMNSAGKIVLECIVETKASMILQFISGLRGELHVTLEEGTWAAWLYDLLKPHVTRLVVCDPRKNTSMKQGNKSDKIDARRLAELLRLDHLNPVYHGEHGLRSLKELVRSYLSITKDLGRVMSRVKAIYRSWAIPCTGKQVYASRHRDEWLGKISELGVRRRAEFYYQQLDALRSLRREIRRELLEESKKHQAWKQLCQIPSIGPIRAAVLLGILQTPHRFRTKRQLWTFSGLGIETYSSADHRYVEGQLQRSKKPVSIRGLNENCNHDLKNLFKGAAIVAAHKPGPFREFYAALLAKGIRPEMARLTLARKIAAITLIVWKKGVRFDAQYLKPQAA

SEQ ID NO: 86544 - protein, 337 aa, unidentified
MYKGSLRDMSEYIGIDVSKNKIDVCWLRSPDTLKIKTRVFRNTHKGHEELDRWLLKHVKKPAQDLQVTLEPTGVYHEALMYFLNEQGVTIFLANPGKAKEFAKSLGLTHKTDKSDATMLARFGRSQPSTLRLWQPDREEIRELRAMLRRMDALESDLRRENNRREKTQCSEASPRVLASLDGMIEALESEIKHLKNDIDNHIDQYPDLKNNRRLLESITGIGEVMSRELVYLFAAKHFTNAREVAAYLGVIPKLNTSGNYKGRSTLTNNGPSKLRAKLYMASIVASEHNPDINAQRERLLKSGKTKMQALGAAMRKLSQICYGVVKNQCEYQPQIHR

SEQ ID NO: 86545 - protein, 337 aa, unidentified
MKYSGIDLHSNNSVVVVSDEADRVLVRRRVPNDAEAILALLAAYRDELVGVVVESTYNWYWLVDALQEDGYRVHLANTAAIKRYEGLKHSGDEDDAAYLAQLLRLGILPSGYICPPAARAVRDLARKRMQLVRSRTAQVLSVENMLSRQTGAGMRSYAVQRLTAQAVEGFGFNPEVEQAMCANVAVIKTLNREIDKLEQRLHQCVRLRPEFGLLTSVPGIGPTLATLIMLEVGTIERFAAVGNFASYARCVDSARISNGKKKGQGNVKNGNAYLAWAFVEAANFARRYCAEARRFYERKKARTNGVVATKALAHKLARTCYHMLKEQKPFDVKRCFA

SEQ ID NO: 86546 - protein, 417 aa, unidentified
MTEYAAFLGIDWADKKHDVCLSDTTTGKREAATLPHSPHEIDHWASALRQRYAGHQIAVCLEQSRGPLIYALMKYDFITLYPVNPRTLSRYREAFSPSRHKDDPSDAAYLADLLVQHREQLRPWQPDDEQTRTLRLLVEHRRRLVGDRTRLSNRLTALLKGYFPQVLEWFRDIRTEMVCDFLLRWPSLEALKRVRRQTLLTFFREHNSVRRETVEKRLTALTEAVPLTTDKAVLHSSVAMTKALCAQMKATLSAIREFDRQIAEVCAGHENYELCKSLPGAGEVYASRLTAALGSDRRRWQSADELACLAGVAPVLERSGQSCWVRWRYFCPKFLRQTFHEYAGESIKHSFWARAYYESQRAKGKKHHAAVRALAFKWVRIIYRCWQTKTAYDEVKYLESLRRKGSSLLNYAANNPA

SEQ ID NO: 86547 - protein, 440 aa, unidentified
MSNLTTFQTVNPNSAGIDIGSAKIFVSTNGVDVISYGTFTQDFRQCISDMKGRGVERVAMEATGVYWINLYSMFEEAGIRVCLVNPKEVRQVKGRKTDVKDCQWIQKKFAAGLLTESYVPEGKLKELRYLVRERLDIIEMGATYVNKMQRGLELMNIKLTNVIAQIQGASGIKMIEAILSGERDREKLLMLCDARIRKNKSKEVLLALEGNYNDTYLFILAQNLGLWKLHQNKLDVIDQKIQGLLEELCNGKSPVQDISAPKPARHHHPKIEDLHSSLVQICGANPTSISGLNDYTLLRLIGETGTDMERFPTVKHFVSWCQLSPGQNQTGKRKRRAKAGHGQKAGQIFRESAQALINSKYVAIGVFVRRLRARKGPQIAIKAGGRKIAEAYYNLLRFGTEYVEAGQEKYEQILKEKELKTIIVLAKKHNFQLIDIVNAA

SEQ ID NO: 86548 - protein, 467 aa, unidentified
MFVLGCDVSRGYVDITVVNERGELALPPFQADASAQGESRIFRQISALRKNYPQETVIAVMENTGGYEANIAQCFRQHGVPVSVLNPKNIHSFRQLELHHAITDPSSARDIALFALQHLDAIKTEVEGTSERALKRLAHILDALSRDMTRLKNRLDNLLFTVRPELLSLTRGDKPRWLLQLLLQYPIPQKLARGRMSRVTRIPSITPDKARNLISLAKSSRGADNHPDFAPLIVYLATRLLQAMDQEKTLRKELEQRFNRIHPSCPLPTIKGVSSYGAAIILAHIGNVHRFHSAKALVAFFGLDPLVRESGDLQHRRHISKRGPGMVRRVLYMQCLSMCSDPDHSIGRFYARLTKQGNPHYYAITACMRKLTVILYAMLRSGNAFDPNYEDSSKALKQSERDRGRKKLRVAKHARTSLALDVPISTREAKRRKRIIALQNKKREGPHVSCDTSAGSCPKNLNEVTFP

SEQ ID NO: 86549 - protein, 360 aa, unidentified
MACVLTPEGKQIRKFGTMTKDLLLLSDWLTTFQVTHVAMESTGVFWQPIYNLLEEEFTVWVVNARHVKNVPGRKTDVKDAEWIADLLSHGLLSPSFIPHRAQRELRELVRYRRRLIQNRAQVVNRIQKVLESANIKLDCVASDVMGASGQAMLRAMAAGEDDPEVLADLAKGKLRDKIPFLREALRGQIGPHQRFMLSSHWRVLDAITAEIEELDREVATRMGPDEEAIERLDSIPGVGRRCAEEILAETGTDMRQFPTAAHLASWAKVSPGNNESAGKRQSGRTGRGNPWIKAALTEAAQAAAKTKDKYFAAQYRRLAPRRGRKRAIGAVAHSILVSIYYILRDNVDSLVKTPSRSWAR

SEQ ID NO: 86550 - protein, 367 aa, unidentified
MKELRARSIRMVKEGTLIATVDIGITNNTGYCTTLGGRSTKSFSFDNTKEGFEKFWYMTVAGKNRFGCDEVLVGYESTGPYAEPLVHYLANKQVRIVQVNPMHTKKMKEVNDNSPLKTDDKDPRVIADIIRLGRALTIVVPEGDAAYLRRLNNVRERHVGEQTALLNRLQQLVFLIFPEFKTVLKNMKGKTAQYILKRYTIPERIGTLSKEVLGEEMRKRSMGKFGIKEAESLIGLARETVGIKEGLAGIFMDIRHILIQLEAEVRFISEIEAEMGASLERIPYSVRLLSIKGLGTVSVAGLIGEVGDFSKFSTQSEIMKLAGLDLYEISSGKRKGQRRISKRGRSLLRKILFYAAIQNDKKEWDHV

SEQ ID NO: 86551 - protein, 415 aa, unidentified
MALKIVYKVCCGIDVHKTFVVACIASTNKQGVTTYKSHRFSTYTKGLKELLQWLLESNCKDVCMESTGKYWIPVYNVLEKDCSIVLAHPKYVKAIRGKKTDKKDAKWIADLFKHDLVAGSFMPPSDIRQLRDLMRYRYKLTCFMSSEKNRLQNCLTVSNIQLGNVVSDTLGKSSKKILDKILENPLDTSFDIEPLIHGSMKDKIPELELAIDGYITPQQAGKLKIIKKHFEDLESRKTELEKLILALAGPYQQELDLILTAPSFKNIFSAIGIISEIGVNMESFPSAKHLCSWAGLTPTNNESAGKKKSVRVSKAGCYIKPLLVQCANSVVKSEKHPEIRNRYLRLRKRRGHKKAIIAIARMLLTALYNMLKKKEPYNAELYRKSDVLPADREITVEQAILIAKHQGYRIKSATE

SEQ ID NO: 86552 - protein, 389 aa, unidentified
MLCIGIDVAKRKHDCCIIDSDALKTVESFTFPNSREGFDMLLSKISELGIPKDKIRVGLEATGHYSSNLAHFISEHDLPLLTFNPLLTNRYKQGFSLRKTKTDKVDACAIAQMIVSGKGSQTYSSSLYHNEEMKSLSRYRSQTMQKCSKLKISVSRLVTILFPELEGLTSSIHLASIYALLKAYPGHEQIAHCSMKRLTRLLSDASQGRFDKSKALEIHQAACRSIGKVSLSASMELVHTITDIEVLKQHIVEIDEKLKEMVDQEESSIIDIPGIGYTLCASILGEVGDFKRFPDVDKLLAYAGMSPSKHDSGNYHSKHNKMEKRGSPYLRKTLYLAARLVAQNVPKFKEYLEKKLSEHKPYKVALSHVAKKLIRLIYRLGISGCPYLA

SEQ ID NO: 86553 - protein, 444 aa, unidentified
MVCSGMILICEVADAPVIMGISKPAGLKFPCGEVKMMNPLFVGIDVGSRNNVAYLMKPDGSKHSSFSVQNNLGGAKLLSERIVSALGSMQLSDVIIGLEATSIYGDSLVYALREDGSLGRFQRKIHVLNPKQVRKFKDAYPDLPKNDWVDAFVIADHLRFGRIAKEVYMDDYRYQALRTLTRARFDVIQNLTREKQRFANYLFLKCSGMAQDKDIQNTSATTIALMERFETVDDLANADLEELTAFVTETGRGRFADPAATAKAVQAAARGSYRLPKTVNDTVNQAMSVSIASMRALKEQIKVLEKAIEQQFEIIPNTLTSIPGIGKVYSAGIIAEIGDIHRFNSQASVAKFAGLVWHKNQSGEFEAEHSQMIKSGNRYLRYYLLEAANSVRRCDSEFRRYYDLKFKEVNKYQHKRALALTARKLVRLVFRLLKDNRLYIPPEG

SEQ ID NO: 86554 - protein, 409 aa, unidentified
MDVILDRVCGLDVHKDSIKACVRVPGEGRKRDQHIATFGSKTEDILALRDWLEQWKITDVAMESTGEYWKPIYYLLEDRFHVLLANAAHIKNVPGRKTDAKDGAWIAQLLECGLVAKSFVPPGPIREIRDLTRYRKTLIRQRTEEVLRLHGVLQRAGIKLSSVASNIMGVSGRAILKALVKGEKDPEAMAELARGQLRVKIPLLKRALEGQFTKHHGQLVSHMLSHIDYLEEMIADISKELAELLVPYEPQLALLETIPGVQRRTAEMIIGEIGVDMSQFPEDRNLSSWAGVCPGNRRSAGKRKPEKIRKGGQWLKPALTEATWAAVKENKSYLSAQYHRLVPSKGKKKAVVAVSHSMLVCVYHVLKKATAYRDLGSDYFLRRNQEATKRRCLRQLEQMGFGVTLQKLA

SEQ ID NO: 86555 - protein, 456 aa, unidentified
MPRRRRPSTRPVTMPILHPDAGGIDVGATEIYVCVPLDRDPQPIRRFGTFTEDLHALADWLTRCGVTSVAMESTGVYWIPLYQILETRGLDVCLVNARHVKNVPGRKTDVQDCQWLQYLHSVGLLRASFRPPETVCAVRSLLRHRDTLIQLAATHTQHMQKALSQMNLQLHHVLSDVTGVTGLAILDAILAGERDPQVLARHRDGRIKASRETIAKALVGAYRPEHLFTLRQSLASYRHYQCLIAECDGEVETLLGTFASQIDPAAHPLPPAPATRRKPHRKTPPFDLRAELYRVLGTDLTQVPGLQTPTVHTLFAELGADLSAFPSGDHFASWLGLCPDNRISGGKVLSVKTRHVKHRVAQALRLAAQSLSRSQSVLGRFFRRMRAKFGAPKAITATAHKLARIVYHLITTRQPYQESRLAAADAAHRRHSESRLRAQARALGFQLVPAPEQAVS

SEQ ID NO: 86556 - protein, 318 aa, unidentified
MKQSVVYIGIDVAKAHLDVAWAQTVRRLPNQRSGHAALIRWIKQSTTPVQLICEASGGYEQALLESLEKGAVKVTLVQAVRVRQYARASGILAKTDRIDAKVLAAFGSAMQPQPMSPRSVEQKRLRQYEAQRRHLSRILVAEENRLAQLSCAQLRTLSRSLMSKIKNQIETLDRRIGELIAQDQTLWEKAQKLTAISGVGARTAALLLAQMPELGQLNRRQAAALAGLAPFNHDSGSIRGKRAIFGGRRALRSGLYMAALSVARFNPILSRFYQRLRAKGKPHSLSQQSCGNSSSLSITPSNPNQSSLEANTVTYDDC

SEQ ID NO: 86557 - protein, 338 aa, unidentified
MKTHVGVDLHQRFCYLTAVDASGKRCRQGQVANEEACLRAWLRRLPAPRQVVVEASGFWPAFARAAVAESERLVMVHPQRVKAIASARLKNDRVDSETLAHLSRCDLLPEAWMADEPTRQLRLLVRLRIALGRQRARAKNQLQAVLHQEGFKKPVTDVFGKRGRAWLAGLELSAAGRVVVDTWLREVDHLDIELAVQTRELERLARADARARFLQTVPGIGAYAAMVILAELGDVKRFPNKRALASYAGLTPVVRESAGKRKRGGITHQGSNTLRWIMLQVAQVAARCSPGARSYYAGLRGRKPAQVARIALARKLLTVVWVLLHHGVCYDEELFIRG

SEQ ID NO: 86558 - protein, 316 aa, unidentified
MVLSPLFVGIDGAKATLDIAVRPTAETWSASNDATGIDALVLRLGALAPTLIVLEATGGSQGPLGAALVAAALPVVVVHPRHIRACAQAVGILAKTDRMDARVIAHCAEAVKPAPRPLPDAETQELRALLVRRRQLVEMVSAERARLDTAPPSIQDAIQAHIAWLTTQVAGLDDALTRASQTHPVWQAKDDVLQSIPGVGPVLARTMLGQVPELGTLGPKPLAALIGVAPFNRDSGTLRGRRTVYGGRAEVRAVLYMGALVATRHNPVIKTFYERLLAAGKAKKVALTACMHKLLTIMNAMVRDLKPWQPQEVPSA

SEQ ID NO: 86559 - protein, 319 aa, unidentified
MKEKLFIGVDVSKSTLDIYISNNTKKKIRNTNSYISKFIKELDKTKIKLIVVEATGGYEQKFVDLLHKNEIPISVVNPKQTKNFSRSLGKNAKNDLLDAQMLCIFAEKMNPRLTKPLTPAQKKLKSLIIRRNQLVDHSKSEKNRLKSPAITEETKESIQGLISFLKEEIKKIEKQIKKVIKENDDFSNKDKLLSEVSGVGNICSATLIGLVPELGTINRKQIAALVGVAPYDNDSGNFSGKRSIYGGRTQVRNILYMATLSAIRSNPCIKNFYIRLIQKGKNGKVALTACMRKLLTALNAMIRDNKNWCTERYLEQKHI

SEQ ID NO: 86560 - protein, 354 aa, unidentified
MSQHHNVTAGIDIGDRYSHLCLLDTDSGEVIEEGRIPTNHSAFEKRFSDSKPMRIAIETGTHSPWISRLLEECGHEILVANARKLRLIYAEGKKNDKIDAEKLARLARLDPKLLAPIKHRGEASQAHLALLRSRDVLVGARTKLVNHVRGAVKSFGARLPKCTAESFHKKVVGYLPQELASALEPVLKTIASLTERIREYDRGLESIAEELYPETGLLRQVHGVGVLTALAFVLTLEDPSRFAKSREVGAYLGLVPATDQSGGSDPEKHISKHGNGMMRKLLVGSAHYILGPFGEDSDLRRHGERIAHRGGKNAKKRAVVAVARKLSVLLHRLWVTAEVYKPLYNGSRREGQAA

SEQ ID NO: 86561 - protein, 397 aa, unidentified
MYIVGIDIAKRKHEAAVIDGEGTVIIKPFSFTNNCSGYNRLLAMLTRAKLPLDEVSFAMEATGHYWLALFTRLQKEVFRVQVINPVQTNSIRSFYIRQAKTDPRDALLIAEVIRFGHFSESTLHPENIYELRELCRGRHAIVSMQADVKRKVVALLDQVFPEYETAFTNMFGDTSMAILQTCPTPKELSEMRLEELCHLIDVSSHKRFRMAKAQELQELARNSFGFAMAGDVFSTMIRLYAKHLDFLKQQVREMDRKIAEIMDTLDTPITTITGIGPTLGAYILSEIGDISRFSSAAKLAAYAGIDPTMRQSGEYNGVRNRMSKRGSPYLRHAIWLAASSAVLHDPALKLYFQKKRDEGKPYMASVGHACRKMVSIIYAVMRDNKAYTPCIPNEISA

SEQ ID NO: 86562 - protein, 413 aa, unidentified
MMTPQDRQVTGGVDTHGDVHVAAALDSLSCRQLGTGSFPTTTQGYAHLLGWLRSFGEVDRVGVESTGSYGAGLTRFLHAQGVEVIEVDRPDRKARRFEGKSDPVDAEAAARAVLSGRAASVPKSRDGLVEAVRALEVVHHGAMKDRTRAINQFKAQLVSAPEPVRDSLRRVSFADQLARARRFPDGHGDAVEREVRWALKELARRIGFLDEQAARLEARIGGLAAQVSPALMGLFAVGPHVAAGLLAAAGDNPGRMRSEAAFAKLCGACPIPASSGKTTRHRLNRGGDRRANNALFTIVLVRMRHHPATRAYVARRSAEGKSRKEIMRCLKRFVAREVFQAITRPPEDLPTGAELRQVRLGLGLSLRAVCNAIGTTPSRLSAIERGRAHDTRLAHRARTWLIEQADNDQPAAA

SEQ ID NO: 86563 - protein, 341 aa, unidentified
MNGSKTVVGVDIAKRVFQLHWIDPESGEIVSLQLKREKFLEHFANRQPCLIGMEACGGAQHWARKLTAMGHQVKLLPGKAVKPFVTGNKNDRQDARAIWTAVQQPHLKAVAIKTEEQQAILALHRMRSQLVKFRTAQINGLRGLLTEYGEVMPQGKAGVRKGITEALARLADRLPAMVIDTLREQWARIERMDSEIATIEQRIKFWLKQDEACKRIAGIPGVGPLTATAAVAIMGDARVFKSGREFAAFAGLVPRQVGTGGRIRLMGISKRGDTYLRTLLIHGARSVLTHAKDPGPWVSALRRRRPLNVAVVALANKMARTIWAMLAHERTYQKGFVSQPA

SEQ ID NO: 86564 - protein, 413 aa, unidentified
MPAWNIIYLDHMSARRRGDPSHSMQVARVAPDWPVAILMRRRRVVGDRITYVGLDVHKDGIVVALAEDGLRGEVRDYGRIANTAAALQRLARKIGQEGVELRLCYEAGPCGYGIQRQLSASGHGCIVVAPSLIPKRAGDRVKTDRRDAASLARLHRAGELTAVWVADAGHEAMRDLVRARLDAVHALRRARQQLSGFLLRQGCHYRRPAWTKLHRRWLAGLRFEQAVHHIVLEDYIAAVEAAQARRDRLTAQIEAMLPNWTLAPVVKALQTMRGMALVNAATLIAELGDLSRFANPRQLMVYLGLVPSEHSSGTSIKRGGLTKAGNSVARRLLIEAAWCYRFPARVSRELRLRQEQQPKPIREIAWKAQLRLCARYRRLARTGKPANVVTAAIARELAGFVWAIARQVPPALG

SEQ ID NO: 86565 - protein, 426 aa, unidentified
MTKAKHTTDARILVGIDISKSRHEVLIAVPGKMRRRRMTVLNSAGDYQRLIAALGGFELPVTIGFEATGNYHRALMYALGAAGFELKLVSSVALARTREALHNSWDKNDPKDAQVILHMLQIGAVQVFHDPLVAGTSDIQELSKTYEMVARAKTELWHRILTHYLPLYFPEADRFHRSSRGDWFLAFLEAFPSPHMITAMDKAAFVAAAWPVIGRRVSKAALLGDIYETSRTSVGLPVTPDSDAIRMFRLVLAQGRSLIQSRNAIEARATELLGDHLDYQLLRSIPGIGPVNALTVLAEAGDLRRFPHHRQFLKFCGMDLATVQSGLFRGRSRISKYGNARLRRTLWIAGQAAVLKPANSFRDKFERYITQDRHNPDLRRKAYTAVAAKMGRTIHAVIKSGEPYRPFFEGASPGGRTSLSPAVEAR

SEQ ID NO: 86566 - protein, 342 aa, unidentified
MTMIGIDPHKQTHTAVAIDDHEVVLDEFTLRASSVQADRLREWSARFEKCEWAVESANGLGYLLAQQLVAAGETVFDVPPVLASRVRVLGSGRSQKNDPNDARSVAIAALRSDRLGRVRPDDHARVLRLLAKRHRDMAQLRNKHCTRLHALLGELAAGGISSELTVSKANAMLDTVVVDSEVVRHRVLIAAELVDDIARLDTILKASKKRVEQAVSASGTTLTSIVGIGPINAATILGYSGDIGRFATKAQFASYNGTAPIEASSGGRIRHRLNPRGNRKINHALHVAAICQLRYEGEGRTYYDRKIAEGKSSKEAIRALKRRISDRVFIVVVHDARRAANR

SEQ ID NO: 86567 - protein, 469 aa, unidentified
MDLLKLPIYTFYCEFLDMEERFMKKVFIGIDVGKFKNSISIIDSEGNPIIKKGISIENDYYGFAKLEEKIDLIMNNYGFTYEDCIAGVESTGHYWFNLRDYLKDIGIETVMIKTDSVKHRRALEEGQKGKNDTLDARVIASCLRNGNYVYIRDNERELRALQKLTRMRNDISDEVVALKNKIHRCIDICNPVFFKIFENLNSKTGVALIKLYPSPQDIINVELDNIKKELGEIVDKPNMRMVSLYKEECEIWSGLIKEPSYAEKVEMIAYIDKFLLQNESKEHLDKQIKEIAKNIIPLYSEFEEIKGIPLIQLISVLSEIGDIRNFKNTRSILAFLGLSLKGNASGKYIGERKINKAGSRIVRKHLFNIMDTLVKHNEYFRIAYCYYKSYNHKNPTKKRSMQIAVMCKFVRVMYGMLKYNTPFDYKEMLKGYYFGDCNIKVFKEEFEGEKRSKKIENYKLAYSIFINYS

SEQ ID NO: 86568 - protein, 407 aa, unidentified
MNCVGIDVSKGKSMIAVMRPFGEVVVSPFEVRHTASELSELARLLKSLDGETRVVMESTGNYHAPVAWLLHDAGLYVSVVNAMLVHDYGNNSLRRGKTDKKDAVKLANYGLDHWLTLPRYVPEEDTRLMLKTCYRQYQQYSKVQTMLKNNLISLLDTAFPDANRLFTSPPRADGSEKWVDFVATFWHCECVCGRSEKAFTTQYQKWCRKHGYNFSEDKALDIYASACRHFGVIPKTDTAKLLVEQAISQLQATSAALAALKQEMQSLAASLPEYPVVMGMFGVGPTLGPQLIAEIGDVRRFPRRSSIVGFAGVDPGVDESGKHSAKSVPTTKRGSPHLRKTLYQIICTYLKKSPADEPVYQFLDKKRAEGKPYFVYMTAAQNKFLRIYYARVKECLEAFDTEPAKQS

SEQ ID NO: 86569 - protein, 350 aa, unidentified
MIIIGVDFHPEFQQIASVDTATGEFEERRLQHPEEAERFYRELAARHAQVRIGMEASGHARWLERLLAELQFELWIGNAAEIRTKRVRKQKTDRQDAQLLLKLLLEDRFPRIWTPSWENRDLRQLLWHRHRMVQTRTRIMNQLQAMALNEGLRCKKRLWRNRGRQQLESFRLAPWASRRRRDLLDLLDRLNPTIAELSQAIQQEAASSPEVQRLMTHPGVGALTALAFVLIIGQVQRFRSGKHVASYLGLVPLEESSGNRRRLGHITKQGSSMMRFLLVEAAQATVRSDSQWRSRYFHLLMRRGRKTAKVAMARRLAICLYWMWRQGWDYQQLTRFGPHAGQPGNRHGVH

SEQ ID NO: 86570 - protein, 430 aa, unidentified
MKRGVVGNPEFSIYVGLDWGTEFHRACVLDASGEVVRECQVDHSGPAITDFVRLLNAMIHGKPERIAVAIEVPRGPVVEAFLEGGFAVFSINPKQLDRFRDRYSVAGAKDDSRDAYVAADSLRTDQHCFRRVAVQHPDVTRLRELSRTEENLSGDLRRIVHQLYQLLLRYYPQLLQLNSTPEEPWIWALLEAAPLPQRGARLTVARLKQLLSKHRIRRWTAEQLHDVLVSPPLPLAAGSADAISEHALLLLPQLRLLYRQRQDIRDRIETLLDGMVAQGREGSEFQEHRDVGLLLSLPGVGCLIAANLFTEGSDPLAQRDYLALRAHSGIAPVTRQSGKTRQIIMRRGCNERLRNAMYHWARCSVQHDPLSKVHYARLRQAGHKHGRALRGVADRLLAILIAMLKSGKPYEASRRQNGRSHDDASPANNP

SEQ ID NO: 86571 - protein, 297 aa, unidentified
MQKISTVRRGAKNVFKGQLTVGLDLGDRFSSYCVLDENGEIILERNLPTTPEAMKQTFGRMLRSRIAMETGTHSPWVSRVLTELGHEVIVAHAQQVRLIVKSRRKDDRLDARTLARLARIDPELLTPVQHRSAQAPLHLAEIRARAGLVSARTALVNAARGLVKSYGERLRKCGTQQFRREITGGLSPGLRGALEPLLREVESLNERVKEYDRRIEKMAQETYPETTLLKQVKGVGVGDLIALAYVLTLEDPHRFRKSRDAGCFVGLQPGRRNSGESEPQMRISRVENLCDHAGWPA

SEQ ID NO: 86572 - protein, 346 aa, unidentified
MGQTERPSSPVDASSFQYVVGVDIGSQTCSCCALKPDKSQALKPLEFANAPAGFTQVQEHLEHLGVPANHLLIGLEATSRYGENLYRFLESRGYQLCLLHPRQTHQFAQQRGLRAKTDQLDASTIARILLSGEARRGYVPTELIATYRELVRLHSHLSDEVARYKNEIHAELFVLFPEFRQIFSDPCRPTALGILKRYPSAQACASAGVEAMTVTLHELAPRHYGRKTAEQLVNLAQHSTSAGIAVSARSSSLKILCDQLEHTQSNLAHLEEEIENLLDADRGATGLQSVPEFGRRTVAVLRAELGDVTRFGRADQVVAYAGLDIQVRQSGKWKGEAKLSKRGSGR

SEQ ID NO: 86573 - protein, 331 aa, unidentified
MGNVTTVGIDLAKNVFSLHGVDADGAVVLRKTVSRARLMEVVVQQPACLIGLEACSGAHEWARRFQELGHTVKLMAPRFVAPYRKNGKNDGNDAEAICEAVSRPSMRFVPIKTLEQQAVLCLHRVRQGFVEERTATINRLRGLLAEFGFVLPQKAGEVRRRATEWLEQMPPRAAGAIRDLREHLRVLDERVKEYERSIEAHARDHEQAKLVQQRLGIGPMSASAIVASVGDMREFKNGRQFSAWLGLVPRQHSTGGKQRLGHIMGRGDPYLRTLLVMGARSVLQRASSQSDPLSRWALAVRERRGYHRACIAVAAKNARVIWAMLNQHAAA

SEQ ID NO: 86574 - protein, 354 aa, unidentified
MIIIGADYHPAFQQIAFVDTETGELQERRLDHPEAAEKFYRELAAEGKKVRVGMEASGHARWFERLLAELNVELWIGDAAEIHRKRERKQKTDRQDAQHILRLLLKDDFPRIWVPSWENRDLRQLLWHRHRMVQARTRMMNQLQAVALNEGLRCKKKLWREAGRKQLEAFRLAPWASRRRQDLLELLDRLNPTIAELTQAMEREVEKCPEAQRLMTHPGVGPLTALAFVLIIGGADRFQCGKQIASYLGLVPLEDSSGNRRRLGHITKQGNSLLRFLLVEAAQVTVRSLPEWRSKYVHLTMRRGRKIAKVAMARKLAVRLYWMMRKGRDYEQFRKFGSHAGQPGHRHGVKSNIE

SEQ ID NO: 86575 - protein, 346 aa, unidentified
MSNSNPKSELVVLGIDLAKNSFQLHGVDASGQVVIKKKLSRNKLSPFIAQLPRCVIGIEACGGSNHWTRGFEKLGHTVHMIAPEFVKPYVKSNKNDAADAEAICEAVQRPSMRFVPAKSIEQQDIQSLHRIRSQAVARRTAQANQIRGLLTEYGIIIPQGISYVRQQLPLILEDADNQLTYLFRELLLGLYEEMTHLDQRIKALEVKLETLCAQNEDCQRLLSIPGVGLLSATALVAAIGDIGVFKSGRELAAWLGLVPRQHSTGGKPTLLGISKRGDAYLRTLLIHGGRTVVRVATNHQDRRNRWICKLEERRGKNITAVAVANKNARTAWALLSKKTVYTVCAV

SEQ ID NO: 86576 - protein, 318 aa, unidentified
MTNITYQFNIGIDIAKQKFDVSYSDQKVASFENNLAGFKLLLKEIKDKSQTRVVMEATGGYEKPLAHFLQAQGVAVSIVNAKRVRDYAKALGRLAKNDVIDAQVIRLFADAVNPKLLPTASETQQALDAQVHRREQLVKQRAMEKQHLETVGNKDAVRSIKRTIAFLDKEIKRIEKALKALIKADSTLTEKVDRLSGVKGIGDITALTLIADLPELGQLTNKEISALVGVAPFCRDSGTLKGKRTTWGGRAQVRSILYMAVLSAVQYNPPLKAFYNRLLMKGKTKKVALVACMRKLLIVANSMLRNNTEWNPNHGKLT

SEQ ID NO: 86577 - protein, 323 aa, unidentified
MIKDIKYFGIDISHLVFDITDSDGNYHQFKNNPSGFKKFVKLLNQQSHCVMEATGYYHYQLAYFLLESGIKVSVENPLAVKRFIQMKLSKIKTDKSDSKAICEYAQKVELKQWKGNTKDEMECLQITRALSVYTKQSTMLKNKLHGEDVLGDPSKAVVRSLKRSLKQLEKEMKTLEDKLLVLVKQEHQDLLTRLKTIPGIGPKTSIMLVVLTGGFDRFTSAAELCSYAGLTPVIRQSGSSVKGRPRISKIGNQKLRNLLFMCSFNACKYNKACRDLYERIVAKGKSKKLALIAVCNKLLKQAFAIAKSGLIYDKEYKSTLVRN

SEQ ID NO: 86578 - protein, 266 aa, unidentified
MSQHYAAIAGIDLGDRYSHLCLLDTENGEVIEESRITTNREAFEKRFSGAEPMRVAIEASTHSPWVSRILEDHGHEVLVANTRKVRLIYGEGRKTDRIDAEKLARLARLDPKLLWPIKHRGESSQCHLALLHSRDALVGTRTKLVNHIRGTVKAFGARLPKCTAQSFHHKVAEHLPRELAPALGPVLETIASLSERIREYDRRLEEVADELYPETKLLRQIHGVGALTALAFVLTLEDPSRFAKSRQVGPYLGLVPATDQSGKSDP

SEQ ID NO: 86579 - protein, 411 aa, unidentified
MRLFVGDDWAEGHHDVEVMDQAGRVLAKKRLPEGVAGIAQLHELIGRYLPEDAADAEVAVGIETDRGPWVAALVAAGYAVYPVNPLQASRYRDRHGVSGAKSDGGDSHMLADMVRTDSHQLRPAAGDTPEAAAVKVVARTHKTLIWERTRAVQRLRHQLREYFPAALEAFEDLDAPDVLELLGKAPDPARAAKLTRAQIAAALKRARRRGITDRTDTILAALRGEHLGLPAALTAAYAATARSLIAVITTLNEQVTILEKQVREHFGRHPDAEIYQSQPGLAAILGARVLGEFGDDPDRYADAKSRKNYGGTSPITRASGKKKVVAARFIHNDRLIDALTSWAFSALHASPGARAYYDHLRAKGIEHNDALRRLANRLVGILHGCLKTRTLYDEATAWGHREDLGQSRVAA

SEQ ID NO: 86580 - protein, 349 aa, unidentified
MRTKPNPDAAAYGIDIGKKVFHVVAMDAAGQPIQRAKFARETLIRFFEAADPVLIGMEACAGSQWLARKLIALGHDARIIPAKFVKAYVKSNKSDTIDAEAIAEAVTRPTMRFVQVRSDDQVDLQALHRIRDRLVRNRTGLMNQARAFCIEYGLAMRTGAGGFHSDVRRHLGNEDNDLSGAMRTLLTSLLDDLDHLERRIAELSKEIEAIAHSDETIKRLLTIPGIGPLGATALVAAAGDGRQFKKARDMAAWLGLVPAEHSSGGKQNLLGISKRGNGYVRRLLIHGARSCFLHLHRETHALGRWLSALEDRTHRNKAVVALANKLTRIAWAILTKPGENYLRTKGAAA

SEQ ID NO: 86581 - protein, 310 aa, unidentified
MERIFVGLDVSKDRLDVHVRPTDEQFAVANEEAGVATLVHRLVGLRPTLIVLEATGGYESAVAAALAHAGLPVAVVNPRQVRQFALATGQLAKTDRLDARANARFAELVQPAARPLATEQAQVLGELVARRRQLVDMLGAEQNRDRQARAQGLRQRIRAHITWLTRAIDELEGEITQLVRSSPVWRETEDLLTSAPGIGDITAHALIADLPELGHLTRRRIAALVGLAPWNRDSGRWRGRRMIGGGRAAVRRALYMPTIVAIHHNPLIREVYRRLTAAGRPKKVAVIAAMRKFLTILNAMLRDRRQWQPA

SEQ ID NO: 86582 - protein, 337 aa, unidentified
MTRYVGVDLHRRRSVIVVLEADGTELWTHRIDNSPLSLGLEIEQAGPAPEVVLEATWGWYWAADVITQAGGSVHLAHPLGIAGYENRRVKNDQEDARLLADLLRMGRLPEAWIPPESVRHQRELVRYRRKLSQLRAGLKAQIHAVLGKEGLLPPLNHLWGPGGAQWLDETEMAEAYETRVRSLRRLIKMYDTEITKLDAYIAAEFKGHPGYEAIQAIHGVGPVLGAIFTAELGDVTRFKSAKHVCSWAGLTPRHRESDTKVQRGSITKQGPPLLRWAAIEAVSKNHGGDAIKQHYQRVAERRGKNKARVAAARKVLTLVYYGLRDYEIRSLAPPEAA

SEQ ID NO: 86583 - protein, 377 aa, unidentified
MADTQLICTVAIELSQSRWVIGALAPRGTKVSINAVPGGDGLRLMEYLGRLKQRLMVEFTEPVDLKVCFEAGYDGFWLARFLRDRGVEVYVLDASSFLVSRRGRRTKTDRTDVEAMAFTLQALLAGNSGVCRVVPVPTPEVEDAKRIGRERTRLASERTRHVNRIRGLLALHGIRRVRALWGGDWRKQLDLLVTGDGRPLGRYLRAEISREFERLHLVLSQIKALEGERRQTLLDPASVFPDKSKVATLTKLAGVGELSATLLVAEVFHRTFKNRRHLASYLGLAPTPYSSGDTQRDQGISKAGNKPARTLLVEIAWTWMRHQPTSVLTTWYRQRFAESGARNRKIGIIAMARKLAIALWHFVEQGIIPPGAIMNGR

SEQ ID NO: 86584 - protein, 363 aa, unidentified
MRESTRVTVGLDVHARSIRLAAVRAEELLEERTLSYDEDAVERLLRRWPGVRCCYEAGPTGFGLYRHLVERGIDCAVVAPGLVPQRPGDRVKTDPRDARKLARLLAGGLLEPIHVPSPELEAIRDLVRAREDARLDRMRDRHRLSKFCLRHGRLLPTSAWTVTRRKWLGEQRFVHTAEQITFDSYLHAIDLVDARIEQLEHAIRETAERGPWRKLVARLRCLRGIDTLSALGIVAEIGDFNRFRTAEEFMAFVGLVPSEHSSGEHRRQGSITKVGNSHVRRLLVEAAWHARRQPKVGYELARRQRGQEPLVLERAWRCQQRLHQRWQRMAGRGKPHQKIVVACARELTGFVWAIATEQPLRSS

SEQ ID NO: 86585 - protein, 405 aa, unidentified
MGKVFVGHDWAETHHDIYVEGMAGTRLAKLRVPEGVEGVARFHELVAPFVEQPDEVTVATETDRGLFVGALVAAGYRVLAVNPMSTSRYRERHSTSGAKSDPGDAFVLAELARTDGHNHRPVAGDSELAEAVKVLARAHQSMIWTRQRQVNQLRSTLREFHPAALAAFDDLASTDALAVLAIASTPSVARGLSRSKIASALRRGGRQRRIEERAVEIQAALRSDTLAAPTLVADAMGASVRALVAVIAELVEQTARLEAELANRFEQHPDAKVIRSLPGLGMILGARALGEFGDDPNRYADTKCRKNYAGTSPITRASGSRQVVLARYARNKRLADVCYQWAFATLTASPGARAYYDQRRATGDTHHRALRALGNRLVGILHGCLRHGTHYDEHTAWGHRTAAAP

SEQ ID NO: 86586 - protein, 326 aa, unidentified
MNIIGVDVSKQKLDCGYFRDLATGKFKTKVWPNTPQGHQALQAWAMRNLGVALSQMTFVMEATGVYHEALAYALHEAGAQVVIVNPAQVRDYAKSLAVRTKNDRRDSLVLARFGATQPWRAWQPEAPEVRELRALLARLTALEKDLQREHNRQEKAQISAASERVLQSIELVVATLEQEKQRLDRLIDDHIDRHPQLKQDSRLLESIPGIGKVLSRHMLAVFRSRAFRSARQMAAYLGVIPVEHTSGSSVRQRPRLSKAGSATLRAKLYLPAVVALKYNPHAKALYARLVAQGKAKKSAIGAVMRKLVHLCFGVLKHQQAYVPPVA

SEQ ID NO: 86587 - protein, 380 aa, unidentified
MKRLRFVGLDVHAETIAVAVAEPGGDVRSLGVIPNRAEAIRKVVKRLGPVEQLRACYEAGPTGYVLYWQLTEMGVKCEVVAPTLVPVKTGDRVKTDRRDAEKLARCYRAGDLTPVWVPDAAHEALRDLVRARLAAKRDQLRHRHRLQKFLLRHGRRPPEKVRAWTETHLNWVRDAVHFDQPAQEATLSDYLNEVECARERIQRLEHAIDEAIVTMPERMRAVVNALQALRGLAKISAVTVVAELGEISRFEKPKQLMGYAGIVSRENSSGEREWRGAITKTGNAHLRRIVVEAAWAYRHRPARGPALRKRQEDQSEEVKAIAWKAQHRLHARYRKLAAMGKPKQKAVTAVARELLGFIWAIAVEVERKPSATATKRSLAA

SEQ ID NO: 86588 - protein, 338 aa, unidentified
MSSNHALGIDIAKDDFHACLLHDGKHFAVFPNQDKGFRDLLRWAESLGAPRPIIAMEATGTYSLPLADFCIQEDLTTYVLNPLLIKRYGGSRKINPNKTDQLDALLIAEYTDKHHGEQDMRPYVPDAEEVRQLRQLSRQLDSLKTQLQGQKNARDQLPKTSAAHASKERHIAFLEEEIARVKQEADKHIASSQELKKTHKLLLTIPGVGKELARTTLAELGDVGRFKHAKDVSAWAGLAPKQHSSGKSVYQEPRLKRGGNFRMRRMLYMGACSTLQSNAWKGFVAHERGKKKEGKVLLVAIMDKLMRIIFGVIRSGTPFEASKTFANLSSSPSQVQSL

SEQ ID NO: 86589 - protein, 361 aa, unidentified
MDNVTRWVGLDVHLRQSAAAVIDTGTGEVTEHRIEGGAAQVAAWLEGLPRPWRGVYEAGPTGYTLARRAAAAGLELEVCALGHVRRRPGDRVKTDARDARRLARLHAAGGLTLVAVPRVEDEQVRDLVRAREDVRADLMRARHRLGTFLMRRELLYPGPGKAWTAAHRDWLSALRLGDRASELTLADYLHAHDLLLARRAGLDAALAEIAEQCRFAPLIGRLRCLRGIQTLTALGLCAEVGDFGRFAHPDRLASYLGLVPSEASSGERRRQGAITKAGSTHARRLLVEAAWHYRRPPRASAALERRQRGQEAWAGAGAWRAQRRLHRRWQRLGAERGKQGGIVAVAVARELSHFCWELAQR

SEQ ID NO: 86590 - protein, 337 aa, unidentified
MIVVGVDVHKQSLTAVAVDEAGRALAELTAGSGGELLAWADSLESERLWALEDCRQLTRTLERALIGAGERLVRVPPKLMAPQRRAGRMRGKSDPIDALAVARAALREPRLDYPRPGEDRLRELKLLVDHRDDLVDERRRAQQRLRWHLHDLDPQLAVPPGALDRPIWLDRIGRRLARQQQTVQVRVCRELVGRCRSLTRTILALDRELQAQIDKTAPALLALPGCGPLSAAKLLGEIGPIERFDTDAQLARHAGVAPLEASSGKHQRHRLDRGGNRQLNCALHRIAITQARMHPPARAYLERKQAEGKSRREAIRCLKRLLARTVYNTLKRSPALT

SEQ ID NO: 86591 - protein, 396 aa, unidentified
MLYLAIDQHRKQLTVNLRDEAGDVILKRQVSTEWKRVREFMEEMRNRSVPEGGFVAIVEVCGFNDWFLKLLTEYGCREIVLIQPEKRSKKKTDRRDANALGELLWTNRQRLLAGKNVQNVRRIVPPSERDAQDRQLTALRHRVTRLRTRTINKVQHLLLKHNMQQECPTKGLKTKGARKWLKELALGTIDRLELDHLLAQWELLDKQLEELERTIQERQAENKTAAIIASIPGAGAFGSLALACRIGSIDRFPHARSLANYWGLTPRSNNSGDATQRLGSITKEGSATARFILAQIVVHVLRRDVGMKEWYRRIKKRRGAKIARVAVMRRLATIIWHMVKRQQPYQAGGSFVTGNGSECVVAPPDRNAFFEGMQGRSRAAKEKGCRSLETTAAARP

SEQ ID NO: 86592 - protein, 395 aa, unidentified
MVAALRPMGKAALLPQEFLHTEVGLEQMAYAIIALGGDTRGVMEATGRYHEPVAAALHEYGIYVCVLNPLYIKQRGGGSIRKVKTDKADAMKIATYGLDNWVDLREYTPMDTVRQQLKLCSRQYNLYMKTVVSLQNNLISLTDKTFPSVNELFSSPERADGHQKWVDFVMTFWHCDCICRVSEKAFTERYRKWCKRKGYHFSTEKALDVYAGSCGHFTTLPKNDNTRLLITTAAQQLLAGKTTLAALRAEMTRLAKQLPEYDTVYAMYGVGETTATQLMAEIGDVRRFPRRSSIVGFAGVDPAVDQSGKHEAQSTPTTKRGSPHLRKTLYQIVYTYLRKAPEGEPVYQFLDKKCAEGKPYFVYMTASQNKFLRIYYARVKECLEAFDARQAIPQD

SEQ ID NO: 86593 - protein, 331 aa, unidentified
MADAKRFVGIDVAKAQLDVALGPDGESFAVANDERGINALLKRLEPSDLVIIEATGGLEVLVASALATAGIGVAVVNPRQVRDFARATGRLAKTDALDAQVLVRFGAAVKPQVRALPDAQAQALEALVNRRRQLVEMLTAEKNRRANSPKVIHKSIDEHIRWLEKRLAGFDDELAGLVRATPIWRERDELLRSVPGVGPVLATTLLAHLPELGALNRKQIAALAGLAPFNRDSGKLRGSRCIWGGRAQVRRVLYMAVVSAVRSNPVIKNFYAQLRARGKYPKSALTACMRKLLVILNAMLHNKTHWHATALTSSTSTLFSLGGAVSEHGCC

SEQ ID NO: 86594 - protein, 343 aa, unidentified
MQVSTIGLDLAKQVFQVHGINTDGTIVLRRRLRRSEVLKFFSMLPGCLIGIEACATAHHWARELSRLGHQVKLIPPSYVKAYVKRGKTDAADAEAICEAVSRPSMRFVPLKSVEQQSALVLHRSRDLLVRQRTMLVNAVRGHFAEFGIVAPQGVGRVGELAALLIEDDATTLPPLARQALRALLAQLHALDEQIASLEAAVIASHRDNEASRRLASIPGVGPITASAIVASVADAHQFKSARHFAAWLGLTPRSHSSGGKERLGGISKQGHPYLRRLLVTGATSVIRYARKKAPGEGGWVKALLARRPARLVSVALANKMARIVWALLVRGTTYQAPGVPTAA

SEQ ID NO: 86595 - protein, 318 aa, unidentified
MTRSADVEWSSVGIDVSKAELVIAVAPSGERWTSATTPEALVAFVARVKTLAPSVVVMEATAGYDVPVAVACAAAGLPVAVVNPRQIRAFAQAIGRTAKTDPIDAEVIALFGERVRPEPRPLPDADTQALAALVARRRQLLEMLHAERQRLEQATATAVRRDLRQHVTWLKRRVADTDDELQKRIQKSPAWREKDDLLRSVPGIGPAVSRTLLAELPELGQLDRRTIAALVGVAPMNRDSGRFRGKRMIWGGRASVRQALYMAALVASRYNAPLRTFYQRLQAAGKPKKLALVAVMRKLLTILNAMVKHNTEWHQQAA

SEQ ID NO: 86596 - protein, 343 aa, unidentified
MTQYVGLDVSLKETKLHVLDEAGHRVWRGRCATDPTAIAATVRRYAPSAARIGLETGPLTTWLWTALTAEGLPVVCLDARHAKKALDMRVNKTDANDAEGLAHLVRAGWYREVRVKGRSAMLAKALLGARSQLLSMSLALENQIRGILKTFGRIVPKGGGGLFEKNVRVLITEDAAIAAVIMPLLQARQVARGNCAALDRRLVRLVQGDATCRMLMTMPGIGPITAVAYAAALEKAENFKQSRAVGAWLGLTPRRFQSGEVDYDGHISRRGDRQLRALLYEAAAVLLTRVRRESALRRWGLMLWKRLGFKRAATALARKMAVVLHAMWKSGTSFNPTLGTVKA

SEQ ID NO: 86597 - protein, 370 aa, unidentified
MGEVTTFVGLDVHKATIAVAIAVGGLREAAEFLGTIENTPQAIAKLLAKLRRKHKHLSFCYEAGPCGYGVHRQLTAAGEACSVVAPALIPRRAADRVKTDRRDAISLAQLHRAGELRAIWVPDAAHEAMRDLVRARLVAVQAVRRARQQLSGFLLRHGCLYDGKTAWTRTHRRWLSGLRFAHPAQQIVAQDYIAAVSDAERRRDALNEQIRLLLPAWSMAPVVNALQALRGVALVVAATLVAELGDLTRFENPRQLMAHLGLVPSEHSSGATVRRGAITKTGNAAARRAMTEAAWTYRLPARVSRALLDRNEGVDKTVRDIAWKAQTRLCARYRRLAAAGKPTQTVVTAIARELVGFAWAIARHVQPAHA

SEQ ID NO: 86598 - protein, 434 aa, unidentified
MEEVTDEPLYRDRVCGIDIGKAQMAATIRVPSDSNPARRASETRSFGTTRREVLALADWLRCWQVPAVVMEATSDYRKGPFCRLEAGGFECVLADARQVKNLPGRPKRDPSDSRWLAACFERGAVRPCFVATPEFRIIRLHTRCRRDLTEERTREKQRTEKLLESAGIKLSSVISRLHLVTGRDIMDHLIAGERNPKVLAQLARTAARRKIAELEEALEGAEFFTAEHAALLAMMLARIDRLTAGIDELTTVIERLLAPYEEQLQQAESMPGWQRRAAQDALAETGVDMTRFPTGAHLASWAGRTPVDHQSGTRKGRAKAKKGNRYLAGITGETAVAAGRTQTRDGVRHRRLARRRGTAKACVATGNTQLKASQLLAGPGTRYQDLGPDYYERQASIRRQIAHHVGKLGALGFEVTLCRIPEPDPDPAGQTQAA

SEQ ID NO: 86599 - protein, 331 aa, unidentified
MKRCNRVGVDVSAKELVVAIEASGRREAPIVLTNDADGHRKLVKLATKRGASARVVLESTGTYGLDLALALHRAKRVEVMVANPRAIAHFARASLQRSKTDRLDAEAILEFAVRMPFEPWSPPAPEILELRALSRRIEALSKTVVQEKNRLHANDQSEELSEFVKEDIRELAGLLESRITKLRKQALLVIAQSEDLSAAFAHITSIKGIAEASGIAILAELAVLPADMTTRQWVAHAGLDPQQFQSGSSVHKPARISKTGNAHIRRALFMPALVAVQWEPHIKGFYDHLLDRGKTKMQANVAVMRKLLHAIHGMLENDQDFVGEKFFAMKG

SEQ ID NO: 86600 - protein, 370 aa, unidentified
MKTTTTEHAVAGIDPHKHTATIAIVDSRGGVRESASFPVTPQGITELVGLLSDSELVIDRIGVEGSAGLGRPLVLALSAAGYDVREVQANRTAERRRRRRRAKTDAEDAEAIARETLADPQLPPAGKHRDPTPAWQTLAAIRDWRRSLVLHRVRLLTEAEAVLVSLPVTVRATLPSTSRVLPQLHALAANTDNLALTAADHIKIDRLLATLTDITTITQRIKTLDRQIPAVLNDLGCTLTEICGVGVVTAMELHTEIGDPLRFQTEAQFARWCGSAPVALSSGEGHGPARHHRLDLGGNRNVNSILHIIHVTQIRCHPPAKSYMNKKLNENKTKRAARRAHKRQLANHIIRHMWNDAQRSTQTTPAAAAA

SEQ ID NO: 86601 - protein, 520 aa, unidentified
MISSESDIRRHCISSLQPALSVTAMKAFSLAHMAHSGNTEFSSLPEAPARTAGQVHAHCARFRSPYAAQDKPSVLGSTNPDRNGGDIMIKINYMSTLFVGIDVSSKSNVVCAMDFDQNKYISSSFGNNQPGADDLADMLADCMQQHKNLDTIVIALESTSVYSVHISNFLSTAEVLMPYKPLVFCVNPKATANYRRSYIGMEKTDPTDAFLIADFARVGRIKNLNPWRGAQFIALKRLTRHRMHLSECLTREKTYMVSNMYLKFSELQLLDDENQPFSNIHGATSSAVLTEFLSPQEIIDLSEEELLKFLAVKSKNRISDLSKTSELLRKAARDSYRLDKCMYEPLNISLASSFNCIHTFQKELKLVDQAIENCISGMTPNALIILKSIPGVGPLLASGIISEIGDITAFHSSDALAKYAGLYWLKNDSGNFVSEDNQLSRAGNAYLRYYLGEAANSVRRYIPEYREFYEKKYAEVTKHQHKRALALTSRKFVRLVFGLLVKNQLYTGEQLDAEPNIISN

SEQ ID NO: 86602 - protein, 458 aa, unidentified
MIRYWAGVSFFAVTPSDQPTERNPRVQPIWPGVGILRCRSLPKCRRIRGDFTLICGEREKPETDGMDPARYKRPRNGPRMCEKHPKSEEGSEMEVTTIGIDLAKSVFAVSGADSRGRVVIRRQLRRAQVMGFMRGLPRCVVGMEATGGAQYWARQFTALGHAVRLMSPALVMPYRKGNKTDRNDADAILEAVSRPSMRFVMVKSVAQQDLLALHRVRAQLVKSRTALCNQLRGLLRERGVAVRMGVAALKRSLPAALADESSELSGEMRELLSEMSQWLRTLEQRIASCEARITRKFKHDERCVRLAEVPGVGPLTATALVAAVGNAQRFKNGRELSAYLGLVPRQHSSGGKTVLLGITKRGDRYLRTLLIHGARSALRQCKLKGDARSDWARRISAARGPNVAAVAMANKNARILWALLSRGDRYRSSRVLTRAVLRPGSPPPVKRARGAKLRVAKD

SEQ ID NO: 86603 - protein, 426 aa, unidentified
MNENEHSRLEAFRQLRAEIRGSREHLIVGIDVAKEKHHAFFGTATGQTLFRRLIFDNTLIGFGKLLTQVRAIQVAQSLPKVVFGLEPTANYHKPLGEHLIKCGRIVVLVSGVAVKRNRELLDGRWDKHDTKDSANIADLISQGKCLYYDYPEMGLRDLRTLLSLKKKLKKQEHSYRVRIRNHLLAQYFPELDRFSGRPEVEPIVRWCLDTSELAGLEFDQFVQRVVPGRKTLAQHQRLQTIQQLAINSIGCEMGEGAHFEAQVMVDGLRQLRETIKTTDKQIRETCRQFPEYGYLLTIPGFGPDVSAKVIGALGNPFRFQNRKQVLKMAGLDLNADRSGKTSDTATPVISKKGKADLRYALYQAALIASTHHRPWIEYYTDQLQGRGKEPGIKTKRWVKLSAKFLIIAWTIMKKKEPYNPRYLNPA

SEQ ID NO: 86604 - protein, 358 aa, unidentified
MDKIKSSKLDCTGQPLYVGLDVHKKSWSVSVFSRYGEYKSFTQPPQVDTLVNYLRRHFPGGEYHSVYEAGYCGFWIHDQLQERGINCTVVNPADVPTKQKEEQHKRDRIDCRKLARGLCNGEMEGIYVPAPWMREDRTLVRTRQAFVKKRTRCKNQIKGMLLFYGIHLTDEQTFAPWSGRFIKWIESIRMERDSGNTALKAHLEELAYLRQLIAKVNRAILKLARSEEYATPVTVLKSAPGVSTLTAMILLTELCDMARFASLDSLCNYVGLIPAIKSSGETEYVRGITPRRNAHLRWILIEASWVAIRKDPALMMAFAQYCKRMGKNRAIVKIAKKLLNRIRYILKHQTPYVPCVTE

SEQ ID NO: 86605 - protein, 343 aa, unidentified
MEEVSIIGVDLAKNVFQLHGAAADGAVVFRKKLSRLQFARFMVDHPACDVAMEACPSAHHWARELTAHGHRIRLIAPHYVKPFIKRQKNDAADAEAIAEAATRPTMRFVEPKTEAQQARAVAFRAREQIVKQRTEAINALRAYLYEFGHVAPEGVGYVPRLAKVVDDPGSGLPDLARDICRMVLEQIDLLSARLTAVSAKLAAASRAAAMPRQLQTMPGVGPITALAVETFAPPMNQFRRGRDFAAWLGLVPRQHSSGGKQRLGKTSKMGQRDIRRLLVTGAMAVVRWALRRGAPPNPWLERMLKRKPPMVAAFALANKMARRIWAMLTRGEDYRDPVIASAA

SEQ ID NO: 86606 - protein, 523 aa, unidentified
MATKAKSRTRKTATKRFIGKPTGHVQERVQACGPQHFGIVAVDCAKRRSKWILCDFFGRVLIEPTTVEHRRGDFAAMIASINDACEAENITDRIAAVEMTGIYHKPVQAAFRKAGFDTRIVHPFASSHYRKPLHPDAKTDDNDLEAIFHAAVAGYGLASLPVGEVYQHLQALSRHRHNLVKQQARLKVQIRRLMHQAMPGYADLWEDDKLYHKSIAIPIALAFPSAALIQNVGTEGLAKHLREHKIRFQARTLERIVTWSRTATEPSELSSLHTRQWRDLNSLRESFHDQIHAVEREMSGFLVKTPYVLLLSVTGINVVSASRLAGEAGPIEHYASARAINGRAGLYPSRYQSDEVDNPDGKLVRQANRKLRSAAMLVAENLIKCHPYYRGLSNTWKQRKVDPRDRRCRIANRAMRMVFQMVAGRQLWRGKGVDREYLLAKLQTFHQNHQTPITQSVAELNDAFAWLPKSSYAQEAKPLSELTRKKRRGPMSLGDLLVPLLARLGVGNPEAVESETSEARSSR

SEQ ID NO: 86607 - protein, 346 aa, unidentified
MKHFAGLDVSLEETAICVVDETGTMVREARVSSEPEALVAFFRGLGLVVERIGLEACSLSAWLHESLVAASLPAVCIETRRAKAAMGAMPNKTDRNDARGLAQIIRTGWYRAVHVKSPTCRSWRALLTARRLVLNKMRDLENGLRALLREAGLKLGTPARKEFAARLRELTAADPGLSVLAEPLLTIIAAMTRELAQLTKRVLEIVRDEPVCRRLMGVPGVGPLTALTFRATIDQPERFRHSRDVGAHLGLTPKRYQSGETDVQGAISRCGDELARTALYEAAHSLLVRSRRWSALRAWGMQVAKRRGMARARIAVARKLATILHRMWADGTEFRWGKEGPMPAAA

SEQ ID NO: 86608 - protein, 311 aa, unidentified
MYYIGIDVSKKDLSVFNGKDLNFINKEGLKSFKKYLKKKYRLSEIAIIFEPTGIYSFYLKEFCAENSIKAYIINPKQSHNFARALGIRPKNDKIDARTLYKFHKLIDLKDIKVPKIDQQTKTLSSYLVSYEFALKQRISLSNHLESLRDKRLIALMKKDLKRAKKLEDKLFNDILEYVSKNQNLKEDYQRLLTISGVGDKTAIALLTLFKTYQGTNRAQITALAGLDPVKRESGSSVKYKVKISKNGKGIYRKIFYLPTVCATVHNQKIRVFYQRLLANHKPKKLAIIASMRKILLIAHAMYRDKTEYVTV

SEQ ID NO: 86609 - protein, 401 aa, unidentified
MKRLSGGIDVGSESHHITILDEEDNILYNQKVSHQLSEFAESIKLFKQIEKKEGGKLSFALEGKNGYSTPLDKILLDQGFTLYNVDNLKLKRFREAFAGEWRDDQRDALMLSKMLKLKEHINSPKEKVFIKIEKPSPLTESLKLLSRHQQTLIDEKVRLTNRLGKKLLEVCPQILKLGKLKNKKIIAVLAKYPDFSKYKRITLCSLLKIRGIGKKGAFFLLKRLNNIEYMPGLTDIYQTIIFSYAKRILELQKEIEDLDKKLDEIGEESKEVKHLKTIPGVATKLASRLIGEIGDIERFPSEKQLAVYCGVACVDNNSGKVTKARAVYKANKICKHTLITMAGGSIRFSFQCRDYYLKKRAEGKSHNHTLRCLARQLIRVIYKMLTEDRDYMVRKELRKVA

SEQ ID NO: 86610 - protein, 319 aa, unidentified
MHCIGVDVSKQELVTFDGEQEHVFPNTHGLPEFRRFLNRSENVLVVFEPTSTYSRRLETLCRTQQVWCCPLNPRVVPHLRQVGKGRSKTDSSDAELLYRYGIERGHSEAVLLESDSLAESIQARFACYRVAQKARVACQGVAEALSQDPATSRELLAELEEEIAELKVKERHHLVAAEQLVEEDAQAALRLAVLLSIPGVGPITALTLLSLFRKYRDANRRQIVALAGLDPIQFQSGTSVHGKSRISKRGNREVRKRLYEATLSAARYNPSVRAIYQRLKEQGKPEKVARIAAARKLLLIAHAIYCSGDPYRNPSEKEG

SEQ ID NO: 86611 - protein, 347 aa, unidentified
MGKSITDLSSVTTVGLDLAKHVFQVHGADASGRVIVVKALRRKDVLAFFAQLPECLVGMEACGSAHHWARELIKLGHDARMMPPAYVKPYVRRQKNDAADAAGICEAVTRPSMRFVGVRTLENQAALMHHKLREMLVAQRTQLINALRGHLAEIGVIAAQGLKNARDLAGVIKAEGDETIPACVRAALAPLVRQLHALDQEIARSDQTIAAMARDDEMARRLMTIPGLGPVTASAMATSVQDVSVFSGPREFAAFLGLTPRQNSSGGKERLGRVSKMGNRYLRKLLVVGAHAVLYHRKPHDDALRSWAKKLMQTKPFKLVAVALANKMARIAFAIMRGKTSYSAAPA

SEQ ID NO: 86612 - protein, 399 aa, unidentified
MRIIGMDIHRSFAQVAFLVDGQVTQETRVDLARDRFLKFARTLEKTDEVVIEATGNSMAVERILRPFVKRVAVANPRLVRAIAFARVKTDKIDAAMLARLHAAGFLPEVWVPDDDTIRRRRTVTERMGIVEHMVRTKSRIHAILHGNLIPKYEGRLFTKAGRAWLAGLPLPPEEQALVSRLVAELERVSAQLAELDKGIAQQALDDPQARRLMTIPGVGTVVALTVLASIGTIARFSTPEKLSSYFGLTPTTHQSGDHPARHGHISRQGNAAARAMLVEAAWSAKMAPGPLRAFFNRVQKKAGAGAAAVATARKLTVLIWHVLTEEKDYAYARPAFTAMKLRRASLKAGAPREYGKAGPSRDYWIKEIRQREAEYVERAERAYERMVDAWKDRPSGRAG

SEQ ID NO: 86613 - protein, 320 aa, unidentified
MSASSVVVGIDVAKAHVDVSVLGAKPDAQRFDNEAEAHSALAATLKPLGVALVVMEATGGYEAALACALQAAGLPVAVVNPRQARDSAKSMGRLAKPDRIEARMLAEFAAVLVRRDDLASLIRPLADAQQQALAAMVTRRRQLVTMMLSERQRLQLAIAVVRPSIEAMIEAIRKQLDDVEAQMVSHVQTHYAELDKLLRSASGIGPVASATLIAELPELGKLNRREIAALVGVAPMANDSGNSKGRRRVQGGRFEIRRVLYMATLTAARHNPTIKTFYDRLLAAGKLPKVALVACMRKLLTTLNAMVKTSKPWDKSFHGA

SEQ ID NO: 86614 - protein, 394 aa, unidentified
MILVGIDIGKNKHTFSIIDKNSGEILLSPSDFSNNLKGFLFLIQKLSSYTKSELLIGMEDTGHYHFALLKYLLDRRYTVALINPTTTDLTRKLQGGITKNDPLDSLTICDVISSNHRNKPYRVTKLNRFDLYEQKQLTRHHHNLKEELNTYKNRLQKCIDIVFPEFNSLFHSKYGIVYMNILKTFSSAKAIANADIRSIRKCFEFKGQGKRISLSAEQLKLTAKSSIGIPSVAEEIQIRHLVSQIELLEKQLSEIDKRIEEFSLKNNSPILTIPGISHFSGTSIISELGDICNYTKASQIIKFAGVAPYHYESSQFTAQHTAITKKGSKYLRKTLYQIILPVISNNKVFYAYYTKKLNEGKGHRCAQGHCIRKLLRVIYHLLSTRQPFNSKLLV

SEQ ID NO: 86615 - protein, 391 aa, unidentified
MTSNIKYVGMDVHKQSISIAVRNAAGKIVMECVIETKANTVLQFFDGLRGEVRVTFEEGTWAAWLHDLLKPHVGKLVVCDPRRNALLLDGNQNDRVDARKLSDLLYMNKLKPVYHGDHGLRTLKELVRSYLTITRDLGRVMTGVKAIYRSWAIPCSGKQVYGSRHRVEWLGKIHEPGVRLRAEFYYQQLDTLRALRQTVRRELLAESKKHKAWKQLCRVPSIGPIRAAVLLGILQTPHRFRTKRQLWTYSGLGIEIHSSADHEVAQGQLRRKKKPVEIRGLNENCNHDLKNLFKGAAVVASTKPGPFRKILRGFSGQGHAPRNGAADLSQEDCHHRFDCVEERGALRRQSSETTNSLSVSDRVRSILGIFSGGGLWVLETPWCESESQLVS

SEQ ID NO: 86616 - protein, 308 aa, unidentified
MMTTPVHVGVDIAKGTFAVRLLNRNLTHANTPEGHAAFITVLPAGAHVLCEATGGYERALVQALHRAGIAVSVLNPRQVRDFARATGRLGKTDRIDAQLLADYGASLRPQADPAPTAAQLRLAALVSARQDLLEMLRAEAGRAEHLELPVLKRQHASRVRLLEKQLAALDRELAESLASEPELEAKAARLQSVDGVGPVLAHTVLGLMPELGQIGGRQAAALAGVAPFASDSGEHKGRRRIAGGRPAVRRVLYMAAVCASQHNRILRAYYLSLLSRGKPAKLALTAVMRKLIVLLNRLLSDPLFILAR

SEQ ID NO: 86617 - protein, 341 aa, unidentified
MKKNSFFIGLDIAEADFAASIYKTPDQPIVTKEAIPNNPEGFDLLLLWLYDHHIDKTNGHICMEATGVYSQAIAYYLLLAGFPVSVEPPLKVKRAFDPIGHKTDPVDSKQIAEYAYRFQDELTSWQPRDEILEKIRQLLSVREQFTKQKVASKNAMHAYSKQRVQVTLIKKAHQETLAQIEKQIARIDKELAKLIKQNPQILQKADYLKSIPGYGMLLAAHLLVITENFTKIQNSKRLASFVGIVPYQHQSGTSVFKRAKIRHFGPGPSRKLLRLAAQSVATHDVTFRRYYLRKLAQGKAKSLVLNNIANKLLKVACAMIRNNTRYIKEHRSIHPMYLKSA

SEQ ID NO: 86618 - protein, 427 aa, unidentified
MIEINTCSDFAALIGLDWGWDSHAIALAPADGPTQTSTLKHSAESLHQWLDQLEKTFEGRAVAVAVEASKGAVVAALLERPWITIYPIHPATSTRQRSAFRPSGAKDDTPDALVLLFILQHHRNRLRPLQPDDEATRTLANLVEARRKAVDRRSLLANQLKSTLKNYFPQALDLVGEDLAIPMALDFLDKWPRLTDVQASKDITLRSFYYRHNIRRAELIQSRIDFRRSARLLTRDSAIIEVNVRIVRMLVAELRVLAEHIIEFERAIEEAFAEHPEKSFFRELPGAGPVMAPRLLAAFGTARDLFPDAASMQRYFGVAPVTEKSGGRRWIHWRWNAPKFLRQTFVEWAGQTVVFCPWAKANYEQQRNKRTGHHAILRALAFKWLRILWRCWQTHQDYDQEKYLQQLEKRRSPIAARARQLNLQMAA

SEQ ID NO: 86619 - protein, 333 aa, unidentified
MGIDLHRRRSVVVRTDASGQVLESARIVNDVDRLVEVIARAGEGPEVVLEATYGWYWAVDALQAAGARVHLAHPLGVKAFEYRRVKNDFRDASDLADLLRLGRLPEAWIAPPATRELRELVRHRAKLVALRSHCKAEVHAVLAKCGVQVVMSDLFGVAGTGLLDGLELPAPYAARIASLRRVMEAVDFEAEFFAGMVRVRLAADPGYAAVRTIPGIGPVLGAVFVAEIGEVTRFGAAPQLASWAGLTPKHHESDTHLRRGHITKQGSRLVRWAAVESVQILPKTTAVGQLRDRVAARRGHNIGVVAAARRQIEYVYYALRDHHVRALHSPAAA

SEQ ID NO: 86620 - protein, 383 aa, unidentified
MEALLYCACGLDVHKDIIEACIMRGIDAEPEIIRDSFGATKPELQRLMQWLLDNNCYTVAMESTGVYWKPIYQILETESVYLEQIWVVNAHHMRNLPGRKSDVKDAEWIAKLLRHGLLEKSFVPCIAIRDLREVARLRRTFVQERCRYVNRLEKFLQTHGFKFSSVMSDILCMSGKKLLHILCETGTLTQKDVQENCRRLRRSSDEIAAAVCGNLTAAERRLLARLLHKLDSCQEDIDGILEDMRLLCSPFQEQLAIVDSIPGFDQESSMEIIAEISAAPQEHFSSPQRLCKWAGVVPRNDETAKKIKSKKILHGNTYVKSILCQAAWAAVKVRGSPFHNWFWSHQRKIGQKKAIIAIARKLLMLIYLLLNTGQMYRPPVTET

SEQ ID NO: 86621 - protein, 381 aa, unidentified
MTTTATHNGHDTTPERVLFVAFELSEKTWKLGFTTGHGQKPRERTVTARHHEHVLNEIAQAKRRLGLPETAPVVSCYEAGREGFWLHRFLQAQGITNHVVDSSAIEVNRRRRRAKSDGLDVRKLLSMLMRYEQGERQVWQVVKVPSVEAEDQRHLHRDLETLKQERASTTTRIQGLLSSQGIRLTSLSKLPEQLDALRLWDGSPIPPGLRRRVLRVYAHHTFLSEQIAAVEAERRAQLQTSSEASIDKVRQLMQLKGIGINGAWLLVMEFFGWRAFKNRREVGGLAGFTPTPYQSGESAREQGITKSGNRHVRWMTTELAWSWLRFQPDSALSVWFRERFGSGGKRLRRIGIVAVARKLLIALWRFLETGVLPEGAGLKEG

SEQ ID NO: 86622 - protein, 335 aa, unidentified
MKNIKETLGIDVSKCTLDTQLHVTAVQTKVTNDLAGFKKLLSWALKSSGVEKCELLVCFEHTGMYSIQLATFLEEKGITYCMMPAIEIKRSLGMVRGKDDQVDAKRIAHYAHIRRDTLKETKLPTKLLKELKALLSLRGKIVAQKAGYKAHLKELKRVFKRAENKDVFEVEEKLLKSLTQAQLKLEKQINKLINSDPEVKRLFNLITSIKGVGPIVGANLIVVTQCFKSFEKSRQLACYCGVAPFKKQSGTSIKGRSRVSHYANKKMKALLNLAASSAVGSDKELKAYYQRRIEKGKSKMSTLNIVRNKLLHRVFAVVKRGTPYVETYQHKVNFC

SEQ ID NO: 86623 - protein, 464 aa, unidentified
MPDARRRPPRARRSSAVLDHLNPNAAGIDCGSASHFVAVPVDRDPTPVRSFPTFTADLHRLADWLTTCGVTSVAMEATGVYWIPLFEILETRGVTVLLVNARHVKNVPGRKTDVSDCEWLRDLHIVGLVRGSFRPADAMVTLRAYLRHRASLVESAGAHVQRMQKALVQMNLQLPLVVSDITGATGLRILRDIVAGQRDPHQLARHRDYRCRASAAEIAAALTGNYRAEHVFVLHQHLALFDTFQQQITACDTAIEAHLTALVAQTPAPTTPLPPARPRQKPRDNQPPFDVRTPLHHLTGVDLSQLDAIGPYTALRLLAEIGTDMTRWPSPHHFTSWLTLAPKNKISGGRLLSSRTQPSANRAAALLRLAAMSLGRTQTALGAFYRRLAYRIGKAKAITATARKLAILVYRMLKGELVYHDPGAETYDAQHRDRLLRRLRQRAATLGYALVDLSTGALVEPAVS

SEQ ID NO: 86624 - protein, 369 aa, unidentified
MKKIIKYIGLDVHKNSIAIAIAEDGQKRDVTFYGEINNDMDQLHKFLRKQISKGVEPRCVYEAGPCGYNIYRSLKDKGIDCVVIAPSLIPKKSGDRIKTDRRDAESLARLHRAEELTAVYVPSMEDEALRDLVRAREDSVNTLKRAKQQLGAFLLRHHICYSGKSKWSKAYFNWLADISMPHPAQQITLQEYIDMVQDGKKRVERISAQINELAERSQLFELNKSLQSLRGVSQIVSTVVLSEIGDLTRFESPGKLMAYLGLVPTQHNSGDKKRPGKITKTGNGHVRRALIEAAQAYRLPARKSRAIAKRNEGLPQEICKIAWQAQVRLCGRYKRMIFKGKNSNLVKTAIARELAGFMWAIANAIPKTA

SEQ ID NO: 86625 - protein, 400 aa, unidentified
MRAVFGIDVSKTSSEVAILVNGEKVHGYTILNDAIGFNRLLGDLKTVHNPEIIFEATGVYSRRLQAFLEEYSYAYTRLNPLEAKKQLDSLRVRKTDKIDAEKLAKSQLVHNRKPTYVQEEVYQHLRDLSRFYQNMTEDLVRTKNRLHKVLQVTFPELETLLSTPTGEQYWNLVMAFPCKEFVLSLSQSNLCEIVRQSTSKRISEKRIAYLTDKLIKLAKQSFCAVKNTSPMLEEVRYYAQELLRLSERRQVVLNDMVALAQPLPEYDILRSIPGIAETTATSIIGELGDIRRFQSSNQINAFIGIDLRHYESGNFLAKEHITKRGNPYARKILFKCIHNIASASHTNPCHIADFYEKRKRQSQVTSTKPHTIASIHRLIRTMYYLITHNKLYDYSLTQNR

SEQ ID NO: 86626 - protein, 411 aa, unidentified
MSGKDTRIDHHRLVKVLERWSFLMTYFVGIDIAKHSHVACVLDQFGEVHIQAFEFSNDLSGFKSLITTLSSFPKEDTIIGFESTAHYHENLFYFLNHNHNYRCELINPLVSSRFRSLSIRDIKTDKVDALSIASFLSFNSSKVGRDTFIINELKYLCDDRHELIKIKSKLYTQLTAALDRVFPELKPFLKNNLKSNIAHNLLKNFSTASEIEKVRVDKLYNVVSPNTRQFSKERAKDLKQLAQMSIGFHSNSLSKRIKNFIHQIELIESQIDDVQHSIIEHMQALDSPIIQLPGMGYIQAAYILSVIQNIQRFDSACKVVAFAGLDPKIRQSGQFEAKKTRMSKRGNKLLRYALIWSANNIRKNSKTLGTYYNKKRSEGKSHYNALGHCATKLVNYIFFILNNPEKAFILE

SEQ ID NO: 86627 - protein, 309 aa, unidentified
MSAYAGIDVSKATLQVALFPKADELCVPNTEEGLASIAEYLSAHQVERVLVEATGGYEKLSVKLLANAGFKVQRINPVRSRQFALAMGKRAKTDPIDAQMLAMFASSLEAKGFAKPDEEREVLLELVNLRNNLLQQRDDNRRRIKQALLPSVVDIYLALEASLKVQIKAVDQLVDAQARKVDSELLQRLHAVKGVGPVTIASLFCYLPELGDLSRGQIAALAGVAPYNNDSGSKVGKRQIYGGRTKLRRATYMCALVMVRYNADFKERYARLRAKGKCAKVALVACMRVLLIRLNAMVRDGTPWRDHAV

SEQ ID NO: 86628 - protein, 344 aa, unidentified
MDHFAGLDVSVKETSICIVDDAGKIVREVKVASEPEALLAVLKNPAYHFKRIGLEAGPLSQWLFSALAEAGLPVICVETRHMQAVLKAQINKTDRNDARGIAQMMRAGLYRPVHVKTIRSQKLRMLLTHRKLLQSKAIAIENDLRGTLRNFGLKVGMVGKVKFEARIRELVENLPDLAVLVEPMLIVRRVLREQIVILHRRLLAIVRDDEVCRRLMTTPGVGPVVALTFRATVDVPARFRKSKAVGAVFGLTCAKYQSGEVDRNGRISRCGDEMMRVMLYEAAQSMLRSKKWSWLKAWAMQIARRRGMKKAIVALARRLAVIMHRIWVDGTEFRWTREQATAAA

SEQ ID NO: 86629 - protein, 415 aa, unidentified
MEVMHPRCAGIDVSKRDAKVCIRVQGSGGRRTSSTVTTWGAMTNQILALRDHLAAQQVTVVVMEATGDYWRPFYYVLETDFEVMLVNARSVKNVPGRKSDVSDAAWLADLGAHGLVRASFVPPEPIRQLRDLTRTRTHITRERTREVQRLEKLLESAGIKLSSVATDITGVSGRLMLQALIDSQGTADPAVVADLAKRRMRSKIPVLTEALNGRFTAHHAFLTRLFLDRIDAHTKDIAALSERIDGLMAPFLPARDLLESIPGFSQIIAEVFIAETGGDMTQFPTPEQLASWAGVSPGSNESAGRVKSTKTRPGNRYLKGALGVAALNQAKSKKTYFSARYRRLASTRGPMKAIVAVEHAMLTAAWNMLTNAEFYRDPGADYYTRQNPAKTRARAVRQLEALGYQVTIQPVQQAG

SEQ ID NO: 86630 - protein, 327 aa, unidentified
MDRAAEQDRAAEQTVFVGIDVAKAKLDVHVGPDLDCFSVENTVGGVRQLIERLRRFPVKLVVIEATGRYERRVAADLLAENFEVAVVNPRQTHDFAKAMGRLAKTDAIDARSLCLFAQCIGPRPTPMPAQNQTLLEERVTRRRQVINMLTMERNRLQQQSVDRKVISSIKRVTRVLEQQREDLDRQIAELIDRDDDWRGKHALLKSVPGVGDATAATLIAELPELGKLNRQQIAALVGLAPFNRDSGTLRGKRAIRGGRASVRSPLYMAALAACRCNPLIQAFNQRLRAAGKPFKVAITACMRKLLTLLNSLIRDNRHWSPQCPRPA

SEQ ID NO: 86631 - protein, 347 aa, unidentified
MLADELDYVVGVDTHRDEHVLAVVAAPAGAVVSVAAAAASGRGYRELLGVAERLASGRRAWAIEGSGSYGAGLARFLAGRGETVLEVSRTPRSSRRLHGKDDTLDAVETARAALAAERLALPRSGVQREALRLLLIARRSAVDVRRQALVQLRAVVVTAPDELRRELRSLPTGALLKRCSQLRRSSGPSDEVTNRLVLRSLARRAQAATAEADELEREILAHVRLLAPALLDEPGIGPIVAAQLIVSWSHHGRVRSEAAFARLAGVAPIPASSGQTQRHRLSRGGDRQLNRALHTIALYRRQHDAATRDYIETKVAEGKSRRDATRLLKRYLARHLYRLLEKQPAMT

SEQ ID NO: 86632 - protein, 415 aa, unidentified
MEGLSPLYRRVAGIDVHRMLHVVTVLIEQPDGSIAKHSREFGGFKRDCRALAQWLVELRVQLVVMESTGIYWKSVFSHLENAGITAWVVNAHFIKHVPGRKTDMLDSEWLAVLARFGLVRGSFIPPKDLRELRLVSRYRRKLNALCSGQINRLHKILDDAGIKLGAVVSDIHGVSARAMVRGLIEGQSEAVLLAHARGTLKRKTEELAASLDGDLSERHLFVLRHLSDSIEALQRQLAEIDAYLMAAMKPYAWAHDLLQTLPGIDQVAAALILIEIGDDMSRFGSPQRLACWAALSPGNHETAGKRKSGRTRHGNNVIRYILCECANAARWTKSTLAAKYKSLMVRKSHKKAIVAVAHKMIRLIYILLSRREPYRDQAIDYAAISAKKNAPRWIKQLKAIGKWPTPSIPAPRTAV

SEQ ID NO: 86633 - protein, 380 aa, unidentified
MTASQTVLQGKDTANQGDLYVSFELGDKQWKLSCNDGRCRRSPSRYALDAGDKAAILDCIRKAKTRCGLDLHAKVHSCYEAGRDGWWLHRWLLEQGIDNIVVDSASIEVNRRARRAKNDRLDADKLLAMLLRWHGGELRVWAVARAPTLQQEDARRVDRELQRLTSERTAHTNRIGSLLVMHNLRPARIGGRDWTKWWSANSAQVPPALRAEIERESARLALVKQQMKAIEAQRRQEVADNMHPLVAQLSRLRAIGLTSAWMLDKELFGWRRFANRRQVAGCLGLTPTPYDSGNSQIEQGISKAANKRPRTLLVELAWSWLRYQPDSALSQWYSRRFAAAGKRMRRVGIVALARRLGVALWRYLQYGEIPQGATLKPTQA

SEQ ID NO: 86634 - protein, 293 aa, unidentified
MNNNNTLYVGLDVHKESITVAYAINSEPVELMGKIGTSPTDIQNLCKRLRSKSSQVSIVYEAGPCGYGLYRRLVKSGFDCMVCAPHLSRKTGERVKTDRRDAIRLVRSLRAGDLSAVYVPGIEDEAFRDLARAWASARDDLRHARQRLKSFLLVHGGHYVGRADWGPAHRRWLSKYSFESPWRQLAFDEHRRTIEDRQAQCERLESALKEAVTEWRLYPVVEALQAMRGIQFITAVGLISELGDLTRFEHPRQLMSWFGITPSEYSSGGSRHQGSITKAGNSYARKLLVEAAW

SEQ ID NO: 86635 - protein, 403 aa, unidentified
MTTPSQVSVWIGLDVGKESHFADVLDNDGERLFSRAVGNDQAGIEAVIDRAAKHGVPGLAIDQPGSIAQLILAVAAARGVPVAYIPGLVMRRAADLYPGEAKTDRRDAYIIADTARTRRKQVHWLDAASDELLAQLRVLNGFDTDLAADQTRVTNRLRDALTSIAPALERAIGPKLHHAGVRDLAEAFPTLTALRAAGPAKVWETIARRSPRLAAKTADAVAKALAAQDVTVPGEAATGRVIAELAGELGRVFTRRNALEKEIREAFLAHPFGEVLASMPGIGPRTGARILAEIGDGTGFASGAKLAAYAGLAPVTRQSGTSLSAETRSRRGNHRLKNAMFLAAFASLRDPASRAFYDRKIAEGKRHNAALICLARRRCDVILAMLRTRQPYQPDRSKAAKAA

SEQ ID NO: 86636 - protein, 420 aa, unidentified
MKKRVYKATNVKKINLEKLNQEVEGKNIVLGVDVAKEDFMAAIMDKDRKVIKTIKWKHPFESHLLLDLILRKLRWHSLEIAMEPSGTYGDSIRAQFLGNGISVFRVSPKRCHDAAEVFDGVPSMHDAKASAIIGRLHLDGASEEWPMAEDSQRELTAVIRTMEMYDDAYRRNVNRLEGLTMRYWPELTKYLQLQSATLLELLKEFGNPESVAQLSQEAGELMRKTGGATLKAEKIKAVLESAPISLGVKCIEAEREQVRELCREIRRLQKLRSQARSQVEALTQNIDCVKEMTPVIGKVTAAILYMTLGNMEGYDNAGSVAKSLGLNLKERSSGKHKGQLRITKRGSGSARMYLYMGVLRLVQNNTIIKAWYQKKIIRDGGLKMKALVAIMRKLASALWHVGKGAKFDASLLFDTSRLAI

SEQ ID NO: 86637 - protein, 449 aa, unidentified
MQRYAGVDWASEKHDVLVQEGGGEQVLAATFTHDERGLSALGNTLVRLGVVLVAIERPDGLLIERLLDAGLRVLAIHPNQVAAARPRFRASGGKSDGFDAFVLCELARTDHHRFRVLVADSDQTKALRALSRAREDLVQARVQLANQLRAELERFWPAGAKIFAEVDSPIGLAFLERYPSPSDARGLGEKRLAAFLARHGYSGRKTTAQLLAKLRDAPQGRAGDAEIEARRAIVHALVAALRPIVAKITELTSEIAHRVRAHPDGHVFLSLFRDPKSVVCAAALLSEIGDCRARYRSAEALAADAGMSPVAVESGKRKVACFRRGCDHRLRAAMSTLADATRHWHPWAADRYATARARGQDHQRAIRTLGRAWCRVLWRCWQDGVAYDPDRHHGLQQHIAVTIPDGSSPRLDLKATQRMAGAAVTRRAARSAEREALDGKPTSATNTEG

SEQ ID NO: 86638 - protein, 350 aa, unidentified
MIIIGCDYHPGFQQIAFVDTETGDCGEQRLEHCEGAQKFYRDLATQGKKVRVGMEASGHARWFEQLLGGLNIELWMGDAAVIRAKRGRKSKTDRQDALHILNLLLTGDFPQIWVASWENRDLRQLLWHRHRMVQARTRVMNQLQAVALNDGLRCKEKLWRKHGREQLEAFRLAPWASRRREDLLELLDRLNPTIAELTQAIEQEAEKCPQAQRLMTHPGVGALTALAFVLIIGKAERFQCGKQVGCYLGLVPLEDSSGDKRRLGHITKQGNSLLRFLLVEAAQVTSRTIPEWRSKYLHLTMRRGRKIAKVAMARKLAIRLFWMMRQGWNYQQVMKFGSHVGQPGNRHGVQ

SEQ ID NO: 86639 - protein, 346 aa, unidentified
MGRSITDLSSVTTVGLDLAKHVFQVHDVDALGRIVVAKPIRRNKLLEFFASLPPCLVGLEASGSAHHWARELIKLGHDARMMPPAYVKPYIRRQKNDASDAAAICEAVTRPSMRFVGVRSLMNQAALMRHKAREMLVTQRTQLLNGLRGHLTEVGVIAPQGLRCARELAELIEACDETIPFEVCEALAPLVVQLRNLDEAIARLDRTIAKLAQKDETARRLMSIPGFGPITASAMAATIQDTSSFAGPREFAAFLGLTPKQNSSGGKPKLGRISKMGNRNLRKLLVVGAHAVLFHRKPHTDPLRMWAKKLIEKKPFKLVAVALANKMARIAFAILRGKTVYREIPA

SEQ ID NO: 86640 - protein, 334 aa, unidentified
MDKYIGLDMDCKKTVGYTIVPGQSESSATFGPDVESMRRYFRQERQGGYRIHAAFEISGQAGFLYDQLLEDVDSLHVVNPTKMTWIYRTAKKNDRIDARKMAVLLSIGELPTVYMPSKEIRQWRQTILHRQKIVQKVGQVKNRIRAALKSEGHRQPEHSGGWWKRANRMWMQQLCEETIHVDSLWRLQVRNLLDELTLLEKQRDRVTDYLDAYLARESRAKLLTSIPGVGPRTAEAVLAYTDDINRFSNYKKYCAYFGVTPKLDESGSFRRLGHISKQGPAVVRWLLCESGWKVVRYCPGLRAFYERVMAGQQSRKKIAIIALTRKLLCLCGRC

SEQ ID NO: 86641 - protein, 354 aa, unidentified
MPERAKARVTVVGIDIGKNSFHVVGLDRRGAIVLRQRWSRGQVEERFANMPRCLIGMEACVGAHHLVRRLRALGHDARLMPPKYVRPYSKGQKNDFRDAEAIAEAVQRPTMRFVVTKTPDQLDLQSLHRVRERLVSQRTGVTNQIRAFLLDRGVAARQGLRFLRCQLPIILATRSDVLSPRMMRVIEELAGDWRRLDERIDGLSQEIEALARQDPACERLMTVPGIGPIISSAVVAAIGNGAVFTKGRDFGAWLGLVPKQISTGDRTILGAISRHGNRYLRALFVQAAWVVLVRIKDWDRYGLKAWIDAAKKRLHHNVLAIALANKLARIAWAVLNKERVFECVRTRATASQPA

SEQ ID NO: 86642 - protein, 420 aa, unidentified
MDRAVTDIIHPVACGLDVHLVVVAACLARSGPKGSPVYEERSFPTTRRGLRELRDWLLAAGCEAVGMEATGVYWMPVYAALEGQLRLVVGNPNHMQNLRGHKTDRKDAKWIAGLVRHGLIRPSYVPTPEFREARELTRCRRQLVQARTTIRNEVSRLLAHRGVALRSAEGLSNAFGASGMAILEALAEGRSLEQDLPRLLHRSVKHKAGTLAAALEAGLGEVSRQLLGMHLGRLEAVEEDIAKVERMIAAHLAPYQDRLDLLMTIPGVSYLSACVILAELGVDMAQWPTEKHLAAWGGVAPGCRESAGKQRRAATRKGNPYLCTTMVECAGAAVLKKDCHYRGKYRHLCARTGSKMKARMAIARKLLVVVYHVLKNLEPYREPEARIPTPRSRQRTIQRHLKELQKLGLAVQLTEIGNER

SEQ ID NO: 86643 - protein, 343 aa, unidentified
MKHYAGLDVSVKETSVCIVDETGKICREIKVVSHPEDLLQLLQDPVWRLERIGLEAGPLSQWLFEGLAQAGLPVVCIETRHAKAFLRAQINKSDRNDARGIAQMMRVNLFRPVHVKTLSSQKRRALLTARKLLQEKALAVENDIRGLLRNFGLKVGAVGTVRFEARIHELIESMPDLIEVIQPLLQARRELREHFATLHRKLLALVRNDEVCRRLMTVPGVGPVVSLAFVATIDTPARFRSSKAVGPALGLTPVLHQSGESSRVGRISLCGDAMMRTLLFEAAQIILTRASRWSWLKAWAMKVAQRRGRGKAVIALARRLATILHRIWCDGTEFRWTREAQAM

SEQ ID NO: 86644 - protein, 393 aa, unidentified
MKQRKNAGSEPGNDTEIPSSMFISGLPACLNLDPDSRLTSIVKVIRLSSSPFFTENFRDKSMENFYFIGVDVSQKKLDFCVMFEGKVVHEEETANHQSAIMSLLHQLEEYYGIASDQILVCAEHTGQYTFPLACACKAVECKLWLENAAEIKYSSGVQRGKNDKVDAKRIAIYARRFQDKVQYYERPTEDIERLKQLESERTLYVADLAKYKGQVKDQKDYMPKALYERKMKRLQALMEDLEEAIQAITDEMDEVIVSCPVLYRQRELLMSIDGVGRVVATNMIITTEAFTRFDDPRKFNCYAGVAPFSYSSGSSLHSKARVSHRADKVMKRLLHLAAVAITHRIGGELKKYYERKVAEGKNKMSVINALRAKIVARMFAVIKRNEKYKPILS

SEQ ID NO: 86645 - protein, 389 aa, unidentified
MSLDHHREEPTAIQTNLGAIFVSLELSRSTWLVTSLSPGGGEKMSKHSVSAGDIAALLARFSELEQKAIARTGKSFPIIVIQEAGLDGFWIHRVLQGEGIESYVVDPASIATSRRRRRAKTDRIDGEALVRALLAYKRGEPRVCAMVRAPTPEDEDSRRLCRERKVLTIERIQHVNRIKGLLFTQGVSGYEPLRGNRRQRLDELKTGDGRALPPHLKAQISRAFDRLELLIEQIKAVETERNTLLAPAAKTEGTPAPQVMLIGLRGIGPEFAAVLWSEGLYRSFANRRQVAAYAGLAPTPWQSGSVAHEQGVSKAGNPRLRATMIQLAWLWLRHQPDSALARWFHERVTRNGGRLRKTTIVALARKLLVALWKYVNAGVVIEGAVMKAA

SEQ ID NO: 86646 - protein, 313 aa, unidentified
MKKTICGVDVSKARLDVCIDPLGAFDSFDNNAAGIARLAVFCRQHAVELVAMEASGGYERRAFLQLWQAGLPCALTNPRSVRRYAEAMGVLEKTDRIDAAVIARFAAAKNLSPTPLPSPEQQRLKALVARLRQVTDDLTIQKQRRASLLDNPEMLASIDEVIALLKRQSRALEGEIASMIDDDPLWSLLAETWRSVKGVAGRTVAWLHAELPEIGTYSNKSIAKLVGLAPIADDSGRHKGKRHIRGGRTGVRSILFLVAAIAARYDKSLAEFRARLVAAGKEKMVIRIALARKLLVRLNAKARDARAAYANAT

SEQ ID NO: 86647 - protein, 336 aa, unidentified
MESGYVGVDLHRCRSVIVRKTATGEPIETVRIDNDPLTLCEVVARSGEAPEVVLEAAYGWYWAADVLAEAGANVHLAHPLGNNWGNRRVKNDERDAEDLADLLRLGRLAEAYIAPPGLRELRELVRHRAKLVAIRSGLKAGVHAVLAKQGVHLAVSDLFSATGRQMLADAALDGAYRLRVTSLLGVIDHLDSEVAYFAALVDEVLADHPGYRAIQAIPGVGPVLAAVFVAEIGDAARFAGPAQLASWAGLTPRHRESDTHVARGHITKQGSRLVRWAAVEAVGRQRGATPVAVFHHRVAERRGANGIGRVAAARKIITLVYYGLRDGHIRCLAETG

SEQ ID NO: 86648 - protein, 356 aa, unidentified
MSEITRVGVDLAKSVIQVNAVDVGGKLVTNRQLSRDKFLPWCAQLPSGCLVAMEACGGSHHWARKLIALGLNVKIIAAHLVAPYRLQGKGGKNDANDAAAVCEAASRPAMHFVPVKTTVQQGLLCVHRLREGLKEERTASINRIRGMLTEFGLVVSKSPEKLREKLTDMLEDASNDLSGLARLVIEEAYGQWKDLDERIEWCNERINAHVKDDAQAKAAKELVGVGPVTASAVVATVGDFHQFKNGAQFGAWLGLTPRQNSSGGKNSLGGITKRGDMYLRMLLIQGAKSAVMTAHKRSDPISKWLYQLREKSGWQKAAVAMANKNARILWAMMTKGCSFDPRHVSVKPTGPVVTMA

SEQ ID NO: 86649 - protein, 392 aa, unidentified
MIYAGVDIAKTNHVIGAVDETGSEVVRPMAFKNTEAGFERCIAWLESIAESEDDVFIGMEATGHYWMACFAYLVAAGYRVCVVNPMQVRAMRKLKGLCGVKNDRIDSALIAETLRQGDYDQTRLATDEVQALKRLTRYHQSLKQELATVKTQAVCVLDAYFPEYAGLFSDMFGTASLKVLAECPTPSEASRKRTSSIARLLSEGSHGRLGAERAAEIKSAAGSSVGIRLGEDAASFQIKTMVTQVEFLNRTIAKVEREVASLLARVEPNITTVPGISTTTGAQIVAEIGDVKRFKGAASIVKYAGLNSGVDESGMFSAEGVPITKHGSPYLRRSLWLAANRARQYDPKLKAFYDKKRREGKPHRVAVTAVARKLCHVVYAVMRDGEPYDPGK

SEQ ID NO: 86650 - protein, 343 aa, unidentified
MNAYYSVGLDIHKKLIAYCVKAADGRLVAQGMVGADRESLSQWAESLPGPWVGAMEATIFTGWVYDFLAPYAVDLKVAHPEMLKAITAAKKKNDRADAEKIADLLRVNLLPECTMLQEEIRELRRILRYRHHVVQTAVKMQNKMNGLLMEVGAGYNKRRLRGKRYFHELLARVDEIPASVKELLLLSRAGYEMFQSVQKRLIQTLRTNELIRERVHRLMTIPGVGEITALTWVLEIGPPERFASIRQAISYCGLCSAQRESAGKEQRGPISKKRNKHLQTILVEAAKLAPRWNAQLAEVHEKELKKGNRNRATLAVARRMVAYMLAVDKSQQDFAAREEAKAA

SEQ ID NO: 86651 - protein, 344 aa, unidentified
MEITTIGLDLAKSVFQVHGVDATGQVVVRRSLRRAQMLPFFARLPSCLVGMEACGTSHYWARELIKLGHQVRLMPPAYVKPYVKRGKTDAADAEAVCEAVIRPTMRFVPVKSPEQQAALSMHRTRDLLVKQRTQLVNMIRGLLAEFGIDIPKGLERALLMARRIVDGEAPDVPMEAAKIVSTLSQQALDIHIRLREVDRDLLVWQRGNDVARRLMTIPGIGPVGATALAASITDPHQFRSGRQFAAWLGLTPLQKSSGGKERLGRITKMGDKYLRKLLIVGMTSLVRRAKYNPKTVDPRLADLLARKPVRVATVAMANKTARIVWAVMARGETYRAGHRPALAT

SEQ ID NO: 86652 - protein, 287 aa, unidentified
MEYYVGLDVSLKQTSICVVNQTGSIVQEGVVDSDPEAIASFVRARAPGTVRIGIETGPTTTWLWTELKRLGLPVICIDARHAKAVLKMQINKSDRNDAAGIARIMQTGWFKEVRVKDLDSHAVKALLASRALLVKIKRDLENQVRGLLKNLGLVIGRAKFNVFAVRAEGLIENRPELVAAVRPLLEARKAIERQVEDLDRKVHKLAQRDVQVRRFMTVPGVGPITALCFKATIDDPTRFKRSRSVGAYIGLTTRRHASGEIDWSGSESRSAVTPCCACICSRRPACS

SEQ ID NO: 86653 - protein, 341 aa, unidentified
MQITTIGLDIAKNVFQVHGIDAAEKVVIRKQLRRGQVMKFFAALPPCLVGMEACATAHYWARELTKLGHEVRLMPAKDVKAYVKRNKNDAADAEATCEAVRRPTMRFVPVKSAEQQAQLMQHRARDLLIRQRTQVINALRAHLAELGITAAQGREGIRDLLAIIADDGDARLPIDARASLMVLAAQLQALQTLIGSIEKRIVARHRSSEASKRLQTIPGVGILGASAIATIVTEPKAFRSGRDFAAWVGLVPRQDSTGGKCKLGPISKQGDRYLRRILVVGAHAVLKRARLHPQKYPWLTQLLARRPFKVVAIALANKMARIAWALLAKGETYRMPRLAAV

SEQ ID NO: 86654 - protein, 391 aa, unidentified
MIYIGIDVAKDKHDCFITNSDSEVLFKAFTIFNNLDGFNDLYQKIESVMDDVTKVKVGLEATGHYSYNLLGYLIDKGLPTYVINPLHTNLYRKSLSLRQTKTDKVDARTIASMLMSDVNLKSYSDISYHNEELKSLTRYRFDKVKERAKLKTSVSRLVCILFPELEKLVPTLHMASVYALLSEFPSAKHVATAHLTRLTNLLSESSKGRYGKDTAITFRDSARASIGSNMPAKSLELKHTIKLIQELDSEIDEIENEIIIIMDGINSPILSIPGINYRMGAMIIAEICDFNRFDSPDKILAYAGFSPSTYQSGQLDGAYAHMEKRGSRYLRYALYNATKYVCHWDPTFAVYLAKKRAEGKHYNVAISHAVKKLVRVIYHLEKTKQQYIKAS

SEQ ID NO: 86655 - protein, 409 aa, unidentified
MKRYYIGVDWADRLHDIYVCDREGSEVRKFRVKEEIEDLAEVGRWLDEQRAAGFELWAAIEKPAGRIVDFLLDHGVTVYAVNPKAVDRVRDRYRMSGSKSDPFDALILANFLRTDHMHLRVLRPASDKAQELKLLCRDHRRAVRQRTRLLNQLTITLKEYYPRPLDAFGDLATELALDFLTCYPTPADLGALKRKDFNRFARQEHHLSKERCEELWNKLCPAQLPIPEYVVRAKAQWTQVLIEQLRAAIKAVKIYEHKVESFFASCPLAQIAKSLPGAKSGTLVPSLWAELGDAKGRWESFAQLQAESGTVPVTVASGKSRVVRFRFACNKHLRYTIYWFAFVSSNRCEWAKLYYREQRAKGHDHPQALRALGAKWLKIIFVMWRDHKDYNEQLHLANIATQKMRQKAA

SEQ ID NO: 86656 - protein, 348 aa, unidentified
MKLKAIGIDLAKGVFGVHGVDEHGKVLMHKRVSRRHLLGLLAKLEPGVVGMEACASAHYWAREIERLGHRARLMSPQLVRPYRKGNKNDPNDAAAICEALTRPSMRFVPVKRQAQQDIQALHRVREQLLKSRTALVNQARGLLGEYGIVAPGGIAKLRRLLVELLADPAARGLSGLLSETLVQIAERLPFIDQRIASYDLRIERVFAADERCRRLDKVAGVGPLVATAMVSAVGNAREFKSGRELAGWLGLVPRQYSSGNRELLLGISKRADRYLRTLLIHGARAALCRVERKQDWRSLWANRLRLKRGFNVAAVALANKNARVIWALLARGDNYHPSGKTAPGSLAA

SEQ ID NO: 86657 - protein, 370 aa, unidentified
MLDTTTFVGLDVHARSIKAVSLDVMTGEVRCATFGYDAAAVAEWVRSVDPKARCVYESGVTGFDLQKRLSGLGVDCAVGAVSKMIKPSADRRRKNDRNDAEFLARMLSVGNVVEVWVPDDECEAARDLTRALEDARDDLSRSKQRLSKFLLRHGLVFDERTPTGRRKGNWTRAHWSWIESIRFSEGADNEVLAYYVDAVRRAAEEKARLEGLVEAEARKPRWRRRVESLRCLKGVDTATAADLVFEAGEFSRFRNARSFAAWVGLTPSEHSSGESDRRGAITKAGNKHLRKTLVEAAWHYLTCSGRPKDLAKGQAPDPAARRHAAKGVRRLAERREALLARGVHGNKANVATARELACWVWAVGLMAEKA

SEQ ID NO: 86658 - protein, 344 aa, unidentified
MQITTIGLDLAKSVFQIHGVDATGQVAVRKSLRRSQMLPFFAKLPPCLVGIEACGTSHHWARELIRLGHEVRLMPPAYVKPYVKRGKTDAADAEAVCEAVTRPTMRFVPVKSSEQQAALSIHRTRDLLVKQRTQLINMIRGLLAEFGVDIPKGLERALLMARQIVDGKAPEVPIEAARIVATLSQQALDIHVRLRGIDRDLAVCLRGNDVARRLMTIPGIGPVSATALAASVTDPHQFRSGRQFAAWLGLTPLQKSSGGKERLGRISKMGDKYLRKLLIVGMTSLVRRAKYNPGKIDPRLADLLARKPTRVATVAMANKTARVIWAIMARGETYRTGHQPALAA

SEQ ID NO: 86659 - protein, 364 aa, unidentified
MVEDRRTIGVGLDVHKSSVRLAAVSGGELLGELSLPYDHERVEREVRAWPGARVCYEAGPTGFGLYRHLVAAGIDCVVVAPGLVPSRPGDRVKTDKRDARRLAALHAGGLLTAIFVPSPEQEALRDLVRAREDARLDRMRARHRLGKFILRHDRRMPTTCWGVTRRAWLARQVFELPGQQQAFDDYLFAVDQVDRRIEGLEAELSRLAQEGPHRELIARLRCIRGIDTLTALGLAAEVGDFARFATAAQFMSFVGLVPSERSSGESRRQGSITRAGSAHARRLLVESAWHARRRPTVGYELGRRHRGQDPAVLERAWRCQQRLHRRWQKMAGRGKPNQKIVVACARELAGFVWAIATDQPMKST

SEQ ID NO: 86660 - protein, 348 aa, unidentified
MRFYTGEHQHYCGIDLHARTLYLCVQNAKGNVLLHRNLPCDRQIFLEAVEPFREDLVVTSECIFSWYWLADLCAEHDISFVLGHALYMRAIHGAKAKNDRIDSLKIASLLRGGLLPQAYAYPAKMRPTRDLLRRRLHFVRKRGELMAHIQNTFHQYNLPRPQGPLVNKSKRTPIPGAFSDPIVRKSVEADLALCETYDGLIRDLENSVLREARSDDPNSLLCLNSFPGIGQILSLTFLYEIHDIGRFESVQRFASYARLVKCETSSAGKRTGSSGAKIGNVHLKWAFSEAAVSVLRHFPESKKLHNRLKRKHGNGKALSILAHKIGRTVYFMLKRNRAFDPERFLMNA

SEQ ID NO: 86661 - protein, 438 aa, unidentified
MLTAGNHHRKRATQPKLRSPTWPHKISIFCTNRKETRSTHLTANISIPQKNFIAIDLHSDNAVICVRRNALNKAGELVGKNIWCGRVSIRDGLDNFIKVLVPHCQDFDHVAVVESTYNWYCLADAFEERGWLLRVADPSTVSQANLKSSDDRTDAQYLAERLRVGSLKHYLPLNYSSRALRDLRRYRMAMVQDCASLKIKLINLYRNQLSKNVRVADLLERCQPHMQPNYRFNSDILEEFKDPNIRLRVAFEISRIAILEEMIEECNAEIQKQCKDQELVKLCKTILGCGPVLSAVICTEIGTMQRFKSAGDFVSYCRLCSTSKLSNGKSKGLGNAKNGNAYLSWAFTEVAQYASRNPVIREILQRLLRKYGGLRVKAIRTLAAKIARVAFYVLKNKQPFNAAKCFGMELTKSIVKKLPHKPLREDAAVVLPTVAGQA

SEQ ID NO: 86662 - protein, 355 aa, unidentified
MLCLGIDQHARQITISLRDEAGDVVQARQVSTEPKKIHAFFQQLTRERLRKGEAFVGVLEVCGFNDWLIRLLRDYRCDKVILIQPGDRKKRKTDRRDAAALSELLWVNRDRLLHGKPVRGLRQIDIASSTDQENRRLTMLRKEAGQTRTRLVNKIRHLLRRHNLQWEMPTKRLPTLSAIAWLKQVVLPEIDRLEMNHLLADLEHVQQRLKELEGVIAQRSGASKQAAILTTMPGVSHFTATSLACRVGRVERFPRAHSLANYWGLTPGCRNSGENNQRLGNITKAGSAMARWLLAQVTHKVLRKDARLREWFKRIKRRRGATIARVAVMRKLATIIWHMLSKRKTFAECRALAAA

SEQ ID NO: 86663 - protein, 345 aa, unidentified
MQTITTVGLDIAKSVFQVHGVDAQGKVIVRRQLKRRYVLAFFQKLPPCLIGIEACASSHYWSRELHALGHTVRLMPPAYVKPYVKRQKNDCADAEAICEAVTRASMRFVATKTVEQQSCLMIHRTRHLLIRQQTAVINAIRAHFAEFGIVAPVGRTGVEELLKVASDGNDKRLPDVARVCIAALGAQLQMLKARILEFDRLIMAWHRSNQVSKRLDELPGVGPALATALVGSIADPKAFRSGRDFSAWIGLVPKQHSSGGREKLGGISKQGDRYLRSLFVAGALAVIRYAKKRGSKHRPWLAALLARKPTKVAAIALANKIARMAWAMMAKGERYKQPVALAAAW

SEQ ID NO: 86664 - protein, 328 aa, unidentified
MKNYQEVIGIDVSKNKLDAYAYNRSSHREFSNDVKGYKALLQWANGKEQKVFFCFENTGHYSLKLALYLSSKKQVYVQENPVVIKRSSGVIREKNDVVDAMMIARYGWLHREELSPSELKDNELLEVGRLLALRDQLVRSRTGLKNTLSELKKLLSSSSTDTCCKTLVSSITHLTSQINKIEKQLKSLIKTSEALSQNYKLISSLKGVGLVVGAQLLYHTNNFERFNSWRQFSSYCGTAPFGHSSGSSIHKKRKCHPMGDRQMKSLLSMAACTAIQYDSELRQYYKKKREEGKLKMIALNNVRNKLLSRVFAVVKRGTPYVELQRFAA

SEQ ID NO: 86665 - protein, 374 aa, unidentified
MGKKHIYVGMDVHKETTVIVLAHGGRNGKVEPLGSFSSGLDSMRKVLERLRRREARLHFAYESGPTGFALQRRLEAWGEECIVASASHVPKKAGDRVKTDRRDAELIARAHRAGELDPIHVPDAVDESIRDVCRARFDAKQDERRGKQRLKSLLLRNGYAYKAISGWTPAHKAYLREKPLQHPGQKAALESYVRSIDHANERIEDLETQLELLALEWRLDPLACSLMAFKGIGWLTGVRLAAELGDLRRFPSARALMGYLGLAASEHSSGLRERKGAITKAGNAHARFYLVESAAHYRKAPKVSKELTRRQVGIASAVVDLSWRAQNRLHKRYWTLVSRGLAAQKAQVAVARELAGYVWAVGQNDYLYEDLPAS

SEQ ID NO: 86666 - protein, 326 aa, unidentified
MKTEKVAHTKNAEVLYVGIDVSKGALDIDAGDLGARKVANTPAEARKALEAIGAEARGRPLHVCLESTGPYVGAPVAECQALGVPCSVLNPCKVKCFATSVVEAKTDAIDASVIRRYAEAKRPEPTPPTRKALARLDWLLLARESIMKSVVATRCVLETVKGEAAKPLEKALAYNERRIAEYDGLIAEAVLADADTAGLVGALSGVEGVGTLTAAKIAAWMPEIGTLGRRKAAALAGLAPHTRESGAWKGRSFIGGGRKPVRDALFMPATVAIRFNPEMKRLHARLMARGKPYKVALAAVMRRLLCRLDSVARDYRAKGNEKEAAT

SEQ ID NO: 86667 - protein, 343 aa, unidentified
MKLHVLGIDLGKTVFHLVGLDSTGKVVIRKKCSRAQLLAFTANLQVQLIGMESCGRSHFLGRALREQGHEVRLMPAQYVKPYVQTNKSDFLDAEAIAEAVQRPRMRFVPIKTEEQLDLQALHRVRERWVMRRTAVVNQIRSLLLERGLTLPKGRSYVDRQLPRILEDGELRLSGCFRILLAQLKLELEQLSARIEEMDRVIQKTAKENEDCQRLTEIPGVGPVTATALIAAVGNASAFEKGRNLAAWMGIVPREYSTGGKQKLLGISKRGNKYLRTLFIQGARSVVQQRHKQAPGLSHWLEQLLGRTHQNVVIVALANKLVRMAWAVLCKNERYRAPVLAVTT

SEQ ID NO: 86668 - protein, 384 aa, unidentified
MYYINTDIGKFNHCTSVIDSEGEVLIEPFFFKNNKLGFQEFLDKTKPFISHRHIAGLEATGHYGDNFIAFLLDNNYQVGVINPISTDAQRKLKIRKTKNDKKDTLLIANVLIAKEYTTMTKHKFMMRQTKQMTRLHNDLTEDLNRHKNRLQGCMDIVFPEYNTLFKTKYSKAYMSILKAFPSASHISNAHLTTLKNTVGNMVHVDATKLRELARQSVGEDNPSIILEIQHLLASIELVTQQLKEVNKKIEDFAINSNSPITSIPGIGVITGMSILSEIGDIELFSHPSKVIGFAGVDPATYQSGEYNAATTAISKRGSRHLRKSLYQCILTVCKYNPTFNSYYTLKRKQGKSHRCAQGHCVRKLLRVIYKILTENIEFDASKCI

SEQ ID NO: 86669 - protein, 413 aa, unidentified
MDKIYDICCGIDVHKKLIVACLNHKRKKELREFGATTRELMELAEWLQKNECEIVAMESTGSYWKPLYNIMESYGLHAILVNPAHMKAVPGRKTDVKDAEWIAELLQHGLLQPSYIPSKDQRELRELVQYRKSLVGERTRELNRLQKMLEGANIKLSGTVTNINGKSARKILEYILSGNEIDEKKYDEMYEEKLIAHNLKASKEQILDDLKGFMSPLQRRMLKELLQHLDELNVHIENLNDEIDNFMKPEEKQASQVIQDVTGIGNTSAQTIIAVIGTDMERFPSDRHISSWAGLCPGDNVSAKKRKSGKIRKGNALLKSTLVLCAHAAVRHKSSYFHAQFKRISTHRGKKRAYVAVAHSILIAIYHILKDGVKYQDLGAEYYNQFNAERKIHAYLKKLKALGWEPPKEAVPA

SEQ ID NO: 86670 - protein, 413 aa, unidentified
MDVWHSRCCGLDVHKSSISACILLREAGRVQKHQRRFGAMTQELQELAEWLRQFGVSQVAMESSGVYWKPVWNILEGQFTVVLANAQHIKNVPGRKTDQKDAEWIAQLLQYGLLRPSYVPCEIIRDLRDLTRMRASLSQEASRISSRIQKVLEDANVKLASVATNVLGKSGRAMLEDIICGEDDPEHLAALALGHLRVKIPQLRVALAGKIRSHHRFLLRRLVDQIQFAEHEIALLDERLEDIGRQRPELAQAVARWDTIPGIDRVAAWALLAEIGDNMSQFPTAEHLASWAALCPGNHESAGKRLRGTTRQGSPWLCRMACQCAWAAARTKNTYLSSQFRRLAARRGKKRASIAMAHTIIVMGYHLQKNQSNYEDLGGNYFDRIHSDGLKRYLVKRLQQLGHKVTLEPMEAA

SEQ ID NO: 86671 - protein, 355 aa, unidentified
MNDAKYIGMDVHQATISVAVRDSDGKLVMEAILETKAETILQFVRGLRGSLHVTFEEGTCAAWLYALLKPHVTQVLVCDPRKNALLKVGNKSDRIDARKLSELLRSNLLSSIFHEDTGLRAVKELARSYLTMTKDLTRVMVRLKALYRSWAIPCATKQVYAPRHRAEWLAKIGEASVHRRAELYYQQLDALRSLQQQVKKELLLEGRKHSATKLLRQIPSIGPIRAVLLVALIQTPHRFRTKRQLWSYCGLALETRTSEEYRMVHGQLRRSKNPVAIRGLNKNHNHDLKNLFKGAALRAAAVEKPFQEFYAALVAKGIKPEMARLTLARKIAAITLIVWKKGARFDAEQLKQQAA

SEQ ID NO: 86672 - protein, 339 aa, unidentified
MGIVGGLDLHRRQITYDWLDTTNGETKRGVIRPATRQSLREWLAELARTDGAFALEATTGWRFVVEELQRAGLEAHVAEPADTRALRGKKRRAKTDRADARHLRDLLLAGSLPESWIPTEFIADLRTQVRLRKSLIDQRSGWIRRVRAQCFHHGLADPPNVQTAAGLGWLARAELPAVARQVVAVALTMIEAIDVHIHALEAELCAVARHQKGCLALQSQWGVGPLSAVAMVAELGDVTRLSSSRKAVRFAGLDITVSESDIKRSRGYLSRQGPPVLRRTLYEAATSAWRKASPDHEYYLQTKGRLGTKRARLSVARRMLRRSYHLLANLGEAAIEPAR

SEQ ID NO: 86673 - protein, 344 aa, unidentified
MTEVTTIGLDIAKNVFHAHGADAAGQMVFSRRLTRAKLLDFFATQPACLVAMEACGGAHHWARQLAQFGHSVRLIPPAYVKPFVKRQKNDAVDAEAICEAVQRPGMRFVPVKTEEQQASGMVFRTRDLLVRQRTQLTNALRGHLAEYGWVAPKGKAHMELLAGLIEEGEMASTLPSAARAMLMVMNDHLDRIDEQIADLDREIARRAREDDAARRLMTIPGVGPVTATAILSLAPPIETFAKGRDFAAWLGLTPLQHSTGGKARLGSISKMGDRTIRRLLIIGGSSIVRQACRRGAPAGSWLESMLARKPRMLVSVALANKMARIVWALLTKHEDFKAPAVVAA

SEQ ID NO: 86674 - protein, 318 aa, unidentified
MTPHTLALAAGIDVGQRFLDIGLAPSGKTFRVPNAAEGIATIVERLTQAGVGRVVLEAIGPYAQRLVTALAIGGFEVGLINPRRIKAFREFEGRRAKTDRLDARLIARFALAMTDAIRPLPTPEQLALKALSTRRRQLTEMIAMEKTRLKQAAEPLLLASHRTAIAALTEECRHIETELARRIANDPQLACSFDILTSIPGIGERVATALITELPEIGRTDRKAIASLAGLAPHISQSGNAPPRAAISGGRPCVRTALYMAALVASRHNPQMKLAYQALRNQGKPAKLALVAIARKLLVTANALVKNNARYTPQSLDS

SEQ ID NO: 86675 - protein, 340 aa, unidentified
MGNVTTVGLDLAKNVFQVHGVDAEGTAVVRQRLTRGRMLKFFAKLPPCLVGIEACATSHYWARELIALGHDVKLMPAQYVKPYVKRGKNDAADAEAICEAVTRPTMRFVGIKSPEQQSAMMLHRVRLILNRQRTQLSNAMRAHLAEFGIAAPIGRNGIEQLLDVIADPSDERVPADARFCLEMLVAQLRIVKEQILENDRRILASARETELGRRLMEIPGVGPLLASAIVATVPDPAMFRSGRNLAAWIGLVPRQNSSGGKERLGAITKAGHQYLRQMLIVGAMAVVRYAERNGAKRPWLVQLLARRKTKVAAVALANKNARMIWAMMASGERYREPQMV

SEQ ID NO: 86676 - protein, 404 aa, unidentified
MKGPIVSIDVSKGKSDYQAFKDLNVKYTGSRSIKHNKEGFDEIVNLVREMEKKLETEVCVVYEATGVYHRVLKKVLEDNNIKQFIINPLLSAKTRKNDSLRSPKTDKLDPKSIAKTYYSHSLHNSHKQETIYHELRELSRYYEDILVHIRKDKVAFRAQLDIVFPGYDALYDYLYGPVALAVIEKYPHPEMLQKKKINTVSKVIQSKTCHRQAVSDTMADKAIEYSKTIYSGCDKDDIEVLILQRFIKKLNEDMAEAERTIGEMIKLAQELPDFSIIKSIPGIGDNLAARIIAELGDMTRFKKKNELVAFAGLDPRISESGQNDGDHMHITKKGNKRLRCLLYLAVTCSIRLKRDDNSIKDFYIKKKQQSNPMCSKAAKTACASKLVRIIYSMCKTGELYQYNK

SEQ ID NO: 86677 - protein, 377 aa, unidentified
MSSIIYVGMDVHTTSYTLCCYRMENDEVSAVVQVEPDYRHILTYLNRIAMKYNNDCTFRCGYEAGCLGYSLYHQMTSHGVDCVILAPSTMPKTNKREIKTDKRDAMKVAKCLAYRTYSAVHIPTEEDNAIKEYIRMRDDEKGALKRIKMQILSFCIRHGKSFTEGKNYWTQKHLAWLKRQDFGNPILQEAFQEYLILYYQASDKVELFDKRIEEMAKMGSYVEKVSKICCLIGIKAHTALAAIVETGDFMRFHTAQQYASYTGLVPGEESSGEAIRRTGITKAGNSHIRRLLTEAAQCYGRGTVGAKSKALLMRQAGNDPEVIAYADKANVRLRRKFYKIMFRSKRNIAVTAVARELACFIWGMMTNNMEYSPVKGS

SEQ ID NO: 86678 - protein, 319 aa, unidentified
MSAQIFIGIDVSRDWLDSFCLPGKQRFRCQNSPDGHARLFEILQSMPDDLKVGFEATGGQEWALWRVLIRKGINAVQLPPAQIKAFAFSMGKRAKTDQIDAELIARFMVFRSEAGRTLPDEKLQLLRALTVRRAQMVDARKRLSAQISARRKQDVSAELEDMDNSLKAFLESQISELEQRIEGVIAQGKELSAKAELLRSIPGIGPVSVAMLLAEMPELGRMTATEAAAMTGLAPMAHDSGAMRGKRVISGGRRSLRHVLFQAGLAAACHNPVLKAVAKRMKERGKPHKLVIVAIARRLVTIANAVLKTGVPWRISSAA

SEQ ID NO: 86679 - protein, 392 aa, unidentified
MTIQAQVSVYSQVFVPREYDVFAGLDVDKKSMAVIFTDHEQLMQSLRLPYSAAQLLGYVRKRFPEQRVAFVYEAGPTGFGLYDELVAAGHVCLVVAPPMVPRAPGVRVKTNRLDARKLSENLRGGQLRSIHVPAPKYRELRHLVQLRDTHVGQLTATKCRIKALLLYEGIPFPSEEGKEKQWSQRVVNELLELPCSESVGFKLDQLVGTLHFNFNSAAAAQKQIRHFCQNDPELRQAVAWLKSLPGIGEIIATHLVARLGDPSLITNVRQIAGFLGLVSSEHSTGDKQNRGEITRTGDSRLRNKLIQSAWVAIRQDPELREFYNRVYQRHPKKVAARKAIVAVTRKLTTRIYAVLKEQRPFVLREVSPAPLTTEETAGHRERLDGQQNERSR

SEQ ID NO: 86680 - protein, 388 aa, unidentified
MIYVGIDIAKLNHFASAVSSDGEVIIEPFKFTNDGDGFQLLLSKLESFDSDSIIIGLESTAHYGDNLVRYLVASDYKVCVLNPLSTSSMRKNNIRKTKTDKVDTYIICKTLMMQKHFRFVTFYDLDLMDLKSLGRFRQKTIKQRTRLKIQLTSYVDEVFPELQYFFKSGLHQKSVYALLREAPTPEAIASMHMTHLAHLLKVNSHGHFDKEMAQQLRVLAKKSVGVSDSALSIQITHTITQIELLDDQLDSVEKEMTEIMKFNDSVIMTIPGIGYINGGMILGEIGDVHRFSNPQKLLAYAGLDPSVYQSGNFQAKKTRMSKRGSKVLRYALINAAHNVVKNNFTFKAYYDAKMAEGRAHYSALGHCAGKLVRIIYKMLTDELEFSLD

SEQ ID NO: 86681 - protein, 340 aa, unidentified
MNATTYGLDVAKRVFQLYWVDAHTGEIVNRRFGRDELIGFLAQRPAGRVALEACGSGHWWARKIRALGHEVVLLHAKFIRPFVQTNKTDAADARAIWTAVQQPEMRTVAAKTEDQQAMLALHRMRALLVKFRTMQVNQLRGLLYEFGVTFRAGRLAGLAEMRARMAELEDALPAMLFDGLRDQLQRIDGLEQGIDQLEKRISAWHKQDATCRAIAEVPGIGRLTATALVAMIGDARTFKSGREFASFLGLVPRQSGTGGRVRLGSISKRGDPYLRTLLIHGARSVMYHAKVPTPWQTTIQARRPANVAAVAVAHKMARTAWAILAHGRTYEKDYVSVKPA

SEQ ID NO: 86682 - protein, 386 aa, unidentified
MEATSRTRPVLGIDVGKRSHWACLVTAEGEIALNAPVANRERDLDELFSGVPGDALVVVDQVRNIGSLALKRAAVAGLESAYLPGTAMHGASRLFAGDAKTDERDALVIAKTAIGIPDSLLPVPRPDAVLDAARAMASQRDYLVAGATRDKNRLRSILLESCPAFESLVDLSDPHCLRMLSEIGGPWQVLDAGKSSVGAVTRGANRARIDALWESISTSTRPDGLRAAAEGASVRLLAKRVSEAASECARLEAEISALLESDATYRCLLTVPGIGPRTASELVIGIDIGEFASHDRLASYCGLAPRNRRSGTSVSSVTASRRGNKRLKNLLVFSCNSLIRSDNRFGAFYRKCRDRGMPHGKALKAVARKRLKVIYAIMRDRVPYAA

SEQ ID NO: 86683 - protein, 367 aa, unidentified
MKNHSSIDQSLSSSDLSACTTLAVDLAKQVFQVAGEDVLGQVRYEQRIKSREAFYEFLHKLPPHVVVLMETGPGAQAWARQLQEQGNLARILPAGLVATHRSGPKNDRNDALAILRAGRDEKICAVPVKSVAALAMQALHRARQGYVRRRTAVSNQMRGLLLEHGVALAQGDVAISQKIPRVLEDATQPVPGLLRELIDELLAEWRHLGERISVLTGRLEVAANADMTAKRLMTVRGIGPVTATALVAKETKPERFPNARKFAAYFGMVPDQHSSGERVRLGDMTKRGDVYLRSLMIQGAHAVLQQLRPDSQQPDDRRLLRWMSRLGRKEAAIRLANRNLRIVWVLLQNDQTYRRHAGDGQQATMSH

SEQ ID NO: 86684 - protein, 398 aa, unidentified
MKRILRIGMDVHSTNYTLCAMEPVIGEDDRIFANIQVTPDYKNILMFIENLKMKLGLDAEYDIQCGYEAGCLGYSLYNQLTAAGVKGVILAPTTMLTPQGQRVKTDARDALMIAQCLSYGGYHAVYIPTEEDDSVKEYLRMRDDHKTALKKIKQQINALCLRHGYHYEGTKWTIKHVAWLRKLELLPLYRETLDEYMASYDEQTAKLERFDKRIGELASQSSYEEKAKRLGCFLGIKTHTALSLLVETGDFSRFAKGSTYAAFLGLAPGENSSGETINRRGITKAGNRHLGQLLIEAARGICKGAIGHKSRELRARQSGNTAEVIAYADRANTRLRSRYYKLIRHGKKKNVAVAAVARELACFVWGMMTDNTGMKMAERNSKDSCQSRVLCTAGAAGP

SEQ ID NO: 86685 - protein, 414 aa, unidentified
MSYKIAGIDVHKKVLMVVVVDASTPEERPERRRFATMPSELRRLSTWLREQGVEEAVMESTAQYWRSVWLELEPYMRLQLAQAFSNRAPRGRKHDFKDAERLVRRLIANELILSFVPDGEQRTWRNLTRMKTQLTRDRVRLQSQMECLLEEMRIKLSIVVSDLLGVSGLRILRALAEGETDPRRLALLGDDRLRCSEEQLVDALTGRPQPMHREMLALQLERLQLIDRQIEKLNGLIAQAMKPHQETVIRLAEVPGLGVDSAQQVMAEVGVQASTFPSAAQLTSWVGTCPGKDESAEVNHSSRSAKGNKYLRRILNQAAHAAVKKKGSHFQAVFRRLLPRLGYKCAIWAIAHRLCRVIWKILHEGVRFIEQGSESDPKVREHRARNLARALRKLGYDVALTPIHPAVAAKAVQS

SEQ ID NO: 86686 - protein, 447 aa, unidentified
MFVGHRFRTDPDELDTLWARLPKDAERIEVVMEPTRNAWVALAAWFRRHGATVVMVPPEQSADLRDYYNKHTKTDRLDSKVLARLPLLHPEGLHREDSLGPGDELKRAVKIGSGLVHRRTACMARLDALLEILGPVWIAALGWDMTLTALRFLARYANPVQVKRLGKARLAAFFRRSSRQAWADERADALIEAAATTLRLWGADGGELDFDALAADIAAQARLALTLTDEINGFDKRIGALYDKADPAGIVRSVPGAGRVCAPQILRRLGDPTRFANLAAVRSFAGLVPAADSSGQADGHRGPTKAGDCCLREALFIAADHARKVDPTPWPSTTSGSCSPVSTTIPRSARWLRSCSPESPPVCAPAPTTYCATLTAASSPKPKDAPSSPNATPCHPRSVPPGARSPPTDTHDATSGTSVPRQESPRAPRHRPFRNQHEPPTAFVATT

SEQ ID NO: 86687 - protein, 345 aa, unidentified
MPIVGGLDIHRKQITFDYPGTVTGEVRRGQVSPADRAHLRAWLARFAGRDDVAFAMEGCTGWRYVAEELAAAGIAAHVGEPADTAFARGRKRHAKTDKTDSRHLRQLLAEGRLPECWIPPAQVLECRALLETYHDLRREHTAWIQRIHAVFFHQGAPALGEGALRTERSLAALREAAAVHLSPAGQLQIATDLDMLAAVEARMDTLRRQLREAARHLAGAKALADRLYGVGPVAGLAMTCWLGGAGRFSSSRKAVRFAGLDVTVYSSDGKRSPGHLSRQGPEILRWVVYEAGKTHARAAAPGHDYYAAVKDRTDGKIAALSQARKIVRQACHILAELGDDALTVT

SEQ ID NO: 86688 - protein, 344 aa, unidentified
MTDVSILAIDLAKHSFQVCATTSEGVIVFNRKYSRGKLSELLASHPACMVAMEACATSHYWGREAQSHGHDVRLIPPIYVKPFVKRNKNDANDAAAIAVAVRQPDMRFVAVKSPEQQAQAMLFRTHQTFTRQRSQLLITLRGHLAEHGIIVTKGNAALIAYEEVLEARPDLVPDLVLETARLYFYQIDQLNTSIATFERQMRDTAKRDDTARRLQTMPGIGPINAAAFLAFAPPMENFQRGRDFAAWLGLVPRQHSTGGKAKLGRVSKMGQSDMRRLLITGATVCLRWAVAKGIDPQTWLGRLLARKPFKMAAVAMANKMARALWAMITKGQDYSGRLVHYATP

SEQ ID NO: 86689 - protein, 357 aa, unidentified
MTTTAKATAADTILAIDLGKYKSVACLYRSADDQRFTTFPTCRAELTRLIEKHRPAVILIEACLLAGWVRDLCVEKGVPCLVANTTSEAWKFKHLKRKTDRDDALRLAEVYVLGKFPSVNIPAKEVREKRGLIETRQKLVGRRVALQNRIRSILVGQGLPAPCGAKAWSAIGLAGIAEHARPIAACGALELWRGRLHLALTELAQVKALSDQAEKKLDELAKTDQGMQILDTIPGVGPRTAEAVVAFLPEPKRFRTTKQVSAYGGFVPRQYQSTDTDYRGRITKRGPKTLRKLLVECAWVMLRYNPWARAIYQRLTHGGKTRKKQAIVAIARKLLVRCWAMLRDHTVWRADPVAAAT

SEQ ID NO: 86690 - protein, 344 aa, unidentified
MDHFAGLDVSVKETSVCILDDAGRIVKEVKVASEPLALLKVLGNPTYCFKRIGLEAGPLSQWLFSALAEAELPVICVETRHMQAVLKAQINKTDRNDARGIAQMMRVGMYRPVHVKTLRSQKLRMLLTHRKLLQSKAIAIENDLRATLRNFGLKVGMVGTMRFEARILELVETIPDLAVLVEPLLVVRRALREQIVILHRRLLAIVRDDEVCRRLMTTPGVGPVVALTYRATVDVPARFRKSKSVGAVFGLTCSRYQSGEIDWSGRISRCGDEMMRVMLYEAAQSMLHSKKWSWLKAWAMQIARRRGMKKAIVALARRLAVIMHRIWVDGTAFRWTREPATAAA

SEQ ID NO: 86691 - protein, 340 aa, unidentified
MTIVMGLDQHRAQITTEWIDTVTGEIGRARVAPAHREGVRRFLGRFAGEELEVALEATTGWRFVVEELRRVGAAVHLAEPAQTSALRGNKKRAKSDRADAKHLRELLMIGRLPESWIPPDYLLDLRAKVRLRHTLVDQRGEWQQRIRAVLYHHGLPHRRDLDLLTSEGRGWLDEVDVPDAAREQITVALAMIEALAAQITPLDKQLRSYARRQAGCRALMSHYGIGALTSVVILAELGDCRRFSSSRQAVRYAGLDITVYQSDGHRSPGHLSRQGPPALRWALYEAAQVARRPASPDRGYYDQAAERLGANRACLAIARKLLLRSYHTLRELGEEALQPA

SEQ ID NO: 86692 - protein, 333 aa, unidentified
MAVMIGTGPHKGSHTAVAVTSAEEPLGKVRVRACPDQAEQLVAWAAAWPERTWAVEGAPGLGRLLARQLVAAGERVLDVQPKLAARVRLLQTENTGKSDPNDALSVAVAALRSTAQRPVLADDHATVLKVWAKRHRDLSRARNQVACRLHAVLCDLVPGGVADEITAGHAARIRGRITPAGPAAEARRDLAAEFPADIRHLDAQRREVKKKLATAVKASGTSLTEIFGVGPVIAATVIGEVGGISRFTSRDRFAAYNGTAPIEVSSGPRKGYRLSRRGNRRLNHAAHMTAVTQVRYPHSPGRAITTRSWPRAKPPGKPCALSNARSATPSTST

SEQ ID NO: 86693 - protein, 355 aa, unidentified
MKGELQKRRILSRGKEVFIGVDVHKESWHVTARTEGEEVFHGGIPSQYHALRKLMGYFKDCRIKVAYEAGPCGFWLYDRPTEDGIETIVVPPSLIPIESGNKVKTDKRDSRKLAKLLEGNMLKRVYVLKEEDRVDRELLRTRRQIVEHRNDVARQIKSKLLFYGIRLPFAQRHGWGQSYLQWLKELDIQREGLRACFESLIELYEYLSDQLMKMNQRVKELSQSSKYRQRLKLLCSVPGIGTLIGMELLVELQEVERFKRAEELASYIGLTPSEFFTGQYVRQGRITGCGNKRIRACLVESSWILITKDPLMRLKYHRLKSMKGAKRAIIAIARKLVIRIRRILLNKEPYVVGGC

SEQ ID NO: 86694 - protein, 363 aa, unidentified
MLYLGIDQHRKQLTVSVRNEAGDVTLRRQVSTEWERVRVFFDELRRLAEADSGFAAIVEVCGFNDWLLKMLVEYGCRDIVLIQVEKRSRTKTDRRDAHQLSSILWLNRHRLLAGQRVEGVRRIQPTTQQDAEDRQVTVLRKRLGQARTRTINKIKHVLRKHNLEQEQPAKGLDTKRTRKWLAKLPLGEIDRMELDLLLAQWKLWDEQIETLEAEIKQRQAQSDSAAVLATIPGCAAYGSLALASRIGSIERFPRPASLANYWGLTPGCRNSGEATNRLGSITKQGSAMARFALGHMVLHVLRRDASMKAWYGRIKRRRGSKIARVAVMRRLATIIWHMLRNNEPYMAGGPPRRKLQPQTVGVA

SEQ ID NO: 86695 - protein, 452 aa, unidentified
MEKSRRHRAEREFSCTHPDAGAIDIGSRIHVAAVPPDRDPSEPVRTFGTCTGDLQRLADWFERCGVRTIAMESTGVYWIPAFEILEQRGFEVMLVNARDAKHVPGRKTDVSDAQWLQRLHEYGLLRASFRPKGELAALRAYLRQRERLLDYAASHIQHMQKALMQMNVQLHHVVTDMTGSTGMRIVRAIVEGERDPTKLANHRDPRCHASIEEIAAALTGNWREEHVFALCQSVELYDTYQAKIAQCDAQVEAVLERLRSAAATGTQPLPPARHRQATANAPSFDARSALHAVLGVDLTQIHGLGPSLALKLVGECGTDLSAWPDAKHFTSWLCLAPSNKISGGKILSTRTRRSGSRAAALLRLAAVTVGRTQTALGAFYRRLSARIGKAKAITATARKIAVLFYNTLRHGRAYADPGASYYEQRYHARVLTNLQRRAKSLGYVLQKELSPT

SEQ ID NO: 86696 - protein, 367 aa, unidentified
MKKVSTVATKQSRNISRQKLTIGLDLGDRNSWYCVLDEAGTIQLEQRVRTTAKALQEVFGAMPRSRIALEIGTHSPWISRLLSDLGHEVIVANARKVRLIGQSRKKDDRLDAQTLARLARIDPELLYPVKHRSAEAQADLMMIRARAGLVRARTGLVNTARGLAKSYGERLRGCNVRDMDPEKAENLSPELQRALEPLLATIEELSERIVEYNDRIEALAQASYPQVELLKQIKGVGTLIALTFLLTLEDSHRFGKSRDVGGYLGLQPGRRKSGESEPQLHISKEGDPYLRTLLVQGAQHILGPFGMDCDLRRWGLKLAERGGRNAKKRAIVATARKLAVLLHHLWVSGEVYEPLHNSSRVTVAAAA

SEQ ID NO: 86697 - protein, 457 aa, unidentified
MYRELFPLRQALSAELKANLPPAVPGIDSEHLLQSYLDRLTMYVGCDVADQILTFFAVDAAGEELGHLSAANDPQGFEQIWDWLENLRSQHGLRIILLAMESTGVYYWACWDFLTQRPNLARVLYNPRTTEHMTEVLSKKVRNELVDAYALAEQVRLGSTPEVVLSEDADLLTARFCSRAARDLAGQINRKKNQLRALLRAYCPPLCKVFPGGKLHHPAVYALLQENLFPDQFVQAGAEALAMTLTTHCRDAFGLAEAQQLVAASRQALTRPIGRDAICHLVQAHTEDITTFQERKAFYLKTGYALIQDRQETELLRTVKGAGVSNTLALVSEIGDVQRFPSGEHLASFLGLTTSKHISGTTLFHSSRITKQGSPNGRYAAVNVAQHLTRYVPRYQAMYQRIKGRKPPRKGHFIALVAVARDFVANVLYDMWRNQRPFFLEVSDYRDYRRKNHRSHD

SEQ ID NO: 86698 - protein, 324 aa, unidentified
MRSIEEGRHELVTIGVDPHPGSLTVSAVGAHGQIHGQLRVTNDEWAFETVIGWAERFETRRWAIEGPGNRYIRDFVTTLLERKEKVYPIAPAMTAQYRSRRARGKDDEIDATNAARALLANEDLPIYEPMEYEAELKDLARSYQRLRRQLTATKLSARQISSKVALASLSDVIKTLEKALSELKKEMAKIVRKVGPELLEICGVGPVVAATVLAEAGRMSRFPNDDHFASYSGAAPIRWASGAQATDRVNPGGNRQLNWALHIIALNRLRIDPATQAYRDKKLAEGKTMREVLRLLKTYIARELYRVLTEAQAASQPTSRELAS

SEQ ID NO: 86699 - protein, 357 aa, unidentified
MQTIACLVEEVLLGVDTHLDTHTAVVIDLLGRELETVTFPTTRRGIDALIKWARLRGTVRRAGIEGTGSYGAGLAHRLALEGIEVFEVTRPTRRGHRHRGKTDDRDALAAARVVLSGEASSIPKTRDGIVESIRVLRNTRASAVKARTQTGQQLRSLVLTAPTELRDRLRDLSTTKTVAHCARWHRVDPTDATRSTRLAMRALARRHEALDAEVAELDTHIKALTKTAAPRLLGERGVGPETAARLLIVAGDNPDRLRNDSALAALCGASPVEASSGKTTRHRLNRGGDRQGNNALWTIANNRMIHDPETRAYVARRTNAGKSNKEIRRCLMRHVARRLYPLLIADLRDAQTHPHLT

SEQ ID NO: 86700 - protein, 419 aa, unidentified
MKGNHTKKVKHINNKTLIVTLDIGKTVHYGYMRTPTGAEVKSFPFYNARKGFNELWDKVCQFKRAQGLKDIVVGFESTGPYAEPLFHFLRKKPLHLVQVNPLHSKKLKELTGNSPCKTDKKDPRVIADIISLGHALTLVVPEGAAAHLRRLTQARERAIQRRTAMLNQLQHLVFVLFPEFLNVIKNVHSKTSLYLLQHHPIPQDIVAVGSESLALILRRVSRGKVTREHARQLFEAAQVSVGITEGRESILVEVKHLIAAIEHEDHLIHGVEEQMNYYVKQIPYSHSMLSIKGMGIITVAGLIGEVGNFETFSTIAEIMKLAGLDLYEVSSGNHRGRHHISKRGRALMRKLLYFAALSVVRKKGIMHEDYQKMLARGMPKIKALVAISRKLLRLVFALARDHTVYVNNYCQKSTLEIAA

SEQ ID NO: 86701 - protein, 415 aa, unidentified
MNQVRWFAGIDWASRKHQVCLLDAAGRIRGEREFAHSGAGLAELCDWLATESGAEPDAIALAIEVSHGPVVETLLERGFRVHALNPKQLDRFRDRFTLPGAKDDRRDAQVLAACLRTDPHCYRRLALDDPLVVELRAWSRLGEELQQERTRLANRMRDQLWRYYPQALQLTDDLAADWFLALWLAAPTPAKAARLRESTLAQLLKAHGVRRIAAAEALRILRQPPLLVAPGTAAAACAHIRSLVARLRLVSRQWREVQQNLDRLCAAAPDQDPAPGQPNEPRDAAILRSLPGIGRIVLATLLAEAHEPLKQRDYRALRALSGVAPVTRSSGNKRLVVRRLAFQRRLSNAVYHWSRVAIQHDPISRRRYAALRRRGHGHGRALRGVGDRLLAVACTMLANRSLFDPNRHANTASHA

SEQ ID NO: 86702 - protein, 398 aa, unidentified
MTESSDYESVQVFIGVDVGKDTHHAVAINRSGKRLFDKALPNDENKLRSLISDLKQHGQILLVVDQPATIGALPVAVARSEGVLVGYLPGLAMRRIADLHAGEAKTDARDAAIIAEAARTLPHALRTLKLADEQIAELSMLCGFDDDLAAQTTQASNRIRGLLTQIHPALERVLGPRLDHPAVLDLLQRYPSPEKLASLGEKKLAAQLCKLAPRLGKRLAADIAQALAEQTVVVPGTNAAAVVLPRLALQLITLRKQRDEVALEVEQRVLAHPLYPVLTSMPGVGVRTAARLLTEVACRAFASAAHLAAYAGLAPVTRRSGSSIRGEHPSRRGNKALKRALFLSAFAALRDPLSGAYYTRKMSQGKRHNQALIALARRRCDVLFAMMRDGTFYTPQAS

SEQ ID NO: 86703 - protein, 348 aa, unidentified
MSHYVGLDISMKETVFCIVNDKGVVVHKGRSKTDPEKIACHLKKTGLLIEKIGLESGSLSHWLTKELRALGLPVLCIDARKMAAFLSVQVNKTDDNDARGIAEAMRCGLYKEVLPKSQESLETSTLMQSRRTLVQQRVQLINSIRGFLKTYGIRLGSCGGKEFPERVRASIPVEAIMAREGIESLVTCYEKLSAEIKKLDKKIEDLVKEDEDVKRLMTVPGVGIITAMSFKIGIDDPYRFKKSRNVGAYFGMTPRQYSSGETKRQGHISKCGSSEVRSLLTEAGLVCLTRSKKWSRVKAWGLKIMRKHGAKKAAVAVGRKLAVVMHRMLVDKTDFVYGEEKKKEEKVA

SEQ ID NO: 86704 - protein, 369 aa, unidentified
MDSMTQVEGPIHLGLDVAKNAIVVGVLLPGREGVDVDRICHDEASVRRLVGRFGDRSALRTCYEAGPTGFGLYRLLRSMGVACDVVAPSLIPRSPGDRVKTDKRDARRLARLHRAGELVAIAVPTAEQEAVRDLCRARAALVRDRRRARQRLDKFLLRHDRVYRAGSAWTARYELWLGGQRFDDPALRSTFAHYRGVVSARDAELAAIEAALTAWTERGPFAAATHRLACYRGIAYLGGLTLASEVFDWRRFGSAIQFMGFTGLVPSEYSSGETVHRGHITKAGNGYVRAQLIESAWAYRNRAAIGVDLKRRQAHADPATLARSWTAQQRLCGRFHRLANRKTDKKIVVTAVARELAGFVWAEMVATQG

SEQ ID NO: 86705 - protein, 333 aa, unidentified
MKLKKEIIGIDVSKLTLDVFILSLKHHFVVSNNPLGFSKLLQVIWKRLPNNKKENLFFCFEDTGKYSLPLCIFLSGEGLNFAMVAALDIKRSMGLVRGKSDKKDASVIALYAWRKRDEIKPTIFPAGSIVRIKQLLSLRNKLVKHKKAYQTGMDDIQDYFKTGDSIFYLEVNKRVVKLLNAEIASIEKEIETIIKSDPQIQKNYKILKTVPGIGKIIAFYLIAYTHNFTKFEDARKFCCYCGIAPFENSSGTSLKGRTKVNPLANKMIKALLNMGALSTIKHYPEFKSYYKQRIEKGYNKMSTINIIRNKIVFRAFSVVKRGSAYVDLHKFAA

SEQ ID NO: 86706 - protein, 420 aa, unidentified
MSVTHTTALLHGGLPAPAGPTGGIDWARDDHAVSVVDPDGRQVARFTVAHTTTGLRQLTRRLGRARVSQVAIERPDGPVVDALLAAGLTVVVIPPSQLKHLRSRYGSAGNKDDRFDAFVLADVLRTDRHRLRPLAPDTPATRTLRATCRARKDLVGHRVALTNQLRAHLQQAFPAAVGLFHNLDSPISLRFLTRFPNQDAADWLSPTRLGAWLAAAGYCGRKTPQQLHAHLAAAPRGATGPNGAARAHITRALLAAIAAVTDQITQLQAHLREQLQLHPDQQIFTSLPRSGTVRAARLLGEIGDCRARFPTPQALACLAGVAPSTRQSGRHRAVAFRWSCDKQLRDAVCDFAADSRRASPWAARLYQQAIDRGHDHAHATRILARAWLGVIWRCWQDHQPYNPAKHGALQALTNTTNPAA

SEQ ID NO: 86707 - protein, 413 aa, unidentified
MDKIYDICCGIDVHKKLIVACLNHKRKKELREFGATTRELMELAEWLQKNECEIVAMESTGSYWKPLYNIMESYGLHAIVVNPAHMKAVPGRKTDVKDAEWIAELLQHGLLQPSYIPSKDQRELRELVQYRKSLVGERTRELNRLQKMLEGANIKLSGTVTNINGKSARKILEYILSGNEIDEKKYDEMYEEKLIAHNLKASKEQILDDLKGFMSPLQRRMLKELLQHLDELNVHIENLNDEIDNFMKPEEKQASQVIQDVTGIGNTSAQTIIAVIGTDMERFPSDRHISSWAGLCPGDNVSAKKRKSGKIRKGNALLKSTLVLCAHAAVRHKSSYFHAQFKRISTHREKKRAYVAVAHSILIAIYHILKDGVKYQDLGAEYYNQFNAERKIHAYLKKLKALGWEPPKEAVPA

SEQ ID NO: 86708 - protein, 427 aa, unidentified
MAKGKIDPEPEFAAFVGIDWADRKHVWCLQAAGSAKRETGELEHKVEAVEAWVAELCQRFGHRPIAVAVEQVKRALVFLLNKYECLHIFPVPSTMTAKMREALYPSGAKDDPRDADLLLDILWQHRDKLRRLSPDNEATRRVQNLVEERRKLTAEKTAQGNRLTSYLKIYFPQMVEWFEKLDMPLVCDLLERWPTLEELQKVSTEELRTFFRQHHCHRGLRERRILAISGAIPAKGDRAVIEAKSAVVKVIVQLIRSLLQGIAELDGKIEEVAAEHPDFFIFESLPGAGAVMAPRLLAAFGSQRDRYRCADELQTYSGIAPVTERSGKRKWVHFRWACPKFLRQSFHEWAGHSIVQSAWARAYYQQQRDRGSDHHAAVRALAFKWIRIVFRCWKDRVAYDESKYLAALAKRGSPLDKLVVVGIGTSL

SEQ ID NO: 86709 - protein, 404 aa, unidentified
MDRYTAGIDWAQTEHAVCVMDGHGKVKAAFSIPHTREGLAELIRRLARFAPPGDLPIAIERPSGLLVDALVEAGHPVVPIHPNALKASRPRYRAAGGKSDPGDAFILADLLRTDGHRFRALRPACDEIRALRASVRGRDDLVAERVALGHQLTALLESFWPGAAAIFADVTSPIALAFLERYPTPESAAHLGEKRLQRFLDRHRYSGRRSAKELLGRLHAAPDGRAGEAEAEAKGALVRSLVAVLERLGQELRRLTSAVERHVAALPLGQVIMSFPRAGKVNAAQILAELGDDPQRFLSPDQLAAEGGVAPVTHASGKSRGVTFRWACNKRLRAALTTFADNSRHASPWAASVYAEARVRGCNHPHAIRILARAWVRVLWRAWSEGKPYDPARHQAAQKIERAA

SEQ ID NO: 86710 - protein, 339 aa, unidentified
MHVTTIGLDLAKNVFQVHGITLDDEVAFNRPLRRAQLLPFFSKLNPCLIGMEACSSAHHWARELTNFGHDVRLIPPIYVKPYVKRGKSDAIDAEAICEAVTRPTMRFVAIKTVEQQSLLSVHRARSLLVPQRTQLINGLRGMVAEFGVYIARGLARVIGFAENILTGEVLELPDIANEVIHNMCEHLMALHARVHWYEDRLKQVAKEDARVRLLRTIPGVGAVTASAIIASIGDGHQFSNGREFAAWLGLTPANKSSGGKEKLGRITKMGDQYLRSLLVVGMTSLVRQTKSHPERASKWLTSLLERKPARVATVAMANKTARIVWAVLTRNEPYTPHTA

SEQ ID NO: 86711 - protein, 410 aa, unidentified
MAERFVGIDVGLREHRIAVLDRDGEAVGQSFTIAASKDGVATLLRALDARDAPPAPTLIGLEASGHLWENLEAALVGAGYRVIVLNPLQTRRYRDVVRRKAKTDDIDAHVITGLLRSGVAQASYVPDEQVQSLRELARLRARLMADRQDYQRQLIAQLDVVLPEHHAVLGDLLTARARGILAQFPTAQHLAQANPRAIRRAAEDAGARGFSLNDATGVRDSARRSLYSGKAAVARAHVVRTLVNQLERLINAIDEVDRAATALLPPSEPGTGPSDAELLQTIPGIGPQTAATLLGELGALTRFTDARALVAYVGFYPVIHESGDRAATPRLSRVGSRIARRSLYLAAVNAVRRSGEWRTIYLRKKAQGKTAKQALVVVAVKLIHALYAMLKHRQPYNPSRLLVEPATIGT

SEQ ID NO: 86712 - protein, 388 aa, unidentified
MDVLYQSCAGIDVHQATVVVCILHGPLTSTRPKREMAQFDTTTKGLKACHDFLSQFHVEAVGMESTGVYWRPVWHELCDDFELILAQPAHMKAIPGQKTDKKDAHWIAQLTRIGLLPRSFVPDETIQELRELTRQRKHYVESRNRETNRIHKILQSGGIKLTTYIEDIMGASGRNLLQLLIDETPITPRIVHQSVYTSLKRKVPQLLEALDGYFSAHHRFMLAQSLEIYDFYQKQIDCLEERMNGYLNLYERPVEILDSIPGIDLTTASVIIAEIGVDMNRFPTAGHLASWAGLCPGNNESAGKKRSTKIRHGNSYLKRCLCQTVFAAKKQKGSPLAERYYQIQSRRGPQKATIALAHQLLKIAYILLKENLTYQEFVLQKRLLETSQ

SEQ ID NO: 86713 - protein, 337 aa, unidentified
MDTTPFLATSKAFVGLDVSKDTLDVCLVIEGKRHEKQFVNDAPGHRQLLRWSHSLAKNGSCHFCLEATGPYSQSVALFLMEKEQLVSVINPARIRFFGLAQNQGNKTDKADARLIAQYCQMQSPPPWRVAAPAVRLLQEMVRRLHALSDLAAQEKNRSQAPGQSKAVLASSKRVVTALEKELLRLKKEVRAHVKAHQDLQRDSQLLQSIPGIGEITSWDILAEMPDVEEFDSAQSVAAYAGLAPREQRSGSSVRKQTQLSKRGNSRLRKAFYFPAVSAMTWNPLVKAHYERLREKGKPKMVALAACMRKLLMICYGVLKHQRPFDAQWLAAPLAPPS

SEQ ID NO: 86714 - protein, 443 aa, unidentified
MSFDRLKRTQRRKRLPGHKLKPSRATLFVQNSKPHLSMKPTYFLGIDAAKHKMRATLSNRSEHVLFEKDLSVEATGLRQLLAAIKRQVNDPEQLLVLIEATGLLHLNWSAALTKAGYAVAVINPLIARRLYTLQNSIRDNKSDPIDARGLCTIGLLHGEKLLVHYRFSLRPEQFTLQRAQSVRKALRSALTNLKKTYQSLMDLSFPELGGLLQLDGVGIRQLLIQAPTPAAIVGKRLSTLEKNWMVRPKAAALKALAADSMADPDLAAASGPALVALLQSVAAMEARLHALDQQIAKLACTSVDPQTKALIETIPGFGPVNVAKILAWLPTEILHSGSNRKVAARLQAFMGNDPRLRQSGQWKGHTKMSKRGVEMLRTAFFQSAFSAAHNDPELRTYYQCKPAQGKTHEVALSHLMRILTRRLVAVLRSGKPYQSHYNLKNAA

SEQ ID NO: 86715 - protein, 505 aa, unidentified
MTAPTTTRQPASSTRPSGQQAQAQAQRKAYTRRKTRAKAKSEALRQKEAAQVQALPVLRPHAAGIDIGSRSHWVCVGFSTEADSCLTQEFPAHTAGLEAIAAFLREHQVNTVALESTGIYWIPLYELLQAEGFEVLLVDPSYSHQLRGRPKTDRRDCQWIYRLHSVGLLAAAFRPDEKTCQLRAYLRQRANVVRQASRHVQHMQKALEQMNLKLTEILSDITGVTGRSIIRAILRGTRAPEKLAKYRDKQCKASEAEIAQALTGSYRAEHLFELKQAYEAWQFSLGQVEKADAQIALQLARMKCDRALPPLKRKARPKRRVNSPGFDVRTALYYVVGLDLTEIEGISELTALTLISEIGPGVSQFATVKKFCSWLGLCPNWKKTGGRVKSSRTRRGVNRAAQALRLAAQSLHHSQGALGGFLRRMKGRLGTQAALTATAHKLARIVYLALKHGMTYVRQSQEEYQAQMKEKQIKALRRKARQLGLEIIEKTSGSVATAVAASVDG

SEQ ID NO: 86716 - protein, 310 aa, unidentified
MERIDVGIDVSKDRLDVHVRPTDEAFTVSYDEAGLAELMAQLQRLQPTLVTLEATGGYHALVAGAVAHAGVPVAVVNPRQIRDFARASGQLAKTDTLDARIIARFSEMVPPAARPLLSEQAQALADLVARRRQLVDMLAAEMNRHRQARNRALQKRIDVHVTWLRRALEDIDAEIRRLIRSSPVWREQEDLLTSAPGIGDITAHALIADLPELGQLDRRRIAALVGIAPLNRDSGLTRGRRMIGGGRPTVRRALYMATLVAIRYNPAIATFYRRLTTTGRPKKVAIIAAMRKLIIMLNAMLRDHRPWQPA

SEQ ID NO: 86717 - protein, 370 aa, unidentified
MAKRSMFVGMDVHKESIDVSLAEEGRDGEVRHYGVIPGDLEAVAKVVRALRAPARRLRFVYEAGPCGFGIHRYLTGQGEDCVVVNPSSMPKRSGDRIKTDRRDGDALARLHRAGELTAIYIPTPDDEALRDLVRAREDAVGLSTQAKHRLKAFLLRQGRRYPGRAGWTRPYRRWLADLSFPLAPQHIALQEYRDTIDETERRVERLTDQLRQQTPTWRWAPVVDALQALRGVSFVTAVGLVVEVGDIRRFDHPRQLMAFLGLVPSEYSSGPSVRRGGITKAGNPHARRLLAEAAWAYQGVPRIGRQMLYRQEALPKTVCDIAWKAQLRLTSRFRKLVARGKAKPKVATAIARELTGFIWAIAREIPPPSA

SEQ ID NO: 86718 - protein, 477 aa, unidentified
MTTFPLTDHAGPVPIRHQYYAGIDIGYKNHTVAAIPVEAFGGRKPDTWQRAPVCKFSSDASGFEDLQRYLDKRSVDPNDFLVVREPTGGNYGLSLLFYLLGKSYKVVQVDNSAVGKYQELLAKETKTDPVDARTMARMGFIHEVIGQEFRIREVRQATEAQVALRILVTDSIRVQADVVRRRNQLQQVAAVGFPELQTFFKHSPTSATACAILAAFATPADIVSAGTEQVRRVLLEARAYTLAHHSDDLVALAKATIGVPLSERMRLRQTWLLEQIGTLEAQREQLLAQMEQASASHPYRPLIESLPVRSPIWTASLIAAIGDIAHFETPNEFRAYMGWFPMLDHSGKSANGTKLANRGVRLARRALGQMVFVLLTPRTADNPFRIYHQRLVARGMKPLKAVGHDAAKLATVLYYMLKTDRPYDEARHRRRMKLPQAQAAVVRPLDVPLEVLDAQVIEEQRHGYASDEIPQDEGAPL

SEQ ID NO: 86719 - protein, 327 aa, unidentified
MTNSAPPSSTTPAVFVGIDVAKDALDLARSDTGELLHVDNTPAGIRKLVQSLAAAHPTCIVLEATGGLEEPLLQALLDVGLPVARVNPGKVRHLAKALGILAKTDALDALVLMEFARLAEPRLAVKRSEKQAELDALVTCRKQLVTAKVDQTNRLQTTTAKSARKALNAVLHVLDKQIKSLDQQIAALIDSDDDMKHLHTRLRSVPGVGPVLTATLIAQLHELGQTDRRQLAALVGVAPFNRDSGKHLGKRAIRGGRTTLRNVLYMATQIAIMHNPIIQAFASRLKKAGKLPKVVIVACMRKLLSLLNAMIRDNLDWNELAVVKNTP

SEQ ID NO: 86720 - protein, 288 aa, unidentified
MMIIGVDYHPSFQQIAFLIEETGEYDEQRLNHEGGEAERFYRDLKRKGIRVRVGMEATGYSRWFERLLAELDFELWIGDPAEIQAKRVKKRKTDREDARLLLRLMREDRFPQIWVPSPENRDLRQLLWHRHRMVQMRTRIMNQLQALAMNEGKRWKSKLFSQQGRVAFEKLALGPWASRRRSELLELLDRLNPSIEELTTAVQQEVNKRPEALRLMTHPGVGPITALAYVLIIGTPERFTRGKQIGTYVGMIPIDCATCWWRLRRRPHATTRTGGVGTYAWRSAGTGA

SEQ ID NO: 86721 - protein, 294 aa, unidentified
MYQNFIGIDISKKDFSVGVHGKNKTVVYLNTTEGFTEFYSDYKSFLENSLVVLETTGGYELCLIHYLQARNILVHRANTRKVKYFIRSFGRLGKTDAIDALALANYGFERHISLELYQVNSQQKLLKLVNRRTELIQMLVQEKNRRQAPDQRELANSFNIIIKAIETEIKALEKSIEEVLKSTPHLQEKKEVLKEIHGIGDIIAIELLALLPELGTINRKKIASLGGVAPHPNESGKKIGHRFVRGGRIEVKPVLFLAAMTASRSKSSLGEFYARLVGAGKKKMVAMTALMRKS

SEQ ID NO: 86722 - protein, 466 aa, unidentified
MAKRTQKSTSKTRSKQQGRAKLKPQDWTLGLTVVHPKAAAVDVGNAEHWVAVPPHMDPEPVRQFGCFTVDLLALADWLQQLGIETVALQSTGVYWIALHDILSERGIRVLVANPRETKNLPGRKTDIQECQWLLKLHVYGLLRNSFRPEKRILGMRTYWRQRQQHIGDAARCIQHMQKALTQMNVQLANVISDIGGWTGQAIIAAILQGERDPRKLAQLRDPGIKASEEEVAESLVGSWQEDLLFVLRQEFESYQALQRKIAECDAQLKRHYQTMADKADPKQLPPCPREKRPHGNVPEGFDLRSELYRTTGVDLTAIDGINVLTAQTVISEVGYDMCRFETEAQFVSFLNLSPNNKISGGKIIGREKRKALNRAGLALRFAATSLLRSQTYLGAQYRRLRTKLGTPKANKAMANKLARIVYRMLKYGEAYVDKGREFYDQKYRQIQIRLLVRKAAELGFQLTESA

SEQ ID NO: 86723 - protein, 356 aa, unidentified
MTSTTKYIGMDVHKESISIAVRNAGGKIAMESVIEAKANTILEFIDGLRGEVHVTFEEGTWSEWLYDLLKPHVRKLVVCDPRRNALLKEGNQNDRVDARKLAELLQNNQLRPVYHANHGLRAMKELVRSYLTITKDLTRVMTRVKAIYRSWGIPCSGTQVYSSIHRSEWLEKIGEPGVRRRAEHYYQQLDALRLLRLEVRKDLLAESKKHAIWKRLRQIPSIGPIRAAVLLGIMQTAHRFRTKRQLWTYSGLGVEGHSSADHQVINGQLQRRKKPIEIRGLNKNCNHHLKNLFKGAAIVASTKPGPFQESYTALIAKGMRPEMARLTLARKIATIVLIVWKRGVCFDANHLKPQTA

SEQ ID NO: 86724 - protein, 374 aa, unidentified
MDGSTRFVGLDVSKAKVAIAFADAGVDAAQFVGTIANTPEKIRQAVSNLGAPQRLQVCYEAGPTGYGIYRLLGRMGVACTVIAPTLTPHRPGDRVKTDRRDALDLARLHRAGALTAVWVPGEEDETLRDLVRAREDAKVDQLRARHRLSKFLLRHDLHPPTALPAWSKKHRQWLESLKLDGSAGVIFREYLYAIDEIVARVARLEAAIHHAATDSPHAPVIQALQTLRGVAEVTATTIVAEVGCFSRFRSPRQLMAYTGLVPREYSSGAGRWQGGITRTGNAHLRRVVIESSWAYRHRPAVGLQLRRRQEGQSAEVCAISWRAQHRLHEKFMRLTMRGKGGGVASAAVAREFLGFAWAIGRSIEDPRHVPASAA

SEQ ID NO: 86725 - protein, 318 aa, unidentified
MSDAVFIGIDVSRDTLEVGSTAQTSTSQQTNDTAGIAALTAQMLELGPALVVLEATGGYEFEAACALQAAGLAVAVVNPRQARDFARAMGALAKTDSLDARMLAEFARVLHQHPERERFIKPLADAELQRLQALVLRRRQLVGMLTSERQRLRMSHASARPSIERVIEFLKAQIEDIERDCAAHVSAHHAALAQALGSVKGIGPATISTLLAELPELGQLCRRKIAALVGVAPLNRDSGQMRGQRAIWGGRADVRRTLYMATLVAVRHNPAFKTFYERLVAAGKPKKVALVAAMRKLLTVLNAIAKTGCHWDESLHRA

SEQ ID NO: 86726 - protein, 339 aa, unidentified
MNSIAVGVDIAKQVFQVHYVDRETGEIVNKSIKRAKFVEHFANRAPCLIGMEAYGGAHHWARELSRLGHEVRLMPAEFVKAFNIRNKNDAADARAIWLAVQQPSKPVAVKTEMQQAMLALHRMREQLVKFRTMQSNGLRGLLTEYGEVMSKGRAKLDKEIPAALGRIAERLPAALIDTLREQWNGLARLDEQIVEIERRMREWKKADRAVKAISEIPGVGLLTATAAVAMIGDPKAFSSGREFAAWAGLVPKQTGSGGKVNLHGISKRGDTYLRTLLIHGARSVLTHAKEPGPWVEQMKKRRPMNVVIVALANKMARMIWAVLAHDRPYRKDYVSVKPA

SEQ ID NO: 86727 - protein, 400 aa, unidentified
MAQPVWAGVDAGKADHYSMVIDGDGQQLLSRRVANDEAALLELIAAVTTLADGGEITWAIDLNAGGAALLITLLIAAQQRLLYIPGRTVHHASGSYHGDGKTDAKDAAIIADQARMRRDLQPLRTGDDIAVELRILTARRTDLVADRTRAINRLRAQLLEYFPALERAFDYSKSKAALVLLTGYQTPDALRRVGTARLAAWLRKRKARNADTVAATAIDAANAQHSIVPGQQLAATVVARLAEEVMALDTEIGDTDAMIEERFRRHRHAEIILSMPGFGVILGAEFIAATGGDMGAFASADRLAGVAGLAPVPRDSGRISGNLKRPRRYDRRLLRACYLSALVSIRSNPASRTYYDRKRAEGKRHTQAVLALARRRLNVLWAMLRDHTTYQPTTPNAAAA

SEQ ID NO: 86728 - protein, 424 aa, unidentified
MNTNWNQYLHFAALDWASDHHDVAVVDRLGTIVAEFRFAHSAGGWAEFQEKMKPYAGCPLALETSSGPAVDQLLQRGWTIYPVNPKAAERYRERKAPSGDKADRHDAWSLADALRTDGHGWRPLIAQDEATATLRALCRDEIGLIEQRTLLVNQLIAALREYYPAALDIFDDWTRPYAWALLRQFPTPAMLQQAGQRRWEKFLHCHRLWHPNTAPERLKIFAAANALPASAPVVAAKSLLATSLVKVLQTLENQLEEYRQRINSAFHQHPDFDIFGSLPGAGEKLAPRLLGELGSARELFPDADSLCCHAGASPVRYQSGQVNRARIRWACDTVLRYTVHLWADCSRKKSAWAQAYYARKREQGMSHAAALRCLGKRWLKVLWRMWQDRKPYVESVHEQSLKDHGSWVLTRMASTITNTPNPRE

SEQ ID NO: 86729 - protein, 323 aa, unidentified
MSGPILGVDIAKKKFDVALLLVNGKLKHKVFKNNQEGFTELSLWLKKQGADHTHVCMEASSTYGDELATCLHDQGHVVSIVNPARIKGFAQGELLRTKNDKIDAGLIARFCLAMHPEPWAPVPPGMRRLQALVRRIDALISMRTQEMNRIDVSHESIKPSVREHIAYLDQEIGNLKEQIAAHIKDDPELKTKRDLLKSIPGIGEATIAAILAELHMFEKCDRVQKIVAFIGLAPRELISGSSVRGKPRICKMGNSRMRKVLYMPALVSIQYNPVIRAMYERLKKNGKNGKVIVCAVMRKLVHIIFGILKSGKPFDPNFRPNYA

SEQ ID NO: 86730 - protein, 367 aa, unidentified
MKKISTVVAKQGRNNSQQELTIGLDLGDRNSWYCVLDEAGRIQLEQRVRTTAKALQEVFGTMPRSRVALEIGTHSPWISRLLKQLGHEVIVANARKVRLIGESRKKDDRLDAQTLARLARIDPELLYPVKHRSAQAQADLMMIRARAGLVRARTSLVNTARGLAKSYGERLRGCNVRDMDPEKAENLSPELQRALEPLLATIEELSERIVEYNDRIEALAQTSYPQVDLLKQIKGVGTLIALTFLLTLEDPHRFGKSRDVGGYLGLQPGRRNSGESEPQLRISKEGDPYLRTLLVQGAQHILGPFGIDCDLRRWGLKLAERGGGNAKKRAIIATARKLAVLLHHLWVSGEVYEPLHNSRRLTVAAAA

SEQ ID NO: 86731 - protein, 353 aa, unidentified
MDVVLGVDAHKRTHTLVAVDGAGRKLAEKTVPTTTVAHQAAIRWARQRFGTELVWAVEDCRSLTARLERDLLGAGHTVVRVPPHLMARTRSSARERGKSDGIDALAVARAFLREPDLPVAYHDPTSMQLRVLVDRRDDLVVQRTGTINRLLVRIHHLDPGHHTPRNWVVKKARAEVAAWLASEEGLIAELARDELGDIERLFHDVQILDRRIGERIRVAAPALLDLHGCGELTAARIVAEVARVERFKSEAAFARYVGLAPIPHTSGTSNVRLLPTRQGNRQLNKAIHRIALTQINRGGPGKDYFQRRLDEGDNRHRALRSLKRRLARVVYTRLHTDQADDAPTRLQTASTST

SEQ ID NO: 86732 - protein, 348 aa, unidentified
MVVIGVDAHKRTHTVVAVDEAGRKLAERTVAATSDGHLELLGWSRTWPERSWALEDCRNLTRRLEADLLRGGEAVRRVPTKLMAGARRSAREPGKSDPIDALSVARAALREPNLPVARLDGVEREVRLLVDYRDVLISDRTGHQSRLRWFLVELGIPEPPSRKLTVPVVLAGVDLQLVGRAEPCARIARDLVARISEMTAAIDALARQIGELTETLAPSLLALFGCGSLTAAKLVAETAGIGRFRSRAAFAAHTGTAPIPVWSGNLVRHRLNRGGNRQLNAALHRIAITQLRCPSLGQAYVAKRLAAGDTKTEAIRALRRRLSDEVYRRLQADEAARATIENAVRAAA

SEQ ID NO: 86733 - protein, 314 aa, unidentified
MKMAMLSFCGIDVSKDRLDVVVLPEGWFFSVSNDTAGWAELVVRLRPLTVSAIGLEPSGGYERGIIRALLAAGMSVRRINPNKLRQFARARGVLAKNDRLDARLIAEYVAIMPTRVVQRDAAVERLAEIVTMRRQLCDEHVAAENQAAHLEDAMLRRLSKRRQMRLEADIRLLDKRLAEMVAANVALAQRYELLTSMPGVGPVLAFTLIALLPELGKMSRKQIAALVGLAPYDFDSGKLKGHRTIYGGRMPVRNVLYMAALSASRYSPALKAFHKRLAAADKKSKVIIVAVMRKMITTLNAMLRDSAAWQPRSA

SEQ ID NO: 86734 - protein, 408 aa, unidentified
MNAVGIDVSKGKSMVAALRPMGEVALLPQEFLHTEVGLEQMAYAILTLGEDTRVVMEATGRYHEPVAAALHEYGIYVCVLNPLFIKQSGGGSIRKVKTDKADAMKIAKYGLDNWVDLREYTPMDTIRQQLKLCSRQYNLYMKTVVSLQNNLISLTDKTFPGVNELFSSPERADGHQKWVDFVMTFWHCDCICRASEKVFTERYQKWCKRKGYHFSAEKALDVYAGSCGHFTTLPKNDNTKLLITTAAQQLLAGKMTLAALRAEMTRLAKRLPEYDTVRAMYGVGETTAAQLMAEIGDVRRFPRRSSIVGFAGVDPAVDQSGKHEAKSTPTTKRGSPHLRKTLYQIVCTYLRKAPEDEPVYQFLDKKRTEGKPYFVYMTAAQNKFLRIYYARVKECLEDFDAQQNSAQS

SEQ ID NO: 86735 - protein, 364 aa, unidentified
MLIIGCDYHPGFQQIACVDTDTGELSEHRLAHREEAEAFYRELKPRNLSARVGMESSGHSRWFERLLGELQFELWIGDPAEIRTKRVRKQKTDRQDAQLLLRLMLEDRFPRIWVPDAENRDLRQLLWHRHRLVRMRTRVMNQLHVVPLNEGLRRKKALWRPAGRKELESIALATWAARRRQDLLDLLDQLTPRIQELTRALEEEVEKRPVTRRLMTHPGVGPLTALAYELVIGMPERFHCGKQLASYIGLVPTEESSGDRRRLGHISKQGNVLLRFLLVEAAQVTVRSQPEWRSKFFHLAMRRGRKIAKVAMARKLAVHLYWMWRQGLDYGQTQKLGSHAGEPGHRDGVQSITDVMIGHPAPSK

SEQ ID NO: 86736 - protein, 343 aa, unidentified
MGLYVGLDVSLKRTSVCVIDEAGKVVWRGTALTSVEALASVLNKQAPQAERIGLESGSMTPFLWHGLRLQGFAVVCLDARWAKKALSSNPVKTDANDAEGLAQLVRVGWYKEVEVKGMEAHRLRALLTGRQQLVQAKVSLINQVRGLLRPFGLVVQTGSGQSFSARVAELVAGDEVLTMVTETLVAAMADLEKRIEVLDKRLRAQAKGMTEVRRLMSVPGIGPITALAYRAAIDTPTRFAHSRDVGAYLGLTPKRYQSGEVDRDGSISKCGDHMARHLLYEAANVLLTSVSTWSSLKAWGMKLVRKVGPKRARAAVARKLAVILHRMWIEGTDFRHGKQPVAA

SEQ ID NO: 86737 - protein, 392 aa, unidentified
MIYVGIDVAKTTHYAAAADSDGIVLVEPFAFDNDAPGFAKFISKIASFPKEQLIIGLESTGIYSENLICFLFDSGYKLAVINPIQTATLRKTNIRKTKTDKVDTLLIIKSLMVNSYRLYTEQDACSLKLKSLCRFRQNLKKSKARLKIQLSGYVNLLFPELLSFFKSGIHISTCYTLLKRCSSPAEIAALRLDSLSKLLSNASRGRFSRSTAEALKSLAKSSVGVKNPYISIQIAQTIQQIELLEQQIDEIEKVIKDTMCELNSVIMSIPGIGAIDGAMILGEIGNIDRFSSPAKLLAYAGLDPTVCQSGKFKARSTKMSKRGSKMLRFALINSAWQLSLRNDTFSDYYQLKLSQGLSHYGALGHVAHKLVRVIFTLLKHNILFDPSRLVNS

SEQ ID NO: 86738 - protein, 348 aa, unidentified
MKSSEYWIGVDLHSRVIQVCVLDARGELVVEDRCMGGGLEEGQKLVRELALRFAGAQVAVEALGCNRWFVAACQEVGLQVTVANAAKLQLKMAGRKTDRRDAFELARRLRLGDITRNAKAYHPTDDEYGLRQLLRRRHGLVQSRTALVAQIRAMLRSYRTPQPRGDLYGKQALKSLRAIELANPLETAVLRTLIDALEALHAGVMSLDRLVAIESKKDAPAVLKLLPYVGPLTATTLVAELGDVHRFKNSKAVGSYAGLVPRVIESGERSYHGPLVNHGNRELRYVLGEWAVQLLARHELVKRWAQPRLRGSAKNKVRVALARRLLVGVWHMLRTGEAFNLERCLALS

SEQ ID NO: 86739 - protein, 476 aa, unidentified
MNCAAQPFRWRQQEELEMNPKRSKSRHGHKMPLVHPNAAAIDVGATMHMAAVRADRTPEPVRSFGTFTADLHRLVDWFTQCGVETVVMESTSVYWIPVFELLDARGFTVCLVNARDAKHVPGRKTDVSDAQWLQRLHSYGLLRASFRPKGQVAELRSYVRQRERLLEYAASHIQHMQKALTEMNLQLHHVVADITGATGLRIIRAILAGERDPEALAALRHYSCHSSAETIAKALTGSYRAEHLFALEQALALYTAYREKASACDMRIEAVLKELSIHRGRDHGAVPPPRRRHRTDQVNALAFDVRAALFALLGKDITAIDGLGAYLSLKLIAECGDDLSSWPSAKHFTSWLGLAPSNKISGGKMLSSRTRRSGGRAAALLRLAAVAVGRTDTALGAFYRRLSSRIGKAKAVTATARKVAVLFYNAVRHGMEYVDPGASSYETRYRTRVVNNLHRRAKAFGFVLQPLEPKAGAAVS

SEQ ID NO: 86740 - protein, 447 aa, unidentified
MNKDTIQTNSVNAIPEAARPEPIVCWVGLDWADKKHCLVVRSAVGGPPQRHLVEQKPEALDAWFLELRQRHPAGRIAVAIEQSRGPVLYALMKYDFLAIYPVNPRSLADYRRAFKLSGAKDDPLDAQLLCELVSLHPDRLRPLVVEDVPTRKLRLLVEARRGFVEDSTGLSNRLRAVLKCYYPLALELLEEDLTTPLALDLLRRWPNLAKLQAAKPSALRAFFYAHNSRSEERIKQRLEAVRSAQPLIQDTALLEPFQLQMEQLVQQLRALQRTITLYDQRIKVVFAQHSEAWLFQPLPGAGPVLAPRLAAAFGTIRANFASTDNLLCFSGVAPIRRQSGTQEIVQFRYARPVFLHQSIVEFAKCSIPKCAWAKLLFEEALRQGKSRWAALRKLAFKWLRILWRCWQQRQAYDEVTYLRSLQRDGVQLYRSLWECLPPLNATPVHNS

SEQ ID NO: 86741 - protein, 366 aa, unidentified
MRKVSTTLVKQSRKNSQQLTIGLDLGDRNSWYCVLDEAGQIQLEQRVRTTAKGLEEVFRAMPRSRVALETGTHSPWISRLLRELGHEVIVANARKVRLIGESRKKDDRLDAQTLARLARIDPELLCPVKHRSAQAQADLMMIRARAGLVRVRTGMVNTARGLAKSYGERLRGCNVRNMNPEKAEGLSAELQAALEPLLAAIESVSERIAEYNQRIEKLARESYPQVAVLKQVKGVGTLIALTFLLTLEDPHRFGKSRDVGCYLGLQPGRRNSGQSEPQLHISKEGDPYLRTLLVQGAQHILGPFGVDCDLRRWGLQLAERGGRSGKKRAIVATARKLAVLLHHLWVSGEVYEPLHNNSRVAVTAAA

SEQ ID NO: 86742 - protein, 345 aa, unidentified
MPIVGGLDIHRKQITFDYLDTVTGQVQRGQVSPADRAHLRAWLARFAGREDVAFAVEGCTGWRYVAEELAAAGVTAHLAEPADTAFARGRKRHAKTDKTDCRHLRMLLAEGRLPECWIPPGRILECRALLETYHDLRREHTAWVQRIHAVLFHQGAPALGGGTLRGEQGLAALREVSAACLSPAGQLQVATALEVLEALEARLHELRHQLLDAARHLAGAKVLAERLYGVGPFAALALTCWLAGKDRFSSSRQAVRFAGLDVTVYSSDRKGPPGRLSRQGPPVLRWALYEAGKTHARASAPDHAYYAAVKDRCNGKRAALSEARKLLRQAHHILAELGDDALSAA

SEQ ID NO: 86743 - protein, 393 aa, unidentified
MQDYFICIDVGKNNHWANVMTPSGEIIINPFKFSNDLKGFSTLFKTIQPYLRKDHLVGMEDTGHYGDNLRIYLLDHGATVAMINPVSTDAMRKATLKSTKTDKEDTRNIGIVLLNPMLYRIVDKSSLDSHEMRELTRYHHNMQEACTRYKTQLQKDIDKVFPEYNSLFSSHYGPTYMRILEQFQSADTISHTDIRTLRNAISPKGQKGRGVSFTAEQLKQLARNSVGEPNMSIELEIRHLVGLITLINKDLAEVDKKIEEYSSQLNSPIKTIPGIGDFSCVSICSEIGRIDKFNNPYQLISYSGTNPIVYQSGQYQLMVTRISKHGSKYLRKTLYQIIQPVIENNAVFKAYYLKKLSEGKTHRCAQGHCVRKLLRVIFHLLKTGESFNPDKIH

SEQ ID NO: 86744 - protein, 348 aa, unidentified
MSKHAVPAGEVSGLLRRFAELRRKAAARTGRDLPIIVIQEAGLDGFWIHRVLQSEGIESHVVDAASILTSRRRRRAKTDRIDGETLVRTLMAYKRGEPRVCSMARAPTPQEEDRRRVCRERRTLMGERVSHVNRIKGLLSAQGVFGYEPLRKGRRERLEDLRTGDRRPLPVRLKAQIIRELDRLEVLLEQLKTVEAERDALLKPASDEAASPAAMLARLKGIGPETAAVLWSEGLFRQFDNRRQVAAYAGLAPTPWQSGSIDHEQGVSKAGNPRLRTAMVELAWLWLRNQPTSALSLWFHERVQRLGRQVRKTIIVALARKLLIALWRYTTAGVVIEGAVMKAAAVTN

SEQ ID NO: 86745 - protein, 353 aa, unidentified
MKMYYVGMDVHQASIVIVVLNGAGKVVEESSLQTGVAAVRSYLQRLKGKVLVTFEEGTQAQWLYEVVQPLVTAVIVCDPRQNRLLAAGNKSDRIDARKLAELLRHGSLKAVDHRDHGVRVLKELVRNYECLVQDTTRVMSRLKAIYRGRAIACQGHELYRQDQKQQWLRKLSEPGAKARAGFLYEQLAAVRPLRQKAKLAMLREARRQAAYPWLLSVPRLGAVSVAQVLAIVGSPHRFRSKRQFWTYVGLAVVTRTSADQEVINGVLRRSRRPVATRGLNRNHNHLLKRVFKTAATSACHRGPFSAAYEARVKRGMDPALARLTIARQIAAITLSLWKRGELFQVERMKMLMA

SEQ ID NO: 86746 - protein, 349 aa, unidentified
MTKVTIGVDLGDQYSQLYVVDAAGTCVETGRVRTTRAGLERWFARQAPARVVLEAGTHSPWASRALQALGHEVLVANPRKLRGLYENDSKDDRVDAEYLARVGRLDPALLKPITHRGAAAQADLAVLHARDALVRTRTQLISHTRGVVKALGGRLSRCSAEAFARRARADVPAELRPALAPVLAQVQQVTAAIRAFDRELERRCAEQYPATARLRQVSGVGPVTALAYVLVLEDPRRFARSRAVGAYLGLRPRRSQSGERDPQLGITKGGNPFLRRLLVQGAQYILGPRGPDCDLRRHGERIAARGGKNAKKRAVIAVARKLAVLLHRLWISGAVYEPLRHSTALAQAS

SEQ ID NO: 86747 - protein, 369 aa, unidentified
MTHSTVSASPIPTHATVQLPTTIGLDLSDRVSHYHVLLGDGRTHSKGKLANTREDLTKHFAMWKGCRLVIEAGGPSHWISRLAHEQGLEVLVANPRHVPAISQSNNKSDKSDAQILAEVGCTDPKRLAPITHRSAEAQAHLAVHRARNEMVGNRTSMINHVRGVLKTHGQRAPQCSPESFGIRAYDSIPPELSAALKPLLQVIDVLNKQIKQYDKEIVRLGKEQYPVTQILQHIPGVGPNVSLGFVLTVDDPKRFKRSRSVGAYFGIVPRKRDSGNSNPQLPITKSGDREMRRLLVLSANYILGHFGPDCDLKRFGLRIAGDGTNKAAKKRARVAVARKLAVLMHHLWKTGEVYDPFYQAKRRGEPVPA

SEQ ID NO: 86748 - protein, 443 aa, unidentified
MKALPVLDSKAAGIDVGSEKLHVSIAGDAPKVFGTFTGDLERLRDWFREQGVHLVAMEATGVYWLYVYEVLEAAGLEVVVVNGRHVQNVPGRKTDMADCQWLATLHAHGLLRGGFVPPADIRQLQDYQRLRADHLIGAASQVQKMQQALERMNLKFHDVISDLVGVSGLKVVRASLKGERRPGELLALCDVQIQKKKADRAKESLRGCWKKEQLFALRQGLELWETYQQKIADCDRELAGLLQEMTGPRAGAGTRWGGPVPLAPAKSPGRNAPVIERLQELVARLCGGRDVTQIPGLSVYLVLQLISEVGTDMTRWPTEKHFASWLGLAGGRKQSGKRKGSVKAHRNRAGRMFCAAARALGQSVDKALGGFYRRLRGRLGGLAANVALARKLALLFYRLPRYGMDYVEKGLKSYEAKVLETETRLLCKLAKKQGFALIPSIPN

SEQ ID NO: 86749 - protein, 352 aa, unidentified
MFTYHRTTTDYSCGIDLHSRMMYICVMDRDGNILVHRNIRGNSFEYFLHLVEPYKHSLTVCCECTFNWYWLADACQDAGIEFVLGHALYMSAIHGFKTKNDKTDSMQITHLLRSNLIPPAYVYPREKRAVRALLRKRIAFVWKRSEILTCLSMGVMTLGHAPLNSTNKTRERWLNELKEVYTEPIDKISMEASMHMVKEFDITIRKLDQAIAGHTRSNYLTEYNTLKTVPGIGRMLALIILYEVDDINRFSSVQDFLSYCRLVKGTVASAGKIKGGKAGKIGNGYLKYAFHEAAVLGKGRNPEMKKYCQRLESKKGKFLANSILACKYARAVFYMLKNKKVFEFDKLARRAA

SEQ ID NO: 86750 - protein, 392 aa, unidentified
MVISVGIDVSKDKHDCFIVSSEGEVLADVFTIPNNMDGLHCLLQRIQACATPQDKIKVGLEATGHYSYNLLGFLLDNGLATYVLNPLRTNLYRKSLSLRKTKTDRVDARTIASMLLSDAGLKPYTDTAYHNEELKSLTRYRFDKVKQRAKLKSSIARLVCILFPELEKLVPSLHIASVYALLEECPGAKQIAAAHLTRLKALLETASKGHYKRDMALEIRDAARNSIGSRMPAKSLELQHTIRLIRELDHEIAEIEEQIQFIMDELHSPITTIPGLGFRMAAMILAEVGDFTRFDSPDKLLAYAGMSPSTYQSGLLKNCYPHMEKRGSRYLRYALYNATKYVCHWDPAFAAYLAKKRAEGKHYNIAISHAAKKLVRLIFALEKSRQPYCSAA

SEQ ID NO: 86751 - protein, 336 aa, unidentified
MNIAYASTDVSKGTLDCCLLLPVVKPKYRKFPNNAKGHEDYRFWTKEHTQGMEVRHCMEATGCYHLGLASFLAEKDDWVSVENPRRIKHFAIAANLKNKNDKVDSYCIARYAQALSPREWILKDPHRRELDAMRTRLRQLKQDISREENRLENIFLPELSVLQIRSHVEFLEGQIAQVEQRVREILAEFKPARDVYNAIVQMKGAGPETALLLASIDVQKFECAKVVPVFFGINPRQHQSGKKQGTTTISKAGDAVGRSLLVSAAISAARHNEVLKAFYDKLRTRGLKHKQALAAVARKLLMITWAIAKATLEQRPVYYPGGTKISRQAKKYCITT

SEQ ID NO: 86752 - protein, 347 aa, unidentified
MNFYNSSHPYYCGIDLHARLLYVCIIDLQGEILVHTKIKADKSQLLALLEPYIGNIVVGVECMHCWYWVCDWCQQQGIDFVLGHALYMKAIHGGKAKNDKIDSFKIAALLRGGNFPLAYAYPHEMRATRDLLRRRTKIVRHGAMLKGHVVNTNSQYNLPATELNLKNISARQQLRSQFKDPIVQRNIDLDMALLDCYAKELAQVEWFIEQKAKQHNAVFYELLKTVSGIGRILALTILYEIGDIKRFETVQNFASYSRLVKCKAESAGKTYGTQGNKIGNAHLKWAFSEAAVLYLRGNDKARNYINKLQKRMSKAKALSALAHKLGRCVFFMLKNKTVFDEEKFLKS

SEQ ID NO: 86753 - protein, 388 aa, unidentified
MTPTSGSLSHPITLDYESTLVLAIELSKTSWVLAAQVPGLPRVKAKQTIAPRTEALLAAIDGYRDRSRAAGRTIERVVAIYEAGWSGFWLARWLARHGVETHVVQPSSVPVDRRARRAKSDGIDAELLLRTLLAWFRGEPRVCSMVPIPDEADEDERRRVREREDLVAERVSLVNRVGAVLATLGVRDYNPLRRDRRARLEALRTALGDPLPPHARARILRMLDRLELVCAQIAELERQRDAVLEEEAPDKAEEMIQQLAGLRGIGVQSATVLVREAFMREFANGKTLGSYAGLTPTPFSSGATQREQGIGKAGNRRLRTVMIELAWLWQRYQPGSAQVSWFRERTAGTGRRMRKVMVVAMARRLLIALWRFATQGVVPEGAVISPAC

SEQ ID NO: 86754 - protein, 348 aa, unidentified
MNALHYIGFDVHKKTISFCVKTAAGEIVEEGNTPAQREALRKWAAARPQPWRGALEATLFSGWIYDTLKPYGEQLEMAHPAKMKAISAGKKKSDTIDARTIADLMRCNLLPACYVAPPRIRELRRLLRYRSLVVSEAVRMKNKMAGLLMETGALYVKEKLHRKKYFANLLEELEEVPQSVIDLLRLSRGALEMFESTQKRLVRELLADSELAQRVERLMSIPAVGEITALTWALEVGDPQRFRSGSDAMSYCGLTAALKSSAGKQQRGPISKQRNHWLQTTLIEAAKLAPRWNPQLAALHARELERGHRNRATLAVARKLVAYLLAVDKSGQPFQVRAPSEVPRQKAA

SEQ ID NO: 86755 - protein, 416 aa, unidentified
MIEKRYWYAGVDWASESHHVFLTDADGRKIAERVFKHSGEGLAEMAGWLMATSGAAEASQIQIAIEVPHGPVVETLIERTFKVHAINPKQMDRFRDRFTLAGAKDDSRDAEVMASGLRTDARCFRLLAGTDPVVIELREWSRIAEDLGGERNRLTNRMREQLWRYFPALLELESDLGAEWLLDLWETIPAPDKAARIRETTIAKLLKRNRIRRFDAAHVLNVLRRPPVQVAAGTTEAASAHVATLIARIRLVNQQLVEAHRRLDILTARLVPTEEAEPGQRKQHDVEILASLPGVGRIVLATLLAEAFDALQRRDYAALRSLTGVAPVTKRSGKSCIVVRRQACHDRLANAMYHWARVAVQHDPRSKAKYASLRSRGHSHGRALRSVTDRLLNVACAMLKTGSTFNPSLAAPKTTC

SEQ ID NO: 86756 - protein, 347 aa, unidentified
MRFYTKQHQFYCGIDLHTTKMYLCILNQKGEKVLHRNMKARPDNFLHAIKPFREDLVVSAECMFAWYWLADLCEHENIPFILGHALYMRAIHGGKSKNDRIDSHKIAALLRGGLIPQAYVYPAKMRATRDLMRRRNHFMRKRAELFAHTQNTASQYNLQDPLGRIAVPKNRDGVIERFDIPCVQRSIGANMALIETYDMVIDELERDIIKSAKSHDPVAHALLKTIPGVGRIIALNLLYEIESISRFPRVQDFVSYCRLVKCTKESNGKIYGSSGKKIGNAHLRWAFAEAAQLFLKGNEPGKKYHQKLVNKHNKGKALSILAHKLGRAVYYVLKNQKAFDLNKFLAT

SEQ ID NO: 86757 - protein, 425 aa, unidentified
MNYKQNEKINQVKESTLVVGIDIGSTTQYARAFDWRGIELGKVFTFSNSREGFEAFKAWMQRLQDKYRKSDVIVGIEPTGHYWFDLGAYLEDEGILLVMVNPYAVKQTKELDDNSQSKNDRKDPKVIAKLVTEGRYSAPYTPDGVYADLRIMVTNRKRLIREMTQIKNRFARWFAIYFPEYTDVFGDYEAQSSMLLLKKVCTPEAIVELGAEKINQIWRDAKLRAVGMKRATTLCETAKRSIGLKKGSSAAQYEMKLLLEDYEYKKAQLDAVIEEIEKLCRKIPESEQMLAIKGIGVITVAGFLAEVGDVRRFESPRQIQKLAGLSLRENSSGKHKGQTTISKRGRSKLRAVLFNVAIPLIATNPEFKSLHEYYTTRANNPLKKKQSVIAISCKLIRVFYAILANGVTYDAQKMLSDIHRQPQAA

SEQ ID NO: 86758 - protein, 315 aa, unidentified
MDAIRTCCAGLDVHQATVVACILTGPLEEKPQVFLREFSTVLSGLLELSDWLAELNCSEVAMESTGVYWKPVYNVLEATCSVTLANAAHIKNLPGRKTDKKDAQWIAELHRCGLVSSSFIAPKEIRELRDLTRYRRKLKGYETSERNRILKVLEDANIKISTFMSDVFGKSGRLMLDALVNGETIEPHQVADLAMGRLRAKIPDLIEALNGRVTLHHRKIIRRSLEHLKFLETAIEDLESDMEQHFIPYQAQEELLQTIPGVGPNVAKVILAEIGTDMSVFPSAAHLASWAGVSPGNHESAGKKKEHGRRKATRL

SEQ ID NO: 86759 - protein, 338 aa, unidentified
MIIGCDYHPSFQQVAFVDTRSGECGERKLTHQMEAESFYRNLHGQEVRIGMEATGHARWFERLLAELQFELWIGDPGEIRTKRVRKQKTDRQDAELLLQLLVENRFPRIWVPSPENRDLRQLLWHRHRLAQMRTRVKNQLQAIALNQGMRRGKGLWSKAGRAQLEALELAPWSGRRRQDLLELLDRLHPRIEELSAAIQQAAEQKPEAQRLMTHPGVGPITALAFVLILGVPDRFRCGKQVGSYLGLIPCEQSSGGRQRLGHISKQGNTLLRFLLIESAHAVVRYEPDWRRRFLHLALRRGRSIAKVAMARKLAVRLYWMWRKGRDYQQISKFGSHVE

SEQ ID NO: 86760 - protein, 336 aa, unidentified
MSDQKFVMGIDISMDDFHVCAKVKKSTGEVKIKGTRSFANTEKGFRAFYTWSKKRVGVEDELYFVMEATGVYYENLAYFLYAQGEYTAVVLANKAKNFAKSLNIKTKTDKVDSKIIAELGLERKLERWEPMSSHYKEVRDLCRELLSLKKEMTRAKSQLHAMEHSYRKSSRVIKLKNEQIDFYENAIDEIHEELKRLVADDLELKEKLEKVQTIPGIGFETSIILASETNGFRLFKNIRQVVSYAGLDVAFNESGIFKGKTRITKKGNSRIRQALYMPSLSALRDNEPIKMLYERVCERNPEVKKKGVVAAMRKLLILTFVLWKKNEAYDKNYVWG

SEQ ID NO: 86761 - protein, 415 aa, unidentified
MERLIERCAALDIHKDSLMATVRVSKPGGGRDQQTHSFRTTTAGLLALRDWLEGFGVTVVGMESTGVYWRAVYYLLEDGFQCWLLNAHHLRNVPGRKTDVQDAEWICQLVEHGLVRPSFVPPRPQRELRDLTRYRKAQIEERTREVQRLDKVLQDAGIKLSSVASKVLSVSGRAMLDALLAGTNDPDALADLARGRLRQKLPALREALSGRFSSNHALLVSQILAHVDFLDESIASLSQRIETELAPFADKVELLDTIPGVDRRAAEVILAEIGPDMSRFPSHRHLASWAGLCPGQHESAGKRKSGRTRNGSKWLSATLAESAKAAARTKGTYLAAHNARIKGRRGASRATIATAHAILVSAYHMLERGVPYDELGDDYFHRRERDRADRHTRRLVHQLERLGHQVTLQPTPEAT

SEQ ID NO: 86762 - protein, 355 aa, unidentified
MIIIGADYHPGFQQIAFVDIDTGEFQERRVQHREEAEKFYRELAAQGMQVRVGMEASGQARWFERLLSELHFELWIGDAGEIRTKRVRKQKTDRQDAQLILRLMLEDRFPKIWVPSWENRDLRQLLWHRHRMVQARTRIMNQLQAVALNEGLRCKKRLWRDAGREQLESFGLAPWASRRRRDLLELLDQLTPTIAELTQAIEQEEVEKCPEARRLQTHPGVGALTALSFVLIIGRADRFQCGKQIASYLGLVPLEDSSGQRRRLGHITKQGNSLLRFLLVEAAQVTVRSDAEWRSQYFHLAMRRGRKIAKVAMARKLAVRMYWMWRKGWDYEQLKKFGSHAGQPGNRHGVQSITE

SEQ ID NO: 86763 - protein, 322 aa, unidentified
MCKIIGIDISKQTFDVGFLKETTWQHFVLDNNKKGFKELLKKVEDDDWLVMEASGPYYLPLALFFHKENKKVSVLNPLIIRRYSQTRLYRAKTDKKDAQTIAEYGVQYELEQWEPEIKEISKIKQLYTALELINKEIHQSERQLESFKSSGILDKDLELTLKSIVKFLKNKQNKLEKQIALNAAKNYQPTLDRLKSIPGIGTKTAIMLTVITGDFEKFDNYKQLIAYVGFSPRLYQSGTSVRGKGHICKMGKSQIRKLLYLCSWSAKKCNKGCIEMYNRLKEKGKPERVIKIAIANKLLKQAFSIVKNQTYYAENFVEKACF

SEQ ID NO: 86764 - protein, 351 aa, unidentified
MLLHGKYFIFRESMENPCGFSSRYGGMDLHKKSSEIVLKTKDGIEIKEGSVKSEKESIKEFFEGIEEEIKLAIEATPQSQYFYDLIEELGIDVVLSNPLKTRLIAEEKVKTDKVDANALCDLARGNLLPTCYVPEKDIRELREIARTRISLGKVKGNFKNHIRGVMDRKRIEYPGSELFNNKGIKWLKSLDQPIINTWIPLLETALEQCDKVERKIAKKAKKYDEIELIESIPGIATYSAAVIYGEIADINRFSSEKKLYSYAGLTPSIHQSGEVEYHGKMNKQGSKYLRWVMIHAIGNHNRFCPNSNISKYYRRKKKTKPAKIARVNGARKLLQAIYWMLKNNDKFRARG

SEQ ID NO: 86765 - protein, 355 aa, unidentified
MRIIGCDLHSRQQTLAMLDVDTGEVEERVLAHEGEQVREFYAGLPGPVRVGIEATGSMHWFLELMDELGVECQVGHPAKIRACEPRKQKHDRRDAMLLLNLLAEDRFPKIWMPTVEQRDVRELLLYRHQWVRIRVRMQNALQSIALSHGLRRGTSLWSKAGLEAIGSLALPPYRTQRRDALVRTYRQLQTEIEALDKTVAACAEQRPQALRLMTHPGVGPITGLATEVFLGDATRFADGKAVASYVGMIPSEFSSAGRQRCGALTKQGNALVRFLWCEAVGHAARRDDALKRFFRRKLAQKGLGKATVATGRKLGIRLWIMMRDQIDYEEFCRRARRNGEAHAEMPDCEHGPASQ

SEQ ID NO: 86766 - protein, 420 aa, unidentified
MKVVYQTCCGVDVHKSFLVATIIKTTSGVQPSYLKKRFSTFNNSILQFKEWLLLNECRDVCMESTGKYWVPVFNLLEDDINVTIANPKWVKAVKGNKDDTKDSKWIGDLFRLGLVPGSYIPCKPIRILREFTRYRYKLTSCRSSEKNRYQNALTVCNVALDSVVSDIFGKSATSVIDYLIEQSDNSINHEEIASRLLRSLKKKSVSVIESIEGYQMTDSQKYRMHLVRAHMDYITSAINDIDTMLDSLVAPYENAVQLLCTIPGVDRNSAITVISEIGTDMAPFSNSKRLCCWAGLTPGNNESAGKKKSVRITRAGVYLKPALVQVAHAAVKSDKSPYYKQKYERIMKRRGKKRAIIAIARMILTAIYQILSTGEVWNPTDLYKIDMPEPLKEKQKEKAIKQAKKLLISEGIIFESQLVS

SEQ ID NO: 86767 - protein, 347 aa, unidentified
MQKSNVIGIDLAKNVIQVCVISAEGELVSNKAVSPKKLKEILAKSKPSIVGLEGCSACHFWGRFAKQFAHDVRIIGPRRVKAFLQGQKTDANDALAIAVAVTQVGMVFSQLKSQDQQILQSIETSRKFIDKQLVALMNHMRAYLYEFGITTARGKKSFSQLVANILGSGEEGQPELPASLVPPLRTMWERYEQTREQRNDIEKQRNAIMKQLEPCQRLIELEGVGEVCATMLFCNLGDGKGFKNGRQASAYVGVTPKEYSSGGKVSMKGIDKIGGNKELRAALYQGALSFVISLPDKPKTTKQAWLMSLVQRVGVKRACIAMANKTVRTAWALLAFDREYQKTLLPC

SEQ ID NO: 86768 - protein, 331 aa, unidentified
MEIKETIGIDISKLDFDARIHCNQMYAHFVNSNSGFGKMVKWVYKNSPFSKENILFVFEHTGLYSYRLSVFLSENNIPFIIVPGLAIKRSLGISRGKEDKMDATKIALYGYRLKDEIIPDKIPSNKIMALKSLLSLRERLVKQRAGYKASLKEQKRVLIKKDNRVLLGAQEKMVVYFSKQINNVEKEMASIIKEDDKLNEIYDLIVTVKGVGPQTALFLIVYTNAFTKFKNARKFASYCGIAPFPNSSGTSIRGRTKVSHLANKRIKSLLDLCAKSSIQFNPEMKRYYDKRVEKGKNKMSTINIIRNKILARIFAVVERKTPYVNFMKYAA

SEQ ID NO: 86769 - protein, 411 aa, unidentified
METLYPRCAGIDVHKSNVVVCVRCGDRPGRPLEEVRTFPTMTRDLLALADWLAEHGVTHVAMESTGVYWKPVFNLLEGRCAVILVNAEHIKQVPGRKTDVKDCQWIAQLLQHGLLKASFVPPEPIRGLRDLTRQRTQLIQERASAANRIQKVLEDANIKLAAVATDVLGMSGRDMLEALIAGETDPEKLADLARKRLREKIPALQLALQGRVTEHHRFLLRLHLDHVDHLGELIGRLGARIEEALAPFAEAAQRLQTIPGISQRVAETVVAEIGTDMGQFPSADHLASWAGMCPGNNESAGKRRSGHTTKGNRWLKRILVQAAWAASHTKGTYLAAQYHRLAKRRGRKRALVALGHTLLVIIYHVLKRGTTYAELGPDFLDRLEPERLTRQLVKRLQSLGHKVTLEPVTAA

SEQ ID NO: 86770 - protein, 352 aa, unidentified
MEIVSGLDLHRSQITFRTADLRTGEVERGKIYPGTREAVREWLDRFEPGTDAHFALEGTTGWRLVVEEIQRRGFAAHLADPAELSERRGPKRRAKTDHADCELMVNLLIEGRLPESFIPPAHILELRTLVRLRKTLVDQRTEWQQRLQAQLFHQGVVPGLKLCRAEDRRRLADAEISQAGRQMIETGIVMLDGFDAKLKPLSAQLVALAKAQPGCRGLQRGLYGVGWLTAVAIVAELGDCRRFHSADQAVRASGLDVTVYESNGKRPGGHLARQGPQVLRWALFEAAQCAARKSSPDHADYRSVRDRIDHNRACLSVSRKICRRACHILKELGDAAMAPPEPASASRRPKAA

SEQ ID NO: 86771 - protein, 429 aa, unidentified
MQNESTPGARGPVFCGVDTHADSHWLCVLDWRGRKVLSRQFPADAAGYEALAGAIAAAGEPACVAMEGTSSYGAGLTRHLASLGMPVREALSPARTQRRRPGQGKCDEADAERAARAAMSGSKLGTPKSQDGWVDGVRCMLAARSGAVKARTSAINTARSLLTTAPEGLRSRFRGMGGPRLMEELPSVRSEGALGAALGALADLWAAARDAALDMELAIEASPEENCPALLAMYGCGPVSAAKLAVAAGDNPGRLRSEASFAAICGACPIPASSGKTVRHRLNRGGDRQANSALHEIARQRVMRDPETAEYAERARARGKSDREVMRCLKRYVAREAYRALMHPHEIRRPEDASELVAARRAAKVSQVRAASILGTSEKYISMLERGQRELKPIRRAYGAWVEAGLPLDWDRQAFEAERKMDSKKHLAK

SEQ ID NO: 86772 - protein, 510 aa, unidentified
MKYAPIQVLPDVPAGGVFAGIDWATADHVACAVDMAGRILDRFSAAHDKAGIEMLITRLRENGATEVAIERGGGVLVEALLAAGLTVVVVSSHQVKNLRARYRSGGGKDDRFDAFVLADTLRTDRARLRPLVPDAPATLALRAAVRARRDLVAHRVAACNQLRAHLAAAFPAAAGLFYDLASPISLRFLASFGSQDAAAQLDEQAITAWLKTIPERGKTAPASVLCARLRAAPDGVTGEDGAAHAVITAALTVTVGMLAAQVKVLETGIGAQLAAHPDGHIFTSLPRAGTLRAARLLAEIGDCRSRYPGPQSLAALAGVVPVTRESGTHTSHAFRWAVNRPLRDAVCDFADGSRHASPWAASVYQAARDRGKDHPHATRAAHPDGHIFTSLPRAGTLRASAAGLYPDEAGNELLISHGGFLRRHDFAAFVHAGTSISDGTTPMAWIDWDAAITAQLPLSGGERRILQLAASIAGGTPASLRESIPGLDPRNLHLVITAIRHAAGQRPPHC

SEQ ID NO: 86773 - protein, 352 aa, unidentified
MQHFIGCDVHTRNQVVAWIEEETGEIKKRWLEHEGKEVREFYAQFPRGTVVGIEATFPAHWFERLMGELGHELWVGDAARIRASEVRYQKTDSRDAELLLDLLRTGRFPRVWVPTLEERDLRQLLVHRMKQVRTRTQAKNQLHALAISQGVCRKGKLWSVKGRKELESLALLPWAARRRKELLESLDRLDEQVRELDRAVEEAGRAREEVALLRTHPGVGMVVALAFVLTVGPIERFSNSRKLVSYWGLNPRENSSGGRQRLGSISKQGNTMMRWLLVEAAQTAARLDPQLRRTYQRLKKQKASGVAKVAVARRLAVRLFWMLRTRHNYTQLVHMSGSPSSAVVPPAAEPNL

SEQ ID NO: 86774 - protein, 409 aa, unidentified
MDVIHPRCAGLDVHKDTVVVCARLIIDGKVQQEVKTFGTTTKELLALADWLHERGCTHAAMESTGVYWKPVWHVLEGSTELLLANAAHIKNVPGRKTDVNDATWISDLLAHGLIRGSFVPPAPVQEMRDLTRTRKQLVREAAQHVHRIQKTLEDANIKLASVVTDVLGASGRAILDALVRGETDPEKLAELANKRIKAPREKLVEALRGKVQPHHRFLLGLHLGQIDALAEAVREVEARLGDALQPFRDLEGLLTTIPGVSQTTARVILSEVGADMARFPSAANLISWAGLCPGNDESAGKRRSTRLRKGGRWLKATLVQSAWAATRKKGSYLKAQFHRIRARRGPKKAVVAVAASMLTAAYHMLKTGVEYEDLTEMHFTTRDRTKLAKRLVKRLTDLGLSVQITPIAA

SEQ ID NO: 86775 - protein, 546 aa, unidentified
MNFYRQSHRHYCGIDLHTRSMYLCVQDHHGKKLLHRDLPADPQRFLQAIQPFRDNLVVGCECTFSWYWLADLCVQHQIPFVLGHALYMKAIHGGKNKNDKIDSDKIATLLRGGMFPVAYVYPAGMRETRDLLRRRMHLVHIRGGTLAHIQNTNSQYNLPPFAKKLCHARNRHDVAQRFTNDSVRTNIELDLDLIDHYDGLITKLELYLVEHAKVDDAYAFHLLRSVPGIGKILALVLLYEIHRIERFPSAGDFLCYARLISGRGESAGKPKGVMGRKIGNPHLKWAFSEAACLMIRESDQAKRFVQRLEAKHGKPHALAVLRARIGRAVYYMLKRKEPFDIGRFFTGVATGAGAKSSPDHGDAAPPAAVAAPEHAVIAGDATGSSSLCADQAPDGDAAVATPEPAVTAGDATGSSSLCADRATDGDAAVDATTGRAICIQPPTQGATSDPPCGSTARCGRATRLRQPNARQARPDTATAEPARRTAASRARRTVTDITPPSATSDLVSGSAACSGGGAATPRRGRTVRSRRPGQTDDNAATAVERS

SEQ ID NO: 86776 - protein, 371 aa, unidentified
MIPAVFERCAGIDVGKKFLAVCVMTGPANEEAEAEIRKFGTVRHELETLRAWLQSEGCTHVVMESTGVYWKPVLNVLEDDPQYSLKIILANPQQVKAVTGHKTDPHDARWLAHLLRHGMIRPSFIPPRPIRELRDFTRRRKQMIGIAAEERNRVQKVLEDANVKIGDVLSDVFGLSGQLMLEALVNGLGGEEQPSAFDIAQLARGHARKKLEQLTAALERHQMRTSHRTLIRHAMRHMAFLAEEIEALDQDIAALIAEANLSTAYELLQTIPGIRSQAAATILAESGPDMKQFPTAANFSSWSGLAPGNNESAGKRKRAPAMKGNPHIKTAVVEAAWGASRTKQSEFQERYQRLKQRIGHKRRSLPLLTHC

SEQ ID NO: 86777 - protein, 344 aa, unidentified
MANLNPFCDFTKLIGIDIAKSVFQIYSCDTQTGEITNVQVKRNKVLESFANCGKCLIGMEACGSSQYWARKLQALGHTVRLMDPKLVKPFVRHNKSDKADAEGIYHAMVAGVRSVAVKTETERDIQTLLTMRALLVKQRTARINHVRGLLAEYGQVMPKNVDQFDKRVDECINGLEGDAVQLVIDTMRDTVKSIRDDDDRIKTLDREISILAKQTRNAKHFLTVPGVGETIMAYMCVLLADPSQFSSARQFAAYLGLVPMHTGSGGKTVNTKIPGRCDKALRAILVQGAHAVARSKYRTDWVKNILAKKAKKVAMIAIANRIARQCWAVASKGQDWRRMPVTAA

SEQ ID NO: 86778 - protein, 349 aa, unidentified
MKNKKIKKQVVGIDVGMESFYVCYKVQYENDSLVIKGTKSFTNDASGMIDFFSWIERRNKSPEISIIFVMEATGVYYEELAYFLHYKKLKVSVQLAQKIKYFAKCCNLKTKNDKVDSKMIAEFGIEKNLNKTDFWTPPSKNFKMIRDLSREHTSLKQSIVGIKSQLHALNFAHETNKEVVKMKKQQIAFYEKQIISVEKAMRKLVKADSKLSDKIDKIETIKGLAFVSIIKVISEVNGFLLFNNIRQLVSYAGLDIIEKESGKFTGKTKISKKGNAQIRAALYMPAMSAMQYNKTLKTFYERVNQGRTIKKQGVIAVMRKLLILIYTLWKKDEEYIEDYQQKITEKKAA

SEQ ID NO: 86779 - protein, 403 aa, unidentified
MIFVGIDWAEAHHDVCVLDEVGVVQAKGRVPDGVEGVARLHAMVADHAEDAAEVLVGIETDRGLLVGALVAAGYRVYAVNPFAVSRYRDRHGTSGAKSDPGDAKVLANLVRTDRHNHREVAGDSELAEAVKVLARAHQSLIWTRQRQVSALRSALREFYPAALRALPELGTVEACSILGMAPTPERGRRLTLAKVRRSLAASGRTRNLDRRAAEILEALLAPQLEAPPILSEAYGSVVGSLVVVIDGLLHQIARLETELAERFERHPDAEILRSLPGLGLVLGARVLAEFGDDPARYADPKARKNYAGTSPITRASGKRMVVLARVAHNRRLADACYLWAFASLNASPGARRYYDARRTAGKTQHQALRALANRLVGIFHGCLHHRQLHREEVAWPTGLDAVA

SEQ ID NO: 86780 - protein, 405 aa, unidentified
MYNAVGIDVSKGKSTVAVLQPGGTVVRKPFDVTHSTSELKTLADYIMTLDGETKVVMECTGRYHEPILRTLSGIGIFVSAVNPHLIKNFGNNTIRKVKSDPADSKKIARYTLDNWAELRKYSSMDTTRAQLKTLNAQMAFFLKQKVAAKTNLISLLDMTYPGVNDLFDTPTRDDGSEKWVDYATSFWHVDCVRKIGLKAFTVRYQAFCKRHGYNFQKNKPEELFNASKELVAVFPKDQEYKDMIQMSIKQLNAISANVERTRKEMNRLASTLPEYSTVMAMRGVGATFGPQLIAEIGDITRFNHREALTAFAGVDPGVNESGKFKSNSNNASKCGPSRLRKTLFLIMSSLLQTKPIDDPVYRFLDKKRSEGKPYHVYMTAGANKFLRIYYGKVKECLKVQSEAND

SEQ ID NO: 86781 - protein, 316 aa, unidentified
MTDQTTEVFVGIDISKQSLDVYIAPPGQSLKVAYDEAGVGQLVERIEAAKPTLVVMEATGGYEARLASELAAKGLPVAVINPRQARDYAKATGQLAKTDRVDAMVLCGFARAIRPEARPPKDEDTQELDALVNRRRQLVEMRVQERLRMALTMSKKIRKGINDHILWIEQCIGEVDSELKGRLRQSNMWRPKVQLLESIPGVGPVTTTTLLAKCPELGTLNRRQIAKLVGLAPLANDSGKHRGRRFIWGGRAEIRSVLYMATVTAIRCNPTIRAFAERLKQVHKPPKVVIVACMRKLLTIMNVMIKTGTAWNPRAA

SEQ ID NO: 86782 - protein, 309 aa, unidentified
MNIIGIDVSKDTFHASFDESQVLVFKNTGEGINKFIEQLKDPEDTVIGCESTGVYHLLLCETLRKNGWNIKVINPLITHRMIGSSLRNLKTDRHDAIAIRKTLLTGAGYIYTDTPEILALKTLVQEREALCKMRAETKQRIHAHEIRARATNLKLHDSFSGAIKLLTYEIKEIEKKLIMYAPHIQKLLRSIPGIGVATSATLVAYIGDIKRFESAEKLTAYIGLDSRIHESGTSVHGKGYMSKKGNRYLRYMLFNCAFIAKRRNPEMKEYFEKKISEGKHYFTALCAVERKLVHLVFAVWSRGTPFEVR

SEQ ID NO: 86783 - protein, 356 aa, unidentified
MLNKKIIVNRSKNNSSLTETESYDQYIALDWSEKNMAIARMGKKDLEPKIIDVPPDLKGLKKYLSELTGKKILTIEETTTSQWLYVELHDYVDKIFICDPYRNRLLTDGPKTDRIDAGKLCKLLKNGMMKEVYHSTDEMYELRKLVSYYDDEVRAGVRLLNQKSALYRAENKSWKKKEELEESHVNKFILAQLDEKIESYKEKHQRYEKEFERISKKNKILRSLKSIPGLGPISSVTILSIVIDGNRFKSNNHYLSYCGLVKHEKLSGGRSYGRRIPRYSRRLKGVYVSAAVRAASTENPLREYYEYLLNDKKLPIYNAKNALARYIAKISLSIIKSGEKYKPYKWRENKKEKEVA

SEQ ID NO: 86784 - protein, 342 aa, unidentified
MNYCGIDLHKNFSQIHLYNEEMREISTRLQNDETAIRGFFEPLRDNCKVAVEATGNWYWLVDLLQDLNLDVSLVNPLQTKAIAYARVKTDKVDAWVLTHLLRTNFLATCWIPDKEQRANRDMLRTRLVLVKIRTQCKNIVHGILEKFNIKLPFSNIWEGIGREALEKVSLSSPYSEFLKQLLADIDHLTPQIEYWEKKIREQIPVSENAQRLLEVPGIGNIWALTILYETGPIERFLRAKRYVAYAGLVPRTRGTSDKYRNGHLCKQANMYLKCAYLEVTTAALRARDINQRLLAYYQRILRRKGKGIAKVALARKIATIVYYMLCVKIDYATCVARNKMAG

SEQ ID NO: 86785 - protein, 394 aa, unidentified
MKLVGIDVGKNSHHFCVMDKETGEFNVTPTSFSNNKEGFDFLINSLKPYSKKSILIGMEDTGHYHVALLKFLLSNGYTVALINPKTTDLTRKMEGGITKNDKLDTITICDVLDTPERKKQYRITKVDRFDLYEQRQLTRHHHNLKEELNVYCNRLQKSIDLVFPEFNTLFSSKYSIVYMNLLKTFGSAEAIASTDIRTIRKCFEIKGRGNRISLTPEKLKECAKNSIGISSEVETIQIKHLVSQITLIKEQIAEIDKKIEEFSITNNSPILSIPGISHFSGASILAELGDIGNYSKPSQIIKFAGVAPYHYESSQYNAQHTGITKKGSKYLRKTLYQIILTVINNNPVFKKYYRLKISQGKGHRCAQGHCIRKLLRIIYHLLETGQSFDPALLR

SEQ ID NO: 86786 - protein, 458 aa, unidentified
MRIVRPICCGLDVHKSVIVATIASTGADGVTSHEQRSFTTLNPDLARLRDWLVERGCPEACMESTGKYWIPVFNALEGHVRVVVTHPKYVRAIKGKKTDRKDSRWIADLFACDLVRTSFIPPRDIRECREIARYRHKLVCMRSSERNRYQNCMTVSNIGLGSVLSDCMGVTARAVMADVASGEPFDEGRLRGLVRGRAKAKADLVVDSVRGCMLDDAQRFKISASLEHMDHLDELVAACEAELRDRLAPHWAAVELAQTIPGVRELSAMLIVSETGDDMSVFEDADHLASWAGLAPGCNESAGKRRSSRTTRAGRYLKPVLIQCALAAVRSTRDDGYFAAKYERISRRRGKKRALVAVARMMMVSLYHMLSNGEVFSPSDHDIPSASDSRRDRIDEESALELLRSLGYDITARRGVRPRAPAQPGIRHHRTDVRRVTPRTTGSVFSARATGLVNCAAW

SEQ ID NO: 86787 - protein, 346 aa, unidentified
MEHHVGIDVSLELSSVCVLDATGKVIREAKVASEPNALVDFLRGLNLTIVRVGLEAGPLSQWLYDGLFAAGLEPVLLETRHVKAALSAMAVKTDRRDARGIAQLLRMGWYRPVHRKSMSSQEIRALLGARKQLQIKVIDLEQTVRGLLRGFGLKVGDVSRGKLPARIRELAAGHVMLEKIVEPLLAAREAMWRELAKLHCEVLIIVKEDQVCRRLMTVPGVGALVSLTYRAGVDDPDRFKKSKSVGAFFGLTPKRYQSGETDVVGSITKVGDAAVRTALHDAANALLTRATRFSTLKRWALDVARRRGMRRAKVALARKLATVLHRMWTDGTEFVWGKDPAAAAKV

SEQ ID NO: 86788 - protein, 387 aa, unidentified
MQRPHDDSKVCRAVFVQDSTLVVVIEMSLTGWLVAGMIPGVSREPLKKIDPKPEELLQLLFRWRDEAIKAGKEITRIAVAYETGRDSFWLARWLRSRGIDAHVIHATSVAISREHRRAKTDRIDTAMLRRGFLGWLRGEPGHCSMAIVPTVAEEDAKRPHRERESLVQERTSTVNRMKSILIQFGVRNFNPVLRKASEKLDGVRTPEGIPLPPNAAAALQRHMDRFRVIKEQIKAIERTRLQRLQRDPTDKMNAMVFLLVRIIGLGVETAEQLVHEILSRNLRDRKAVARYAGLTGAPNESGSKRREKGLSRSGNGRVRVILIQLSWRLLKLQPGSELVLWYKKRTADAKGSRKPMIVAFARKLIIALWRYVNTGLLPEGFELKAAA

SEQ ID NO: 86789 - protein, 381 aa, unidentified
MKPTIHAIERNPQPTLYLAFELSDQDWKLGFTVGLGQPPRQRKVAAGDTTTLKQELALAKQRFGLPADAPVVSCYEAGRDGFWLHRFLESEHITNLVVDSASIEVSRRGKHAKTDRLDVEKLVIMLLRYHAGETRVWSVVQVPSLAAEDQRHLHRQLLALKGERTRYVNRIKGLLVGQGIHLDVTSDFLTHLPELRLWDGARLPDGLLARLKREFAGWQFVHQQILALETERRSAIRESQEPAMAQVRQLLRLKGIGENAAWLYVMEFFGWREFHNRREIGALAGLTPTPFQSGDEDHAQGISKAGNDLVRAMAIEIAWGWLRFQPDSALSQWYQERFGAGGKRLHKIGIVALARKLLIALWHYLESGELPPGAALKSATA

SEQ ID NO: 86790 - protein, 331 aa, unidentified
MQFSHFVGIDISKETLDAALYPACDRKTDFLHFANSAKGLAEMMSWLKHRGVKPSELLICAEHTGIYTNTLIAFAHKKGIALSLNSPLDIKRSIGLARGKNDTVDAARIAEFAYTRRDRLRLYERPAESIIKLQYLLTERRQYVRQRTAIINLHSAMGQYETAYGRARNESAINHIEKLIKKVEEQMLATVSEDPSIRRNFDLVHSVKGIGLVNAINTIVYTNNFKSFDSPRKYACYIGVAPFDYASGTSVKGKTQVSKICRTQQKAELSMAARSAIVHDPGLRRYYQRKMKEKGGDKSAHGIVINAIKFKLILRMFAVVRSGEPYKVINY

SEQ ID NO: 86791 - protein, 338 aa, unidentified
MTKTPIAVLGIDLGKNSCSLAGLDATGAVVLRRRMTREGVVAFAAALPACIIAMEACCGAHFLGRTLAGQGHAIRLMSPEYVQPYVKAQKTDDRDAEAIAEAATRPTMRFVTLKSEAQLDLQVLHRARERLVQERTALINQLRAVLLERGLILPKGRSALARRLDELMGASLALSARANRMLEEGIDQRIKAYDDEFAALTREDAQARRLATIPGIGAINATALLAAVGDGSAFAKGRDLAAWLGLTPRQHSTGGKTKMLGISKRGNCYLRKQLIHGARAALPHLAAKPNALGAWLQHLLARAHPNVVVVALAAKLARIAWAVLRNERGFDQQALVAA

SEQ ID NO: 86792 - protein, 363 aa, unidentified
MSESMTVTVGLDVHARSIRLAAVRADVLLEERTLPYDEEAVERVLRRWSAVRCCYEAGPTGFGLQRYLVGRGIDCRVVAPGLVPQRPGERVKTDSRDARMLARLLAGGLLQPIHVPTPELEAARDLVRAREDARLDRMRDRQRLSKFCLRHGLRMPTSSWTVVRRKWLSEQRFEFPARQQTFDTYVHAVDLVDARIGQLERAIREAAEQEPWCTLVDKLRCLRGIDTLTALALVAEIGDFSRFKTAEEFMAFVGLVPSEHSSGEKRRQGSITKVGNSHVRRLLVEAAWHARRRPKVGYDLARRQRGQHAEAIERAWRCQQRLYQRWQRMAGRGKPQQKIVVACARELAGFIWAIATEQPLRSN

SEQ ID NO: 86793 - protein, 342 aa, unidentified
MQITTIGLDIAKNVFQVHGIDANEKVVVRKQLRRSQVIAFFKALRPCLIGMEACATAHYWARELTKLGHEVRLMPAKDVKAYVKRNKNDAADAEAICEAVRRPTMRFVRIKSAEQQGQLMQHRTRDVLIRQRTQIINALRAHLAELGIVAAQGNAGVNELRAIVADERETRLPIDARASVIVLATQLEALECVIGAIEKRIKMQHRSNEASQRVETIPGIGVIGATAIVATVADPTIFRSGRDFAAWIGLVPRQDSTGGKQKLGPISKQGDRYLRRILVVGAIAVLRRALENPGKYPWLTQLLARRPFKVVAVALANKMARTAWALLAHGGTYRAPELAEAA

SEQ ID NO: 86794 - protein, 490 aa, unidentified
MVVDIVHPRVAGIDVHKKVVWVAVRLPGEAPGERKVVIKRFKTFWRPLQKMAAWLAELGVTDAALESTGVYWWPVYHALAGAGIEVCVCNAAHMRNVPGRKRDIADCQWIAELHEHGLLRPSFIPAAEVAALRARTRYRKRLIEARTAEGQRLAKVLEDAGIKIDSVASRLLGKSGREMIEALIAGERSPGRLADLAKGVLRRKTDDLQMACDGRFTDSHAQMCRLHLDAYDHLTATIAELDALVAEAAAPFAAVIARLITIPGIGQRTAEVIVAETGGDMARFASSARLAAWTGLAPGDNESAGKRRHAAARQGNRHLRAAMTEAAWATARTRTRPGARFRRLARSSYFGRPAAKSPALRERCSVKRAPATPAPVTSRRPSGPAAVSSSVGGRVSPTQAKIKRGTLPPSLPRAPEGRPPWLEDCGAGGAREALESAQPKPNGTASPAARIPHGLIATCASSRNPFGTRSRELLGSHTVKMKRHCSIVLL

SEQ ID NO: 86795 - protein, 393 aa, unidentified
MLYVGIDVAKRKHDCFIANGDGEVLADAFTIQNSKEGFNELLRQIKLFEPYPGPKNTKVGLEATGHYSDNIIGFLRKVGLPPIILNPLAVNLYKKGQSLRKTKTDKADARFIAKMLIHEGFEPHVVSSYHIDELKSFTRHRHRMVKACSSFKVSYDRLLSIIFPELESFVDDTLGVTVLKLLLEFPSTDAIAGCHLTRLSNLAHEYSRGRFGKDWAARLKELAKNSIGAVSNAKAFELRQVIRQIISLSEEIDLVEKEIKAIMIENDTPLLTIPGIGYTLASVILAEIGDISLFDTPEKLQAFAGLDPTTYQSGQFTGKKDVMVKRGSPYLRWALLQAAKNASHFDASFGKYLSRKLAEGKHYNSAMGQVAKKLIRVIFHLMKTGETYQAATT

SEQ ID NO: 86796 - protein, 411 aa, unidentified
MKQIRERTAGLDVHRDLVVACTRVPGESGVVVAKRRFATTPGGVAVLADWLTAAGVTTVVMEATGVYWKAVFYPLEGRFEELWLVNAAHVKNVPGRKTDMIDAEWLADVAAHGMVRPSFVPPPPIRELRELTRYRTTQIDARADEIRRLEKVLQDAGVKLTSVASRVWTMSGRAMVEALIAGERDPGALAELAKGKLRARRAELAEVMPASWSAHHAAVARQILSHIDFLDASITTLTEEIAARIDAGAFDETLDLAVTAPGVARRATEILIAETGADLTVFATAAQFCSWIGVAPGTKESAGKRKPAKSMPGNRHLRRILIEAARAAARTDTFLGARYRRIARHAGPNKAAVAVARSLATALYYMLTTHQPYHDLGPDFYDRPAHKEHILRDHVRHIEAMGYSVVLSATT

SEQ ID NO: 86797 - protein, 370 aa, unidentified
MLDTTTFVGLDVHARSIKAVSLDVMTGEARCATFGYDAGAVAEWVRSADPKARCVYESGVTGFDLQKRLSGLGVDCAVGAVSKMIKPSADRRRKNDRNDAEFLARMLSVGNVVEVWVPDDECEAARDLARALEDARDDLSRSKQRLSKFLLRHGLAFDERTPTGRRKGNWTRAHWSWIESIRFAEGADNDVLAYYVDAVRRAAEEKARLEGLVEAEARKPRWRRRVDSLRCLKGVDTATAADLVFEAGEFSRFGNARSFAAWVGLTPSEHSSGESDRRGAITKAGNKHLRKALVEAAWHYLTCPGRPKDLARGQAPDRVARRHAAKGVRRLAERREALLARGVHNNKANVATARELACWVWAVGLMAEEA

SEQ ID NO: 86798 - protein, 318 aa, unidentified
MDQYIGIDVAKEALMVYDGKREFSCRNTRGCADLKDHLRQKDLKDIILIFEATGPYSRYLREFCAHQSIRVWIVNPIKSASFTKTLGNRSKTDTIDAKMLYELRKVIKPEDILVPRIDKEAEQLSLYLSSYELMIKTRTALSNHLHALAHTPDVPPELVATLTGEVTRIKEGEESFLNQMEHYVENNEELRDDYHRLLAIKGIGRVSGLGLLILFRTYPDTSRAQITALVGLDPTRTESGTSVKGRRKISKGGNSTIRKILYFPTLNCIQHNQVVKATYERLIRNHKAKKLAVIAAMRKLLLIAHAVYKSKTVYCEAR

SEQ ID NO: 86799 - protein, 404 aa, unidentified
MEVLYPRCCGLDVHQKTVVACVKTAEGKETRTFKTMTGELLEFADWLAAKGVTHVAMESTGVYWQPVYNLLEQFGFILLVVNAHHIKTVPGRKTDIKDAEWVAELLQHGLLQGSFIPNRSQRELRELTRYRRTLVQQRAQVVNRIQKLLECANIKLTAVVSNVMGVSGRAMLEAIAKGIKDPQVLAAMAKGRLRSKLLDLEKALQGLVGPHQQMLLQSQLRHIDFIEAEIARVDRDVARRMSSLEDVLNRLDEIPGMGRRSAEEILAEIGTDVSRFPDAAHLASWAKVCPGSYESAGKRKSGKIGHGNVWLRSALVEVAQAAGHTRDTYLSAQYHRMASRRGKKRAVIALAHTILVIIYSLLRYGSNYQDMGSNYFDERDHGKTLRRSIQRIERLGYQVILQPA

SEQ ID NO: 86800 - protein, 378 aa, unidentified
MVLYLEIDQHARQITISLRDEQGDVLQARQVSTQPEKIRAFFQQLTRQRLPEGDSFVAVLEVCGFNDWLIRMLHEYHCHKVILIQPDERKKCKTDRRDAAALSELLWVNRERLLQGKPVRGLRQVDIASDTDQENRRLTTLRKEAGQARTRLVNQVRHILRRHNLQWQMPTKRFPTKAGIAWLKQLALPEIDRLEMDHLLTEIEQVQQRVKELEQVIARRCGVSEEAGLIASMPGVSYFTATSLACRVGRVERFPRARSLANYWGLTPGCRNSGENTQRLGNITKAGSGMARWLLAQVAHKVLRKDARLREWYKRIRRRRGSTIARVAVMRKRATIIWHMLSKRKTYAECRAAGEAGAKAREEQECGREEARERRGGI

SEQ ID NO: 86801 - protein, 348 aa, unidentified
MNSLHYIGFDVHKKTISFCVKTAAGEIVEEGSVLAQREVLRHWASTRPQPWRGAMEATLFSAWIYDTLKPYGEQLEMAHPAKMKAISAGKKKSDTIDARTIADLVRCDLLPACYVAPPRIRELRRLLRYRSLVVSEAVRMKNKMAGLLMETGALYVKEKLHRKKYFASLLEELEEVPESVIDLLRLSRGTLEMFENTQKRLVRELLADPELAQRVERLMTIPAVGEITALTWALEVGDPQRFPSCSDAMSYCGLTAALKSSAGKLQRGPISKQRNHWLQTTLIEAAKLAPRWNPQLAALHARELERGHRNRATLAVARKLVTYLLAVDKSRQPFQLRVPLEEPTQKAA

SEQ ID NO: 86802 - protein, 406 aa, unidentified
MQVYTGIDWSENKHDVVFMNQAGAVFAQLTIAHTVDGFLQLDAARQQLQVMPEECLVCLETAHNLLIDFLWSRGYVHVYVIPPSVVKANRGRQGQSKARTDPSDAELIADILRTDQGRLQPWHPDSVLTQQIRAQVSLVRHLTRDVVRSSNRLRATLARYYPAALQVFSSVRTQVALAFIRAYPTPQAAAALSFAEFEAFATAHRYPRPSQLRRNYLRLQEPYPEPMPGTVSVFQAEAVQLAGLLLEELRANKEAKRRLKTLFDQHPDAPIFASLPGTGDLLAPALLAKFGDDRQRFPTAASVQALAGTCPVTVSSGKRRSVHFRFSCDRTFRDIAQKWAMCSLSQSLWAAAYWQQTRPRCHSNSHAYRCLANRWLSIAWAIWQKRECYDESYHLQQRALRSKKRP

SEQ ID NO: 86803 - protein, 405 aa, unidentified
MKESIAKEMNDAGSATGLAGVMQALEQASNVYGAYIGLDVHKETIAVAVAECGRGAPEYYGEIANTPKKVAQLIERLSARYGGEPLLWVYEAGPCGYGLYRQIVETGHDCEVVAPSLIPQKAGERRKTDRRDALGLARLSRAGELTAVWVPAPEQEAIRDLTRAREDMKKLELKARQTLGAFLLRHGKVYAGKSRWTQAHFRWLETVTFDSPVQQIVLQEYIEAVKTAQRQVASLEQQMHAVLPQWSLAPVVEGLMALRGVSLISAMTILAELGDISRFDSPRQLMAYLGLVPSEHSSGPNRRQGGITKAGNGHVRRILTESSWNYRFPARKTRDIEKRAEKTSAAVQAIAWEAQKRLCGRYQHLLRAGKVKQQVTTAVGRELAGFIWAIACEVMGKDHGSRATA

SEQ ID NO: 86804 - protein, 442 aa, unidentified
MNPPPYDLIIGLDRSDRKADLHLIGVIDSQRRSQTIDTSPEALWEWLLQLRQEYPQGRIALCLEQPAAHLIAYLEAYEWIALYPINPLTLLKYREAFVTSRAKDDTKDARYLAELLLAHHDKLKVWAPEDEPTRALQQLVYHRRSVVNERVGLTNRLKDLLKQYFPQALVLCGEELWRPLATRFLLKWPSLQAVRKAKTEKLKEFYYLNGSRSARLMEQRLSLIERAVPVTDQAAVLDSFILRVQLICRQLQDVVTTIKTFDQRIAEAFKGHEDHEIFSSLPGAGPVLAPRLLATMGSQRERFESAARLQNYTGIAPVTKQSGGKCHIHRRYLCPKFHRQSFHEYAKESILWSRWAAAFYLQQRTKGSYHHAAVRALAYKWQRIIWRCWQDRKPYEEKTYEAALRKAKSPLPKLFDQVELGKSPIKTKSTKAKKPLAGLPQR

SEQ ID NO: 86805 - protein, 410 aa, unidentified
MEVLYPHCAGLDVHKDTVVACVRHMANGSVRREVRSFKTTTKELLALSDWLVGEGCPHVAMEATGVYWKPVWHVLSDGDFTLVLANAAHVKNVPGRKTDVNDATWLADLLAHGLIRSSFVPDEQTQEMRTLLRTRKQLVRECSRHVQRLQKTLEDANIKLDSVISDIVGLSGRRMIEALIAGQTEPGALAAMAHRRIKATPDQLEAALRGRVTRHHRFLLQLHLQQIDAVNAAIDQIDQEVDACVEPFRATVRLLTTIPGIDELSACVILAEIGRDMSRFPTAGHLISWAGLCPKNDESAGKRRSTRMRKGAPWLKTTLVQCAAAAARKKASYLQAQFHRLRARRGAKKALGALAASILTSVYHMLISGELYRDLGPHHFDHRAKAVNTRRLVMRLQNLGYAVQITPLAA

SEQ ID NO: 86806 - protein, 407 aa, unidentified
MDLLKTVFGIDVSSRKSNVCIMVNGQKVNDYAISNDMVGFNRLLGDLKQVTNPQIIFEATGVYSRRLQAFLDMHELRYVMMNPLEAKRKTKDDLHQNKTDKLDALYLAKLQSEHPQRLAYVQNKEYQELMANNRIYEQASHDLITNKNRLHKAVQLTFPEIEHLLANPRGKNYWSIALRFPHPDIVLETKEADIIDFLKGLSGIGKKRANDITQNLIRLAKVACPAVKKNSAHIRGLKMAINNILSAEEECQTALQEMAKLAPKRDLEILTSIPGIGENTALRIISELGDIRRFNNPSQLNAFVGVDPQVYESGNLTAHLSISKRGTAIGRKVLYLAINQIQSAKKVGNPCHIADYYEKRKRSSETASHKKAAIASIHKLLRTIFALIKNDQLYSYDVAKHNQRLLS

SEQ ID NO: 86807 - protein, 407 aa, unidentified
MEVMYGTCAGMDVHKDSIVACVRCMKGNKVDREVRTFGTSTSELIGLGDWLEDRGCVIAVMEATGVYWKPVWAVLTGRVELVLANAHEVRNVPGRKTDMNDAMWLADLIAHGLVRASFVPPEPIADLRDLTRTRKQLSREVVEHTQRIQKVLETCNIKLASVASNILGKSGRAMLEAMVAGESDPEKLAGLARGTLKAKRGKLMEALHGRVRDHHRMLISTHLRLIDALQASIADVEKRIEAELRPFSEAVELLQTIPGVGTTAAQAIIAEVGVDMNRFRSAGHLRSWAGLCPRMDESAGKRRSNRMRKGNAWLKTMLIQCAWSSIRGEGYLRALFLRVRARQGKKKAIGAVAAAILTAVHGILRDHEPYRDLGAEHFNRNDRQRTASRLARRIRSLGYEVEMRPAA

SEQ ID NO: 86808 - protein, 350 aa, unidentified
MPKRNVPRPAAVYGIDIGKNIFHVVGLSSDGIPVQKVRFRRDTLLQFFQRAAPTIVGMESCAGSQWIARKIQALGHKVRLIPAQFVKPYVKSNKSDIIDAEAIAEAATRPTMRFAALKSEEQADLQALHRVRDQMIGTRTRLINQMRAFCLEYGIALRQGAGLFKLDLPQALEDQSNDLSSAMRKLLAELFTDLRQLEQRIGDVTREIEAIASREDVARRLMTIPGIGALGATALLAAVGSGRQFQKARDLAAWLGLVPREYSTGGKQKLLGISKRGNRYVRKLLVHGARSCFRHLDRTRDRLGSWLDGLQARMHPNKAVVAFAAKMARIVWVVLTKPGALYERRDPAFA

SEQ ID NO: 86809 - protein, 307 aa, unidentified
MECFVGIDLHKYVSQLAVLRESKSPSQLRFANDVVTVERVLKKLPERSKIAVEAMGSWWWLVELAQKTGHEVFLSHPKQTKAIASARLKSDKVDALMLAKLLKADLLPTVWIPPATQRHVRELLTHRARLVRQRTAAINELRAVYAKRNIDPEARLQRTRPIVSGAEGLSGYGPRIVEEDLKLLEFINRQIGGLDKELIKIAHEDPQAKRLMTIPGVGPVSAVAISCWIGEISRFSNAKKLASYFGLAPRVRQSGDTERHGHITKEGNRMVRWLLIQAALVHTRRGKGPSRKHYLGVVKRRGKRLLG

SEQ ID NO: 86810 - protein, 404 aa, unidentified
MWYAGIDWSDTHHDVMVIDDVGKQVVSKRVAHTKAGLDQLVVLLQGILGSEPKEQMACVVETNHGLLITTLLEAGFAVYPVHPKTVDRRRGAAGGKTDQIDAYLLAKYGRAELADLRKLQPDSPGIAELKALTRDQESLIEMQTRLVNQLTACLKGYYPVALSLFTKLQQRSTLLFLQASPTPADALAATEAHLAQTLKQGKHPKAQAVAAKIFQHLRQPSLTADEVTIRTKARLMKALVLQLLPLVEQIAEYEEAIETLFLSHADNALFASLPGAGQRLAPRLLAEIGDDRERYPNAQGLAALAGTAPVLYQSGNFSKAHRRHACLKHLRNALYQFAWQSTRSQVWAREYCQRKRKEGKSHSVALRALWNIWVRIIYAMWRTRRPYDPAVFEKARHDHALMAA

SEQ ID NO: 86811 - protein, 331 aa, unidentified
MNVCVGLDIGSRTSIVGVRKDGRPAGQWDIAQTPAGRKAAVKKLQALKPKSIVMEATGIYYLDLALELHAADLPVSVINPKSFHNFAKLMLVNSKTDSIDAQLLSEYGERMTPRLWTPPSSVQLELRALGRHINRLVGHRTRAKNELHALQATATTVSMLIEDQEEAIATLDNRIERFRKAGRELIAQCPTLNRQYKQLLAGPGMGEVSALAALAELTTLPQILKSSQVARHAGLDVRQTQSGTSIDKPGRLGKSGNAYLRAAMYMPALTAVRCDPYAKAFYESLVSRGKKKMQAIAAVMRKYLTGIWACMRGDEPFDTAKLFSSEHLRKA

SEQ ID NO: 86812 - protein, 407 aa, unidentified
MDLLKTVFGIDVSSRKSNVCIMVNGQKVNDYAISNDMVGFNRLLGDLKQVTKPQIIFEATGVYSRRLQAFLDMHELRYVMMNPLEAKRKTKDDLHQNKTDKLDALYLAKLQSEHPQRLAYVQNKEYQELMANNRIYEQASHDLITNRNRLHKAIQLTFPEIEHLLVNPRGKNYWSIVLRFPHPDIVLETKEADIIDFLKGLSGIGKKRANDITQNLIRLAKVACPAVKKNSAHIRGLKMAINNILSAEEECQTALQEMAKLAPKRDLEILTSIPGIGENTALRIISELGDIRRFNNPSQLNAFVGVDPQVYESGNLTAHLSISKRGTAIGRKVLYLAINQIQSAKKAGNPCHIADYYEKRKRSSETASHKKAAIASIHKLLRTIFALIKNDQLYSYDVAKHNQRLLS

SEQ ID NO: 86813 - protein, 406 aa, unidentified
MRVLYERCCGLDVHKQSITACALTPEGKEIRTFGTLTDDLEELVDWLKEKKVTHVAMESTGVYWKPVYNLLEAEPIEVLVVNAQHIKAVPGRKTDVKDAEWIADLLRHGLLKGSYIPHRAQRELRELVRYRRSLIEERARELNRIQKVLEGANIKLSSVVSDINGMSARLIIRALIEGKDDPAALAQLAKGRLKQKTEELRRALKGVMGPHQRMMLAEQWRHVEYLDEAIARLDREIEERTSPFHEALELIDTIPGVGRQSAEQIAAEIGTDMSRFPTAAHLASWAGMAPGNHESAGKRLSGRTRKGNKKLRSCLVECARAAARTKNTYLSAKYHRIAKRRGANRASVAVGRTILEMIYYILTRKEPYRELGADYWDRQQEARIVRQTVKRLEGLGYEVKLEKTSA

SEQ ID NO: 86814 - protein, 356 aa, unidentified
MNTCARSQMLFVGIDVHKETHTAVGVSPFGEKIFEAKIGNHPKDFDFLAAKVEKMKGSLSPYFGLEDCHGYGERLAEYLVEKYPVIHVPSVMVDHARKKTTHPEKTDSLDAYGVAKVMMNDMDSLPQYTLTEELKRTKQIREISLDREHLVLERARLKNQLHAIFYRIWNHDYQSVFKDPFTLKAMRHWMKARPSCDKFLLRAMKRKIRRLVDLHYEIVDLERDLSELLETSDYTVQTAPGCGTAIASAIIGEIGDIARFKSPASLAKYAGCSPRECSSGKTHRHRKTWAGNRRLNCAFHRMALSQISRMGNEKARTYFARKVSEGKSKSQALVCLRRQMVNIIWCMMKNKTVYHD

SEQ ID NO: 86815 - protein, 354 aa, unidentified
MSNKSNLTVATMGIDIGKNSFHVVGLDRRGAIVLRQKWSRGQVEARLAHMPACLIGMEACVGAHHLSRKLQSHGHDARLMPAKYVRPYSKGQKNDFRDAEAIAEAVQRPTMKFVATKTADQLDLQALHRVRERLVRQRTGIINQIRAFLLERGVAVRQGLRFLRTELPNILATRSDVLSPRMMRIIEGLAGDWRRLDERIEGLSNEIEAVAHQDPACERLMTVPGIGPIISSAMVAAIGNGAVFAKGRDFGAWLGLVPKQISTGDRTILGAISRRGNRYLRALFVQAAWVVLIRIKDWDRYGLKAWIDAAKKRLHHNVLAIALANKLARIAWAVLNKERNFECARTRATSPRPA

SEQ ID NO: 86816 - protein, 361 aa, unidentified
MSESMALVGLDVHQAQTVAAMLDPSTGELRLERLRGEPASVVPVFLEQLDRPVAAVYEAGPTGFALARVAEERGLDIRVVAPGSIPRAPGDRVKTDRRDAKRLVRLFAAGELGFAFVPSEADERFRDLVRCVEDARKDLMRCRHRLSKFLLRRGQRFPRKAWTQPHERWLCQLHFEDAPSQATFLDYLSAVQALVARRSTLIRVLEEAVPESSHAETVARLRCFRGVDTLTAAGLCAEVGDFHRFSKPALLSGFLGVVPSEYTSDDKRVQGQITKAGPPHARRLLVEAAHHYRHRPAVGETIAARQAGQDPRVVQIAWRCQRRLHERWVHLAGTRGKRTGTVAIACARELAAFCWEAATLD

SEQ ID NO: 86817 - protein, 372 aa, unidentified
MAPENILYGALELSKSRWILSIQFPDHQQPSLYPITGGDAEGLMIKLDAARDRWAKVSGKSPSIMVCYEAGYDAFWLARFLKARGIECLVVDPASLQVNRRGRRAKTDRIDVGLLLRSLIAWCRGERHVWSVVRIPSVDAEDLRRSHRERDRLIRERTAHINRIKGLLFGQGIRGINVKSHYNKLKLEEFVTGDGRPLPPRLAHEIAREIGRLALVQEQLTAVQRERDEAPTPCLSTEKKRVQLLLLKGIGPTVSAVMAREVYYRQFDNRRQVAGFLGLAASPHDSGAIERSQGISRAGSGPVRATMLQAAWLWIKHQPKSMLSRWFLERTQGQSGRFRKIMIVAVARKLAIALWRYLEHGLVPQGAILTNK

SEQ ID NO: 86818 - protein, 328 aa, unidentified
MSCWIGIDVAKAVLDGVVRTTGEVVQFPNDATGHTALVAWATPLAPTGLVLEATGGYERAVVLALAAAGLPVVVVHPRQVRDFARSTGHLAKTDRLDAAVLALFAERVQPAVRPLSDAATAALAELITRRRQVRDMLTMEKNRLPLVRTRVRRDVPAHSTWLERRLDDTDDALRRAIEASPVWRVQEELLRSVPGMGPVVSRTLLALLPELGHLNRKQIAALAGVAPLARESGTWHGRRTVGGAGPGAARAVHGRLGGESAPSGPPCAVHPAARGGEAGHGGAGGVHAQTPRHPQCHAPHRDTVADRRGLISKTVAERSEGSLCLEAW

SEQ ID NO: 86819 - protein, 347 aa, unidentified
MNYIGVDCHISTLDFAVINERGTITQKAKVNTGVKEFMTFVKSIPKPRKIFIEEGELAGWMLETSLKFGEELIITDPKINKWIGKAGQKNDPIDAEKLAQLARGKYIKEIYHPVNNRRKFKELVFAYHDTVKSQTRIKNKIKANFIRNGIKCSGETVYSDKYRDKWRGMLSKNKITHLILEELWVQLDQVGESTERLIRNIRIQSKQYPEIKKFMKVPGVGLIHASTISAIIETPHRFANKKKVWMYAGIGLMERSSGETVYSRKLTREYNRPLKNAIKKAAEVAILSKDNQFRRQYLKLTIEKGIASHRAKLTVARSMLAALYGMWKKGEEYDPEIDYKRNKGNKK

SEQ ID NO: 86820 - protein, 310 aa, unidentified
MEQTFIGIDVAKDRLDVHVFPSDEAFAVARDSEGLAALTERLGPIEPHLVVLEATGGFEQTVAAALVAAAIPLAVVNPRQIRDFARATGQLAKTDALDAKVIARFAAKVQPEPRPVPDEQARALGELVARRRQVIEMMVAERNRRRQLSSRRLLKSVDRLLAVLQKELTELNRDIGEGIRGTPAWRERDELLRSVPGVGNIVARTLIADLPELGRLDRKQIAALVGIAPLNRDSGKMRGKRTTWGGRAKVRCVLYMAALVASRRNPVLAAFYQRLLRAGKAKKLALTAVMRKLLTILNAMVRDNRRWQIA

SEQ ID NO: 86821 - protein, 345 aa, unidentified
MSWTGERVRLFVGDDWAEDHHDVELMDAAGRVLAKQRLPEGVAGMARLHEVIGQQLGEDAGDAEVVIGIETDRGPWVLAVVAAGYTVYGVNPLQASRYRERYGVSGAKSDGADAHMLTDMARTDSHQLRAVAGDSAGAEGVKVLARTHKTMIWERTRQVQRLRQQLREYDPAAVEAYDDLDAPDTLELLGKAPDPARAAKLTRAQVSAALKRARRRNITDRATVILAALRSPQLDQPPAVTAAYAATVRSLIAVITVLNEQAKALQRQVEEHFGQHPDAEIYRSQPGMGAVLGARVLAEFGDDPHRYADGKARRNYAATSPITRASGKKKSSPPASSTTAGSSTR

SEQ ID NO: 86822 - protein, 355 aa, unidentified
MNEQSIDYTNQDFFLGIDVHKKSWKVTVRTNGMQLKTFSMDPSPGQLYGYMHKRYPGGNYHSVYEAGFCGYWIDRELKRLGFNNIVINPADVPTTQKEKSTKTDKVDSRKLARELEKGELKAIYVPDEFHQQLRSLCRLRSRVGQSQTRVKNRIKGHLAFYGYVIPGQDEMSHWSRGFIEWLKTLEFSYGMGRDYLCVCLEELESHRRRLVDIIRLLRRYCREYGIMEEIKNLRRVPGVGFVTAMTLYVELMDMSRFRTIDQLASYAGLVPSVIGSGEKESNLGLSFRRNRYLRYLLIEAAWVAIREDPALGYVFSQLIRRMTKQEAIVRIAKKLLNRIRYVWKHKEAYVCGLIS

SEQ ID NO: 86823 - protein, 390 aa, unidentified
MYLIGIDISKFKHDCFIATETGLVIKDSFSFDNNQEGFKKFLNVLLSLDQTQEIRIGLEATGHYGTNLKLFLHENNFSFIEFNPVLSERYRQVSSLRKTKNDKIDAKLISKMLLSYDYKTNSSISYHILKLKSLTRFRKRLVKNRTVFKERLINILDIAFPEYSKHFTQVWGKVSFYILKNYPTAKDIANINVEEVMTTIHSLSKGHYSMIKLMKLIETAKTSIGFKNDYHVLELQLTINMIEQLDSSIDKIENEIIEIMNQYNFKTATIPGIGIISAASIVSEYEDFSKFQNPNQLLSFAGLEPAIYQSGTQQTYGHMVKRGSSYLRETIMNIIPYVMAYNSVFYEYYRKKKSEGKHHRVALTHLAKKLIRIIYHLETNNISFDSSKIK

SEQ ID NO: 86824 - protein, 428 aa, unidentified
MSEKNDTRLQEFRQLQKEIRGSEDYLVVGIDVAKDRHSAFFGTATGKALFRRLVFGNDREGFERLILQAEAMRVQHGLRKVVFGLEPTANYHKPLGEYLITGGHRVVLVSAKSVKRNRELLDGRWDKHDTKDSANVADLISQGKCLYYEYPELRLRELRGLLSLKRRLKRQEHGLRVRIRNHLIAQYFPEFDRYFGRSESEGLAIVRWCLGPSVIASLAYDQFARWVAPGNRALRQQERLRAIWQKASASIGCEVGEAVRFEAKLMVEGLRQIREALGETDEKITDLCIQFPEYEYLLTIPGFGPDVSSKVLGAIGNPFRFERGNQVLKMAGLDLVAERSGKRSDGVVPVISKNGKAELRYALYQAAMIASSRNREFIRWFTNRLRGRQREKGIKTRMRVKLSAKLLIIAWTVMKKREPFNPDYLRIE

SEQ ID NO: 86825 - protein, 351 aa, unidentified
MMLIGVDYHPSFQTIAFFVEETGEYGEQELNHSDGQAERFYRDLKQRGICVRIGMEATGHSRWFERLLAELGFELWIGDPAEIKAKRVKKQKFDREDARLLLRLLRENNFPQIWVPDAENRDLRQLLWHRHRLVQMRTRIMNQLHALAMNEGYCWKKKLFSDQGRAQLEKLALAPWASRRRQELLELLDRLNPTIEELTAVVEREARKRPEAKRLMTHPGVGSLTALAYVLIIGTPTRFQRGKQIGTYVGMIPCEESSARKQRLGHISKQGNSLLRFLLVEAAQAAARVHPDWRRRYLHLAMRRHKSIAKVAMGRRLAVRLYWMWRNGCEYSSSLEFGSYTGQLETGNGVK

SEQ ID NO: 86826 - protein, 338 aa, unidentified
MDKSAECGIDVSAKQLWVVLRRQGECEGERSFANTPAGHKELKGYLGRAAERVRIALESTGLYGLDVALSLQADSRLEVMVANPRAVKDFAKALLQRSKSDPIDARVLAEYAARMPFRRWQRPSSPALSLTAVVRRIHALTEAATREKNRLHALSVTETSLKIVERELRRSLQWLERSQARLRRAARQIIAADAGLERRFQLLLSLPGVGETSALQLLGELALIPPEADVRQWVAYAGLDPRECSSGSSLRKRPRISKVGNRHLRRALYMPALSAAHHHAVFAAYYGALQQRGKCKMVALVAIMRKLLHATFGMFKHDAMFDGSRVFRLPAAAAGEAA

SEQ ID NO: 86827 - protein, 346 aa, unidentified
MHSTIIINLHRKDMKDLTTLQHFVGCDVSKDTLDFAIHRCGVDYRTFTHIRVSNSREGFESMRKWLRTNSVIPKEAVIAFEHTGVYSSALSEWCFRKGITFVLLHPLDVKNYGARGRNKNDKADSQFIADYLYTMREKLAPSSPESPIIGRLRHLRNERNLAVRSRRAYMNMLKIMKDRTSAARIRKMIAMLGEQIKSIGKEILQVLAQDPAIENNYRLLISIPGIGPVNAVETIIATGNFTRFRTARQYAKFSCVSPLTNSSGTSVRGGDHVSRAGHNEIKAVLTEGARSAIHHDANLRAYYERKRSQGKAHGCVLNAVKFKLICRMFAVVRRQTPYVNLDGYRS

SEQ ID NO: 86828 - protein, 359 aa, unidentified
MQEQRNKLNFKGENIYVGIDVHLKSWSVTILTEHNHHKTFSQPPDPEALSKYLNVHFPGATYYSAYEAGFSGMWSHYKLENLGIKNIVINPADIPTTGKEKLQKTDAVDSRKIARSLRGKELKCVHIPSRQTLSDRSLIRTRSSVVKDLNRLKQRLKMMLHFHGVRIPDCFEKDSTISKRYTKWLREEASVADGIHTDAFLFLMDEVEAKKKSLLKITLMVRHLSRSERYKKNMDLILSVPGIGLITGIIFLIEIEDIKRFENNDRFAGFIGIVPSCHSSGEKDNKGEMTPRGQPHMRVALIESSWTASRKDPALTLSFINYCKRMESNNAIIRIARKLANRIYFVLTKQTKYVCAVVQ

SEQ ID NO: 86829 - protein, 390 aa, unidentified
MGSHTFIPRDYDVFAGLDVDKRSISVTFTDHQGFLKSLRMPYSVGHLLSHVRKHFPDKKVAFAYEAGPTGYGLYDGLKAQAYKCVIASPSMIPKAPGQRVKTNRLDSRGLSENLRGGQLKGIHVPSPVYRELRHLTQLRDTLVSEAAAMKQRIKSLLLMEGIEFPPAPAGSQWSLLVKEKLRKLPCSHPVRFKLDQLLDSLAFAEQQVLKTTKEIRRFCQTDPELSQCIKYVMTVSGIGWIVASHLLARIGDWRELKNVRQLGGFLGLVPTEHSTGERTERGAITHTGDGRLRSKLIQASWSAIRQDGELREFFRSVAKTHPRNIASRVAIVAVARKLSGRISVVLMKQRPYVVREKVQSAPLTQEETVPQGTPRRQAELGEKTSERFDP

SEQ ID NO: 86830 - protein, 409 aa, unidentified
MEVLYESCAGLDVHARTVVACLIRKGRKTIRTFGTMTEDLLALLDWLRAEGCTHVAMESTGVYWKPVFNILEGSMEVMLVNARHVKAVKGKKTDVKDCEWLADLLRHGLLKPSFIPKPSIRALRELTRYRESLVREQTAISNRIVKLAESGNIKIGQVAARALGTSGRAILEQLALGETDTEKLADLALGRLKSKRAQLQKAVVGRLTETQRWLLSQLLGRYDQVEAALARVQERIDQQIREDQDPFVPEAAELLDTIPGVGQSVAQTVISEIGIDMTTFPSDGHLASWAGMCPGNDESAGKRRNTRVNAANRYLKAALCEAAWAASHTKNTYLAAQYRRLARRMGKKKALVAVGHSILIIVYHVLSRRTQYQELGGNYFERHNTEAQKNRLIRKLEALGLKVTVEKAA

SEQ ID NO: 86831 - protein, 371 aa, unidentified
MYHLSHAVQMNGCQNHCKLMKTETTAFNPKLYIGIDVHKKSWTFHYQTDLFDGKTITQPANPNTLVEWVQKHYPAHEVTCAYEAGFSGYSAARLFQKQNWNVLVLNAADIPRPQKQSVVKTDKIDCRNICKQLKNEALKSITIPEEQRESFRSLFRERNNFVMGLRHIKLNIKSYLMYCGITIPEEFDNASWSKNFIEWIKNQRNEYETGSLKISYLLKRYEFMYQESLSVSNQIRLYARKHYKKDYYLLMSVPGIGGITASAILAELGDLRKYNRFDDLASSVGFVPGLYSSGDTTIVKGITPRAKSLLRSYLIEASWQAVRFDPVLQEYYRSHYGKQPNKIIVKVARKLLSRIHAVIKTETPYQIGVIK

SEQ ID NO: 86832 - protein, 419 aa, unidentified
MNYVGFDWASRAHDVTVLDEAGGVLDRWAFPHSETGWVTTLDRLARHGSAAEVPVIIERTCGLIVDRLLAAGHPVVPVHPTAFYAARPRWGASGAKSDPGDSYKLADYLRTDGHRLRRLTPTDPGLHELQALVRLRDDQVRARTAATNQLTAILDNYWPGPKQLFMSLASQIALAFLTDYPTPTSAAHLGEARMAAFCRRHAYRGGKSPAELLSRLRAAPVAPVGLPPATLAAMVTAQVTLLKTLQTVISDVERLIAVRVVAHPRSNLFENLPGVGMINLAQLLAEVGPILDRVDSAEQAATECGAAPVTRSSGQTRGVYFRWAANTRARKAITSFAHNARMQDDWAAALYADARARGKRNPHATRIVARAWLRVIWACWTSGQPYNPDRHHSSRFLHRCHPAGAQARSRWSPPPEERS

SEQ ID NO: 86833 - protein, 321 aa, unidentified
MAEVVSFEQVVQRGCGLDVHKQTVVATIDGVGLKRETREFGTTTRSLTELKEWLEQSGITHVAMESTGVYWKPVYHVLEPSGMTVWIINARHVKYVPGHKTDKRDSKWLCKLLLAGLLKPSFIPSREQRELRDLTRYRRKLIERIASEKNRVIRLLEDCNIKLSSVLSDTHGVVGTKLIDKLCKTGKVSMEDIEEVYHGKLKASKDEIYAACEGVVTKHHVFMLQRIKENILSCEGSIFKINSQIKSILFPYQNVLELLKAVPGMDTKSSEDLIAEIGLDMSVFPTEKHLASWCGVAPGNDESGGKKKVHASPTATSRSRR

SEQ ID NO: 86834 - protein, 358 aa, unidentified
MDAPARPAATKLPVGYLKREEERHHDDHDDWTGPGGGVDENGSTVLVKRLHRKQMLPFFSKLSPCLIGMEACGTAHYWGRALAAMGHEVRLIPPSYVKAYLKRGKSDALDAEAICEAVQRPTMRFVPVKKVEQQSILMIHRARSLLVRQRTMLANALRAHLAELGFVANPGIANLAKLAEQALVDKDGLPSYARTALETLIRQIMAISGEIAMLDQQLIAWHAESEASRRLVAIPGLGVITATAVAATITDPGQFRSARQFAAWLGLTPQQHSTGGKARLGNISKQGDRYLRRLLVVGATAVIRHNKDKATPMANWIRKLMEKKPFRLVSVALANKLARIAWVVLTRKEAYRPYRLAA

SEQ ID NO: 86835 - protein, 349 aa, unidentified
MKIIGCDFHPGYQQIAMWDKVSGEMTERSLSHERKEEVRAFYAGLEGPVRVGIEASGQSQWFERLLVELGHEVWIGDAAKIRASCERKQKTDRRDAELLVKLLAENRFPQIWVPTPEERDARQLLWHRAKLVRIRSQVKNQLQALALNQGVQRKRKLWSATGRKQLENLPLLPWASRRRTELLTLLDQLDASICELDVAVIEQAHQRPAARRLMTHPGVGPITALAFVLTLGPAGRFRRGKQVASYFGLIPTEHSSGGGGQRLGHISKQGSSFLRGLLVEAAQSAVRHEPGMRREYQRLAQRKCRALAKVAMARKLAVRLYWMLRLEVDYAQLLQGSHAGQLESFRGRR

SEQ ID NO: 86836 - protein, 394 aa, unidentified
MHKDAHCAVVIDCWMNKLGEINFENRLSRYPAFVEDVRKICGTKEIVFGLEDTRGFGRNLAAYLVGRKFEVKHVNPAYTSAVRLANPIIYKDDSYDAYCVARVLRDMVDTLQDAKHEDIFWTIRQMVKRRDLIVKSNVMNKNQLHSQLAYSYPSYRKFFAMIDSKSALCFWENYPSPEYIWNTTPEEIYHTIKPVHQALKIQRIHEIISMIERNGDTRKDYQPERDFIVRNIVKDIRHNKELIAEIDGELRKLIPLTGYKLHTMPGIDLVTEAQIISEIGDINRFPDSDKLARFMGLAPVQFSSAGKGKDQRCRNGNRALNAIFHFLAIQMVAVSASGKPRHPVFREYFEQKVKEGKNKPQALVCVARRLVRIIYGMMKTRTEYRPFEKADDKN

SEQ ID NO: 86837 - protein, 412 aa, unidentified
MVLPECRFYVGVDWAAETHAVCVLDGAGTITAEFTIAHTAEGFAELLTRLGRLDPDRGEVPVGIERPDGRLVDALLQAGHPVVPVSPNAIKTWRDGEVLSGAKSDTGDAAVIAEYLRLRAHRLRPATPYTAQTKALRTVVRTRDDIVEMRTTATNQLSALLDAHWPGAKEIFADVESPIALAFLTCYPTAAHAQRLGEKRMRAFCTKHGYSGRRTPAELLARLRAAPAGTTDEPLVEAVRDAVLALVAVLTALGTARKDLDRSVVAHLGEHPDAKIFTSLPRSGRINAAQVLAEWGDSRQAYDGPDAIAALAGACPVTTQSGKHRAVHFRWACNKRFRKAITCFADNSRHTSPWAAKIYTDALARGHDHPHAVRVLARAWIRVIYRCWVDGVPYDPVRHGNAAELAKHQTAA

SEQ ID NO: 86838 - protein, 404 aa, unidentified
MTVVVGIDPHKGSHTAAALNEAEAVLGELRVRSGAAQLEHLLAWAAQWPERTWAVEGAGGLGYLLAQQLVAANEHVVDIQPKLAARVRLLATSSTNKNDPNDARSVAITALRSPEANQVRAEDHAAVMKVWAKRRHDLVSARTRVVCRLHAVLCELVPGGISGQLYASKAATMLDEFEPENAIAAARHELGLELLADLRRVDEQMRDTKKRIALAVAASKTTLTEIFGVGPIVAATVIGYVGDVTRFASSDRFAAYNGTAPIKVSSGPRKIYRLSRRGNRRLNHSIHMAAVTQIRNLRSEGRAYYDRKVAEGKTGKEALRALKRRISDALFRQLQIDAQRAQASIMGPGGQTGNDSKACVTDSHPEGRLFGEATPEPGTTLRPAATAVRSGRSKTPTRVAKRAS

SEQ ID NO: 86839 - protein, 312 aa, unidentified
MPASRPEIGIDAAKDNLVIHHQDLNQTLTIDNTPQAIRQWLATLPEGCDIAIEATSTYHMDLTERAHAKGHRVYVVDGYRLSHYRKGVGGRAKTDLADAQLLARHLHKEKDELRPWSPPPKAYRMLQSLLRRRAALVKARTALRQSLSGEPELKAPLRALIAKMDRIDTLIQKRLKSAVSAAGLQTQVQRCDAIDGVGEITAIALVMAFLRGDFKNSDAFVAFLGLDVRVRDSGKLRGKRKLTKQGDTEVRRLLHCAAMSASRHPVWRAFYQRYRDRGLHTTQALVILARKIARTAFALMKQQQEYCPAKLF

SEQ ID NO: 86840 - protein, 355 aa, unidentified
MSQEKYIGMDVHQATISVAVMDARGKLIMECLLETKAATILEFMQGLRGTLALTFEEGTSAAWLHDLLKPHVSRLVVCDPRKNALLKDGNKSDRVDARKLAELLRTNQVKPVYHGKHGTRALKELGRSYLTITKDVTRVMNRIKAVYRSWAIPCAGTSVYTPRHRAEWLAKLVEPGVRIRAEHLYQQLDSLEPVRLEAQRELLLESRKHAAVKLLRQIPSIGPIRAALLVALLQTPHRFRTKRQLWAYSGFAVEIHDSGEYRSVRGKLQRNRERITVRGLNDNHNKDVKSLFKSAAISASTRPGPLHDFYVTRVESGMRPTMARLTLARKIAAITLTMWKKGVSFDPKQLQRQAA

SEQ ID NO: 86841 - protein, 417 aa, unidentified
MSEYAALVSIDWADQQHAVCLLDLSTGAREQTIVKHTPQALQEWVLSLRQRFAGQPIAVCLEQSRGPLLYALLQYDFLVLYPINPATLAKYRQAFSTAHGKDDPSDADYLLDLLEHHRNRLRPWRPDDQKTRTLRLLVEQRRRLTSDRTRFSNRLTALLKGYFPQVLDWFEDIRTVLVCDFLERWPELSSLQRTRPATLNKFFRSHHSTSNSTNQRRLAEIKMAIPLTTDEAVMTSSVINVKVLVAQMKAVIAAISEYDRQIEALCLTHDDYHLFAALPGAGPVHAARLTAALGSDRSRWRTVDELLRFSGIAPIIERSGKQFRIRWRYFCPKFFRQTFHEFAAQSIQDSFWARAYYSMQRAKGKDHHAAVRALAFKWIRIIWRCWQTRTPYNEVIYLESLRKKGSSVLKFAADYQP

SEQ ID NO: 86842 - protein, 350 aa, unidentified
MLIIGCDLHTRYQQIEAMNTATGEVIERRLSHDGDQVEQFYSTLPKPVRVGVEATGYSDWFEQLLQKCGHELWVGDAARIRAAEVRHQKTDSRDAHLLLRLLAEDRFPRIWIAPRELRDARQLLLHRSKLVSLRTSMRNQLQAVALGQGLRKKRALWSGKGLDRLKALPILPFAAERRSDLLNWHELLSVRITELDRKVAQQAHACPEAVRLMQQSGVGPITSLAFVLTIGPVDRFRHSKQVVSYLGLNPRERSSGGHQRMGHISKQGNSMMRWLLVEAGQTAARLDPELKTFYGQLKRRRGSNVAKVAVARKLAVRLYWMLRMPVADTQRVGLRSSPGIDMMDSSPSNS

SEQ ID NO: 86843 - protein, 410 aa, unidentified
MKVAGIDVHKKVLMVVVVDASTPEEKPARRRFVTMPSELHRLLLWLQERGVEEAVMESTAQYWRSVWLELEPHMHLHLAQAFSNRAPRGRKHDFKDAERLVRRLIANELILSFVPNGEQRIWRSMTRMKLQLTRDRVRLQNQIECLLEEMRIKLSIVVSNLLGASGLRILHALANGETDPKKLAQLGGERLQCTEEQLVDALTGRAQPVHGEMLALQLQRLQLIDQQMARLNSMIAAAMKAHQDAVIRLAEVPGLGVDSAQQIIAEVGAQASTFPSAAELTSWVGTCPGKEESAEQNHSSRSAKGNKYLRRVLNQAAHAAVAMKGSHFQAVFRRLLPRLGYQSAIWAVAHRLCRVVWKILHEGVRFIEQGHEVGPREKKKRAQMLARALRKLGYEVTITAIKQPAANLAV

SEQ ID NO: 86844 - protein, 305 aa, unidentified
MLKGSKSKYEKFSNDPEGFKKLESWLKKARSAELHIGMEATGNYWKALARFLIANGHQVSVINPLKIKRYGDYRLHCNKTDKTDALMIANYCLQEDENLLLWQDVDEETRHLRDLIQYRDNILEMLGQIKNRIGSIMEDETVLLWQSADKAYLEQRLELVAKEIEAAVKESEEMKKKQALLLAIPGIGPMIASYFMALIPDVSAFKTSGQVVAYFGLDPMIQESGTSLKKQSRISKKGNAAFRGKLYLPAIVAVKVNPVIRNLSERMTASGHLKKEIYVAAMRKLVILMYGVLKSGKPFDPNYAN

SEQ ID NO: 86845 - protein, 343 aa, unidentified
MQNDTRIAVDVAKAVFEIAVSDRPGRVSRRERLPRTQFLAFFAQQPAATVVMEACGSAHYWGRRIEALGHRVTLLPPHQVRPYIRRNKTDRTDAKGILEASRNEDIRSVPVRTVAQQVLTSLHRLRSGWMAERTARLNALRGLLRELGVFIPVGARQVVPAVWALLEDADSDLPEALRPLFAEACHEIRDIEARVKQVERQLEAIAEQLLAVEHLRTIPGIGLLTATALVAFIGNIHRFPSGRHLASWLGLTPREYSSGLKRYLGRISKRGDGYLRTLLIHGARSVLLHARQQQPDQLRKWAHKLGETHVHNKAAVAVANKLARIVWAVWSRQQPFAQAPRAV

SEQ ID NO: 86846 - protein, 355 aa, unidentified
MDSTKYIGMDVHKESISIAVRNGAGKIVMECVIETKASMILQFIDGLRGDLQVTFEEGTSAAWLYDLLKPHVKKLVVCDPRKNASLREGNQNDKIDARRLAELLRLNHLHPVYHGEHGLRSLKELVRSYLTITKDLGRVMTRVKAIYRSWAIPCSGKQVYAPRHRAEWLAKIGEPGVRRRAEFYYQQLDALRTVRQQVRRELLAEGKKHKAWKRLCQIPSIGPIRSAVLLGILQTPHRFRTKRQLWTYSGFGIETQSSADHRRVDGQLERAKKQNSIRGLNRNCNHDLKNLFKGAAIVAASKPGPFQEFYTTLLTKGIRPEMARLTLARKIATIVLIVWKRGACFDAQHLKPQTA

SEQ ID NO: 86847 - protein, 369 aa, unidentified
MPKKRNKVSILPVIEPNAAGIDIGATEIFVAVPGDRDAEPVRSFPTFTVDLERLADWLQECQIRTVAMESTGVYWIPLFQILEKRKIDVRLVNAHHVKNVPGRKTDVQDCQWIQQLHSVGLLRGSFRPDDEICAIRSLWRHRDNLIQLATLHLQHMQEALDQMNLQIHHVISDLDGTTGLAIMDAILAGERDPHKLAQLRHPRVRASQETIMKSLVGDYREEHLFTLRQSLNAYRYYQQLIQEVDLQVKQMMHRLPSNVADGEKPPKGDKPRPRKIPWRNEPPQLRDDLYRAFGVDLTEVPGINTLTAQMLLTEIGPNLARFPTAVAFCSWLRLCPDPKISGGQVLSSRTRPTKNRAALALRMATQGLH

SEQ ID NO: 86848 - protein, 416 aa, unidentified
MKGTGKAREIQGRYIGLDIHKEYVLAGGQNVAQEWVMQPRRISMERFQEWASANLRKGDAVVLETTTNVWDLYDIIAPLVSRTVVAHAGGVRQIAEARVKTDKEDVKRLIRLLIADIVPEVWVPPVEVRELRGMISYRNRLVKTSTMIRNRLQSLLHRHNLILPKGGLTDKAWWEVQKISAMEKIQIRQELAMLEEIDQHKAEVDAELGRQSLGETWGRQAVRLLQLPGFGVVISMTVLSAIGDITRFESAKKLVGYAGLGAGVHDSGKEHIEKRITKSGRKELRWALVEAAWRAIRISPYWKEQYEKHLHRMRNPNLAIVAIARKLLVAVCLVMTKEETDIHASEEDLAYKMLVLAWDLGENERMGLTYKQFAKYALMKLGIETDITRFVRRNVPRRLAPREEVLARMSELGLTI

SEQ ID NO: 86849 - protein, 339 aa, unidentified
MGLYGGLDLHGKSTFLGLVDGEGKRVYRKKLPNDPGIILGELHPYREEIIGLVVESTFNWYWLVDLLMDHGYRVHLANPAAIQKYTGLKYADDEHDAFWLAEMLRLDILPEGYIYPKEDRPIRDLLRKRGHLVRLRTSLILSLQGIIARNCDVRLSVNKIKARRTNQVGPLLAGNEDLALAGAVSKESIDFLGENIRKVEGVVERRVELREPYRYLLSISGVGKVLSLTIMLETGPISRFPKVGNYASYCRKVKSQWLSDGKTKGKGNSKNGNKYLAWAFSEAAEFARRYDEDARTFYNRKKQKTNFMVAHNALAHKLARAAYYVMRDQVPFSAAKLFG

SEQ ID NO: 86850 - protein, 320 aa, unidentified
MVFIHFIGIDVSKNWFDVAIAGSPGKPRRFDNTARGISQLLVDLENCRATSFVVLEATGGYEIELLAALIGAGIATHRAAPWQSRSFARSLGKQAKTDGLDAKALARLAAERHTSLRPFALASEDQSKLNELMMRRADLLAFQVAEKNRDAHPRYTRSTQAVRTSLAESLDFLAAQLQHIEAEIDALIAASETLQQRINIMTSQIGVGSKTARILQAFLPELGQLTRRAAASLAGCAPHARDTGLATKHRSVFGGRSAVKRVLFTAALSARNHDPFMRAFFERLLANGKPKMVAIVALMRKIIVQLNAKLRPQLIYNHGR

SEQ ID NO: 86851 - protein, 345 aa, unidentified
MLTDELEYVIGVDTHAKTHTLVIVEARTQRTAQKLALDANRTGYRRALRLARRRAPGCRVWAIEGTGSYGAGLTRFLAERGEQVREIERPKRAPGRRGKSDAIDAERAARELLAGTAGSHPRSDAEAQALRALLVTRESAVRQCTASLNELRALLLTAPAELRERLQDLSEARLVGVCCKLRPGRDAERAAHSLALRTLARRVRALRLEAATLEDEIERRVRESSPQLLAQRGVGPISAACILTSWSYRGRLRSEAAFARLAGAAPIPASSGQTVRHRLDRGGDRRLNRALHTILLTRRRLDPDTRAYVTRRVVEGKSEREAVRCLKRYLARSLFRLLESPPLTP

SEQ ID NO: 86852 - protein, 324 aa, unidentified
MAKRTTICAGIDTGKWKLDVALDKSPEQRQVDNTAEGHKALLDWLRGHRVKRIGIEASGGYEQAIVAELRRKRFVVVVFQPAQVRGYAKFHGQRAKNDKIDAALIAACTAAVKKIHPAPDPRLLPFAERLTMIDQIIEDNARLKNRLESCRDERIQKLWKQDIACLTRRERVEFKALVTAIREHRDLAARLDLIYSVSGAGLPTAVTILVRLPEIGQLTREQVAALAGLAPYDDDSGEQVGVRHIDGGRKRLRRALYAAALPAAFRWNPQLIALYNRLIAAGKGHKRALVACARKLLIFVNTVVARGTPWQNQPPPRAAMTAIG

SEQ ID NO: 86853 - protein, 393 aa, unidentified
MRFYTTPHRYYCGIDLHARRMYICVLDAEGQIRVHRNGPATPEHFLTTIAAYREDLVVAVECIFTWYWLADLCAQEGIAFVLGHALYMKAIHGGKAKNDKIDAHKIAVLVRGGMLPMAYVYPREMRATRDLLRRRCHFTRKRAELLTHIQNTASQYLLPTLGKIAYHGNRVGVAEHFRDPEVRKSVETNLALIDEYDRLLTELELHLTQTAKVHDVNAFYRLRSVPGIGKILALVLLYEIHDIHRFPRVQDFVSYCRLVKCAKQSDGKHYGYSGTKIGNAHLKWAFSEAAVLCLRKNPPAQRYVARLAHKHGKGKALTILAHKLARAVYYMLRRGQAFEVTKFFSGTAGGDRLPRAPRMAAAPAGNDLDGGAILTLPKSSGAGRPGAATNATA

SEQ ID NO: 86854 - protein, 434 aa, unidentified
MDLSKRLQVGIDFGRSKADVCLLDPGGEVLVMHKSFGNSPAGYQKAKELLQKVLDSRGLEQVDISGEATGFYWLPFYLQLANDPDLKALDTQLFVLNPSWVRWFKKSLPQDDKTDAKDPFYIADRTRTRRPKLAWSSQEDWLELRFYTRVRFHLAQTLTREKNFFQAYLFLAHSGYHRVGPFGDTFSVTSRKLLLQPQKLAELVEMPEQQIAAELFRLSGHTLRNPLENARLLKQAMQESFSLPTGLSEPVQRILELVMHHIEFLEDQIQQVEQWIAADAQAHHPEVQLLSSIPGIGLVFASGIAAELGGLERFLSGLKWDRKRQVYRPKRLRDAEDAIAKFAGLWWPRFSSGDFEAEERSLAKTGNAYLRYYLIEAADSLRRHIPSFAAYYQKKYPEVNKHNHKRALVLTARMSLGLYVGLLHRHEVYRPEVG

SEQ ID NO: 86855 - protein, 343 aa, unidentified
MSVYVGMDVHRKRSQIAIVDEAGDQQRNRNLANDPAKLVPFLGVLPPGTPVAFEAAYGWGWLVELLEELELEPHLVHPSRCKAIAAARLKNDKVDAATLAQLLRADLLPEAWIAPQQVRDLRALLRHRAGLIRLSTGLKNRVHAVLADRGISARSSLWTAPGRTWLAALDLPPIPRAIVQDCCGLLDTLATPIARLEGEIGALAKPDPRVQALMALPGIGRLTALTLVAEIGDIGRFPSARKLCAWAGLTPQVRNSDRKVRHGHITKQGSPWVRWILQEAAQTAKRSPLFADTYGQLAHRRGRNIATVAIARRLLARSFHILTQLEVQKASEKAPTGCARVFA

SEQ ID NO: 86856 - protein, 380 aa, unidentified
MASMHDSDRFKTTVYAAIELSKKSWVVAIARPDRDRPSIHRIAGGNLADLIGRLRKAAGEKQRIVVCYEAGYDGFWLARSLAKIGIDCRVLDPASIQVNRRARRVKTDRIDSLALLRALIAIDRGERHVCAVVRVPTVEEEDARRSHRERQRLVRERTGHINRIKGLLFAQGIRGIEPKRRRTRIDFGKLTTAEGRPLAERLRRELEREYQRLELVQSQLRIVEKERDTADAQDPAVERKRELLCALQGVGGASAAILAREVFARQFASRRQLGSYLGLTPSAYDSGSTTRCQGISKAGNSWARRVLIEVAWLWRKYQPGSPLSHWYARKTADQSPRIRRIMLIALARKLAISLWRYVETGLVPDGAVMAKTTPHMAAAT

SEQ ID NO: 86857 - protein, 332 aa, unidentified
MKKIIHFIGIDVSKETLDIALIKNNDKSNIYSSKVTNNKTGFKKMKQWLKLEKVSWQEAVFCIEHTGMYSKPVGQFILSLQGNLWMEMSLKIIRSMGVQRGKNDKIDAMRIALYAQRCQDEMKLYEPPRPIVEKLRTLLQLRKRLINSRNSLQVPCNELTTIDEQAGKEATRLIRSSVTALEKNIDVINEKIDELIASDEQLAHEFEIGISVPGIARITLAYMICFTNEFKNYAGGKQLACYCGVVPFEYTSGKSVKGKPHVHNMANKFLKKLLHMGAIAAVTYYDEFKCYYKRKLKEGKPKMLVLNNVRNKMVLRLAAVIKNNKPYQKIAA

SEQ ID NO: 86858 - protein, 456 aa, unidentified
MAKKRKNSTKKIGAPVLHCLNPNAAGVDVGATEIYIAVPVDRDPQPVRHFSTFTEDLHAVAAWLKACKIETVAMESTGVYWIPLFQVLEARGFTVFLVNARHVKNVPGRKSDVSDCQWLQYLHTVGLLRGSFRPEQAVCTVRSILRHRDSLVQMASSHVQHMQKALNQMNLQLHHVINDITGVTGLTILKAILAGERNPHRLAALRDRRVKATEDTIAKSLVGDYRREHLFTLGQSLTAFRHYQELIGACDREIEQYLEAFESKVDPREGSSPESKNEQESSDGMPRFDLKTHLHRIFGVDLTRIPGINILTTQTLLAEIGPDLSRFGSAPAFTSWLGLCPDNRVSGGKVLSVKTRKVKNRAATALRMAAQALHRSQSYLGHFYRRMRAKLGAPKAITATAHKLARIIYHMVTMGQAYDETVCAQNEIQNRLRLEARLRKQAREMGFQLVLANTAV

SEQ ID NO: 86859 - protein, 407 aa, unidentified
MRQDKDIILAVDYHSRNIEFRWLNLDGGEERTGNYPTTRAGILRHVEQAISELSPGGRVVWIMESTTGWARVKDLLGERVDFVLANVLQMPQSPKGRRRKSDKIDTGRLLNEYLKGDLPRSFQPAVWWRQVRRLVDSRQDLVERQTAIKNWITSLLHHETWEDRTNLWTNKGRLRLAKMAFSPSDRMLVDLKLRQLDEIDEQIKAVETAMKEVYDTWPEAQLVDQIKGIGMMTAVSILAHIGPISRFMTAEQLLTYAGLIPATWSSDATCHHGHIGGGGTDSHLRYLMIEAATWLAKIPRYRAAYERVCKKRGKKIARIVVARMAMRSIFKILKDKVRFDASASAGKEPARDCRRATPSEGNDAFIALGLPAEKEKARMSSEPSPLCSRQAGARVARQRCPILQPGR

SEQ ID NO: 86860 - protein, 338 aa, unidentified
MYYSGIDQHKQFSYFTTVNDEGIIIKQAELKNNEFDILNYFYTLGKDHIATVETTGGWYWMNDLLSNHGINLKLAHAKYVKAIAYAKVKTDKVDSHILAQLLRLNFIPEAYKISDNLRPLRDTLRARLRLSQKRTSCLNFMNRMLEKFNINSPSQLTEFYKLQYLQFDNQEQLLKQQMLTLEKSLYPSLIPNEDIQRLLWIPGIGKLNAFSILLEVGDINRFQSEKNFFSYCRLVPSARNSAGKSKQRSSKDGNKYLKLVFSDAAVHSLQYYPTIKKYHDSKLRKKKKQVAHAIIAKEIARIVYYVLKNKSAFNNHFKGIELEHKKSVQWPRTSSPDV

SEQ ID NO: 86861 - protein, 385 aa, unidentified
MIYVGIDIAKLNHFASAISSDGEELIKPFKFTNDNDGFQLLISKLDPLDKDSLIIGLESTAHYGDNLVRYLVAKNYKVCVLNPIKTSTMRKNNIRKTKTDKVDTYIICKTLMMQESLRFVTFYDLDLMDLRALGRFRQKTIKQRTLLKIQLTSYVDEIFPELQYFFKSGLHQKSVYALLKEAPTPEAIASMHMTHLLKVNSHGRFDKKMAQQLRVLAQKSVGASDSSLSIQVTHTIQQIELLDSQLERVEAEMTEIMKFNDSVIMTIPGIGYINGGMILGEIGDIHRFSSPNKLLAYAGLDPSVYQSRNFQAKKTRMSKRGSKVLRYALVNAAHNVVKSNATFKTYYDAKMAEGRTHYNALGHCAGKLVRIIWKMMTDNLEFNLE

SEQ ID NO: 86862 - protein, 309 aa, unidentified
MHGICGVDVSKAWLDSWAAGRYRRFANSAEGVRDLLAVCREHGVTLVVMEASGGVEQAAFLELWRHGQPCAIANPRAVRSFADAMGYLEKTDRIDAEMIAGYAHARKLVATPPPSDDQRRLTALAARLRQVSADLSVQKQRLHATSDPIALASLKEAIAFFNRQAKALACEIAALVTVDPLWAELDKTIRSIKGLAGRTVAVLLADLPELGTISNKAIAKLVGLAPLADDSGRRSGRRSVRGGRASVRSILFLVADGARKYDPRLAEFRDRLHAQGKPKMVVRIALAHKLLVWLNAKARETRQAFAMRT

SEQ ID NO: 86863 - protein, 471 aa, unidentified
MHGDVLPPTDRYGINRKRSVRQENLVLPGSKNPEYSLFPASLSHDRMIGPWKSPGNAGGLVGRHTLSCRKANQGGKAMPELFVGIDVAKDTSSAQGIDRNGKGRFSLTFAMDSEGFMQLWKAITEHSKDVSEVSAAVESTACYHINLYSFLTAKGVSTVVINPLLIANFTKLSLRKTKTDKKDAMSIAQFLLVHRETISQLSLSQDLQDFRDIARERESVCNLLSAHKVEIKRLLQSTFPELERIGDISTKVMQEFIAAFPSARLVNMARPKAIQKILQRKGVGTRLTYTPEDLIRAAKQSVATISPAKEFILQGKVRTHQHLQERFEELTKILTEYCKASMLEDFEIITSIDGINKRTATTFLAEIGCISKYASYKKLIAFAGIDPTVYQSGKFEGASRISKRGNRHLRRVIWLMTTCVIQHNATFTAYFMKKRSEGQPFKKAVFATAHKLVRVIFAMLTQRTMFKEVCA

SEQ ID NO: 86864 - protein, 375 aa, unidentified
MKKNSSGCKSPKARMKATRATNVTVGIDLGDKTSRYCMLDENGEVLREASVATTKKAMTQVFATMKPCRVAIEVGTHSPWVSRLLKSCGHEVIVANARQVQLISKSSRKNDRMDAQTLARLVRVDPRLLRPVQHRSEQAQGHLRVIRVRAALVEARTMLVNAARGLTKATGERLPSCDADQMGVELMESLPAGLQNSLRPLLEEVGSLTEKIQALDQQVEQIARTDYPETDLLRQVSGVGPLIALTFVLTVEDRERFQKSRDVGCYLGLRPRQSDSGESEPQLRITKEGDPYLRKLLVQGAHCIMGRRGPDTDLKRWGLKLSARGGKNAKKRAVVAVARKLAILLHRLWVTAEVYEPLRNSQSGPPVKKSRKAVA

SEQ ID NO: 86865 - protein, 444 aa, unidentified
MFARLSGVPWLLIEICARSLGYGCVSGVFHGPLLATGTNGWRSVVAQRDIAWIGIDVGKTHHWACMVDAEGKKLSSIKVANDEAEIVALITNAGSQARQVVWAVDIIGAPSALLLALLARADHAVRYASGRVVAAMSAAYVGEGKTDAKDAYVIAETARLRGDLPVIDTGTDLVRKLAVLTGHRADLIADRVRMINRLRDLMTSVFPSLERAFDYSSHKGAVVLLTGYATPDGIRRIGQTRLTGWLRNRNVRGSADVAARAIAAAKAQTVVLPGQDLCASIITELATAILALDDRLKALDAQIEATFAEHPQAAIIQSMPGFGPFLGASLLVGSNDLRAFPSAGHLAAAAGLVPVPNDSGRRTGNLHRPLRYSRPLRHVFYLSAQTSMMRAGPNRDYYLKKRSQGATHSQAVISLARRRIDVLWALLRENRTWTAAPPPLAQAA

SEQ ID NO: 86866 - protein, 339 aa, unidentified
MTEITRIGVDIAKNVFEVHAVNAQEQVVVRRSLRRNQVLAWFGKLPACLIGMEACGTATHWARELSRLGHTVRLIPPAYAKAYVRRNKNDPADARAICEAVSRPSMRFVPIKTVEQQGEAVTHKARQLLIKQQTMTQNSLRGLMAEFGIVVPQGPQHISKLLVILGDPEDPRIPAVARTALNAMADLLAALEQQVETLDKTIRAQVRANPTARRLDTIPGFGPILSGAIAAIVADPRHFDSGRDFAASLGLVPRQDGTGGKVKLGPISKRGNGYLRRLLVNGATAVLNGKNARNDPWRAKMLDGKPRKLVAVALANKMARIAWAVMTRQEDFRPRAVPA

SEQ ID NO: 86867 - protein, 313 aa, unidentified
MSEQQWIGIDVCQKYLDIYVRPQGKLFQVTNDEVGISTLVQTLNNIQPELIVIEATGGMEIDAVVKLNGAGLAVAIINPRQARDFAKATGQIAKTDVIDAKILAHFADAIRPEVRPISDESARQLEDLVARRRQISDMITAEKNRRRGKTNSVQADINEHIEWLEKRLQEIESQISSAIANNRDWQQKLKLLTSVPAVGEVVAVTLISFLPELGTLSHKSISYLVGVAPLNKDSGKFRGQRRIWGGRAKIRCVLYMAALVAIRFNPPIKAFYERLIQKGKLKKVAITACMHKLLIFLNAMMKNNQTWRHEVNP

SEQ ID NO: 86868 - protein, 407 aa, unidentified
MEVLHPRCAGLDVHSQTIVAAVRIAEGGKVRREAETFGTTTRELLRLRDWLKEFGATHVGMEATGVYWKPVWHILEDEFSQVLGNPREIQNVPGRKTDMNDATWLSDLIAHGLIRSSFVPPRPIQELRDLTRTRKQMMRERGQHVQRIQKVLEDANVKLTNALSDLTGVSGRAILEAMVRGVSDPDQLAALAHARVRASKEQLRDALQGRVTDHHRFMLQIHLRQIDSIDAAIELLEAQIERALAPFREQVGHLLGMPGISEVMAATIVAEIGTDMSAFPTAGHLLAWAGLSPQQNESAGKRRNSRTKKQRWLKTAMVQAAWAASRKRDSYYHAQFLRIRARRGAKKAVVAVAASMLTAVYYMFKNNTTYNELGHEYFQQRDTGRAADRLVKRLRSMGYEVELRRAA

SEQ ID NO: 86869 - protein, 454 aa, unidentified
MAQRKRDVIPKPGRSRTAALTITHPNAAGIDIGSASHFVAVPPDRDDQPVREFPSFTVDLHALADWLDACGVDTVAMESTGVYWIPLFELLESRGFTVLLVNARHVKNVSGRKSDVLDCQWLQQLMTYGLLSGAFRPAERVCVLRSLYRQRGMLLRSQARHVQHMQKALTQMNLQLTNVLADVVGETGQKILRAIVAGERDGQVLGAMKNVRVHASVEEIARSLQGTWRTEHLFALKQALGAFDFVGTQLAECDREIEQQLHVLHAHDGDPAKGKKRGRARNAPKFDLRTQLFQMCGVDLTRIDGVDVTTALAVISEVGTDMTRFPTVKHFTSWLGLCPGTKITGGKVMSGKTKRVVNRAAQALRLAAAALRSSKSALGAYFRRMCSRMDKPKAVTAAAHKLARLIYTMLTKGQEYTDQGQDYYEERYRQRVLRALSQRAAKLGMKVVAIEQPA

SEQ ID NO: 86870 - protein, 316 aa, unidentified
MICGVDVSSERLDAQLGRQGVCKSFLNDQAGISALAEFCRRHKVGLLVMEASGGYEQLAFGLLWSMGIEVAIVNARSVRRFAQAMHLFEKTDRIDAGVIAWYAETKKVVATPAGSVQQQQLKALVTRLRQLTKVRAMERNHRTLVTDATVLASLHQVLVLLNRQIKELEKQIADLISSDPVWGKLDTTLRSIKGVANRTIACLMAELPEIGLLSNKKISKLVGVAPLADDSGKHKGKRRIYGGRQEVRGILYIIVTCVSHHNPDFTAFKQRLTTAGKPKKAIRIALAHKLLIRLNAKARDMRQTLAQSPGPLTVKP

SEQ ID NO: 86871 - protein, 438 aa, unidentified
MSNNVIFNFDDLFISVGIDVGADFSWMSIALPNQQFVGKPYKILHSSMDSLTTAVSKIKEAEELYSLESHIFLESTGIYHYPLFCYLRDNGFNCSVINPIITKNSTNINIRKVHNDRFDSKKAALVGLKPDLKVSLMPSDLALNCRNLCREYYDLTDNRSAYVNKLQGELRMAFPQYLGIFSKITIHTSLTLLEKYTSPNAFLKADKQEIIDVIRTTAHFGLTYAEKKYNAIIQAANDANEFGYIIDSNIRRIRLYISFIRKYDEEISNILDALHELVDSNSDTDFVKQLHLIESFKGAGFLSAVSLMGEIGDFSAFSKPKQLFAYFGLDPAVKQSGKFEGTKVQISKRGSAIARRVIHVLTLQRISISRNGEAKNPVLRDYYLKKCESKPKLVAMGAVSHKVCNMIFAILRDNRPFKIITPQEHIKQYKAAKCNIAA

SEQ ID NO: 86872 - protein, 439 aa, unidentified
MILIREVADAPVIMGISKSAGLKFPCGEVRIVNPLFVGIDVSSKSNVAYLMNPDGSKHSIFSVQNNLGGAKLLSERIVSALSSMRLNDVVIGLEATSIYGNSLVYALREDGSLGRFQRKIHVLNPKQVKKFKESYPDLPKNDFVDAFVIADHLRFGRIAKEVYMDDYRYQALRTLTRARFDVIQNLTREKQRFANYLFLKCSGMAQDKNIPNTSATTIALMEHFETVDDLANADLDELTAFIAKTGRGRFADPDVVAKAIQTAAKGSYRLPKTVNDTVNQAMSVSIASMRALKEQVKVLDKAIEQQFEIIPNTLTSIPGIGMVYSAGIIAEIGDIHRFNSQASVAKFAGLVWTQHQSGEFEAEHSRMIKSGNRYLRYYLLEAANSVRRCDSEFRRYYDLKFKEVNKYQHKRALALTARKLVRLVFRLLKDNRLYIPPEG

SEQ ID NO: 86873 - protein, 343 aa, unidentified
MKLSRVGVDLAKNVYQLHGVDRSGKTVWKRRLKRHQWFKVLLDTAGPECEIGMEACAGAHHWGRELQSRGYTVKLIAPQFVKPYVKSNKSDAKDAEAICEAMSRPNMRFVTVKRVEQQDIQATHRIRAELITQRTAKANQIRGLVAEYGLVAAKHLSSLRAAIPCWLEDAENGLTGDFRALLQGVWTDLLLLDDRVGEMDQVIKQLADNNEDCVRLQQLRGIGPMTSTAMVATVGDARQYPKSRQMAAAIGITPKQHSSGDRDRLLGISKRGDVYLRTLMIHGARAVVARAKHKDDRLSRWVTNIANKKHPNVAAVALANKTARMAWAMLRNETDYDPDYAIS

SEQ ID NO: 86874 - protein, 437 aa, unidentified
MSGKKSLELRVSVDVGYRRHSVAIGLPSGEVLEEFEIAHRPEGFEEFFSRIEKHHKARRCGVAVGMEGFNGCARPLDAMVRRRGYRLYNINNLKLARFKEIFPGAAKSDRIDARKGLELFQLSDHLPLAKEVLQEVKGTPQENEVLKRLTRRRRRLVDERVRVISNLQTDLQAVCPGLLEITKNAGNQWFLNFLVSAATLPQLARLRPSTLLKVPAVGRKYARLIEDWQKRAHFSEEVEWVSEMIQEDAQRCLELDEKIKALKAKIKGVAKDSKIAKTLLSIPGFGTICTAELAGEIGTIERFSKEGSLALYLGMSTLDNSSGKYQGSKQPKHVNRRAKAAMMVALDRHRKYVPESQRYYEKKRREGKKHNQAIRALGRHLCRIIYKMLNDEREYEIRPEKGNTKTKVKSRSCVKTQIRKPKISAKGKNNNIYQQST

SEQ ID NO: 86875 - protein, 344 aa, unidentified
MSMVRSVVGGVDTHADFHVAAAIDGNGAMLGVESFPGDAAGYEELLGWLVSFGVVRLVGVEGTGSWGVGLARFLHDQEVETVEVDRPNRQKRRKVGKSDPIDAEAAARAALSGEASVTPKTRNGPVEQMRVLLVARRSARTQRIQTLNQLRHLVFCGPEPIRVRFKDRYKTGLVTEAAKMRPRNGSDPVTFTTNTVIRSLARRIQHLNAEMASIDQMLSELVAATAPSLLELHGVGLDSAATLLVCAGDNPDRLKSEGSWAHLCGVAPLPASTGKTPRHRLNRGGDRQANAALYRIVLTRMSNHPETRRYETRRRDQGRNTTEVMRSLKRYVARQVFKQLPRIA

SEQ ID NO: 86876 - protein, 343 aa, unidentified
MGQYVGLDVSLKETAVCVLDEEGRVVWRGSCGSTPEAIAATIHQHAPQVVRLGLETGTLSPWLARGLEGLDLPVVCLDARQARAVLSLRINKSDPNDAHGLAEIVRSGWYRQVQVKSRSAYQLQALVGARAQLVKTKIDLTNQIRGLLRTFGLVVGKAGGRKFDLRVQELIVDDDALQPPIEALLSSWRQVCEQIGILDKRLLAVAKQSATIQRLMTVPSIGKVVATAYAAAIDDPSRFAKSASVGAYIGLTPRRHQTGELDYTGRISKRGDKLVRSYLYEAAGILLNRIHRPSWLQSWGKKLVKRLGFKKAAVAVARKLAVIMHRIWMDGSSFDWSRKEAMA

SEQ ID NO: 86877 - protein, 416 aa, unidentified
MSFALPEALFFTGIDWAAETHAVCVTDAGGKIAAEFTIEHSADGIAGLVRRLGRYGEAGVMPVAIERPDGRLVDLLLEAGHPVVPVSPNAIKTWRDGEVLSGAKSDAGDAAVIAEYLRLRAHRLKAAEPYSDETLALRTAVRSRGDLVEMRVAATNQLSALLEAHWPGAKAVFADVESPISLEFLARYPTPASAAHLGEKRMAAFLVKHGYSGRRPAAELLARLRAAPAGTSREALSEALRDVVLAAVGVLTALNAAVRNLDRSVAAHLGEHPDGKIFTSLPRSGQVNAAQVLAEWGDCRQAYAGPDSVAALAGVTPVTSQSGKHRDVQFRWACNKRFRVAVTTFADNSRHASPWAAKVYDDARARGKDHPHAVRILARAWIRVIWPCWLNGVPYDPAQHGAAAALAEQTAKQIAA

SEQ ID NO: 86878 - protein, 300 aa, unidentified
MNETIVEKFVGIDVSKSTLDVCIEPDEKTLHVAYDEAGIKQIVDRLKEVSPTLIVIEATGGLEIRIATELASKGLQVAVINPRQARDFAKATGRLAKTDQVDAAMLAAFAKAIRPQARPLRDEDTCALNDMVSRRRQLIDMRVQETLRLGTAASKPLQKNLSKHIAWLDKQIAEIDADLTKRLRKSDVWRIKDDLLRGIPGVGAVATLTVLAKCPELGTLNRREIAALTGVAPLANDSGKHRGKRFIWGGRADVRAVLYMAAVSAIRCNEPIKAFSERLKKAGKPPKVVIVACMRKLLTI

SEQ ID NO: 86879 - protein, 341 aa, unidentified
MEEFIGLDVSLKDTSISIRRGGKRIWRGKCPSDPKCIAEVIRSRAPNAKRVVFETGPLSVWFFHALTAEGLPAICVDARHAAKALDMAPNKTDARDADGLAHLAEVGFYKEVRVKSFDSMLVRTLVNARTHLIQISTKLSNQIRGLMKTFGLVVPKGAGGVFDTNVRELISANEGLALIILPLLEAWRGVRKRAAELDGQLIAVARRSSPCRQLMSIPGVGAVTATSFIAAIEEPDNFRTSRSVGAWLGLTTRRFQSGEVDYDGHISKRGDSHLRGLLYEAANAILTRVSSESSLRTWGLKLREQLGFKRAAVAVARKLSVIMHTMLKTGELFNPSAGAAA

SEQ ID NO: 86880 - protein, 411 aa, unidentified
MEVIHKRCCGLDVHKDTVVACLMIREGGKVHKEVRTFLTMTVDLVVLHDWLKAHEVTHVAMESTGIYWRPVFNLLEEDFTVLLVNAAHIKTVPGRKTDVKDCEWIADLLSHGLLRGSFIPPEPIRDLRDLTRYRKSLTDERVREVNRLQKFLEAANIKLSSVANDVMGASGRAMLEALTAGSTDPQILSELAKGRLRKKLPELRKALEGRFRSHHRFMVGEILTHIDFLDEAIERISQEVSCRIVPFSKTVEVMDLVPGINQRVAEGILSEIGVEMSCFPTDGHVASWAGVCPGNNESAGKRKSGKTRKGDRWLRRYLIEAAWAASRKKGSYLSALYHRLVVRRGKKKAIIAVAHRLLVIIYHMLKDQGSYRELGPDHFNKVNAVHVQRHHVRRLESLGFKVILEPVAKAA

SEQ ID NO: 86881 - protein, 389 aa, unidentified
MLLDHPSDGPAAIRTQFGAIFVSLELSRSNWLVTSLSPGKGEKMSKHSVTAGDTAELMKLFAELKRKAAIRTGQTYPIITIQEAGLDGFWLHRVLQQEGIESHVVDPASIATPRRRRRAKTDRLDGETLLRACLAYKRGEPRVCAMVVAPSPEEEDRRRLCRERRTMIEERITHVNRIKGLLFAQGISDYAPLRRDRRTRLAALRTGDGRELPSHLRAQIDRELDRIELLLEHIKTVEAAQDALLAATRNPTDQQAAPEPVAMLLALRGVGANFAAVLWSEAFYRQFSNRRQVAAYAGLAATPWQSGGIRHEQGVSKAGNPRLRTTMIQLAWLWIRHQPQSALTRWFKERSQQGRKSAIVALARKLLVALWKYVTAGVVIEGAVMKRPA

SEQ ID NO: 86882 - protein, 375 aa, unidentified
MGEITRALIARVGVDLAKRVIQVHAVDAAGRRVVSRALRRDAFMAWCVQLPPGCLVAMEACSSAHHWARKLRALGLDARLIAANLVSPYRMEGKTGKNDATDAAAICEAASRPSMRFVSVKTCEQQGVMSLHRVREGLKEERTGCINRIRGVLAEFGLVFAQGPKALRAELADVIEDASNELSTMARLVLQRAFEHWRELDEHLRWCDRQVGQHVRSSPAAKRAAKITGIGELGASALTASVGDFRQFKSGHQFGAWLGIVPSQNSSGGKTSLGRITRHGDDYLRTLMIQGGKSAVMSAGKRDDPTSRWLVQLVARVGWQKACVAMANKNARILWAVMTRDQGFDPKHVSEKPQGKKPAHERIAAGPPPLEACPA

SEQ ID NO: 86883 - protein, 447 aa, unidentified
MTKFKEHGKSFAAHIGLDWADKKHFWTMQTADGKRSRGELKHTPEAIDAWAAELAERFGGRPVAITLEQARGALIAILSKYAHLHLFVVDPSRLNHYRKSVSPSGAKSDPVDGDLILDFQLKHPELLRCLEPDTVETRSLQFLTEQRRDLVNQHTGQVQIFNSWLKQVFPQILEWFDDVSTPLVGDLLKRWPELAKLKKARPETLLQFFHDHNCRSVERNQQRLEAIRTAVTATHDAALLKAANLMIQTSIQLLATLRTAIEQFECQIQAVFATHPDRFIVESFPGAGPALEPRLIAALGTDRSRFQSAADMACCFGIAPVTESSGNSRWVHWRWACSKFVRQTFHEGAACTVRQEGWARDHYERQRAKGKGHHAAVRSVAYKWIRILYRCWRDRVPYSEQRYLEALRTHGAAKGKSAANAAEPSIGLPTVQWKNCGGFSKPTKFSS

SEQ ID NO: 86884 - protein, 317 aa, unidentified
MLEKGKVYAGIDVAKDSLEVAVSTGECFTVANNDEGIAQAVQRLTAAGPVLVVMEASGGYERQAWVALWEAGLPVALVNPRDTYHFAQANRQLAKTDRLDARGLMLFGAQIQPAPCAPPSADNRELSELVGRRRQLVNMLTAERNRRQQVMTTPSKRSIERTIKTLLRERKSIERAIADKLSHSAELTDLAQLLCSATGVAAVTSATLLTRMPELGTLSNPEVGALVGSAPFDRKSGCWSGESHIFGGRAEVRTALYMAVTTAKRYPGPIRELYQRLRKAGKQHKVAMIACVRKLAIILNAMVKHHTPWRSSCAAAS

SEQ ID NO: 86885 - protein, 362 aa, unidentified
MTMLAEPNEKVEDPAILDAAVGGDTHRDTHYLEMLTGAGVLISRITIDNDADGYAEALAWIAEHTPGPRVLIGLEGTRSYGIGLCRALQAAGLEVVEAEQPKKAQRRGRGKSDPIDAHLAALTVLRMPADRKVLPRNDGDREALRILLGARREATTIKTKQTNRLRALLLTGDDDDRALSKGAMSDARLGTIARRRARKGENTEQQVRREEATRLALAIRRVTSELKANKTHLTELVEEFVPGLLDTVGIGPVSGAQAIVSFSHVGRCRNEAAFAALAGASPIQASSGRTHPHRLNRGGDRQLNRALHDIAKTRWRHCERTKAYITRRQAEQMPDREIRRCLKRYIARELFRTLTAAGVDNT

SEQ ID NO: 86886 - protein, 349 aa, unidentified
MRIIGCDFHPGYQQIAMWDQGSGELLERSLSHERKEEVRAFYAGLQGPVRVGIEASGQSQWFERLLVELGHEVWIGDAAKIRASCERKQKTDRRDAELLVKLLEENRFPQIWVPTPEERDARQLLWHRAKLVRMRSQVKNQLQALALNQGVQRKRKLWSAIGRKQLENLPLLPWANRRRTELLALHDQLDASICELDQAVTEQAYRRPAVRRLMTHPGVGPITALAFVLTLGPAGRFRRGKQVASYFGLIPTEHSSGSGGQRLGHISKQGNSFLRGLLVEAAQSAVRHEPGMRREYQRLAQRKCRALAKVALARKLAVRLYWMLRMEMDYAQLLQGSHAGQLESFRGRS

SEQ ID NO: 86887 - protein, 445 aa, unidentified
MQTLPLLDPKAAGIDVGSETLHVFVAGDLPKVFGPTTGQLHALRDWLQEQGVASVAMEATGVYWLCAYEVLEHAGLRVLVVNGKHVKNLPGRKTDLKGCQGLATLHAHGLLRSGFVPPEHIRRLQDYLRLRADHVTLAAGHVQKMQQALERLNLKLHDVISDLTGVSGLKVIWAILQGEREPQRLLELCNVQIQKKKAGALKEALRGIWKTEHLFALQQDLAGWAFYQQRIGECDAQLERELHGLAGPEDPQAPAPKATQPGGANAPQIAGLHGLLWRRCGGKDPTVLPGVADYTLLQRIGGVGTDLSRWPTEKHFTAWLGLAPGSRQSGKRKGSQKRARNRAGRWFCVIARSVGRSADKALGGFYRRLKIRRGGLVANQALARKLAALFWRLMVHGRNYVEEGLKKYDMLLPLTQVSALCCPFSGGISEKGSNTSHLAPFPSVP

SEQ ID NO: 86888 - protein, 404 aa, unidentified
MSVHAAPVTSSTIVVAVDVGKTSAMVSVTDVARKRVLGPVEFAMTRSGLVAMVRGVSAVVAPSAQVKVGVEAAGHYHRPVLDYRWPTGWEVLELNPAHVAEQRRVAGRRRVKTDAIDLEAITELVLAGRGQVITDREVLIGELAAWAVHRSRRVAVRTATKNQLLGQLDRTFPGLTLALPNVLDTKIGRLVAAEFADPARLCTLGVSRLIRFAAVRDIQLRRSVAERLVTAAAEALPTRDGVVARRVLATDLGLLTDLDSQIENAERELAALLPVSPYATLTSVPGWGVVRVSNYAAALGDPDRWPGPRQIYRASGLSPMQYESAGKRRDGRISREGSVALRRALIDLGIGLWLTDRAAKAYAAELKSRGKPGGIITCALAHRATRIAHALVRDHATYNASRWT

SEQ ID NO: 86889 - protein, 349 aa, unidentified
MKIIGCDFHPSYQQIVVWDQVSGEVVEKALSHERKEEVRAFYAGLQGPVRVGIEASGQSQWFEQMLGELGHEVRIGDAAKIRAATDRKQKTDRRDAELLVKLLEEGRFPQIWVPTPAERDVRQLLLHRHKLVRMRTQVKNQLQALALNQGLQRKGKLWSVSGRKQLEALPLLPWASRRRAELLGLLDQLEKSLEELDRATTEQANTRREVRRLMTHPGVGPVTALAFVLTLGPPQRFRRGKQVASYFGLIPSEYSSGEGKQRLGHISKQGSSFVRGLLVEAAQSAVRHEPQLRREYQRLAQRRCRALAKVAMARKLAVRLYWMLREEVDYAQLIQGSRAGQPESFRGRG

SEQ ID NO: 86890 - protein, 386 aa, unidentified
MSQPFDASRSLTSLEQDSTIIAVIEMSLAKWLVAAVVPGVERQPLKRLDADEAALLKLLHRWRNEAGQAGRQVKRIVVAYEAGRDGFWLARWLRVRGIEAYVIHPSSIAVSREHRRAKTDRLDTELLMRAFLGWLRGEKRHCSMVAIPTVEEEDARRPNRERGNLVTEQTRIVNQIKAVLTRFGIRTFRPTLRKAEEQLEGLRTAEGAPLLENTRAELRRYLARLRVVREQIRAIEQSRLGKLATTPEKGPHAMVRLIARVLGVGVETADMLVNEVFSRHWRDRKAVARYAGLTGSPDESGRRRRERGLARAGNTRVRCGMIQFAWRFLRFQKDSALAQWFAARTADKRASTRKTMVVALARKLLIALWRLATSGEVSDGIVLRPA

SEQ ID NO: 86891 - protein, 348 aa, unidentified
MVQRKELNFEGQNIYIGIDVHLKTWHVSILTESGCLKKHSQQSSAQALFEHLKKHYPNGNYLSAYEAGFSGFSTYYSLLDFGIECLPVHAADIPTGQYESVMKTDAIDSTKIARALKSGLLRGIYIPKKEVLDDRNVMRLRITLKRQLSGYKSRVKHLLYNNGVIYPECFQNSKSHWSKRYLKWVHEDVQLLSESRNSLDLLLRQVELFRKSLLEITRLVRTLSRNGRYGEAYENIVSIPGIGMITGMCLLTEIGDIHRFRNERQFASYLGLVPTSHSSGEKTSHGEMTFRGNKRLGPLLVESALVAIRHDRDLAAQANHTARQGIGRCLRRVLQAYVAARGDNPHNP

SEQ ID NO: 86892 - protein, 352 aa, unidentified
MMLIGVDPHKSTSTATAVEPESNREVASIRIEATLREYRRLLTWAGRWPQRRWAIENAEGLGRHLASWLLARGEQVVDVPTTATARVRQLSRGGGRKNDRIDAAAAACVAALQGDARPLEAEGTTDVLGLLDERRANLSQARVRAVNQLHALLRALLAGGAPRGLSAGAAAALLRTVRPAGAAERVRKQVADDLVVEIRSLDSRLKANEAVMAELVKSSGSTLTETVGIGPVTAARLIGRSGRPSRFPSSAAFAAYSGVAPVEVASAEHARHRLSRSGDRQLNSALHIVAVTQIRTAGSLGNIYYRTKIAEGKTPREARRCLKRRLADHVWRTMIADEKRQRAKPASVSDAA

SEQ ID NO: 86893 - protein, 319 aa, unidentified
MASFLGIDISKATFHACLLIDQGEAKRVFPNSPKGFEQLAAWLKNRRAVDIHVCMEATGPYWEPLAMHLYGLEYRVSVINPARIKAFAQSELLRTKTDAVDAALIARFCKSQSPEPWVPPPPEIRVLQALMRHYEHLKTTRVQQSVYAQSSEASPVIKASIQEVIATLDEQIAQIERQIRQHFNDHPDLRRKRDLLTSIPGIGETTAGSILSEIAHIDRFESAKAVAAYAGLSPRDRRSGTSIHGRPRLCKTGNSRVRKALYMPAIVALRFNPVLRLFAERLLAAGKHKRPVIGAVMRKLLVLAFGILRSGVPFDANYA

SEQ ID NO: 86894 - protein, 342 aa, unidentified
MSQYDGSQVVGIDLHRQRSVIVRQTDTGEQLSAVRIVNDPVALGLQIEKAGPHPEVVLEATYGWYWAVDALQAAGASVHLAHPLGVKGFRYRRVKNDVRDAADLADLLRMNRLPEAWIAPPQTRELRELVRYRAKLVALRSGLKAQVHSVLAKEGVLIPVSDLFGGTGRQRLAKVPLGVAYAQRVISLLELIDVLDAHEGRFFDQIAAELRGHPGYRAIQALPGVGPTLGAVFVAEIGDVHRFTDPSHLCSWAGLTPKHRESDTVVRRGHITKQGSKLVRWAAVEAIQRQPAGTKISVDRKRIEARRGRNIAKVAAARKLLTLVYYGLRDGHIRALIRQKAA

SEQ ID NO: 86895 - protein, 346 aa, unidentified
MDKFDACGIEVSAQELVVSLGREGRAERLRSFPNTAEGHDAILRFLHSGAQRVRVVLESTGLYGLDLAYALHQDARVEVMVANPRAVRHLASALMQRSKNDRLDAEVLREFAARMPFQAWVAPSPQCFALCALTRRLETLTEQSAAEKNRLHAASLSVAFPAAVRRDLQRSVRSIQRAIVRLTREAQRILEGDSLLNSSYHLLLTAKGIGPTSALRLLAETALLSEDLDVRQWVAYAGLDPREYQSGSSVHKKVRISKTGNRHLRRALYMPALVAVRHEPHLRAFYRHLLAQGKCKMQALVAAMRKLLHAVYGMLKHRQPYDGAKLFRLVVDLPAPSAGHRSAEAA

SEQ ID NO: 86896 - protein, 432 aa, unidentified
MDILYERVAGLDVHKDTIVACVRNVVEGKTKRECLSFATTTEQLAELRAWLEECRCTHVAMEATGVYWTPVFRILGEGKFELVVANAAHIKNVPGRKTDMNDAMWIADLLACGLIKASFVPPEEMQELRSLTRTRKQLVREQTRHVQRIGKTLAEANIKLDSVISDVMGASGRRIIEAMIAGVHQPRKLADLASKQIKATPKELYDARHGRLTDHHRFLLELHLRQWDGLDETIRKIDQEIDQRITRMSTTAETYKIPFRTLIELLHTVPGISAVAAPAILSEIGRDMSRFPTAGHLVAWAGLCQVKTKALAGANPRGCARARPGSRRCSCNAPGLPSARKTATTEPSSSACKASVDRRRPSVPSPHRSLRRSIICSRMAANTTTSGLATSIGAPPKSKPITWSSVSKSWALPSSFNHSRRQSDTFPMPVSS

SEQ ID NO: 86897 - protein, 349 aa, unidentified
MKTYYVGMDVHSATIAIAVLNGAGKVVMESTIETGAERVRGFLKQLRGKVYVTFEEGTQANWLHDIVRSLVTEVVVCDPRHNKLLQSGNKNDRVDARKLAELLRNKSLKAVYHGDNGVQTLKELVRTYDCLVSDTTRVMNRLKAIYRGRAIACGGHEIYRQDRRGQWLGKLHEPGAKQRAGFLYEQLAALKPLRHKAKLAMVKEVRRQTAYLWLMSVPRLGSVSVAQLIAVVGTPHRFRSKHQFWTYVGLAVVTCSSADHEVVNGVLRRSQRPVSTRGLNRNHNHLLKRVFKNAATSACHSGPFQAGYEARVARGMAPSLARLTIARQLAATTLAIWKREEQFDPERKK

SEQ ID NO: 86898 - protein, 471 aa, unidentified
MFIHHDRWDAAVVLRMGIDIAVRAPHQASLANEKGELLWSAHRFRTTTGDLEKLWARLPTGHTPSDVTIVMEPTRNAWVPLAAWFRRRGAHVVLVSAERSSDLRAYYAKHTKSDRLDSVLLARLPLLHPEGLHRERGLGPGDPLRRATKMHSTLVKRRTTSLARLDALLEILGPDWHGAFSADLSNKTPLQFLAAGYADPHTVRRLGRARLTRFLYRHSRGAFGEAHADQILAAARASLELWGDDLAFPDLAEDIAIEARLALALTAEVKELDERIAVLVADRDPHGIITSAPGVGAITGAVILGRLGNADRFQSLAAVRSFSGLVPSLDSSGVSGRHGGPTKRGDHLLREALFISANQARRLDPTLAAKYHRLMVTNGKHHNSALCHIATTLLTRVVACWRAQTPYQIRDIDGRTLTADEARAIIRERYTIPDTVRRSRITTGTGRRSKESLRAPSTGPSNQHAKQPGAA

SEQ ID NO: 86899 - protein, 412 aa, unidentified
MQVVYPCCCGLDVHKKSITACVLWVEARGEKRNEKRVFGTFTRDLLKLSDWLRECGVRQVALESTGIYWKPVWNILEGQFEVLLVNAQHIKAVPGRKTDQKDSEWIADLLQHGLLKGSFVPPCAIRELRDLTRYRVNLAEECNRIANRIQKVLEDANIKLASVATDTLGASGRAMLKAMIAGEENAEVLAEMSKGLLRNKMPELRGALEGRTTVHHRFLLQELMDHLEFVEGKMLRLEEEIAKRMHPFDDAVRRLRQIPGVDRITAWGLIAEIGVNMDQFGDSRHLASWAGLCPGNHESAGKRKSGRTRKGSAWLRRCLCQAAWAVSTKKNNYLSAQFRRVAARRGVKKATIATAHTLLVIAFHILKAPVEYRDLGGDYFDRLHQETLKHKLVKRLEALGLKVTVEPMAQTA

SEQ ID NO: 86900 - protein, 404 aa, unidentified
MKGPIVSIDVSKGKSDYQAFKNLNVKYTGSRSIKHNKEGFDEIVNLVREMEKKLETEVCVVYEATGVYHRVLKKVLEDNNIKQFIINPLLSAKTRKNDSLRCPKTDKLDPKSIAKTYYSHSLHNSHKQETIYHELRELSRYYEDILVHIRKDKVAFRAQLDIVFPGYDTLFDDLYGPVALAVIEKYPHPEMLQKKKINTVSKVIQSKTCHRQAVSDTMADKAIEYSKTIYSGCDKDDIEVLILQRFIKKLNEDMAEAERTIGEMIKLAQELPDFSIIKSIPGIGDNLAARIIAELGDMTRFKKKNELVAFAGLDPRISESGKNDGDHMHITKKGNKRLRCLLYLAVTCSIRLKRDDNSIKDFYIKKKQQSNPMCSKAAKTACASKLVRIIYSMCKTGELYQYNK

SEQ ID NO: 86901 - protein, 317 aa, unidentified
MIALGIDIAKLKFDIALLTQGKFKTKVFANDSAGISACLKWLRTHASEPVHACLEATGPYGEAIACALHDAGHTVSVINPARTKAYAQSLGLRQKTDAVDAKMLARFVQTQQPPAWTPAPAELRALQALLRRLDALVEMRTQEKNRLGVAEPTVSASIGQHLDYLEAQIDALKAQIESHIDQHPGLKQQHDLLDSIPGIGPATSAWLIGELNLTRFDSARQAAAFVGLTPRKDTSGTSVRGKPRLSKQGNSLLRKLLYFPALTAMTHNPLVRALCLRLKAKGKHNMAIIAAAMRKLIHIAFGVLKSGKPFDPTLADT

SEQ ID NO: 86902 - protein, 338 aa, unidentified
MKVTTIGLDLAKSVFTVHGVDEHGNAMLRKTVRRGKLLELFTHLPVSVVGMEACAGAQHWARELRKLGHDPRIMAAEFVEPYRRGGKNDANDAAAICEAVSRPQMHFVALKSMDQQAVLAVHRLRQGLVEERTALANRLRGLLTEYGVVVGMGLDRLRHALPEILEDGDNGIPGIAREVFADAGQQLRELDARIAAYDRRIAALARASAPAQRLMKIEGVGPVTATALVASVGDAKVFHNGRQFAAWLGLTPRQHSTGGKQRLGAITKHGDVYLRTLLIHGARAVLQVTAKRSDAKSRWVESLRQRRPDNVAAVALAAKNARIIWALLARAHDYQPAA

SEQ ID NO: 86903 - protein, 343 aa, unidentified
MKDVCILGVDLGKNSCSVVGLDGSGRVLLRRRTRREGVIALAAKLPGCVVAMEACCGAHHLGRLLVAQGHEVRLMSPEYVRPYVKAQKNDDRDAEAIAEAATRPTMRFVALKSEAQLDVQVLHRVRDRLVGQRTSLTNQIRSILLERGIVVPQGRRSLLDALAALSSDDGSGVGARVQLLLEDMLDQWRALDTRIKALDDEFAEMARNDPAARRLATIPGIGVMNATALVAAVGDGRTFSRGRDLSAWLGLVPRQATTGGRPKLLGITKRGSKYLRKLIIQGARAALPSLARTATPLGGWLRGLLARAHGNTVVVALASKLIRIAWALLRNETRFAAGGHAAA

SEQ ID NO: 86904 - protein, 372 aa, unidentified
MQGDSTSYVGLDVHKRTIAVSLMVAATGEIREWQETHDGTVARRLARRLRREAAGPVSCCYEAGPTGYVLQRQLRSEGVNCAVVAPSLIPVRPGSRIKTDRKDARKLGELLRAGLLTEVHPPSEEQEALRDLCRCRVDAMEDLLGARHRMDKFLLRRHCVCKEGVRNWGTRHMSWLRQLRFEDAVSQVTFDSYLLSIDQLGERLLQLELRLAEFGAQEPYREPVGWLRCFRGIDTVTAVSLIAELHDPRRFRSARALMSYLGLVPGENSSGERERRGSITKMGNGHARRLLVEAAWHQRHRPAISQPLRKRREGQPAWVLAIADRAQERLWRRWTRMTFRGKPTQKVVVAMARELVGYLWAVLQGPPAPAAE

SEQ ID NO: 86905 - protein, 359 aa, unidentified
MASVSIANDPAAGITVGIDTHGEVHVAAAFTSDLGRPLGHLEIPTTPAGYGRLLRWAQAFSDATPRFGVEGTGAYGAGLARHLRRAGCTVIKINRPNRQTRHARGKSDPINAEAAARAVLSGEASSVPKSDEDRVGMIRTLRVARRSAVHSTTQIVNQIHSLLVTAPADLREQLRSLTGRSLIETLAAFRPGPITTPTAAAKMALRVLARRHQHLGDEITTLNVELERLTQEVAPELCALKGVGPDVAGALLVAAGDNPERLRSEASFAQLCGVAPLPASSGKTTGRHRLNRGGNRQANNALWRIVIGRLRWHHPTRDYVARRTAEGLSEKEIIRCLKRYVAREVFRAIVAERELARAA

SEQ ID NO: 86906 - protein, 342 aa, unidentified
MEAPRHIGIDLHRNQFTCCVRLENGRNYLSDWKLEDLPRFVNKLRPNDEIAVEVTGNTRLFHEAVAPHVKRVVAVDPNQFHVISHSVKKTDPNDARNLALYLEKDLLPEVRMKDKTQAQLASVTQTRDTLVKLRTSLKNKVNNILSAHGINLKKEALSSEKKLQEILAMKFDAMVKLELEVIIEEIRSLNQRILKLETAITDEGSKLKGHKNLTSIKGIGPLTGSILLSVIGDIHDFENEGKLAAYFGIVPRVSNSNETEHSGRITKRGSKLGRTALVQCALIAQRYSPYLKRYYEKIKARRGTGKAIIALARKLLGIIYRTLKNNWVFEDFPNFVLAEAAA

SEQ ID NO: 86907 - protein, 391 aa, unidentified
MLICGIDIGKNHHEASIIDKEGRLLAKSLRFANTTPGADGLLEYIGRCNTDKDVVVIGMEATGHYWLSVYCFLHDAGFQVNVINPIQSDAIRNLFLRKTKNDAKDSFLIAETIRIGRYSKTEMADEDILSLRQLCRHRMDLVDYIADQKRKIIGVMDRVFPEYQTFFSDMFGKTSTELLAKAVTPEELLAIPTDDLCKLLRDNSRGRFGEAKVEELRQAAKTSFGITIGTAAFTMQLRQLLEMIGLLESQLVELETEIEQYLVKLDTPITTCPGVGSILGAVILGEIGDISRFSEPKKLVAFVGIDPSVKQSGEFTGTQNKMSKRGSPHLRRAIWLAANVAAFRDPVLSAFYQKKRSEGKHHCTAVGAVARKLTFIIYAVLRDNKPYVPNC

SEQ ID NO: 86908 - protein, 358 aa, unidentified
MNRKAGMSAGQVIGTVDGQQVFGLDIAKSVFQVHTVDMGSGEIVNQQLKRAKVLTYFANRTPCLIGIEACGGAHHWARKLTAQGHNVRLIHAKAVRPFVGGNKTDAADARAIWLAIQQPGTKFVGMKTLEQQATLVLHRQRELLMKMKAMQSNALRGLLYEFGATFARGKNALFAEIETALEALVGDIPQYVADSLREQVKRIKDLAKDIKAIEGRLAQRLRDDEDMQRVAQIPGVGLLTATAAIATMGQASAFKSGREFCAWLGLVPRQSGTGGKVKLLEISKRGDTYLRTLLIHGARSVLTHAREPGPWLEQIKARRPVNVVIVAQAAKMARAIWAVTAKQEDYQRGYCSVKPKAA

SEQ ID NO: 86909 - protein, 417 aa, unidentified
MRIVRPICCGADIHKDLIVATIAATNQDGITEYIQSSFSSQNFDLVRLKAWLIEHHCFEIAMESTGKYWIPVFNVLEGEIKVFVVHPKYTKAIKGKKTDKKDSKWIADLFKHDLLKFSFIPPKEIRELRELSRYRIKLIAMRSSERNRYQNSMTISNIGLASILSDPFGKSSRAVMKEVIRSSSVTEEKISKLLERNAKKKVKEVLQSLVGSHIESDQRLKMNIASQHMDQIDSHVRRLETEMAIRCIPYATLINLLLDIPGISYLSAMTIIAEIGTDMSVFETSKQLSCWAGLAPANNESANKKKSVRISKAGSYLKPLLVQCALAAINSKSNPYYRIKYNRIKKRRGHKKAIIAIARMILVNIYHILSTGEVYSPCDMEQIINPKPVKKVMTIQNAIEFLQSQGFDTSKLISSSS

SEQ ID NO: 86910 - protein, 391 aa, unidentified
MDRVWVGIDAGKEVHWAHVLDASGEKLLSRKVENDEADLAKLIDEALSFADEVVWAIDQPGGGATLLLGLLWEREQRVLYIPGLTVERSRDTYPGESKTDARDAHVIADQARMRPDLEELTAGEGELAELQILLARRRDLVTDQTRTINPLRDALLSSFPALERALDLNNRGALTLVSHYQVPAQIRRAGRKRIATYLRNRGVKGADALSGQALTAAKAQSVTLPAEDVTARIVAELAAEVLSLKESLKTLDEELEKRFFARKEARVLTSLPGVGVILGAEFLVRGGDLSAFESADKLAAYAGLVPAAHDSGKRVGNDRRMRGGNKALKYVFYQSAFASLRSSPESRAFYDRKRAEGKRHTQALIALARRRVNVLWAMLRDGTTFEARFVA

SEQ ID NO: 86911 - protein, 375 aa, unidentified
MKEKLRFLGLDVHAETIAVAVAEPDGEVRSLGTIPNRAESIRKMIKKLGPAEKLRACYEAGPTGYVVYWQLAELGIQCEVVAPTLVPVKAGDRVKTDRRDAEKLARCYRSGDLTAVWVPDEGSEALRDLVRAREAAKQDQMRARHRLSKFLLRSGQRPPLGVRPWTRPYLIWVAQLRFTQIAQEATRQDYLHEVEHMRERVARLEQAIAEAVKLASPALQQVINDLQALRGIADISAVTIAAELGQVSRFDSARQLMGYCGAVPSEDSSGKRIRRGGITKTGNAHLRRIVVEAAWSYRRPPGIWYGLRRRQESISEEVKEIAWKAQHRLHKRYMKLGAAGKDQRKIITAVARELLGFIWAIGTRAETLASQQAAA

SEQ ID NO: 86912 - protein, 347 aa, unidentified
MKVTTIAIDLAKNVFQVLGMDSHHKQVFNKRLNRTQLTEFMSQQSVCNVVFEACYSSHYWGRKFVAMGHDVKLIPAQHVTPFVRGSKNDKNDAMAIYEASFRPNIRFVPIKTEAQQEILMLHRVRERLVKQRTACTNQIRGVLVDFGICIPQGHSAFERAMWDIICDEAQRPLIKLMANDFWEEYQALTKRLERINSLLKQLVERDPNGKILLSIPGIGPIIASAFVASIGAGQAFNSPKELAVWLGLTPKQFASGNKSVNGGITKRGDSYLRKQLIHGARTVVSHASKKNDDLNQWITQLRNRKSICCTVVATAHRLARLMWILLQKQVPYAPQYTTNQGVNHGTC

SEQ ID NO: 86913 - protein, 341 aa, unidentified
MEVYVGLDLSRKRLDWQAVDEQRRRLGEGAITPDREGLARLVLQLGSEVVGVIESMNGARFVHDQLELAGWDVRIANAERVKGLAPLACKTDKIDARVLAELGALGLVPEIWLPDPRVRAERELARFRMHLVKQRTMLKNRIHQTLIAYGVPCPVADLFGVRGRRLLDGAELPAAWRASTEASLRLLEQLQAEIDACVGELRRQNLEHPYVPLLVTAPGIGPILGYTIASELGDIGRFATPAKLVGYTGLCPRVYQSGERDRRGRLAKNGPNYLRWALIEAAVHAGRSVWYRDLYQRTRARAGRQRGAAVAAITIARKLAEAIWWMLTRKQRFAPAGAGSL

SEQ ID NO: 86914 - protein, 388 aa, unidentified
MIYVGIDIAQLNHFASAISSDGEELIKPFKFTNDNDGFQLLLSKLDPLDKDSLIIGLESTAHYGDNLVRYLVAKNYKVCVLNPIKTSTMRKNNIRKTKTDKVDTYIICKTLMMQESLRFVTFYDLDLMDLKALGRFRQKTIKQRTRLKIQLTSYVDEIFPELQYFFKSGLHQKSVYALLKEAPTPEAIASMHMTHLAHLLKVNSHGRFDKEMAQQLRVLAQKSVGASDSSLSIQVTHTIQQIELLDSQLERVEAEMTEIMKFNDSVIMTIPGIGYINGGMILGEIGDIHRFSSPNKLLAYAVLDPSVYQSGNFQAKKTRMSKRGSKVLRYALVNAAHNVVKNNATFKAYYETKMAEGRTHYNALGHCAGKLVRVIWKMLTDEVEFNLD

SEQ ID NO: 86915 - protein, 341 aa, unidentified
MKQNVCTVGIDLAKKIFHLVGTDITGKIVWRKRLTRHALVPFLAQLPPVTIGMEACGGAHYWARQFHQHGHTVKLMAPQFVKPYVKSNKNDMRDAEAIAEAVTRPTMRFVPLKAVDQQDIPALHRVRERLIGERTALINEVHGLMLEYGIVLPKGVAKFRQAVVEKLEAEKDKLTALSQELFWKLVKEFAALEDQITFYQEKLETLATTHPECQRLMTIPGVGPITATALVAAVGDVGVFKNGRQFAAWLGLVPKQHSTGGQSLLLGISKRGDSYVRKLLIHGARATLRWVKLQTDKRSQWIRGLLGRRGWNRTAVAVANKNARIVWALLSRGGVYGAPVS

SEQ ID NO: 86916 - protein, 343 aa, unidentified
MYYIGLDVHKRTISYCVKDAAGHVHSEGKIGSTRRELDAWIKTLPQPRMIAMEATIFTGWIYDHLLPHAEKVKVAHPLMLRAIAASKKKNDRIDAGKLADCLRCDFLPECHMATREIRDRRRTLRYRNLVIKQMVQMKNRVSGLLMETGVSYNKQRLHKVGYFGELMTTNKEVQQSIRPLLKLSRDMISRSQKLEYALVSSLEQDPLLQERLRRLRTVPGVGPITALTWALEIGDYTRFSSIKQAISYCGLCGDEKSSADKVMRMPISKQRNKHIQRVLIEAAKLAPRQSHELALIHARELERGHRNRATLAVARKMVCYMLAVERRQQDFVPAEEFSRTVAA

SEQ ID NO: 86917 - protein, 344 aa, unidentified
MEITTIGLDIAKRVFQAHGVDAAGQAVLRRKLQRGEVLKFFKGLAPCLVGIEACGTSHFWAREITALGHEVRLMPASYVKAYVKRGKTDAADAEAICEAVTRPTMRFVPVKSAEQQAVLMLHRTRELLVRQRTMLVNALRGHMAELGMIAPQGIGRVGELVAMLLGENTATVPTLARQALLGLAHELEALGNRVKEIEAAILTWHKDHEASRRLATIPGVGPITASAIVATVTDPGQFHSARQFAAWIGLVPKQNSSGGKQRQGGISKQGDRTLRRLLVLGATAVIRHAKTKDTPELAWLKGVLERRPVRLASVAQANKTARIVWALLIRGGSYRAPAAPQAAA

SEQ ID NO: 86918 - protein, 368 aa, unidentified
MDQKSSKLYIGLDVHKESIDIAVAEEGGEVRHHGQVGGDANALWRAVRKLESSGRKLVFVYEAGPCGFGIYRGLIGRGHACWVVAPSNTPRRVRDRIKTDRRDSVKLAGLARAGELTPIYVPDVSDEAMRDLVRAREDAVVMQRQARQRLAALLLRNDVRYGGKTAWTAAHRRWIADIRLAQPAQRLAFEEYVQAVEEAMVRVERLTGYIVQEVAPWRWLPVVNALQACRGIQLLHAVRIVAELGDLSRFSHPRQLMSYLGLIPSEDSSGERRRQGSITKAGNGSVRRALVEAAWAYQYTAKVSGLIARRQVKVPKAALDIAWKAQVRLCARFRRLAARGVSRNKIVVAIARELAGFVWAIGQQVKPA

SEQ ID NO: 86919 - protein, 316 aa, unidentified
MPRKRILVKSIDTSISYQVVGIDLAKHLVSACLITGAGEIFGIDRLTDDDLLKSAERMSPTLFCMELCPEVHYLAEKLQGYGHHTKVIDGAAVKEYIKTHFGGQKTDLNDAQAIAFLSLDTNLPEITPKNTSNSVLSSIQAVREQFRKEYIQSFVSLKGICQRWGLPISKGVMNKNKVEELVSESKKIPQEVKDWLLELLQSCRELQKRLNKISKYLKEYADNDEICQKIMSVPGIGPITATRLKATIGDIQRFEKPKSIVAYYGLVPKSKATGHNEKKRRHNSSRRSSCPFSSDRGCGSSFEFGSKRIPKIKASQ

SEQ ID NO: 86920 - protein, 345 aa, unidentified
MEHIGIDVHKKESQICILTDAGELIERRIRTEPARFAEVLGERPRARIVLEASTDSEWVARCLEGLGHEVIVADPNFAPMYGLRHRRVKTDRRDARALAEAGRLGAYRPAHRLSDGQRHVRGRLAVRDALVRTRTRYISLVRALLRQRGWRVPTGTAEGFCRRVAALPLPGRLLSEVAPLLALMRQVNQQLAYSDERIAALAQTDERVRRLQSVPNVGPVTAAAFVATLDETQRFHRAHEVEAYLGLVPRELSSGEIQRRGRITKAGSGRVRWLLIQAAVSMLRLRDPRTAALRDWASRIAARRGKGIAVVALARRLAGILFALLRDGTVYEPGPRQTRELTQAA

SEQ ID NO: 86921 - protein, 336 aa, unidentified
MLIVGCDFHTRFQQIAMVDTTTGEIVERRLEHKTGEAQKFYAGLPDPARIGMEATSDAPWFERMLREYGHELWVGDAAKIRASMVRKQKTDPRDALHILDLLVTDRFPRIWIPSRTQRDVRQMLRHRHKLVGFRTSTMNQLHALAMGQGVCRRKKLWTTVGRQELEGLELGPWASRRRRELLQLLDQLNAWIGELDQAVKKEAASCPEAILLMKQKGVGPVTALALVLTLGPVNRFPTSKKVVSYLGLNPSEDSSGGKQRLGGISKQGNSMMRWLLVEAAQTASRFDPELRRDYLRLKFRRGQAVAKVAIARKLAVRLYWRLREQVQASAAGSHAG

SEQ ID NO: 86922 - protein, 340 aa, unidentified
MRIIGCDLHAAKQTIAMLDRDTGEVVEQTLNHDGDAVRAFYAAVPKPAVVGIEATGSMGWFVRLMEELGVTCRVGHPAAIRTAEPRRQKHDRRDAQLLLRLLAEDRFPAIWMPTAEQRDLRALLLHRHQWVRMRTRVQHALQAIALGQGVRRGGSLWSSDGQAVLAALPLLPHATDRRDALQALYRQLHAQVERLDVPVQAIAEQRSGATLLMTHPGVGPVTALATDVFLGDPSRFPNGKALASYVGLIPSEYSSGARQRLGHLSKQGSPFLRFLWGEAVMGAVRRDPELQRFFRRKLPQKGLGKARVAAARKLGIRLWIMLRDQITYDEFCRRSPRRRS

SEQ ID NO: 86923 - protein, 381 aa, unidentified
MKDDIRFVGLDVHAETITVAVAEAAGGEVRALGTIPNREESVRRLVKKLGPAKGLYCCYEAGPTGYVLYWQLTRMGVECAVVAPTLVPVRPGDRVKTDRRDAEKLARLYRSGDLTPVWVPDEAHEALRDVVRAREAAKRDQLRARHRLGKFLLRHGRRPGKKMTAWTVKHLEWVRSVRFEHAALNATLLDYLTEVDHMAERIARLERAIDEAIEKMPAVMKAVVDGLQALRGVKKLSAVSVVAEVGPMSRFDRPRQLMGYSGGVSREDSSGKHVWRGSITKTGNAHLRRIAGEAAWSYQHRPCLGPALRKRQAGLSEEVKAIAWKAQHRLHDRYFRLLGRGKHKNKAATAVARELLGFMWAIGVQVEKEQAQNASGKPLAA

SEQ ID NO: 86924 - protein, 340 aa, unidentified
MSEITTIGLDLAKHVFQVHGIDAEGTTVLRKRLRRSQVLGFFSRLPRCVVGLEACATAHYWARELGALGHEVRLMPAQYVKAYVKRNKNDAADAEAICEAVQRPTMRFVPVKMAEQQAAQLLHRGREQLVRQRTMLANALRAHLAEFGVVAAQGLRNVAQLIAIVRDDGDLRLPDVARQVLQVLSAQLKHIEAAIAALEKQLLAWHKTNPVSQRLASIPGIGPIIATAIATTVADANVFRSGREFAAWLGLVPRQNSTGGKTQLGGITKRGNRYLRRLLINGASANLLRSKATKADPWVIGLRRRRPPLVVAVALANKTARIAWAVMLREREYQPRAVAA

SEQ ID NO: 86925 - protein, 401 aa, unidentified
MISVGIDVSKGKSTVCILKPYGEVVASPHEVLHTEEGVTELVKRIQSQDGEVKVVMEATGTYYLPLLTAFVGADLYVSVVNPLAMKKYMSESIRKGKTDKMDSVRIANYGIDRWFRLARYVPPVAIYEELRILGRQYSHYVSMRISSKIALTNLLDRTMPGIKALIRSNNANNPEKDKVCDFVEEFWHYDNITEKSEACFISEYCLWAERKGYHKSQLKAQKIYSMACNGIPTLSSNVPSTKMLILEAARVLKEINKTLEMILSQMQVLASSLPEYGVVREMSGVGAVLAPRLIAEIGDVRRFHSGSALVAYAGLDSPPNQSGTFYGTKRSISKRGSPLLRKTGYEVMKCLKTVKPTQDAAVYEFMIKKESEGKPKKVAKIAALNKFLRIYYARVLEVYQV

SEQ ID NO: 86926 - protein, 469 aa, unidentified
MKKAATTPVADGHRAAAKKRGRPRKATPRVVHPHAGGADIGATHVYAAVSPERTAEPVQVFETFTEDLYRLAAWFKEHGVTSVAMESTGVFWIPVFQILESCGIEVYLVNAQHVKNVPGRKTDVSDCQWLQYLHSVGLLQASFRPPAEICAVRSLLRHRGNVVAEGAKHLQHMQKSLTQMSLHLHHVLSDLSGKSGLAIVDAILAGERDPKTLAQLRERGVKAPEETVRKSLVGDYRPEHVFTLRQAREAYRFCRAQLQECDAEIARLLGELASRVDPDETPPPPAPPRQAARKGQIELPERDLRTELYRILGTDVTRTPGLDVSNVCQLVAELGPDLKASFANSDRFVSWQALCPNPKVSGGKVLKNGTRKVKHRVATIFRIAAQTLHHSHSALGAFYRRMRAKLGAPKAITATAHKLARIYYHLVTTRTEYDESVFAQNEELHQKRRVQRLMREAADLGFELSAAAT

SEQ ID NO: 86927 - protein, 413 aa, unidentified
MYIVGIDIAKKSHQAAIMKPDGTLVGRSFRFTNTKQGFEFLMDKLAAVDSSLENFEFGMEATGHYWLNLYTWLADNHATVHVINPLQSDALRNLYIRKTKTDSVDAKIIAQVIRIGQYSETKLADDRMLMMRDLCRQRFFLVDMVANLKRKIIVMMDRIFPEYQGFFSDTFGKSSTAILKHCTTPEEITLFGEDNLAQLLQVASNGKFGLKKAQELISLARNSFAARLSSKTLSLLVKQMMEQMELLQNQIGILEKHISSHFKSFGTKITQIPGIGPVLGASILSEIGDISRFANPKKLCAYAGIDHSVKQSGQFLGNENHMSKRGSGYLRRCLWMASFVSVNHCREITIVYKSQVSKGKTHFQSMGFVCHKLLNIIYTVLKNDIDYSPMLCINPAITARTSRRIARAALKAR

SEQ ID NO: 86928 - protein, 347 aa, unidentified
MIPIGADVHKRRCELYQFEDGQLKRLPPMENTRENWLEVLTKLPPEAEIALEVSTSGYFVMSVLEEAGWRDRAHWVHTAGIDSLRKQKNDRLDAQRLARKLAVAHLEPLPEAWFPPPAIRALRLRARRRCWLAVLRAQGKNRLQSLLQMHGLRPEVTDVFGVTGQRWLAEQKLPAPTRESVDQILRLDRMWMQELKVAEGCLHAVESEFPQIRRLQTIPGIGPILAPVIWSEIGQLDRFHSASALVNYTGLVPSLYESGEVSVQGAITHQGSAWLRWALIAAANAVTKGNSPFADRYHRLRRRKKANVAKTAIARSLARCVYGVLKHGVDYQEERWGRRVGALEQEA

SEQ ID NO: 86929 - protein, 373 aa, unidentified
MTSMTVEPTGQVVSRQIIVGVDTHKYAHVAVAIDHLGARLGAQHVAANREGYAQLEAWAASLAGNGRVLAYGVEGTGSYGVGLASFLRRAGHRVIEVNRGDRRSRRSNGKSDTLDAEAAARAVLGGQAKAVPKSADGTAEMIRQIKIARDTARKAKTSAIITLKALIVTAPADLREHLAGTSDKVLVDRCASLRPGAVNSPTASAKHALRTLAKRYQALEAEIREHDTILDDLTRSHAPTLREGLGIGADTAAEMLIVFGDNPERVHSEAAFAKLCGASPVPASSGMTNRHRLSRAGHREANAALYRTVIVRMRFHQPTIDYVARRTAEGLSKRDIIRCLKRYLAREVYQAVMTDHRTRRAAIQKPTPRTLDL

SEQ ID NO: 86930 - protein, 425 aa, unidentified
MNKVDSIRLGQFRQLTKEIRGSKKHLIVGIDVAKDKHNAFFGTATGKTLFKRLVFENTSEGFKRLLIQAETLKVHYGLTKTVFGLEPTANYHKPLGEFLIKCGHMVVLVSGVAVKRNRELLDGRWDKHDTKDSANVADLISQGKCLFYEYPPMALRELRSLLSLKRRLKKQEHGLKVRIRNHLLAAYFPEFDQYYRQSYSQGLAIVRWCLAPSVIAGLNYDEFVRLVAPRTRTIGQRDRLKAIWKKAADSIGCDAGESLEFEAKAMVEALEHIRETICATDAKIKKICLQFPEYRYLLSIPGFGPDVSSKVLGAIGDPFRFKTGAQVLKMAGLDLSAERSGKNSGAATPVISKKGKADLRYALYQAALIASTRNQYFIVYYTNKLRGREKEKGIATKMRVKLTAKMLIIAWTLMKKKEVFYTPQA

SEQ ID NO: 86931 - protein, 351 aa, unidentified
MDRYIGLDVHSQSCTLVVLGPSGRRLKNQVLETNGRVLVDAIKGIAGDLHLCFEEGTQSAWLHELLSPHVKELVVTVPAERKGAKDDLRDATELAEKLRAGTLETRVYKAPKPLAGLQNAVRAYGMVTRDLVRAKNRLKAVFRARGIASDRTVYDVERRASWLKKLPAAHRRLAEWMGREVDALVPLRDEAEAWMHEEAKAHPIVKILSTAPGMATKRSAQVVAIVGTPDRFRTRRQFWSYCGLGIVTRSSSDWIHQGGGDWVRKEVNQTRGLNRNRRPQLKAVFKGAATTVIQQLHDHPLYEDYQRALRAGIKPNLAKLTLARRIAAAVLSMWKHKEDYDEKRVSVKKRP

SEQ ID NO: 86932 - protein, 315 aa, unidentified
MAQAISVISYGADVDSRFIQINRHGESAVHKIENSRCAIRAWLKSITGAGRLAVESTGAYHMELADQAHKAGLTVYVVNPRAIQQYREGVSQRAKNDRCDARLIARYVDREHEELRPYTPLSARQRRAWQLLKRRATLVRSRQQIQQSLAGMTGLRAQLGQVLSRLDKLIALIEKQLETLLKELNLWELVDCCASVQGIGKLTAMALVIAFDRGEFKSADAFVAFLGMDVRVRDSGKFTGQRKLTKKGDGEYRRLIFNAARAAGRFGFKPHLERFKDRGMKTTQAYVALGRKLIRIAFALMKNREHFDPNRLKIA

SEQ ID NO: 86933 - protein, 342 aa, unidentified
MESTTIAVDVAKEVLEVAVSIRPGQVSQQKRLSRTAFMKFCTDQPPATVLLEACGSAHYWARRLQTLGHRVVLLPPHATRPYVFRNKTDRTDTRGLLEAYRNEDIHPVPVKSVSQQALTALHRLRSTWLAARTARLNTVRGLLREFGCIIPVGAHHVLPRAWDLLADPDSGLPDALRPALAEACTEIRQLEDRVRLVEHQLEALADQTPAVARLRSIPGVGLITATALVAFVGDVQRFPSGRHFASYLGLTPREHSSGLIRRLGSISKRGDVYLRMLLTHGARAILWKAKSRPNPDRLRAWALQVQRLRGHNKAAIALANKLARIVWAVWKHDVDFREVIAA

SEQ ID NO: 86934 - protein, 353 aa, unidentified
MTSTKYIGMDVHKESISIAVRNDAGKIVMECVIETKASVIVDFIHGLRGELQVTFEEGTWATWLYDLLKPQVTKLVVCDPRKNSRQGNKNDRIDARELADRLYMNKLNSVYHGGAGVRTLKELARSYLTISKDLARVMTRVKAIYRSWGIPCAGKQVYAPRHRAEWLAKITEVGVLRRAEFYYQQLDALRSLRHEVRRALLAESKKHKATKLLCQIPAIGPIRAALLIALIQTPHRFRTKRPLWKYSGFAIETHSSADYRSVQGQLHKSKKQVSVRGLNRDCNHDLKNLFKSAATIASVKPGPFQEFYAALVAKGMRPEMARLTLARKMATIVWIVWKRGVSFDAQYLKPQTA

SEQ ID NO: 86935 - protein, 391 aa, unidentified
MSMYFVGIDISKYKHDCCIISAVDQQIVSKFTITNDKDGFEQLLISLNSLSNPEDIKIGFESTAHYALNLELFLENANHSFMEVNPVLIKEYKKSTTLRRTKTDSVDCESIARWLMTVEYKPHSKGFYHAYSLKSLTRLRDRLIRQRSFYLVKITNVLDHTFPEFKPFFNERLSKTAIYLLENYGSAEKMAHMNSASYDKLRCISRGKFSIQQFLHLKELAANTVGVNNSIFDIELNSLLTLYNSLCKEIKNLEAEITRLIEEVHPHYMSIPGIGPISAAVIYAEYGDISNFSNPSQMLAFAGIEPGINDSGTESHGGRMVKHCSSQLRYVLLNACLPLIRFDLTFATYYAKKRAEGKKHRVAITHVAKKLIRVIYALERQDVDFNAQKIR

SEQ ID NO: 86936 - protein, 387 aa, unidentified
MYFVGIDISKFKHDCAVIDEIGDTIQPSWSFRNDREGFSLLKERLDSLPGEKKIGLEATGHYGQNLKLFLEANGFAFMEFNPLLVSRFVRGKSLRNTKTDPIDARNVAQYLMTVEYKPYPPSFYHLDQLKSLTRFRSSLVRQRSRQLVELTNVLDKMFPEFKPFFKGKFSATALYILDHYQSPERIASMNTRSYEPLRKISRGHFSLNDFVKLKTLAKNTVGCTTGFLLQEMSILLELYTQLDAKVEELDDQIEECVHGIDPPMLSIPGVGASSTAVILSEYGDFSKFKNPSKMLAFAGLEPGYFQSGQSESTGHMVKHGSPHLRCALLNCCLPLVSNEPIFAEFCAKKRAEGKTHQVAMTHVAKKLLRVIFTLQTKNIPYDPALIR

SEQ ID NO: 86937 - protein, 362 aa, unidentified
MTINVGVDLHKTQFTVFARVGEGMFGKYLTTEEGYQEFLSQVRLWHGEGQSVRVGVESTGNTRYFKNRMEREGIEVRVINTLKFKVVNESVKKTDRHDAATIAEFLEKDMLPESRLCSEASEQLRRLLKVRTTLVQTTVTVKNQIHGLLTGLGMQDSRASLQSKRGRQKILNALAGADNGLVVQPLFETIDRLEENVKIVERELAALTEKDRAVELLRTIPGCGPVTAWTIRAFTDDIGRFESFKKYSAFAGLVPWVQCSNMTEHYGRITKRGPEELRTALVQLVLGMRRSKQTLSWRLMERYTIMKREKGTGKTIVATARKLSRIIWCMLTADEPFDPSLMIDARLNKKADSMRAALRITA

SEQ ID NO: 86938 - protein, 425 aa, unidentified
MNSISNKKINQVTDQTLVVGMDIAKKKHYACFVDERGRVLKKPFPVLQSREGLEWLYQCIVEAMKEFGKTEVIVGIEPTGHYWLNLAYFLDEKGIPLVMTNPMHVKRSKELDDNLPTKHDAKDALVIARLVKDGRFSYPRILKGMEAELRVGATFRSKLVEEQGAIRNQMIRWLDRYFPEFSQVFLSFGKMALAVLEYTPFPSDLAGKELEEVLALYRKSEGLQSPQKPKAKKLMELAQHSIGVTEGQQMARIEIATLVRRYRQLEEEIEALTEQLIELVQTSVEYEWLKTVPGLGDATIVELLSEIGSFSHYQDPRQLIKLAGLTLREHSSGQHKGQKRISKRGRRRLRALLFRVMMPMIRHNEAFRQLHDYYTTRPDNPLRKKQSIVVLCGKLLKVLHAVCTKHQAFDAKRMMQDIFGLETAA

SEQ ID NO: 86939 - protein, 426 aa, unidentified
MKVMHDRVAAIDVHKEMVKVAVRVPGAKRGSRKTDVLEFRTFYGVLQEMGRELRRRGVTHVVMEASGVYTEPVYYALAGLDFTEVMVINPAHAKALKGHKTDAKDAIRLLDLYECGLLSGSYIPAPDLKEVRDLARYRMKTVQARTSEIQRLQKTLESAGIKLDSVVSDITGMSSTAMIEALIDGERRGEVLADLARGRLRTAGKMADLSMALAGRFTDHHAMMCRLHRDRIKMFDDAVADLDARIAPPVARYSREADLLKTLPGFGDVVAAGWLGAIGPAPHEHFATAQRLASWATVCPGNYMSAKKSKGGRTGDGGNYIKPLLVQAAWAAVRVPGRLQARYSRLVRRFGGPRSKGAVKRAIMAIAHTLLKIAYQVLKTGKPYEDLGAGFYASRESPQARQDYLIRQLQKLNPGSTITITPQEAA

SEQ ID NO: 86940 - protein, 323 aa, unidentified
MSEIAVWLGIDVAKATLACALRLGNKHKNKSFANTSKGHQELLEWIALHGGCTPLHACLEATSVYGEAVAIALAEAGHTVSVVNPSLPRAYAQAMGLRSKTDGLDARVLADFCRDRAPMTWQPPSSKEQQLRALVQRLQALMGMKVQEELRLETLREIVRSSVETHLKWLVAEIERVSKEIQSLIDDDPDLRAKRDLLDSIPGIGERSSATMLAFGLGAERFATARQFVAFAGLCPAHHQSGTSVNKRPRLSKAGHALLRKALYMPAVVAVSRTAWGRAFAARLAAKAKPKMLIIGAMMRKLAQVAFGVIKSGKPFDPSLHGA

SEQ ID NO: 86941 - protein, 321 aa, unidentified
MVTGIDCSKDYFDFIVLEGDSVIARDRYGNDRKGFKELLRHVSGTHVAMEATGPYSFQLALFLYEAEVRVSVINPLIIRRFSQMQMSRTKTDKKDALLIAEFTAMTSPKEWTPPGRELLQIRNLETYIEGTKQRMRMLANQLHAFEAAGMLHKDLQREMEQELHGYETRIREKGKEIEGLINRAYARLSENLRSIPGIGPRSASLLIVLTDGFRRFENHRQVISYFGLAPRIFESGSSVKGRNPICKMGMGNVRKVLYMAAMAAKRCNRACRELFERLTAKGKLHKVAVIAVVNKLIKQAFAIAKSGRPYDENFLGQNIIR

SEQ ID NO: 86942 - protein, 420 aa, unidentified
MNAVGIDVSKGKSMVAIMRPFGEIVSAPFEIKHTASDINSLVELINSVEGESRIVMEHTGRYYEALAHQLSEANLFVSAINPKLIKDFDNDSLRKVKSDKADAIKIARYALDKWQNLKQYNVMDELRNQLKTMNRQFGFYMKHKTAMKNNLIGILDQTYPGVNTYFDSPARSDGSQKWVDFASTYWHVDCVRKMSLNSFIDHYQNWCKRKKYNFSQSKAEEIYGKAKELVPVLPKDDITKLIIKQAVNQLNSASTTVESLRTLMNETASKLPEYPIVMAMKGVGASLGPQLMAEIGDVSRFTHKGAITAFAGVDPGVNESGSYEQKSVPTSKRGSSDLRKTLFQVMDVLIKTHPQDDPVYQFLDKKRAQGKPYYVYMTAGEQVSKNLLRTSERISFISSRILIIIIIFRPALVWWSYFDT

SEQ ID NO: 86943 - protein, 345 aa, unidentified
MTQFSKIIGVDLAKSVFQLALADDHHHIHQSKRLNRTQFHTFFINHPPVHVIMETCGTAHYWARTLQALGHTVTLLPAQYVRPYVRRNKTDRNDAIAIVEAARNRDIAVVPVKTEYQQTLQSLHRLREQWKTTRTARINGLRGILREFGVLVPIGPRAAITTTRASLDALPPLLHTSVQAVLDELTDIQARITTLEKQLKQIVKEDGVIQRFMQINGIGLLTATALRASVQSPTQFKNGRQLSAWLGITPREYSSGDKRYLGRITKKGDKYLRTLLIHGARSVMARNKIRQRNNEKLNHLQQWAIQLEQRVGHNKATVALANKMVRILWATWMHQREFDGNYAVH

SEQ ID NO: 86944 - protein, 497 aa, unidentified
MQTDSCLQNVWAMPSPRSGLVVDVLPNRKAQHMNLTLGIDLACRAAHQASLARPDGTYMWTGKKFFTRPTDLEKLWTAIGLNQEDAVTVVLEPTRNAWAPVASWFRRRGATIVMVPTTQSADLRAYYSKHTKNDHLDSKLLARLPLLHPEGLREHTSDGPADPLRRAVKMRSSIVKRRTAIYQRLDAQLELLGPTWYDALGSNYGKCALAVLIRYADPTSILRLGPARLTRFLIRYSRGAWRDEHARTLLAAARESLELWGPDGIDFAELAADIAVEALQARVLTEQVEDLDERIADLYEEADPTGIIASAPGMGPVNSAVVAGRMGDPHRFPSLAAIRAYSGLVPKVSQSGLRNHQHGLTKAGDPLLREALFNAADHARKTDPQLAAKYVRLMNSERHHDSAICHSATMLLTRIAACWRAGEHYVLRDTDGHVITPAEGLSIVREHHQVDPKIREKAAHQRQSKRLKVRAGREQQESPSAPTSRPTDSESTRLDVA

SEQ ID NO: 86945 - protein, 384 aa, unidentified
MRAVCGLDVHKDSVYLCILHDSGEIFENVYGVLTFQLEEMRRMMQSHGVTEVTMESTSVYWVPIWRVLEPHGFRLRLVNPYFIKQLPGRKSDVKDAQWISECTLKDLVRGSFVPPERIQQLRQYDRRIFDLDAEIVRKLSKLDAVMQRCNIRLSNYVSNTDTKSYKDVVDALCKGVTDAEQLIKKIHGRIVNKHGRETILASLTGVVSEAEKDAMRQLREELTLAEEHKEECHQKMVTICKTYYPKEFARLMTIPGIKERAATSLIAEIGVDMTKFPTAAHLASWSGLKPRNDVSNGKYKSRRITHGNVFLRKTIIECAWGASRTKDCFFSRFSYRMTQVCKKNKMKVLVAVARKLIIAVWHVLHDETDYKDFDPDCKKPATNG

SEQ ID NO: 86946 - protein, 336 aa, unidentified
MTKYIGLDAHSSTCTFNVTDERGMEVDNTTIESNGRLLVKYVRGIEGVKKLTFEECELSAWLYEILRPEVDELIVCNPVANKDYKKIKTDKMDARRLSKLLRGGFLISVYHDGSKREQFRSLMSGYQDFIEEGVRLKNRYKSLFRKSGKKVKGEALYSEESFLEGLERTDFKFIGTQIYQLLEKMEGSRQEYVKEILRCSKGFKEIKYLKSIPGIGSIQAAKIVSQVIDPERFSSKYKYYSYCGLVRHKRISDGRGYGSEKIWGNRILKCVYKMAGHSVLKGKSGLRNYYDSLRLKGISHDNAYNAVCRKIAAISLSVWRKSEKYDDRLITGNLIK

SEQ ID NO: 86947 - protein, 359 aa, unidentified
MGELSKVGMKTVGLDLGDRSSHFVVLDAEGQLVEEERVATRDQALRKRFSGCQRMRIALETGTHSPWVSRVLKECGHELIVANSRKLRLIYENRRKNDRVDAMYLARLARLDPQLLSPVEHRGPQAQKDLALLRSRDVLVEARTQLINHSRGLVKSVGQRLPRCSSEAFARKVLGAIPESLQPGLLPVLEMITSLTAQIKALDRRMDALADQVYPETKLLRQVTGVGPITSLAYVLILEDAGRFGKSRAVGSYLGLTPGSYKSGDSDPQMRITKEGDALLRRLLVVAAQYILGPFGPDTDLRRFGLRIAQRGGKNAKKRAVVAVARKLAVLLHHLWRSGEVYEPLYQETRKAARLGKIA

SEQ ID NO: 86948 - protein, 416 aa, unidentified
MNAVGIDVSSRKSTVAVLRPLGEVVCLPFDVTHDIAGLASLVEKLKALDGETRVVMEHTGRYYEAVEKALHEAGFFVCAVNPLLIKEYGANSLRRVKTDKADAVKIARYALDNWADLRDFTPMDAIRYDLKTLNRQFQLASKQRTASANNLIALLEQSFPGIRKCFDSPVRSDGTQKWVDFAHSFWHVDCVRKQPFAAFCERYRKWCKRHAYLFKQSNAEEVYALAKRAVVLTPKSKVVKVLVQEAANQLISISRSVEVYRAEMDRLAAMLPEYPVVMAMYGVGKSYGPQLMAEIGDVRRFERKQALIAFAGIDPMPNQSGDKNVRSNKSSKRGSPYLRKTLFNVIRTYLQCAPQDEPVFQFLNRKRAEGKPFYVYMLAAANKFLRRYYAKLRDYFASPDTLQSVDPIPATLKASL

SEQ ID NO: 86949 - protein, 349 aa, unidentified
MASMPHPQRLVTVGVDSHKDVHVAAAVDQLGRLLGTTQAPTTQRGYGQLQRWAQGLGQVERFGIEGAGSYAAGLARWLVDRGHQVVEVNRPNRQTRRRRGKSDPADAEAAARSALAGDEVTTPKTANGTVEMLRVLRVARRSAMKARTQAANQLDSLLVTAPDQLRAQFRGLAPDRLVKIAAALRPGEFASPIAATKLALRELARRHQALTGELDRLDSQIAKLAPKAAPPLLARRGVGPQTAAALLVAAGDNPDRLRSEAAFSMLCGSSPIEASSGKTVRHRLNRGGDRQANNALWVIALARMASDQPTKDYVERRTKQGKSKKDIIRCLKRYIAREVYRDLQAAIAT

SEQ ID NO: 86950 - protein, 432 aa, unidentified
MKAVVERCAGIDVAKKLLNVCVLSGPADQDPEAELGLFGTFNADLDRLRNWLLEKGCQQVVMESTGSYWKPVYAALEGSGIEVNLANGEDVKARRGHKTDWDDCQFLANLLRHGMIRASFIPPQAIRDLRDLTRRRRQLCGAAVSERNRVQKVLEEANVKLGSVLSDVFGVSGQLMLEKLLDGEPDVGAIAELAQRKARQKIPEIRQALEGHRLRDHHRTMLRLSLDHIAFLEGQISGIDEEIGKLIEREGYQESFDLVRSVPGVQEITAAALLAETGVDMSVFPSEGQLSSWIGVSPGNRISAGRNKSGATTRGNRWARTTLVECAWAAAAQKDSALKERFRRLSIKGRKVALIAVAHQLAIILHRTLSSRMPYQEAAEVFPDERKRQRLIRHYVRRLGKLGVTVHSLRPDSESHRKTKTGTTIHGQRAEP

SEQ ID NO: 86951 - protein, 348 aa, unidentified
MTVYIGVDFHARQQTISYLTTEEGAIQHLVLLHDHPVTVRAFYAQFAGQRVVVGFESSGYAAWFEELLEELGCELWIGHATYIRQFAKRRQKNDRRDADLILELLHTGDFPRIHRYSRTTREMLQQLRYRQRLVKMRTMAMNMLLFMASSRGVSLRTQLQSKRGQAKLQQLALPATLGTQRDELLSLLQTLNEKISTIERWLEQQTKADLAVQRLQTHPGIGLLTSICLRYTLEDAGRFANTRKVSAFAGFDPMQDQSDERNRMGAISKQGSRWLRFYLVEAGQVAIRKDADLQRVYQRVARRGGHAKAKVAVARRLLVRAFIMLRDEIDYAEFQRRGVAARSSRGTA

SEQ ID NO: 86952 - protein, 362 aa, unidentified
MRIIGCDLHARQQTLAMLDTTTGEVEELTLKHEGDNVREFYSSLPRPARVGIEATGSMQWFLNLMEELGIECLVGHPAQIRACAPRKQKNDRRDADLILKLLAENRFPAIWLPPKELQDLRSLLRHRHQWVGMRTRIQNALQSIALANGLRRGTALWSHDGQNRIASLSLAPHTAYRRSELQAMYEKFEAEIEKLNQRVEQQACQRPGARLLMTHPGVGPITALATEVFLGDPARFADSKALASYVGMIPREYSSGGRQRLGGLSKQGNPLLRFLWGEAGAHAARKDPELQRFYRRKLVQKGLGKASVAVARKLGIRLWIMLLDQIEYHEFCRRGQKQQKSSDACARMPETRNGAKSHRPVD

SEQ ID NO: 86953 - protein, 355 aa, unidentified
MESTKYVGLDVHKEATTIAVMNSAGKLIMESIIETKAITIRQFIQGLHGDLHVTFEERTWAAWLYDLLKPYVTKVVVCDPRKNTLLKVGNKSDRIDPKKLAELLRNGSLSEVYHGENGVRTLKELARSYLTISKDLGRVMNRVKALYRSWAIPCAGTQVYALCHRSEWLSKITEAGVRRRAEHYYQQLDALQTLRREVRKDLLLEGRKHNATKLLRQVPCIGPIRAAQLVALMQTPHRFRTKRQLWTYSGLGLETRDSAQYRYVEGQLQRSKKPQQLRGLNSNHNHDLKNIFKGAATTASVSAGPFHDFYQALLTKGMRPTMARLTLARKIAAITLIVWKKGARFDPQHLKQQAA

SEQ ID NO: 86954 - protein, 344 aa, unidentified
MKIKLLGIDLAKNVFQLCALNQANKVLFNHSVRRVRFCSTIAKLEPTTIAMEACSSAHYWGRTFEAMGHKVLLVPAQHVTPFVRGGKSDARDALAICEAAQRPGLHPVPIKSIEQQDIQLLHRLRQRQVQHSTALANQIRSLGREYGVIFPAGIKSLISRLPEALEDGSNELSPVARYALADQLRCLIEVRKVMTTFLHQIEQLAVQHPAYINLLPLPGVGPMVASAYIAAIGNGRQFKCGRQVSAWLGLVPRQYGTGGKIQLRGMTKNGDRYLRTLMIHGARATISRGLKNRPELARWVQPIIDRQGFNKAVVALANKLARISWVIITTGESFDVKQAFKPAV

SEQ ID NO: 86955 - protein, 348 aa, unidentified
MALTIVKTRAITGGVDTHADVHVAAALDPVGGLLGVQEFPVTPAGYALLLDWLAGFGTVCLVGIEGTGSYGAGLARHVAAAGVRVVEVDRSDRQDRRRQGKSDPLDAVSAARAAQSGRAAGAPKGRDGSVEAIRALMVAQRGARTDRIQAINQARSLIVTGPDDLRARFTGHTVAGLVAELASLRPRPGSTVGYATRIALRELGRRAEFLDTQLKRLDELIVPLVTAQAPSLLALYGIGPHTAALLLIAAGDHPERLRSEAAWAHMCAAAPIPASSGKTVRHRLNPGGNRQAGHALWRIVFTRMVSHPATRAYVERRTAEGKSKKEIIRCLKRYVAREACPCLRPPAG

SEQ ID NO: 86956 - protein, 344 aa, unidentified
MNNLSRVGIDLAKNIFQLHGVNRSETSTWCRRLKRDNWIKVLLNKAEPGCEIGMEACTGAHHWARLLQAKDFHVKLIAPQFVKPYVKSNKNDANDAEAICEAMSRPGMRFVTVKTVEQQNIQAVHRIRSELVGQRTAKANQIRGLVAEYGLVAPQQINHLRAALPVWLEDAGNGLSDRFRRLLNGLWGDLKRLDERVSEMDKEIALIAESDPVAKRLQQLRGVGPMVATALLAAVGDGKQFANGRQMAASLGLTPKQHSSGGKDRLLGISKRGDSYLRSLLIHGARSAIYAARGKEDRLSQWVMSIATRRHPNVAAVALANKTARIAWAMLRYETDYDPQLAAA

SEQ ID NO: 86957 - protein, 338 aa, unidentified
MLHSGIDLHRRTVVLATVAADGQPVRTAKVPTTRDAVRAYFAALPGPHRAVVESTATWYWLRDLLVGDGVDLRLGHAKYIKAISYAKVKTDAVDAATLAQLLRSELVPEAHVISPAGREARDALRARLRLVQRQVGCRAAVAGLLAQYNVTTRGALPPLVQLRATMLDEQRALLTAQARRLVHELEPLLLPTPDVQRLLWIPGVGRLVAFTLWLELDGVARFPSARDFVSYCRLVPGADNSGGKTRHKRAKDGNVYLKLAFSRAAIRAIQYYPELRAFYRATARRKPPAVARALVAKELARIAYFVLKRQEDYNGTFKGQRLSRTKRPTWPRLASPPM

SEQ ID NO: 86958 - protein, 490 aa, unidentified
MKGQRAKRNQKNQKTSKKTNGKATPGKWDEMNRKQRREMMRQMQSGDLSLEVIHPDASGIDIGNESHYVAVPPSRDSQPVRCFGCTTAELKKMAEWLTQCGIRTVAMQSTGVYWIAVYDILEAAGMEVYLVNARETKNLPGRKTDVQESQWLMKLHTYGLLRNSFRPSQEIRILRTYWRQRHDLVRSAGRHIQRMQKALTQMNIRLANVISEISGMTGQAILKAILDGQRDPRELAAYRDHRVEASEEEIAQALEGNWQEDQLFVLRQEQAGYEFCQQHITECDQQLEKYLARLEDRTQGATLPKETRKGRLNKKKKRNPQFNLREELFRMIGTDLTQIDGIDVTVAMTVVSEVGWDMSKWKTENHFVSWLKLAPDNKISGGKVIGKGRTPTNNRATTVLRMAATTLRASDTYLGAQFRRLRTRLGPPVATKAMAAKLARLVYRMLRYGMKYVDQGAEFYETQHRKQQVIHLKRKAAQLGLEIVEVADAA

SEQ ID NO: 86959 - protein, 386 aa, unidentified
MKKNNTPEQSPSKRANKMSRKVNRTGQKSRQQTGPVTIGLDLGDKSSRYCVLNEAGQVVLERSVGSSKKAMTQVFGAIPRCRIALEVGAHSPWVSRLLERLGHEVIVANARQVKLISQSSRKNDRLDAQMLARLARVDPQLLRPIRHRSEQAQGYLTVIRVRAALVDARTGLVNAARGLAKAMGERLPKCDTDQMGEERLKMLPQGLREALRPLLQEVESLTGKIKECDVKIEQMARAEYPETCLLRQVSGVGTLIALTFVLTVEDKERFAKSREVGCFVGLRPSQSDSGESKPQLPITKEGDQYLRKMLVQGAHCILSKRGPDTDLKRWGAALADRGGKNAKKRAIVAVARKLGILLHRLWVTGEVYEPLRNSQAAAKQKKTAAA

SEQ ID NO: 86960 - protein, 416 aa, unidentified
MNAVGIDVSSRKSTVAVLRPLGEVVCLPFDVTHDIAGLASLAEKLKAIDGETRVVMEHTGRYYEGVETAVQDAGFCVGVFTPFLTKDSGAIPLPREKPNRADAVKFARSAFDNWADLRDFPPMDAFRYDQKPLNRQFQLASKQRTASANNLIALLEQSFPGIRKCFDSPVRSDGTQKWVDFAHSFWHVDCVRKQPFAAFCERYRKWCKRHAYLFKLSNAEEVYALAKRAVVLTPKSKVVKVLVQEAANQLISISRSVEVYRAEMDRLAAMLPEYPVVMAMYGVGKSYGPQLMAEIGDVRRFERKQALVAFAGIDPMPNQSGDKNVRSNKSSKRGSPYLRKTLFNVIRTYLQCAPQDEPVFQFLNRKRAEGKPFYVYMLAAANKFLRRYYAKLRDYFASLDTLQPVAPIPTILKATL

SEQ ID NO: 86961 - protein, 342 aa, unidentified
MGKLYVGLDLGSRHVEQVVMRLNGKVIQQRRFATSEIKLRQAFEDLTAEVHVHMEAGELAAWVREVIKPYARSITVSHARDNAWIAKDPNKRDRIDAFKLADLLRMNRVHPVYYADDPLRRDFKQLVQHYDDLTAQEVALKAMIKARLRTQGVIIHNASPFTEKGCKEVLARVPSTELRGAIRQLYKVLAHTLEVRDQAYAAMVKAGRRFPEIKLFQEGVPGVGPIGAARFSAYVQTPHRFSNKRKLWRYCRLGISYRSSDGQLLSYPKLDRAGCGPLKDVARKAFEVAVNSKDDNQFKRAFEQTLGRTHDKTHARLTVMRKIVSVLRAMWLTNSPYQDELG

SEQ ID NO: 86962 - protein, 356 aa, unidentified
MTSTTKYIGMDVHKESISMAVRNAAGKIVMECVIETKASMILEFVDGLRGDVHVTFEEGTWAAWLYDLLRPHVTNLVVCDPRRNALLQEGNQNDRVDARKLAELLQNNQLRSVYHGDHGLRTLKELVRSYLTITQDLSRVMTRVKAIYRSGAIACSGKQVYGTRHRGEWLGKIVEAGARQRAEFYYRQLDALRLLRQEVRRDLLAESKKHKAWKRLCEIPSIGPIRAAVLLGILQTAHRFRTKRQLWTYSGLGIEGHSSADHQVVKGQLQRKKKHVEVRGLNRNCNHDLKNLFKGAAVAAATKPGPFEEFHAALLAKGMRPEMARLTLARKIATIVLIVWKRGVCFDANHLKPQTV

SEQ ID NO: 86963 - protein, 352 aa, unidentified
MVRIGCDFHPSWQQVSWLNQETGETGDVKLVHEAGAAEKFYGQFPGGTRIGMEATGNCQWFLELLAKLGHEVLVGDAAKIRASDARQQKHDKRDARLLLQLLAENRFPRIWVPSREQKDLRQLLIHRHKLVRIRVQVKNGLQHLAMNQGLQKKKQLWSERGQQALRALPLQPWASRRRADLLKMRSELDAKINALDMAVMEAAEKDARARLLMTQPGVGPITSLAFVLTMGDVSRFQRGKQVASYLGLIPREYSSGGHQRLGSISKQGNSFLRMLLVEAAQSVVRYDESFRKEYLHRCHGKPKGVAKVAAARKLAIRLYWMLRSNTKHPEIVHVESSSRVPLVGATCLRQAS

SEQ ID NO: 86964 - protein, 314 aa, unidentified
MSAGVFVGMDVSQACVDVAVHPGTAFQIPYDERGIAQAVERLRALQPTLIVLEATGGLEVPLTGALAAAGLPVVVINPRQVRDFARATGQLAKTDRLDAQILARFAEAIRPPVRPVPDEQTQALAALVARRRQLIEMLTAEKNRLRLAAQPIQQRLRAHITWLEKELGSTNTDLEATIRLSPVWREKEEVLRSVPGVGPVLVTTLFANLPELGTLTRKEVAALAGVAPFPRDSGTLKGRRTIWGGRAHVRATLYMAALVATRRNPVIRAFYQRLCQAGKAKKVALTACMRKLLTILNAMLKSGTPWRVAASQPA

SEQ ID NO: 86965 - protein, 320 aa, unidentified
MRNTVGLDISKLTFDASAIVGNAEYSAKFDNDSKGLDQFSDRLKSLGCQNLHICMEATGSYYEEVADYFAQYYSVYVVNPLKISKYAESRFKRTKTDKQDAKLIAQYCRSAKESELVKRQKPTDEQYRLLRMTAAYAQIKSECAAMKNRHHAAKDEEAAKAYAQIIKAMNEQLEVLKEKIKEQTEKPNCKEGVKRLETIPAIGRMTAAVLFHHLTSSKFETSNKFAAFAGLSPQQKESGTSVRGKGKLTKFGNRKLRAVLFMPAMVAYRIRAFPGFIARLEEKKKPKKVIIAALMRKLAVIAYHVHKKGGDYDPSRYKSA

SEQ ID NO: 86966 - protein, 355 aa, unidentified
MIIVGCDYHPGFQQIAYVDTETGEVKEQRLEHRELAEKFYRELASQGETIRLGMEASGHARWFERLLAELNIELWIGDAAKIRAKRVRKHKTDRQDAQHILQLLGEDRFPQIWVASWENRDLRQLLWHRHRMVQARTRIMNQLQAVALNEGLRCKKKLWREQGRKQLEAYRLAPWASRRREDLLKLLDELNPTIAELTQAIDQEVEKSAEAGRLMTHPGVGPLTALAFVLIIGRAERFQCGKQIAAYLGLVPLEDSSGERRRLGHITKQGSSMLRFLLVESAQVAARSIPHWRNQYFHLAMRRGRKIATVAMARKLAVRLFWMMRQGWDYEQVNKFGSQGRKLSSHNVVTTGSTR

SEQ ID NO: 86967 - protein, 390 aa, unidentified
MLLLGIDIAKLNHVASLVDSSSGELIFSNFKFQNNILGFSSLLEKISKFSINEIVIGLESTGHYGENFINFFFQKGFKVAVINPLQTSHLRKANIRDSKNDRLDSINIAKALLFGEHRYISQKNLTNFALKKLTRFRKSLIKQKTKTKIQLVSLLDIIFPELQYFFKSGVHSNAVYTLLKKYPSTEKIAALREKSLFSILNKASKGHYKEEHALQLKSLAKSSVGIKDTSVSMHIPQLIELIEMLDSQIKSIEKEINSSVGEESPILTIPGINTVAAASILGEINDIDNFDSSSKLLAFSGLDPKIRQSGNFSASSCRMSKKGSSYLRYALIFTAWNLVRNSETFNRYYLSKRAQGKSHYNALGHTAHKLVRVVYTLLKKNISYQENLIV

SEQ ID NO: 86968 - protein, 392 aa, unidentified
MIYVGIDVAKDKHDCFAMNSDGEILIEKLTITNNLDGFETLYNSLMNFSDSLYNIKVGLEATGHYSNNILNFLTEKGFNIYLINPLQTNLYVKGQSLRKTKTDKLDAHVIATMLISDNLKPYIPVSYHISELKSLTRHRFRLVKENSKFKTSLVRLVDIVFPELSKIVSSVAQKSCLALLSELPNAKKIAECNLTHLTHLLSDNSNKKFDRDKAIEIREIARKSIGTPSESVAFELKQTISIIQFLQKQIDNIDKRIKEILKEIDTPILSIPGISFKLAGSILAEIVDISRFDFPSKLLAFAGLDPSMYQSGKFFSTHSVMVKRGSKYLRFALMNASRMVCMNDAVFNNFKNKKMSEGKHYMVTMGHVAKKLVRVIYYLLKTNNKYEADKVA

SEQ ID NO: 86969 - protein, 354 aa, unidentified
MIIIGCDYHPAFQQIAFVDTETGELQERRLEQPDRAEKFYRELAAQGKKVRVGMEASGHARWFERLLADLNFEMWIGDAAEIHRKRERKQKTDRQDAQHILRLLLKDDFPRIWVPSWENRDLRQLLWHRHRMVQARTRMMNQLQAVALNEGLRCQKKLWREGGRKQLEAFRLAPWASRRRQDLLELLDRLNPTIAELSQAIEQEVEKCPAAQRLMTHPGVGPLTALAFVLIIERADRFQCGKQIASYLGLVPLEDSSGNRRRLGHITKQGNSLLRFLLVEAAQVTARSLPEWRSKYVHLTMRRGRKIAKVAMARKLAVRLYWMMRKGWDYEQLRKFGSHAGQPGYRDGVKSNIE

SEQ ID NO: 86970 - protein, 350 aa, unidentified
MNHNTIVGVDLAKEVIQVCIVKQNKVHSNIEMTQEEFTSWLASNKPVTVVFEACGMSNYWKQTASRLGHNAKIISAKLVAQIRQNQKTDKNDALAIVQASQLTDINFIQGKTLKQQERQSMIRIRDLALKNKVAYSHQLKALLLEFNLRPTKKQGGLKGLVERVLEDADNGFSAPFRAVLKAAWTHYEATIDAVNQFDKSIEQSVNNEPDCHNLLALESVGPINAVNLYISIGCGEMGHFKKGRDASACIGVTPILHSSGGKTKLGSIGKYVKNQSVRKNLISGAMAVVNKLANRDSKTTKEVWLKGIIERRGKKCAAVALANKTVRTAFAMLTQGTEYKAEPLCKNVAL

SEQ ID NO: 86971 - protein, 382 aa, unidentified
MRFYTTQHPFYCGIDLHARTMYVCLLDQAGATLLHRNMTATPEALLKTIAPSREQIVLAAEWMFPWYWLADLCAEHGIPFVLGHALSMKAIHGGKAKNDTIDAHTIAVLLRGGMLPQASVYPAERRATRDLLRRRMPLARQRGELLAPVQNTTSPYNLPAIGKKIASKANRDGVAERFADPAVPKSIAIDLARIGYDDDLLRDVERTLVKTAKHHDANPLYLRQTVPGIGKILSLVLLYESHDIARFPRVQDFASYCRLVTCAKESAGKRSGTSGTTIGNAHLKGAFSEAAVFFLRDNPAGQTLLTRLEKKPSTGTAFTILAHKLARAVSYMLTRQTAFDLDTFLQGYGRGAGELKASLDSHGMNLIRHARHAVKNCVCERL

SEQ ID NO: 86972 - protein, 346 aa, unidentified
MYDRKDIILAVDYHAENTEVRWFNCSTGEERRLRIPTTRAGILRLVDKAVAEAAQARGKVIWIMESTTGWARVKELIGSRVQFVMANVLQMPLPPKAYRRKSDKIDTGRILREFLNGSLPQSYQPESWWREVRRLVDSRQDLVERQTAVKNWITHLLHHETWTDRTGLWTQKGMKHLRSLKLSPGDRMLLNLKLQELDQLSDRRKQMEAAMQKVCDQWPQAQYVDEVRGIGMVTAVSILAHIGPIERFPTAEDLISYAGLAPGHRQSDGTRHNTKIGGGGTDSHLRYLLIESMQWVCQIPRYRPAFERAVAKHGTNIARIIVARMLLRSIFKMLKDKVRFNQIAAA

SEQ ID NO: 86973 - protein, 421 aa, unidentified
MNTDWTQHACFAALDWASDHHDVIVLNRHGAVQAEFRFAHTADGWAEFTTKMQPFTGAPLTLETSSGPAVDQLLQRGWAIYPVAPTAAARYRERKVPSGTKTDRHDTWALADALRTDGHAWRPLRPQDEATATLRALCRDEIGLIEQRTALVNQLQAALREYYPAALAAFDDWTAPHAWALLLQFPTPAQLQAAGKRKWEKFLHTQRLWRPQTVPERLEGFARANALTISPAVTAAKSLLAVSLAKILVTLQAQLAEYRRRITEAFRQHPDHDVFGSLPGAKATLGPRLLAEVGGVRAEYPDADALMCQAGVSPVSYQSGKVSKCRLRRACNKVLRATVHLWANASRQTCAWAQAYYEHKRAEGQSHASALRCLGKRWLKILWRLWQNGQAYDEAKYLAQLQRRGALTWTKLPTAPTAKTV

SEQ ID NO: 86974 - protein, 400 aa, unidentified
MRNNAFVPSDYDVFSGLDVDKRSISATFNNQQGHIRSLRMPNSVEHLVNHVRKHFPDQKVAFVYEAGPTGYGLYDGLVAQGYRCLIASPSMIPKAPGQRVKTNRLDSVGLAENLRGGQLKSIHVPSPVYRELRHLTQLRDTFVSAMVGMKQRIKSLLLLEGIEFPPAPAGSQWSIVVKHKLRKLPCSCTVRFKLDQLLDSLEFNEKRVVKTTQQMRRFCQNDPELSRCMGYVMSVSGIGRIVASQLLARIGDWRELKNVRQLGGFLGLVPTEHSTGDRTDRGSITQTGDGRLRSKLIQASWSAIRQDAELRESFASVCKTHARHIAPRVAIVAVARKLSVRISVVLMKQRPYVVREKVHSAPLTQEETSPQGTTRRKPEPGETKLLTVRPLRQRSRGLVP

SEQ ID NO: 86975 - protein, 404 aa, unidentified
MAVVIGVDPHKGSHTAVVLGGDEAPLGQVRVRAPAAQAQRLLAWAAAWPERTWAVEGAGGLGHLLAQELVAAGERVLDVQPKLAARVRLLAAGAVNKNDPSDARSAAIAALRSPSCLPVRPDDRAAVLKIWAKRHHDLSRGRNQVACRLHAVLCELVPGGLAREISAAQADQILAGAGPRGAVQQARAELAAELAAGLRRADALPRETKKKLATAVRASGTSQTGLFGVGPVIAATVIGDVRDVSRFASRDRFAACDGTAPIEVSPGNRKVHRLSLRGNRRLNHAIHMAAITQIRYKHSEGRACYDKKTAEGKTPEEALRAVKRQISDAICRCLRAGAARIAAASVQGPGGHAGNDSVASAAGSHPERRLFGQATPGPATTLRHPADQQKRTSSRARKKTARTA

SEQ ID NO: 86976 - protein, 388 aa, unidentified
MIYVGIDIAKLNHFAAALSSDGEIVLEPFKFTNDADGFLLFLSKLESFEKNSLIIGLESTAHYGDNILRYLVTRKFNVCVINPIQTSNMRKNNIRKTKTDKVDTYIICKTLMMQTKLRYYTFSDLDLMDLKTLGRFRQKTIKQRTRLKIQLTSYVDQVFPELQYFFKSGLHQKAVYALLKEAATPEAIASMHMTHLSHLLTVASHGHFKKETAKELRVLAQKSVGCSDSSLSIQITHAVEQVELLDSQLARVESQMSEIMEFHDTVLMTIPGIGPINGGMILGEIGCIERFSTPGKLLAYAGLDPSIYQSGNFKASNGRMSKRGSRVLRYALINAAHNVVRNNSTFKAYYDAKMAEGRKHYNALGHCAGKLVRIIHKMLTDDVEFNLE

SEQ ID NO: 86977 - protein, 356 aa, unidentified
MTKILMAGIDLHSNNLVIGIVDEDGRQVRSQKLACDLPAVVAFLKPYKRRLRSLAVESTYNWYWLVDGLVALGYPVVLADPAKIDQYSGIKHANDKSDAFFLAELQRLKILPTGYIYDPQLRPVRDLLRRRMSLVQQRTALMLSFKSHYTRMTGQAMSLSRLKGMAAAEAKALYEHPADQLIATVQQAHVAGLNRSLQQIEKLVLAKAQTLPCYAKLDTLPGVGRILGMTIALEVGEISRFGSPGQFASYCRAVDAVRTSNEKNKGWNNRKCGNKYLAWAFVEAANFAKRYDAQSRRWFDRKAARTCGVLATKALACKLAKAAWHVMSGNVAYDAARVFGRVAESQGKGLVQALQD

SEQ ID NO: 86978 - protein, 407 aa, unidentified
MKVIFGIDVSKSTSTVCELINDSKSITTITNDRPGFLELLNDLKAFTQHPQIIFEATGVYSRRLQTFLDDYGYEYVVLNPLKAKKEMDLGLRHNKTDRTDAYHLALIQRLYHHPVSQLQAEQYHQLNALSRFYDQLTSDIVMAKNRLHKVLQFTFPELEQLFNTAKGFNYWSIVKMYPHCEIVNDLTELEIYTKLIKLPGFQVKKANKFTLKLIALSQKTYPVAPCKSVESDKVRYYTQRLIDLNKRRQNLVNQMVRLAKSLPNRDLEILESIPGIAQTTAVRILGELGDLRRFSNPNKINAFIGINPGRYQSGEMDASLSITKHGNTVARKILYRAIGQIDQAAKTQHCYIADYYENKKLSSQTKGFKKIAIASIHKLIRTMYALISNDQLYDYDVAKHNQKRLLS

SEQ ID NO: 86979 - protein, 431 aa, unidentified
MPANNQIPESEIAAWIGLDWADQKHIVCLQASDSTQLETQSIAQNPQCLNQWAAQLRQRFGGRKVIIALEQTRGAVVYALMCYDFILLCPIPPASLAAYRKALYPSGCKDDPKDAQLLLELLRKHSSHFTLWRADGPETRRLQLLVERRRGFVAECTRHSNQLTDLLKSYFPQVLDWAGNLNTRQACDFLQRWPTLQAVQKAKPATLRRFYQQHGCRHPQCINERLGQIRQAQPLTTDLAVIESNRLTVQVQAGILRACLEAVERLDREIEVHFSQHPDGAIFDSFPGAGQVLAPRLLVAFGTDRSRFSSAQQVQQMSGIAPVTQSSGKSHWVHWRWACPKFMRQTFHEFAGHSLSRCCWAQAVYQQQRKRGKSHHAAVRVVAFKWIRILFRCWQEQTLYDEQIYLRTLRQRNPELFAQLPGSLSPAVEIP

SEQ ID NO: 86980 - protein, 339 aa, unidentified
MKLYAGNDLHSNNNFWGIIDETGKRIFYKKLPNSPEKILSTLEPFKPDLANIAVESTYNWYWIVDLLMDQGYTVHLANPAAMKKYSGIKYSDDKHDAFWLAEMSRLGILPQGYIYPKEERPTRDLCRKRLQLVDMRTAIILSLKSLIARNIGQRISAENIKKLSQEDITEMLSGHEDLMLRAAMDKVAIDNFSGQIKFVESSLKRKIKSNTTYVNLMTMPGIGPILSLTILLETGPVERFKQVGNYASYCRKVDSKWTSNNKNKGKGNTKNGNRYLAWAFSEAAEHARMCNQQAKRFFEKKMSKTNRMIAHGALAHKMSRAAYFIMRDNVPFEPKKMFS

SEQ ID NO: 86981 - protein, 395 aa, unidentified
MGTQSTYTALTDYRGGTAPAGSRLYVGIDAGRRQHVVAGVVLERMENGSWERAAVHRIHTTGEGFRDLIAWVEAFGHTPTQVRIGCEPTGLWCAETVVAWLERHGYEVQWLQTWALHERRRLAIGKQTKTDALDARLIARLLYEREFHAQNRGFLKTGPRSTDGLRLSVRSRVRLIEQRTRLRLQLTNVEDALFPELKEFFKSSITSPAVRRLLEAFPTPKSMVGGSAEDVYRVLVVEGRSRIHAARINELRQLAAESAGLLQVEPILHAQCWLLRQLNAVDEQIEDLERSIVSALQSWPAEQRAVLASFPFMSQMRQAVLLAAIGDVNTFRNDGQLRKLLGWYPEARESGTTVSTHRLGYSRRGSRPRPSLPITGDCELAALPATLQSDISPAN

SEQ ID NO: 86982 - protein, 468 aa, unidentified
MPFAAFDLHKREIEAAVFDEDGRTTFRKRFPGTREAILAFAEQHLTPVHKVAMEATFNTWAVADLLAPLVDSITVGNPLQTRAIAQAKVKTDKIDVQVLGHLLRLGYLPAVWKPDAATRQLRQQTTERATLTNDRTRLKNRIHGVLNHRLIAPPAALTGGALFESAGIEWLQRLEIDPVGRRSLDRMLVQLDVVEKQIESTEAPLARLAYADPKVRLLTTLPGVGFATALALRAALGDLSRFPSPDHAAAYLGLVPSTYQSGDKTYHGHITKRGNSHARWMLVEAAQCVDDHPGPLGHFFRKLAKKKNRNVAVVATARKLVVIAWHMLKNDEPYRYAIPRSTEEKLRKLRVLATGERRRSGPAKGQKATPAIAPGIRSRLIKSLPDLYASEHLPALPPPRAGELRMIEADGLAFRGQSASGIQEAIIKKEARLKALWSTRLSNQMAVLPPFDQVFREFRRVLRQANLP

SEQ ID NO: 86983 - protein, 400 aa, unidentified
MPFHGGLDWGTTAHAVCVVDGTGKVIARIEARHDAAGLADLLTRLHKLAPPAELPIAIERPSGLIVDALIEAGHPVIPIHPNVLKACRPRYRAAGGKSDPGDAYMLADILRTDGHRFRPLTPLSDGIRALRALVRGRGDLVAQRVALANQLRSLLEGFWPGAAAIFADIDSPIALAFVARYPTPDSASRLGEKRLARFMAQHAYCGRRSSGELLARLRAAPKGLASDAEADAKGELVRGLAAVLDRLVPEIAKLSSRIEHAVAELPDGQIVMSFPRAGRICAAQILAELGNVRERFPTEDQLAAEAGVAPVTHASGKSRGVVFRWACNKNLRVAITCFADNSRHASEWAAAIYTRAKTRGCKHAHAVRILARAWVRVLWRAWQNGKAYDPAKHTAAARRA

SEQ ID NO: 86984 - protein, 356 aa, unidentified
MAVYVGIDVHKRFCQAVLMNEDGIILHETRFENTLDGATSLVNLARSIDSNVKAVVEPSANYWIKVYDKLEEEDVEVKLSNPSRTKAIAEARTKMDKLDAKTLAYLLRGNLVAESYVPTKKNRERRTFIRHRASLIKTRVEVKNRIHALLDKYDLSYEYTDLFGKEGLEWLRSLNLLASDDHILKSNLQILEAFNEQIRSADIQIAKDAVNEEQAKLLMTMPGVDYYAAMILLSEIGDVKRFASPEKLVSWVGLAPQVHQSGETHWTGHITRKGSKRARWILTQCAQSARQHDPKMREFYERIERKHGPSKATIAVARKMLAIMHVMLTRNEPYQGENRQLTTQKHKRLERIANAA

SEQ ID NO: 86985 - protein, 424 aa, unidentified
MYGGVAGISQGPNEFQEGGFILVRYHVGVDVGKYRHHISIRDLSQDDHCKAFSFTNDRDGFIELIAVLEKLSSERSDFLIGVEACSYALNLSYFLMAMGFTLVEVNPFRAGQFRKAQGKKAKTDKIDARTIAAILPLGDHKSLSIPDPILDNLKELTRFRVDLVDEKSTNIIHLREALSTLFPEYEKVFRQLDSAGSLALLAAYPGPEHIIGAGEETVGRTLSLASPRRMSIGMARRIIEAAKRTVGVVQRQPSLGVKISVLAKRIAGLQSTIRDLDRQITTLFNSLPCKPQGFPVGRAPSLATIISEIGDIHRYPTLKKFLSHLGWCPQSFQTGNYHLKHPKMSHAGNKYVRRLIWMLSIFAVQFVPRYREYFQRRVSEGKAKMHIIVAVGRKLLSVLYAMLKSGMAYDPNWEENSRPALARH

SEQ ID NO: 86986 - protein, 426 aa, unidentified
MQNCLFIGVDVALKGNQFCAMNFDQHIYFNLKFPNNPEGNEMVINKIKDIEDKFFFEKVIIVMESTGMYSFHPACFFSSNEYLNNYHTEVYQINACDFDKYKKSFHDLEKEDDIDAYVLADFARVGRTKSLYPFKGSQYIALQRLTRQRYHICKELIREKTYILTNLYLSFSGLISLNKNEMPFSDLFGATSSAFLEEFESPSQIIESSVEELINFISEKSKNHSSNLDNKITTLNKAMHASYRLDQTAYEPINIAIACSLNTIKFYQQQLKNIDKTILSTALGLDSNTYNILLSIRGIGKVYAAGIMAEIGNIERFSHNSKLAKYSGLYWKRNQSGEFDSQDKKSSKKSNKYLRYYLVEATASCVRQNFPFIKDFYNLKYNEVTKHQHKRALVLSARKLERLIFGLLRKNQYYIPIDSVQNSKNN

SEQ ID NO: 86987 - protein, 375 aa, unidentified
MKQEMHVLGIDIAKHVFHAVGMDDRGNVVYRKRLSRHDLMPFIAKLPPVRIGIEACGGAHYWARRFRAYGHEVKLMAPQFVKPYVKSNKNDSRDAEAIAEAVTRPTRRFVPIKDVDQQDIQALHRVRERLRGERTALVNEVHGLLHEYGIVIPKGVAKFRQAVVGTLESEQDKRTPLRQEMLWKLVEEFAALEKQLAYYQEKLEALATTHPECQRLMTIPGIGPLTATALVAAVSDASAFKNGRQFAAWLGLVPRQHSTGGKERLLGISKRGDTYLRKLLVHGARATIRWVGRKTDRRSQWIRQLVERRGHNRTAVAIANKNARIVWALLTSHQAYELAKGSNRRRSGGAPVPLCAKGSSITATMDVKHNNRYFT

SEQ ID NO: 86988 - protein, 414 aa, unidentified
MSYKIAGIDVHKKVLMVVVIDASTPEEKPDRRRFATMPSDLQRLSTWLRAQGVEEAVMESTAQYWRSVWLELEPYMRLQLAQAYSNRAPRGRKHDFKDAERLVRRLIANELILSFVPDGEQRTWRSITRMKVQLTRDRVRLQSQMECLLEEMRIKLSIVVSDLLGASGLRILHALAEGDTDPKQLALLGDDRLKCSEEQLVDALTGRAQPMHRQMLALQLERLQLMDGQIAKLNGLIARAMKPHQDAVIRLAEVPGLGVDSAQQVIAEVGVKASTFPSAGDFASWVGTCPGKDESAEENHSSRSAKGNKYLRRVLNQAAHAAVKKNGSHFQAVFRRLLPRLGYQSAIWAIAHRLCRVVWKILHEGVRFIEQGSQADPKVRKQRARILARALRKLGYDVAITPINPATTEPAVQM

SEQ ID NO: 86989 - protein, 419 aa, unidentified
MLFAGIDWSEKFLDFHLRTAEGKILAQGRVKPSVEGMADLFAELESHAPTSEIGIAIETAHGAWVQALLDRGYQVYPLNPKTVERFREALSANGVKTDKIDRKVLAMFLVTFHKENKPLRPDDPEIIQLRILCQDRLRLVEERSAKVNELGAILKCYYPAFMGFFGDLDSGIALDFLQQYPTQKQFQKLSERRLLNWLSRHRYSYPKRIDEMVGLLKQPALPVAEHLQQAKKTLICYLARSIKTLNAEMAQRDKQINDHLDSLAESDWIRSLPRAGKVLAPALLACLGRDPERFSSVGEARALMGTAPVTKASGKSRVVVFRRGCWKFARRTLQLFADQSRHQCHWAQAFYEKQRNSGHKHHEALRALAHRWLKILLAMRRSGSLYDEGIFLNSQRRYQLKTPILKTFKCVRDFFLAPC

SEQ ID NO: 86990 - protein, 339 aa, unidentified
MAIVGGLDLHRKQVTFDVVDTATGAYERGRIAPADRESFRRWLADFQSRPMDLAVEGCTGWRFVVEECQAAGARAHLAEPADVADLKGRRQHAKTDRLDARHLRELLEAGKLPECWIPPRHVLEIRAKVRLYKDLLEERGGWQQRIHATLFHLGAPAQPDLLGPDPDRLARLEALSPATRQATAVALRMIDALDRELTALRAELVAFGRRQPGCKELQHEYGIGALTAVVIWSELGDARRFANSRNAVRHTGLDISVYSSDGKCSRGHLTRQGPPMLRWALYEAGRCAARQTSSDHAYYEQVAARVGKQRAALSVARKLARRCHHRLRALGDDALAPVA

SEQ ID NO: 86991 - protein, 345 aa, unidentified
MQTVTTIGLDIAKSVFQVHGVDAAGRVVIRRQLKRRHVLAFFQKLPPCLVGIEACASSHHWGRELQVLGHTVRLMPPAYVKPYVKRHKNDATDAEAICEAVTRANMRFVAIKTPEQQSCLILHRTRHLLIRQQTSVINAIRAHLAEFGIVAAVGRNGVEQLLGVVADANDKRLPEVARACLAALGVQLRVLKAQILEFDRMINAWHRSNETSRRLDKAPGIGPVLATALVATVPDPKTFRSGRNFSAWIGLVPLQHSSGGKDRLGHISKQGDRYLRNLFVAGALAVIRYAKIHGTQHRPWLTALLARRPTKIAAIAIALANKIARMAWAMMVKGKHYKEPVALAA

SEQ ID NO: 86992 - protein, 348 aa, unidentified
MAMTIVEGPRTIVGGVDTHLDVHVAAALDPLGGVLGVESFVASPQGYEAMLEWLGGFGMVSKVGVEGTGAYGAGLGRFLRRAGVQVVEVDRPNRQMRRTTGKSDPADAVEAARAVLSGRATGAPKSRDGNVEAIRALLVAKRSAREGRLRAVHQMRQLSYTAPDQLRSRLKGLSTTDLVDEAASLRVRSETEPVTAATKTALASLGRRVHALEDEAVTLDERLAELVTATAPSLLGLFGVGIDTAAMLLVAAGDNPERLRSEAAWAHLCGVAPIEASSGKVTRFRLNRGGDRNANQALWRIVMTRISFDPRTRAYMERRTKEGRSKREVIRVLKRYVAREVFKHLPRG

SEQ ID NO: 86993 - protein, 354 aa, unidentified
MKRTTKYVGLDVHQAMTVASVREESGRVIARSIFPTEEATIFEFLRGMRGPIHVAFEEGTQAQWLYDLLVPVVDRVLVCDRRGKSRQGNKGDQVDADELSELLRRGALRAVYHGSPHRSTLRELTRTYTNVVEDATRVMLRLKAMFRARGIKTPGKRVYHPKDREEWLAKLGDDGARFRAQTLYAQLDVLRELRPKVKATMVAEARRDPAWAVLRSIPYLGPVRIALILAIMRTPWRFRAKRNLWAYCGLAVVTHSSSDYELVDGRAVRRRRAPMTRGLNRNYNRELKDVFKGAATAATGRPGPLKDFYEERIAGGMRAELARVTLTRKLTALTLRLWKKGEHYDPAKLTKQAR

SEQ ID NO: 86994 - protein, 349 aa, unidentified
MIMLGIDAHKRTHTVVAVDQLGRQLGTKTTNATTTADHLAIIRWADQFGDDRSWAVEDCRHLSRRLERDMLAAGERIVRVPPKLMARSRDSARTYGKSDPIDALAVARAALREPDLPTAHLDGESRELRLLVDHREDLVAERTRHINRLRWHLHEIDPSWDPDPRALTTFKHLDIAAGRLAGLDTVVARVAADLVGRIRRLTVDINELRAELESRTETSALHLRQIHGVGPLSSAKLIGEVAGAERFRSRHAFARHNGTAPTPVWSGNSDRHRLSRAGNRQINAAIHRVALTQARSHPDARAFLARRVEAGATKKEALRSLKRRLSDVIYRAMLADAALTANGVHDRAA

SEQ ID NO: 86995 - protein, 351 aa, unidentified
MDRYIGLDAHSSSCTAAVIGPSGRKIQHQILETNAKALISFVKSIPKNRRLILEEGTHSEWLHEVLTPHVQELIVVGVRRSRGPKDDKRDAFGLAEALRTRNVDVRVYKKRGRFITLNHLAKVYSTLVADTVCCQNRIKSLFRSRGVPTTGTKVYSPKHRSQWVSQLPTQAHGQADLLYCQYDALLELRQRSEREMLAEAQKHAIYRVLKTIPGLGPIRTAQLMPIVVTPYRFANKRQFWSYCGLGIVMRSSSDWVRLPDGQWARTQNQKTRGLNRNFNRPLKRIFKGAATTIIARSRDDDPLHQHYQGLLDGGTKPNLAKLTIARQVAAIALSVWRSRKAFDPEILSRKP

SEQ ID NO: 86996 - protein, 345 aa, unidentified
MPIVGGLDIHRKQITFDYLDTETGQVCRGQVSPADRAHLRAWLARFAGRGDVAFAVEGCTGWRYVAEELAVAGIAAHLAEPADTAFARGRKRHAKTDKTDCRHLRMLLAEGRLPQCWIPPSRILECRALLETYHDLRAEHTAWVQRIHAVLFHHGAPALGTGTLRTRQGAAALQAVAASCLSPAGQLQVATALEVIETLEARMHVVRHQLLDAARHLAGAKVLAERLYGVGPFAALAMTCWLGGAGRFSSSRQAVRFAGLDVTVWSSDRKGPPGRLSRQGPPVLRWAVYEAGKTHARASAPDHAYYAQVKDRCNGKRAALSEARKLLRQAHHILAELGDDALSAA

SEQ ID NO: 86997 - protein, 422 aa, unidentified
MSNSTGYAFFVGIDWADSKHDVAVYSTAKGTNKVFIIEHSTEAIDAFISELLAEAKGAPIAIILEQSKGSLMHALMLRDNVDLYPINPKQFASYRESFRTTKGKSDKNDALLLARLLYERHKQLRVWKPEDENTRLIARLCSRRRVWVEQRTTQGQRLLDLVKSYFPVLLKLAKSKLYDSPLLLEILRKWPDPRRLKRANPELLAKVIASHGVKNQSKLEKIIACLKKAPIHSKDKSLLTVSAIEARYLSKQLTANQELIAQLDQEIKAALAKHPDKELFTSLRGAGNALAPRLLAAFGTDRKRFKNAEEVACYVGVAPVTKQSGKSCSVVRRRACNKYLLQTFHEFASAAAKWCTWSNAYYKMHREKGMKRHAILRKLAYRWIRILFRVWSTRTAFDPERYIRSLLVKCPEIKPYLSAEKS

SEQ ID NO: 86998 - protein, 350 aa, unidentified
MKLIKRVIKKVIGVDIAMSSFKIRFGTLDQELHQEISKPFEFSNDRKGFKQLLKIINEVHYFRSEDPSSKDIPVWFVMEATGVYYENLAYFLLKNGFPVSVILANKIKNFSKTLETKSKTDAIDAANQTQYGLEKTLKAWIPPSGIFKELKELSRESQSIKESITRITNKQHAKGYSFKANKESVKRLNQHKTFLRQQLKQVEKQIVELVKSDKELNEKINTVASINGVGFMTVAKIVSETSGFALFRNINQITSYAGYDIIQNESGKHKGKTRISKKGNGHIRSALYMPALSAIKYNEKLKQFYERLCKTKANKRIALIAVARKLLILIFCLWKKNEKFIQNYPGPNAA

SEQ ID NO: 86999 - protein, 305 aa, unidentified
MRPDGRHRTKKFANTTKGHDELVSWLKGHKIDHAHICIEATGTYMEPVAECLYDAGYIVSVINPALGKAFAQSEGLRNKTDTVDARMLAEFCRQKRPAAWEAPHPLERALRALVVRHHALTDMHTQELNRTETAREVQRPSIDAHLLWLEAELKRLEKQIKDLTDDDPDMKHRRKLLESIPGIGEKTSAVLLAYIGLKDRFAHARQFAAFAGLTPRRYESGSSVRGASRMSKAGHVSLRRALYMPAMVATSKTEWGRAFRDRLAANGKKGKVILGAMMRKLAQVAYGVLKSGVPFNASRHNPVAA

SEQ ID NO: 87000 - protein, 338 aa, unidentified
METYAGIDLHSNNNYIGVIDANDKRLYSKRHENQLKPVLKALAPFKRTLKGIVVESTYNWYWLVDGLQEHGFKVHLANPSAIKTYEGLKHTDDKWDSFWLAHLLRLGILHQGYIYPKEQRPIRDLLRRRLMFVRQRTAQILSLQSMISRIRGLDFSGNAIKQFDMDFIERVFDSHHHRFTGERNLLTIHFLGSIIREIETEVKSQIQLRKDFQMLLTTPGIGLILGLTIMLEVGDITRFPKVGNYSSYCRCVESKRISNNKKKGESNKKNGNRYLAWAYVEAANHAIRACQKSQKFFQRKMVKGNRTLAIKALANKLSKANYYMMRDQVPYDAEKLFQ

SEQ ID NO: 87001 - protein, 349 aa, unidentified
MNEEKGKRIIGLDMHPDVFAAAALSADQSRQNADWVQDRMPTAGLEAWAKKQLRKEDVVVLEASGNSFAVATRLHAIGYTALVLESAQAGKIRDNFCNDDRHSAVKLAKVYRSGMAKVVWQPDAKTREYREVFFAHRNAVKDATRCRNRIRSFLNEHCVRLKPGVRLTQASGEATAKAAKDWTILQLELLRQKFSQLREVESRRNQLERIMVRELAANGRWASLWRLMGIRHRVAFALMAMVGDVHRFATAKKLVGYIGLAPRKDQSGNDKKGYDKGVGNFGRGDLRGLLIQSAHNALIQKDSPLHKWGWKLLMKKHRNEAAVAVARKLTVSIWHLLMGHFTRKRPADR

SEQ ID NO: 87002 - protein, 476 aa, unidentified
MKVPFRFFVGVDWGSQEHTCCILDSNREQIEVRKWPHSGAGIAELADRLTELCSGDASAIAIGIETPHGAVVETMLERGFAVYSLNPKQMDRFRDRHSVSGAKDDRRDAYVIADALGTDLHKYHRVQLSSAMILRLRELCRSQENLQQQQVQVANQLRELLYRYFPQIIPLSPGMDDPWFWDLLEKAPLPVLAARLTPAKIQKLLTSHRIRRVTGKQIHELLQAPPLWLAPGSAEAASEHVLMLIPQLRLSRQLRKEVEQRIESLLQQLASDVESTEHRDVPLLLSLPGIGRVVAATMLAEAWQALAERDYHALRTYGGAAPVTKRSCKRKSIQMRQACNERLRNAFYHWSRVSIQHDPRSRSHYAEMRARGHTHGRALRGLTDRLLAVLIAILESGIAYDPAIRNRAAYLTGDGVILPIAGAEDRAPQGCDPSAGSSADWTGAVAAVPASSVRRKAKNPRGLGGRSPDTFPHHAP

SEQ ID NO: 87003 - protein, 344 aa, unidentified
MEHFIGIDVSLASAAVCVLDARGGVVKEAKLPSEPEALAAFVLGLPFEVTAVGLEAGPLSQWLHKALTEAGVPAVLMETRQVKAALKAMPVKTDRRDAAGIARLLQMGWFRPVHCKSVSAQETRALLTARRAIQKAAIDVELSLRGVLRNFGLKLGKVSKGGYAGRVRELAAGNAMLETMAEAMLRARAALRAELAGLERRLRDLAKQDAVCRIMMTMPGVGPQVALTVKSAIDAPERFRSSKDVGPWVGLTPGRRQSGEMDVVGSITRAGDAGLRSALYQAATVMMHHARPCWLKAWGLQIARRRGMKRAVVAMARRIGVILHRMWVDGTDFRFTRPPAASAA

SEQ ID NO: 87004 - protein, 320 aa, unidentified
MAMRMQPLLIGVDVSKAKLDICEAPGQPLRQLCNERSAIRAWLKALPGPACIAVEATNTFHLLLLEEAHRLEHTLYVIDGYRLNRYRESIGGRAKTDASDARLLRRYLEREQAELRPWSPPPKGYVCIQRLLHRRAVLVKSKVALEQSLRELPELNRSAKVLMRQLTRLDTLIQQRLRQALEQQGWLAELKRCQAIEGVGPLTGAALVMAFNRGPFKSSDAFIAFLGLDVRVRDSGQCRKRRKLTKKGDPELRRLLHLAAMRACHTPAWEAFYQRYLDRGLTKIQALVILARKLARIAFALLKNQTTYRTNALRETCLTT

SEQ ID NO: 87005 - protein, 344 aa, unidentified
MENYAGIDVSLELSSVCVVDAQGKIVKEAKAASEPEALVAFFRTLGFAVKRIGLEAGPLSQWLHAGLKRAGFEAVLLETRHVKAALSAMTVKTDRKDAHGIAQLIRMGWFRPVHAKSIGSQEVRALLVARKQLLERLIDVELSIRGILRGFGLKVGPVTRKGFEARIRELVAGQATLERIAGAMLSARAALKAEYEKLHKAVLALVRDDAICRRLMTVPSVGPLVAITYKSAMDDPHRITKSKSAGALFGLTPKKYQSGEKDITGGITRAGDEMVRTALYEAANVLLSRITRFSKLKRWGMDVAKRRGSKRAKVALARKIAVILHRMWIDGTTYRWAAEEPIAA

SEQ ID NO: 87006 - protein, 365 aa, unidentified
MQKLIKFAAQMDKPMDKPATTVGLDVGDRFSQYCMLNRDGEVVESGRVASTETGLRRQFECGPPMRVALECGTHSAWISRLLEQFGHQVLVANTRKLRAITASESKNDRNDAEKLARFAAFDPRLLSPIRHRSGERQRDLDLIHARSTLVRARTMIVNSLRGLVKSAGGRLPSCSTASFQTRVVATIPAALADAAKPLLEQVEALNRSIGEMDRRIEQLTARYPEIQRLRSVPGVGPVVAATYVLTLDSKDKVRHSRQAGAFLGLRPRQSQSGDSDPQHRIAKTGNVYLRSLLVQAAQYVLGRFGPDSELRRWGLKLATCGGKRGKKRAIVAVARKLAVILHRMWQTGDKWRAFPQTTGKPANIA

SEQ ID NO: 87007 - protein, 343 aa, unidentified
MQVVRIGLDLAKYVFEVHGVDQRGKVVLCKTLRRGSVSTFFANLPPCLIGMEASNGAHYWARVLTDLGHKVRLISPQFVAPYVKSNKNDRNDAEAICEAVGRPTMRFVPPKSPEQLAIQALHRIRQRLVRSRTRLVNQIRGILSEHGIVIARDIWRLRRALAEITGNATDDLNMLVRLLIGETQAELIELDRRIASCDRRIRELYRTNKLCQKLGEIEGVGPVTATALVAAVGDRSCFKNGRQFAAWLGLVPKQRSSGGRHQLLGISKRGDRYLRTLMIHGARAALGKAGGKQDPRSRWLVNLRQRRHPNVAAVALANKNARIAWAMLSGNLCYEPARSVQSA

SEQ ID NO: 87008 - protein, 392 aa, unidentified
MVVSVGIDVSKDKHDCFIVSSEGEVLADAFTIPNTIDGFHCLLQRIQDCTHAQDKIKVGLEATGHYSYNLLGFLLDNGLATYVLNPLRTNLYRKSLSLRKTKTDRVDARTIASMLLSDVGLKPYTDTAYHNEELKSLTRYRFDKVKERAKLKSSIARLVCILFPELEKFVPSLHIASVYALLEEFPGAKQIAAAHLTRLKTLLETTSKGHYKRDMALEIRDASRNSIGSWMPAKSLELQHTIRLIRELDHEIAEIEEQIQSIMDELHSPITTTPGLGFRMAAMILAEVGDFTRFDSPDKLLAYAGMSPSTYQSGQLKNCYPHMEKRGSRYLRYALYNATKYVCHWDPAFAAYLAKKRAEGKHYNIAISHAAKKLVRLIFAMEKSRQPYCSAA

SEQ ID NO: 87009 - protein, 409 aa, unidentified
MEVIVERQSALDVHKAQVTGCVRIPGAAGERVEHVEQFQTTVRGLLVLCDWLKAHGVTHVVMEATGDYWRPVWAVLEDDFELMLVNARHVKQVPGRKTDVSDAAWLCQLAEAGLLRASFVPPKAIRELRQLTRYRRAQIAERKREAQRLHKALEDTGIKLDCVATDILGKSGRAMLDALVAGTTDPEVLAELARGKLRAKLPALREALEGRFEPLHALLIGAILSHLDFLDEQVERLSEAIEEQIRPFWPAVELLGTIPGVKQRTAELLIAEIGTDMSVFPSAGHLASWAGQCPGNDQSAGKRRSGRTRKGSKHLNAALKDAAMAATRTNGSYLQALYRRKRSQLGHARALGAVKHSMICACWHMLSTGELYSDLGGDYFQRRDPAKTTKRLVAQLERLGHTVILQEAA

SEQ ID NO: 87010 - protein, 413 aa, unidentified
MIKRERIKESRQEVYAGIDIAEEKHVIRFIDNLGREIGKPVSFTNNLEGFSQIEQCAKERGKFSVTFCVEPSGDYWKPLAYYLKERQYPVVLVNPYHTRQSKELIDNSQTKNDRKDAYLIADLGKQGKCFQAHLPEGSMADLKELVLAWTRTNRLLVQAKTYLHNFLTKYFPEYKGCFSMMYGKASMYCLVHFPLPADIQQIGLSRLTFLLKRASGGKLSEKKVQLLYQKACTSIGMKEGTHAAKEALGDILQDIEMLLQRKRKMKEQMAFHLLQSGYRDSLLSVPGVGVITACFFLSEIGNPQWYTKATQIEKLAGLHLVENSSGKRHGRFIISKRGKHLLRYTGYLAALSAVAKNNELATLYEYRLKHTRNPKEDKMKLMTYLAAKMLRIMFVVCKRRTVYQPEAITQYWK

SEQ ID NO: 87011 - protein, 340 aa, unidentified
MKHYLGVDLHRNCFTVCTLGEDGKSELRKWSIHSLGDFAQEVQDTDAVAVEATGNTRHFCQALEARGCRLVVVNPHQFQVISRSVKKTDAHDAKTLAEFLAKDMLPEVRMKEQLPTEIASVLQTRDKLVKLRTILKNKINNLLAARGILIRKESLSTEKGLEQALQANVGELAQVELGVLVEQIRHLNQSIAKLEAAIKKQGPKLPGYENLKSIKGIGDIGGSILLSTIGDIHDFADEGKLAAYFGIVPRVSNSNETQRSGRITKRGNKLGRTALVQCALIAMRYSPYLAKYYARIKAARGTGKAIIAMARKFLGIIYKTLKNGWVFEDFPGFVLAPTAG

SEQ ID NO: 87012 - protein, 389 aa, unidentified
MFFVGIDVSKFKHDCIILNDIGKTVTDSFTVHNNAIGFATLLNALSSFSKENLKIGFEATGHYGCNLKSFLQKNGYSFVEINPLLIHNFAKQNSLRRTKTDSGDAKTIARFLMKDDSLCANIAPYDISELKTLCRFRFSLKNQRKILLLRMNNVLDKIFPEFYPLFKNKLSATALFILSHYGSVQSIANLSTRSYEVIRQVSKNTFSLPDFIRLKQLAKDSVGIHSETLEYELKTVLSLIADISEKIEDLEKMITKIVTEINPPTLSIVGVGPLSAACIISEYEDIKRFSSSNAMLSFAGLEPSVFQSGAFAASSAHMVKHGSSYLRYAIVNCCRTLRLHNEVFASYYLKKINEGKSFNTALIHLAKKLIRLIFALESKGESFDPTKQR

SEQ ID NO: 87013 - protein, 344 aa, unidentified
MEAAVTIGLDLGKSVFQVHGVNRDGVVVVQRRLTRARLLAFFAKQPGCLVGMEACAAAHHWARELQKLGHRPKLMPPRYVKPYVKRQKNDAADAEAICEAVTRPNMRFVEIKNCEQQGVLVLHRVRLMLMRQRIALSNAIRGHMAEYGLVAPVGRNGLLRLIEIIADEQDERLPVMARSSLVILACQLRLVNEQVLENDRRVRLSARSTDIGRRLMEVPGVGPVLASAIVASVPDPTAFRSGRDLAAWIGLVPKQNSSGGKEKLGGITKQGDRYLRQLLVVGALSVIRYAQRHGTRRPWLVALLSRRSPKIAAVALANKMARIIWAMMMTGERYREPVLVGSAG

SEQ ID NO: 87014 - protein, 347 aa, unidentified
MTIVGNPDVVIGGVDTHADVHVAAVVDHVGGVLGVEAFATTRVGYRQLVSWLRSFGELVLVGVEGTGSYGAGLSRYLRTTGIDVVEVDRPNRQVRHRQGKSDPVDAVAAARAALSGQATVTPKSRDGNVEAIRVLMIARRSAVDTRIETLNQLRHLVFTASPEIRAKFTGLTAISLANKAATLRPRPGEDPVRQTTLVTIRTLGQRVHYLREEIKGLNRLLRPLIRDTAPGLLEVYGVGFDTAAKLLIAAGDNPERLRSEAAWAHLCGVAPIPASSGKTIRHRLNRGGNRQANSALYHVVITRMRHHQATRDYVARRLGEGKTMGEIARILKRYAAREVFKHLPRPA

SEQ ID NO: 87015 - protein, 353 aa, unidentified
MSVGLDLHKRYSQVEALDEGGGRRSAARLVNEFEEIEGFFRSLGEPCRVVLEAGWNWGSMYDWLERVENIVEIQLAHPYGVRAIAAAQVKTDRIDARMLGQLLRVGLIPRAYIPGKETRQLREAVRQRLFLVRVRTMLKNRIHALLDRHHVVPPPASDLFSKRGRDYLSKVELPGCAQDLLRQDLRLLELFGSEVRGTEKLLAQALKGDRRVELLLTLPGLGVLLATVVALEIDRIERFVRPAKLVSYAGLVPTTYSSGGKTSHGGLMKMSNKWLRWALVEAAWVAVRRDPYFRHQFALRCRTKGPKTAIIAVARRLAEVIWYVLSENRPYQVRQPASKRREYELTPAALVTD

SEQ ID NO: 87016 - protein, 457 aa, unidentified
MKKRGFLGIDVSKGYADFLLLDSDGNVMEEGFQLADNKQGRQKLKEIIASWQKKGLEELFCGVESTGGYENNWYAYLKTGFKDSKVYVCRINPRGVKAVGDASLKRTITDAVSAENIATYMISFPKKLDYGIDTLPVDQGFKEGRQHMTYIRMLQKQKVQLSNQLEKLLYQYFGETLVYCRHGSPVWLLTMLVKYPTAAGVLKAGVTGLSIIKGISQEKAKAIIAKAKSNTQDSSPQIAHVIAVTAREILHKDVLIKEEKAYLTGMYQTAKEVALMSTIPGIGVDSAVAIMLEIEDVRRFETAKKMASFFGVHPTFKQSGDGMWGNHMSKKGRGEIRAILYMATLSAIRYNPILKQVYARFRAKGMKHYQAAGIVMHKLLRIIYGILKNQTPFNAETDELNQQKATEKQHDQEQKDKAADKVKKQKKHRFQETSTDAPISRRAEQKIRKQIASQASD

SEQ ID NO: 87017 - protein, 341 aa, unidentified
MSNANSYIGVDLHKKMCFVTVMNKEGKIKKQTEISTDADKVAKFFSKHTDAAVAVESTMNWIPFYENLEGLGCKVVLSNPLATKAIAAARIKNDKVDSKILADLLRTNLLPLSYVQPREIRNLKELVRQRMSYVEMRTQIKNKIHSVLFKNNLKHDFTCLYGKAGMIWLKQLELRDIYRQEMDRYLTTLDLLDKQVEELSATIMETAKTDYDCQLLMTIPGISYFTALVIKSEIGNIERFPSAKKLCSYAGLIPSTYASADKVRHGRITKRGSKWLRKALVDAITSGSRHPSKLSCLYRKLKKNKGTGKAKVATARKLCTIVFAILTDKQPFREFVSVKQR

SEQ ID NO: 87018 - protein, 420 aa, unidentified
MKAWNEIKHYAGFDWAKDHHDVIVLDAGGKTVADFRFDHTAGGWEEFSKKLASFPDVAIAVETKHGAVVERLMERECCVFPVHPRSAKGYRQRKVPSGNKTDRVDAWSLADALRLDGMHWKQLSAQDPLIKELRLLCRDEVALIRDRTALITQLRQALYDYYPAALEAFDDWTMPAAWSFVVSFSTPQILVKAGKRKWEKFLHVHKLARPTTYQRRLDIFARAHQFAGSEPAIRAKSKLAVARAKQLQLLETQIAEYRQEIRRLFAQHPDAKLFGSLPGAGDKIAPRLLAEIGDDRALFPDAQALQCLAGTAPVSYQSGQVHRVYLRRQCNKSLRNAVHLWANLSREFCPWAATYYATLRAKGKSHACALRALGQRWLKIVWKMWQTRAPYDADLHARNQLKHGSWVLQLVNKTDVSAKT

SEQ ID NO: 87019 - protein, 354 aa, unidentified
MVNNIKFMFNIKNYKVMKNFKLFIGIDISKKTIDVSLLTSEKIKGLPYKRFDNNTKGYKAMMKWINSMYKFSKNEMLFCMEHTGIYSLNICCYLNENDISFWLENPLQIKRSFGIKRGKNDKLDSKDIANYAYIHKHNAKLYKMPDKTLLTLKNLIAYRERLIKTKVSFKISSDELKLCDKGIRASICSESDTIVKSFNKKIEKIEKQMEELIRLDEKLSHLYQLTTSVKGIGLIIAVHMLVHTNAFTAFNNARQFACYCGIAPFEYTSGISIKGKTKVSHLANKKIKSLLSMASLNAIRYDLEMKDYYEDKIKKGKNPMSILNIIKNKMVGRVFAVVKRDTPYVELKGYKKAS

SEQ ID NO: 87020 - protein, 336 aa, unidentified
MGITTLGIDLAKSVFQLHGIDADGNVILRKKVRRNGLLNDLARIPPCLIGMEACATSHYWAREIAALGHEVRLLPPAYVKPYVKRQKNDMADAEAICEAVTRPNMHFVAVKSADQQAVLMLHRARDLLVRQRTMLINALRAHLAELGVVSARGPHKIREVLSELQADQLDVPEVGRAALSSLVRQLDALEDEIGQLDDRIQAWHRQSEVSQRLATIPGVGVLTATALAATVADTAQFRSARQFAAWLGLVPRQNSSGGKDRLGRITKMGDGYLRKLLVVGATAVLRRIVHAQTSTGAWVRRLLERKPSRLVSVALANKTARIVFAVLSKKEIYNPA

SEQ ID NO: 87021 - protein, 360 aa, unidentified
MRIIGCDLHARQQTLAMFDTATGEVVNGTLMHEGDQVRKFYSELPRPVLVGVEAIGPMQWFLDLLAELGIECQVGDATKIRAAEPRKQKHDRRDAELILKLLVEKRFPAIWMPSKELLDLRALLLHRHQWVRLRTQVQNALQAIALASGLRRGPGLWSYDGQAKIAFLPLPPHASLRRSALQAMYGHMDEEIEKLTVQVAEQAERRSGAQLLMTHPGVGPVTALATDVFLGDPQRFADGKALASYTGLIPQERSSGRRRRLGRISKQGNPLLRFLWNEAGAHAARRDPELRRFYRRKLVQKGLGKARVAVARKLGIRLWIMLRDQIDYQEFCRRGQKQSSAACAGMPEVGNGANGHRPVE

SEQ ID NO: 87022 - protein, 427 aa, unidentified
MNKVQKLLLVHSSDIIFVGVDVAKKTHYARIINHIGLEVIKPFKFNNSIDGYERLVSKILEAKEKSKATKILIGFEPSGHYWKPLAWFLKEKGYTVVIVNPYHVKQRKEEEDNSPSKNDRKDALIIARLIKEGKFLNCLLPQNTYADLRNLSVARKQLIKKLNSVKNKIIAILDEYFPEFEEVFKNLWGKAALWILRNCPFPSIILKLSKEEIAEQLKKATNNRVGMKRAEKLIEAAKKSIGVKEGIKGAQIRLNIYLDELEFLKTQLETIEKAMEELLKKIDIAEYLLSIPGIGVITVAGFLAEVGDIGKYTHYKQIQKLGGLNITDNQSRKHRGKTKISKRGRPELRNLLYKASLTLVAKNKEFKALYNYFLRRRENPLEKKQALIAISIKLIRVMFTLAKKKEKYDSQKVLGEYRMKQIKELVA

SEQ ID NO: 87023 - protein, 346 aa, unidentified
MAHYAAFDVSDKETAIHGLDEHGKLVWKGKRPSEPEALAAALRRHAPELVRVGLETGRLTPWLFHALKGLGVPVVCPDARHARAATALQRNKTDARDAETLAQLVRTGWFREARVKSWAAHAVRHLVGARAQLVGMATDLSNQIRSLLRTFGLRITGRAGGTFERKVREQITGSPEVAAVAEPLLAAWRAMRDQIAALDRKLIEAARSNATCRLLMTCPGVGVVVATSFAAAVAAPDHFRCSRAVGAYLGLTPRRHQSGESDHSAGVSKRGDKLLRSYLFEAAACLLIRVQRPSALKAWGVGLVQRLGFKRAAVAVARKLSVVLHAMWRENRPFQAWPTPAVAAAA

SEQ ID NO: 87024 - protein, 322 aa, unidentified
MVSFLGIDVSSSSLDALVRPEGIKMSVPNDSAGFVKLEKSLRGLNIKRILLEATGGYERAVMRFLQDAGYKVIRVNPKRARSFADSMGIKAKTDAIDAAVLAHFAEVIPDKPTLQISPDRALLRELLQQRDRLVQQRDDDQRRLKQAQSAMVGNFLKANLQHFRLQIKLVEQAIKQQAAILNDERIAQLIQVKGIGLVTAGKLVALLPELGRVESREIASLVGVAPFNHDSGKSVGKRSISGGRFEVRRALYMACLVAVKHNPTLKTRYEALRGRGKFAKVAIVACMRIFIVRLNAMLRTGTPWRDLDLPAPENTAQLQGSA

SEQ ID NO: 87025 - protein, 388 aa, unidentified
MLLDHPSDGPAAIRTHIAAIFVSLELSRSNWLVTSLSPGKGEKMSKHSVAAGDTAELLALFAELRRKAEVRTGQGYPIITIQEAGLDGFWLHRVLQQNGIESHVVDPASIATPRRRRRAKTDRLDGEALLRALLAYKRGEPRVCAMVVAPSPEEEDRRRICRERQSLIAERITHVNRIKGLLFAQGISGYEPLRRDRRARLEALRTGDGRELPVHLKTQIGRELDRTELLLEQIKSVEVERDALLAAGRPADKKAAPDPVAMLLALKGLGANFAAVLWSEAFYRQFSNRRQIAAYAGLAATPWQSGGIRHEQGVSKAGNPRLRTTMIQLAWLWIRHQPQSALTRWFKERSPQGRKRVIVALARKLLVALWKYVTQGVVIEGAVMKPAA

SEQ ID NO: 87026 - protein, 379 aa, unidentified
MRHVCGLDVHKDSVFVCILNEKGVVFQEKFGVLTPELERMVGVIMEHGVTEVGMESTSVYWMPVWRVMDPYVEQKLVNPYFIRQLPGKKSDVKDAEWIATCILKGLVRGSYVPEERIQRLRQYDRRIFDLNDDIVHKLTRLDAALQRCNIRLSNYVSTTDCKSYGDVVDAIARGETSPDALLRCVHGRIVNRHGADVIRSALTGVVTPVDVDVIRQLREEIELARRHRDECQRRMDGLCSEWFPEQYANLQTIPGVKARSATAIIAELGTDMSSFEDAAHLVSWAGLRPRNDESAGRIKARGITHGNKYLRKTLIECAWGASRTRGCFYSRFSHHQTVVRRKSRMKVQVAIARKMLSAIWFILHDGVAYRDFEGDANAA

SEQ ID NO: 87027 - protein, 445 aa, unidentified
MSNALCASSAEPEWAAWAAIDWADQKNFWRLLPVGSRQSEAGELDNTPEAVEVWAANLQQRFGGRPIAVILEQSRGALVYMLTKYPHLVLFPVHPTTAARYRETFAPSGAKSDPSDTESLLDLLLRHPERLRSWHPDTVETRLLHFLVEERRQTVDERTRHTQRLTACLKLYFPQILRWFEDVASPLVGDLLERFPTLEQLQRAHPGTLHKFFSQHHCWNQEKNAERMAAIQAAVCATQDQAVQEACILITHSLVAILATLQAQIASFDQRIAELVAAHPDGALFASLPGAGAALVPRLIVAFGTQRERYQSADELQRYSGIAPVTEASGHSQWVHMRWACPKFLRQTFHEFASSSIPYSEWARAYYEHRRKEKNQSHHAAVRALAFKWMRIIYRCWKDGKAYDEEIYMQSLRRRSALLGKALGLDTRIGWQAVAGFQKFCGSKT

SEQ ID NO: 87028 - protein, 417 aa, unidentified
MDTLFARVAGLDVHLKSISCAVRCRQDSGKLLTEVRSFGTMTRDLRALADYLQGLGVTHVALEATGVLWKPVWNILDGRFTLLLVNPRHLKKVPGRKTDVKDAEWIAQLLQCGLLRGSFVPPRPVRQLRDLTRHRAQLMGEHTRVANRVHKLLEDANIKLGAVASDVLGKSGRAMLAALLQGEQDAEKLAELALGRLRGKIPELQRALEGHCTEHHRFVLGRLLSHLGYLERHSEQFSDHIAGRLDELLPAEIFVRLDAIPGVNRKTIENVIAEIGTDMTVFPDEHHLSSWCGMCPGNEESAGKRLRSRTRKGNRWLRRALTEAAWAASHVKNSYLAAQYRRLVGRRGKNRALVAVAHSLLVIIYHVLKNNVEYKDLGPDYFERLEPDRLRRHLVRRLQRLGYDVTVTPRVAEDSVR

SEQ ID NO: 87029 - protein, 330 aa, unidentified
MKNVKDVIGIDISKNTIDATLYHSKEHAVFSNDEEGYRDLIEWSKCHLGTAHCFYCFENTGNYSLKLSVFLSSSSLVYVEESPMRIKRSTVLTREKSDKLDSYMIARFGWMYREELEPSNVKPKAFQEIGRLLALRDQLVRDRSGLKSTLKEQRHLLSSPSTDACCKILERSIKHIDKQVLSIEKHMKELLETDDRLQQNYRLLLSIKGVGLILSCQLLYHTSNFVKFDNWRSFSSYCGIAPFEYSSGSSIRRRKQSHYIGDRKMKTLLSMAAVSAIQSDQELKNYYQRKLEQGKHKMIALNNVRNKILARSFAVIKRGTPFVNIAAVNF

SEQ ID NO: 87030 - protein, 354 aa, unidentified
MSQQLNTTIAVIGIDIGKNSFHIVGLDKPGAIALRQKWSRGQVEAHLANMPPCLIGMEACVGAHHLSRKLKALGHDARLMPAKYVRPYSKGQKNDFRDAEAIAEAVQRPTMKFVATKTTDQLDLQALHRVRERLVSQRTGIINQIRAFLLERGIAVRQGQRFLRAGLPTILTTPPDVLSPRMVRIIEGLASNWRRLDERIEGLSSEIKAIACQDSSCERLMSVPGIGPIISSAMVAAIGTGDTFSKGRDYAAWLGLVPKQMSTGDRTILGKISKRGNRYLRVLFVQAAWVVLIKPKSWQRHGLKPWIEAAKKRLHRNVLAIALANKLARIAWSVLAHGRGFEASTINDTATQPA

SEQ ID NO: 87031 - protein, 355 aa, unidentified
MTSTKYIGMDVHKESISIAVTNAAGKIVMESVIETKANMILQLIDGLRGDLQVTFEEGTSAAWLYDLLKPHVTKLVVCDPRKNRSMREGNQNDKIDARRLAELLRLNHLSPVYHGEHGLRTLKELVRSYLTVTKDLGRVMSRVKAIYRSWAIACSGKQVYAPRHRAEWLGKITEPGVRRRAEFYYQQLDALRLLRQEVRRDLLAESKKHKTWKRLRQIPSIGPIRSAVLLGILQTPHRFRSKRQLWTYSGFGIETQSSADHRKVNGQLQRAKKQAAIRGLNRNCNHDLKNLFKGAAIVASSKPGPLQEFYSALLSKGIRPEMARLTLARKIATIVLIVWKRGVCFDAQHLKPQTA

SEQ ID NO: 87032 - protein, 337 aa, unidentified
MNITHVGIDLAKTVFQVHAVDETGKTVVRRQLKRSQLLAYFAQLPACQVGMESCGGAHHWARELAALGHEAKLMAPQFVAPYRKGGKNDGNDAQAICEALGRPTMHFVAVKSAEQQAVLVVHRARELLVRERTALVNQVRGLLAEFGIVVAVGVAALRRRLPEVLEDGDNALPALVREVLGELQERLLDIETRVGHYDRRIAALAKEMEAAKRLMAVEGIGPVTATALVASVGDARVFGNARQFAAWLGLVPRQYSSGGKTRLGRITKRGDVYLRTLLIHGARALMRHLEGREDAKSRWVRAVHERRGFHKAAVALAAKNARIVWALLARGSEYRVV

SEQ ID NO: 87033 - protein, 333 aa, unidentified
MEKKWFIGIDISKKTLDVVIYVPTKKHADETNYERFLNKEEGYKSLLCWLKKKNMAKKRLVISMENTGIYSFDLCLFLEAASIDYCSFNPLHLKRSLGWVRGKNARVDAERIAYFAYLHRDELSYSKLSGSSIIRLRDFAAERKRFVKQQAEYKGFLTDRKDCEMTSTIERAAHMVKILDEEIASVEEEMLQIINSDPSILRNYELLNSIKGIGTINAMNTIIHTNNFQAFETARQYACYLGIAPFEHSSGTSIKGKTRVYPTGAKLLKADLSQAANSAIVWDKEMKKYYERKRKEGKAYGVVLNAVKFKLVGRMFAVVKRGTPFVELMTYKK

SEQ ID NO: 87034 - protein, 323 aa, unidentified
MQGQKSPERSAQPGVYVGVDVCKDWLDVYLHPVGQKFRVSNTSVGLKALKRRLAELPVELIVMEATAKFHRQAHRTLHAAGFAVAVVNPLRARLFAEAVGQLAKTDRLDARVLALMGQALEPSALAPAPEAIEALQELARARSAAKADQTALLNRRGASQTAFLKAELGRRLKVLAGHIERLDAEIERRIGADPALKRRYDIVLTIPGVGPVAAVALVIGLPELGACSGKAASLLAGLAPLARDSGVKAGERHIWGGRAFVRTGLYFAAVAATTCNPQLREDYQRLRDAGKKAKVAITAIMRKLIVLANVLIKEDRPWQPIHA

SEQ ID NO: 87035 - protein, 406 aa, unidentified
MNMNAVGIDVSKRKSTVAILRPGGRVVVKPFDIPHLSANFQSLEKLIRELDGETRIVMECTGRYYEPVARELSQAGFFVSAVNPQIIRNFQGLDNPLRKVKTDKADSVKIARYTLDSWANLKQYSLMDGLRSQLKTMNRQFDFYMKHKTAMKNNLIGLIDQTYPGANTYFDSPAREDGSQKWVDFIDTYWHVDCVRKMSLSAFTDHYQKWCIRRKYNFSKLKAEEIYGKAKELIPVLPKDSFTKRIIKQAVDQLNAASQTVEQLRTLMNETASKLPEYPVVMAMKGVGPSLGPQLIAEIGDVTRFTHKSAITAFAGVDPGVNDSGDYSQKSVHASKHGSPVLRKTLFQIMNILIKTKPDDAVYRFMDKKRSEGKPYYVYMTAGANKFLRIYYGRVKEYLSSLPESE

SEQ ID NO: 87036 - protein, 426 aa, unidentified
MKVSGRSIGLDVHRDFCEVAIAQDGEVRSAGRVETSPERLELFAASLDPRDRVALEVSSGAWEVARILEGHVARVVVVSPADTGISQARAKTDRLDARTLARLLAAGELDAVWTPDERCRVMRRRLSRREQLVRARSRAKNEIHAVLMRRLKGKPPVTDLFGAKGRRWLGSLELPVEESETMQECLRHIEFLDGEIAAVEGLIAGEALRSAEIKRLMSVPGVNVICAATFIATVGEIGRFRTQRQLIGYLGLDPRVRQSGSTPAKSGRISKQGSASARWALVEAAWSVVRQPGPQHAFYQRVRARRGHGIAVVASARKLACLFWFLLTHGEDYAHQQPSLTAKKLRLLEIRAGAPTLKGKRTGTFATRQAMRDGERRLAEQAEASYTRMVRDWQAAGAKKQGASVTPGRASQKPTKGKVTRQTTSP

SEQ ID NO: 87037 - protein, 370 aa, unidentified
MEHPTTLFVGLDVHKDSISVAHVPEDRSADVTFVGPIGTRQCDIDRLVRRLQSKASRLIFAYEAGPCGYVLHRYLTRKGLTCLVVAPSLIPKKSGDRVKTDRRDAVQLARLLRSGDLTSVYVPTVEDEAIRDLTRAREDALKDLKAAKLRLKSFLLRLGITYVGKANWNEAHLRYLAKVVCPTPVQQIVFQEYLRTVSEQVERLGRFDIELSEQVPSWRLYPVVIALQALRGVQDTVAVTTLAEIGDLTRFTNPRQLAAYLGLTPSEHTTGGKRRLGSITKTGNGHARRALVEGAWAYRFPAKVSESIQKRLEKLPKPIQDIAWKAQVRLCKRYRRLIARGKHPNVAVVAIARELVAFMWAIAKEVPIAA

SEQ ID NO: 87038 - protein, 340 aa, unidentified
MSIVMGLDQHRAQISAEWIDTITAEVSRARIVPADRAGVRKFLARFRGEGLEVALEATTGWRFVVEELERIDAEVHLAEPAEAAALKGKKKRAKTDWADARHLRELLLIGRLPESWIPPVHILDLRARVRTRHLLSHQRTEWQQRMHSVLYHHGFPQRRNLLSLDSRQWIAGLRLPAAAREQLDIALGIVDALDIRLVPFDSELHAIARKQPGCRALIEQIYGVGALTAVTILAELGDVRRFQNSRDVVRYGGLDITVYQSDDHRAPGHLSRQGLPALRWALYEAAQRARFPASPDRAYYQRLAARIGGNRACLALSRKLLKRSYHILKDLGDQALAPVA

SEQ ID NO: 87039 - protein, 342 aa, unidentified
MQITTIGLDIAKNVFQVHGIDAAEKVVVRKQLRRGQILGFFEALPRCLVGMEACATSHYWARELTKLGHQVRLMPAKDVKAYVKRNKNDAADAEAICEAVRRPTMRFVQIKSVEQQGQLMLHRARDLLMRQRTQLINALRAHMAELGIVAAQGREGVKELVKIIASEQDARLPVDAHTSLVVLAAGLQALQTMIGSIERRIIAQHRSDEASKRLRSIPGIGIVGATAIAATVPDPKVFRSGRDFAAWIGIVPREDSTGGKHKLGPISKRGDQYLRRILVVGAHAVLKRARHQPEKYPWVTRLLERKPFTVVAVAVANKMARVAWALLARGGSYRAPAFAAAA

SEQ ID NO: 87040 - protein, 318 aa, unidentified
MSSAAPAFVGIDVAKAELVITIRPSGEHWTIANDVAGIHTLGQRVRGHAPTLIVLEATGGYERAAVAALAAAQLPVVVATPRQVRDFARATGQLAKTDRIDADILALFAERVRPAPRALPDDAAQALDALLTRRRQVLEMLIAERNRLEHAVPTVRRGITQHIRWLERQLADVDRDLDDTIQASPVWRATENLLRSTPGVGPVLSRTLIGELPELGTLPRKQIAALVGVAPLARDRGTLKHKRLVWGGRAPVRAALFMAALVGTRCNPVLRAFYRRLLEAGKPKNVALTACMRKLLTILNAMMRTNTAWRHIDLSPTT

SEQ ID NO: 87041 - protein, 339 aa, unidentified
MRLYTAFDLHSNNNVLTILDENDHVVFERRLPNERREVLAHLAPYRESIEAIAVESTYNWYWLVDELMDAGYTVKLVNTVAVKVYDGLKYTSDEHDARHLAHLLRLGILPTGYIYPKEERAVRDLLRKRSQLVRYRTAQILSIQNLVSRDTGHGIKTDQIRELDEEMIRQLSDNDEDRAMAVRSNLEVMRCLDGQIRILERAVLAKAKLKPSFEKLLTVPGIGNILGLTIMYEAGDVGRFAKVGQFASYARCVQSSRWSNNKKKGEGNRKNGNKYLGWAFVEAANFTVRYSECARRFFQRKKAKTKAVVALKAVAHKLARACYHVLKDQVSFDESRAFA

SEQ ID NO: 87042 - protein, 373 aa, unidentified
MPKYSTAFGMDVHLRSTTVCALDADTGEAVTRRFPGNPWGEIAGWMDGFPGPSLAAYESGYLGFAPQRELSGLGVDCVVAAVSKVPRSAADSASKNDRNDAARMAKAILAHDISPAWVPSPEVEGIRDLAGAYDGATARLATAKQRLLAFLAKRGFVYGGTTPAGNPRKYWTYDFLRWLDKVRPEDDGGVRALAALRNEVEAAAEARADLLSEYRAAVDASPIAAEVAALQSIKGCAFALAAAFSAEVGDFTRFRSGRQVTAYFGLAPSQRSSGDSVRLGGISGAGNALVRKLAVEGSWCYAAARHQPKLMPRDTGVPLEIRMHGRKGSERLLRRREEMLARGVPAAKANAATAAELVRWLWALGMMCREGAE

SEQ ID NO: 87043 - protein, 387 aa, unidentified
MPQFDDLSRSLVAFDQDATLIVVVEMSEASWLVAGMAPGVDRQPLKKLGPDPDALLRLVERWRDEAVKAGKMIERIALAFEAGRDGFWLAPWLQARGIEVHVIQSTSVAVSREHRRAKTDRLDTAMLRRVFLGWLRSERGHCGMVAIPTLEDEDARRPSRERESLVGERTRIINRMKAILAWLGVRGFNPKLRKAPQRLDDLRTPEDLPLPPDTVDELRRDMARLAMVCEQIKALEQARLTNLEQAPGTGPHAMVRLIANVIGVGIETADMLVQEVLSRNLRDRRAVARFAGLTGAPNESGSRRRERGLAKSGNARVRRGLIQLAWRFLRFQKDSALAQWYRARTEGPAAARRTKMIVALARKLLIAFWRMVTVGEIPAGFALRQPA

SEQ ID NO: 87044 - protein, 347 aa, unidentified
MGNPEVGRVDVCGLDVSAKELVAMVRREGKTEACRTFPNTRQGHRDLQRYLTQQRERVRVCMEATGMYGLDAALALRADPRIELMVANPRAVKSFSRALLQRSKTDPLDAWGLLEYAARMPFQPWQPPPAEALQITALARRIHALTRQCTREKNRLHAVAATATTLRVIVQDLRRSVRGLESAITKLSREAHKILAATPELERRFLRLQSTPGIGPVRALQLLGELVLIPANCDVRQWVAYAGLDPRHHESGTSVHQKARISKVGNRHIRRALSMPALTAVRFAPQLRAFYLHLQARGKCKMVALVAVMRKLLHAIFGMFKHDAPFDGAKLCPTLTLAAQPEAACAA

SEQ ID NO: 87045 - protein, 400 aa, unidentified
MNAVGIDVSKGKSTVAIMRPFGEVVAEPFEVSHTDAELRKLACFLEKLPGETRIVMEYTGNYWQPIAKVLHDAGLFVSIVNALLIYKYGNNSIRKGKTDKLDAVKIANYCLDRWTGLERYTPVDQIRQALKTCRRQYDQYIRLKVNLKNNLIALLDGTFPGLNILFKSAPRDMDGHEKWVDFAEKFWHRECICGNSEKAFTNQYKKWCAKAGYRFSEEKASSIYAHAVSQVNTLPMTDSIKRLVTLAVSQLNTIIETISVIQHEMLTLAAQLPEYPVVMRMFGVGPVLGPQLMAEIGDVRRFDRKQSLVAFAGVDAPPCQSGTFESKNRHISKRGSPRLRKTLFQVMSTIIQHAPADDPVFQFLDRKRREGKHYYVYMTAAANKFLRIYYGTVIAYLEKL

SEQ ID NO: 87046 - protein, 378 aa, unidentified
MGQAGGRLFALEARSSCHPLVCPRQHLMERGTPPPPLFYSNSCLSGFQKPARITRMSKKNSHDVAFTYFGVDVSKSHLDVATCEDCKSQRMANTPDGIHAIVLRMAAADHPMVVLEASGGYEKDLLDALEQAGIPFRLVNPRNARNFARACGVQAKNDNIDARMLARFGLRHQLLPQGRPAAAIRRLADLEQLRDDLIKNALATECRIQQSRDAFIRKTHQDQLRALHESIAEVDREIEASVTANEEANALRNAYQQVKGVGPRVSTKLVALMPELGRVDRRQIASLAGVAPFDCESGAWKGKRSCHGGRRVLRKNLYMAALVASRYNEHAKAFYSRLVQNGKPKKVALMAVARKLLCHLNSIASAVLKALNEPSTTS

SEQ ID NO: 87047 - protein, 383 aa, unidentified
MSATTRFTDPTLPEPPALYLALELSNRSWKLAFSTGHGQKPRFRNVPARDLDALTREIALARRRFELPDSVPVISCFEAGRDGFWIHRFLQTQPHGFNLVVDSASIEVNRRFRRLKTDRIDAQKLVTMLIRYHNGELRVWSVVHVPSPQAEDARHLHRELLTLKADRTRITNRIKGLLAAQGLSVSSLNRGFLDQLDDLRLFDDSPLYPQLHQRLEREWLHRRDVSQRIRLIEKLQTTRLEAPAHDPALDLVRQLMTLKGIGLQSAWLFTFEFFAWRNIQSRKEITALSGLAPSPYQSGDEARDQGISKAGSSSVRTMAIQIAWGWIRFQPDSELTRWFERRFAHGGRRMRAIGIVAVSRRLLIDLWRFLETGSIPEGAITSP

SEQ ID NO: 87048 - protein, 368 aa, unidentified
MNTKSVNVSTKRVNANGPILAIDLGKYKSVACIYERAEPSWQLTSFPTNRAELIKLLDKHQPSVVVIEACALCGWVLDLCAERGLSCKVANTTSEAWKFKHSKRKTDKDDALRLAQLEALGQLPTVAIPPKATRQWRALIALRQSLVGRRVAVQNRIRSILVGQGLTAPCGAKAWSALGLQGMGRLARPLEACGADELWQGMLELALTDYRQISALVEQAEKRLDALGKADQDVQRLQTIAGVGPRTAEAVVAHLHEPKRFRTGKQVSAYAGMVPRQFQSGETDHRGRISKRGPRLLRKLLVECAWCLLRYNSWAQAVWQRLTRGGKVRRKQALVALARKLLVRCWAMLRDGTCWRDDPPAEPAATPA

SEQ ID NO: 87049 - protein, 451 aa, unidentified
MSRRTPQDSDPTLHIVHPHAAAVDVHSDIHVACVGPGQVRTFGAYSADLDALADWFRAAGVTSVVLESTGVYWIALFELLEGRGFEVFLIEPSQASHCGARPKTDRLDCQWLQRLHTYGLLRPSFRPPDAVLALRGYWRQRQMLVRYASHHVQHMQKALEQMNVKLTEVVSSIVGVTGTAILAAILAGERDPKRLAALRHERCARSEEEIARALEGTWRPEHQFALKQAFELYEYLHRQIDECDRQIARELDRLPDRSDAEGIATTPRRRGRKPNDVRFDATAKLTRALGVDVTAIEGIDAATALVILAEIGVDVARFPSEKHFASWLGLCPRTARSNKTEKRRTPRKGKNRVAQALRMAAQAVGRTQTALGVFYRRIKSRIGGRGAITATAHKLSRLVYRMLKFGTEYVAQSLLEYEAKVREKLERSVRRKAQALGYELVPRGPASPAPS

SEQ ID NO: 87050 - protein, 315 aa, unidentified
MGGVNAAIEVGKQQLVVRLGSDGEQFSELNEVRAIKRIARRLLQAGCARVLIEGGSYQSALIAGLRAAELPVVVVNPRRVREFAKSIGQLAKTDEIDARVLALYGERTQPPLRELPDEQSQALRALWVRREQLIEMLVMEENRLEHAPEKAKAVRHNLRAHIDYLRKQIKQADDDLDREVHNSALWDKYEMLSSVPGVGLVLSVALLSDLPELGRLSRGEIAALAGVAPFNCDSGTLRGQRRIEGGRPRVRRVLYVATLAAVRCNPVLKPFYLRLRAAGKPAKVALVAAARKLLTILNLMLKTKTVWRPPCQAAT

SEQ ID NO: 87051 - protein, 326 aa, unidentified
MNKYCVGIDIAKQTFVTAIKVGDKFKTKSFGNNAKGFAQLLNWVKPPKGSQPHYCMEATGKYGNALALFLHDNKHRVSIVNPMRIKRYMESLGVRTKTDDSDAKNIQLYCVATNLSLWQPKSETITLLQQLVRRIDTLTGIISQEKNRKECVDEFTLTSINKHIIYLKKEIAEHEATVKQLINSDAKLKTKAKLLRTIPGVGIKTTNKALAFLSNVEDFSEANKLVAFLGLNPKIERSGSSLNRSSLAKTGNAYCRKMFYMPAVVAIQHNQALVLFYNRLLKKGKAKKAALCAVMRKLVRIIYGVLKSKKPYDHKLVIAKKKLASH

SEQ ID NO: 87052 - protein, 416 aa, unidentified
MNAAGIDVSSRKSTVAVLRPFGEVVRLPFDVAHNTEGLASLAEQLKALDGETRVVLEHTGRYYEPVAKALHEAGLYVSAVNPLLIKEYGANSLRRVKTDKADAVKIARYALDNWADLRDYTPMDTIRYDLKTLNRQFQLASKQRTASANNLIALLEQSFPGIRKCFDSPVRSDGTQKWVDFIHTFWHVECVRKQSLNAFSERYRKWCKRHGYIFKQGNAVEVYSLAKNAVVLVPKSEVTKVLVQEAANQLTSISRSVEIYRAEMERLASTLPEYPVVMAMYGVGKSFGPQLMAEIGDVRRFERKQSLVAFAGIDPMPNQSGDKNVRSNKSSKRGSPYLRKTLFNIMGIYLKCSPQDEPVYQFLDHKRSEGKPFYVYMTAASNKFLRRYYAQVRDYLSTLDNLPPVDMDSTGLKPSD

SEQ ID NO: 87053 - protein, 346 aa, unidentified
MEHYAAIDVSLEWSSVCIVDANGRIVREAKVRSEREALVGLLQDSGLRFARIGLEAGPLSQWLHAGLVEAGWPAVCIETRHVKAALKAMTVKTDKNDARGMAQLMRMGWFRPVHVKAPMVQEIRALLTARKLLVAKLRDVESSIRGILRGFGLKVGAVSKGKFEARINELVAGQARLERVVGPLLRARAALRAEYATLHGELLKVVREDEVCRRLMPIPGVGAVVAMTFRSAIDQPERFAHSRSVGAHFGLVPRKYQSGEIDRTGRISKVGDAMVRTALFEAANVMLTRAVRFSALKAWAMRVANRQGAKKAKVALARKLAVVMHRMWLEGTEFRWGRQATPAAAA

SEQ ID NO: 87054 - protein, 428 aa, unidentified
MSTFRSTLVPPAVLVAIDVAKDRSQVLVEYPNGSHKSLTIRHTHEDVGQLMRALKRFKSPIRAAFEATGDYHRPLAAMLAAHSVELHLVSSIATNRTREALYNTWDKNDPRDAQVILHLLKTGSTQIYHDAFLNAYDDLQELSNTYYTVSTRKTRMYHTLVTHYLPLYFPEAEPYISSSRCEWFIRVLMMAPCPAVILRYSKRAFIEAAAAIQYRKFDRSRWLGDLYEAAKTSAGVPVTDQSEAVAMFRLVLEEYLHVCRLREAIEQRITQRMCNHPDYLRLQTIPGVGPVLALTILAEGGDLRRFAHYRQFLKYCGFDLATEQSGKARGTTRLSKRGNARLRCAFWMAGVVAIHKRENTFRAKYEAYVKDNPKNPDLKRKAYTAVAAKVARVAHALIKHGADYRRFNAAIPSGRTSSQRAVEALATS

SEQ ID NO: 87055 - protein, 338 aa, unidentified
MALKTIGLDTAKHVFQVHGLDEQGRAVLRKRLRRDQISDFFGSLPRCVVGLEATQGSHYWARVIGSYGHEVRLIAPQFVKPYLKGQKNDARDAAAICEAVGRPEMRFVPKKSVEQQDLQALHRIRSRLVGSRTQLGNQIRGLLAEYGIILPLHLSQVRQQLPVLFSEEHPLLTFFSRELFASLYEELCALDERIEAMEERIQRVFAGNERCQKIAAIEGVGPVTATAIVAAVADARVFRNGRQLAAWLGLVPRQHSSGDKQRLLGITKRGDPYLRMLLIHGARSVVYRASTKTDSRSRWIAEKQQKLGTTKACVAVANKNARIIWALLAKDESYRAAA

SEQ ID NO: 87056 - protein, 338 aa, unidentified
MAIVTVGIDIAKSVFAVHGVDEAGKVQLRQPKVARAKLNALMAELPPCTIGIEACTGAHYWARQFQAHGHTVKLMAPKLVAPYRMSGKRGKNDAADAAAICEAVSRANMRFVPAKTEDQQARLMVHRARQGYVTARTATINRIRGLLAEFGVVLPLKAEVVRREAANKLEELPGYANLVIGDLLSEVHHLDERIGQYDIHIRTMARQSTPAQQLMQLMGIGEVTATALVATVGNAREFGSSRQFAAWLGLVPGQYSSGGKTRLGGITKAGDAYLRGLLVIGARAVLNAAASKNDRLSRWAMKVAQRRGYWKAVVAIAAKNARMAWAVLTKAENFKVPA

SEQ ID NO: 87057 - protein, 410 aa, unidentified
MTEAAYQIYVGIDWGSHTHQVAVLDTARRLIGERAVSHDGLALQALASWLADLAPPGAVAVAIEVPHGAVVDTLLERGIEVYALNPRQMDRFRDRYTVAGAKDDRRDAQVLAAALLTDRPAFRRLQPDDPLVVQLRELTRMDAELHEEIRRLANRVREQLLRFYPQALTLCPAADEPWFWALLTLLPTPMAAARRRRGPVAALLREYRIRRVTADEVLTVLRRPPLTVAPGTIEAAGAHIALLLPRLELAATQRRLCAHRLEALLETLAAAGEHQGHRDVTILRSFPGVGRTVAATMLAEASQLLATRDYHRLRTYAGIAPVTRQSGTHRGVHMRYACNLRLRNALYYWGFIAARHDPATHQHYQTLRARGHSQGRALRGVADRLLLVLMAMLKSQTLYDAARRRAQVAA

SEQ ID NO: 87058 - protein, 310 aa, unidentified
MTKRIIGIDIAKQKADAYDLQHQKHQTIEAENYAEWVDTLAKDKPDLVVMEATGGYERVLAGFLAAAGIPLAVVNPRQVRDYAKATNQLAKTDKIDARVIARFAEAVQIEAKPLVDAATQTLRDLMERRRQLVAMRVAESNRKAQAEHPRVKRDIDAMLLFIDRQLAKLDEDLDRDIHDSPAWREAEDLLSSVPGVGKVTARTLLSEMPELGHANRREIASLAGLAPFNCDSGQYRGQRRIRGGRSQVRRVLYMAAVSASRFNPSIRRFYHHLRESGKPAKVALTACMRKLLLLLNRILKNKTPFEAKTT

SEQ ID NO: 87059 - protein, 418 aa, unidentified
MDDQVRWFVGFDWASEQHRVCLLDADGKCVAERDVKHEGAALSELGAWLLDKSGAPPGEIGVAIEAPRGPVVEALLEHGFQVFAINPKQLDRFRDRFTVVGAKDDSRDAYVLGSSLRTDPHAFRRLSVDDPLVIELREWSRMHDELVQERTRLANRLRGQLWRYYPQAGELTDDVAANWFLELWQQVPTPEQAAQVREKAIARILNRHRIRRLDATTVLGILRKPALPVGPGSIKAATAHIRIIAARVRLINQQIKEAGQRLDQLCGEIEAAAENRPGQICEQRDVEILRSCPGLGRINIATLLAEACEPLRRRDYHVLRVLSGAAPVTRRSGKSYIVLRRHACNTRLAQALYHWARVAAQQDPISRQRYAELRRRGHSHGRALRGVGDRLLYVLCTLLERQTLFDPNHNAAQAAAAA

SEQ ID NO: 87060 - protein, 333 aa, unidentified
MVEGTKGSHHKEGSKKMSKNSTVCAGIDTGKYKLDVAIDESADQLQVDNSPAGYRCLSAWLRQREVERIGIEASGGYEQAVVSFLRADGFVVIVFQPVQVRAYAKFVLQHAKNDNIDAVLIARCTAAATDIHEPPDARLAPLAQRLTMIEQLTQDVAQVKTRREACWDQRIREFWKQEIDRFKRLLQAELKQLVAAIREHRDLSTRLDLIASVDGIGLRTAVAILVRMPEIGRVSREQAAAIAGLAPYDDDSGKRRGLRHIKGGRQRLRQSLYAATLPAAFYWNTQLKALYKRLIAAGKTHKLVLVACARKLLIFVNTVVARGTPWKSAPATT

SEQ ID NO: 87061 - protein, 414 aa, unidentified
MQSWSEITCYAGFDWATDHHDVVILNPSGQIVADFQIEHTAEGWQRWGEQVAALGAGLAACVETSQGFVVEQLLESGVAVYPISPASAKAYRQRKVPSGNKTDHVDAWSLADALRLDGHGWKALAKEDPLVAELRLLCRDEVALIEERTALINQLQSALREYYPAALEAFEDWALPSAWAFVEAFPTPQALVSAGKRKWEKFLHTQQLARPQTYQKRMEIFACAAEFVSGQALTRAKSRLALARVRMLRVLKSQIDSYRAEIEKLFAQHPDHDLFGSLPGAGPKIAPRLLGEIGSDRSRFEDPSALQCLAGTAPVSYQSGQIHKVYLRRHCNKLFRHAVHLWANLSRQSCPWAAVYYQQLRTRGKSHACALRCLGQRWLKILWKMWHSHTPYDAELHARNQLKHGSWVLKIQNA

SEQ ID NO: 87062 - protein, 396 aa, unidentified
METLIVGVDVSKESFSVTGLDGSGVPSFTDAFPMDADGFSKFLGTMTAQQPDISAIVVGMESTACYHINLFSYLMAHGIRAIIINPLLIANFTKLTLRKTKTDKKDASTIAQFLFIHRDTINQMSLSQDMQDMRDLARERESIAQLISAGKSEIKRVLQTTFPELERLCDVYTGIMLAFLKDFPSARLIRMSKRQEIVKALEPRGQGNRISTFTADDVINLAKNSVGLVSPAKEVILRGKISTLLHLEDRQAELTHMLTNYCTSLLVEDLKIVTSVEGISNGTGTTFLAELGDIANYENHKKLIAYAGIDPTVYQSGKYQGTSRISKRGNKHLRRVLWLMTVNVIHHNDIFKDYYQKKKQAGLPYKKAVLATMHKLTRMLFAMLSHKQQYVKTLVN

SEQ ID NO: 87063 - protein, 383 aa, unidentified
MNSSNKNKKRTGQTVTPSVVGDRAKARVVPSLLPKSSNSCLGYPSPHVTQGRATLEPVQIIKEDCILEVSLIFVGIDVSKAQLDVAIRPTAQTLSVTNDKAGIKILVKHLEKLEPTLVVLESTGGLERQVMLALIGTEIPVVMANPRQVRDFPKATGQLAKTDRIDAAVLAHYAEAIRPKPRPLPDELTLELRALTVRRRQIIDMIVAEKNHLATASKAIKKRITAHITYLEQELDRADQDLDRFIQKNPTWKDNQEILCSTPSIGPVSSRTLVAELPELGTLGRKQISALVGVAPFPRDSGTLKGRRTIWGGRASVRSALFMATLSATRFNSVIRDFYKRLKAKGKPSKVALVACMHKLLTILNAMIKNKTRWSETFSHQTT

SEQ ID NO: 87064 - protein, 447 aa, unidentified
MQSKDLNSGIFEILHPNAAGIDIASQMHYVAVPTDRDEQSVRKFGSFTEDLHDMARWLKLCKIDTVAMESTGVYWVQPFLVLEEHGFDVYLVNARHLKHVSGRKSDIKDCQWIQQLHSYGLLNKSFQPEDLMRELRTYVRQRKNLTQGYSTQVLLMQKAFDQMNIKLHNVISDITGKSGLLMIDAILKGERDAQVLAELADRRIKATKEDIVKSLQGIWRQDNLFELKQAYELYLVFRDKIVDCDKQIENVLKQIVDQSNETPNSSQKRKANGKNKFNFNASDYFKVISGVDLTEIFGISELSVAEIVSETGTDMTKWVTEKHFTSWLNLAPNTRTSGGKRLKSKPIKKKNKAGQAFLIAASSLKASNNWLGEFYRRIKAKSGSPVAIKATARKLAIIFYRMLKEKVNFSPLPIEEYNQYFKERKLKYINKQATSYGFKLVPLELVS

SEQ ID NO: 87065 - protein, 421 aa, unidentified
MIQVSHEAFAAFVGIDWADAKQDGCLQVAGSAKREYFQREHTPEAIDAWGTTLRMRCHGQPVALCLALNKGPLGSALRTYDFLVLCPIHPLTLARYREAFTPSRAKDDPTDAALQLALLLTQRDTLQPLNPQSPTMRALAQLIAHRRRVVGDTVRITNRLTSTLKNYFPHVLHGLQEKDTAIFCDFLSRWPTLKAVPLARRATLATFFRAHHVRYAEVIAQRLQAIKAAPPLPTDAGVMAPHALLVQALVAQLRGTWQALADCDTAIAQRAQSHPDFPLFQALPGAGPVFAPRLLVACGEQRERYACAADLQKYAGSAPVTERSGTKSWVHWRLQCPKFLRHTFVEWAAESLRPSFWAQVSYQQPRDKGKAHQAAVRARAFQWIRILSRCWQERTPYDAAIYRQALHRRGASLSQTLAKAS

SEQ ID NO: 87066 - protein, 357 aa, unidentified
MKYLKCIEKFVTGKAVFCGIDVHKHHWDLCYFSDGEVVERIKIPSEVERLTSHTDRFYMSASRIQFVYEAGFSGFHLYRCLVSLGYGCLITPPNRVLGVPDKVKTNKRDAENLARLFSGSFLKEVYVPNPGSESDRQLMRLRDGYQKKLSRVKNQIKSHLNLQGVRWSSEKKDTPWTKRYLEWLEGLSFEELHQAYILKQYLTEYRFFRAQIADLTKRIRQLSKSEMYQTNFKRLSGCKGVGLITAMTFLLELPDIARFKNTHAFSSYLGMTPSQHSSGEHVRLGHITREGNPHLRRVLVESAWSVIRHDPFLRQKYDRIRAKGSNGKKAIVAVARSLAIRLRRCLLDEVPYAIGVC

SEQ ID NO: 87067 - protein, 405 aa, unidentified
MPYILALDVSMGHSYSVLYKDDTCLFEDEIEHTQRGFHALLEEIQHLPERPLIVFEATGIYSRPVEKFFQDHHFSYCLLNPLEAKKQMEENTLRSWKTDKSDAHRLAQTHLKNQRQPKEVQSNFYLEMRDLARFYQEIEKKITRLRMDLHNCLQLTFPELEQFFSNRLTPYALTLIRLFPHPDFVLASTRTKIKNKLINETRKKISANRAEQKADQIIHYAQCAYPAVEKDSIHCQKTIYYAELLQDLLEQKKALATQMIKKAEGSPCFLLYQTFPGIGALTAALLLGELGDITRFKTHKQLNAFVGIDIRRYHSGKYTGQDRINKRGNPKARKIIFFTIRNMIRQQRAAPNHIVDYYYKLKKQPIPKKEKVATVACMNKLLKCMHAMVRAHTEYDYAYAVSVDH

SEQ ID NO: 87068 - protein, 421 aa, unidentified
MVKSQKIVGFDCGEDEHSAVLLDAAGKFGKRYGVANERGQIQELLAELLLGVSPDEQLVVVVESRRSHGRIVSDVAIDLGCDLRQVNTVALNHYRDLEGQPRKDDEWDAYLAARMVFLEMGGCREAVEATEEERALSRLTRTHRRLVDERRKHLARLRAVLLEMAPEMLHSSWEGPKPGRKAMLYLLERWPGFEGLERAQLRSIEKILRRCRYGSRATHVAKLIRKMARGISIAAEERHAFTLELDLLARQIRFCNESRDRLRAEIVHRVERHPVGPKLLEMQGNGPVITGVLVSELLPVARTSTEPKCATYAGVTPLSRKSGKSLDNDKLAQGVNPRVLNALYTSSVVAIKHSAIDRAYYQKKLRGYAGHPKPHVAAFIALSRQRHKLVFKLMTTDARYDKEVLIATHLKRLEQDQMAAA

SEQ ID NO: 87069 - protein, 459 aa, unidentified
MNRKQRREMARKLYVGDLSLEVVHPHAAGIDIGNQAHYVAVPPDHDNKSVRRFGCTTAELKDMAAWLKHCQIRTVAMQSTGVYWIAVYDILEAAGLEVYLVNARETKNLPGRKSDVQESQWLMKLHTYGLLRNSFRPPQEIRTMRTYWRQRNDLIRSAARHVQRMQKALTQMNIQLANVLSEVSGVTGQAIIQAILTGERDPRKLAAFRDKRVKASEEEIARSLEGNWQEDLLFMLKQEQDGYEFCQKQMSECDERLQQYLRQKEDRSKGAELPEENRKERLRKKKTNKPRFDLRTELFRMTGTDLTQIDAIDVRTAATVISEAGWDMSKWPTEHHFVSWLRLCPDNRVSGDRVIGKGRLPINNRLTVALKIAASTLRQSNTYLGAQFRRLKTRLGPPIAIKAMAAKLARLVYRMLRYGMRFIDRGAEFYEAQHRWRQINSLKRKAAAFGFKIVDAPAA

SEQ ID NO: 87070 - protein, 344 aa, unidentified
MNKYNIIAIDLAKNVFQVCKVSPQGKVLYNREISRAKLKQLLTKEKLSLVSMEACSSAHYWARYAKEAGHQVKVINARSVKGFQTRQKTDRNDALAIATASSLDHIHSIRIQSVDEQAMQSMERARNLALTNQIAQSNQIRGLLLEFGIILPQGLAVLRKEIPYVLEDAENGLPDKFRAALLRLWEHLLIQIDHVDDLTKQLEKAIKANPLCQKLMKLEGVGPIGALGLALRLGKGENFSNGRNASASIGLTPKQHSSGGKERIGHISKRSADKRLRSTLFQGALSVITQVVNRPPRTNKDQWLLALIERRGKKIAAIALANKTVRTAYAILKNDLVYQPEKLA

SEQ ID NO: 87071 - protein, 412 aa, unidentified
MSLALPDALFFTGIDWAAETHAVCVMDAAGKILAAFTIEHSADGIAMLVRRLARHGKPGDMPVAIERPNGRLVDLLLEAGHPVVPVKPNAIKTWRDGEVLSGAKSDAGDAAVIAEYLRLRQHKLKAAAPYSDETKALRTVVRARDDLVEMRVAATNQLSALLDAHWPGARAIFADVESPISLEFLTSYPTPASARHLGEKRIAAFCAKHGYSGRRTAAQLLERLRHAPAGITGEALTEALRDAVLAAVGVLAALNTSVKNLDRSTAAHLGEHPDGAIFTSLPRSGQVNAAQVLAEWGDCRQAYEHPDSVAALAGCTPVTKESGKHRAVHFRWACNKRFRKAITTFADNSRHASPWAAKIYNDARASGKDHPHAVRVLARAWIRVIWRCWLDNIPYDPAKHGAAATLIEPKAA

SEQ ID NO: 87072 - protein, 317 aa, unidentified
MDKPPAATCFVGIDVSKGHVDVHVRPDGTAFSCTTDPDGLANLITRLAPLQPQLVAMEASGGYEAVIAAALTEAGLPVAIVNPRQVRKFAGAIGRLAKTDAIDAGVIAHFADAIRPAPKPMPDALMLRVRELLARRRQLVVMVNAEKQRLGKAADKLAQRSFKTILRSLEAERARIDRAIDTLIQQSPLFCAKQDLLKSVPGIGDIVARTLIVELPELGSVDRHQIAALAGVAPMNRDSGRYRGKRRIQGGRVEVRAPLFMACLTAIRHNPPLRSFYRRLRDAGKPARLAIVAVMRKLLTTLNAIIRDNTAWTHVHI

SEQ ID NO: 87073 - protein, 340 aa, unidentified
MQSPRHIGIDLHRNQFTCCVRLENGRNYLTDWKLEDLPRFVKKLRRNDEIAVEVTGNTRLFHDAVAPYVRRVVAVDPNQFKVISHSVKKTDPNDARNLALYLEKDLLPEVRMKDKAQAQLASLTQTRDTLVKLRTALKNKINNILSAQGINLEKEALSSEKKLKEVLAMRFDPMIQIELKVIVEQIRSLNQSIAELEKTIADEGSKLEGHKNLTSIKGIGPLTGSILLSVIGDINDFDDEGKLAAYFGIVPRVSNSNETERSGRITKRGSKLGRTALVQCALIAQRYSPYLKRHYEQIKARRGTGKAIIASARKLLGIIYRTLKNKWVFEDFPNFVLAEA

SEQ ID NO: 87074 - protein, 388 aa, unidentified
MEVLYPVCCALDVHQASVTACLRAPGDGPQRRQQVRTFGTTTPELLRLAGWLTAAGCTHVAMESTGIYWRPVYNILEGRFELSLVNAQHVKMVPGRKTDVRDSEWLAQPLELGLLRRSFVPPAAQRELRDLVRYRKRLIEERAREANRVQKVLETANIKLASVVTTVLGVSARAMLKALIAGEQAPEQLADLAQRRLRRKRAALGEALTGRVTAHHRFLLDHLLRHIEFLDGAIAACDRQVETLTAPHAEALTQLDTIPGVARRTAEVIAAELGCDMTRFPTAGHAASWTGLCPGNHESAGKRLSGRTRHANRTLRQALVESARGAVRKRDSYLAAQYRRLVKRRGDKKAIVAVAHSILVIAFHVLRDGQPYRELGADYFERLKALGV

SEQ ID NO: 87075 - protein, 368 aa, unidentified
MSKTGSKRMCVGVDLHKTQFTVCALDEETGAIELEGEFRTNANGYADFINRMHEIEGESGHVIELAVESTGNARFFKNKMEAEGFSVVVVNTNKFKVITMSTKKNDANDAATLAFYLLKEMLPESHLCDQTSEEIRRMLKTRSILVQAMVKMKNQIHGMMLGYGIETKSSQLQSKKKRQELYQDLADHNFSEFTASSLKVILDSLDDLQKQIKTIEEQLQKMVAENQNVELLQTMPGIGPIGAITIAAYTNDMGRFDGNFKRFASYLGIVPSVHDSNQTVRRGKITKHGPQELRTAFVQVAMGIIRQPQNTSEWKLMIDYYRMKKEKGSGRAIITLTRKIARIVFAMLNNQEEFNPALMIREKTKLTA

SEQ ID NO: 87076 - protein, 349 aa, unidentified
MWIIGCDFHPAWQQLSFFDPETGEIGERKLVNGNGEAERFYRGLPAPSLVGIEACGNSQWFVDLLQRLGHEVWVGDAAEIRARNVRRQKTDRRDAAHILQLLREDRFPKIWMPTAAERDVRQLLIHRHKLVEIRSRVKNGLQHLMLNQGVQKKHRLWSEAGQQALRELPLQGWVARRRADLLGLLASLDKQIAPLEMAVKQVAEQDATARLLMTQPGVGPITGLAFAVTIGDARRFRRGKEVASYLGLIPWEDSSGERRRLGAISKQGNRFMRMLLVEAAQSAVRHDEGLRKQYQQRCHRMAKGVAKVAAARKLAVRLFWMMRTETAYPEIVRIESSPRVPVVDRVSDR

SEQ ID NO: 87077 - protein, 314 aa, unidentified
MILPLRCVGIDVSKHTLDIFDDAVGQAERIANAPQPITAQVARWRCGNVFVVFEATGVYDRELAEVLHRADVRFARINPARARDFARACGRLAKTDAIDAQMLAGFARTMAPACEPAPDPARNALSLLAKRRDQLVHMRAQEKNRRSESRDAIMIESIVRFIDFLDEEVAAIETRIKALIRDDPTISDDARLIRSVPGVGPVACMQLIAQMPELGCLGPKQVAALAGLAPLNVDSGLYRGKRAIGGGRKRVRDALYMAALNAVRRDGSIKAFYQKLRTAGKPAKLALIAVARKLLTILNAMLRDRKTYLAPKPL

SEQ ID NO: 87078 - protein, 345 aa, unidentified
MHIASIGIDLGKTTFHLVALGERNKVLVRKKFSRSQLLAYTANLPSSLIGLEACAGAHFVGTALREQGHQVRLIPAQFVKPYRKSNKNDFLDAEAIAEAVTKQNMRFAQLKTQEQLDWQAMHRVRDRLVQRRTALINEIRGFLLERGITFAAQPIHLRKNLPAVIEDAERNLSPRLRWLLERMWQEWKQIEIDVRAITDEIERISNDDARCRRLRQISGFGPLISTATVAAIGNGSAFRRGRDFAAWVGVVPRQHSTGGKQKLYGISKRGNVYLRRMLIHGARSVLFRVKYDTGGFGQWVHRLAQRAPRNKVVVAIANKLARIAWAVLSSGRDYRHQPLRQLPAA

SEQ ID NO: 87079 - protein, 342 aa, unidentified
MNYYAGIDVSLECSSVAAVEASGKIVREGKVASEPAALIEWFAGVELRMERIGLEAGPQSQWLYGELREAGLAVELIETRHVRNAFKTMAVKTDRKDARGIAELMRVGWFRPVHCKSIAAQEVRVMLTARSLVQSKLQDVEASLRGMLRGFGLKVRRTTPNRLAERIRQLVCGHPNLEVIAQSLLAVHEVLLREFKGLEKRVRGAARSDARARLLTTIPSVGAIVSLTYACAIDDPGRFKSSKRVGAHFGITPRRYQSGEIDYSGRISKTGDKSVRTALYQAAHIMLTKPVKASALKSWAMRLARRVGMQKAKVALARKLAVVMHRMLVDGKPFDFAAGAAA

SEQ ID NO: 87080 - protein, 350 aa, unidentified
MVIIGGDSHKRTHTFVAVDEVGRRLGQKTVPATTEGHLVALRWAQQWEERQWAFEDCRHLTRRLESDMLRAGESIVRVPPKMMAAERRGTRSPGKSDPIDAEAVARAALRVPYLPVARLEGESRRVKLLVDHREDLVAERTRMQARVRWHLHELMPELELAPKALGKFKHLDRVAALLANIDGTVAEIARELIVRIRELTIRCNELEREITRIIRTLAPTLLALPGCGPLTAAKVVGETAGADRFKSRAAFARWNGTAPIPAWSGSERFRLSRSGNRQVNAALHRIAVTQWRGVGPGQAFIEQRMAEGKTKTAAIRLLRRRLSDEVLRRLRSDQAARAQTDPHQEFASAA

SEQ ID NO: 87081 - protein, 409 aa, unidentified
MKVLFERCAGLDVHKDVVVGCVRILEEGGRARYEVRRFSTMTAGLLELGDWLRGWGCTHAAMESTGVYWRPVWHVLEGEFELVLANAAHIRNVPGRKSDVNDATWIADLLAHGLIRASFVPPGAIQEVRDLTRTRRQLVRQVGQHSQRIQKVLEDANVKLGSVISDVLGESGRRILKAIVVGETDPERLASLGSERLHCPREELVEALRGKLTKHHRFLLDQHLSTIEHLEGSVRDFEAQIEAALEPFRADVERLTTIPGISRIAAQVIVAEIGTDMSRFPTAQDLISWAGLCPGLNESAGKRMSTRIRKGAPWLKPVLVQCAWAAARSKNTYLQAQYLRLKSRRGPKKAAVAVAASILTAAYYMLLRAAPYQDLGPAHFTVRDRALVAQRLARRIRDLGYEVEIRKAA

SEQ ID NO: 87082 - protein, 338 aa, unidentified
MYYTGIDLHKFTSYLTTVDSSGAIVKQENLKNVAHNFIQYFSSIPGEHKTTVESTMTWYWLNDLLTSINIPLVLAHAKYVKAIAYAKVKTDKVDSHTLAQLLRMNFIPVAYKISNDKRLLRDALRARLKIVQRHTSVTNSMQFLLAKYNYDSPTELSGIPEFQYEQLSEVEQLLSEQMLDLEKQLYPSLIPDDDIQRLLWIPGIGKMNAFTILLEVDNINRFPDVKNFFSYCRLVPSARNSGGKSKQRSSKDGNKYLKVAFSDAAVHAVHYYPVIRKHNNSLIRKKNKQIAKTIIAKEIAEIVYHVLKNKTDFNNKFKGKELEHKKSLQWPRVVSPYA

SEQ ID NO: 87083 - protein, 415 aa, unidentified
MEGLSPLHRRVAGIDVHRMLHVVTVLIEQPDGSMAKHSREFGGFKRDCRALAAWLRELQVELVVMESTGIYWKSVYAHLENAGLTAWVVNAHFIKHVPGRKTDMLDSEWLAVLARFGLVRGSFIPPKDLRELRLVSRYRRKLNATCASQINRLHKMLDDGGIKLGAVVADVNGVSARAMVRGLIDGQSPALLLSHARGALKRKTEELAASLEGDLSERHLFVLRHLSDSIEQMQRQLADIDAYLMRSMQPYAWAHGLLQTIPGIDEVAAALILVEIGDDMARFASPERLACWAALSPGNHESAGKRKSGRTRHGNNAIRYILCECANAARMTKSTLAAKYRSLMVRKSHKKAIVAVAHKMIRLIYILLARRQPYIDQAIDYAAMSAKKNAPRWIKQLKAIGKWPATSAPAATAAT

SEQ ID NO: 87084 - protein, 350 aa, unidentified
MTEAYDGRQVVGMDLHRRRSVLVRMTADGKRLETARITNGAAELRREIAKAGEHPQVVLEATYGWYWAADELAAAGAEVHLAHPLGVKAFTYRRVKNDEKDAADLADLLRMGRLAEAWIAPPEVRELRELTRYRIKLVRMRSSGKEQVHAVLAKLGIPVTCSDLFGAWGSAWLDGLRLPQPYAGKVASLRELTGWLTTEIGLLDAVIADLLGSYQPYHAVRALPGLGPVLAAVAVAEIGDISRFPSPGQLCSWAGLTPRHRESDLKVARGHLTKQGSPILRWAMVEAIQHQPADSPPRELKDRIIARRGKEAKNIAKTAAARKLLTCVFYAMRDGQVRSLAGRSRAAEAA

SEQ ID NO: 87085 - protein, 342 aa, unidentified
MERITTIGLDIAKLVFQVHGIDATGEVVLRRRLTRARLVPFFAKLAPCLIGIEACATSHYWARELRKLGHVVRLMPPSYVKPYVKRQKNDTADAEAICEAVTRPTMRFVEVKTPQQQSVMVLHRMRLMLMRQRTQLSNAIRGHMAEFGLVAPVGRRGLLALIDTLHDETDDRVPAEARHCLQMMAAQLRLVNAQVLENDRRIRTSARATDVGRRLMGIPGVGPVLASAFVASVPDPAMFKSGRNLAAWIGLVPRQNSSGGKERLGGITKQGNRYLRQLLFIGSIAVIRYAERHGTRRPWLVRLMGRRPTRVAAAALANKTARMIWAIMTNGQAYREPELRSV

SEQ ID NO: 87086 - protein, 345 aa, unidentified
MPIVGGLDIHRKQITFDYLNTVTGEVKRGQIAPADRGHVRAWLARFAGHGDVAFAVEGCAGWRYVAEELAAAGIAAHLGEPADTAALRGRKRHAKTDKTDARHLRALLAEGRLPECWIPPAQILEYRALLETYHDLRRAHTAWVQRIHAVFFHQGAPPLSEGALRTEPGLAALRAAAATHLSAAGQQQVATALDMLAATEAQLGPLRHQLRQAAAHLTGAKVLTTRLYGVGPVTALALTCWLAGKDRFSSSRKAVRFTGLDITVHSSDRKGPPGRLSRQGPPVLRWAVYEAGKTHARTSAPDHGYYATVADRKNSKRAALSEARKIVRQACHILTELGDDALTAA

SEQ ID NO: 87087 - protein, 408 aa, unidentified
MNTLYVGIDVSSKSNVVYLMLPNGDKHSNFSVANSHEGSTLLVKKIYSALTSHSLDTVLIGLEATSVYGDNLVYFLREDATLAPFNRKIHVLNPKQVKKFHDTYNDLPKNDYVDSFVIADCLRFGRINKEVYMGDYRYKALQNLTRARFFAVQNLVKEKQRFMNVLFKKYSTMTQEKVFSDAFSTTALAVYDEFESAEALANMDLHELTDFIIEKGKNRFPDPDAVAKAIQKAARSSYRLPKTVNDSVNQVLSISITSMKALESQIKEFDKAIIALMELLPNVLISIPGIGPVYSAGIMAEIGDINRFDNQASLAKYAGLAWKQHQSGGFEAEVTRLIPSGNRFLKYYLCEAAFSLVRCDKEYSDFYHLKYKEVNRYQHKRALALTARKFVRLVFRLLKDNRLYCPAK

SEQ ID NO: 87088 - protein, 356 aa, unidentified
MQTQVTKKIDFSGKELFIGLDVHKKSWSVTILVEGMEHRTFTQPPDPKALFNYLQKMFPGGTYYSAYEAGFCGYGIHRELNSLGIKNIVINAADIPSSQKDQLEKRDPIDSRKIARALGKGLLRAIHIFDRDMEELRSLNRTRFYLMRDLRRSKNRIKSFLQYYGESIPPEFDNNQWTLKFISWLKNIKMQTLSGQDAFSNLISSYEYHREQILTLSRQIRQRVTEYDKELYSLLKTISGIGPLTSSALITELGDINRFPHIDHLSSFVGLIPRVKQSGESSYSGGITFRCNEYLRTLLIEASWQAIRQDPALMQYYHEHIINTKGQKVIIKVARKLLNRVRYVMKNRQPYVTGVA

SEQ ID NO: 87089 - protein, 423 aa, unidentified
MSYRIAGIDVHKKMLAVVVSDVEVDGEFQFERVRYNSSPEYLQRLAEWLIAQRVEEVVMESTAQYWKPVWGALERYWKPICQEREGAGPRSGTLHLAQAQSNRGRRGRKKDFPDAERLVKRLVADELVLSFVPDTEQRLWRTVTRRKYQLTRNHVRLQNQLEGLLEECHIKLSSLVSDLLGASARRMLKALAEGETNPVALAAMADKNLRATQAQLCDALGACTELRPIYRRLLKMFLEELQFIDQQISELDHELASLLSRHHDAVVHLAEIPGLGVDSAQQIIAEGGAGAATFPSAKQLSSWVGACPGEEESAEVSKSHRSPKGNRHMRRILNQAANAAAKSKGTIFEIVYRRLVSRLGHNQTIGAIAHRLCRLIWIILHRGVRYEERGPSVNAKTRRHRTNRMIRELRNLGYRVEPLVMTV

SEQ ID NO: 87090 - protein, 482 aa, unidentified
MKKRNIYQNRSQELLSLFEEAGNSAKVMCVPMDYAKKDHVVMFCNGYGDILRKPFSIKNSPDGVKYLVDQATRSCRRRGIRKQHVFFGGEDANSYAENFVNTLRSKGWVVAGVNAHDAKKQRANLQASTDCLDLMGIATMLLNCRANCCPAQSGIYRNLRTLVRHRRKLVVMSTEVRNRIHTVVDRLFPGFLDEGKTGIVPFTSSSLYLMEDRFSPKQIRRRKREKLIEILKRFGTSKAEKTADKLQQYAAQVLHTTVEYIDTLQLSLAQHVKHLRCLKESIDQLEKEIAVNLAQTQGAFLTSVRGIGIVLAAGVTAEIGDPNEQKPLNNLVSYSGIIPRVKQSGGPEGKTYTVSVAKRCNRILKDYVVKSALHLGLHGPQDLMADYKRRDASGQHADFSMGRRYLRMAMCLMRTSQIYLPPRLRKADATLQERAGYYLMTWPYLRGKWKKLGALEAAFTKDRPLGLWRQIVQGLYEIKLKL

SEQ ID NO: 87091 - protein, 397 aa, unidentified
MSECYVGIDVSKAASTAQGINEKGKKLFYVEFTMEAEGFSKLLDALRSHCKDLSMLKAAMESTGCYHTNLLCFLATEGIPCFVINPLVIANFAKLSLRKTKTDKKDAMVIAQFLLVHKDVLVKVEPSQSLQDLKDLARERESLTVLMSVLKNDIKRMLQITFPELESLCNVFSESMRDIIKQFPSARLVRIADFVVVKKALTPYDARRTSPFYPEDFIKAAQDSVATDSIAKELILPEKYATLEHLMKQRARITEALVEACQAMMIKDIEIITSIGGISDTTASAFLAEVGDYKAFSSYKHLIAFAGLDPSIHQSGKFEGRSKISKRGNRHLRHLSYLMTTCVVRLDNIFREYYLRRRAEGLPYKKAILATAHKLLRVIFTMLTNRTTFQVKEVISK

SEQ ID NO: 87092 - protein, 460 aa, unidentified
MNRKRSKSRVDRTMPMMHPNAAAIDVGATLHMAAVRADRATEPVRSFGTFTTDLHRLVDWFTECGVETVVMESTSVYWIPIFELLDARGFTVFLVNARDAKHVPGRKTDVSDAQWLQRLHSYGLLRASFRPKGQIAELRAYVRQRERLLEYAASHIQHMQKALTEMNLQLHHVVADITGSTGLRIIRAILAGERDPEVLACLRHYSCHSSAETIAKALTGSYRTEHLFALEQALALYDAYHEKASACDVRIEAVLKELCIHRGRGIGSVAPAPRRRHRTDQANALAFDVRAALFALLGKDITTIDGLGPYLSLKLVAECGDDLSSWPSAKHFTSWLGLAPSNKVSGGKMLSSRTRRSGGRAAALLRLAAVTVGRTDTALGAFYRRLSSRIGKAKAVTATARKVAVLFYNAVRHGMEYVDPGASSYETRYRTRVVNNLHRRAKAFGFVLQPLEPKAGAVVS

SEQ ID NO: 87093 - protein, 406 aa, unidentified
MELVALHKRVIGLDVHQAQITACAILEEADGTTRIEQRQFGAFKRDRRALADWAASLRPDEVVMESTGIYWKSPYAALEAVGIRGQVVNARHVKNVPGRKTDVGDAQWLATLARAGLLRGSFVPPMLLRELRLISRQRQKLVGQLASEKNRLHKVLTDGGIRLGVVVSDLHGQSARAMVKAIILGQAPNEVLQFASRRLKASREEIFDALQGDLTDSHRFVLDELMRHIEEIEARIARFDVRLLDGLKGERNTLALLQTLPGVDLIGAAMLLVEIGADMDAFGTADRLASWVGICPGNNESAGKRKSGRVRKGNLYVRRLLCEFAHAASRTKSVFQSKFKSLIVRRGHKRAIVALAHKILRTIFFMIKRREHYRDSATDYEALSVQRNAPRWIKALTRFGFIPAVA

SEQ ID NO: 87094 - protein, 260 aa, unidentified
MGEDDTMSSELFIGIDVSKDHLDIAVRPTAQCLTFENTDTGVDELIRTLLEFSPTLIVMEATGRYHQLALGRLVAANLPAIAINPRQSRDFARALGRLAKTDRIDAALLAEFADKVRPVLRSIPNSDTQELEALSTRRRQLMTMLIAEQNRHHSAPRSLRPGIKKHIHWLEKELEQSDKELKNRIRSSPAWREKEDLLSSCKGIGPVTTHSMLAYLPELGTFNRRQIAAIVGIAPFNNDSGKYRGRRSISGGRRQLRSVL

SEQ ID NO: 87095 - protein, 314 aa, unidentified
METSTQPVFVGIDVSKNKLDVALWPSGESFAVERNAKGLNSLCARLAALNPVTVALEATGGFETVVAAALAAASLPVAVVNPAQVRAFAHALGKRAKTGPIDAAVIARFAEAAKPAIGPLADAETQLLADLIARRRQIVDMIVAEKQRLGHAPAKRLKKSIERLLKALEKELSNLNGDIDTAVRASPLWRANEELLTSVPGVGPTTARTLIAELPELGTLTRKEIAALAGLCPFTRQSGQWRGKSFIAGGRANVRASLFMAAMVAARFNPILKTFYDRLAAAGKPKKAALIAVARKLLTILNAIVRDKKPWQTA

SEQ ID NO: 87096 - protein, 412 aa, unidentified
MRNSSKNAQKTKSSTGAIQTGNEARLLRGRVNRLLDQLGVKPEGRIFPEPKAGQKAREPRFFVGIDLGDKKSRLCFLDGAGLVVAETDLATTREEMGEYFSAIPYSRIALEVGTHSGWLSGLLKGLGHEVFVANPRRMESIHKNRRKNDRVDALTLARLVRADVELLYPIEHRGASAREDLVLLRARDALVSVRTKLINSMRGLVKSVGGRLPKCSAEAFAQSVANAIPAEVRDALTPMLEQIRSLTEKIRGYDKVVSEVARKKYPQTALLSQPNGVGDLTALAFLLTLECPERFRKSRDVGAYLGLVPRQYDSGDSSPQLRITKTGDVMLRRLLVGSAQYMLGPFGKDSDLRRHGLKIASRGGKNAKKRAVVAVARKLGVLMHRLWLNGEVYEPLYNAQLAEESVEAVVNA

SEQ ID NO: 87097 - protein, 429 aa, unidentified
MNNEALIRIMQFRQFKERIRGSEEYLIVGIDISKNQHHAFFGTANGKTIKRRLIFKNDFIGFMDFLSMAQVLRGQNGLSQIVFGMEPTGNYHKPLGTFLIKRNQEVVLVSGIATQRNRELLDGRWDKNDTKCAANVADLISQGKCLFYDYPEPKISGLRSLLSLRERLKKNYHILRMRIRNNLVSEYFPEFDRYFGQSPKQTLSIVKYCLDPVKINQMEFKEFLLKVTTTNRGLAQEKRLRKIHALASESIGCESNRYTEFEAKILVDQMEQTTIFIKEIEDKIAEAAGEFEEYHFLLTIPGFGPYISALVLAKIGNPFRFENRKQVLKMSGFDLSAKRSGKGSDKAYPVISKKGSNALRYALFQGAVIASSRNNYFIEYFTNTLKGREKERGIKIKMRVKLAAKLLVIAWTIMKTKKAFDPALLHSVK

SEQ ID NO: 87098 - protein, 386 aa, unidentified
MQKLNDLSRCLTLLEPDSTVIAVIEMSQSSWLVAGIVPGVERQPLKKLAVNEAALLKLLHRWREEAEEAGYGITRITVAFEAGRDGFWLARWLRARDIEAHVIHASSVAVSREHRRAKTDRLDTELLKRAFLGWLRGERDHCKMVAIPTIDDEDAKRPNRERESLVGEQSRIINRIKATLARLGVRGFNPKLKKAAERLEGLHTPEGELIPPNTLSELHRDMERRRLVRDQIRQIESARLDRLEHAPGEGAHAMVRLLARVMGIGIETADMLVQEVLSRNLRDRRAVARYAGLTGSPDESGKKRREKGLARSGNPRVRRGMIQLAWRFLMFQKDSALAQWFRARTENARGSRKTMIVALARKLLIALWRLVREGVVPDGVILRPAQ

SEQ ID NO: 87099 - protein, 350 aa, unidentified
MDRYIGLDAHSSSCTVAVIGPSGKRLQTQVLETNAKVLIDFIRAIPGTRHLCLEEGTHSNWLYEVLSPHVQEIVVAGVRQDRGPKSDKIDAFGLAEKLRIGAVERRVYKEQGTFGALRELCRAYNVLVADSIRVQNRIKSLFRSRGIPCSTRQVYSAGRRKEWIEKLPVRSQPLAETLYLEYDALEELRERAEKAMLDEARKHAMYRILKTVPGIGDIRAAQVLPIVVTPYRFSNKRSFWSYCGLAIVMRSSSDWIRTQDGSWARAMTQQSRGLNRNHNRVLKYIFKGAATTVMGRTKDGPLYQHYQMLLDGGTKPNLARLTIARQIASIVLSIWRSEEVYDPKKLSHTT

SEQ ID NO: 87100 - protein, 350 aa, unidentified
MIIVGCDFHPQWQQIAVFDAETGEIGEHKLINGDGEAERFYRALPAPALVGVEACGNSQWFIDLLERLGHEVWIGDAAQIRASYVRRQKTDRRDAAHILRLLVEKRFPRLWVPSAEERDLRQLLIHRHRLVEIRTRIKNGLQHLALNRGMQKQHRLWTVKGMDAFKNLPLKGWSGKRRGDLLHLLEELDVQVDSLDAAVAEAAANDQRARLLMTQPGVGPVTALAFAVTIGDVGRFATSAQVASYVGLIPREHSSGGKQRLGAISKQGNRFLRQLLVEAVQTTNRLDEGFRRQYQARCHKKPKGVAKVAAARKLTVRLYWMLKTQTAYPEIAHTESSSRVPMAGTSTPSV

SEQ ID NO: 87101 - protein, 349 aa, unidentified
MSIERRKVCGIDVHKSFLVVTILDREGNYETKKIHQDLDSLLGLREWIISQACDSVAFESTADYWRPLYTVLQDKVPVTVANANHIKHVPGRKTDITDSRWIAQLELNNLITPSRIFSGESYDLRSLTRSRELLVQNRTELKNKINHLLDSASIRLSSVLSDLFGKSGSIILKGIVENKPFKEIVNSLPKRMRGSADAISVTLPLSIPPIDLVLLQSYLNLVDSHDKEIKLIDGRIREVLQNKSREQQILTSIPGVGFIGASTFIAEIGDIHDFEDADKLAKWAGLIPSVYQSADVTRTGSIMKQGSRHIRWILVELAHVTIRSPGRIGTFFERLMPKKGYRRQLLRLP

SEQ ID NO: 87102 - protein, 452 aa, unidentified
MQNQDKPAAIVRAVAGIDAAITARHHIAVREFFDDGTEHLSRFTVDLTLAGLERLSARLAAVPAPVTAVVEPTSMTWLALALAVERAGGQMEMIGARHSSRLRGAIMGKNKSDVIDSEVLTHAGEIFDPPPLVLASPGQLALRRAVVRRAGAVIDGNRYWRRLLSLARWAFPDVWTAFAGSESTALAVLGRWPHLRSLASARAATLTAVVAEHTRDVADTPARAAAIKTAARGWAEFWDGHLDLDALAVDVTEHLTDLQESRARVDRFTAHSRQWWEHLYGDDPLILSLPGVGPATGPCIRAYFGDGSGFDSAKKAANYVGITPSNWSSGTMNQSRRAISKEGPAPLRLAFYQAGSVARTIDPQLAAFYHRLMTEHGHCHTQATIAVARKLAERTWKTLTTGQMYELRDLEGRPLTKRAAKELIASHYTVTPKQRSQSRSHTIEAKRARLTR

SEQ ID NO: 87103 - protein, 358 aa, unidentified
MIFVGIDVAKDKHDCFITNTEGESLFKPFTISNNLNGFNELYLKIESVMEDVSKVKVGLEATGHYSYNLLGYLLDKGFPTYVINPLHTNLYRKSLSLRQTKTDKVDSRTIASMMMSDVNLKSYSDTSYHNEELKSLTRYRFDKVKERSALKVSLARLVCILFPELEKLVPTLHIASVYALLYEFPSAKHVASAHLTRLTNLLETASKGRYRKDVAITFRNAARNSIGSNMPAKSLELKHTIKLIQELDAEISEIENEIQSIMDEINSPILSIPGISYKMGAMIIAEIGDFSRFDSPDKILAYAGLSPTTYQSGQLDSSHSRMEKRGSRYLRYALFNATKYVCLWDPTFASYLSKKRAE

SEQ ID NO: 87104 - protein, 348 aa, unidentified
MNKKIVKQVAGIDVAQKELVVCLGRMYDDWAPELYSHKTFPNHEKGFMALVLWVKKLAVEEVPVRFVMEATGVYHESLAYFLDEKGYESSIVLPNKISNYSRTLEVKTVTDKTASEAIARFGLERKLDPWKRPKKLFKNLRQLTRERDQVVQMRTMAKNQLHAEQAEAEPNPGSVTRIKQQIVFLNKQELQIKKELLVLSRQDSQVQQSVKLLCSITGVGSLTATTVLAETNGFELIRNKRQLTSYAGLDVKEKQSGTSVKGKAHISKRGNRYLRKAMHLPALTAIRHDDRFKAIFARLVSKHGIKMKAAVAVQRKLLEMMYIVYKTNIPYDKKYLQRNEEQQQIING

SEQ ID NO: 87105 - protein, 344 aa, unidentified
MTSLSIIGIDLAKNSIHIYGTDSTGKKTVSKAISRKKVVEYFANIPPCLIGMEACATSAYWQRTLEELGHTVKRIHPVFVVPFRIGDKNDANDARALWEAVQRPHLRSVPAKSQEQSDIQAVHRVRANLVKARTATLNQARGLLAENGLVVPKGPRHIMRMLVESISDEHNELSGIMKRVLNTVYELLNTLEAQIHETTLQLTSIARSCEPCVRLQKIPGVGVITATMLYSVAGRAQDFKNGRQFAAYLGLVPREHSTGGKHKLLGISKRGDGYIRSLRVTGAQSCIRSLGYAGSRVGECRLREWLQEVKTRRGVNKAAVALANRTARTAFSMLKNGTSYSATH

SEQ ID NO: 87106 - protein, 468 aa, unidentified
MKHNQQRKRTGRSERQASVSLFERIQPNAAGVDCGQKSHFVAVPPERDPEPVREFRTFTTDLQRLAEWLAQCGVKTVAMESTGVYWIPLYEILEQRGFEVVLVNARDVHNVRGRKSDVKDCEWLQQLHSVGLLRASFRPAAAMVPLRSYLRQRAILVEELTARIQRMQKALTEMNLMLHTVVSDITGVTGLKIIHAILAGARDPERLAVHRDGRCHASHQELVAALTGNYREEHLFGLRQNFTAYQFHLQQIAECDAEIEALLNLLAAQQPPPAAALPAPRAKTTKKHAPAFDIRTPLHVLTGGADLSQIHSIGPQAALQLVAEIGTDMSRWPTEHHFASWTTLAPNNKISGGRLLSSRTPPSANRAATILRRCAMSLGRTSTALGAFYRRLAARVGKAKAITATARKLAVLVYRVLSGDLIYNDPGATAYHQLNRARELKSLRKRAKLLGFELVDRSSGEVLLNPVS

SEQ ID NO: 87107 - protein, 480 aa, unidentified
MNFKSKKAKNQAIISNSTTNIISQEEMARRITVTEANMKSYTWRDLETHGKFTKNDKLTFISDDMLILGCDIGSETHYVRAIDTRGRELSKDAYSFSNNADGFQSAKDWALQIAAKYEKKQIVLGLEPTGHYWFCLAAWMITNGISVVQVNPYAVKQTKELEDNSQLKDDRKDPKLIANLVKDGNYGMPYLPEDLYAELRRLSMLRDQLTEDRIRNINRLHREMKIYFPEYMDAFGKLDGAFTLEVLKKAPFPEDILAIGSDGLREIWHEAKLRGRGYSRADKIVAYAKESVGLKHGTSGGKEAVRWFAEQMLELSKKLNEIEARLHEKCREIPHAENLLEIKGIGENTLSGILAEMGDISRFDDVKEIQKLAGLGLVACSSGKQKGQTKISHRGRKRLRYWLFQAAKSAVSHAEEFKTLHEYYTTRNDNPLKKMQSLIVIACKLLRIIFTLLRTGQKYDPEKMLKDIRYSSNATTAQAA

SEQ ID NO: 87108 - protein, 435 aa, unidentified
MTKKIQYRAVDVQQLSLENVLERFDKNARVVVGVDVAKRRFLAALCDSLGEPQMIVRFEHPVQTVDFVSLLSGMRDAGRTVEVVMEPTGTYGDPLRYQLGERAIDVFRMNNEIVHDAAKLYDGAASKHDAKDACVIAWEHAHRPHRSARWLELSEDRRSIRALTTQRELFDEPLRRLISKMEPLLARHFPELEKFFDLGRRKTPYRLLEAFGSPAGIVEAGTEQMTHFLRKAARRQPEAELVRDLLHAARTTTGMAPVATELQLIRMMSSEILRLMGMRDEVDVRIEKAGALVQPVQALRPCLGAVTAAVVYAYLGAPSDYASAAALEKAAGLNLIERSSGGDDGTRHLSKRGPGIVRKYLFLAAMRLIQTDPVAKAWYQARKSFKADQKAKALIAVERKLCRALFHVAAGNPFDSAMLFDTRRLPLSAAKTEAA

SEQ ID NO: 87109 - protein, 355 aa, unidentified
MDHIGIDVHKRESQICILAEGGELIEQRIRTEPDRFAAVLGGRPRARILIEASTDSEWVARCLEGLGHEVIVADPNFAPMYATRTRKVKTDRRDARTPADANLLGAYRPAHRLSDAQRHVRGRLGVREALVRTRTRYISLIRAVLRQHGYRVPSGSAEGFVHRVGAMALPGRLRSMIAPLLAVMLPLNRQLAYSDQVIEHLAVHDPRVQRLRTAPSIGPVTAAAFVATIDDAQRFRHAHQVEAYLGLVPREFSSGDSQRRGPITKAGPGRPRWLLIQAAVSILRRRPPEAEALWAWALRIAARRGKHVAVVALARRLAGILYALLRDGSVFQPHRAVGVPRAAVGAVNRRAAHAR

SEQ ID NO: 87110 - protein, 391 aa, unidentified
MEKAWAGVDAGKEFHRAHVLDASGKELLSRKVENDEDDLLKLIDEALCLAEELIWAVDQPGGGAALLLALLWERNQRVLYVPGLAVDRARDAYRGESKTDARDARVIADQARMRSDLGELRPGEQEIAELQLLLARRRDLVTDQSRTITRLREALLSLFPALERALDVNSKGPLTLLTHYQTPTQLRRAGHKRIATYLRNRGVKGSNKVAHKALGAARSQSLTLPAQEVAAAIVAELAEDVLGLKDRVESIDQELGQRFFARPEARVLVSLPGMGPILGAEFLVVVGEISAFESADRLAAYAGLVPAARDSGKRVGNNKRMRGGNKVLKRVFYQSAFASLRSAPESRVFYDRKRAEGKRHTQALIALARRRVNVLWAMLRDGTTFEDRSAA

SEQ ID NO: 87111 - protein, 401 aa, unidentified
MQQDQQHDSVDVFVGVDVGKGQHHAVALDRNGKRLYNKAMPNDEAKLRALISELRAHGRLLFVVDQPATIGALPVAIARDEGVMVAYLPGLAMRRIADLHAGEAKTDARDAAIIAEAARSMPHTLRSLRLADEPLAELTMLCGFDDDLAAQITQTSNRIRGLLTQIHPALERVLGPRLDHPAVLDLLERYPSPATLAAASEKTLANRLTKLAPRMGKNLAAEIVQALNEQAVIVPGTQAATIVMPRLAQQLAALRKQRDEVASEVERLVLAHPLWPVLTSMPGVGVRPAARLLTEVAHKAFASAAHLAAYAGLAPVTRRSGSSIRGEHPSRRGNKVLKRALFLSAFAALRDPISRAYYTRKVEQGKRHNQALIALARRRCDVLFAMLRDGTIYQPKAADNA

SEQ ID NO: 87112 - protein, 317 aa, unidentified
MDKIIIGIDISKQKFDAAYKTAEGRWRQRVFENNPKGFNGLLGCVPQDFSGKIHVVMEATGRYGEDLAHFFHGKGFDVSIINPAQIKHYGQSLLRRTKTDKADARLIAEFAEHQHLSIWQPPLPSLQALKEQVRCLNSFKKDATQIRNRLEAAKDPKVRSLCQERLDHIETQIKAIEAAIKKIIKEDQMVKAHFQRLITIPGIGEVTALILLAELPDLSTFKCAKQLAAYAGLNPSIRTSGSSVRGKERLSKMGHALLRKALFLPALSIMGRKTPLAPFIERLREKGKKGKVIVGAVMHKLLHIIFGVMKRQVAFQG

SEQ ID NO: 87113 - protein, 390 aa, unidentified
MDVLYQSCAGIDVHQANIVVCILHGPLTSTRPKREMATFDTTTKGLRACHDFLSQFHVEAVGMESTGVYWRPVWHALCDDFKLILAQPAHMKAIPGQKTDKKDAHWIAKLTRIGLLPRSFVPDETIQELRELTRQRKHYVESRNRETNRIHKFLQSGGIKLTTYIEDIMGLSGRNLLQLLVDGTPITPRIVHQSVYTSLKKKVPQLLEALDGYFSDHHRFMLKQSLEIYDFYQKQIGLLEERMNVYLSQYENHVEILDSIPGIDVITASVIISEVGVDMSQFPTAGHLASWAGLCPGNNESAGKKRSTKIRHGNSYLKKCLCQAAFAARNQKGSPLAERFYQIQSRRGSQKATIALAHQLLKIAYILLQEQITYPEFLAQKKTTRDELVA

SEQ ID NO: 87114 - protein, 445 aa, unidentified
MLPIMYKQVAGLDVHKKTVVATRMRVTTEDRGVSETRTFGTTTPDLLELHDWLCEWPCSHVALESTGDYWKPVYNVLEGTFKIVVVNANHVKHVPGRKTDVKDSEWLAELMMHGLLKASFVPARPQRALRMLTRYRTTLVQERARVVNRVHKLLEEANIKLGSVATNIQGVSARAMLAEIAAGQTDATQLADLARGRMRSKIPELEKALTGLVQPHHCFLLSRQLTHIEFLDEQIEELSAEIARQVEAMSSRSAPTGEKGNAEAGTEPPITEETERPLTWNEAVALLDTIPGVDQRTAEVILAEIGLDMSQFPTAKHLATWAGLAPGNHQSGGKRYSGRTPKGNRPLCSIMVQGGWAAVRTQDSFLNARYHRLAARRGKKRAIVAIAHSMLVSAWYMLTYRQPYHELGGGYFDQRQKETKVNYLVRRLEKLTGGSVVLEFQPTPA

SEQ ID NO: 87115 - protein, 352 aa, unidentified
MEMIALDCHKRYSVASVQTPEGRCLAERRIEHRRGSIREFLGPYSPGCPVAVETIGNWYWIVDEIEQAGKIPRLVHARKAKLMLGSINKTDKLDVRGLNRLQQTGTLPTVWIPPAGLRDQRELPRTRMVFATARTRLKNRIHSVLDKYGFQDQFTGVSDIFAAGVRPRLEGCIKQLPPQAAYTSGLLLEQLEAVQETIEALEERMAEVFKPTAELERLDTLPGVGLILGVVLMVEIGDIQRFRCAERLASYAGTVPRVHSSGGKTYYGRTRPDVNHYLKWAYTEAGNAVAVHRESLAHRHVSQLYSRIRSRRGHASAVGAVARHLAEATYWMLTKKESYHERGITEVSPQGV

SEQ ID NO: 87116 - protein, 318 aa, unidentified
MEAQVKCFIGIDVSKAQLDVYIHPTAERYCVKQTEEALVAMGENLQSLNPVLVVLEASGGFECSVAGVLATMNLPVVVVNPRQVRDFARATGTLAKTDLIDAQILARFAEAIKPEVRPIPDDCVQKLSSIAKRRRQIVEMLTMEKNRLSQASGMVATSINDHIVWLTQCLNTIDKDLRISLRESPVWREKEELLRSVPGVGPVLTASVIAYLPELGRLNRKQIAALVGVAPLNRDSGTFKGKRSVWGGRGHLRTILYMGTISAVRFNPTIKIFYERLRQAGKPPKVAITACMRKLLTILNAMFKHNVSWNPNYALCTP

SEQ ID NO: 87117 - protein, 345 aa, unidentified
METMYYIGLDVHKKTINYCVKDGSGRIYAEGSIPATRLTLDMWMKTLPRPWTAAMEATIFTAWIYDHLKPHAAAVKVAHPLMLRAIAVAKKKNDRIDAKKIADCLRCDFLPECYMASTEIRERRRTLRYRNLLVRQAVQMKNKIAVLLMEAGVSYNKQKLHKVGYFRELLATNQDIDEGLKPLLRLCRETVVRLGKTESALVRSLERDSLLVERVERLMTIPAVGPITALTWALEVGDVQRFSSIKKAISYCGLCGAERSSANITMRTPLSKQRNKHLQTVLIEAAKMAPRNSPELAMVYDQEKQKGNANRATLAVARKLVAYLVAVDRRQKEFLTVERENRTAA

SEQ ID NO: 87118 - protein, 347 aa, unidentified
MKFYTQQHKFYCGIDLHTKKMFVCILDAGGNIRIHQNINTDPETFLNIITPFREDIVVAVECMFTWYWIADLCVEHHIPFVLGHALYMKAIHGGKAKNDKIDSHKIATLLRGGMLPQAYVYPARMRATRDLLRRRNHLMRKRAELFAHIQNTRSQYNLPDPLGCIAKPKNREGIAQRFDDPSVQKSMAVDLEMIEAYDHILTQLERDIIACAKEHDLRSYALLQTIPGVGRILALVLLYEIESIERFPQVQDFVSYCRLIKSIKESNGKKYGSSGKKIGNAHLKWAFSEAAVLFLKGNEPGKKYLQRLAHKHGKAKALSILAHKLGRATYFMLKNKEAFNQKKFLGL

SEQ ID NO: 87119 - protein, 415 aa, unidentified
MQTLVERGCGLDVHQATVVACLLIVLKNGQTEKQMRTFGTTTRELLALRAWLLSQGCTHVAMESTGVYWKPVYVVLETEGTLEIVVANAQHVKKVPGRKTDVKDAEWIADLLCHGLLRSSFVPPKPIRELRDLTRYRRKLVESQAAERNRLLKLLETANIKLASVATDVFGVSGRLMLRALIEGKATIQEMAELAKGLLRKKIPQLEMALEGKLEEHHRFLLKLQLERLEAAEKDLAVLEQRIQEKLQPYAAQLALLQEIPGVDWTLAAVIIAELGVDMKVFGNVSQLASWAGVCPGSNESAGKRKSSRIPKGNVYLKTALVEAANAAARAKGTYLRDKFFRLKARRGYKRAAVAVAHKILVAIYHMFSHHVCYNELGDLYLDNLNKHHLTRNLVHRLERLGYTVTLEPKAAAAA

SEQ ID NO: 87120 - protein, 387 aa, unidentified
MKFYTKQHKFYCGIDLHTKKMYLCILDTEGEVRLHRNIKTDPEVFLNVIEPYREDIVIAVECMFTWYWVADLCTEHGIPFVLGHALYMKAIHGGKAKNDKIDSRKIAVLLRGGMIPMAYTYPAKMRATRDLLRRRNHLMRKRAELYAHIQNTRSQYNLPETLGCIAKPQNRGGIVERFKDASVQKMIDTDLAVIRAYDPIIAKMERDIIRMANHHDPIAYALLKSIHGIGRILGLVILYEIENINRFPTVQDFASYCRLVKCAKESNGKKYGSSGKKIGNAHLKWAFSEAAALFLKGNEPAKRYRERLMNKHGKAKSLSILAHKIGTAVYFMLKNKKPFDQNKFLGLYSWRRRISLTPNWNLRDISMQPHPGGDKITRASSNAQRMI

SEQ ID NO: 87121 - protein, 316 aa, unidentified
MTIVKTRAITGGVDTHADMHVAAALDPIGGLLGVQEFPATAGGYAGLLGWLGGFGTVALAGIEGTGSYGAGLARHVTAAGIRVVEVDRSDRQDRRRQGKSDPLDAVSAARAAQSGRARGAPKGRDGAVEAIRALMVAKRSARSERVQTINQARALVVTGPDDLRTRFARHTAAGLVSGLASLRPRPGDVVGYATRIALRELGRRVQFPGAQPGRPGELIAPLAAARAPGLLALHGVGPDTAALLLVAAGDHPERLRSEAAWAHLCAVVPIPASSGKVTRHRLNPGGDRQANHALWRIVLTRMSAHPPTLIYVRAAG

SEQ ID NO: 87122 - protein, 341 aa, unidentified
MAGIDLHSNNAVIALTDIDGKRLGSRKVPCELKEVVKFLAPFKQRLEKVAVESTYNWYWLVDGLRALNYPVVLANPAGMEQYSGIKHADDTNDAFFLAELLRLNILPTGHIYDEELRPVRDLLRRRMTLVHQRTALMLSFKSLYTRTTGQEMTLSGLKQLEIKEAQALYKHPANQLIAGLQIKHIGELTESIQKIEKGVLASAKELPLYAKLTSLPGVGKILGMTITLEVGDIKRFAEPGNFASYCRTVEAERTSNEKKKGANNAKCGNRYLAWAFVEAANFARRSDPQCRKWYDRKAAKTNNVIATKALACKLAKAAWHVMAAGTDYDAARMFGQPAMKK

SEQ ID NO: 87123 - protein, 414 aa, unidentified
MPNTLIVGIDISSQSNSIFFIDDAGNHLIKKPFSLPNDQEGANELIKRVIDCLSQYNLSYVKFGMEATSHYGWHLHLYLASSSELLPYKPTFYVLNPSVVKGFKKIYTFLPKTDNIDAIVIAECVRFSKLNPTPLPDFKYAALQRLTRMRYHLVHNLTREKNRALNLIYLKFSTYSQECPFSDIFGKASCAIIENFTPDDIASMPLEDLIKFVSDNGNNRLSDVNKIAEILKTAANRAFRLHPLLAEANDLALSMTLENIRFMQEQLKKLDKEISKLLKAFSQTLTTIPGIGNVLAAGIIAEIGDIKRFKNEAALAKYSGLVWTQYQSGNFNAQDVSLAKCGNQYLRYYLVEAANCVRVHTVRYKAFYNKKYSEVTKHQHKRALVLTARRLIPLIFAMLSKGQIYQERGDVYNT

SEQ ID NO: 87124 - protein, 429 aa, unidentified
MNFRPIAGIDVGKFFSEMAILSPSNELVARMKIKHDSYSDIERAFELLKKVEKDFDSRPFIVMESTGHYHKILFHSFYRFGYEVSIINPIQSDCIKNIGIRKVKNDKVDAKKIALLYRFQELKATNIPNEDIECLRSLCRQYYKLNDELTAYKNRLISVVDQLMLNLKEVFSDICSKTAIAVLEECPTPSLMIKADRDKLISVIKKNSRKSHEWATKKYDLLILKAKEFEPLSIDNPANIAMLEIYISMIKTLQENLKKVLKTIEQLIANDLSKDMPVMWLTLELLQSIPGVGLITAATILAEIGDFSAFSKPKKLVAYFGIDPSVVQSGEFTGTRNKMSKRGSKYLRRVLFTIAIANVRTKRNGQPTNPVLLEFYNKKLQSKPKKVALGAVMHKLIFIIFAVLRDKKPFELRTPEEHAKRLKTKHIAA

SEQ ID NO: 87125 - protein, 328 aa, unidentified
MTNAATRELAPLDFVGVDMAEEAFEWALHGVRGTHSASNNETGFQALLEALKDRRIGLIVIEATGGLERALAGFLLRHGLPVAVVNPRAAREFARSMGHLAKTDAIDAVALAHLAQTLAAKADQAGVAFVAPSVEVEALQAMVARRVQLLNMRTAEKNRLGGAMRVLHKSIEAVIKTLDKEIAKLERDIDAHLERHFKAQAQHFEAIKSLGPITCATLLAFMPELGTVSNARAAKLAGVAPLNRDSGKERGKRHIWGGRRVVRCALHMAVLSAVRFNPVIKAFYERLIAAGKPKKVALTACSHKLLRILNAMARTGQPWNEKFHAVTP

SEQ ID NO: 87126 - protein, 458 aa, unidentified
MKLLYRRCAGLDVHKSSVTVCVRRRVSGSSQVEMEEAVFATFTQDLRRLGAWLKQHKVKHVAMESTGVYWIPVWNALEGQSLSLTLVNPATVRALQGRKTDRIDARRIAEYMQYGLLGGSFVPPRAVRQWRELTRMRVHVQQDRNRVINRIARQLETVNIKLSSVASNIVGKSGRAILAALAAGRSTPEQMANQALSRLRDKRAALVLALDGKPDAHFRWMLSRLLRKLESLDMELAEIDAQLDQQMSEQADLIERLSTIPGVDRTTAQAVIAELGTDMSVFPDAAHLASWAGLCPGNAESAGKRFSGRTRKGDRYLRRVLVQSAWAAARTRNCFLRALFFRIAGKRGLKKAAVAVAHRVLTIIWRIIRDGGAYEERGGDYFDQRDPQRTARKLTRRLEHIGFQVEIKRRSIDPVPNDQAVPASLCGKCHRWHFAHCIHHNPRPLRKRHPPKSFESQG

SEQ ID NO: 87127 - protein, 369 aa, unidentified
MDVHSTNYTLCAMEPIIGEDDRIFATIDVLPDYKNILLFIENLKMKLGIDNEYDIQCGYEAGCLGYSLYNQLTAANVKCVILAPSTMLTPQGVRIKTDARDARMIAQCLSYGGYHAVYVPTEDDDSVKEYMRMRDDHKVALKRIKQQINAFCLRHGHQYTQGKWTIVHLRWLKNLELPALYREVLNEYMTSYEEQTNKLERLDRRIEELATQKKYAEKVKKLVCFLGIKTHTALSLIVETGDFTRFAKGNIYAAYLGLTPGENSSGSKTNRTSLSKAGNNHLRQLLVESAGGICKGTIGRKTKALKARQNGNAADVIAYADRANIRLRSRYYKLIRQGKARNVAVAAIARELACFVWGMMTDNISVKTV

SEQ ID NO: 87128 - protein, 418 aa, unidentified
MNEEGNTRGSRRYVALDIHKHYCVMAAVDREGRVVLNPVRVEHVDLEGWLKKNLCSTDHVVIESTTNAWHVYDLLEPLVERVVVANPIKVKQIAQARVKTDIRDTLILARLLAANLVPEVWVPPAHVREMRQLLSQRRQLVETHTQIVNRMHSVAHRHHLKHERGKRFNEKNTLWQKDKQLSKTEQFQLELEMENRAYTEKQIGRIGKAVAKMSHQKPWAESMTYLMQLPGFGVITAMTVLAAIGDVQRFGSAKHLASYSGLTGGVDQSGTHLVQKGITKEGRKELRWAMVEVAQRAVKSDPRWTRKFQELHQRMHRNQAIVAVARQLLELVWYVLTRRQPYRHFSQERIAYKYLTWSWQMDEAARDGLTRQQFARYYMMRLGIGHDLTRIALNPKYPRRLASETELLALRPELNQTE

SEQ ID NO: 87129 - protein, 380 aa, unidentified
MTWIADRERTLTALHLREAPVFTERTSVGLDVHARSIVGCGLDTVTGQVARRRVTPTLQGVTEWLAELPAPVAVAYEAGPTGFGLARQLTAAGIRCVVAAPSKLQRPPGDRVKTDSRDAQHLARLLRMDQIVEVRVPGVEQEAARDLVRAREDVRGDLMRSRHRLSKLLLRQGILYSGGHPWTGVHEQWLRGQHFALPGLQLAFDTAFETVLLTTARRDRLDAAITEMAFHSEYTPVVRRLCCLRGVSTLTGFGLAVEIGDWHRFTGRTIGAYLGLVPTESSSGGQRSQGSITKTGNTHARRLLVEAAWHHRKAYRPGVTLRARWAQAPAAARARGHEGNHRLHRRWQVFTARQKRPVIADVAIARELAGWCWSLAVLDD

SEQ ID NO: 87130 - protein, 356 aa, unidentified
MSRKLDNSPAVIGIDIGKNSFHIVGQNQRGAIVLRQKWSRGQVEARLANLPPCRIGMEACVGAHHLSRTLRGLGHDARLMPAKYVRPYSKGQKNDYRDAEAIAEAVQRPTMKFVATKTADQLDLQALHRVRERFVGQRTGIINQIRAFMLERGIAVRQGLRFLRAELPGILATRTNALSPRMLRILEDLSADWRRLDARIADLSGEIEALARQDKGCERLMSVPGIGPIISSAMVAAIGTGDAFSKGRDFGAWLGLVPKQLSTGDRTILGSISKRGNRYLRSLFVQAAWVVLVKIGPKRWDRYGLKSWIEAAKKRLHHNVLAVALANKLARIAWAVLHKGRAFECVKTNEAAYQPA

SEQ ID NO: 87131 - protein, 316 aa, unidentified
MEAIFDNCCGIDVHKKTLTACIMIGREGKITKKEIRTYSTMTEDIEGLRDWLKSEGVTHVAMESTGIYWRPVYNILEEGFEIMLVNARHIKNVPGRKTDVADSEWLCRLLRNGLLNGSFIPPIYIRQLRDLTRYRSKLNNNIAAEKNRLQKYLEDANIKLSSVATDTLGVSGRLMIRDIIKGNTDAEGLSELAKGRLKNKKEELKKSFNSRVTEHHRMLIEMSLKHIEYIEGMMAKLEGEMDELVKKQDLAKDLELLDTIPGVDKIGATAIVAEIGADMSKFPTDAHISSWAGMSPGNNESAGKKKAQGPRLETSG

SEQ ID NO: 87132 - protein, 314 aa, unidentified
MKDYVGIDVCKARLDVHGVPTDRASTYTYDEAGVDGLLQALSGAPPRLIVLEATGGLERALVAALLAKELPVAVVNPRQVRDFAKASGHLAKTDRIDARVLAQFAKAIEPTQRPVPDEAAQAFADQLTRRRQLVEMLAMEKTRLKQAPNKLVRKDIKQHIAWLENKLRASDEGLRHAVEDSPIWQAKRDLLGEVKGIGEVTALTLIGALPELGRLDRKQIAALVGVAPFNRDSGTLRGKRTVWGGRAVVRQILYMATLSAVRFNPPIAAFYRRLRGNGKVAKVALVACMRKLLTMLNAMVRDGRRWSPPPIVGA

SEQ ID NO: 87133 - protein, 375 aa, unidentified
MKRPVSSATAHRPFFNRERETESAWVPCETVNKLGSPLHSRSEARTIAGAACASPYPRARVRCSGEFTMNVCIGIDVSKHALEWSVGTEGRIQHTRNEPRPISQLVRRLAALDAERIVVESTGGYERKLVLKLAEAGLPVVVVNPRRVRRFGEGMGILAKTDAIDARLLALFGEKVEPPIRPILQGTERLLADLVARRRQLIAMVVAEKNRRDTATEPVRRTIDALLRTLDQHIRDLDRKIEKPLLEDSERAELSELLQTVPGVGPGVARTLLIDLPELGHLGRREIASLVGVAPFAKDSGTIRGSRRIRGGRAAVRTALYLAAMTASRFNPVLRDLYERLRQAGKPPKLAFVAVARKLLTILNAIAREKTAWQA

SEQ ID NO: 87134 - protein, 423 aa, unidentified
MEIMHRRVAGLDVQKETVVACVRVMDGRRPTRECRTFTTTTQGLLELLGWLTASRVTHVAMEATGVYWTPVWKILSEGDFTLIVANAAHIKQVPGRKTDMNDAMWIADLLACGLLKASFVPPEEIHELRSLMRTRKQLVREQTRHVQRIEKTLEEANIKLGAVLSDLMGVSGRRIIEAMIAGERDPHRLAALAERSVKASPNALHDALHGRLREHHRFLLQLHLRQWDALDAAIRQIDEQVSDHIERVDEEAADGQPPFRELIPRLCAIPGVSFQSATAILAEIGRDMSRFPTAGHLIAWAGLCPGHNESAGKRKSSRLRKGAPWLKTMLVQCAWAAKRAKHSYYSAQFHRLCGRRGPQKAICAVAASILTAIYHMVQSGTPHRDLGADYFDRRTPETKAKRLVAQLARLGYAAQLQPLAEAA

SEQ ID NO: 87135 - protein, 403 aa, unidentified
MPGNRRRRRLTVANTRTEHDRFIAELQALAPRPVIVGFEPTGHYHRPLAWRLVQAGFDARLISSVALARTREALHNGWDKNDPKDAQVILHMLQIGAAKPYHDPLANEINNIQELSVTHEVISRAKTEVQHRILTHYLPLYFPEIERFKGNTRSDWFFALLEQFPVPAAITALSKEAFVAAAWSVVGRKVSKSRLLGDIWETAHRSIALPVSPDAPAIEMFRVVLGEARRLIAQRDAIEEAAIDLLGDHSDFQRLQQVPGIGPIHALTILAEAGDLRRFRHHRQFLKFCGLDLSTYQSGQYRGKTKLSKRGNARLRRTLWMAAQVAIRQRENSFRDKFDRYVARDRHDPDLRRKAFTAITAKMGRVVHAIIKRGDDYRPFVEGPVPGGGTPLYWCHEGASATL

SEQ ID NO: 87136 - protein, 395 aa, unidentified
MFIVGIDIAKRSHEAIIIAEDGQVVRKAFSFRNNCTGYNLLLEQVRRLTLVKSQIVFAMESTAHYWLALYARLLKDGYAVMVLNPIQSHSLRELYIRKAKTDARDSLIIADLVRFGRCKASNVPQDKILALRELCRSRAYLVDMAADLKRKLIALLDRIFPEYESLFDSVFSKASIAVLSKYSTPQKVKNANLRKLTDILMESSNGHFGEWKAHQLKEAACSSFGIDDSGGVYSTLLGMFLEQILSLTAQADSLEKQISVFFQEFNNPLTSIPGVGTVLAATILSEIGDITRFSSADKLLAYAGLDPSVKQSGEFKSNQNRMSKRGSPYLRRAIWLASTVAVHRDPMFQTYYEKKISEGLHYMNVIGHVSRKMTAVIFAVLRDGQPYQPILQSAD

SEQ ID NO: 87137 - protein, 314 aa, unidentified
MTSNAEIVGIDVSKSTLDVACWESKAYRQFSNETKGIPELIEWLKELQPELIVLEATGGLEMPLVAELAYAKMAVAVVNPRRIREFARSMGQLAKTDKLDAKVIAHFGVATHPEARKLPTEEEERLTALITRRRQIIEMLTAERNRLHSARFAMKERIETHITWLEGELKDLDKEISDFIQQSPVLKEKEKLLRSVPGIGPVTSATILAMLPELGTLNRQKIAALVGVAPVNKDSGKRQKTRRVFGGRANVRSVLYMAALSASKHNPIIKAFYDHLVRMGKEKKVALTACMRKLLVILNAIVRINQAFSLLPVN

SEQ ID NO: 87138 - protein, 451 aa, unidentified
MDQNFYLGIDVSKGYADFIILNKDKKVVEDNFQLDDTFEGHNQLFKIVSDFITRNPEAELFAAVESTGGYENNWLAYLIKCQSKLQLSVARVNPFGVSYNSKATLRRIVTDKESAKNVAEYLISHPEKIQYNNEDYYSSVRKQWTFIKMLTKQKVQLLNQLESLLYIANPEVLRYCSSKVNLWTLKMLKQYPTAKHLAKVKLSTLSKIPYITEPLAKDLIDNAKKSVASSIDDTTAEIIKALVEQILQLRRLIYLQNKQLESNCNLAEVELLKSFEGIGAYSAVGLMIEILSVERFSSVKKLASFFGIHPVFKQSGDGLSGFKMSKRGRKEPRQILFNVARFAVVHNPYIKEIYVMHLKKGMPKMAALGAVMYKILRIIYGMLKNNKPFDAEIDRANRAKHNSVDNQTKPDYTRRYQQMDIKAPISRRQIKKRKEQEKSHILKPLNAESQF

SEQ ID NO: 87139 - protein, 344 aa, unidentified
MKVSVLGIDLGKNICSIVGLDETGAVVLRRQVKRKTLIGLAAKLSPCIVAMEACCGAHYLGRLIAGQGHDVRLMSPEYVRPYIKAQKNDDRDAEGIAEAATRPTMRFVELKTQEQLDMQTLHRSRDRLVAERTALINQLRAILLERGIIVPQGRRELEDELFMLINEQRDAGVSPRLLKLVEDMRTEWRELDRRITVFDKEFAAFAKENQDARRLATIPGVGVTIASALIAAVGKAEAFERGRDLAAWLGLVPRQATTGGKPKLLGISKRGNIYLRKLLIHGARAALPHVAARDTALGRWVKALLARVHKNVAVVALANKLARIAWAILRRGEKFAAKGLPMTA

SEQ ID NO: 87140 - protein, 346 aa, unidentified
MNYIGIDVHKSICTAVVMNDDEKVIDQIIDFGTNDEGCSFIVDRYSPEDSYILFENLTSAHRVYHFFKDRGYRVEGLHTGHGCVTEISKTDFKTDLEDATKLARMCKDHFTGRREYALAHFADIDSMKAKELCRVMNDCSEQRDKLNLRIQAYMDLFDIHLPKGLKNVYTNKAMAYLKSLNHPALTIMVEDMASAMAHIETSREGLESLFKDNEDVKNLMSIKGIAIQTAATIYTAIDGIERFETPESLVSYFGLKITRHESGGDRDLHGHINKRGDPLVRKYLANVVVKHSIYYPDSDLAGFYKRKKEVMPHWKAVTAAMRKLVCIIWAMLTRHQVYRFSSPVKA

SEQ ID NO: 87141 - protein, 344 aa, unidentified
MEQISRIGMDTSKHLFQLHGVNAAEAPVLRKKLRRKEMIAFFEKLTPTVIAIEACGASHHWARLLQSFGHSVKLIPPQLVKPYVKRGKNDAADAEALCEAMSRPTMRFVPVKTAEQQAVLMLVGVRDRLIRNRTQLANAIRGHAAEFGLTAAKGMTHLVPLLERIQADESLPTLARELFAIQATEYAQLQVQIDEVDAKLTAWHRADECSRRLAKIPSVGPIGAVLLRMKTPDPAQFQSGRQFAAWIGLTPKDHSTAGKVRLGVITRAGDEALRSVLVVGATAVIQHAQRSGKASPWLVELLKRKSPKLTAVALANKTARIAWKMMLTGEPYAAKSAPAVLAAV

SEQ ID NO: 87142 - protein, 309 aa, unidentified
MDIIVGIDVSKDRLDVHVTPSGDSFFVCNDHAGIDGLLTRLAGLGADVVALEATGGYETLAVAGLSGAGLAVIVVNPAQVRAYANALGRRAKTDPIDAAVIAAFVAATKPEIRPLRDAETQALQELVARRRQIVQMITAEENRDRMVLAGQARKSIKRLLVALRRELKSLDADLDDHIRKSPVWRVRETLLISVPGVGPIIARTLLAEMPELGTLDRRQIASLAGLAPWTRQSGKWKGKSFIGGGRGKVRAALFMAALVASRHNPVLKAFRDRLVESGKPKIVAIVATMRKLLTILNAIIRDEKPWQNA

SEQ ID NO: 87143 - protein, 453 aa, unidentified
MKKEKPQKGIIKMGSSLPVFNPYAAGIDIGDTLHCVAINDGNGGHEVKTTSAFTCDLHEIVDYCKSNGVTTVAMESTGVYWLALYLLLEEAGIEPYLVNAKHAKNVTGRKKDDTDSIWLQKLHTCGLLQKSFQPDNEIRLLRSYTRQRKNLILLGSDSVRRMQKALELMNIKIHTVISDILGKTGMGMLKAIIAGERNPEILCTLCDPRIKASREDIIKSLQGIYKEEYLFMLEQAVENYEFLQKQIKSCEEKIQQQLLKQVAIIKEGDITCVEETPKKKAKAKAKKNQFDFSLLPYLIAIAGVDLCQIPGISEVTALEFISEVGLDMRKWKSSKHFAAWLNLTPNTKITGGKIISSKMLKKNNKAGQLLRQAASCLITNKTAIGDYYRAMRARLGGKGAALATAHKLARIIYTMLLRKTEYNSGMIVENQEKIKKEKIKKLEKQIARLNQAA

SEQ ID NO: 87144 - protein, 356 aa, unidentified
MNNLSKLDFTGQPIYIGLDVHKKSWSVSIHSQQCEHKTFTQPPEVDTLVHYLQRNFPGASYSAVYEAGYSGFWIHEQLKEKGVSCLVVNPADVPTKDKERAKKRDRIDCRKLARSLRGGELEGIYVPGRSKLEDRSLVRTRQSMVRKQTRCKNQIKALLLFYGIHLSEEQVKSHWSRRFLEWIEGLRMERSSGDLALQVHLAELRHLRQILVILDRGIRELSLTEEYREWVRLLKTIPGISTLTAMILLTELIDLCRRFSSLDQLSSYVGLIPDTQSSGGTEHTGEITKRRHGQLRAILVEAAWVAARKDPALLGAFEGYCQRMRKAMAIVKIARKLLNRIRFVLKNHKPYVPAVV

SEQ ID NO: 87145 - protein, 387 aa, unidentified
MEVRMVNTPSADSNNEPVACYVAIELSKSGWLVGFLTPLSDKTSRYQVKAGDAQALLDLIERVHTRVARQLNRPVEVMSCYEAGYDGFWLHRVLEAHGIHNHVLDPASLQVNRRARQAKTDRIDVDRMLRALIRYLRGEPEACSVVQVPRVEEEDAKRLHRERKRLVAERVQHVNRIKGLCAAQGIYNYAPLRPDRWSQLDKLRTGDGRSLPARLKSEIVRELKRLELVLEMIETVEVERDAIIKDPRSRHLNADKIKMLARLRAIGPEFATSLTGEVFYRKFANRRKLGRYVGLDGSPFRSGSVERDQGISKAGNPVARSMMVELAWTWLRYQPDSALSIWFRERVGNLKGRPRRIAIVAMARKLLVALWRYLETGVIPTGAVLKA

SEQ ID NO: 87146 - protein, 499 aa, unidentified
MPSTNVAAAPILGAMKRKSIFRNESQKLDAAFIEAGLPERVLLVPLDFAKVTHYACFCDGRGTYIRKAFTVKNNQEGIDYLVDQIERTRVARSIKSKRHVIIGGEDSASYTRNFMDRLFELGYLTVRLDSKEVHRQAESVDSSTDKTAVRAIAKTMLNRDARQVGGSDPYAQLRGLTRQRRRIVHLSTAVKNRIHTHADCLFPGFLSKDSAVAAFSMASLELMANKFSAATLARKSEKTLTRTLSRQGVRSAPEVAAKLKEQARNAICADDASVQLSSQLIESELRLFQTLQSSLSQLDRESARILLQLPEAFAVSIKGIGITLASSIFAETGSLSQIQRCDQINAYAGIAPRVKQTGGPESPARIGGKRRNFNRILKDYTLQAGNHLYLHGPEELLHDAARRKLAGKAVDTAMARRFLRIARALAKSHSIYLPSHLRTAQAGTDVEAQTRAQYIVKTWPDFLLKWKRLGLHEEAFAPETPLGDWRIIVQEIYEIDLPI

SEQ ID NO: 87147 - protein, 437 aa, unidentified
MKHLAIVDPRAAFVDVGSEHMHVSVAGDEPAVFGTVTSQLHALRDWLKSQGVRSVAMEATGVYWLPLFGVLEAAGFDVRMVNGRQTRNLPGRKTDMQDCQWGATLHAHGLLRAGFVPPADIRRLQDYLRLRADHVASAATHVQHMQKALERMNIKLHDVISSLAGLSGLAVIRAIVAGERSPEALLAQCDRQIRRAKAEQVKESLRGTWCAEHLFALRQALQSWEHYQRQIVECDREIEATLPPHDPDTTPLARPKAVKRAGVNSPDIPKLREILAQMCGGRDLTQLPAHTHYGVLQLIGEVGTDLTKWPTEKHFTAWTGLAPGNHDSGKRKGRVKRGRNRAGRLFCMMAQCLARSKDIALGGFYRRMSARRGGLVATMALARKLAAWFWRVMVKGDDFVEQGIAHYEAQVLQTKQRALKRLAKELGQQLVPVVETP

SEQ ID NO: 87148 - protein, 361 aa, unidentified
MILGVLIFEPRRRPLVSECDGSQVVGVDLHRRRSVIVRQSESGERLGVRRMVNDPAELMAEVSKAGPSPRVVLEATYGWYWAADALAEVGAEVHLAHPLGVKGFTYRRVKNDVRDASDLADLLRLGRLPESWIAPPAVRELREVVRHRAKLVQWRSGLKASVHAVLAKQGVQLPVSDVFGVRGRLLLAQARLDKPYRARVNSLCRLIEACTWEIDLATQLVTQRLAHHDGYRVIQQLPGVGPVLAAVFIAEIGDVHRFTSARHLCSWAGLTPKHRESDTKVHRGRLTKQGSPLLRWAAIEAVQKMPADAGWLVSTRTAIAARRGRQIATVAVARKLLTLIFYGLRDGHIRALHQPHQTVAG

SEQ ID NO: 87149 - protein, 340 aa, unidentified
MKYIGMDAHSKNSYFVILSRNGQVINREKVETQEDTILGFVRSIKGSKKLSYEEGVMSQWLYLLLKDEVDELIVCQPPKSKGAKNDWLDAAEIADLLRVNRLKSVFHSDDVLMNLRVLISGYDDLLQEIIRTKNRYRALYREAGISTKAKDVYEDQELLLQLDSEHRQLVGNSLYEQVQLLELHKQKYVKRLDQNVHKYKPVKLLAGIPGIGTIRANHIVAVMVTPYRFSRKGKLVAYSRLTKHGRMSDGKLYGRKRSLGQPILKDAFRGAALSSIKGSNAFRREYDKQRAVGRNDKEARNKIAKMVAATVLGVWKSGKPYDDKHWEVTQKRNQSCCRHM

SEQ ID NO: 87150 - protein, 370 aa, unidentified
MKQIRSFIGMDVHKETISISVAEDGRNGPVRFLGVIPNTVEDVTKMAKRLAKHGELDFCYEAGGCGYVIHRQLTALGHKCVVVAPSLIPRKPGARIKTDRRDSEKLAILHRAGDLTPVWVPDTTHEALRDLVRARVDASMHLMRARQQLLAFLLRHGRSYPTGKHWTQRHRSWLAGQTFQEQAHGIVFHDYLETVWTAQQRRDALIEQITVMVGSWSLGPLVEALRGLRGIDTISAATFLASTGDLSRFESPRMLMGYLGLVPSEHSSGGSIRRGGITKTGNREARRMLIEAAWSYQYPARIAQEKAEILVRLPKNIRDIAWKAQSRLCPRYRSMVARGKKNTVVVAAIARELAGFIWAIGQEMRSQMAT

SEQ ID NO: 87151 - protein, 354 aa, unidentified
MEHFAGLDVSMEETHICVLDREGALIREGKTATSPKAIRDFLAFGPECKGVVFETGRMAPMLYHGLVELGISVQCIESRQAYQGLKSLARHKTDRNDARGLAHLARTGFYKPTHVKSLSAHAVRSLIAARKKLVGQRVTIDTQIRGLVVVFGVRLPRALSPAFKDAALAVSDGVPGLHAALCGLFSARETIPTAVAAIDGDIKKMTRRSKVCQRLMTVPGVGPVTALAFAAAIDDPHRFKKSRDVGAYLGLVPQRHQSGEIDYTGSISKRGDVKVRTLLYEAANVMLTRYAAPLKLKSWALAIAARSTMRKARVASARLQFQPCRPTSSQPHPEPRSSKRTSDIDSNWKSTLTD

SEQ ID NO: 87152 - protein, 319 aa, unidentified
MDYIGVDVSKQDISVFDYKGLSTFKNEKGLKDLRFYIKKQFKSYDDIAIIFESTGVYSDYLKEFCSIHKIKACIVNPKKSSNFAKAIGNRSKTDKIDANMLYRFKDIISQKDILIPETNETADRLSSYLTSYEFISKKVTSISNHIEALKHKSDTPKDILRMFEKELKYTKEMQNKILLKMEEFIENNKGLKKDYENLLTIPGIGKISAIALLTLFTTYKDTNRSQITALAGLDPIRKESGTSVNKRRKISKSGNKMFRKILYFPMLTAIRYNKKIKKFYDRLVENHKPKKLALIAAMRKMILIAHAIYKNKTVFCDDL

SEQ ID NO: 87153 - protein, 283 aa, unidentified
MENIALIGIDLGKNSFHIHCQDRRGKAVYRKKFTRPKLIEFLATCPATTIAMEACGGSHFMARKLEGLGHSPKLISPQFVRPFVKSNKNDFVDAEAICEAASRPSMRFVQPRTESQQAMRALHRVRESLVQDKVKTTNQMHAFLLEFGISVPRGAAVISRLSTILEDNSLPLYLSQLLLKLQQHYHYLVEQIKDLESQLKRKLDEDEVGQRLLSIPCVGTLTASTISTEIGDGKQYASSRDFAAATGLVPRQYSTGGRTTLLGISKRGNKKIRTLLVQCGFVE

SEQ ID NO: 87154 - protein, 415 aa, unidentified
MALKIVYKICCGIDVHKNFVVACIAKTDKQGVTTYERHHFSTYTKGLKQLLKWLLDRNCKDVCMESTGKYWIPVYNVLEHDCSIVLAHPKYVKAIRGKKTDKKDAKWIADLFKHDLVAGSFMPPADIRQLRDLMRYRFKLTCFKSSEKNRYQNCLTVSNIQLGNVVSDTFGKSSQKIIAKILENPDDTSFDIGSLIHGSMKDKLPELELAIDGYITPEQAAKLKIIKEHFDNLEARKAELEELILALANPYQQEISIILTAPGFKNTFTAIGIISEIGTNMEAFPSAKHLCSWAGLTPTNNESAGKKKSVRVSKAGCYIKPLLVQCANAAIKSKKHPEIRDRYLRIKKRRGHKKAIIAISRMLLTALYHMLKNGENYNSDLYQKSDILPTTREITVEQAILMAQFQGFRIKSATE

SEQ ID NO: 87155 - protein, 369 aa, unidentified
MGDRITYVGLDVHKEGIVVAVAEGGLRGEVRDYGRIANAAAALDRLMRKLGGTGVRLRFCYEAGPCGYGIQRQLSTAGHECVVVAPSLIPKRAGDRVKTDRRDAASLARLHRAGELTAVWIPDAGHEAMRDLVRARLDAVHALRRARQQLSGFLLRQRCHYGRPAWTRLHRRWLAGLRFEQAAHHLVLEDYIQTVEAAEARRDRLTAQIAAMLPDWSLAPVVAALQTMRGMALVNAATLIAELGDLSRFANPRQLMAYLGLVPSEHSSGASLRRGGITKAGNSAARRLLIEAAWCYRFPARVSRDLCLRQEDQPKPIREIAWKGQVRLCARYRRLARTGKPATVVTTAIARELVGFVWAIARQVTIPAG

SEQ ID NO: 87156 - protein, 450 aa, unidentified
MGNASGVSRGDCNRNARLARLRSLVPVTNAIVGIDLADAKQMVVVTDHDSKVLARKTFRCRAWDLGAALGWAAERAAAKGFSGVTVACEPTGHRWRVLGQLAADRSMPFVCVQPMLSSWARRSEDLTSDKTDEKDAVLIARLTAQLRCYVPEPVDETWGRLRHLGARREQVIVEMVSQIQQMRALLECVWPAALDTAKQPFRSKTWVAAMSAICERDGGDLDRTRRLGPARFEQAVRREILKRGGQKPSLRIARRLFAALTDPTGVIAHRPGALERVAFLLVDWHTAGDKLTDTEARMISVLGELKLTALATSIPGLSPVGAAAILAETGDPNRFASGRALVKHAGLAPREKLSGTFVGRTKLTGAGRPGLRLAAWRAVWGTQRGNTVYAARYRHLTSREQNKLTATQAQTVIAAAILRQLHAVITTGQAWDPDIATHGTGHRKQMPIAA

SEQ ID NO: 87157 - protein, 351 aa, unidentified
MKIVHYIGFDVHKKTIQYCAKTADGTIVGEGKLRALRQELTNWAEQRTEPWHGAMEATLFSGWIYDTLKPYAAQLDMAHPAMMKAIGAAKKKSDEIDARKIADMVRCNWLPVCYVAPAEMRELRRLLRYRNLVVRQAVQMKNKIAGLLMEVGEPYNKQKLHGKRYFEELLGNLQETPASVKDLLRLSRGALELFEATQKRLLKQLQEAPQLQQRVVLLRSIPGVGEVTALAWALETADPHRFPSIGQAQSYCGLTTALSASAGKEHRGPISKQRNAHLQTTLIEAAKLAPRWNVQLAAVHAKELERGHRNRATLAVARKLVAYLLAVDKSGQRFQERGPATTEEEETKTTA

SEQ ID NO: 87158 - protein, 344 aa, unidentified
MGEVITIGLDIAKSVFQVHGVDRDGAVVIHKRVSRSKLLEFFAAKPRCLIGIEACPSAHHWGRELQSLGHTVKLLPPSYVKAYVKRSKNDANDAAAICEAVTRPSMRFVPLKTREQQAALMLHRTRQLLVRQRTMLSNALRGHLAELGIVSAKGRNGTGELLGIIADAEDGRVPQAARAILEVLARQYRAIGMEIGLIDQSILAWHRSCEASRRLAEIPGIGPIVATALIAEVGDWKSFSSGRSLAAWIGLVPKQHTTGGKQRLGHITKQGNRYLRWLLVAGAMAVIRYAKQHGTKNRPWLARLMERRPAKVAAVALANKIARIAWAIIVRGERYNEPKLLMAA

SEQ ID NO: 87159 - protein, 338 aa, unidentified
MKLYGAIDLHSTNNVTVLINEQDEVVYQKRLSNDLALVLEQLSPYQLSIQGIVVESTYNWYWLVDGLLEADYQVHLANTAAIQQYEGLKYTDDHSDARWLAHILRLGLLPEGYIYPRQERAVRDVLRKRSQLVRQRTANLLSIQNQITRNTGSSIRANRIKRLSAHEVEGLLPDGDVALAVKANLSVLRCLETEITQLERVVKERVQLQPAFRYLLTVSGIGPILALTIMLETGDIRRFGSVGRFASYCRCVRSEKLSNGKRKGSGNTKNGNRYLSWAFVEAAHFAVRYEPQIRSFYQRKKAKTHAVVAIKAVAHKLARACYHIMRDEVPFDVARAFS

SEQ ID NO: 87160 - protein, 334 aa, unidentified
MEMLYGAIDIHKHVFQAAVFDADSGEVVEERFPATRERLDDWAMEWQGRLTAVAIEATSGWRWVVRELQQHGFVVQLADPGQAVALKGKRRRAKTDRLDARWLAMLLAKQMLPTAWIPPEEIQRLRDLTRLRLALSQDRTRWAQRLHAFLGHEGWPCSRSRLLTAKGRLWVASLALDPHAKAQSERLLRLIVALEQEIAELDSELRRLARADARLRALQTIWGVGPILACHLLAEIGDARRFRRARQLVRAAGLDPVVIESADNKRRGRLSKTGSPQLRWALVEAAQHACRNGSPDLELYQSVRERAGAQRATLTAARKIARRCFHTLAAAEAA

SEQ ID NO: 87161 - protein, 358 aa, unidentified
MKYVGIDVHKKMCQAAVLDDEGSLLDEIRFPNDAEGIEEFAGKLTSYSDEVSAVVESTGNLWIQIHDRLEKHGFTVALSNPAKTRLIAEAKVKTDKVDARTLAALLRADMVPTCYVPGEELRSRRELLRHRVNLVKNRTMVKNRIHGILDKHGLRMPGAYPFSRGNVDWLRGLSLGFMDDAILRSDLALLEALSGQVDAIEAKIAALAVEDKRTRLLMTMTGVGYFTAMLILSEVGDIGRFRSEKAFSSWMGLAPMVRQSGERTWVGGVPRQSDGRLRTALVECAQSAVRFDPRFRGLHERVSRRRGAGCATVAVAHEMARIMYFMLSRGEAYRGVDVGLVGRKLKDMDRKAMNGLRS

SEQ ID NO: 87162 - protein, 341 aa, unidentified
MNHKFTNKKYFIGVDISKDTLDVAVLNEDSYGSYQDLVVENNFSGFDKIQNRLAKQKIDLKDCMFCMEHTGTYGLLFFAWLDQMQIDYCVEAGTQIKKSIGMARGKNDRVDARRISDYAYTNRMKLKPFQLPSAIILQIKQLLTYRRQLIKIRTSLKNSLKSHNQYERVSGLKSISEQIKAQIKEYDIKVDHIEKQIIEVINTDEELKKNYKLAKSVRGIGPIITAFMIVTTNNFTAFENGRKYACYSGIAPFDNLSGTSIKGRSQVSNLANKRIKTLLTNGANSACVWDPEIRKYYDKKKSEGKEHNLIINSIRCKLVNRVFAVIKRQSPYVNIYQQNFN

SEQ ID NO: 87163 - protein, 292 aa, unidentified
MAMLSFAGIDVSKDRLDVMVLPEEQRSSVSNDPTSWAELVEQLRALSIAAIGIEASGGYERGIMRALLSAGMPVRHVNPFKLRQFAKASGVLAKNDPLDARMIASFVAIMPTRPAPRQAPAAERLTEMLAVRRQLSAEKVAAENASRLLEDAMLRRLSRRRIGRLGTDIDLLDKHLVGIVGTDAALAHRYQLLTSMPGVGVVLACTLLALLPELGRMSRKQVAALVGVAPYAFESGTLKGRRCIWGGRAHVRQVLYMAAMSACNWNPRFKTFHDRLKAAGKLPKVAIVADAS

SEQ ID NO: 87164 - protein, 339 aa, unidentified
MTIVGCDFHPGWRQVAVFDAETGEIRELKLENGNGEAERFYRQLSAPALIGFEACGNTQWFEDLLDRLGHEVWMGDAAAIRASYVRKQKTDRRDAAHILKLLMESRFPRLWRPSAGERDLRQLLIHRHKLVGIRTRVKNGLQHLMLNRGVQMKRKLWSEAGQKALRALPLEGWAAQRRQDLLHLLSGLDPQIRQLDVAIERAAQENPRAQLLMTQPGVGPITALAYVLTMGDVSRFQRGKQVASYLGLIPSEHSSSKRRRLGSISKQGNSFMRMLLVESAQTVNRLDEGFRKQYQHRCHRMARGVAKVAAARRLAVRLFWMLRTNTAYPEIAHIESSPR

SEQ ID NO: 87165 - protein, 312 aa, unidentified
MDLFVGIDVSKAMLDVAVAPTGEAWSVPNSTEGMQQLVSKLSEVSPKLIVLEATGGLERRAIAALAGASLPVVAVNPRQVRDFAKATGQLAKTDAIDASVLALFAERIRPQVRPLRDEETQELEALVVRRRQVVDMITAEKNRLAAAPPSKRVRTAIGKTIKWLQKQLEETDNDLDNAVKGSPMWREKDDLLRSVPGVGKVLSRTMLSLVPELGTLGKKQLAALVGVAPLNWDSGQQRGRRCVWGGRAHVRAVLYMGALAATRFNPVIRAFHARLIAAGKLPKVALVACMRKLLTILNAMVRDRTLWTREAP

SEQ ID NO: 87166 - protein, 361 aa, unidentified
MKKPSQHLIAEVPRRQAKVEMTIGIDLGDVWSHYCTLNQDGEVVDRGRFRTTPKAIEKWFTDVPSARVAMEAGTHSIWISEQLQELGHEVIVANVRELRAISHSDRKSDQVDAEKLARYARLDPNILRPIAHRTVGQQEALTLIRARALLVRLRTAAVNAVRGLTKSCGYRMPASATTCFAQRCLAVMPPGLAQALGPVLQQIAEITVKIKQYDRQIQQLGQTEYPETQALLKVHGVGHLTALTFVLTLGSKERFGRSRDVGCYLGLRPRRSQSGDHDPQLGITHAGNAYLRSLLIECSNHILRPHGRDSALRQWGLHLAGRGGKQAKSKAVVAVARKLAVLLHHLWSTQEPYVPFYEQAA

SEQ ID NO: 87167 - protein, 387 aa, unidentified
MIYYIGIDISKYKHDFCIISNTGEVIVRNSSFENNKKGFQSLLDQLKPYNKSDVHIAFEATGHYSMNLELFLIDQGYSFIKMNPLVIHQFLKAQSLRRTKTDKADSLTIANYLMSVPYKPNSDILYNIFTLKSLCRSREQLIKERSKYQVLLTNQLDLTFPELKSFLDNRISTTLLFILEKYTNTEHISLMRDYDSIRCISRGKFSYSKFAKLKELAKNSVGHHDENTDLLISTYVSIIKTFNDKIDPIEKQISTIIKELNPRMLTIPGLGEISAATILSEYGDISNFSSPNKMLAFAGLEPSIIQSGTIENNGKMVKHGSGHLRYSIMNTAMIILRYSPTFYDYYLKKRSEGKCHRVALSHVCKKLIRVIYTLEKNNIDFDPSLLR

SEQ ID NO: 87168 - protein, 345 aa, unidentified
MKQYAGIDVSLEYSSVCVVDADGRIVCEAKVLSEPDALIAWFAERGVVMERIGVEAGPLSQWLHAGMTKAGLAVELIETRHVRAAFKTMPVKTDKKDARGIAQLMRLGWFRPVHCKSLPAQELRALLTARKLIQGKLHDIEMSIRGILRGFGLKVGPTTRRTYAARIRELIEGHPTLEAIAASLLKVRDALTDEFAGFERKLRGMARQDDKARRLMTTPGVGVLVALTFVAAVDAPERFRSSRAVGPHFGLTPKKYQSGETDYSGRISKIGDVGVRTALYEAANVILTRPVKGSDLKSWALAVARRAGPRKARVALARKLAVVLHHMLRDETNFIPHKPLPAMAA

SEQ ID NO: 87169 - protein, 338 aa, unidentified
MTLYVGVDLHSNNNYLGIIDEENRTVFKKKVQNDLGKILQILEPFEKNIAGIVVESTFNWYWLVDGLMVRGYRVHLANPAAIKQYEGLKTIDDLKSALFLANLLRLGILPTGYIYPKEERPLRDLLRKRLQLVRQRTSHILSIKNIMSRSLGIQMRSNDVKKLDEQQVKKMFPEEHLFLSVYTSVKLMHQLEQEINYIEKVVKETARLRKEFKLLLTLPGVGLILALTIMLEAGNITRFSKVGNYSSYCRCVRSSRTSNGKSKGEGNRKNGNKYLSWAYVEAANIAKRYYEPIARYHQKKTVKTNKAVAIKAISNKLARASYYIIRDQMPYDRTKLFC

SEQ ID NO: 87170 - protein, 437 aa, unidentified
MTTRAFVGVDVSQADAHVCFLLADGSEPAPRWSIPNTQPGAEALSQTLAQLAHQHAITELRIGMEATGLLWWHLAQHLRATPRLAPYAPQVYALNPHLVTTFRANYGALPKTDRADAFLIAERIRFGRQLPAPFQRDARYAPLQRLTRFRLHLVQNLAREKNYCLSFLFLTFSRFGQVSPFGDPFGATSSAVREAFTTEELAQQPLEALTAYLQAKGHGRFADPTAVATTLQRAARDSYRLDQVLQEPLRVVLATTLASIRGLHAQLKTLDVTIARELAGLPQTLDTVPGLGPVWTAGLVAELGAISRFDDEAAIAQYAGLTWETYQSADYQAEDTALTKRGNPYLRYYLVEAANSVRQHCPEYGQYYAAKAAETPRHAHKRALVLTARKLVRLIDALLRTGARYQTPAERQARAGTLPHAAHPRPPRRYKRARAIA

SEQ ID NO: 87171 - protein, 350 aa, unidentified
MIIIGVDFHPEFQQIALVDKETGEFQEKRLAHREEAENFYRALAGAGQKVRVGMEASGHARWFERLLAELQIELQIGDAAEIRTKRVRKQKTDRQDARLILQLLLEDRFPQIWVPSWENRDLRQLLWHRHRMVQARTRIMNQLQAVALNEGLRCKKRLWRAHGREQLESFRLAPWASRRRRDLLELLDRLNPTITELSQAIEQEVEKCPAARRLMTHPGVGPLTALGFVLIIGDASRFQCGKQVASYLGLVPLEDSSGNRRRLGHITKQGSSMLRFLLVEAAQVTVRSLPQWRSRYLHLMMRRGRKTAKVAMARRLAVRLYWMMRQGWDYQQSIKFGSHAGQPGHRDGVQ

SEQ ID NO: 87172 - protein, 340 aa, unidentified
MGEITTIGLDLAKQVFQVHGIDADGTTVLRKQLRRSQVLSFFSRLAPCLVGMEACATAHYWGRELAALGHEVRLMPAQYVKAYIKRNKNGAADAEAICEAVVRPTMRFVPAKTAEQQAALLLHRGRERLVRQRTGLVNALRGHLAEFGVIAPQGLRNVGKLIAVVRDVGDARLPDLARQVLEVLAAQIEQLEGAVAAVEKQLMAWHKSNPVSQRLATIPGIGPIIASAIAASVAEPGGFRSGREFAAWLGLVPRQNSTGGKHRLGGISKRGNQYLRRLLINGASANLLRSKATKADPWVIGLRRRRPSLVVAVALANKTARIAWAVMQRNENYQRMAAAA

SEQ ID NO: 87173 - protein, 312 aa, unidentified
MSQNIPILYVGVDVAKSALAVHLAGQHLHFPNSPAGHAQLGQRLAKWPQCHVVCEATGGYEQPLVQSLHTAGIPVSIIEAGRVRHFARAKGLRAKTDPIDAAVLTAFGQAIQPVAAPPPSAQQTQLAELVQRRHQLTQLAVNERNHAEHYTDKFRRQQSRQLVRLLEKQLQQCDAAIAALLKADAALAHKAQRLQAIPGVGPVVAATVLAQMPELGQLNPQTAAALAGVAPYNWDSADQKGRRAIAGGRRAVRTALYMAALSAVRYDRILKAFYQRLLAAGKKPLVALTACMRKLIILMNRLLKNDHVQLAT

SEQ ID NO: 87174 - protein, 345 aa, unidentified
MQSMYYVGLDVHKKTISYCVKDASGHIHLEGTIPATRMDLNRWMKTLPEPWTAAMEATIFSGWIYDHLKPHAAALKVAHPLMLRAIAAAKKKNDRIDAHKIADCLRCDFLPESYMASTEIRERRRTLRYRNLLVRQAVQMKNKTAVLLMEAGVAYNKQRLHKVGYFRELLTTNQDIDDGLRSLLRMCRETVVRLGKTESALVRSLQRDPMLRERIDRLMTIPAVGPITALTWVLEVGDVRRFSSIKKAISYCGLCGAEKSSGDTIQRTPLSKQRNRHLQTILIEAAKMAPRNSPALAMIYDREKQKGNANRATLAVARKLVAYLVAVDRRQKDFLVVENENCTAA

SEQ ID NO: 87175 - protein, 380 aa, unidentified
MEKACGLDVHKESVFACILDEQGEKIFEKRFGTLTPDLIALRDTLVEYGCGRVAMESTSIYWMPVWHVLDCDFDLTLVNPYFISQLPGRKSDAKDAQWIAECLQKNSLKRSFVAGDLLQQMRQYTRQHRRLTKSKVRLEQQMDNQLQRCNIRFSNYVSRQGTNVSLRKIINAIISGERDPVRLCRLVHGRTRNKHGEQVITDSLSGVVQQADVEILIQCMEQLKLIDKQQATCLYHLEELANTHFAEEISLLCTIPGVKTFSALCILAEIGNDMSAFQKATHLVGWAGLRPRNDETAQKIKSRKILHGNKYIRQILVEVSWAVTRANKSFLKRKFNILAKRMKSQKALIAITRKLLVIIYNVLKTKQPFDINRNLQAFIA

SEQ ID NO: 87176 - protein, 350 aa, unidentified
MIIIGVDFHPEFQQIASMDSDSGEFQEQRLAHREDAEKFYRGLAAAGQKVRVGMEASGHARWFERLVVELQFELWIADAAEVRTKRVRKQKTDRQDAQLILRLLLEDRFPQIWVPSWENRDLRQLLWHRHRMVQARTRIMNQLQAVALNEGLRCKKRLWREGGRQQLESFRLAPWASRRRHDLLELMDRLNPTIRELTQAIEQEVEKCSEAQRLMTHPGVGALTALAFVLIIGKAERFDCGKQVASYLGLVPLEESSGNRRRLGHITKQGSSMLRFLLVEAAQVTVRSVPEWRSKYLHLMMRRGRKTAKVAMARRLAVRLYWMWRQGWNYEQWNKFGSHAGQPGHRDGVQ

SEQ ID NO: 87177 - protein, 317 aa, unidentified
MQEVQVFVGVDVAKAELVIARHGQAGAVAIPNEVQAISTWLCGLPPGACVAMESTGRYHQLLARLAHAVGMQVFVLNARDVHFYAKALGARAKTDRVDAHVIARYVAEQHTRLHRWIPPCPALQQVHSLLGQRWAVVNKRMALRLSLQGCDEEIITQVQVLEAGFAALLKAIDARIVALLEQDVRVRERQRLLQSIVGVGPQSSALLASVLSRVNFVSADALVAYSGLDPRACDSGSSRGRRRLSKRGQPALRHQMYLAAMSACHTSTFKGTYAALRGRGLKTTEALVVLARKLLRIAFAVWRSGQPFDPQRFAPAA

SEQ ID NO: 87178 - protein, 354 aa, unidentified
MTSTKYIGMDVHTESISIAVRNSIGKIVMECVIETKASTILQFINGLCGDLRVTFEEGTWATWLYDLLKPHVTEVLVCNTRKNASRNGSKSDRIDARKLSEQLYMSNIKSVYHGEHGLRTLKELARSYLTITKDLTRVMNRLKALYRSWGIPCAGKEVYAPRHRAEWLGKISEAGVRRRAEHYYQQLDVLRPLRQEVRRDLLAEAKKHKAWNLLRLIPGIGPIRAALVIALMQTPHRFRTKRNLWTYSGLALETHDSAQYRVAEGQLQRSKKPATVRGLNKDHNHDLKDIFKGAAMRASNAAGPLHDFYQALLAKGRKPTMARLTLARKIAAITLIVWKKEVRFDANYLKPQAA

SEQ ID NO: 87179 - protein, 317 aa, unidentified
MRASAAFFVGIDVSKQQLDIAVRPSGESWTVAHEEASLSALVARLRDLAPTLIVLEATGGWEVPVTGALAAAALPVAVVNPRQVRDFARSTGLLAKTDRLDAQLLAQFAEVLRPAPRPLPDAQAQELTALLQRRRQLVEMLTAEKNRLPLAARRIRPQLQAHIAWLHQQIAQFDEDLRQLIRSSPLWREKDDLLRSTPGVGPVLATTLVAALPELGTLSRRQIAALVGVAPLNRDSGTLRGRRTVWGGRAQVRAVLYMSTVVAVRHNPVLIAFYQRLRAAGKAPKLALTACMRKLLTILNAMLKHHRRWAPVRAQHA

SEQ ID NO: 87180 - protein, 346 aa, unidentified
MEHYVGLDVSLKLTAICIVDRTGKIVREGVVTSDPETIAAFIKSHAPHVARVGLEAGATSTWLWTELNKMGLPVICIDARHAKAVLKMQINKSDRNDAVGIARIMQCGWYKEVHVKDLDSHATKALLVSRALLVKIKRDIENQIRGLLKNLGLVIGRAKMNVFAARAAELAEARPELAAAVEPLLKAREAVGRQIADLDRKVMRLARNDAQVRRFMTAPGVGPITALCFLATIDDPTRFKRSRSVGAYVGLTTRRFASGEVDWTGRISKCGDAMLRSYLYEAANVLLTRVAKWSTLKAWAIRIAKRSGLRKAKVAVARKLAVILHRMWIEGTEFKWSSKEAANQPA

SEQ ID NO: 87181 - protein, 371 aa, unidentified
MGESSKVLYVGLDVHKDSIAVAYAPEDRGSEVVSVGAIGTRQCDIDKLLRKLQAKGARLMLAYEAGPCGYWLYRYLTRKGLSCAVVAPSLIPRKAGDRVKTDRRDAVTLARLLRSGDLSSIYVPGVEDEAIRDLSRAREDAMHDLKRSKVRLKAFLLRQDIRYEGRANWNAAHLRWIARVVCPTPVQQIVFQEYVRAVTEQAERLERLEQALREAVKTWRLYPVVEAIQALRGVELTAAIILVSEVGDLTRFDTPRKLMSYLGLTPSEYSSGGQRRQGGITKAGNGHARRALVEGAWAYRYPAKVSRHLQLRLEKVPADVQAIAWKAQVRLCKRYRHLTGRGKHANQVAVAIAREMAAFAWAIARTVPLGA

SEQ ID NO: 87182 - protein, 363 aa, unidentified
MTYERSTLVNSEKYIGLDVHQATISVAVMDSKGKVVMESILETKAATILEFFAGLRGTLLVTFEEGTWAAWLYDLLKPHVAKLVVCNPRKNALLKHGNKSDKIDARKLANLLRLNDLEPVYHGETGVRMLRELARSYLTIVKDVSRVMSRLKAIYRSWAIPCAGRDVYYTRHRGEWLGKIPEAGCRRRAEQLYQQLDMLQPLRQQARRELLAESRKHTITAKLRQIPSLGPIRSALAVALIQTPHRFRTKRQLWTYSGLGLETRDSGEYHYVQGQVRRRKKQVFIRGLNKDHNHDLKGLFKAAATRASVRPGPFQDFYQRSLAKGIQPTMARLTLARKIAAITLTLWKKGENFDAEKLKAQAA

SEQ ID NO: 87183 - protein, 387 aa, unidentified
MPQPNDMSRSLITLEQDSTLIAVIEMGQSSWLVAGIVPGIERQPLKKLAADQDGLLQLLHRWRKEATQAGHPIKRIAVAYEAGRDGFWLARWLRAREIEAYVIHPSSVPVSREHRRAKTDRLDTELLKRAFLGWLRGEPKHCSMAAIPTVEDEDARRPSRERESLVGECTRIVNRVKANLARLGIRGFRPRLAHAPKRLETLRTPEGTAVPANTLAELQRDMAHLRFVKQQIKEIETARAKRLEQASGGGRDAMVRLLARVVGIGIETADMLVQEVFSRKLRDRKAVARYAGLTGAPDESGQKRRERGLAKAGNARVRHAMIELAWGHLLHQKDSALAEWYQKRTVDARGGTRKTMIVALARKLLIALWRLVTTGEAPAGLLLRPAA

SEQ ID NO: 87184 - protein, 407 aa, unidentified
MTEMVHERCCGLDVHKDTIVACLLTPQGKTIRTFGTTTGCLRQLVTWLQEAGCTQVAMESTGVYWKPIYNLLEQTAMTVVVANPQKIKVIPGRKTDVKDAEWLATLMRRDMVPASLIQDRAQRELAELVRYRQSLVAEQTRETNRIQKVLEGANLKIGSVLSDTQGVSGRRMLEAIARGVSDPDELAALADPKVKASRQELHAACEALIGPHQRMMLREQLAHLDELAERIARLDAQIAERMRPFESRVTALDAIPGVGRVIAQEIIAFIGTDMSRFPSAQHLASWAKLCPGTHESAGKRSSARTGKGPKALRWTLVQAAHAAGRTRRTYLGARYHRLAARIGAKKAAVAVAHDILIIAYHLLRDGVAFEELGADYYTKRNPERIKRRALKQLEDLGFEVSLTQKAA

SEQ ID NO: 87185 - protein, 338 aa, unidentified
MGKIVKQVAGIDVAQKELVVTLGHLLDDFSIELFAYKVFKNSDSGFKSLVEWANKLTDNQVDVLYVMEATGVYHQKFAYFLTDNNYKLSIVLPNKISNYMRTLELKTVTDKSCSQAIAQFGLERKLDKWSKPKVTYKELQQLTRERDQIVQERSIIKNQIHAEITEAEPNQRSMERMQARIRFLNSQEKEIKEDIEWIVKENPDIRQIIDRITTIPGVGELTAVIVLAETNGFELIRNKSQLSSYAGLDVKEKQSGTSVKGKPRISKKGNRALRKSMHLPALTAVKWDDNFKETYVRLVSKHGIKMKALVAIQRKILQLIYILFKNETIYEKDYTIKK

SEQ ID NO: 87186 - protein, 435 aa, unidentified
MSNSVKYDLFISVGIDVGSDFSFMSIALPNQTFVGKPFKIIHSDFNSLSMAVSKIKEAEEMYSLESRIFLESTGIYHYPLFCYLSDKGFLVSIINPIISKNSTNINIRKVHNDKFDSKKLALIGLKPDLKVSLMPSELALDLRNLSREYYDLVDNRSAYINKLQGELRIAFPQYLKIFSKVTVNTSLTLLEKFTSPDGFLEASKDQIIASIRSTARFGITYAEKKYKAIIQAAKDAKTFSYSVNSNFKRILLYIRFIRQYNVEIEAILSDMRELVESNKDTDFVKQIRLIESIKGAGFLSAVTLMCEIGDFSAFKSPKQLFAYFGLDPAVKQSGNFKGTDVNISKRGSRIARRVIHTIALVSIALNRNGTANNPVLREYYLKKCQSKPKMVALGAIMHKVCNIVFAILRDEKEFKIITPEEHQANYLKAKYGIAA

SEQ ID NO: 87187 - protein, 342 aa, unidentified
MDHFAGLDVSVKETSICIVDDTGRIVREVKVASEPEALLAVLKNSAYHFERIGLEAGPLSQWLFSALAEVELPVVCVETRHMQAVLKAQINKTDRNDARGIAQMMRAGLYRPVHVKTLRSQKLRMLLTHRKLLQSKAIAIENDLRGTLRNFGLKVGMVGKVRFEARIEELVENFPDLAVLVEPLLIVRRALREQIVILHRRLLAIVRDDEVCRRLMTTPGVGPVVALTYRATVDVPARFRKSKSVGAVFGLTCSKYQSGEIDWSGRISRCGDEMMRVMLYEAAQSMLRSKKWSWLKAWAMQIARRRGMKKAIVALARRLAVIMHRIWVDGTEFRWTRETAAA

SEQ ID NO: 87188 - protein, 338 aa, unidentified
MKLYGAIDLHSNNAVCGLIDTQDKVKMRRKTRCELDVILGAFSAFKEDIVGIAVESTFNWYWLVDGLMDAGYRVHLVNTCAVKQYKGLKHTDDDTDTFWLAHLLRLGVLPTGHIYAKEIRSLRDLLRKRSQLVRLRTTNILSIHNLYSRNTGARLATNAVKHLTRERLEQRFGDENLVLAIDSNRRIMQALDEQIGVLEQAVLAQAKLDPRYRYLLSVEGVGKILALTIMLETGDIARFEKVGNFTSYCRCVDSTRWSNGKKKGKGNSKNGNKYLSWAFVEAANFAVRYHERAKRYYPLKMAATKRVVAIKALAHKLARASYYVMRDQVPFDPNKMYG

SEQ ID NO: 87189 - protein, 382 aa, unidentified
MLPTASRKKSSAVETKLYVAFELGWTKWKLAFGARVDEKPWHTTIGARDIRALTEAIARARRKVGLSETSSVASCYEAGRDGFWLDRLLAQMGVMNVVVDSSSIGVNRRARRAKSDRLDATKLLAMLMRHQAGERGVWSVVRPPTPEQEDARHLQREIRTLKKEKTRLVNRVRGLLASQGVAARMGRRGLVVPVTSLRIWDGSMVPPGLRRRIECEMARHEVVHRQVLELEGERDRKIREGNSVPCQKARRLMQLRAVAEASAETLSREFLYRDFRNRRQVGGLSGLSPTPYQSGESSRERGISRAGNRHVRGIAVDLAWQWLRHQPQSKLSRWYEERFGKGGPRMRKIGIVAMARKLLIALWRYAEFAELPEGALLKEQAA

SEQ ID NO: 87190 - protein, 409 aa, unidentified
MRVIGLDVHRDFAVVALLEGGEICGGGRVDLTRDAVIAFGRQLRADDEVVLEATGNTATIVRLLRPFVRRVAIANPLQVRAIAHAKVKTDKIDAATLAKLHASGFLPEVWMPDEATVALRRLVAQRGQVVQQITRAKNRIHGVLHANLIPPYRGELFSAAGRSWLAEQPLAEDEKLAIRRHLADLDHRAADLAALDQALAVRALEDARVRRLMTIGGVDATVALGLLAAIGDIARFSSSEKLVSYFGLNPSVRQSGSGPAQHGRISKQGRAHARAVLVEAAWAAARAPGPLRAFFLRVQARRGKPVAAVATARKLAVLVWHLLTKAEDYAWARPALLEAKLRRVELTAGHPAARGRRKGRAHAYNSKEVRQRERAWLEQTERAYARLVAAWQEKRPAGRTGAASGRRTP

SEQ ID NO: 87191 - protein, 345 aa, unidentified
METMYYIGLDVHKKTIDYCVKDGSGRIYAAGSLPATRLALDMWMKTLPQPWTAAMEATIFTAWIYDHLKPHAAAVKVAHPLMLRAIAVAKKKNDRIDARKIADCLRCDFLPECYMAATEIRERRRTLRYRNLLVRQAVQMKNKIAVLLMEAGVSYNKQKLHKVGYFRELLATNQDIDEGLKPLLRLCRETVVRLGKTESALVRSLQRDSLLVERVERLMTIPAVGPITALTWALEVGDVQRFSSIKKAISYCGLCGAERSSANIIQRTPLSKQRNKHLQTVLIEAAKMAPRNSPELAMVYEQEKQKGNANRATLAVARKMVAYLVAVDRRQKGFLVVENKNRTAA

SEQ ID NO: 87192 - protein, 351 aa, unidentified
MNICHYIGFDVHKKSISYCVKTGDGKIVEEGKLRATRQALRAWAEKRTEAWHGAMEATLFSSWIYDVLKPFAAELQMGNPSMMKAIGAAKKKNDKLDARKIADLVRCNLLPVCYVVPPEMRDLRRLLRYRNLVVGQAVQMKNRMSGLLMEVGAEYSKQRLHGAKYFSELLDQLDEVPESVKDLLRLSRGALETFAATQRQLLDRLQKEPLLGKRVELLRSIAGVGEVTALTWALEICDPRRFPSIGDAVSYCGLTSALDASADKQQRGPISKQRNAHLQTVLIEAAKLAPRWNRQLAEVHERELKCGNRNRATLAVARKLVSYLLAVDKSGQPFVVRNPPAREREEIEQVA

SEQ ID NO: 87193 - protein, 377 aa, unidentified
MSKVRFLGLDVHADTIAVAVADANGEVRRHGMIPNQLDAVRRLVKKLGAGYDLRACYEAGPTGYVLFWQLTALGVACEVIAPALVPTKAGDRVKTDKRDAEKLARAYRAGDLTAVWVPDAAHEALRDLVRAREDAKQDQTRARHRLSKFLLRHGQRPTVKTKPWTLVYMDWVQRKVHFEQPALEATLRDYVQEVEHAAARIKRLEKDLAEAIASAAPVIRAVVEALQALRGVAFLTAVTIVAELGMLSRFASARQLMGYSGLVASEYSSGSRILRGAITKTGNAHLRRVVVEAAWAYQRRPWVGGYLAKRQTGLDPALIEIAWKAQHRLCGRYQKLAARGKNKPQIVTAVGRELLGFIWAIAKTVETRFAQPHTQAA

SEQ ID NO: 87194 - protein, 452 aa, unidentified
MRCGRLLGMFARLSGVPWLLIEICARSLGYGCVSGVFHGPLLATGTNGWRSVVAQRDIAWIGIDVGKTHHWACMVDAEGKKLSSIKVANDEAEIVALITNAGSQARQVVWAVDIIGAPSALLLALLARADHAVRYASGRVVAAMSAAYVGEGKTDAKDAYVIAETARLRGDLPVIDTGTDLVRKLAVLTGHRADLIADRVRMINRLRDLMTSVFPSLERAFDYSSHKGAVVLLTGYATPDGIRRIGQTRLTGWLRNRNVRGSADVAARAIAAAKAQTVVLPGQDLCASIITELATAILALDDRLKALDAQIEATFAEHPQAAIIQSMPGFGPFLGASLLVGSNDLRAFPSAGHLAAAAGLVPVPNDSGRRTGNLHRPLRYSRPLRHVFYLSAQTSMMRAGPNRDYYLKKRSQGATHSQAVISLARRRIDVLWALLRENRMWTAAPPPLAQAA

SEQ ID NO: 87195 - protein, 409 aa, unidentified
MLYAGDDWAEDHHDVALVDETGRRLARARLSEGVAGIARFHELIAAHLAGGDGPEQVAIGIETDRGPWVTALVASGYQMYAVNPLSVSRYRERHSVSGAKSDAGDAWLLADLVRTDAARHRKVAGDSPAAEGIKVLARSHQRLIWERNRSVLRLRSLLREYFPAALEAFPKLAGPDTLELLARAPGPRPAARLSKAQIAAALKRARRCHAVDKAAAIQAALRAPQLSQPGELTAPYAAAVVALTKVIAAFSEQIAVMEQQVSESFRRHSSAGIYLSQPGLGALLAARVLGEFGDDPHRYASAKGRKNYASTSPITRASGKKMMVLARYARNDRIADAVHWWAFCSLRASPGARAYYDELRARGKSHSTALRQLGNRLVGILHGCLKTGTAYDEHTAWGHRYGKPQPAAA

SEQ ID NO: 87196 - protein, 340 aa, unidentified
MSEITTIGLDLAKHVFQIHGIDAAGNCVLRKRLRRGQVILFFAQLPRCLVGLEACATAHYWARELQAAGHEVRLMPPQYVKAYVKRNKTDAADAEAICEAVRRPTMRFVPIKTAEQQAAVLLHHGRERLVRQRTTLVNALRAHLAEFGVVAPAGLRNINRLIAIVRDADDQRLPDLARPVLRVLATQVELAQAAVAKVEKELTAWHRSNPLSQRLATIPGIGPIIATAIAATVVEPSGFASAREFAAWLGLVPRQHSTGGKARLGGISKRGNRYLRRLLINGASANLLRSKATNADPWVIGLRRRRPSLVVAVALANKTARIAWAVMRRQEDYRSAAVAA

SEQ ID NO: 87197 - protein, 408 aa, unidentified
MQVLYPCCAGLDLHKDMVMARVRCVSDPPHDEVRSFGTTTAALLRLNDWLIEQAVTHVAMEATGVYWKPIWHLLEEHFELVLANAQHIKNVPGRKTDVNDATWIADLLAHGLIRSSFVPPAPIQELRDLTRTRKQLVRESAQHCLRIQKTLEDANLKLGSVLSNIMGNSARAILAALIAGETDPEKLADLAQGNTRKKRVELIEALRGRIRAHQRELLRIHLNLIDALYRAIAEVDARVGKALAPIKDSARLLTSLPGVSDLTAHVIVAEIGVEMARFPTASHLISWAALCPKSDESAGKHRSTRVRKGAPWLKTTRVTAAWAEVRVKGAYLQAQFLRLRARRGAKKAILAVAASMLTAAYHMLKNSVAYHDLGADHFSRRDRSKAIQRLLGRLNDLGCEAQLNSQAA

SEQ ID NO: 87198 - protein, 399 aa, unidentified
MALQRGVVIGADTHLDTIHLAALDEHGRPLADAEFPTTPRGYIQAVKWARGLGTVQLAGVEGTSSYGMGLTTALHDAGIPVVEVIRPDRSARRRQGKSDPLDAYSAARIALSGDGVAVPKDDRMPALRAILTARRGAVKASTAAINQIKSLLVTAAPEVRERYRQLGRITLIQTLARSRPSAHSESTTRAVLTACKALAQRVEFLQAQERELTSQLDELVTAINPGLRAAYGIGPDTSAQLLITAGGNPERLRSEASFAALCGTAPVPASSGKTQRHRLSRGGDRAANNALYRIALVRMSSDKRTREYVTRQLANGRSKMEILRLLKRALAREVFRLLTQHCEVDNYSDLRPARKSKNITLTAVAQHFGVWPTVISRIERGLQRDDALVATYRQWLTAA

SEQ ID NO: 87199 - protein, 402 aa, unidentified
MVFLGVDWAEEHHDVCLLDDEGNRLEKARVPEGIEGVRRIHALVGNHAEPGEVVVGIETDRGLLVGSLIGAGYQVYAVTPLAVSRYRERHAVSRAKSDKADAKLLADLVRTDRHNHRQVRGDSEQALAVRVLARAHQAQIAARQRQANQLRNALLEFYPAALEILGTDLDSKMAVALLSTAPTPAAGRRLSRAQIRSALSRAGLQRSLDEKAALIQQQLREEQLEAPAAVGQAFGAIVSSAVKLIRAFNEEISAIEAELTASFEAHPDAEIIRSLPGLGVVLGARVLAEFGDDRNRYANAKCRKNYAGTSPITKASGKQKVVLARFIRNRHLADATYMWAFCALTHSPGARGYYDARRAKGANHHQALRALGNRLVGILHGCLRYEQNYSEVTGWGESALAA

SEQ ID NO: 87200 - protein, 357 aa, unidentified
MNKISAINAVVKTFSIDLAKSKLQVHGFDANGQRCFARALSRTQTTALFRDLGRPVKVVMEACSSGHYWGRQLLALGHEVALIPPQFVTPLRIGNKTDGNDADAIYEAALRLKCRPVPVKAIEQQDLMLTQLERDRLVKQRTALTNQLRGILAERGLVFGKGLKALREGLREVLARSPDQEVTARCLDWLQAQLFDWQRLDERLKDCDTRMRHDLRDHPRCQQLMEVDGIGLQTALFFFALVGDGSQFASGRACGSWVGLTPLEASSGERRFLGAITKRGDRTLRWLLVNGGRTLAAQAQRKAKHGLPLNERDTWLLGLIQRGGFNKAAVAMANKNARILWAMLRTGEAFRSPLMAA

SEQ ID NO: 87201 - protein, 335 aa, unidentified
MQVYGIDLSKEKFDVNFLDANGKEKNKTVKNGLASISGFLSTVEPGSVLCAENTGTYGDLLVFLSNQFGVPIALVPGYTVKHSLGLVKGKSDPIDASRLREYGGRFFDKLSFKEYQSENMSELRQLYTLRSQLVKSRKELVTGAHAREQLPMQSVAVNLILKASLSSLDKQIGEVEKEISLIIMGDAEMAENYTLSVSVFGVGPVIATNVIIKTGNFKAIDTARRAASYAGVCPFPNTSGNMSAKSKTSPFADKELKSLLYMGAKAAVKHNKEYRLYYQKKQQEGKPHYLIMNNVMNKLLRTIYSVVKNKTPYSRDYVCLDPREKNVNGSEKKVA

SEQ ID NO: 87202 - protein, 423 aa, unidentified
MKKRTYRGVEVKKVNQPRLAEALAGRDLVVGVDVGKEVCFGSFVGAEQEVLVTVKWKSPWEDRMFVEWLGGLGCRSIEVVMEPSGSYGDPLRSLLWGAGIRVYRVSPKRSHDAAEVYDGVPSWHDAKSAAILAKLHKDGASELWPFRSEQERDLRAVVTTMAVLDEHFHQNVNRMEGHMARYWPEVGAWLDFTCVTFLELILRFGGPVQIAAREEQARATMRSVGGRFLKAEKIDAVIACSGQTIGVSMTAQEAEELKELAKHTLDLYRRLKEAKRKVDRVSCQQPSIEAMSRAVGKRTAAVLVVEGGDPRQYGSSSEWLKTFGLNLKERSSGKHIGRLKITKRGSGKARKWLYLAALRLIQKDLVVRTWYEKKVVRDGGTKRKKAIIAIMRKLVRALWYVGRGEPLDTSKMFDVKRLGLACG

SEQ ID NO: 87203 - protein, 321 aa, unidentified
MNPSTRATSWVGIDVSKATLDVCVQPTGAQWQAPNTSAGRDALVEQLASVAAERIVLEASGGYEALVVAALASRELPVVVVNPRQVRDFARATGQLAKTDRIDAQVLARFGEAIRPELRAVPDATTRTVRALVSRHRQLQEMLTMEQNRLVSAAVQDAPEPLRDQLGEHIDWLRRQLRDVDDELRHELQASPVWRERENLLRTIPGIGPVTSATLLSQVPELGQLDRKAIAKLVGVAPLNHDSGTLRGTRHVWGGRGAVRAVLYMAALVATRCNATIRDFYTRLRAAGKPPKVALVACMRKLLVLCNAMLRANTPWRSITP

SEQ ID NO: 87204 - protein, 418 aa, unidentified
MKVVYPICCGVDVHKTFLVATLITSQGIIPHYSKKRFSTFNKSILQFKQWLIDNNCYDVCMESTGKYYVPVYNLLEDTIRVIVANPKWVKAVKGNKDDKKDSKWIGDLFRLGLVPGSYIPEKPIRILREYTRYRSKLVSCSSSEKNRFQNAFTVCNVALDAVVSDMFGKSATFITDYLISSDTFDPEYCTSLLQKSLKKKADTVVESIQGYQMTQAQKERIIMVRSHLDYVTKSIAELDEKLDRLVEPYDGAIKLLCTIPGINRASAITIISEISTDMSQFTNSKRLCCWAGLTPGNNESAGKKKSVRITRAGIYLKPALVQVAHAAVKSDKSPYYKIKYEHICKRRGKKRAIIAIARMILTAIYNMFVTGEVWNPTDLYKIDMPQEMQDKQKEKAIKQAAKFLISLGLIKATDISVA

SEQ ID NO: 87205 - protein, 371 aa, unidentified
MKNYQMGIDISKEKLNICLKKGTQTIREEEIKNTVMAIKKCVKRIEKENCVANDDVLVCAEYTGRYIYPLVCACEEMELFLWMEDPTRIKNSFGVTRGKDDRVDARRIAEYAFRFSDKAVAYEMPDRTLVSLKNLLSDRDTLLADRHKYEMQLHDQKGYMDAADYARKKRSWTAVVKTLDKQIALIDDEIQVLVESDEKLKHQTELLKTVDGVGDRIAVRMVVVTMAFTRFETPRQFNCYAGLAPFRYTSGKSIYSKSKVSQRANKQIKALLHLAAVSAATHMKSSEYRDYYERKTEEGKHPMCVLNVIRAKLVSRMFAVIKRDEAYQRNYKIFTPTEKTLKKSLSIHKNRYVFCKRNTKKPQKTRNLSRL

SEQ ID NO: 87206 - protein, 372 aa, unidentified
MREDSEVYVGLDTSKLKISVALAEAGRDGEVRFLGEVDSAPEAVERLVRKLAKRHGRLFFAYEAGPTGYGLQRQIAALGHDCAVVAPSLIPKRPGEHVKTNRRDALTLAKLHRAGELTPVWVPDPGHEAMRELVRAREAAMADLRAKRQHLQSFLLRHGRISPGRAAWTRAHTRWLCELRFEHPAQHLVLAEYRQAILDAETRLERLGQQVAELVPAWSMAPAIAAYQALRGVAFLSAVTFAAEIGDVRRFDNPRQLMAYLGLVPSESSTGERVRRGGITKAGNGRARRVLIEGAWTYRFRARMSRLLQERQAGLPKAVRDIAWKAQLRLCGRYRKLMARGKRQGVVTTAIAREMAAFLWAIGSEVEPQAAN

SEQ ID NO: 87207 - protein, 392 aa, unidentified
MIYVGIDVAKDKHDCCILGPDGEVLRDAFTFANNRKGFEELLAAIQKALQEKSRDEVRVGLESTGHYSTNLVAFLRGNGFEPVVLNPLSVNLFRKSQTLRKTKTDKADARFIAAMLLTSDASPHASVSYHIEELKVFTRSRSRLIEHRGKLRISLTRLLDVIFPELAALVWSTNQKSVYQLLLELPNPQAIAHCRIDRLTNILSAGSRGKYGREKTLTIRQAAADSIGSNSPAMAFELQQTIRLIQNIQIELNLLDSQIRAAVKAVESPLLTIPGIGYTLAGIILAEIGDIERFQTPAQLLAFAGMEPSTFQSGKFNAGQTPMVKRGSTYLRWAVLQAARLVAMRDRTFHDYLLKKQQEGKHFNVALSHVGKKLVRVIFHMLQTNRAFVPQS

SEQ ID NO: 87208 - protein, 320 aa, unidentified
MQKELLYCAIDVSKERLDVAGTALGLPEQLDNNHAGYGRLIQAARKYPGVVHFVFEASGPYHLGLALALWEAKLALSILNPARVRYFAKAQGKAKTDPLDKEVIGTFAQAFRPEPTPAPDRVGRELMELLQRREGLVESRAAEQNRLGQSHHGVIERQIRRLISQLTEHIEQIEQRMDKLVGNCAQLKARVEILRQVKGVGQLTALSLLITLPELGSLGRNRISRLVGLAPLNDDSGQQSNKRFIQGGRKRPRAALYMAGLSASRHNPVLRDFYQRLLKAGKPKKVALTAVMRKLLICLNALLRQQNSKEGFCTAKAAAT

SEQ ID NO: 87209 - protein, 342 aa, unidentified
MQWTVAIGVDTHKHTHVAVALDRLGGQLDVFEAPATSAGYLALYRWAQELGEPAFALEGVGSYGAGLARFLQAAGCPVYECERPKRSERRRGKNDLIDALLAARRLLAGERLGCPRGLSGPREDLRLLLLERRSAIRARTATLNQLQAVLVTAPARLRSRLEGRSSEQLARTVARLRTIEGEQAVVRGVLRRLGRRVLSLDSELAELERELEAIASAIVPELLAECGVGPVCAAQLVVSSGDPSRMASEASFAALAGTSPVDASSGQQQRHRLNRGGDRQLNRALHVIALTRVRYHGETAAYYQRLLAAGKTTREARRCVKRMLARYFHRKLCSLPTLALTT

SEQ ID NO: 87210 - protein, 337 aa, unidentified
MKKIVTQEKGNSVAKESALPNEGNQPGLFLGVDVSKASIDAYLLPSKQTWHVERKFAKLEEWAASLPENISLVVMEATGNLERPVAVALVARKIPVAIVNPRQTRSFANALNIQAKTDPKDALVLATYAKAIAPEARPLPGEKQFELEESLARRRQLVGMLASEKNREEQAFGKKTLASIREHMAWLESRIQDCDKGITEAIAENSAWSELKGLLESTPGVGPGTSRTLIIDLPELGALNRRQIAALTGVAPFDRQSGQWRGKSFCSGGRAAVRSMLHMATVSAVQWNRVIREFYERLMRQGKPYHVAMTACARKLLTILNTMVKKGEKWNPVQKNA

SEQ ID NO: 87211 - protein, 347 aa, unidentified
MKYFAGLDVSLEETAICVVDETGGIVKETRALSEPRALSEALRGLDLPLERVGLEACSLTAWLHDGLRTEGLPAICIETRQANAAMKTMPNKTDRNDARALAQIMRTGWFRQVHVKSRQCRLWRSLLVARRTVLHEMRSIENVVRAILREAGIKLGTPARAAFTARVRELAGDDAGVMAMADPLLAILETMLKEFTRLTKQVLDIVRKEEVCRRLMSVPGVGPITALAFRATIDRPDRFRRSRNVGAHLGLTPSRYQSGETDIQGRVSRCGDELARTALYEAAHSLLTRSKKWSSLKAWGMSVAKRRGMARARVAVARKLAVILHRMWTDASDFRFGKEPACAQAAL

SEQ ID NO: 87212 - protein, 393 aa, unidentified
MVCVGIDVAKDKHDCFIISSEGEILADVFTIPNNAEGFDTLLQAIRRSTRPEDKIKVGLEATGHYSYNILGFLLDKGLPTYVINPLHTNLYRKSLSLRKTKTDRVDARTIAAMLMSDVDLKSYTDTVYHNEELKSLTRYRFDKVRERAKLKQSVSRLVTILFPELEKLVSSLHSASVYALLSEFPGAKQISSTHMTHLKAILKNASQGRYGQEMAETIRNAARSSVGSVMPAKSLELQHTIRLIRELDAEIEDIETAIQAIVDEMQSPITTIPGMGVRMGAVILAEIGDFSRFDSPDKILAYAGMSPSTYQSGQLSLSGAYSHMEKRGSRYLRYALYNATKHVCHWDPTFAAYLAKKRAEGKHYNVALSHAAKKLVRLIFAMEKSQRPYCAAA

SEQ ID NO: 87213 - protein, 449 aa, unidentified
MMEPAEIQDEEYEQILERVAAVDVAKATGMVCTRMPDESRPGRRLSKVWEIPATTNAIIELGEYLAGLGIQKITLEATSDYWRPFYYLFEAAGLDVQLVRAQDVKQAPGRPKSDKLDCVWQAKCTERGLLRPSFVPPAEIRQLRDYTRLRVDLTRDRSRHVQRLEKLLEDALIKLSVVATDIMGVSGRAMIEALIAGERDPEVLARLARGRMKVKHAALVQALTGRFDARHGELARMLLDQYDALTAQVTRLTTRIEELIAAIPQARGVDADGSTGPGAGEAPDAAVRSAIARLDEIPGIGRNGAQLILAETGLDMTRFPTAGHLASWAKLCPRTIQSGARSRGGRTGKGNPYLKGLLGEAAAAAAKTDTFLGERYRRIVRRRGKLKALVAVARSILVIIWHLLADPAARFTDLGAGYYASRTDKDRKTRNHVRQLEALGFTVTLAHAA

SEQ ID NO: 87214 - protein, 342 aa, unidentified
MLTIGLDVHLSRTSVCILDARGNTLRQQEVKGGQEAVAQLLAKLEEPFQVCYEASTGYGALYQRLRPLAQRVEVAHPGRLRLIFKSCKKNNRADAQKLASLLHLNQVPAVHVPAQEVRSWRGLIEHRRSLVDRGVSVKNQIRALLRCQGIKGPARERQWTKAGVQWLLETPWPTAMEKLRAEVMVEQLADLRRQLARVTGMLNEKGLGHAGVVLLMTIPGIGPRTAEAFMAYVDDPQRLSGGTIGAYFGLIPREDSTGEHRRLGHITREGPSTVRKLLIEACWRGVSQSRRIQEIYERHLKGDRSRRKLALVATSHWLCRVMPAMLKSGQAFREAAPAAAPQ

SEQ ID NO: 87215 - protein, 379 aa, unidentified
MKTNSDTTPKLYVGLDVHKEQTSVAIADPGAQGEVRSHGNIATSIPSIEKLLRRLAKARNISLSDLHVCYEAGGCGMWIARQLTKLKVPCMVVAPSLIPSKSGDQVKTDKKDAIKLARLLRAGELVSVYVPDETDEAIRDLCRARVDAKDDLRRAKTRLLAMLRRLGHQYDGKTHWTQAHWRYLRSLRLPHESHAFIMEELLQQIARIEDQVSRIEARMELLLQEWKSKPIVEAIMALRGFKTVAAMMVVSEIGNFVRFTHPKQLMSYIGLTPGEYSSGGKQKQGGITKCGNSHLRWILVELAIHYRKGVAISPALSMRQEHQPGWIREISWKAQNRLNARYVKLQQRLMHHNKIKVAIARELTGVIWEIGYKMQSAAA

SEQ ID NO: 87216 - protein, 339 aa, unidentified
MTVKTIGLDLAKDVFQVHGITEDGCVIFNKAIKRAKLLAFFETLPPCTVGMEACGSAHHWGRMLRKLGHDVRLMPANYVKPYVKRGKTDAVDAEAICEAVRRPTMRFVEIKTEEQQAILSIHRTRDLAVRQRTQMANMIRSLLREFGHILPIGVEAVTAFAKRHLAGDHPDMPEIANGMLGMQCYQFIGLNERIAGYSKMIEQHALLDADTRRLMRMPGIGPITASAIIATIGDAHQFRTGRDLAAWLGLTPLNKSSGGKERLGKITKKGDRYIRKLLVVGMTSRAVMAKRSPEKVDLWTAKIIADKPFRLATTAMANKAARIIWAMLTKKQEYRQPAF

SEQ ID NO: 87217 - protein, 325 aa, unidentified
MVPERTEAYAGVDVSKERLEVCVRRGREAREGEHTFGLSNDPAGTQTLLARLLEERPVLVILEATGGFERPVAAALAAAGLPIAVVNPRQARDFARATGQLAKTDRIDAQILARFAQAVRPSPRPVPEEEAQALAEITARRRQVVGMLTAENNRLGVATTKAVRKRLEAHVRWLEKELSRIDRDLEEAIEESPTWRENEELLRGVPGVGPVVARTLLAELPELGNLPPKQLAALVGVAPLNRDSGAFRGKRAVWGGRATVRTALYMGALVATRHNPQIKEFYERLLGAGKPRKVALVACMRKLLIILNAMLKNRTPWRFPQILAP

SEQ ID NO: 87218 - protein, 317 aa, unidentified
MCKIIGIDISKQTFDVSFKRKERWDYFVFPNEEKGFKQLLNLIEQVDWVVMEASGSYYFPLATFLSSRNIKVCVENPLVIKRFSQTMLYRAKTDKKDARTIAEYGEKYDLKQWEQESENCTKLRHLYTRVELLNKQIQQNKRQLEAFESSGSLDKFLEKTIKKDLSNLEKTKHKIEVEMERLAKQQYGQTIENIESIPGIGRKTAMMLSLITDNFKKFENYKQLIAYVGFSPRIYQSGTSVKGKGHICKMGKAQIRKLLYMCSWSAKHCNKTCKEMYDRLKSLGKPERVIKIAIANKLLKQAFAIAKANGKYQENYC

SEQ ID NO: 87219 - protein, 403 aa, unidentified
MSINGAPVMAASVVAVDVGKNTAVLSVTDAGRRRLLGPVEFAMTAPAVAAVLERVCAALPVAAVKVGIEAAGHYHRPLLGPGVWPVGWEVLELSPARVAEQRRVQGRRRVKTDAIDLEAITELVLAGHGVPVTARSARLIELTGWAAHRSRRVLTRTAIKNQLLAQLDRCFPSLTLALPNVLGTKIGCLVAAEFADPHRLAALGVTRFVRFAAHRGLRVRRSAADRLVAAARNALPAPEAVVARQVLADDLGLLADLDAQIAAAEAKMATLLPDTPFARLITVPGWGTIRAGNYAAAVGDPGRWPGARQLYRASGLSPAQYESAGRRRDGTISREGSVALRRALIDLGIGLWHADPAARRYGQALRARGKKGGVIGCAMAHRANKIAYAMVRDQTGYDPTRWA

SEQ ID NO: 87220 - protein, 403 aa, unidentified
MVTIGIDIGGRAHVAARCRDGQARADREILRLSQSRAGFTALDAWLERQPAPVALVTMESSGHYWMPLASHLRRREIPVAVVNPLAAKYFAKSRLARTKSDPADARSLAEMAMRDQPVVRDPLAGAELRQAARFAMTLVEEQAKVCQRLIRLVELGFPELGELFDDPTCRTAREILRIAPTARAAARRRTTSLANANAGAGRRRLGVARAERLQAAAADSIAVPELDAEVSFEVGLLLAQYDLLERQIAAADRRVASLLDGETARRLQTIPGVGPSIAAALLAEIGDIERFTDFDQLLAFAGVHPAERSSGRKGSNPETAWHMSKAGNSHLRAAAYRMAVVGVQHNPVIAAHYARKRAAGKSKMNALGHCMRKALSLVWGVWRNGVDFDPSWEGRDLTRPYGI

SEQ ID NO: 87221 - protein, 321 aa, unidentified
MEAVWVGIDVSQEWLDVVIWPGPASFRVANEATAVASLAARLRTLNPRVVVLEATGGLEVLAASEVHAAGLPVAVVNPRQVREFARSLGTLGKTDRLDALVLAQFAQASESNGRLTPLRLADEAEAELKALVGRRRQLLGMLVAATNRRARAPKLVRKSIVQHIKGLKRAVAEVEQELQQVLASSPAAQAKATLLSAVPGGGPQLSFTLLAELPELGQLGRRQIAALVGVAPYPYESGMFKGRRTIWGGRAHVRTMLYMAALSAVRFNPPLRAHYQALLARGKARKLALVACMRKLLITLNAILRDATPWNPNQLDFQHSR

SEQ ID NO: 87222 - protein, 346 aa, unidentified
MLHVGLDLSRKRLDVHVLDGTGKTIEVTAVLPDRDGLRSLARRLESRGQPVRAAVESMTGARFVHDELEMCGWEVDVADAQRVKGLAPLACKTDKIDARVLAELCWRDLVPAIWLPTPDVRGERERARWRLHLVRHRAALKCRIHSTLITFGHQCPVSDLFGRDGRALLDRLDLPEPWKGTVTATLQLIDDLDVQISACEQELRELGMEHRYVPLLMTAPGVGWILASTIASEIGDIIRFPSPKALCGYTGLCPRVYQSGGKDRRGSLAKNGPPYLRWALIEASIHAAQHPAFRDHYEATKKRLGKQRGAKVARIEVARKLTESIWYMLSRNQAFSPAGPPSSLAA

SEQ ID NO: 87223 - protein, 356 aa, unidentified
MSKVISEGAVRVGVDLAKRVIQVHAVDAAGRLLTNRALARDKFIEWCVRLPAGCIVAMEASSSAHHWGRKLAALGLDPRIISAQLVEPYRSQGASGKNDANDAAAICEAASRPTMRFIPVKSIEQQSMLCVHRLREGIKEDRTACINRIRGLLAEFGLVFPQGPRELQAVLSAVLEDATNELGALARLTLRRAQAQWHELDEHLAWCDERIDAHAKHNADVKTAATLWGIGPVTASAAVATVGDFKQFKNGAQFGAWIGLTPRQRSSGGKNNLWGITKRGDTYLRTLLIQGAKSAVMTAHRRQDKISTWVVALRERSGWQKAVVALANKNARILWAVLTRGQAFDANHLSVKPTAA

SEQ ID NO: 87224 - protein, 433 aa, unidentified
MKVKYEDRLKQKVIAITTDTLVVGVDIAKNYQWARFVDFRGIEHDHALKFKNSKSGFETILARIREICKKEKFKKVVVGMEPTGHYWKAFANWLEKQDGIKVVLVNPYATKQAKELDDNSPTKSDKKDALTIAKLVKDGRYFELYLPHDIYAELRGLSTTRTGLNKRKSALKNTVRAVLDEFFPEYTEVFKCPLSGKASRHILKTCPFPKFIMELGEDGVTAEIKKVVKKTVGRKKAKRLVETATDSIGVDYGEEAAGLKLRLMLEELELLEKQTEELEEQMKGALQKTDYAEYLLSIKGIGVVTLAACLGELGDPARFENPRQMSRMAGYNLVEDSSGKNKSGTKISKRGRKNLRSVLYQMALTMVATNSEMKQLYHYLKTREKAPLRKMQALIVISKKILTLIHTLARKKESYDPNKVFGHVRREQLKSVA

SEQ ID NO: 87225 - protein, 467 aa, unidentified
MTPHKDYCLDPCPPVLTPMLPPSPILSDALQVCHPHAAGIDIGEAEHWVAVPPGSDPQPVRRFGTFTADLDALADWLIDCGVTTVAMESTGVYWIPLFELLEARGVQVLLIDPRQAKRAPGRPKTDRLDCKWLQRLHAYGLLAGAFRPADQVCVLRGYLRHRQMLLTYAAHHIQHMHKALEQMNLKLTQVVSDITGVTGMAILKAIIAGERDPVTLAKLRNPHGQHSEDEIAKALQGTWRAEHLFALQQAVELYQFYHQQLTTCDQRITAHLETFADKSDGQPLPPKARRHKKTNEPRFDARTPLYRLAGVDLTTIEGIEENTALILLSEIGTDMHRWPSVKHFGRWLGLCPQHQSSGGKVLSRRVRPGAHRVTVALRLAARRLHHSQSALGAFFRRMKARLGTPKAITATAHKLARLVSHLLKHGSAYVQQGLENYEAQYHERKVKTMAKQAKALGYTLVPLAAQG

SEQ ID NO: 87226 - protein, 282 aa, unidentified
MKELSKESVIKFVGIDLAKRSFHLYAVDGEGRAVLSRKVTRARLSAVVAQLPACTIAMEACGSAHHWARLFRSFGHEVRLIAPQFVKPYVKSNKNDAADAEAICEAAQRPGMRFVAVKTVEQQDIQAIHRMRNLAVQQRTAQINQIRGLLLEYGLEVAQGRAAIQRRLPEILEDADNGLSERFRAELHALAEELRLLNERVAHYDDQIEQIAQGDAQARALGTIPGLGAKVAAALLAGVDEDPQLLKNGGGLAAWLGLVPRQHSTGGCLLPTLETTSTGRPG

SEQ ID NO: 87227 - protein, 340 aa, unidentified
MEIAVLGIDLGKNSCSIVGFDDGGAVVLRRRMHREGVIKLAGKLRPCVVAMEACCGAHHLGRVLRAQGHEVRLMSPEYVRPYVKSQKNDDRDAEAIAEAATRPTMRFVELKSEEQLDMQTLHRARDRLVGERTALINQLRAVLLERGITVAQGRRKLERHLAGLDAQGGLSQRMRVLIEDMRLQWCELDRRIAELDKELTNWVRNEEVARRLMTIPGIGVLNATALIAAIGQGESFARGRDLAAWLGLVPRQLTTGGRPRLVGISKRGNKYLRKLLIHGARAALPTLLESPTSLGAWLRGLMTRMHKNAVVVALANKLARLAWAVLRHGETFRFAVSAAA

SEQ ID NO: 87228 - protein, 346 aa, unidentified
MAFIGVDLHTNSFTVCRLGADGSELFETFQLAAAELERFCLSLDADDEVAVEATGNTAWFCDEIRACVGRIVVVNPRQFQVVRQSVKKTDRNDARALAFFLSRDMLPETRLKRPAEVELASLAQTRDMLVKSRTKILNKIHGVFNRHGIKLKKEGLSGRRLRALEIGRFGEVEQVELTVLRDQALALSAAIRGLDRALAEAAAELEGFEEITSIKGIGARSAAVFLSGIGDVNDFASADKLAAYVGIVPRVAASNGVEHHGRITRRGNKLMRTTLVQCTLVAIRYSGYLNAFYRRIKARRGAGKAIIATARKLLTIIYNTLKNKWVFEDFPAFRLRNPGQTAGQTS

SEQ ID NO: 87229 - protein, 407 aa, unidentified
MEVVHQRCAGLDVHKDEVVACARVMEGGRATHAQARFPTTTRGLLALADWLATRGCAVVVLEATGVYWKPVWHLLEESCELILANAAHVRAIPGRKSDTNDARWLADLVAHGLIRASFVPPTPIQELRDLTRTRKQLAREVAQHTLRIQKTLEDANIKITGVVTDLLGVSGRAILIGLIAGETDPARLLARTTGRLQADPRRLQDGLQGRVTGHHRFLLQLHLDQIATLEAGIDRIEAVLEDRLRPFRDVIARLTTIPGVSVLVAQTIVAEIGLDMTRFPTSGHLISWAGLCPRMDESAGKRRSTRIRHGAPWLKTVLVQAAWAASRVRDRYPRAQFARLRARRGPKKAIVAVAASLLTAVYFILRDGTEYRDLGGRYFDERDKARAVRRLTRRIEALGFNVDIKAA

SEQ ID NO: 87230 - protein, 347 aa, unidentified
MDVLYQSCAGIDVHQATVVVCILHGPLTSTRPKREMAQFDTTTKRIKKPVMIFLTQFHVEAVGMESTGVYWRPVWHELCDDFELILAQPAHMKAIPGQKTDKKDAHWIAQLTRIGLLPRSFVPDETIQELRELTRQRKHYVESRNRETNRIHKILQSGGIKLTTYIEDIMGASGRNLLQLLIDETPLTPRMIHQSVYTSLKRKVPQLLEALDGYFSAHHRFMLGQSLEIYDFYQKQIDCLEERINGYLNLYERPVEILDSIPGMDLITASVIIAEIGVDMSQFPTAGHLASWAGLCPGNNESAGKKRSTKIRHGNSYLKRCLCQAVFLRQKDKKRKSTSRALLPNSK

SEQ ID NO: 87231 - protein, 356 aa, unidentified
MDEGSCVGLDVHARSVVAGVIDLGSGEVRSQRVPPGSEATVAWLKALPAPVRVVYEAGPTGYGLARVCAEAGISCVVAAPSKIRPAADRVKTDRRDAERLARLLRLGEITAVRVPGPDEEAARDLVRAREDARGDLMRARHRLSKLLLRHGVVYEATAWTRAHDAWLRKQRFQGGPLAIVFDECYSRMLDAKTRRDTLDKAIAELAATPPYVDVVERLVCLRGVSTLTAFALTVELGDWNRFRPESLGPFLGLTPSENSSGERRRQGGITKTGNTHARRLPIEAAWHQRSAPRLSVTLERRRTGKSLAVRAQADSSARRLHGRWNALEARGKPRLIVVVAVARELAGHCWALATME

SEQ ID NO: 87232 - protein, 354 aa, unidentified
MIIIGVDFHPAYQEIAAVNTDTGEYQEKRLAQPQEAEEFYGSLAWVGQAVGVGMEASGQAQWFERLLEGLRWELWRGDAAVIRAKRGRKQKTDREDARHILKLLLKDAFPRIWVASWENRDLRQLLWHRHRMVQARTRVMNQLQAVALKEGLHCKKRLWRASGRQQLECLQLAPWSSRRRGELLELLDRLNPTIAELSQAVEREAEKCPEAQRLMTHPGVGALTALAFVLIIGNAERFGCGKQVASYLSLVPLEKSSGNRRRLGHITKPGSSLVRFLLVEAAQVTVCSVPEWRSKYHHLVLRRGRKTAKVAMARKLAVRLYWMWRKGWDYEQWKKFGSYVGQPGNRDGVQSITE

SEQ ID NO: 87233 - protein, 315 aa, unidentified
MSEMTVETFVGIDIAKGTLDLCIEPGGEALHVAYDDKGVSHIVSRLVVLAPTLIVMEATGGLEMRLAGELAAKGMPVAIINPRQARDFAKATGQLAKTDLVDAAILAAFARAIRPAVRPIKDVDARELDDLVTRRRQLMNMRVQEMLRMGTASKVQKKSLTAHITWLNKRIADLDDDLSKRLRASDVWRSKDDLLQGIPGVGAVTSLTMLAKCPELGQLNRREIAALAGVAPLAKDSGTHRGKRFVWGGRADVRAVLYMATISAIRFNSSIKAFAERLKRAGKPAKVVIVACMRKLLTIMNTMIKNNTPWSPKNA

SEQ ID NO: 87234 - protein, 374 aa, unidentified
MANIIEAFVAFDTSKLRNAVAIAEAGRAGEVRFLGEIENTEAAVAKLVRKLAAKYGRLTFCYEAGPTGYGLYRQIKSLGHECMVVAPSLILKKPGERVKTNRRDAVNLVKQLRGGDLTAVWVPDPRHEAMRDLTRAREVAVEDLRRKRQQVSAFLLRQGLHYPGERAWTKAHRDWLASQKLEYAEHRIAFEEMLLAMRQAQERIERLEQAIRVAVPDWSLAEVVTALMALRGIDFISATAFLAEIGDLSRFRTPRELMAYLGLVPSEASTGDTVKRGPITKAGNRRARRVLVECSWSYQHPPRVGKEKQERVAAAPRAVREIAWKAQCRLSARYRALTRKGKLKTVAVTAVARELSAFIWAINRQIANPGAAAR

SEQ ID NO: 87235 - protein, 366 aa, unidentified
MDTIYIGVDFHARQQTICYLKIETGELVISELKHQDKEQVRAFYAQFQGPVIIGLEASGYSPWFETMLEQLGCEVWLGDATEIRRRARWRQKNDRRDAELIWDLMVHNEFPLLHRPTLQSREILRMLRYRQKLIKFRTMSKNSLQAIALQAGLAKGSRLFTTAGQQELRTAEMSPVLQWQRDHWFALMQPLNQQLLETMVWFKAASKGDAAITRLRTHPGIGLLTSLCILHTLQPVSRFRNQRKVVAYAGFDPMVRSSAERAIYLGISKAGSRMLRYLLVEAVHTAIRYDEDLKRFYKRVAERRGRPKAKVAAARKLLIRAYIMLRDEIDYAEFRRRAVAARLARRGQGPKVPEVLIGQSASPALS

SEQ ID NO: 87236 - protein, 411 aa, unidentified
MEAAVITAVGIDVSKSKSTVAVRRPGGEIVLRPFEVHHTNSDLKKLASTLKKLGGDIRIVMEHTSTYWRPIALTLKEAGFFVSVVNAMLIHDFSDNTIRKLKTDRADALKIANYALTFWDTLPPFNNEEETRLLLKMQSRANERITATATALRNGLIALADQTFPGVNIAFDPNTKNANGHEKWVDFFLRYWHKDCVCQYSMEAFTESYRGWCKRKNYKFRTDTVHKIYLLAQEGVATLPKCESTKMLITQACKSLNAVCESKQSTQLEMQRLAAMLPEYEVVMQMEGAGPITGPALMAEIGDVRRFKNKKALVAFAGIDAPPFQSGAFESKSRHVSKRGSPHLRRTIFIISNIILTRSNPENAVYCFMDKKRSEGKHYYVYTVAGSAKFLRVYYARVTEFLRSQPSSDAC

SEQ ID NO: 87237 - protein, 346 aa, unidentified
MNNHNVKGNITVLGIDLAKSSFQLHGIDDKGNILLKKKLTRSKLIAFIANLPACLIGLEACGGAHHWVRTFSEFGHRVKMIAPQFVKPYVKSNKNDAVDAEAICEAVQRPNMRFVPSKSIEQQDIQCVHRVRSLLVGRRTAQANQIRGLLMEYGLIIPQGINQLRKAIPDMLEDAENTLSPYFRELLRELYEEIIHFDERIAAVELKLKRISEQNEDCRRLLTIPGIGLLTSTALVAAIGDISVFKNGRELAAWLGLVPRQHSTGGKPTLLGISKRGDTYLRTLLIHGGRAVVRVAHKHQDKRSQWIGEIKQRRGENISNVAVANKNARVAWALLTHKQDYCTVGA

SEQ ID NO: 87238 - protein, 368 aa, unidentified
MKEETVTSNGSSQANVVNKGNRVLKLGLDTHYRQVTVAMQEDGGRIKAAGKMRHADFLNWVYKKLEESWEIYSCYEAGAGGYWLHRQLEQMGVKNLVVVPKAMGQGGKKQKTDKRDSGELCDSLDRYLRGQDKALSIVAVPTEDQEQKRALIRYHRQIMADRGRCEARGKGLLCAQGIEVHGRWWQGDGWIEVQHNPRLKDWMKEQLIGWRNKILSTDEEQSGLRERIAALAPAILPKGVGAYSAAVLEFEMRGFERFKNRRQVGSMTGLCPGIHLSDGRGKEGSINRCGIGIVRWTLVEMVWRLMKWQPQYPPVRRLALGLVKSKRAKKRLAVQAARRLAIDLWRLSTGQTTPEKLGLIMHCTHPEK

SEQ ID NO: 87239 - protein, 276 aa, unidentified
MQISTIGIDLAKSVFQVHGVDTAGKVVLTKKLRRSQVRALFEKLPPCLVGMEACATAHHWARELKSLGHDVRLMPASYVKAYVKRGKNDAADAAAICEAVTRPSMRFVPIKTIEQQSALMLHRTRDLLVRQRTQLINAMRAHLAELGLVAAQGRDGLKALISIVTDETSPIPTLARKALQALLSQLNASAQAGRRDRAGCPCSAIDSEASQRLETIPGIGVIGATAIAATVSDPTVFKSGREFAAWIGLVPRQNSSGGKERLGSISKQATVICDAF

SEQ ID NO: 87240 - protein, 404 aa, unidentified
MKGPIVSIDVSKGKSDYQAFKNLNVKYTGSRSIKHTKEGFDEIVNLVKEMEKKLETEVCVVYEATGVYHRVLKKVLEDNNIKQFIINPLLSAKTRKNDSLRSPKTDKLDPKSIAKTYYSHSLHNSHKPETIYHELRELSRYYEDILVHIRKDKVAFIAQLDIVFPGYDALYDDLYGPVALAVIEKYPHPEMLQKKKINTVSKVIQNKTCHRQATSDTMADKAIEYSKTIYSGCDKDDIEVLILQRLIKKLKEDMAEAERTISEMIKLAQELPDFSIIKSIPGIGDNLAARIIAELGDMTRFKKKNELVAFAGLDPRISESGKNDRDHMHITKKGNKRLRCLLYLAVTCSIRLKRDDNSIKDFYIKKKQQSNPMCSKAAKTACASKLVRIIYSMCKTGELYQYNK

SEQ ID NO: 87241 - protein, 316 aa, unidentified
MSETVLGIDVAKKKLDLCLMTGGKVLMKKFDNDAKGIRLLQGWLRSLKIERVHACLEATGTYGEMIAEFLHEHGHLVSVVNPLRIEAFARSDLKRNKTDIADARTIAEFCLEKNPDAWHPLPPEIKQLQALTRRIEVLERMRASEQNRFDVAPDPVRPSLKRVIADLKKEIQNVQRLIKDHIDNNPDLKEQSELLQTIPGIGEKTARLLLGEIEFRQFSSARALAAYAGVTPRRYQSGTSLNRTRLSKLGNGRIRKALYFPAIVAVRYNKVINLFAQRLKENGKTPMQVVGAAMRKLLHIAYGVIKNNRPFDPTPA

SEQ ID NO: 87242 - protein, 346 aa, unidentified
MKKHSAKGEVKVLGIDLAKQSFQLHGVDESGQSVLRKTLSRNKVSAFVAQLPPCLIGLEACGGANHWVRVFKEFGHTVRMMAPQFVKPYVKSNKNDAVDAEAICEAVQRPNMRFVPEKSIEQQDMQSLHRIRSQLVGRRTAQANQIRGLLMEYGIVIPQGIRHVRKQLPLILEAADNGLSDLFRELLHELYEELVHLDQRLEGLEQKLLRLSVQNEDCQRLLSIPGIGLLSATALVAAVGDVSNFKNGRELAAWLGLVPRQHSTGGKPTLMGISKRGDCYLRTLLIHGGRTVVRVAHQHQDRRSRWVSELEQRRGKNICAVAVANKNARIAWALLSNKTTYQAAAA

SEQ ID NO: 87243 - protein, 338 aa, unidentified
MLFSGIDLHKRTVAIHTLDAEGAVVRTANLPARRSALTAYFRTLPGPHRAVVECTGMWYWVRDLLVPQGIDLRLGHAKYLKAISYAKVKTDAIDAATLAQLLRVDLIPEAHMISPALRETRDLLRARLVLVTRALKCQRSIGALLEKYNVASPAELSELPRLQATLHAEERALLATHIRRLEHELRDRILPTPDAQRLVWIPGIGKMVAYTLLLEIDAIGRFPTVRQFHSYCRLVPGAQDSAATRRHKRSRDGNRYLKIAFHHAAVRAVQYFPEIRAEFQRLVRRKGKTIARALIAKELGSIVYQVLTRQEAFNGRFRGLRLTRTKTRQWPRLTSPPA

SEQ ID NO: 87244 - protein, 345 aa, unidentified
MNVTAVGIDLAKNVLQVHGVDARGKIVLRRQLRRDLVTAFFAQLPPCLIGMEACASAHHWGRTLERFGHTVRLMAPQFVKPYVKANKNDVADAEAICEAVTRPNMRFVPIKSIEQQAVLSLHRVRQGFVKARTAQANQIRGLLGEFGLIIPKGIWHIAQRVPELLEDASNELPLALRQLIDRLSCHLKELDRQVRELEREILAWHRNSDLSRKLEQIPGIGPLAATALVASIADARSFDNGRQVSAWLGLVPRQNSSGGKPTLLGISKRGDAYLRTLLIHGARSAILAARRRNDSKNGWLAKLLDRRHPNVAAVALANKNVRTVWALLAHGRDFRLDYVPARTAA

SEQ ID NO: 87245 - protein, 400 aa, unidentified
MLSIGIDVSKGKSTVCGMKPGGEIVYAPFEVQHTREGMSDLVSLLRGSGEEVRAVLESTGSYHCPVVAALLENGIFVSVVNSLRMKRFCSQSIRKVKTDRIDAMQIALYGLAYWQELQPARLPEDTYRELQLLARQYYQMTSMLIKAKVDFNALCDQVLPGMQELMSDHAGRHKLSDFVLRYHHTTHILEMGETRFRKDYCKWAEKKGYRNCERMAALIFATAQNGIPVLPNAPSTQIVITEAIRVLHTVEASRDAILTQMQALAKTLPEYSLVREMPCIGDTLAPRLIAEIGDVRRFHSKRALIAYAGIDAPPYQSGKFCANNRHISKRGNRYLRKTGYEVMQSYVMHKPANDPIFTFIEKKRSEGKCGKLAMVAGLNKFLRVYYGKVTELYRSLPAIE

SEQ ID NO: 87246 - protein, 340 aa, unidentified
MSLHGGIDLHANNSVIVLINEQDEVIYRKRLPNALPTILEQLAPYHMQIKGLVVESTYNWYWLVDGLMEADYRVHLANPAAIQQYSGLKYTDDHSDARWLAHLLRLGVLPEGYIYPKAERAVRDLLRKRAHLVRQHTANVLSVQNILVRNTGARFSVKRLQELTKQELKSLLAEEPQVLAVTSSLAVLDCLRHQIKTLEKTVHKRLHHTPAYEQLLTVDGIGTILAQTITLETGAISCFPTVGNSASYCRCVDSTKISNGKRKGTGNVKNGHPYLAWASMEAAQFAMRFQPEAQRFYQRKLAQSRNNTVLARKAVAHKLARACYYMMRDLVPYEATKAFG

SEQ ID NO: 87247 - protein, 348 aa, unidentified
MQITTIGFDLAKNVFQVHAIDEAEKVVIQKQLRRAQVLPFFAKLMPCLVGMEACASAHHWARQITRLGHEVRLIPAKDVKAYVKRNKNDKADAAAICEAVNRPTVRTVPVKTPDQQASLMQHRVRDLLVRQRTQAINAVRAHMAELGIIAAQGYEGLKALISIITDQHDERLPEDARVSLLAIATQIRSCEVELRAIEKRLLVQHRNSEDSKRLETIPGIGVIGASAIVATVPDAHIFKTGRDFAAWIGLVSREQSTGGKQRLGPISKQGDRYLRRLLILGALSVLKLAKAHPERHPWLSRLLARKPPKVAAVALANKMARIAWALLTKQENYRTQVITVAPVPAASG

SEQ ID NO: 87248 - protein, 428 aa, unidentified
MPNSDYSKQLARRQRIKGTTLVVGMDIGCEFNAMGLMNKEGEVLGRYPKIYNSRKGFDYFVKAIEDTKRKKRLNDVVIGLEPTGHYWRKIAYFAKDKGYDVKFIRTTALKHQRELDESSPAKCDIKDALTITNITREGKYIDTVIEDGLLRQLRTLASVRERIQRYNTGSKHALSAVLDDYFPELKGIFWSMKAKGLWAVLDECPFPEDALRLGPVKIAETIAKSSRRKVEATQKAIRVYQAARESIGLKQIGIADRYRVKMYLEEVKRSEEQLKDIEAQMKTLLQQIPYAKYILSVPGIGVLSTAILLGELGNPFYFKHPKQIIKYSGYDPVESDSGQWIGRKRISKKGRWLLRKYLYFMAMRVVHRSPYFKSYYNRKLETKTRFGQTLTKKEAFCAVIIKLIKVIFALLRDKRTFTANAPVLALVR

SEQ ID NO: 87249 - protein, 371 aa, unidentified
MSIIHYIGMDVHKENYTLCCYTFEKDELQYKQTVAPDYKMILKYLEQIRNRSSEEVEFICGYEAGCLGYTLYHQLTDRGVKCVILAPTTMGVTNTSRIKTDKRDAGNIARCLAFGTFSPVFVPTAEDESVKEYIRMRDNQKKALKIIKQQILALVLRHGYRFTDGKNYWTGKHIKWLKSLNLGGILQESLDEYLVTYEYLINKIERLDKRIAELAEDERYQENVKKLSCLIGVKTHTALSTLVEIGDFKRFAKAEQLAAYLGLVPGEDSSGGRVTRCSITKAGNSHVRRLLVEAAQSYTRGAVGHKSRDLKQRQVGNEPQIIAYADKANERLRRKFYRMTLKNGTNRNVAATAIARELACFMWGMMTDNVA

SEQ ID NO: 87250 - protein, 341 aa, unidentified
MNVKTIGIDLAKNVFQIHGVDEHGKRLFNKQLRRAQMASFFANIPPCLIGMEACASAHFWANKLISMGHNVKLMAPQFVKPYVKTNKHDAADTEAICEAVTRPNMRFVPVKTAEQQAVLALHRSRQSFIKQRTAQANQIRGLLAEFGIVVPRGIQQLQRRLPELVEDADNPLPVLFRTQLSLLQHHMAYLFDVIATLDKQIEQCYRQNALCQRIGKIPGIGPVTASALIATIGKANNFENGRQLAAWLGLVPRQHSSGGKQVLLGISKRGDTYLRTLLIHGARAVLQSAEHKQDAVSSWANQLMARRNNNIASVALANKNARTVWALLAKEREYCAPIISA

SEQ ID NO: 87251 - protein, 344 aa, unidentified
MSTVNQATVFVGLDYHAASVQVCALSPDGKVLMNRSCANEWRAVMGAVRKQCPGAVNVQAAIESCCGAAGLADELIGHAQWSVNLAHPGYVARMKQSPDKTDFSDARMLADLQRVGYLPKVWLAPEEVRELRRLVHYRQALARERRNLKLRIGATLREARQKAPATVNPWTKAWLAWLDGSAQLSPNARHVIDCCLRRLMGLAQELAQIDRRLEKQTQDDPLVRKLLTIHGIGLITAVTLRAEIGRFDRFRTGKQLARFCGLSPRNASSGQKQADAGLIQAGNKELKSLLIEAAHRLIRCEERWTALAARLSSRGKKGCVVVAAVANRWLRWLFHQVQPSCLAV

SEQ ID NO: 87252 - protein, 360 aa, unidentified
MTESTPIVAFDQHAASVMAAVLLPGERTPALHPLPPDFPSIRRFLERLALPGVRCCYEAGPCGFDLQRTLQTAGIACDVIAPALIPRRAGDRVKTDRRDAAQLAVLYRAGALTAIHIPTEQEEAVRDLLRCREDICTDLLRAKHRLSKFLLRHGRRCPDGRAWSKRYIAWLTGQRWPLSALEQTFTSYRRAIDDTVARLRSVDADLQAALTVAPLAPRVARLRCFRGIDDLTALTIAVELGDATRFPAARQVMGFTGLVPSEYSSGATQKRGGITKTGNTHLRRVLVEAAWHYRHRPAVSHRLRIRQQGAPPAAIRVAWSAQHRLHARYRRLLARGKSPQLAVTAVARELSAFVWAALAP

SEQ ID NO: 87253 - protein, 345 aa, unidentified
MENMYYIGLDVHKKTISYGVKDGSGRIHAEGKIPATRFDLDRWMKTLPQPWTVAMEATIFTGWIYDHLRPHAAAVKVAHPLMLRAIAAAKKKNDRMDAKKIADGLRCNFLPECYMAPTAIRERRRTLRYRNLLVRQTVQLKNRISGLLMEAGVNYNKEKLHKVGYFRELLKSNPDIDESLRPLLQLCRETLVRLQKTESALIRSLARDRFLVERVEHLMTIPAVGPITALTWALEVGEVSRFSSIKKAISYCGLCGAEQSSGEHVKRTPISKQRNKHLQCVLVEAAHRAPRRSPELALLYDREKQKGNANRATLAVARKLVAYLVAIDRSQRDFLLVEKENQAAA

SEQ ID NO: 87254 - protein, 344 aa, unidentified
MKEVITIGVDLAKNVFQVHGVDEEGGVIVVRQLRRSQMLAFFKKQPPCLVGMEACATSHHWARQLIELGHEVKLMPPHYAKPYVKRSKNDAADAAAICEAVTRPTMRFVSVKSTDQQGVLMLHRTRELMVRQRTMLVNAIRAHMAEFGIVAPVGIPRVKQLFAVIADGDDDRLPPIARTCLEGLVRQFLLLHEEINVTEKRIHAWHRSNEVSQRLETIPGIGPIIASALTASITDPEVFRNGRELAAWIGLVPRQNSTGGKQRLGKISKQGDQYLRWLLVAGAMSVILHAKRKGTTNLPWLADIIARKPTKVAAVALANKTARIVWALLKQGGIYQKPIAALEA

SEQ ID NO: 87255 - protein, 341 aa, unidentified
MKKFIRIGVDLAKNYFQVHALEGDDGRCVTRKLRRQDFLAFFSQIEPCFVGMEACGSSHYWARELMAMGHEARLVPPIYVKPYVKRGKNDAADAAAICEAMSRPGMRFVPVKSAENQAALALHKTRDLLVKQRTMNVNSLRGLLSEFGVVVAKGIGRVEDLIEKAKDDATLPEAVKDLVKTYVEVLNAIETQIAALGDGIEKAHAQSEQSRLIAQVPGVGKIAASVIIATIPDPHIFKTGRDLAAWLGLTPRQNSSGGKEKLGAITKKGNAYIRRLLVLGATSLLRVVGKRQGALRDWIVALSTRKPARLVTVALANKLARIIWAMMTNGETFRVETFAKA

SEQ ID NO: 87256 - protein, 340 aa, unidentified
MNFTTYGLDIAKRVFQLYWVTHENGEIHNRKYGKQELLEFFAQREAGLIAIEACGSAHWWRRKLMALGHEVKLIHAKFVRPFVQGNKTDAADAKAIWTAVRQPGMRMVAGKTEDQQALLALHRMRLSLIKFRTMQVNQLRGLLYEFGVTLKSSRQAGLSEIQQRMDELEEIVPGVLFEAVKEQLNRLDEIEADVKNIERRIKDWQKQQAACRKIAEIPGVGMLTATALVATMGEADSFKSGREFAAFVGLIPRQSGTGGKIKLLGISKRGDTYLRTLLIHGARAVMFNAKDKGAWSEALLQRRPTNVAIVAMANKMARTAWAILAHDREYQKGYVSQVPT

SEQ ID NO: 87257 - protein, 409 aa, unidentified
MDIMYERCCGLDVHKKTVVACVLVPGSGRQPTKEIRTFGTMTADLLELGDWLAEKGVTHVALESTGVYWHPVWNLLEGNVELLLVNAQHIKQVPGRKTDVRDCEWIANLLRHGLLRASFVPERPQRELRELTRYRTSLIRERAAEINRIQKTLEGANIKLGDVASDILGVSARRMLEALIGGTTDPAELADLAKDKLRKKLPQLERALKGQFRAHHRFLLAQQLAHLDGLDELIDSLGSEIAERVRPVEQVVERVDGIPGFGRRTAEIVVAEIGTDLSRFPSYKHLASWVGLCPGNNESAGKRMSGKTRKGDVWLRSALIEAAHAASRSKDTYLAAYYHRVAARRGKKKAIVALAHTLLTIIYYLLTRDCDYEDLGPEYLNEHDREQTERRLIRRLQGFGYTVTRATAA

SEQ ID NO: 87258 - protein, 411 aa, unidentified
MEVLYPRCCGLDLHKATIAACVLVVEGKSKKRNLLRCRTMTRDLLALADWLEGWGVTHVAMESTGVYWKPVWNILDGRFELILVNAQHFKAVPGRKTDMRDCEWLAELLQHGLVRGSFVPPTPIRDLRDLNRNRGIVAQERATVSNRIEKVLEDANIKLSSVASHVLGQSGRTMLHAIGAGEEDVEKLAGMARAKLRKKIPELRVALTGTLRDHHRLLIRQWLVRLEGLEKQIGEIDIEISRLTQPCQDVIERLMTIPGVDRITACGLIAEIGTNMAQFPSAAHLASWAGLCPGNDESAGKRRSGKTRSGNPWVRRVLCQAAWAASHTKNTYLAAQFRRLAAKRGKKRAIIAVAHTILTIAYYVISRGEGYRELGGDYFERANGEGLKRYLVRRLERLGQKVTIEPALSTA

SEQ ID NO: 87259 - protein, 320 aa, unidentified
MLSFCGIDVSKDRLDVMVLPEEQCCSVPNDASGWAALVARLRNFSIMAIGLEASGGYERGVARALLAAGMSVRQVNPFKLRQFARASGVLAKNDPLDARMIASFVGVMPTRPAQRPTPAAELLAEMLAIRRQLSAEKVAAENASRLLEEAMLRRLSRRRIGRLAADIELLDKRLVEIVATDAALAHRYRLLRSMPGVGPVLACTLIVLLPELGGMTRKQVAVLVGVAPYAFESGTLKGRRCIWGGRANVRQVLYMAAMSASNWNPGLKAFHDRLEAAGKKPKVTIVAVMRKMITTLNAMVRDDVVWADRHSGRNSVTTAR

SEQ ID NO: 87260 - protein, 343 aa, unidentified
MQSISTIGLDIAKSVFQVHGVDGTGQVVIRRQLKRRFVLSFFEKLSPCLVGIEACASSHYWSRELQALGHTVRLMPPAYVKPYVKRQKNDTTDAEAICEAVTRPNMRFVPTKTVEQQSGLMLHRARHLFIRQQTAVINSIRAYLAEFGIVAPVGRRGVEQLLEVVADTADRRLPEVARACLAALGSQLRALKAQILEFDRRIIVWHRSSATSKRLDAIPGVGPALATALVASVADAKTFRSGRDFSAWVGLVPKQNSSGGKDKLGSISKQGDRYLRSLFTAGALAVIRYAKIHGTRHRPWLTELLARRPTKVAAIALANKIARMAWAMMARGERYREPAALAA

SEQ ID NO: 87261 - protein, 349 aa, unidentified
MRSSESNNIHFSCICGIDIAKKVMQVFKVTSDGVVTNTSVSRKDFLEHFRNIPPALIGMEACATSQHWGRELQGLGHTVKLLSPKAVKPYVKGLKNDRNDAEGIYRALIMGVREVSIKSTAVRDLSLLQTMRAKRQRDKVATINHIRGILAEYGLVMGKSVRAFLSNAGTLIARLKESETTSQLVISELEKLLKEVKEIVSRIEELESSIKKIASENKNYDLFRSAPGVGPITAAMMVVLLCNPTVFKNGRDFAAYLGLAPMSFGSGGRNQVTGIPSKYRCHNEARSLLVQCAHSITRLKYKSDWVASILSRKPKKVAIIAIANKLARQLWVMAKKGDKFEKRLVLAAV

SEQ ID NO: 87262 - protein, 351 aa, unidentified
MVVIGVDAHKRTHTLVAVDEAGRRLAEKTVAATPDGHLEAVEWAARWPERIFALEDCRHLTRRLEVDLLRAGEAAVRVPPHLMAVVRQSGRERGKSDPIDAHAVARAALRESDLPVVQLDGEARDLRLLVDHRDDLVRERTRMQSRLRWHLHELFPGLEIPPKALRRQHVLAELEERLAGVTGTVADIARELLVRCRESTSRANELQVEITRIVRRLAPSLLALPGCGVLSAAKIVGEAAGASRFRSKAAFARWNGTAPIPVWSGNSPRHRLSRGGNRQMNAALHRIAITQLRGVGEVGRVYVEGRMAAGDTKTEALRLLRRRLSDEVFRRLRADETMKPDVLRVSDSMAA

SEQ ID NO: 87263 - protein, 377 aa, unidentified
MSEYSAYVGLDVHKDTIAVAVAWPGRGEPFYRGEIAHRRSSLRRLMGRLSPHGEVVSFCYEAGPCGYGVYREISEAGHDCAVVAPSLIPRKPGDRVKTDRRDALTLARLHRSGDLTSVWVPGPEQEAMRDLTRAREDMKGLELKARQRLGAFLLRHGRVYGGRSRWTQAHARWLEEQKFEQPVQQVVFQEYVDAVEQATARVAALEAQMHEALETWSLAPAVAGLKALRGVDTITAMTVLAELGDLTRFDSPRQLMSFLGLVPSERSSGSQRRQGSITKTGNGHVRRVLVEAAWSYRYPARKTAHLRRKAAAAPEAVQALAWAAQKRLCARYRHLLHAGKAKNQVTVAVARELVGFIWAIACEVNGRVHASRAAIPA

SEQ ID NO: 87264 - protein, 371 aa, unidentified
MDERTKYFVGLDVHKESISIAVAEAGRAAGRLLGQIPHDTSKLLRKLGAIGEASEVHVVYEAGPTGYGLQRDLVRHGYACEVIAPSLIPKRGGDRVKTDQRDSLRLAELSRAGELTAIWIPDTVDESIRDLARAREDAINARRQVRHQLRGFLLRHSIRYSGKTAWTKTFYRWLGTLSFPERSSQMAFTEYLLAIEAGDKRVERLSVALEEAIAGWRFEPVVKALCALRGIDMVSAIGLVAEIGDIGRFDHPRKLMGYLGLVPSEHSSGDKVNRGSITKCGNSHARRLLTEASWNYRFKARIGYRAQRRQEELSTTIRDIAWKAQLRLTTRFAKLTARGVNANKVCIAVARELAGFVWAIARSATALNVPG

SEQ ID NO: 87265 - protein, 309 aa, unidentified
MEKVYVGIDISKDSLDVAVHACDKQWRFSNDRAGITSLCKMLMKLKPILVVFEATGGYEMPLYFSLDEAGLPAAPVNARQIRDFARSTGKLAKTDTLDARIIAHFGYAIQPVPHPVPDTQELKIAQARRLQLLEMITAETNRLRGAPKALKRRIEAHIAWLEQELADTDRDLKEMIENDPVWREKDSLLQTTPGVGPTLSATLIAQLPELGTLNRRKIAALVGVAPLNRDSGVFHGRRTVWGGRANVRAVLYMATLVATRHNPVIRSFYLRLCSAGKTKKVALTACMRKLLTILNAMLKHNAPWSYTPC

SEQ ID NO: 87266 - protein, 351 aa, unidentified
MSHKLNSSIAVIGIDIGKNSFHVVGHDKRGAIMLRQKWSRGQVEARLANLPPCLIGMEACVGAHHLSRKLQMLGHDARLMPAKYVRPYSKGQKNDFRDAEAITEAVQRPTMKFVATKTAEQLDLQALHRVRERLVTQRTGIINQIRAFLLERGVAVRQGLRFLRAELPRILAAPCDALSPRMLRVIEDLAGDWRRLDERIEGLSSEIEALARQDKGCERLMTVPGIGPIISSAMVAAIGTGDAFSKGRDFGAWLGLVPKQISTGDRTILGSISKRGNRYLRALFVQAAWVVLVKVGQKHWERYGLKSWIEAAKKRLHHNVLAIALANKLARIAWSVLAHGRTFEASKMQAA

SEQ ID NO: 87267 - protein, 472 aa, unidentified
MYEEERIRHARYCQLRWEIRGSGEYLIVGIDIAKDKHHAFFGTARGKVLLKRLVFHNTKDGIMKLLGQVEALKVRHNLPEVVFGIEPTGNYHKPLGDYLVKNGHLVVLVSGAAAKKNREIMDGRWDKNDTKDAANIADLISQGRCLFYEYPPQRIRDLRDFLSLRRRFKKEEHRLRLRIRNNLVTKHFPEFDRFFGENDSESLSIVKWCLDPQVIHAMDFDKFFLMVTSKRRSLAQERRLRAIHFTARDSIGCTMGEAGGFESGTLVDQAKEVRAVIKDIESRMEEISRGFAEYEYLLSIPGFGPYISSVVLASIGNPWRFQNSSQVIRLAGYDLSASRSGKTSDKAIPEISKKGNAELRYALYQAALVGSTKNRDIMDYFTRKLKGRSREKGIGTKMRVKLAVKLLVIAWTLMKKKEPFNPEYLKDSCLVKQSGDSHILEEKRAVAMVRSRASASSSRRDRRSLTANRSAG

SEQ ID NO: 87268 - protein, 386 aa, unidentified
MKYVGVDVAKETHYACITSQNNKVLTPPFPFMNTIDGYNLFLSKFKKFPKNDVVIGLESTGIYGENLIAFLSEQNYKIALINPIETSALRRKRIRNAKTDKIDSKGICKFLFQEEYRLLEPQELAVLELRGICRFRQSLKKQNSRLKVQLVSYLDIVFPEYHTLFSSIHGKGSYAVLTEFSSPAAIANVNITRLENILKSASRGHFGRAKADELKELAKKSVGNKSNNKGFQISYTIAQIRLIESQLDDTEKHLAKLWNNIDTVLKTIPGISAIDGSMIYSEIGDITRFRKPDQVIAFAGLDPATKQSGNFRAASTRMSKRGSPFLRYALINAAWNVSMNNATFGEYYNLKLSEKGRHYKALGHVAGKLTRVIFAMLKNNMAFDLP

SEQ ID NO: 87269 - protein, 366 aa, unidentified
MHEGTTHVALDDSKRTIVVGILRPGAAAPELRELPKEPHLIRRLFQRLRREGPVRACYEAGVSGYDLYRQITACEVECQVIAPALTPRRPGQRIKTDRRDAAKLVRLFRAGELTAIHVPDEAEEGVRDLVRCREDSRRDVLRWRHRLLKFLDRHGRLYVTGKNWTHRHWTWIRSQRFELPVLQRTFEATLFTLEQALARVAELDKEIAAIAVTERYQAPVGWLRCFRGIDTLSAMILLAEIVDFQRFRHPRELMAYLGLVPSEYSSGSAERRGGITKAGNSHARRVLVEAAWHYRHRPTVSGALRHRTADQPPHIVGQAWRAQQRLHRRYRHLIGHGKRPPIAVVAVARELVGFIWAAMTQRPAAA

SEQ ID NO: 87270 - protein, 349 aa, unidentified
MEKITTVGIDLAKQVMAVCAMDAEGRMVMRKVLRRDQVLRWTATLPQCVVAMEACGGAHYWARELTQQGHTVRIIAAEFVQAFRKSGKNDANDAEAIATAARQPTMRFVAMKSVEQQAALCVHRLRQGVTEERTAVINRLRGLLTEFGIVAPLSPAKLRRELARCQDPDDLRLPATVRQLVGDQVIALDQLDARLMSYAETIAAQAQQSEIARRLQTIAGVGPTTAAAMVASVSDAKDFRNGRQFAAWLGLTPRQHSTGGKTRLGRITKRGDAYLRTLLILGARSTLQSALRKPPEGRHRLQQWIVAVFGRIGYHKTLVAIANKHARIIWALLIKGEAFDVRRLAQHAV

SEQ ID NO: 87271 - protein, 386 aa, unidentified
MSGSSRRGPGPSSVLLTPDHAGNVVGVDPHKRTLSSTVLDPRGGILASGHFRVSGDGHRALEAWARQFGPIARFGVEGASSWGRHTAIFLIGRGYDVRDVCANRTPRSDRARQRGKSDTLDCERIARETLAHPLLPRAFKRAGQDRGPDELHEMLCLWHNQRRSLLTSRQHLVNEAECMLCELPLELREQLPDSKAVRPRLAALSRRNRRRRHDRATTLRLRLLDDYRARIVQLDAEDKNITAELAELVQASGSTLGQLCGLSTVLVSELLVEVGDPRRFTIAGFARFNASAPLAASTAEGPGEPVRHRYNPGGNRRVNRILHLMAVTQLRCEPRAQTLYENARAGGHTKKEARRILKRHLSDVIYRRMVRDLGEPAADRPLLLAA

SEQ ID NO: 87272 - protein, 344 aa, unidentified
MDHFAGLDVSVKETSVCILDDAGKIVKEVKVASEPQALLKVLGNPTYHFKRIGLEAGPLSQWLFSALAEAELPVICVETRHMQAVLKAQINKTDRNDARGIAQMMRVGLYRVVHVKTLHSQKLRMLLTHRKLLQSKAIAIENDLRGTLRNFGLKVGMVGTVRFEARIQELVEGLPDLAVLVEPLLVVRRVLRQQLNVLHRRLLAVVRNDEVCRRLMTTPGVGPLVALTYRTTVDVPARFRKSKSVGAVFGLTCSRYQSGEIDWSGRISRCGDKMMRVMLYEAAQTLLTRSTRWSWLKAWAMQVARRRGKKKAIVALARRLAVILHRIWVDGTEFRWTREAVPAA

SEQ ID NO: 87273 - protein, 408 aa, unidentified
MDRVIIGVDPRKLSVTIEARDTREILRATGRFGTDTRSYHQLLAVARQWPQRIWAVEGANGIGRPLAQRLLAGGERVLDVPAKLAARARVFDTGQGRKTDAADAHAIVMVALRDKGLRELRTDPELTVLRMLCDRRDELSRARAQALNRLHRLFLGLLAGGAPVKKSVSQYRALLATVRPRDLAGKTCRRMAAEELEDLERLDVKLKAMKAELKAAVLATGSHLMDIHGIGPAGAARILADVGDIARFPDRGHFASWNGTAPIDASSGQHTRHRLSRAGNRRINHVLYIAGIVQLRNDTPGRAYYRRKLQQSKTSMEAMRSLRRRLSDAVYRQLVTDAGRRAAQQANPGEPSAAALSPSPADPAPPAAPAAATSRRRARGVNVERPTGRTTLTPTSVGARLTASGPRT

SEQ ID NO: 87274 - protein, 400 aa, unidentified
MISIGIDISKEKSTVCMLRPYGEVVEPPYDVAHNESELNALIEHIQSFDEDVKVVLEATGGYHHIVVSKMLSAGIFTVVVNPYIMKKYCAATLRKAKTDKIDSVKIANYGIDHWFSMTAYCPPDEVYAELKLLGRQYEQYVRLKVGCKIHLAELLDGVLPGIKKILTGNVPAFSTKDKLCDFVEKYWHYDHIKKLSEEQFLSSYEKWSKKKGYRYNESQAIAIYQLSKNNIPTLKSSTPSTKMLVLQAVKSVRDAELTLSLIISQMQEIASTLPEYSVVNEMKGVGTVLSVRLIAEIGDVRRFHNGSALVAFAGIDAPPYESGSFVGTNRHISKRGSASLRKIGYEIMHALKVTKPTDDSAVYDFIIKKENEGKPKRVAKIAGFNKFLRIYYARVMEVYC

SEQ ID NO: 87275 - protein, 405 aa, unidentified
MNAVGIDVSKSRSTVTIRQPGDVVVLPPRDFRHTQSSINELIATIMELDGETKVCMEHTGRYYEPMASWLTNAGIFVSAVNPKLIRDFGDESLRAPKTDKADSKKIARFALDRWTKLRQYSPMDETRNQLKTMNRQFSFYTDQKTAMKNNLIALLDQTFPGANDFFDSPARSDGSQKWVDFVYTYWHVDCVRSKSLDAFMEHYRNWCKRKEYYFSAEKAEKIYRGASDLIAVFPKDDNTKLLIRQAVTLLNTVSETVETLRTKMNQMASQLPEYPVVMEMNGVGPTLGPQLIAEIGDVTRFEHRGSLTAYAGVDPRPNESGDYKRQSNPTTKKGSPYLRKTLFLIMDGLIQRSPVDDPVYAFMDKKRAEGKPYHVYMTAGANKFLRIYYGRVNAFLSPSVETEEP

SEQ ID NO: 87276 - protein, 424 aa, unidentified
MDPNTKEDVPFQKQYQLFAGFDWASDHHDVVAVDGAGRIVLELTFDDTAEGWAKLRQDFIDGAGPDLSRVAVSVETRNGPAVERLLDMGCRVYPINPKAAQRYRERKAPVGGKCDRLDALSFGDALRTDGHAWQCLRPDDPLTQELRILCRDEIQLIQQRTALVTQLRAALHEYYPAALEAFDDWVSVSSWAFVEAFPTPGALAKAGKRRRENFLHVHRLSRPETYQKRLEIFARADRFCGSPAVTSAKSRLAVALAGQLRLLEKQLQEYRKAIEALFAQHPDQDVFGSLPGAGVKLAPRLLSEFGQDRDRFPDPQSIQCYSGTAPITKQSGKSLLVLFRRGCNKHLRATVHHWANLSREKCVWAEAYYQHKRKHGKSHACALRCLGQRWLKILWKMWQTGTRYDEALHTRNQVKHGSWVVQPG

SEQ ID NO: 87277 - protein, 322 aa, unidentified
MAMLSFGGIDVSKDRLDITVLPDEQCSSVSNDAAGWAELIEQLRGSSITAIGVEASGGYERGVVRALLAAGMSVRQINPFKLRQFAKASGILAKNDRLDARMIASFVAIMPTRPAQQQAPMIEQLAAMLTVRRQLSDHKVAAENVSRLLEGAMLQRLSRRRIAGLTADIDLLDQRLVEIVTADPTLAHRFRLLTSMPGVGAVLACTLIALLPELGQMSRKQVAALVGLAPYDFDSGKLKGRRCIWGGRARVRHVLYMAAMSASNWNPGLKAFHDRLEVAGKKPKVTIVAVMRKMITTLNAMVRDDVVWADRLSSRHSVPTAR

SEQ ID NO: 87278 - protein, 407 aa, unidentified
MQVAKVFVGHDWAEAHHDVYVEDEGGRRLAAARLVEGLEGVRRFHELVAVHAEEPQEVTVATETDRGLFVGSLVAAGYRVLAVNPMSTSRYRERHSTSGAKSDPGDAKVLAELARIDGHNHRPMAGDSELAEAVKVLARAHHSMIWSRQRQQNQLRSTLREFYPAALEAFDDLASGDALAVLTVAPTPSVGRTLSRSKIAAALRRGGRQRRVDERAAEIHTALRSEQLAAPPMVADAMGATVAALVGVITELVAQTENLERELADRFEQHPDAKIIRSLPGLGMILGARALGELGDDPNRYADAKSRKNYAGTSPITRASGKQRVVLARYARNRHLADTCRMWAFAALSTSPGARAFYDQRRAAGDTHNRALRALANRLVGILHGCLRHRTHYDEHAAWAHRVNIAA

SEQ ID NO: 87279 - protein, 449 aa, unidentified
MSRPQVIEDEEHERVHDRVAAVDVAKDSGMVCTRTPHPSRPGARRSTVWTVKARMGTIRALGRQLRKDGIEIVTLESTSDYWRIWFFVLEACGLAVQLVNAAQARNLPGRPKTDKLDAQWLARLTELGLLRASFVPPKAIRDLRDYTRARTRLIQERTRCWQRLEKLLEGALVKVSSVASKLTTVSAQDMIKAMIAGERDPQVLAGLARTRMRAKHDDLVQALDGMFDDHHGELAALLLDQIAFLDARIAQLGARAAELTAAMPEAWGINPDGTTGPDAGAAPGAPVLNAVARLAEIPGVSEDLARAIIAETGLDMSRFPDAAHLVSWAGLCPSARQSGPRSRAGKKGQGNGYLRGSLGQAAIGASRTATFLGERYGRIARRRGKVKAQVAVARSILVIIWHLLASPEARFTDLGPGYYQARTDVDRKIRNHIRQIQALGFEVALTKTA

SEQ ID NO: 87280 - protein, 427 aa, unidentified
MNDSSYKPTLCVGADVHLDEIVLRAVDKALGHEVLQRFRVTNNLPGAQRAAATIAQTATDLSYTRIEIGWESTGMLWIPFHRYLSTVPILQPFELELICFNPKLVAKFKDGLVLRSPKNDERDAFDVAARLRFGELPVSYVPSDFWQGLRRLTRYRFRLSKALSQEKNRFQSYAYLKCSDWKRVKAFSDIFGATSVALLTEFTVAEVREMTHDQLVDLITHRGRGRFDDPTATARAVRQTLRSSYPIDPQMDEIVTAALSAGWHHIRYLNRSMKRLDRLIARHIDLVPNPIITIKGLGAVITAGILAEVVDVLRFPDEKHLAQFMGLTWRKSSSGGFVSQNTRLTKVGNLYLRYYFVLGANLLRQHNLEYKAYYWRKYHEVSKYQHKRALVLTARKLVRLVHALLTKNEPYVRPRTTDHDQEDDGLQ

SEQ ID NO: 87281 - protein, 420 aa, unidentified
MKPLSDDEFTAFVGIDWADRKHDICLQGAHGERREFARIEHKVDAIDQWAISMRQRFGYPIAVALELTKGPLVYALQKYDFFVLFPINPATLAKYREAFKPSRAKDDPTDAEHALELLMHHRDRLAALKPQSVPMRTLLHLVEQRRRVVDDKTRFTNRLGYALKQYFPQALDWFDHTDTIVFCDFLTRWPTLLQVKRARATSVRAFFWSHNVRHVNVIDERIQAIKSARALTEDVAVITAYRLQALVLVDQLRVTLQAIDRFDAQIAEIAPSLPDYALFKSLPGAGPHLTPRLLVAFGEQRERFATAAEIQKYSGVAPVTERSGNKCWIHWRWQCPTFLRQTFVEWAAQTINKSFWAGAFYRQQRDKGSSHQAAVRALAFKWMRILYRCWQTRTPYDESIYLNALKQRGSTLLSKLVTQT

SEQ ID NO: 87282 - protein, 355 aa, unidentified
MTRTVYCGVDFHARMQTIAYCDSSDGEIHLIQLDHRKDDVRDFYSKLTGQVIVGLEAGGYSCWFEAMLEELGHTVWTGHATEIRRRANWRQKNDRRDAELILEIMLNGDFPHVHRHSRESVEVLRMLRYRARLVKMRTMISNNLQAIAISSGLTERSRMLSRAGQQRLKNARMTPAIKHQSENLITLLEPLNERIGKVDRWLKEQASTDDRVKLLMTHPGVGVLTALGVVHTLEPFNRFKRQRAVVAYVGLEPMERSSAERKRYLGISKAGSRLLRFFLGEAAHVAMRVDPELKQFYERVGKRRGKSIATVAVARKLLIRCWIMLRENIDYTEFRSRGVEARLARNTSRPSVPEK

SEQ ID NO: 87283 - protein, 423 aa, unidentified
MADMSFAWFAGIDWGSERHHACLVDLEGTIIAERECSHSGTGLAELADWLIQMTGAASEVVVAIEVPHGPVVDTLLDRGFAVYSINPKVLDRLRDRFSVAGAKDDQRDAYVLADGVRTDRRLLRRIQVSDPRFIELRAWSRLAEELQEERVRLSNRVHHQLWRYYPQMLKLSSDAAAPWLLELWTIAPTPNKGSQLRKSTVERLLKQHRIRRVTAEIVVGTLKEPAITVADGVAAAACAHMRSLVARLRLVNRELQESEHKLDELCSAVGEVDAVSGEGLQHRDVVILRSMPGIGRINLGVLLSEGSGLLKSRDYQGLRTLCGAAPVTRRSGKSQIVIMRYAAHARLRNAVYHWARVATQHDTKCRAKYAALRRRGHSHGRALRGVADRLLALACVLLQRQTLFDPCLRQSEGHRALFDAQAV

SEQ ID NO: 87284 - protein, 411 aa, unidentified
MVKENFIYVGIDLHKETHTAVMIDCYNQKLGEITFPNRPAAFPKLVTKVKKCNTDGKEVVYGLENAYGYGRALAVWLIDKGYLVKDVNTAISHRQAKHRGAMYRKSDSDDAKAIALATLNMLDKLPDACPNDAYWSLGQLVHRRDNIMKQRTRLVNQLHEQLCIAYPSYKQFFNDISRPTALYFWEHYPSRKYLKGKSVEDLRTELVPVSHNRCSTKNCEKILDAVASDKVKNNAYQDARDMVTLSIVSDLQHYDSQLAEVDKMLEQMYKMLGCTLTTIPGVNVITAVKILAEIGDIKRFSNANKLAQFAGIAPLHLSSSGKGKDVATKQGNRRLQATIYFLAIQMVQVSSKGTPRNSVVRAYYEKRKAEGKTSQQALICISRRLISIIYGMLKHGTEYRMPVVESAGENR

SEQ ID NO: 87285 - protein, 411 aa, unidentified
MSKVFCGIDWAERHHDVALVDEHGELVAKRRIHETVEGWQQLLDMMAAAGDTAEDPIPVAIETPRGLLVAALRASSRPVYAINPMAVSRYRDRHSVSRSKSDHADAMVLANILRTDAHVHRALPADTELARAIAVLARAQQDATWRRTKASNELRSLLREYYPAFLDAFINRKDYLTSSDARAILAVAPTPAAGAKLSKARIAAALRRGGRQRGIDALAAEIQQALRVPHLRQPSMIEDAMGTTALALLATLNIECANVAQLGEACAQAFTQHPDYQIITSFPGLGDLTGARVLAELGDDRTRFTDARAVKAYAGSAPVTRASGRSISITHRRVKNDRLAAAGWVWAFVAATNSPHAREHYKRRREVHADRHAAALRHLFNRLIGCLHQCLTTRQLYDETKAFPTRNPTLA

SEQ ID NO: 87286 - protein, 369 aa, unidentified
MERKEASVVKQFYAGLDVGSSVCEVVAIDESEGPVAALKVSTSGPNLLTAIREMRRAHPGKWWLAVEEGELAQWVADLLRADVERLIVCDPKRNAWIARDPGKNDQVDATKLAKLLKGGFLAPIYHSADANRTDFKRAVQHYHDLTRTQAGLKCQIKSRLRAYGIVVRGSEVFGAGAREEQLKGMPTETGRQLLRQLFELLDQAGRTQEKARRLMVAMGRVFPEVARFEEVPGIGPVWACTFSAYIQTPERFKSKRQLWRYCRLGITNRRSNGEPLGRQRLDSGGVGILKALSFQAFCAARAAGDNEFDRHYEESMARTGDKTHARLNTQRKILAVLYGMWKRNEPYRPNRAEGGAAQAKEATKSAEVR

SEQ ID NO: 87287 - protein, 421 aa, unidentified
MKKSQRIVGFDCGEDGHSAVLLDTAGEFKERFGVVNERGQIQELLAKLILAVGPEAQLVVVVESKRSHGRIVADVALELGCDLRQVNTVALNHFRDLEGQPRKDDEWDAYLGARMVFLRMGGCREATETTEEERTLSRLTRTHSRLVEDRKRHVARLRAVLLELTPEVLHSSWEGPQPGSKAMLYLLERWPGFEGLERAQMRSIEKILRRCRYGSRATYVARLIRKMARGISIAAEERHAFTLELDLLARQIRFCDESRDRLRAEIVHRIERHPVGQKLLDMQGNGPVITGVLVSELLPVTRTSTEPKCATYAGVTPLSRKSGKSLDKDRLTQGVNKRVLHALYTSSVVAIKHSAIDRAYYQKKLRDYAGHPKPHVAAFIALSRQRHKLVYKLMTTDARYDKEVLIAAHLARIEQERPAAA

SEQ ID NO: 87288 - protein, 306 aa, unidentified
MTMPACFVGCDVGKNDIAVFFSASATSVMLANRPEALARFARSLDPACLVVCEATGGYEAALLEALHAAGIACHRADARKVKAFIRSLGTLAKTDAIDARALARYGAERHDRLERWRPQPEDQQRLQALVTTRRDIVAARTAWSNRCKAPTAQGIAPLLDPIVATFQTQLRAIDQAIAALVHAGRLAARAARLQAIPGIGAVTAYSLLALMPELGSLSRRQAASLAGLAPHPRQSGARDAYRRIRGGRPAVRQALFMAALAAVRANPQLKSFYQRLIANGKKPIVAVTAAMRKLITFANAQLKQLS

SEQ ID NO: 87289 - protein, 373 aa, unidentified
MKSANPGEIPSDWHPMINTRNSRQKNNTPESKAEVLAIGLDVHSNRYVFRHQYDGGQPKPASGMSPEKFRRWVLEQAAGAARVVCCYEAGPFGFGLARFLSEHGIECLVVAPENWDNRGKKVKTDKVDALHLLRRLNSYLAGNREACSIVRVPSEEEEQRRCLGRLREQLKDTRQRAQKRGKSLLLTQGMLVDSQWWKPARWEALRAGLEDWLVRLLESHRRIIIEADREERELKEELEAVEKPEWDFVGLGALTHSLLLREICSWERFKNRRQVGGYTGLCPGVHQSNGKGYNTGVNKHGNPRLRWLLVELAWRVIRFQPEYWKVVKMQEALDAGKARRKQAVVAIARQLAVDIWRMATGQTTPEKLGLRTA

SEQ ID NO: 87290 - protein, 313 aa, unidentified
MIITSRCVGIDVSKHHLDIFDEGIGVSERIANAPHAITELVARWRCDALVVFEATGVYDLELRAALRAADIRFARINPARARDFARASGQLAKTDPIDARMLAAFARAMRPATEQVSTPARNALARLAKRRDQLVLMRAQEKNRRSEAGDRAMVERICRLIEVLDHEIAEIEADISALIKAEPEISDDAQLMRSLPGVGPVACMQLIAQMPELGHVGPKQAAALAGLAPFNVDSGAYRGKRKIGGGRKRVRNALYMAALNAVRRADRFKAFYAKLRQAGKPAKLALMAVARKLLTILNAIMRDRKAYIPAQQS

SEQ ID NO: 87291 - protein, 443 aa, unidentified
MANSKTRADRIISRQLSHCTVEAAHLSAVGIDVHHDQLICCFQKLDPIAGELTSEHRSFGTTIPQLLEFAAWCRVRESSVILMESTGVLWFSPYRSLEDVGFDNDTLALVNARDVKAAVGRKTDAQDAKRLAEYARLGKFHKSFVPSRPFRDMRMVSRDIIRLSDDISRQKNRYNKNLNSVGCRATSVFSDVHGKAAGKILDAYIRGDRDFEEIVRSARKQLRATQQEILEAINFAMSDALRELLRSSYEHLQYLIARRDSQIALLERMQAPYQEYIDRLMTIPGVKELSARLLFCEFTNEQQSFPDAAHFASWLGLCPGNNKSAGKSSSGKTPKGNRWARKTLTEVAHGIGLMKRGGLKALFQAFKERRGARRAVVAIAHKVAMIMFAMIWDGSEYVETTCSAARKTVAPDIEEPAGTAHCDHSEWADRRQRHWGTDRPAQR

SEQ ID NO: 87292 - protein, 390 aa, unidentified
MLRKNIVQTLDAATSWKVFGLDLAKHDLAVVAIPADGSEVQYVKRYSYADFLEFTAQIPSATMVFEPGNGANHFALRLQAQGHTPKTVSGASVKSWITLHMSGQKTDLNDAYALARLSEDPDLKTVRIKSVDQNRLQSLQAMRKQLVEQRTKTIVSIKGIFQCWGILFKKDSRSLKKFKEAADNNKELLGEEVVEAMILQIDSIADLDKDIKHVEELLKKVTMQDPRAQPMLDIPCVGLQTVSRLCAIMGDIKDFETPRSFVAFIGLVPKNMISGNKTTTPSGYEQVGQGKVNRRGDKMARSLIIQCASSMYMNFHKDNFPECTLKDWIQKQKDAHKPYGKIMVSLAAKLLRIIYAVLKHGEAFSYEKAGISRSALAALKAAQPAEVGNA

SEQ ID NO: 87293 - protein, 393 aa, unidentified
MFYVGLDIAAEKHDCCIMTEERRVLKQFAFRNDAEGFEFLKKTLTKLAPTEEIKIGLENTGVYGSNLVQFLRRNGYKTYTFNPLLINKSIQATTLRKTKTDKADAKFLAQYLTWDNSQPDHDVSYHISELKSLSRLRFSLVQQRSKCKTQAKGVLAQVFPELTQVFSDVFGTTARTILSLCPSAQRMAAYPVPQLEDLLRTTSRGQLGLEKAELIHALAVHSVGNSSIALELQLQIYLEQITQLSLHIRRCEAALRTILAQMDSPITTIPGIGTVLGATILGEIGDIFRFSSPAKLLSFAGLEPSITCSGKSVSAPGRMVKHGSRYLRWAFGQAARCIILRDQTFAAYASKKRAEGKHFNVVCSHVAKKLVRLVFALLKNHSSFIPNYSSLAA

SEQ ID NO: 87294 - protein, 392 aa, unidentified
MYIVGIDIGKNHHEASIVSPEGKQIGPSLRFATTHKGADSLMSFIFKNIGNSPCVFGMEATGHYWYPIYSFLKAKGYTIYVINPIQSDSLRKMYIRQTKNDSIDSFLIAEVIRFGQFGTTSMADENILAMRQLCRYRDSVISSRTEIKLRIGTIMEQIFPEYEKQFSSLWVSTSMGILEKYLTPENIENAPIDELFEIIKDKSHNRLTRAKAISIKEAAADTFGIKIAQDAFSFQLKQLIDRMNFLDKQIEALDCQILEYYEKFDCYLHTIPGIGMIAAATILAEIGDINRFKSSSALVAFAGIDPTVRQSGEFSSTHNHMSKRGSPYLRHAIFLAATTCSFHNSPLNAYYKKKRDQGKHHLTATGAVARKLTSVIYAVLRDSKPYEPKSFC

SEQ ID NO: 87295 - protein, 413 aa, unidentified
MDVLHPRCCGLDVHKSSISACILVHEAGRVQKHQRRFGAMTQDLQELGNWLRQFEVAQVAMESSGVYWKPVWNILEGQFTVVLVNAQHIKNVPGRKTDQKDAEWIAQLLQHGLLRPSYVPCEIIRDLRDLTRMRASLSQEASRISSRVQKVLEDANVKLASVATNTVGKSGRAMLEEIIAGQKDPEHLASLALGHLRAKIPQLKLALEGKVRPHHRFLLRRLLDQLRFVEHEILLLDERLEDIGRERPELSEAVARWDTIPGIDRVAGWTLLAEVGHNMAQFPTAEQLASWASLCPGNHESAGKRLGGTTRKGSPWLRRIACQCAWAAARTKNTYLSAQFRRLAARRGNKRAIIAVAHSLVIIGYYLQKSQRNYEDLGGDYFDRIDSAGLRRYFVRRLEKLGHRVTLVPIQAT

SEQ ID NO: 87296 - protein, 386 aa, unidentified
MPKPNDLSRSFTAFEQDSTLVAIIEMSLTSWLVGGILPGIERHPLKKLDVDEEALLQLLHRWRDEAINAGRKITRIVLAFEAGRDGFWLARWLRARNIEAYVIHPNSVAVCREHRRAKTDRLDTELLKRVFLGWLRGESDHCSMAAIPTLGEEDARRPNRERENLLGERTRIVNRVKACLVRFGVRNFKPTLRKAPERLEALRTPEGGPLPPNSFAELRRDMVRLRFVMGQIKEIEETRLQRLENTPNEGSHAMVRLLARVIGVGIETADMLVHEILSRNLRDQRAVARYAGLTGSPDESGKRRREKGLARAGNARVRRGMIQLAWRFLMFQKESALAQWYRSVTNEARGAIRKTMIVALARKLLIALWRMVRTGEIPHGVALRTA

SEQ ID NO: 87297 - protein, 358 aa, unidentified
MNSIKYIGIDVHQATSVFAVMNQRGKIVGEAVLETKPATIIDFLKGQRGTVWVTFEEGTYANWLYDVIQPQVAKLVVCDPRKNKLDGNKSDKIDAKRLAELLRMNALNAVYHGQQSTQTLKELARSYVSLQQDSTRVMNRMKAMFRGRGIDCRGTSVYRPENRKEWLEKLDGNGPRHRAERLLKQLELLEELCLEAQNDLICEARKHKSFKILRGIPGLGPIRVALVLAFVITPHRFHNKRQFWTYTGFSVVRRGSAEYEITQGELKRTKKKPLPRGLNNNYNHVLKNVFKGAALTAAYRGPFRKAFDQRVANGTAPNIVLLTLARKIASITLALWKKGESFDIKRHRLSEQTTLKRP

SEQ ID NO: 87298 - protein, 326 aa, unidentified
MQGKEVPGCKAGSDSKVGIDVGKGWLDAHVLPADQSLRVPNAPEGIRKLKHWLRRFQVTLIAVEATGKWHRTLHRSLHAAGLRVAVTDPFRVRMFAKAHGILAKTDRLDARVLAMFAAMMDPLARPPAPRAIEVLQELVRARASAVAERTALRNQRAAAKTPFLRKQLAHRTAHLNADIADLEAEIKRRIVADPTLNRRHRILISVPGIGPVVAATMIACLPELGAASAKQITLLGGLAPVPDDSGQRQGYRRIKGGRQIIRNGLYLAALTAAKHNASLSVFYRRLVDNGKAAKVALIAVARKLILLANVLITDNRVWSPLPPNTA

SEQ ID NO: 87299 - protein, 342 aa, unidentified
MKFYCGIDLSARDCHVCVIDEQLKIVIEQKLGNELTKICQLLEPYKANLKIVVESTFNWYWLIDGLQAEGFEVVLAHTLGLYLITGAKVKTDRRDAYSLAKLLLVGAVPTAYIYPVETRPVRELLRRRLHLVQVRAGEYGSLRRLLLRQGILSRKQQEIKTATETELEQWFAHPLVRLHASQELQRIELYSHQIAELEQTILALTKTEHSYELLLKLPGVGQTIALTILYEVGELTRFANVKDFSSYCRVVPGIAQSGNVTRRGRASKQGNHYLKAAFSQAAVHAVRCYPKVRRYYERQLKRHQGRGRQMICYNIIAHKLAQAAFHVLKEQTEYREELLFGR

SEQ ID NO: 87300 - protein, 458 aa, unidentified
MRKFYLGIDASKGYSDFIILNQNKQPMMENIQLDDTFEGHCRLYEMLDGFLKDHPESMLYTGVESTGGYENNWYRSLLEFQGSLNLQSTRLNPLGVHHNSKAALKRNVTDKISAVSVAEYMIAHPEKISYEQQDSLAGLRKQWGFVNMLTKQSTQLLNQLESMIYAANPEILQYCKDSPSTWVLTLLSKYPTAVNLARAKVVSVSQIPYISSERAQKLVISAKQSVASATDKITQQLIVATVKQIQHLKKTIKNQIDILIKECSSPEVDLLKTFSGISDYSAIGLLLEIQSVKRFPTVKKLAAFFGLHPELKISGDGASAFRMSKKGRKEPRKILYMVALTAINRNPLIRDTYQARVEKGMKKMAAIGLCMHKILRIIYGMLKNNQPFDPDIDKKNREKACHQGEPITTDKNRRYQDYDPKAPISRRQHVKRMERKQSHSDNGTKSGIRVPVPALHNK

SEQ ID NO: 87301 - protein, 388 aa, unidentified
MQTVADRPEAPTAIRTDLGAIFVSLELSRSTWLITSLSPGGGEKMSKQVVRGGNVAGLLECFARLREKARARTGKVFPFVVIQEAGLDGFWIDRALQNEGIESHVVDPASIATSRRRRRAKTDGIDGEVLVRALLAYKRGEPRVCAMIKAPTPEEEDRRRLCRERKVLIVERVRHVNRVKGLLFSQGISGYEPLRRDRRQRLDTLQTGDGRLLPHHLKAQVCRELDRLELLLEQIKAVEAERDALLAAQQVAAPAPAAMLLDIKGIGPEFAAILWSEGLFRHFDNRRQVASYAGLAPTPWQSGSVDREQGVSKAGNPRLRTTLIQLAWLWLRHQPQSALALWFEERVRRNGGRLKKTTIVALARKLLVALWKYVTAGVVIEGAVMKRT

SEQ ID NO: 87302 - protein, 426 aa, unidentified
MNCKLNEKINQVEESSLVVGIDIGSTTHYARAYDWRKVELAKVFKFSNTLEGFEALSSWMERIQATRQKNKIIVGIEPTGHYWFALGQYLQGHGIKLVMVNPYAVKQSKELDDNNQTKNDAKDPSVIAKLVIDGRYSIPYVPQGAYADLRIMFTNRTRIAREIGAIRNHLARWFAIHFPEYKEVFRNYAAESSLQLLKVAATPSSIVKLGAEGINKIWREAKIRAVGMKRATTLYEAAKKSIGQTQGTAAAEVEMKLLLEDYEAKMRQYASIMAALEEAVGRIPGAERLLAIKGIGLVTVAGFLAETGDLGRFESPKQIQKLAGLSLRENSSGKHKGETTISRRGRHGLRNVLFNAVIPLLATNEEFRSLHEYYTTRSVNPLRKKQSAIVLCGKLIRIFYVILVKNAVYDGQKMLADIHRNGSQVA

SEQ ID NO: 87303 - protein, 403 aa, unidentified
MEGPLISLDVSKGKSNYRFFENGTDRKGKKGVIRHDIRGFDSIRDEAEKMEERLRIKPSVIFESTGVYSDVVEKYFTDKGFDVYVISPLLSASMRKEGVRPAKNDSLDTLSIAKVFYSRDDLRKCSENDKKAERLREMSYELDMMNRRIRPMKCQFLRLLDKVWPCLDEVSDYSSRFMLDFIIAFGHPENIKTVKGVLSVIRKSEMGTAGRKDKIAQDLFDYCHTHLSAVSKDSSYVELLKRMAIELKAMAKKKSELIDRMAEEARNKDEFVRLLTIPAVAKTTALKIMARVGDISRFRNAGALVAYCGLDPRVYQSGKMTGEHRTITKKGDCILRSTLFLAVKLMVMLYPDTKVARFVAAKAKNGLSYKQAVVAGSAKLARIIYSMLTHHENYVEFNADIVA

SEQ ID NO: 87304 - protein, 327 aa, unidentified
MLYAGLDVHKNFCQAIVLTKDSEVVKEKRIKSEKKDIEEFFSGFENIRVAFEASTNYEYFYDVLNGLGFTVHLSHPLKTRLIAESRVKTDKIDARALADLLRGNLLPTSYVPPDKIRKLRHLVRHRIFLGRHRSKLKNQIHAELHRRNLKYPGPNVFTNTGIQWLRSLKIPAIESYLTIYDAVVKELKSAELEIKIEGIKYKEVRLLITIPGIGVYSALLIFSEIGNINRFNSEEKLFSYAGLTPRVHQSGENSYHGRITKDGSKYLRWILVEAVRVHIQCAPESNITQYYYRLKKKKPGNVATIAAARKLLQAIYHMLKNKDEFRG

SEQ ID NO: 87305 - protein, 456 aa, unidentified
MPKTTTDNRPEFKPVNFGAAAIDIGSKMHMAAVNPACTDVAVRSFGTFTQDLHDLADWFKACGVTSVAMESTGVYWIPVYEILEQRGFDVILVNARFAKNVPGRKTDVSDAAWLRQLHSYGLLRGSFRPDAEIATLRAYLRQRERLVEYAAAHIQHMQKALMEMNLQLHHVVSDITGATGMRIIRAIVAGERNPDVLATYRDVRCHSSAETIRAALVGNDRDEHVFALSQSLELYDVYQAKMLDCDRKLEVLIAALSSKGVKPVGKLSKPRIKTKQVNTPTFDVRTALFSVLGVDLTEIHGLGPSLALKLVGECGTDLRAWPSAKHFTSWLCLAPGNKISGGKVLSSRTRRSSSRAAALLRLAATTVGRSETALGAFYRRLATRAGKSKAVTATARKIAVLFYNTLRHGMSYKDPGADQYEQQYRSRVLSNLQRRAKSLGFVLQAIPGEDANPAVS

SEQ ID NO: 87306 - protein, 354 aa, unidentified
MQIIAFDSHKRYTLASVESKDGKILKEQRIEHRKGEIRQFLSNYQRGSPVAIETIGNWYWIVDEIEQAGFKPRLVHARKAKLMLGCVNKTDKLDVRGLNKLQRTGTLPAVWIPPGDLRDKRELPRTRMVFCCTRTRLKNRIHSAMDKYGLQTDFEDISDIFGSRGRLQIELSLNKLPPHIVYTTRCLLAQLDSVEIEIRKIEKRMKEVFEQTDDVKLLQTVPGIGFILAVVITLEIGDVGRFICPEQLASYSGTTPRVHASGDKVRYGRLRPDTNHYLKWAFSEAGNSIAVNSKRFPTRHVSMLYKRVRSRKGHAKAVGAVSRHLAEAVYWILSRKEGYKERGFVQADISANLS

SEQ ID NO: 87307 - protein, 309 aa, unidentified
MIIRSGLIGIDVSKAHFDIFDAESGRTERHPNSGESARSLADRLQNRPQAFAIFEATGRYDRNLRVVFDELGVAYARVNPSRARDFARAAGYLAKTDAVDARMLAAMGQALSLCPARERDRERERLSGLHKRRDQLVAMRACERVRLSEMPDLKDSLESHIAWLDQEIRRLDAMIAAAIDASETLLEEARLLRTAPGIGPVAATTLIALMPELGSLSPKTAAALAGLAPFNADSGQFRGVRRIKGGRRRVRQALYMAAIAAIRSGTRFKTIYETLRAKGKPAKLALIAIARKLIVALNAMVRDRVAFQA

SEQ ID NO: 87308 - protein, 452 aa, unidentified
MGKRSNGMTRGDANRNARLAALRAVLPCDHAILGIDLAQSRQAAALADHDSRVLARWRPRCSPWQLGDLLERARRAALSAGFSGITVACEPTGHRWMILQQLAAGRGMPLVCVQPLVVARSREAEDYTRGKNDDKDAVLIARLAGQLHCYLPEQAGAGWARLRHLGARRARLITQSSACKQQLRDLLEVAWPAALGAAADPMASATWLASLGVALAGEDRNLEAVHAAGQRQFIDTARAGLGAWGATRVCVRIAAAVYAALRDGAGVLPQRPGALERALAALRDWTVVRQELAGVEAAMLELLDQLGIGQVAGSIPGVSAVSVAAILAETGDPSRFSSARAMVKHAGLAPAENSSGNHTGAATISRRGRPTLRLAAWRAVWGALRHNRVYANRHAQLTTRAVDKLTTQQADAAIAAALIRQIHAIITRRTPWDADIAAGRRRPRQEVSAKAA

SEQ ID NO: 87309 - protein, 345 aa, unidentified
MKYFAGLDVSLEETSICIVDETGRIVKEARALSDPQALCEALNGTGLPLDRIGLEACSLTAWLHDGLHAEGLPATCIETRQANAAMKTMPNKTDRNDARALAQIMRTGWYRQVHVKSRQCRLWRSLLVARRTVLNEMRSIENVVRAILREAGVKLGLPSRSAFAGRVRELTGADAEVMAMVEPLLAILGVMLREFARLTKQVLDIVRNEEVCRRLKSAPGVGPITALAFRATIDRPERFGSSRAVGAHLGLTPARYQSGETDIQGRVSRCGDELARTALYEAAHTLLVRSKKWSSLRTWGLNIARRRGMARARVAVARKLAVLLHRMWAEATEFRFGKRPAALAA

SEQ ID NO: 87310 - protein, 342 aa, unidentified
MNGDYDGRQYVGIDLHRRRSVIVRMTPEGEQLGWVRIDNDPVALGLELAKAGPDPEVVLEATYGWYWAVDALQTAGAKVHLAHPLGVKGFAYRRVKNDVRDAADLADLLRMGRLPEAYIATPHERELRELVRHRAKFVALRSGLKAQVHGVLAKQGLLPEVSDVFGPTGQAWLRTASLDLVYRQRIDSLLELIDAYDGEIELFRVMIANRLRGHRGYRAIQQISGIGPTFAAVLVAEIGDVTRFSRPEKLCCWAGLTPRHRESDTSVHRGPITKQGSKLVRWAAIEACQRTRPGTKLAVDRTRIITARGRNIGVVAAARRLLTLVFYGLRDGQIRALAAGAG

SEQ ID NO: 87311 - protein, 363 aa, unidentified
MIMIGADSHKRTHTVVAVDDVGRRVGEKTVRANTDGHLDLLAWSRRLVDEAALGTSVTFALEDCRHLTRRLEADLLAGGGRVMRVPTRLMAEARKVSREPGKSDPIDAQAVALAALRHPELPVAELEGPAREVKLLSDHRRDLVGQRTRICCQVRWFLHELDPDLEVASRGLRRQSLVADLLAQLNRFDGVVARLTGELLLRCQDLNHQINALEHELRDLVRQLAPSLLAIPGCGVLSAALIVGETAGVHRFRDKDAFARFTGTAPVPVWSGSSKGKVRLNRGGNRAMNYALHMIAITQARGIGPGRAYLDKQTGRGKDQVAAFRLLRRRLSDAVFASLKADARTERQDLQVDQAAVDLPAAA

SEQ ID NO: 87312 - protein, 429 aa, unidentified
MPGENEERLMSGNQPEVQYAAFLAIDWADQKHVWSLQEANSSACERGEVDHMPEAVETWVAQLSQRFAGRPIAVAVEQSRGALVFMLSKYAQLHIFPVPPAMTANLRKAFYSSGAKSDPTDADLLLDLVQSHREKLRRLSPDTEATRLIQNLVEERRKLVDEKTGQSNRLEAQLKMYFPQIPHWFGDVGSPMVCALLERWPTLEALQKARPDTLRSFFRKQHCRKEELVESRIKAIGEAMPALKDRAVVEAKVAVVKVSVQLIQVLQEGIEGFNRQIQEAAEAHPDFFIFESLPGAGAVLAPRLLAAFGSQRERYQNASEVQILAGIAPVTESSGKSSWVHFRFACSKFLRQSFHEFAACSIPQSPWARAYYELQCRRGKKHHAAVRALAFKWIRIIYRCWNERAAYDENVYLAALARHNSPLVAATKA

SEQ ID NO: 87313 - protein, 342 aa, unidentified
MGEVSTIGLDIAKSIFQIHGVDVDGAVVIRKRISRAKLLEFFATLPACRIGIEACPSAHYWSRRLEALGHTVKLMPPSYVKAYLKRSKNDANDAAAICEAVTRPSMRFVARKSEQQQCGLMLHRSRQLLVCQRTMLSNAIRGHMAELGVIASKGRNGTAELLKIIADEHDDRIPAAARLSLDVLARQYAAVRAEIVAIEKRIHAWHRSSEESRRLEEIPGVGPIVATALVAEVGDWKEFTSGRSLAAWIGLVPRQHSTGGKQRLGGISKQGNRHLRWLLVAGAMAVIRYARQRGTKRPWLARLMERRPIKVAAVALANKIARMAWAMMVRGERFKEPRLLPA

SEQ ID NO: 87314 - protein, 358 aa, unidentified
MDYYTGDDAHKEYSVFTTMDDTGKIGKADRVSHDRETYRKYLKTLPPGVSVAIESVGNWYWMIDEMEKAGLRPLLTNPQKAKQMMGMINKTDKLDARGLAMLNRNGTLPVVWIPPAELRDQRELSRMRMALTQVRTKFKNRIRATLAKYALDVDEVSDIFGVKGRFLIKEAIKELPSETRRSVEEQLVLLDQVIEQISSVEEHIRQVVKASPEMTLLKSLPGVGDILAIIIALEIGTVERFYNANKFASYCGTVPRVNSSGGKTYYGRVRSDVNHYLKWAFIEAANSICVNQHRMEGRHTVELLKRVQKHKGHPQAMTAVARHLAESAYIMLKYNTPYHEPERQRVVSSNTGVSTRLA

SEQ ID NO: 87315 - protein, 321 aa, unidentified
MDIWVGVDVSMETLDFGWTLNGSKKHIRVTNDADGFKLALSKIPKDAKFVLEATGPYYLDLAFFLDERGQYLSVVNPLCTKSHMRTELRCAKNDKTDSFALSRFGQEKNPERWIPIRPIVLQMREILGVCDTLKMTMASFDNQIHALSQCSNSSSYAVGVLEDIKAKMAVQLKESMDYLDELAEKVMSRQVKIIESIPGIGRDTALKIAILIGDFQRFSNSRKLVSFCGVSPTVSQSGTSVPSNGVISRMGGHKIRAALYVCSWSAIRFNPQCKAMWERMTKKGKPGKVILMAVVNKLIRMIYSMVINNTMYNPTFLAQAA

SEQ ID NO: 87316 - protein, 359 aa, unidentified
MASKLKKNKINFKGKTVNIGIDMHKHSWRITALVEGDIVLALTLARPVYDTFCKVLSRFKGNDVRIVYEAGPGGFDLYDRLSTDGIECIVTPPSLIPTESGSRVKTDKKDSFKLAKLLENNMLKKVWVLSPEERAHRQLVRTRRQIVNHRSDVMRQIKSLLLFHGIQIPFPSKQQWTGPFIQWLHDLDLGDKYLNRSLKALADLFDYLSAEKKRLTREVIQLAKEEKYSHRVQLLKTIPGIGCLSAIEILVEIQDITRFQTADELAAYLGLTPSQYSSGEHVRMGHITHAGNDRVRTTLVEASWILIGKDPHMRCKYEDIKHRRGGKRAIVAVARNLSIRIRRMLLDQVPYEVGFQKAA

SEQ ID NO: 87317 - protein, 317 aa, unidentified
MQTFPNIGVDVAKDAVVVACAAQSFPVHSIANQRASLLAWLKSLPAGSRIGLESTGCYHELLADLAHAQGYTVFLLNPLDTRHYAKAIGNRAKTDRVDAELIARLIEQEHIHLRPYTPPTANQRRLDRLIRRRAKIVRIKSSLKLTMLNLSGFATELKAVLCRLDALIAKIDAAMSEIAACSPEHVEAQHHLQTIVGVGPVVGMALTNTLERVPFHNADAFVAFTGFDPRANDSGHKAGRRRLSKRGPAELRRLLFNAAMSAAKTKVWKPIYEHYRTQGWSTTASLVIIARKIARAAWSIHHYHSTFNPDRITTGLT

SEQ ID NO: 87318 - protein, 342 aa, unidentified
MQISTIGIDIGKSWFHLVGFDARGGIVVRRRCSRPQLIRELANLPPCLVGMEACCGAHHLGRVLAAHGHDVRLIPPQYVRPFVKSQKNDLLDAEAIGEAVQRPTMRFVPLKTVEQLDLQAVHRVRARLVARRTAVINQLRGFLLERGVTFPVGRQALARRFPVVLDNPESGVSPRLCRLLQQLREEWHSLDRAIQDADREIQALATQDDACRRLIEIPGIGPLTATALVAAVGHGAAFAHGRDLAAWLGLVPLQHSTGGKTTLRGISKRGNTYVRQLLIHGARAVRRHHRGRPHRLGRWLTHLEARAHPNIVVVALANKLARTAWAVLQRDARYDGRLMASA

SEQ ID NO: 87319 - protein, 453 aa, unidentified
MAQRNAKVSRKPGKSGVALTITHPNAAGIDIGSAAHFVAVPADRDDEPVREFPSFTVDLNAIADWLKACGVDTVAMESTGVYWIPLFELLESRGFTVFLVNARHVKNVSGRKSDVLDCQWLQQLMTYGLLSGAFRPAEQVCVLRSLWRQRGMLLRSQARDVQHMQKALTQMNVQLANVIADVVGETGQKILRAIVAGERDGRVLGAMKNVRIHASVEEIAKSLQGNWRAEHLFALKQALAAFDFVGTQLSECDQQIEAQLQRLHVHDGEPAKGKKRGRARNAPKFDLRTQQFKMCGVDLTRIDGIDVTTALAVISETGADMSRFPTPGQFASWMGLCPGTKITGGKVMSSKTKRCANRAAQALRLAAAALRTSQSALGAYFRRMCARMDKPKAVTAAAHKLARLIYTMLTKGQEYTDQGQAYYEARYRERVLHHLSQRAQKLGMTLVPAEQPA

SEQ ID NO: 87320 - protein, 323 aa, unidentified
MSTYTNNANDSSLLGIDVSKHELVVKSVDGAIEFSVKNNAAGFKKLLQAIRKNSIEKVVLEATGGYEKACVRFLQEKLVQVAVANPKLVRRFAESAGRIEKTDPIDAQMIALYAHTHKPRNAPVLSENEQIRHDLVTRRKQLVSMQTAETNRQIQVTCPIVKKSIQTIIQAINDEIQAIEKQLDFYVEQDPETLRKEAIMTSLPGVGKTTARTLTCEIPELGNLNRGQIAKLAGLAPICNDSGNMRGKRTIGQGRKEPRTALYMAALVAKKHNPIIKEFYDRLIRKGKPHRVALVACMRKLLITLNAMLKKNELWHLVTAQNA

SEQ ID NO: 87321 - protein, 338 aa, unidentified
MEQVITIGLDLAKNVFQVHGIDAAGKVLVRRQLRRGDVLRFFGGLPRCLVGMEACATAHYWARELTKLGHTVRLMPPAYVKPYVKRGKTDVADAEAIAEAVTRPTMRFVAVKTADQQAALVLHKVRDLLVRQRTMLINALRGHLAEFGIVAARGPGGVTAAIISLHEAQDSLPELARVALHGLIDQLRIVRGEIARVEKRIVAWHRASNASRRLATIPGIGPITASAIAAAVPDATLFQSGRQFAAWLGLTPRAHSSGGKERRVGISKQGDGYIRRLLVTGATAVIRLARQGNASKTWAAKLLERKSARLVSVALANKTARIAWAVLARNQSYVAPAM

SEQ ID NO: 87322 - protein, 317 aa, unidentified
MSNSEVFVGVDVSKSELQVATRPEGKPMTFANTEDGIALLIDCLKPLCPNLVVLEATGGLEICVVNALAVKELPVVVINARQIRDFAKAIGRLAKTDRIDAEVIAQFAEAVRPPLRQLKDEQTQRLQALNTRRSQLVAMLRSEKNRLTSAPKWTQKEIQTHLKWLKKAVEKIDKEISDLIKGSPIWREKEAILRSFKGVGPVTSATLLAALPELGTIGSKPLSALIGVAPLNRDSGQFRGKRAVWGGRDNVRSVLYMATMTAIRFNPVISAFYTRLREAGKPHKVAITACMRKIIVTLNSMIKNQTHWHSPVLEKCF

SEQ ID NO: 87323 - protein, 409 aa, unidentified
MQVMFERCAGLDVHKKTVVACVRTLEGQETRTFGTMTAELLALADWLLACGCTHVAIERTGDDWKPVFNILEGTCEVILVNAQHVKAVPGRKTDVKDAAWLAELLQHGLLRASFIPPVAQRALRDLTRYRSTFIQERVTLINRVQKLLEDANIKRAAVASDIMGVSGRAVLASLLAGHSDPQALADLAKGRLRSQRDQLANALDGRIKPHHRFVLTELLCQIDSLDDTMARFDAQIQAIYGPFEAAAGLLDTIPGVARRTAEMIVAEIGTDMSRFPSADHLASWAGVAPGNHESAGKRGSGETRKGNRFLRTSLVQAAHAAARTRGTYLSAQYRRLATRRGKKRAILAVAHSMLVMAYDMIQRQEPYREAGADFFDRLQPEDTARRLVKRLESLGYQVTLQSPAPDVVP

SEQ ID NO: 87324 - protein, 347 aa, unidentified
MDHYAGIDVSLEQSSVCVVDASGKIIREDRVASDPQALIAWFGLLGFGLARIGLEAGPLSQWLYAAMREAGLTVELLETRHVRDAFKAMPVKSDRNDARGIAQLMRLGWFRPVHCKSLGAQELRAVLTARKLMQSKLRDIENSLRGILRGFGLKVGKTTARSFAGRIRELVAGQANLELIARGLLAAHGVLLREFNGIEKRVRIMAREHVQARLLMTTPAVGPIVALTYACAIDDPARFKSSKQTGAHFGLTPKKYQSGATDIIGRISKIGDAAVREALYQAAHVMLTKPLKGCSQLKSWAMRIARRAGMRKAKVALARKLAVIMHRMLADAKEFNPAATTKLVAAA

SEQ ID NO: 87325 - protein, 309 aa, unidentified
MNKEQYNLIAIDIAKDSLQVYHDDKSESVTYNPKGLAHLCRAIGKLKKPWVICEATGGYERPLMALLYAKGITVTLVNPARVRAFAKSEGIRAKTDPIDARVLLRFAQEKSLQPTPPPEPQNQELAALMDRRSHLTEQLAREKNRRQKGDPFIGKSIARMIIVIEDELQILDQKIRELIDTNCELHANSQIFLSVQGIGEVTAWTLLAYLREIPHLGRNQLVALAGLAPFNRDSGKSSSKRSIQGGRAKVRKCLYMAAQSAALYNPVIRDYVARLRERGKPYKCAIVAAMRKLLIHLQSLLKNYKKCLA

SEQ ID NO: 87326 - protein, 410 aa, unidentified
MRIIALDVHRSFAQTAILESGKLRDAGKIDLEYSRLLRFARKLKPDDEIVIEATGNTSAIVRVLLPFVGRVVIANPILVRAIAWAKVKTDKIDAAVLAKLHASGFLPEVWMPDEETEARRRVVAERTQLVSQMTRLKNRIQSVLHANLIPPYKGVLFSQRGRAWLEAQPLAEDQRRVIVRHAGELDRLGAELAEVDKSLAQKALDEPQVKRLMTITGVNSTVAMSVLAAIGDIHRFSSPEKLVSYFGLNPRVRQSGDKPAYHGRITKQGRAHARSMLVEAAWVISGAPGPLRAFFIRIRHKRGKHVAAVATARKLAVIVWHILTKDEDYTWDRPALLQWKLRKLELKAGHPSRRGGKQKGSAAAYSNKSVRDSEREAISNAEEQYRRFVATWKQQSPKERSGATNEVRRS

SEQ ID NO: 87327 - protein, 408 aa, unidentified
MQSNFQYFAGIDWGSEKHRVCLMDGAGRTIAERWVEHRGDSLAELVDWLRQQSSESGSALAAAIEIPRGAIVETLLEHGFAVFAINPKQLDRFRDRYSPAGAKDDRRDAFVLADALRTDMHCFRAVRLDEPAMIRLRELSRLEDELSQEQNRAVNRLREQFHRFFPQLLQLSESADEPWLWALFESAPSPTRAAKLSEAKIARLLRQHRIRRLDAAQVRAILKTKPLTLAPGAADAAAEHAHMLLPRLRLLHRQRTDLARRIDAILEELASAVEGQQEHRDAAILLSLPGLGRKVAATMLSEASQAIAERDYHALRCYSGAAPITRQSGKKKVVLMRRGCNERLRNALYHWSRTSVVWDQASKNTYAKMRACGHSHGRALRGMADRWLKVLMSMLRNNTLYDLQRRVA

SEQ ID NO: 87328 - protein, 357 aa, unidentified
MNYVGIDYHKAYSVVVTMNERGQLLQEARVPGNSLVAFAQYFQTLNGPAKVVLEGCRNWGYLYDLLHEIPLVAEVQLANAHKVRVIAEAQVKTDKIDARALANLLRGDLIPRLHVPSPRNRCRKNVLRQRVFWIRQRTMIRNRVHILIDRQRGLSVPVCRDLFGKRGMDWLKGISLSEPDATLLRQDLAVMERLNEQLKELDKLVAAENRDDPRATLLQSLPGVGAFFAAVLASEIDTIGRFHSPTKFCAYAGLAPTTSASGGRCYQGKLFGQCNRWMRWALIEASWVAIQCSSYFGQLYRFHKARGKKSNQAIVIVARRLCEVAWHLLKENRPYEERPMIKNFPGRAESKLIESVV

SEQ ID NO: 87329 - protein, 411 aa, unidentified
MLDVKVENCAGIDGGKKFWAVCILTGPADRKPVAEVRRFGTSVKELEKLRAWLLETKCTEAVMESTGSYWKPVFNILETALKIILANPEQVKALRGKKTDPNDSRWLASLLRHGLVQGSFIPPRDIRELRDLTRRRRTLMGEGAAERNRVQKVLEDANVKLGNVLTDLFGMSGQAMLEALLKNKQSATEIAELGHWSLAPKIPQIVEAMEGHRMNDHHRFLVRQALDHMHYIEKMIEELDKAIAVKLEPYQKQMELACTVPGIGRVSAASILAETGMDMSPEGPFPDCHHLASWAAICPGNDESAGKRRSGKTRQGNRWLRGMLTQTGWAAAASKKSIFRPRFQRIKLRRGGQRAVIAVAHAQLIAIYWAVRNGTPYPEQVQRIEQDRREAQIRHHLQRLSKLGYEPNMQS

SEQ ID NO: 87330 - protein, 360 aa, unidentified
MLYVGMDIHKRFSQVAVIDQSGEVMDRRRLNHTPYEELTTYFNQFPKDTQVIMEPTCGWSWLSDYISNLGLEGILAHPLKVRLIAESQIKTDKVDALVLAQLQRTGFLPRAYLAPPEVRKLRELIRCRCRFVRLRTMLKLQIHALLDRLGISHQLSDLFGKIGRTFLENLKLESPYQENLFRLLRVIDLLTEEIKQIEKIIQSRVKKDPQTKRLMSIPGVGFILAYLFTSEIGDITRFASAKKLASYCGLVPSVKQSSNRLHYGHLTKRGNSLLRWGFIEAAHVAIRWNPELKAWASKIRAKKGSGVAVCAVARKLVNIVYQLLTQKRDYVKYPSDISKKTKTNRSSRPVLLLVVPPVAG

SEQ ID NO: 87331 - protein, 459 aa, unidentified
MKRKHSKKGKREQPDWSLNLDVVHANAAGIDIGNESHYVAVPPDRDVNPVQQFACFTEDLQRMATWLESCGIDTVAMQSTGVYWLPVFEILTEAGLRVFLVNARHTKNLPGRKTDVQESQWLLQLHTFGLLNNSFRPPEEICMLRAYWRQRAQHVASAGACIQRMQKVLTEMNVQLANVITDISGVSGMAILQAILKGERDRYKLAALADVRIQATREEIARSLEGNWRPELLFILQQELDLYHIYQQQIAECDTALHAHLQTLESKVEPGSQPPAAKANKKAGNNAPTSFDLRGELYRISGTDLTQIDGINVMNAQTIIAEVGVDMSRFPSEAHFASFLGLCPDNQITGGKVLRRGTKRIQNRAATALRMAATSLWRSKTYLGAKFRHLRARVGAPKAITAMAHMLARLVYRMLRYGQQYVDKGMKFYEDKYRQHQIRSIEKKAKDLGFTLTFTPATA

SEQ ID NO: 87332 - protein, 287 aa, unidentified
MEITSIAIDLAKHVFELCGADSSGKVRLRRQLRRSQLLPFMRNHPVCEVGMEACAGAHYWARQFMAMGHRVKLLSPALVAPYRKGNKTDRNDADAILEAVSRPSMRFVMVKSVAQQDLLALHRVRAQLVKSRTALCNQLRGLLRERGVALRMGVAALKRSLPAALADESSELSGEMRELLSEMSQWLRTLEQRIASCEARITPKFKHDERCVRLAEVPGVGPLTATALVAAVGNAQRFKNGRELSAYLGLGPRQHSSGGKTVLLGNTKLSAHAADPRGALRTSTVQA

SEQ ID NO: 87333 - protein, 427 aa, unidentified
MPYRIAGIDVHKAMLAVVVADVEVEGDWQFTRRQFGATPSQLRLLTEWLVEHEVEEVVMESTAQYWRPVWDALERDWQPTQRRREDAGPTTGALHLAQAQSNQGRHGRKRDFPDAERLVKRLVAHELTLSFVPDVTQRLWRTVTRRKYQLTRNRVQLQNRLESLLEEAHIKVSTLVSDLLGASARRMLHAVANGETDPAAIAALGSPRLHATPEQLCDALGASTDVHPLYRRLLAMTLTELDLLESHMQQLDEELAALLRVHQAAVQRLAAVPGFGVDSAQQIIAEVGPMATTFPTAKHLASWVGACPGHDESAGVNRSHRVPNGNRQMRRLLNQSAHAAVKTKGSIFELLYRRFVGRLGHAQAIGAVAHRLCRLVWKILHDGVTYEERGPVVSQARAQRRAAKMLRELRSLGYRVELTPAPSGNAL

SEQ ID NO: 87334 - protein, 367 aa, unidentified
MIVDEVAKNVEKIISIDTAKNSFQVLVVNQKTGKKKNIKVQRSKFVEYILKEGPCLIFMESCSASQHWARLFESFGFTVKLIAAQHVKAFLRNRRVKNDERDAEAIYTCGIQPDTKFVRIKTVEEQTVALLHTLRKAAVSQRVELSNRIRGILAEFGIVVARGKGSFNSEIEALFNECEKIHDVYLRSAISSLFEDYHRLEQREKELSEKIESLNKDNELVKIALTCPGVGPLTASAIVAEVGDASQFRNGREMAAWNGVVPSQHSTGGRSTLGGITKTGNRYLRTLLAQCACAVIQKASRHLEQGKDTHLDRFALRLKLNGKPAKKIMIAVANKIIRILWAMLTQRKTFENKAEETSDISAELQLA

SEQ ID NO: 87335 - protein, 433 aa, unidentified
MLKINYMSTLFVGIDVSSKTNAVYAMDFEENKYISSSFGNNQPGADQLVTMIAECMHKHKNLDTVLIVLESTSVYSVHISSFLSTSEVLMPYKPYVFCVNPKATSNYRKSYIGMEKTDPTDAYLIADFGRVGRTKKLEPWRGGQFIALKRLTRHRMHLSECITREKTYMVSNLYLKFSELQLLEGDDKPFGSLYGAASSAVLTEFLSPQEIIDMPEEDLLTFLAQKSRNRISDLSKTSELLRKAARDSYRLGKCMYEPLNISLASSFNCIHAYQKEIKLIEQAIEKCINGMNPNALLILQSIPGIGPIWASGILSEIGDITVFHSSDALAKYAGLYWPKGDSGDFTSEDNKMSKAGNPYLRCYLGEAANSVRKHIPEYADFYARKYAEVTKHQHKRALALTSRKFVRLVFGLLVKNQLYTGEKLDAEYNIESN

SEQ ID NO: 87336 - protein, 415 aa, unidentified
MGQQRNKVCGVDIHKKFLVATILTRDGTKMQKRFGTDIDDLLNFRDWVLKENCDCVAIESTGVYWYPVNAVLENKVELILANAHQIKHTPGRKTDALDSEWIAEVALNNLIDPSRILPKEDRELRRLTRTRESLVKIRSQMKNQVHQGLESCSIKLSSVLSDSFGKSGRYILDGLIKGKNIDEIIAGIPSKRVKNNGDQIRSAIKIGLDQIQVFLIQSHLDTIDCLTKKLDEMDLEIKQRISGRKDDLKIVMSVPGIGFIAATTILAEIGNYQDFSTPDKLAAWCGIVPSVYQSADKLRTGSITKQGSKHIRWIMVQVAQAAAKKKGSKLRKFFLRVKAKKGHNVAVVALARKILCILHHLLMNREMYQEEGVEKSRPSSLDWSSATTDKMSLQTMIEIIAKAGYEVRKTERDGG

SEQ ID NO: 87337 - protein, 343 aa, unidentified
MAIVNRIALDLAKDFIQVLALDESEQEVFNKKLRSNKVLAKLATLKRTDDCEVAVESCGMSHHWRREIEKLGYKTVALPPRFVKAYLQGEKNDANDARAIAEAASRPNRKSVRIKSIEQQDLALMVSQRDSRVQTRTQEANRLRSVLAEYGITMPQRISSILKRVPEILEDADNALTARSRNLVLRQYELLKTMDEEVKAMDKLLSAEANNTDDSRRLMTIPGIGPVTAVSLLALIGDVSDFKRGRNVSEYLGLVPRQNSSGGKDRLGGITKKGNTRLRTLLVHGARSALRMAHKRNDKLSLWAQDVAKRRGNNIAAVALANKHARIIWAMLTHKEDYRMAAA

SEQ ID NO: 87338 - protein, 393 aa, unidentified
MERLMSQVFDASRSLTALEQETTIIAVIEMSQSKWLVAAVVPGIKRRPLKKLDADEESLLKLLHRWRQEAERAGYSIKRIVVAYEAGRDGFWLARWLRVRGMEAYVIHPTSIAVSREHRRAKTDRLDTELLLRALLGWLRGEKRHCSMVAIPTAEEEDAKRPNRERDNLVTEQTRIVNQVKAILIRFGIRSFRPKLRKAEEQLGHLRTAEGSALPENTRAELWRHLARLRMVREQIRAIEKERLQKLTADHGRKKGPNAMVHLIARVVGIGVETADMLVTEVLSRQFRDRKAIARYAGLTGSPDESGKRRREKGLARAGNARVRTSMIELAWRLLRFQKNSALAQWFRTRTADRRGGTRKTMIVALARKLLIALWRFATTGQLSDGIVLRPAS

SEQ ID NO: 87339 - protein, 337 aa, unidentified
MTAIDQFAAHIGLDWADKKYDVCVQFKNGERVFHVIEHTAEALDVWLTELHQKVKGRIAVALELKKGPVVYALRKYPFITVFPVHALSLARYRQTFWPSGAKDDPQDAELALELMLRYPKKIKAIEPDNADIRLLQQLVEQRRQLIEDKRRFVNRIINTLKQYYPQPLEWFSHRGSLLLCELIIRWPSLQQLKRARRDTIRNFLNAKGGRAMALTEQRVASIDNAIPLTTDPSVIEANALMAAALATQIKVVSEIIKTYDERIETLFDTLPDTGLFKSLPGMGQCMGPRMLAALGDNRDRFNSAEEIQNYAGIAPVTERSGQKSWVHWRWQCAKFVR

SEQ ID NO: 87340 - protein, 420 aa, unidentified
MDVVVERCAGVDIGKAEVVACVRTPGPGGRGRRKQTRAFPAFQSGLEELADWFAAEGVSEVAMEATGSYWKPLWYLLEERGFAQRLVNARHVKIVPGRKSDVLDAEWLAELLEHGLLKASFVPPEVIRQARDLTRYRKRLVQSVTAEFQRIEKTLEDAGIKLDVVASDILTLSGRLMLKALVAGERNPRVLADLAKGRMRSKIPQLQQALRGRFGAHHALVVDMALDHVEYLERHIARLDAQIDALFAAHTTEGAVPFTEARRRLCTIPGVGERAAEAIIAEIGVDMDRFPTAGHLASWAGLTPGTNITGGKRHSGKTRPGNRWLGEILNQSAWSAARARDSYLAAHFWRLARRIGKKKAAVAVSHTILVTCWHLLKNNCDYQDLGADWYTRHTDTDRQRDHHIRKLQALGYTVSLRKTA

SEQ ID NO: 87341 - protein, 480 aa, unidentified
MSLKRDASSEKNQTVRYTKRLEIVHPHCAGLDIHKEKIWVCTSPFHDGVAPEVSTFATDTGSLEKLAAYLRERKITTVALESTGVYWLPTFLTLRQKNLNPILVNPRDVKNIKGRPKSDRADCVWICRLHSYGFLRASFVPPDVVLDLRSFYYAHEKLTVDSASMLQRMNDELVKMNIRVDLILTDLSGASGIRLIEAILGGECSPERLYQLLDEQIMKKGKDVILPYLHGDYREGNLAILRTWYDLYLGIRKEISRINQKIYELLQSFPKKADAKDLPRVKKNYREDKLDFPYELRPIFFEIYGVDLTQLPGIGAGVLLALVCMVGTDLSPWPSAKHFVSWLGLAPINKESAGYRKSGSTQRINNLLSNALKMAAMAAKRTTTDIGRTARHLAGRILPKKAKVATARKLAELVYNILQNGMELKVKTEEEYEQRRKQRDIQFFVKGLFKYIINGQLLPEVEKVYQEHCQGIKAASLTNA

SEQ ID NO: 87342 - protein, 426 aa, unidentified
MKVVYPVCCGIDVHKSFLIATIITTKAGELTPHYQKKRFSTFNNQILALKNWLLECTCYDVCMESTGKYWVPVSNLLEDVMNVTIANPKWVRAVKGNKDDTKDSKWIAELFRMGLVKGSFIPAKDVRVLREFTRYRTRLVSQRSSEKNRLQNAFTVGNVAMDSVVSDMFGVSSKNVRDYLISTKEFNPNHVLTLLHGRMKPKGQELIDSIEGDHFTNEQILRIQIIEEHKMYLDHSIDFLDYLLAQMVEPYEPAIQLLETIPGLRRQSAVQIISKIGVDMSQFSTSKRLCCWAGLSPSSNESAGKKKSVRISRAGVYLKPALVQCAHAAVKAKEKNPYYRLNYERIYKRRGNKRAIIAIARMMLTAIYHMLSTGEVWNPTDLYKIDRSDNLVQKQKEKAIKQATKFLICEGVLPDDFVRKDLAVST

SEQ ID NO: 87343 - protein, 403 aa, unidentified
MNYFAGLDWGGTTHAVCVVNQTGVVVMRSEIRHDAQGLASLRRQLNKIASAEAIPIAIERPSGLIVDTLVVAGHPVVPIHPNVVKACRPRYSVAGSKHDGGDAYLLADVLRTDGHRFCPLTPASDEIKALRSLVRTRNALTTQRVALLNQLHALLESFWPGAAAMFHSIDSAIGLAFLERYPTPSSAARLGEKRFAAFLKGKGYSGRYSAAKLLTRLRAAPAGQVGKVEEQAKGELVLTMARILGPLREQIAKLAERIESQIEQSEDGLLIMSLPFAGRLTAAQILAEIGDARARLISVEQLAAEAGVVPVTKQSGKSRTVGFRWACNHRLRNAITFWADNSRRGSPWAARIYADARARGCRHPHAVRILARAWLRVLWKVWTTRVPYDIRKHSAAYALIGTT

SEQ ID NO: 87344 - protein, 426 aa, unidentified
MPGGEFCTRLGAWQRRRPPRIVERGWLDQSVTCDVGYPECLWRSGQSQQREDWSVTQCTKTQFVGLDVHKDSIVIAVAQLGREPARVIGTVPHEWSALRKVLDKLGPRCEVACCYEAGPTGYGLARALIAAGWACDVIAPSLIPKKRGERIKTDRRDAVKLAQNHRSGELVAVFIPDEQGEAIRDLERAREDAKKAERVVRHQLSKFLLRNNRRYPGRTTWNAAHQGWIAKQAFAEPAQQYVLSDGLAAVEAATLRVSQLTARLRELTVGWSQEPLVKALQAMRGVEFVTAVTLVAEVGDFRRFATAQDFMGYVGLIPSEQTSGPHRRQGPITKTGNAHVRHVLVESAWHYRRQPRMSKALRERSVGVAPQVCAIAWKAQKRLHGRLNRLIGRGKNKGEAVTAVARELAGFVWAISREEKLLVSLR

SEQ ID NO: 87345 - protein, 416 aa, unidentified
MRKAAVVYTDITELHPVHDRVAALDVHLNQITVCVMLREPDGQVRMQFREFGGFKRDRREMAEWIASFQPQAVSMESTGIYWKSPYAALERVGIRAQVVNAAEVAKTPGRKTDMLDAQWLALLTRAGLLRGSFLPVEKLRHARQLARYHTSLVNDLVRQKNRLLKVLADGGMRLSAIVSDPHGKACRAMIDAILDGASPEQAVRHAGRLRATHAELRAALDHELTEVHLHLARQIRQYINFIEASMSDIEAALMQEVLPQGSLIAQLLTLPGIDRLAAAKLLVEIGDDMRRFAKPGRLAVWTGVCPGNEESAGNRKRAKTRKGNCHARRVLIEIAHAAVKTQCYFKDKFQSLKPRLGYKRAIVAIAHKIIKVIYCMLSRGELYRDRSVDFEALQTRRNAPRWIRQLQKHGVLPANA

SEQ ID NO: 87346 - protein, 356 aa, unidentified
MKNTTPLQSYDGEQIYVGIDVHKKTYVVVARVGQTIVKKWSTAARPADLAQQLLKYFSGGTIHTIYEAGFSGFVLHRELFKQGIDSKVVHAAAVEVAAHNRVKTDNRDADKLSSQLAAGRLRGIYVPTVEQEQRRMLSRTREQLVEHRAALKNQIRMKAHQLGLIAPEERREMSHEMVAELLERSPTLEFTVAVNALHQIWQALDEQIKQLVAQLQQQAQSDPNEATYRSAPGVGRISARVLSNELGDLSRFANERQLFSYTGLTPSEHSSGEQTHRGAITKQGNRHLRGILMEIAWRAIRKDPALARFFERLYPRTGKQRAIVAVARKLIGRIRGAFRKAEPYHNDYESSLQMAT

SEQ ID NO: 87347 - protein, 412 aa, unidentified
MEVLHACCCGLDVHKESVTACVLWAEGKGKKRKAKRQFGTMTRDLLELADWLQSCGVTHVAMESTGVYWKPVWNILEGHFEVLLVNAQPIKAVPGRKTDQNDAEWIADLLQHGLVRGSFVPPTPIRELRDLTRYRVSLVHECNRIVNRIQKVLEDGNIKLASVATDALGASGRAMLKAMIEGEEDSGKLAEMSCGLLRRKIPELQQALEGRLRSHHRFLLRELMEHLEFVESKIARLEQEIGEHLRPFEEEVERLCTIPGVDWVTASGLIAEIGVQMEQFGDAEHLSSWAGLCPGSHESAGKRKSGRTRKGSAWLRRCLCQAAWAVSTKRGNYLSALFRRLAARRGKKRAIIAVAHTLLQIAFYILRDRKCYQELGANYFDQLHPNRVKRYLVKRLERLGFQVRLVPAAQPA

SEQ ID NO: 87348 - protein, 498 aa, unidentified
MSIFYMGGDVSKGYSDFVVVDSKEHIIEESFQLDDNFNGHNAMSTYLEGFFKTYPDATLNVGLESTGGYENNWYNLFVHLQSVHSINIARLNPKGVSHHHKARMQRNATDPISAYSIATYLISYKKIVRYNKESNPLDQLCRQWNSLKLLKKQRTQLLNNLNSLIYQSNPELLIYCKRGFPPWALEIINLYPTAKRLKNARAKTLTKKISYLTIEKAEKIIEKAKCSIASHTEATDEFIIQQTVLQIRHLNEAVEAHKEHLEKNCFLPEVKLLTSFTGIGMYSAIGLFLNIIAIARFSSAKKLASFWGIHPKYRKSGDGVWGNYMSKEGRAEARAILFMVAMSAITSNPVIKEIYNKKREEGMCRMAALGVCMHKIVRIIYGMLRTNKEFNPEIDQANQNKKVMKKEKKTSNTNRRFQKIDNDAPISRRQKKKREMNKKDEKPQKINNLENGVNPIHDSIKKNNKYQIEKGKYNIPEKVNEIILRIVNNIENEKSKKN

SEQ ID NO: 87349 - protein, 336 aa, unidentified
MNFIGCDLHKKTITICVVREDRKVIFRKTLSCNQPQAIKETFEQFAPCQVAVEATASYEWFAQLVEPVAERIVLAHPRKLRIIAESTNKSDKVDATVLAVFLALDMLPESHRPTPRVRQHRSLVRHRHHVQGRITSIKVKIRRILSDYNADQPSLFTKELKPYLKSVELLPADRFVIDDLVEQMEQFTKSLRKINQELKEFAKKATIAEQEARAILASIPLVGDVTIDVMLSELGDPRRFRSQKKAVAYAGLAPGVRESAGKAKQLGITKAGSPLLRWALVETAWRLVGKTRRWRAIYEKIKLRSGAKKAIVAVARRLLCVMMSMLASGERYRFVA

SEQ ID NO: 87350 - protein, 346 aa, unidentified
MSKISRIGMDTSKQIVQLHGVDEAERVVLRRKLRRKEVLPFFSGLAPTVVGIEACGGAHYWARELTLLGHAVRLMAPQYVKPYVKRGKNDAADAEALCEAMSRPTMRFVPVKSAKAQAALMLAGLRDRLVRRRTQLANAIRGYAAEFGRVAARGQAKIEPLLRRLQADEALPVLARELFAEPAREYAELKARLQAVDARLMAWHRAHALSRRLARIPGIGPVTASLLAMKAPDPQAFRSGRQFAAWIGLTPKDHSTAGKVRLGVITRAGDETLRSLLVVGATAVIWQARRGKGSPPPWLVTLLGRKPPKLAAVALANKIARIAWKLMTTGEAYDARRAMAAAPAAA

SEQ ID NO: 87351 - protein, 310 aa, unidentified
MSVHQTHIGIDVSKTHLDIFDPRTGHARIENTPQAIALWLGGRDPAAAFAVFEATGRYDGPLRAGLACAGFAFARLNPTQARRFAQATGRLAKTDRIDARMLADLGARLRPDPSTPGEPERMRLGELGRRRDQLVDQRAAEKVRKQETGGDDLVLASLEAHIAWLDTEIARLDAAIAALIAESRALKTEADLLRTVPGIGKVTATALLSLMPELGRRRPGQIAALAGLAPFNADSGQLKGVRRIQGGRRRVRKALYMAAVTAARSNSRFKTLYQRLTAAGKPAKLAFIAVARKLLITLNAIVRDQKPYHP

SEQ ID NO: 87352 - protein, 444 aa, unidentified
MTRKSKKQRLQIIHPHCAGIDIGSQEHWVAVDPEITTDPVRCFSSFTDSLNEMADWLESLGVEIVAMEATGVYWIPLYELLDQRGFNVQLVNSRSTRQVTGRKSDVLDCQWIWQLMSHGLLKGAFRPADSICRLRAIVRQLATKVQEQSRCIAHMQKALTQMNIQLDNVVSDLMGKTGTAILRAIVAGERNPQKLATLRDGRLRADEETVARSLQGNWREEHLFSLTQALEHYDFLDQQIRGCDRLIEKQLVELPQLAENPPEPVKALKNPRRTKMQQSTLHQALYGVMGVDLTAIPTIGIETVLVLASEIGSDLSRFPNESNFCSWLNVVPPTCISGGKKLHGRSPRVFNRAGQALRQAACNARNSNSFIGASHRARLARMDGASAVKATAHQLARLIYAMLTKGQPYVEKGIEAFEARTQDRQLKALQRKAQKLGFELVEAA

SEQ ID NO: 87353 - protein, 451 aa, unidentified
MSKVKPQVIDDEEHERVHDRVAAVDVAKDAGVVCTRTPHPARPGARQSRVWTVKARMGTVRALGRQLKNDGIERVTLESTSDYWRIWFFVLEACGLAVQLVNASQAKSLPGRPKTDKLDAQWLARLTELGLLRASFVPPREIRDLRDYTRARARLTQERTRCWQRLEKLLENALVKLSSVASKLTTVSAQDMIKAMIAGQRDPRTLAALARTGMKAKHDELVEALDGMFDDHHGELAALLLDQIAVLDSKITQLNARIEQMVAAIPSAWGINADGTTGPEAGTGPDAPVLPAAARLAEIPGISPMLARAIIAEVGLDMARFPTAGHLVSWAGLCPSARQSGTRTRAGKKGQGNGYLRGSLGQAAIGAARTATFPGERYHRIARRRGKAKAQVAVARSILVIIWHLLAHPETRYTDLGPGYYQARTDTARKLRNHIRQIQALGFEVALTKAP

SEQ ID NO: 87354 - protein, 530 aa, unidentified
MTCSTPHRRRPSRRSRASRAPVTVAKARGQLHPQAQQVGPERFGILCVDCAKARSTWMLADFYGRILFPPTDVCHTRGEMEATISQLQQTLARDGIADAIAVVERTGSYHLLPKQALARAGWQVRIVHPLATRQFRQSADAGNKTDQTDLMAIHRAAVTGLGLTEQTLEEPYQKLRLLVRHRRALVSMTTQLRCQIHHHLHAAMPGFGALFRDLWSSPMPMTIVREVGSAAAVAQMGQAELARLLHQRRITHQQRSLDKVVAWAHAAPPPDDNAATHHQFCIQLDEGLANLHHLIQDTERQIAQLLVLTPYILLLSIPGINVVSAGELAGEMGPITHYASATCITGRAGLYPSRYQSDRTDHPDGPLVRRGNRRLRRALMTIAENLLTCNGHFRGKAQYWELQGKNKAKARVKVANNFARIAFQMVAGRMVFAHRCCRERDYVLHKLVEFACVHQMPGEQLLHALQAATGQLPAAEHKAEGEKLQPWLRRPHRSRNQEPQSLGEILPQVLAELGLTAVLESAPLRSQGSS

SEQ ID NO: 87355 - protein, 386 aa, unidentified
MHDSTDLPVPERTDIRGDSATLFVSLELSRSTWVATSLAPGSKKMSKHTLVGGDGRKLLDLLARLKTRAEQRIAAPVKVVAIHEVGLDGFWIHRLLEANGVESHVVDPASIAVPRRHRRAKTDAIDGETLLRTLMAWQRGEPRVCAMTVPPSPSEEDCRRVSRERATLLRERIQHTNRIRGLLFGQGITNYNPLHKNRRECLEELRTGDGRSLPAHLKAEVLREIDRLELVLRQISEVEAERDEMLRPAEASSPAALLMRLKGIGAEFATVLYLEGLFRHFENRRQLAAYAGLAPSPWKSGSIDHEQGISKAGNPRLRTTMVELAWMWVRYQPDSALSCWFRQRVGSERGRIRRISIVALARKLLIALSRYINHGEIPAGAVVKPD

SEQ ID NO: 87356 - protein, 342 aa, unidentified
MYYIGLDVHKKTISYCVKDASGLVHREGKVGATRWELDDWMNTLPQPWTVAMEATIFTGWIYDHLLPHAQQVKVAHPLMLRAIAAAKKKNDRIDAGKIADCLRCDFLPECHMACTAIRDRRRTLRYRHLLVRQMVQMKNRISGLLMETGVSHNKRRLHKVGYFRELLTSNEEVNESIRPLLRVSRDSIVRLQKTEYALVSSLQRDPLLAERVKRLRTVPGVGPITALTWALEMGEVSRFPSIRQAISYCGLCGDEKSSADKVTRTPLSKQRNKHIQRVLVEAAKLAPRQDHNLALVYEREKQKGNANRATLAVARKMVAYLLAVDRGRRDFIPFADSQSAAA

SEQ ID NO: 87357 - protein, 399 aa, unidentified
MNGSKQETKRPEGAGGRVIGLDMHPDSFTAAALEGKTAMDAQVLWVHDNQPQQRLEKWLEKHVDPLDLIVIEASGNTFHTVDRIKACGRNAVVLEPLRASQVRKAYCTTDKISAVKLARVYFSGLAVEVWTPDEKTRERREVLHAHRRCVQDTTRGRNRIRSWMNQFGIRRRKGLRLTQPSGREWVLKQRGWTPTQQLLIDQMFNDLWQAEARRKKLRQVMAEEVANDPEILKLNRLFGLHVIAAYALAAIIGDIHRFRTPRKLAAYLGFSPNTNRSGLGKHDGGSVPWGCGEVRRILIQSAKTILRFDNDTPLHKWGLALAYRKGRNLAAFAVARKLVTAIWYLLKGYFTPLTEETPVLRRKLFELAKEIGVKRVRELGYKHSGDFRDRKMQVLFETT

SEQ ID NO: 87358 - protein, 482 aa, unidentified
MSRQKKHPRGTPAGRRAQADQGKPSRKAKGMGLGDRPILEPNAAGIDIGAREIYVAVPPDRDENPVRVFSTLTEDLQKMAQWLVSCGITTVAMESTGVYWIPPYEMLEQHGVKPCLVDARGMKNVPGRRTDWHECQWLQFLHSVGLLRAAFRPEGGVCAVRSLMRHRSDQVLIANQHIQHMHKALTQMNVQIQHVISDITGLTGLAIVDAIIQGQRDPAVLAKLRDPHIQASEETIRKSLEGNWRPEHLFTLQQSRQSYQHYQEQIRACDEQIEKMLLAFEPRVDPEKRPLPPDRKGKRRGRKKKNANPKTGFDLRTESYKLFGVDLTQIPGLMAMVLVLFSEVGRDMSRWPTAAHFVSWLALCPDNDISGGRVLWRGMRKVHNRAGDLFRMAAYSLHHNQTALGDYLRRMKTKLGPAGATTATAHKIAIIFYTMVKNQVEYDPTIWAQRDADREKRFEAKLKRQAQQLGYKLVPIAENPAA

SEQ ID NO: 87359 - protein, 412 aa, unidentified
MEVVHRRCCGLDVHKKTVVACLLVTEDTGAVRSEVRTFGTMTAHLEALAAWLQAAGCTHVAMESTGVYWKPIWNVLEGQFELLLVNAQHIKAVPGRKTDVRDCQWIAELLRHGLLRGSVVPPRAQRELRELSRYRTALIQERSAVVNRLQKTLEGANLKLGVVASNVLGQSGRQMLDALLAGETDPAVLADLAQGRLRAKRAALEQALAGSCGPHQQFLLAEQLAHIDELDERVARVSEVMAERLRPVEDALVRLDSIPGVGRRTAETLLAELGPDLSRFPTAGHLASWAGMCPGNHQSAGKQHSGKTRKGNKWLRVTLLEAGQAAGRGKGTYLAAQYARLVGRRGKKKAAVAVGHSILVIAYHLLQRETTYQELGANYFDTRERERVQRRLVGRLERLGYKVALAPADSVA

SEQ ID NO: 87360 - protein, 344 aa, unidentified
MLKHAPSQAGRGTHADVHVAAALDPIGGLLGVREFPATTAGYARLLGWLGGFGTVALVGIEGTGSYGAGLARHVTAAGVRVVEAVRSDRQDRRRQGKSDPLDAVSAARAAQSGRARGAPKGRDGAVEAIRALMADGRSAAGERTRTNGQARALIVTGPDDLRARFAKHTAAALVAGIASLRPRPGDVPGYATRVAMRELGRRAVFPDGQLERLDELIVPLVTARAPGLPALYGIGPSTAALLLIAAGDHPGRLRSEAAWAHLCAAAPIPASSGKVTRHRHGPGGDRQASHAPWRIVFTRMGSDPATRAYVERRTKEGKSKAEIIRCLKRYVARQVYPHLRPAGD

SEQ ID NO: 87361 - protein, 438 aa, unidentified
MKVLHERVAGIDVHKDMVKVAIRSPGDRPWTRKTGVFEFRTFYGVLQEMARELRRRGVTHVAMEASGVYTEPVYYALTELDFTEVIVVNPAHVKALRGHKTDARDCARLAELLECGLLHGSFIPSAEQKEVRDLTRYRMKTVQARTSEIQRLGKALESAGIKLGSVLTDITGVSARLMIDALIDGERRARVLADLAKGTLRQAGKQADLSMALAARFTDHHAMLCRLHRDQIKLHDHAIAGLDGQIAGRTGRWPRELGLLTSVPGFGDVVSAAWLAEIGPAPHRWFPSHDKLASWVTLCPGNNISARKRKHGRTGDAGTYIKPMLIQAAWGAVQSRGRLQARYRRLVRRFGGDKNPGAKKKAITAIAHTLLKIAYQVLKTGQPYTDPGADFYTRRESPQQQHAYLERRLQQLHPGCTVTITITPQPGSPPPGTPAEAA

SEQ ID NO: 87362 - protein, 422 aa, unidentified
MLTATQENEEIIERVAALDIGKAELMCCVRVPDEDHPGRRLQEVQAYPALTRSVLRLADHLTRLGVTRVVMEATADYQKPVFYLLEAAGFETWLVNAKDVKHLPGRPKTDKLDAVWLCKVAERQMLRPSFVPPPPIRKLRDLTRYRADLVAARTAEKQRAEKLLEDACIKLSAVITDIFGVSGRDMLAALVAGERDPKVLAQLARRSMRAKITVLEEAFTGHFTGHHAFLLGTMLRRVDAISADIATLDERIAEQAAPLAGAVAQLDEIPGISLASSYVILAEIGTDMTRFPTAGHLASWARVAPGIKESAGKKKGKGSTGHGNAYLTAILGNAAAGAAKTDTFLGEKYRRIARRRGSKRAIVALGRSILVIAWHLLSDPEARFCDLGSGYHAARIDPERRKHRHIRELEALGYTVTLKPAA

SEQ ID NO: 87363 - protein, 346 aa, unidentified
MKKIFIGIDFSKEKFDATVIKAEGVEERAARQHEVFDNKIGGFRRLLRWVRNVVEEQDASMWLFCGENTGGYSKALCNYLYACGYDMWLENALSIKRSSALQRVKSDKADSGIIAEYAMRNYDQMRLYKPLSRNLERLREVFLYRHNLVKLKASMMTRKGEKQITQEKSDISRFMAMSSKHLISEFNKKIEECDKRIQQIIDEDEELQKNFEIITSVPGVGVQNAVCLMVYTDNFRRFDYNSRKIACYYGVAPFGRQSGTSVNTPAHVSPFANKLIKSLLTQAALASVNFCPQMAIYYHRLVEAGKKKQVAVNNVKNKLLHVVTAMVRKGEKYNPDYDYHAAIEAA

SEQ ID NO: 87364 - protein, 346 aa, unidentified
MLYVGLDLSRKRLDFCLLDELGEKVEVGAAPPDADGLRSLTTRVGRLGEPVFAAIESMNGARFVHDQLELAGWRVEIADAVKVKGLAPLACKTDRIDAWVLAELARRDLVPAIWLPDPQIRADRERARFRLHLVRHRTSLKQRVHAVLLAHGKPCPVSDLFGVAGRDLLERLALPEPWLGTVAASLQLIDELDQQIGNCERELHRLGAEHRYVPLLVTVPGIGWVLAYTIAAEIGDISRFATPTKLTGYTGLCPRVYQSGQSDRRGALAKNGPRYLRWALIEATMHASRHPLYRDRYQHTKQRLGKQRGAKVAQIDLARRLAEAIWHMLTRDQPFAPAGAADPLAA

SEQ ID NO: 87365 - protein, 431 aa, unidentified
MNYNQNKKIAQITPKTLIIGVDIAKFKHVARAQDFRGIEFGSPCYFENTKEGFEHFLKWISEIKKEQSMDKVVVGMEPTGHYWFNLAHILKENEIKFVAVNPLHVKKSKELDDNSPTKNDVKDAKVIAQLVKDGRYAEPTIPQGVYAELRVAKKIRDLLTEDLQTVQGQVHNWIDRYFPEFLKVFKKWEGKAALQFLKLYALPHEIVNFTEHELLSHLRKSVTRSVGLSKIRELKQAASKSIGLRQGSEMAKLELKTILAKYELIQLKFEELDAQIDGLLDEIPGVPQMLAIKGVGRDTIAGFFAEVGDLSEYTHPRQIIKLAGLSLKENTSGKHKGKTTITKRGRKKLRALLFRVCMILVAKNSAFKALHAYYTQRPDNPLKKMQSLIALCNKLIRIFFSIGKKQFEFSEEKMLKDIPHLSVLKKAELAA

SEQ ID NO: 87366 - protein, 445 aa, unidentified
MARKNKKQRLEIIHPHCAGIDVGSKEHWVAVDPGQDDEPVHCFSAFSDDLYALADWLKSLDVEVVAMEATGVYWIPLYEVLDARGFQVHVVNARATRQVSGRKSDVLDCQWIWQLMSHGLLRGAFRPADQVCVLRSLVRQRATKVQEQSRCILHMQKALTQMNVQLDNVVSDLTGKTGLAILRSIVAGEHDPQQLAKLRDRRLRADEATVARSLYGNWRKEHLFALTQALAHYDFESAQIHECDQAISQTFIDLPTLSQEEAPTPVKPLRSPQRTRAEQTALHQALYAVLGVDLTAVPTLGIETVLVIASEIGPDLSRFPSSGHFCSWLSLAPPTRISGGKPLPGKTPKVFNRAGQALRQAAANARNSDSFIGAAHRARLARMDTAKAIKATAHQLARLIYAMLTKGQAYVEQGIEAFEARRQDRQFRALQRKAAKFGLALVEAA

SEQ ID NO: 87367 - protein, 366 aa, unidentified
MDAIYIGVDFHSRQQTVCYLKTETGELVITELKHQDKERVRAFYQQFLGHVIVGLEASGYSPWFEAMLEELRCEVWLGDATEIRRRARWRYKDDRRDAELIRDLMVHHEFPRLHQPTPQSRDILRMLRYRQKLIKVRTMTKNSLQAIAMQAGLAKGHQLFTAAGQVEFKAVAMSPVLQYQRDHWFELLKPLNQELLETMKWCKAAAKGEAAIARLRTHPGIGLLTSLCLLHTLQPVSRFRNQRKVVAYAGFDPMVRRSADSAIHLGISKAGSRMLRYLLVEAVHTAIRNDEDLKRFYQRLAERRGRPKAKVAAARKLLIRAYILLRDEIDYAEFKRRAVAARLARRSQGPPSVPEVLIGQSASPGA

SEQ ID NO: 87368 - protein, 442 aa, unidentified
METYAGVDWASDKHDVLVADAAGEKLLAATFAHDEHGVRSLCRQLVRLGVELVAIERPDGLLVERLLDAGLRVLALHPNQVAAARDRFRVSGGKSDRFDAFVLCELARTDNHRFRVLEPDSDATKALRALTRGREDLVGARTALCNQLRAELERFWPGPLGLFSDLHSQISLAFLERYPSPTDARGLGEARLAGFLAREHYSGRQQPAQLLAKLRRAPHGRVGELELSTRRQLVLTLVSMIKLVSGQIKELERRIATAIREHPDGQIFRSLFKGPDSVITAAELLAEIGDCRARYPSRDALAGDAGQAAVAIESGKRKAACFRWGCNKRLRQAFHTLADSTRHHNPWAQDLYAGALARGQDHPRALRTLGRAWCRIVWRCWQNRLPYDPARHRALQRHITVIIPTVSGPMVDHAATRRIAAGTFATNAENENPKARRLTAAQ

SEQ ID NO: 87369 - protein, 347 aa, unidentified
MNFYNNMHPYYCGIDLHARILYVCILDQEGNTLTHKEIPANPEKLRKILEPYIGNIVVGVECMHCWYWVSDFCHEIGVDFILGHALYMKAIHGGKAKNDRIDSYKIANLIRGGNFPLAYVYPKEMRATRDLLRRRTKIVQHGADLKAHVVNTTSQYNLPPNKVNLKNISAREQLKSTFPDVSVQKNINLDMVILDCYAEQLNKVEWFIEQQAKQHKPVHLHVLKSITGVGRILSLTIIYEIGNIDRFNSVQNFASYARLVKCKAESAGKSYGTQGNKIGNAHLKWAFSEAAVLYLRGNDKAKRYLLNMQKRMSKAKALSALAHKLGRCIYFMLKNETVFDESKFLKR

SEQ ID NO: 87370 - protein, 388 aa, unidentified
MIYVGIDIAKLNHFASAISSDGEELIKPFKFTNDNDGFQLLISKLDPLDKDSLIIGLESTAHYSDNLVRYLVAKNYKVCVLNPIKTSTMRKNNIRKTKTDKVDTFIICKTLMMQESLRFVTFYDLDLMDLKALGRFRQKTIKQRTRLKIQLTSYVDEIFPELQYFFKSGLHQKSVYALLKEAPTPEAVASMHMTHLAHLLKVNSHGHFNKEVAQQLRILAQKSVGASDSSLSIQVTHTIQQIELLDSQLERVEAKMTEIMKFNDSVIMTIPGIGYINGGMILGEIGDIHRFSSPNKLLAYAGLDPSVYQSGNFQAKKTRMSKRGSKVLRYALVNAAHNVVKNNATFKAYYEAKMAEGRTHYNALGHCAGKLVRIIWKMMTDNVEFNLD

SEQ ID NO: 87371 - protein, 343 aa, unidentified
MEKIITVGLDLAKSIFQVHGVADNGQVLVRRTLRRSQVLPFFRGLPACLVGMEACASAHHWAREIAALGHSVRLMPPAYVKPYVKRNKTDAADAEAICEAITRPTMRFVPVKTAEQQAAGMVLRTREMLMRQRSQTANALRGHMAELGIIAGTGMTSIAKLLVLLRDEKDSRIPSAARFALIQFAEQIELLTTRIEKLDREILAAVRQDPHARRLMSIPGVGPLIAATVRTSVLDARAFATARDFAAWTGLTPRAQSSGGKDRLGAISKRGNRQLRTLLIVGATSIIKLAKRGLKVPVWIRTMLQRRPVKVVSVALANKIARTIWALLVRGGIYQAPTAMLKS

SEQ ID NO: 87372 - protein, 312 aa, unidentified
MTEHCYCGIDVAKDRLDVQVLPHRQRFSVDNNGTGWAELVERLHALPIAAVGIEPSGGYERGIIRVLLAAGVSVRRINPSKLRQFARARGILAKNDRLDAQLIAEYVSIMPTRVVQRAATAERLAEVVTMRRQLCDEHVTIENQAAHVEDAILRRLNKRRLARLKADIHLLDKRMAEIVAADTILAQRYELLTSMRGVGPTLAFTLIALLPELGQMSRKQIAALVGLAPYDFDSGKLKGHRCIYGGRMPVRNILYMAALSAARYNPALKVFHNRLAAANKKPKVIIVAVMRKMITTLNAMVRDKAAWQPRAA

SEQ ID NO: 87373 - protein, 321 aa, unidentified
MRYIGIDVSKSTFLVVYPLSKGDYKPREFKNTAKGIHEFIRTLEADDHCVMEATGNYSYLLLYLLNQANITTSMENPLKVKNFARAMLSVTKTDKADAQLLSLYGERMRPAPFKMPSEAILLLKQKRAALRQFQKQLHSTTNLKKSLEVLPQKDAATFKAIDKIIETLEKQICKVEEDLIVLTQKEFDRQMQRLTSIKGVGVSLAAAIILATGGFTYFDNAKQVSRYLGICPTYQQSGTSVHFKGHINRNGDAHLRSQLYVAAWSMSQHNAECNKLYVRMKEKGKSGKLIMIAVANKVIRQCFAVVKHDTDYVDGFVSRKP

SEQ ID NO: 87374 - protein, 355 aa, unidentified
MNTTKYIGIDVHQATSVFAIRDHQGKLIGEAVLETKPAAIIDFLKGQRGTVCATFEEGTYANWLYDVIHPHVAKLVVCDPRKNKLGENKTDKIDARKLAELLRLNALTAVYHGQDSTRSLKDLARSYVNLQQDSTRVMNRVKAIYRGRGIPCRGTSIYEPKNRKEWLEKLLKDKGAQLRAKRLFEQLEFLEPLCVEARKDLVREGRKHQSYKILRRIPGLGPIRVSLILAFVMTPHRFRNKRQFWTYAGFSVVRRGSAEYEITQGELKRSKRKPLPKGLNNNYNRVLKNVFKGAALSAAYRGQFKQLFDNRVADGKAPNLVLLTLARKIASITLALWKKGERFDIKRHRLSEQTT

SEQ ID NO: 87375 - protein, 361 aa, unidentified
MSMQSRAKSPVCLTIGVDVGDRFSQICVLDGDGEVREEARIRTTPAAFGQWFRSAASALVVLEAGIHSPWISRLITESGHETIVANPRRLRLIYQNDRKSDRVDAESLARVGRLDPRLLCPVKHRGPEAQADLALLRSRDSLIRARTLLINHARGSSKAVGVRLPKCSAKSFHQKVAGRLPEVLADSLSPELETIGRLTAQIRDLDRKIEEMAETKYPEIAALRPVYGVGPVTATTYILTLEDPHRFPRSRAVGCYVGLRPRQADSGDQQPQLHITKAGDEALRSLLVCAAQYILGPHGPDSDLRRWGLKLAERGGKAAKKRAVVAVARKLAVLLHRLWETGEIYEPLRNARLRGEMEPVL

SEQ ID NO: 87376 - protein, 389 aa, unidentified
MIYVGIDVAKDKHDCCILGSEADNLYPVFTIPNNKAGFDELYEKIFSVTNDRTEIKVGLEATGHYSLNLLGSLIDKGLTTCVINPLHTNLYRKGLSLRKTKTDKVDAGSIAMMLMTDKTLKPYSDTSYHSEELKSLTRYRFDKVQERAKLKSSVARLVNILFPELEKLVPSLHMASVYALLSEFPGASYVAESHLTHLRNVLETASKGRYGRDMAVTIRDAAKNSIGSVMPAKSMELKHTIHLIEVLTDEIDEIEVSIKSIMDTCNSPIMTIPGISYRMGAMILAEVGDFSRFSNADQILAFAGLSPSTYQSGQLDSSYSHMEKRGSRYLRYALFNATKYVCHWDENFGAYLSKKISEGKHYNVAVGHAAKKLIRTIYRMELTGEAYRK

SEQ ID NO: 87377 - protein, 319 aa, unidentified
MSYLHFFGLDVSKGWFDVAIAGSMSKPKRFANSTEGIAAFLQEFAGQLPSGLVVLEATGGYETALIVALVTGRIAVHRAAPWQAHSFSRSLGKPAKTDGLDARSLARMAAERHESLRLFVVASQEQGQLSELLMRRADLLAIQVAEKNRAGHPRYTEAIATVRQSLAASLDFLAAQIARLDDQIKALVATAPELHARFKIMTSVIGVGDKTALLLQGLLPELGSLTRRQAASLAGCAPHPRDSGLTRGHRSVFGGRALVKRALFTAAMSARTHDPAMRAFFERLTKAGKPKMVALVAIMRKIIVQINAKLRPPAIAPSW

SEQ ID NO: 87378 - protein, 434 aa, unidentified
MPNQTHSTTTSTLPVFGAFVGLDWGDEKHALSLCAGTTTTIERATLEQTPEALAQWANALRGRFPNSKIAVCLEQARGPLISSLLAYEHIVLYPVNPKTLARFREALYPSRRKDDPIDGDLLLDLIVKHRDHLRPWQPDTVQTRQLALLNEQRRHFVDHRTGLTNELLSHLKAIFPQALDLAGADLASALATDFLKKWSTLQSVQKVKPAVLRKFYYGHNSRSEELMSQRLALVKNAVALTADPALLAAHSLAIQTLAAQLQALRPCIEQHEQQIGALFAAHPDAAIFESLPGAGPALAPRLLTSLGTDRSRFAQALAVSCYTGVAPVTEKSGKIQNWVHLRWSCPIFLRQTWHEFANSSRKFCPWAKACYDQCIERMDHHEAIRKLAYKWQRIVWRMWQDRQPYDEGRYLRSLQKRGLKTYAALPVEPVKLGE

SEQ ID NO: 87379 - protein, 353 aa, unidentified
MQIVGALDVHRRQITHKTLDLVTGDVRRGRLSPANRESVREWLERFRGCEAEFALEGTTGWRFVAEEIERAGHVAHLADPAETAAKRGSKRRAKTDRADCDLQLKLLLAGELPESWIPPAHILELRTRVRTRKTLVDQRSAWQLRLSAQLFHQGVPTGINPRTRAGRAALACVELSPAGRELVSIALRMIDVLDLEIVPLDRELRAFSARQPGCRALSERLYGVGPVTATAVLAELGDCRRFTSSDDAVRHAGLDVTVYQSDSKRAAGHLSHEGSPVLRWALYEAGQQATRQTSPDHEYFLQVRERTDHKSASLSVARKLCRRAYHILRELGEQALAPVDVDAHVEEAIHAAA

SEQ ID NO: 87380 - protein, 402 aa, unidentified
MNCVGIDVSKGKSMIAVMRPFGEVVVSPFEVRHTANELSELAGLLKSLDGETRVVMESTGNYHAPVAWLLHDAGLYVSVVNAMLVHDYGNNSLRRAKTDKKDAVKLANYGLDHWLTLPRYIPEEDTRLMLKICYRQYQQYSKVQTMLKNNLISLLDTTFPDANRLFTSPPRADGSEKWVDFVATFWHCECVCGLSKKAFTAKYQKWCRKHGYNFSEDKALDIYASACRHFGVIPKTDTAKLLVEQAISQLQTTSSALAALKQEMQSLAASLPEYPVVMGMFGVGPTLGPQLLAEIGDVRRFHSKKALVAFAGIDAPPYQSGQIDVRSRSISKRGSASLRRTLFLVMSVILQCAPIDEPVYQFMDKKRSEGKPYRVYMMASANKFLRIYYASVKAYLESLEHD

SEQ ID NO: 87381 - protein, 343 aa, unidentified
MDIVVLGIDLGKNSCSLAGLDASGRVILRRRMRRSSVESFVKGLGRCIVAMEACCGAHHLGRVFAAQGHETRLMSPEYVRPYVKAQKNDELDAEAIAEAATRPTMRFVAVKSQSQSDIQALHRARERLVSERTALINHLRALLLERGIVAPQGRRKLQEELAVFADEDGIEALSPRIRLLIEDLRSEWRALDERIAAFDAEFVRMAREDEAVRRLTTIPGIGTINATALAAAVGNARAFRRGRDMAAWLGLTPRQMTTGGKPRLLGISKRGNRYLRKNLIHGARAVLPYLVERETPLGRWARGLLARAHKNIVVVALANKLARIAWAVLARGCTYEAADEAAA

SEQ ID NO: 87382 - protein, 349 aa, unidentified
MQEITRVGVDLAKHVIQVHAVDGSGKLRTSRALARDKFMAWCAQLPPGCMVAMEASSSAHHWARKLAVLGLEPRIIAAHLAAPYRLQGKGGKNDANDAAAICEAASRPTMRFVPVKSVEQQSMLCIHRLREGFKVERTACINRIRGLLAEFGVVFSQSPAVLRQALPDALEDATNELGGLARLALQRAWQQWQELDAHVSWCDDRIKAHGKSSAAVASAEQLMGVGPVTASAVVATVGDFRQFKNGAQFGAWLGLTPRQNSSGGKSNLGGITKRGDMYVRSLLIQGAKSAVMNAHKRDDPISQWALALRERSGWQKAVVALANKNARILWAVMTKRHAFDARHVSIKPC

SEQ ID NO: 87383 - protein, 334 aa, unidentified
MENIALIGIDLGKNSFHIHCQDRRGKAVYRKKFTRSKLIEFLATCPATTIAMEACGGSHFMARKLEELGHFPKLISPQFVRPFVKSNKNDFVDAEAICEAASRPSMRFVQPRTESQQAMRALHRVRESLVQDKVKTTNQMHAFLLEFGISVPRGSAVISRLSTILEDNNLPLYLSQLLLKLQQHYHYLVEQIKDLESQLKRKLDEDEVGQRLLSIPCVGTLTASTISTEIGDGKQYASSRDFAAATGLVPRQYSTGGRTTLLGISKRGNKKIRTLLVQCARVFIQKLEHQSGRLADWVRELLCRKSNFVVTCALANKLARIAWALTTRQQTYEA

SEQ ID NO: 87384 - protein, 329 aa, unidentified
MSQNTIKTMQTNNTVVYAGVDVAKATLQLHLQGQQTEFNNTPKGLHQLCAQLQKAPTVHVVCEATGGYERALVKALHQEQIPVSVTNPARVRAAAQAQGQRAKTDPIDARMLTDYGQRYQPDPTPPTSATQDRLVALTQWLKQLVHGRALAKTQAEHHQDPFVGRQHAKLMTHLQSQIAAVEKQIEALLEQDAALKRRVDCLDEIEGVGPRTAWMVLAHLPELGRLNRQEVAALAGLAPWTRESGMMKGKSCIGGGRPEVRLALYMAALSAARCNPVLRSLYKRLRAKGKAAKVALTAVMRRLLTYMNHRIKALPSETATATAKESKTP

SEQ ID NO: 87385 - protein, 434 aa, unidentified
MMTPDDIDVWVGLDVVKSAHHAHALDHDGNTLYDKPLKQDEKAIRTMLGKLSKHGRVLLVVDQPNTIGSLPLTVARNMGIAVAYLPGTAMRRTAQLLPGDAKTDRRDAHVIAWAALKLPETLRDAGPDDETLAALKLLAGHDEDLAHESTRHVNRLRSLLLQTHPAFERALKGERITRDATLALLERYGGPMGVKRAGIEDVKDWAKSNGLRAGRIIDDMFKAIGEQTVTVPGTLMAETIIPSIAHDIKTIRDRRREVGRQVEKLLEDHPLLTVLTSMPGIGVRTASNILLGIGGDIANFKSSAHLAAYAGISPVTGQSGTSIKGERPSRRGNKRLKNALWQTTFVASTKHPPSVAYYKRKREQGKHHNAAIICLARRRCDVIYSMLKKRNPLPGTSPRSLNRATRERTPDATGRAKRAHDSQPESRHVNSPRS

SEQ ID NO: 87386 - protein, 415 aa, unidentified
MALKIVYKICCGIDVHKNFVVACIANTDKQGITTYERHHFSTYTKGLKQLLKWLLDRNCKDVCMESTGKYWIPVYNVLEKDCSIVLAHPKYVKAIRGKKTDKKDAKWIADLFKHDLVAGSFMPPADIRQLRDLMRYRFKLTCFKSSEKNRYQNCLTVSNIQLASVVSDTFGKSSQKIIAKILENPDDTSFDIASLIHGSMKDKLPELELAIDGYITPEQAPKLKIIKEHFDNLESRKAELEELILALANPYQQEISIILTAPGFKNTFTAIGIISEIGTNMEAFPSAKHLCSWAGLTPTNNESAGKKKSVRVSKAGCYIKPLLVQCANAAIKSKKHPEIRDRYLRIKKRRGHKKAIIAIARMLLTALYHMLKNGENYNSDLYQKSDILPKTREITVEQAILMAQFQGYRIKSATE

SEQ ID NO: 87387 - protein, 423 aa, unidentified
MNHVTDGQYTAYIGIDWADTKHDICLQAANNNQLEFDCIPHQVDEIEQWALSLRQRFGGPIAIALELSHGPIVYALQKYDFLVLFPINPSTLAKYREAFTPSRAKDDPTDAELALDLLLRHPDRFQPLAPQSVELRTLATLVEQRRGLVNDRIRITNRLRNTLKQYYPQVLEWFDRINTPLFCDFITRWPTLEQVKRARKSTLERFFHQHSMRRPQVLEKRYQSIKAATPLTRDAAVVTPYRLHTLVLAEQLRVTLQAIRRYDEEIAQLAPQHPDYELFSALPGAGPSLAPRLLVAFGEQRQRFTCAADMQKYSGVAPVTERSGRKHWVHWRWQCPTFLRQTFVEWAAQTVNKSFWAGAYYRQQKAKGCSHQAAVRALAFKWIRILYRCWQARTPYDELTYLEALRRRGSPLLNQLGAVAESA

SEQ ID NO: 87388 - protein, 358 aa, unidentified
MKIVGCDLHARQQSIAILDTESGEFTEKIIRHEGNAVREFYAALEGPTVVGIEATGSMQWFLELLEELGIQYRVGHPAKIRAAETRKQKHDRRDARLIVDLLVMKDRFPEIWMPSMEQRDLRTLLRDRHQWVKMRARLQHTMQSIALNHGLRQGSGLWSVAGQSALQALPLAHYTSQRRNALLTLYALLQKRIQELDKIVEAEAQSRAQACRLLTHPGVGPVTALATEVFLGDPKRFRTGKQVASYIGMIPGEHSSGKRQRLGKLSKEGNALLRYLWTEATMHAAGKDPELKRFYRRKLIQKGMGKARVAAARKLGIRLWIMLRDQIDYEEFCRRAKLRQEGEAHAGMPAFNSGPALQ

SEQ ID NO: 87389 - protein, 379 aa, unidentified
MYRILKIGMDVHTTNFTLCALESKFGEEDQIIANITVGPDHKNVLDFIKRIKEKMDPKGQDEIDVECGYEAGCLGYSLYHTLTACKLKCRILAPTTMLSEQGPRIKTDRRDAKLIAQCISNGGYHAVHIPTAEDNAVKEYVRMRDDHKLALKKVKQQTNALCLRFGFFYDGTNWTGMHLKWLRALELPELIRETLNEYLATYDELTAKIDRYDKRIQEIAAQSEYQEKVKKLECFLGIKTHTALSLIVETGDFIRFRKGNIYAAYLGLAPGEHSSAESGGRLGITKAGNSHLRRLLIEAAGGICKGQIGKKSKDLIARQKGNTADVIAYADKANVRLRSKYYRLTRHGKKRNVAVAAVARELACFVWGMMTDNIHGNAA

SEQ ID NO: 87390 - protein, 347 aa, unidentified
MTEAYDGRQVVGMDLHRRRSVIVRMTEDGRKLETVRITNGPAALRAVLVRAGKNPKVVIEATYGWYWAVDVLEAAGAEVHLAHPLGVKAFSYRRVKNDERDAADLADLLRMGRLPEAWIAPPEIRELREITRYRHKLVKARTSVKDQVHGVLAKLGIPVTHSDIFGVHGQAWLDELKVPQPYAGKVASLRQLAGELSAEITLLDTVLGDLLAGHEGYAAIQQLPGIGPVLAAVIVAEIGDIRRFPGPGQLASWAGLTPRHFESDTKVIRGHITKQGSRMLRWAVTEAIQRQPAGTRPRQVKDAIIARRGKEAKNIAKVAAARELLTLVFYGMRDGHLRRALQRGQAA

SEQ ID NO: 87391 - protein, 411 aa, unidentified
MIEAIYRCCAGADVHSKTVAVCVRRVDEAGKVHKEIRTFGTMTRDLLGLSDWLLAEGVTHLAMESTGVFWKPIYNILEGQFEIVLVNARHVKNVPGRKTDVKDCEWLAQLLQCGLLRGSFIPALPQRELRDLTRMRKQLTHEMSAAANRVHKVLEDANIKLGLVATDILGVSGRRMIAALIDGETDVDKMADLACRRLRDKIPLLRLALHGKVTEHHRFMLKRLMDHLCYLEREIEQFSKQIEVASRPFTKAITALIPIPGIDLASAQNVIAEIGPNMKQYPTDAHLASWAKICPGNNESAGKRKSGTTGSGNRWLNSTLVQISWAAVHTKDSYFQAQFRRLAGRRGKKRALIAVAHSILTVIYYVLKRDLQYKELGGDYFDRLQRHKIVKYHVKRLEALGYKVEVVDQVA

SEQ ID NO: 87392 - protein, 388 aa, unidentified
MIYVGIDIAKLNHYASAIDSDGVVLIEPFEFLNDNAGFYTLLSKLNSFELDDIIIGLESTAHYGNNLVSFLVTKGLHVCVINPIQTATLRKNNIRKTKTDKVDTLVIAKAVALMDHPRFVTLYDIALMQLKNLGRFRMKLVKQRSRTKIQLTAYLDQVFPELQYFFKSGIHQKTVYAILKEAPSATRIASMHLTHLKNLLVSNSHGHFKKETALELRVLAQKSVGTADRSLSIQITQSIAQIELLDSQIDAVESEMKDIVTSLDSVIMTIPGIGPINGGMILGEIGDINRFSKPRKLLAFAGLDPSVYQSGNFIAKKTKMSKRGSSALRYALMNAAHNIVKYNQTFKEYYDSKRAEGRGHYNALGHCAGKLVRIIYKMLKDDVEFNLD

SEQ ID NO: 87393 - protein, 322 aa, unidentified
MASFLGIDVSSRSLDGWVRPQAVRIAVSNNPAGFEELERTLRKFSIKRILLEATGGYERDVLRFLQDAGYKVIRVNPARARKFADSMGVKAKTDAIDAEVLAHYAEVIPDQPTLQISPDRALLRELLMQRDRLVQQRDDDRRRLKQAQSLVVANFLKANLQHFRSQIRLVEQEINQQAAKLNDERIARLTQVKGIGMVTAGKLVALLPEIGRVESREIASLVGVAPFNHDSGKSLGKRSITGGRFEVRRTLYMALLVAVKYNPAFKARYEALRGRGKLAKVALVACMRTFIVRLNAMIKTGTPWRDLILPQPAGTTQVEKAA

SEQ ID NO: 87394 - protein, 323 aa, unidentified
MSKHTMVCAGIDTGKHKLDVALDGRSDRLQVDNTADSHKSLSTWLRQHRVNRVGIEATGGYEQAVVLQLRQDGFVVIVFQPAQVRAYATFHLQLAKNDKIDAALIATCAAATRKIHAPPDPRLAPFAQQLTFIDQITEDIAHIKTRCASCRDARIRGLWNDEITRLKQLQNAELKALVKAIRQHRDLAERLDLIESVDGVGLATAVAILVRMPEIGRVTREEVAALAGLAPYDNDSCNQIGARHIRGGRKRLRAKLYCAALPAAFRWNAQLMALYQRLIAKGKSHKTALIACARKLLIFVNTVIARGTPWGEKPPVPAALPTR

SEQ ID NO: 87395 - protein, 451 aa, unidentified
MARQRQEAMSLEVVHPNAAGIDIGNAAHYVAVPPERDPEPVRCFECFTEDLKKMAEWLAGCGIDTVAMQSTGVYWLPVYEILTERGFRVFLVNAAHTKNLPGRKSDVQECQWLMQLHTYGLLNDSFRPTEEICVLRTYWRQRDDHVKAASATIQRMQKVLTEMNVQIANVISDISGLTGMAILDAILEGERNRYTLAELAHPRVQASTEEIAKSLEGNWRPELLFILRQERDIYREYHKRIGECDEAIQAHLKTLGNKSDPGSQPQRPKAGKRAGGNAPRFDLRSELFRISGIDLTRIDGINVMTAQTVIAEVGLDMSRWPTEAHFASWLGLCPDNKITGGKVYHRGTRHVENRAATAFRMAATSLWRSKTYLGAKFKRLRAQLGAPKAITAMAHNLARLVYRMLRYGHEYVDKGMEFYQQRYQQQQIKWMQKKARDLGLIITLAPAPATI

SEQ ID NO: 87396 - protein, 423 aa, unidentified
MIKLKYSICCGLDVHKNVIVATIVTTNKDGISEYLQKSFSTINSDIQRFHNWLIENNCYHVCMESTGKYWIPIFNYLENDIDVCLTHPKYVKAIKGKKTDKKDSKWIADLYKFDLVRCSFIPPKDFRQLRELSRYRFKLVCMKSSEKNRIQNCMTISNVGIASVLSDPFGKTATEIISYLLEHTADSMDEKAVRKLIKKGAKSKSDEIIEAIKGYTIETDQAKKLELARGHLEYLDDMITQTEVELYVRIKPYYEFVEFVSTMPGMTELSSTIVLAETGVDMDIFDDAKHLCSWCGLSPANNESAGKKKSVRIAKAGDYLKPMMVQCALAAIKSKKQPYFAIKYGRIKKRRGHKKAIIAIARMMMVCIYHMVSEKKPFTPTDYEELMDPQNHVESVVLNENNVFAYLESLGYDSSKLVKRNDN

SEQ ID NO: 87397 - protein, 384 aa, unidentified
MRTAKKRGPGPSHVLTTPDHAGNVVGIDPHKRTLTATVVDPRGGVVASEHFRVSGEGHRELEVWARQFGSIARWGVEGSASWGRHTAVFLVGRGGDVRDVCANRTPRSDRARQRGKSDTLDSERIAREALAHPLLPRAFKRAGQEQGPDEQHQLLALWHNRRRSILTSRQHLVGEAEHLLCDLPLELRDELPDAKAVRPRLAALAHRNRRRRYDAPTTVRLGMLDAYRAQISALDREEKDVVVQLRELVAANGSTLSELCGLDTRSVAELLVEVGDPRRFTEGGFARFNASAPLAASTAEGPGEPVRHRYNPGGNRRVNAVLHRMAVTQLRCEPRAQAIYANARARGHTKKEARRILKRHLSDVIYRRMTRDLVSPSAQPLLAA

SEQ ID NO: 87398 - protein, 334 aa, unidentified
MQHTIAVDLSKNVFQVAESEHPGKVSRKRRLTHGQFERYLGACPPSRFVLEACGSAHHWGREIQSKGHTVKLLPPHHVRRYRAGDKTDATDAKALLEADRNEAIHEVPVKSTDQECLAALHRLRAGYMTTRTARLNAARGVLREFGINIPVGAKHVAPAVLALEEGAVPVPVRVVLQGMVEEVYGLEDRIASIEHQLEGLVEQTPLAQYPLTIPGVGLLTATALVGFVGDFRRFPSGRHLAAYLGLTPREHSSGEKRRLGGISKRGDTYLRTLLIHGARTVLMWAGKRKTQRATDQWMIELLRRRGRNIAAVAVANKMARWVWVVATEHREFRR

SEQ ID NO: 87399 - protein, 354 aa, unidentified
MTRTDKYVALDVHQATTLASVRAETGRVIARTILPTEAPPLVEFFRGMRGTVHVAFEEGTQAQWLHDLLVPLVHRVVVCDRHGEPRRGNKGDLVDADQLSARLWRGELRAVYHGSPARAALKELTRAYRNLVEDATRVMLRLKALFRARAIPVRGTRVYQVRERASWLAKLPERGVRFRAEALYAELDVLRELRPKAKAAMLAEARRDPAWRVLRTIPFLGPIRVALLLATMQTPWRFRTKRHLWAYTGLAVVTRSSADHEIQDGRPVRRRRAPLTRGLNPNHNRVLKDVFKGAATAATARPGPLQAFYHGMLARGMREELARVTLTRKLAALTLRLWKKGERYDPTQLTQQAH

SEQ ID NO: 87400 - protein, 314 aa, unidentified
MEQQVVGLDVSKSWLDGYLPASGRRLRVSNDAAGIRMLMDAVGGDTACLVVMEASGGYERTAHRALLAQGVTAAIVNPKRVRDFARGMGLEAKTDRVDARLIARYGQVMRPQATPLPDPARLELREILACRRQLLDEITVRRQQLEQLQSPLVRAQVEKTLACRRQEAKALDQLLRETIRAHPALAADAALLASMPGCGPILAATLLAELPELGTLDRRKVAALAGLAPVARDSGLREHRRVIKGGRGQVRRALYMAAVASLETDRSPLKARYASLLAKGKPPKLALVALMRKMLVTLNAMLKTKTSWKDPRQQ

SEQ ID NO: 87401 - protein, 341 aa, unidentified
MRTFIRIGIDLAKNFFQVHAIEREGEPAVTRKLSRGKVLAFFAQAAPCRVGMEACGSSHYWAREIRALGHDVVLIPPAYTKPYVKRGKNDANDAAAICEAMSRPDMRFVPIKSADQQAVLMLHKTRELLVKQRTMAVNALRGHLSEFGLIAPKGIHQVKELLALAQADETLPEEAKQATAMLASHSDGLDEKIDDLEKTIARASGKNQTSRLLDEIPAFGPLIASAMVAFNPDPSVFRSGSDFSASLGITPSQHSSGGKDKLGGITKKGNRYLRKMLVVGCTSVLRVAHKYKGALAEWIIAMKARKPERVVAVALANKLARIAWAMMSTGEAFRTELYTKA

SEQ ID NO: 87402 - protein, 316 aa, unidentified
MTPIKPWVGVDISKSSLEIHIRPTKVCWATNTTPGELKELSKQLKAIDPWGVILEASGGWEKRVVEALRKEDVPVIVINPRRIRDFAKAAGILAKTDRIDAAVISLFGEKMEPEVRALATPDDEAKRALLDRRRQLSDMLTQERNRLGMMPWEMGKDLRRHIDFLEKELKGLEKKVRDAMEQDPELKAKDACMQNVMGVGPSLSLAMLSAVPELGKLNRRKIAALVGVAPFNSDSGKWRGQRHIFGGRRHVRNVLFMATVAATRCNPVIRPYYQHLRAEGKKFKVAIVACMRKLLIHLNSLMRQHLASRQAISLAS

SEQ ID NO: 87403 - protein, 466 aa, unidentified
MENNYILYVGMDVSKGKADAAILKVSDCRSVKPKFLRKKLSFKFVKSEVASFLETVRSYSDVNCTSICFALEVTGIYSTNVYDYIKANLYENESIKFLNTDFVNQWRIAHNIAKSDPLDAQTISTIIGTDLDVQYVNDNVFENKNGYQDLKALVHRHYQIKKIYSQEINRLIAQCDCLFPELQYVFEPKSAAFIAVLSSYPTTHDIINASRVEVFDVVYEATKHRCSMDKVDKLFELCQDTLVPDDISSYGKSIILDLVENIKNIKGQLKSIERYIKDIASLNPAYKLLLTITGCGPITAATVIAETGNIRRFKNADCFVSYSGTSPRNKRSGTSVETMGKISKKGSRYLRHAIYMIAEFARRHNPVLKHQFERIKNGNKKRHKLANIAIANKIARYIYSIMKNKSSFVILHDHIMRLPEETRDTFFNSISLDFPKNTRKQIYQYSDINGELHRFVYIKTDEMIPA

SEQ ID NO: 87404 - protein, 416 aa, unidentified
MNAVGIDVSSRKSTVAVLRPLGEVVCLPFDVSHDADGLASLAEKLKALDGETRVVMEHTGRYYEAVAKALHEAGFFVCAVNPLLIKEYGANSLRRVKTDKADAVKIARYALDNWADLRDFTPMDAIRYDLKTLNRQFQLASKQRTASANNLIALLEQSFPGIRKCFDSPVRSDGTQKWVDFAHSFWHVDCVRKQPFPAFCERYRKWCKRHAYLFKLSNAEEVYALAKRAVVLTPKSKVVKVLVQEAANQLSSISRSVEVYRAEMDRLAAMLPEYPVVMAMYGVGKSYGPQLMAEIGDVRRFERKQALVAFAGIDPMPNQSGDKNVRSNKSSKRGSPYLRKTLFNVIRTYLQCAPQDEPVFQFLNRKRAEGKPFYVYMLAAANKFLRRYYAKLRDYFASLDTLQPVAPIPTILKATL

SEQ ID NO: 87405 - protein, 355 aa, unidentified
MSQEKYIGMDVHQATISVAVLDSRGKLIMESILETKAATILEFLQGLHGSLSVTFEEGTSAAWLHDLLKPHVTRLVVCDPRKNALLKDGSKSDRIDARKLAELLRGNQLTSVYHGEHGMRTLKELGRSYVTITQDLVRVMSRIKALYRSWAIPCSGTSVYAPRHRAEWLGKIPEPGVRLRAERFYQQLDLLQPVRQQARHDLLTESRKHHVVKLLRQIPSIGPIRAALLVAQLQTPHRFRTKRQLWAYSGFALEIHDSGEYRYVRGKLQRNQERMTLRGLNNNHNPDVKNLFKGAAISASTHPGPLYDFYIALLEKGMRPTMARLTLARKIASITLTIWKKGADFDATQLHRQEA

SEQ ID NO: 87406 - protein, 370 aa, unidentified
MEQYTEAFVGIDTAKKKHALAIAYPGRDGETRYLGEIDSAPAAVQRMIRKLARRYEKLYFCYEAGPTGYGLYRQVRALGHDCIVVAPSLVPKRPSERVKTNRRDAVTLARLLRAGDLTPVWVPDAVHEAVRDLVRARTAASEDLRRKRQQLLSFLLRHGQIYSGRKHWTKMHLHWLAQQKFDHPAQQIVFQDAVDAIEDAATRLRRLDQQVAEIVPSWSMAPVVEAYQAMRGVSFGVAATFVAEIGDLRRFDNPRQLMAFLGLVPSERSTGERVRRAGLTLAGNKRARRVLIEGAWSYRYPARVSQTLQTRLEGLPKTVRAIAWKAQIRLCARYRRLTAAGKKRPLVIAAIAREMAAFLWAIAQHVAPAA

SEQ ID NO: 87407 - protein, 302 aa, unidentified
MTTIYTGLDIAKLNLQLHLAGRIHDLPNTAAGHRRLLKLLACQPGAHVVCEATGGYERDVVAALHEANVAARVRHFARATGQRAKTDDIDAAVLTAYGQALQPNPTTPRTEQEQQLAELVRRRVQVLEILVGQRQQVERLTLPALRRQAQSLIRRLERDLEQIEEQLKALRTQVATLHERAQKLEAITGVGAITALGVLAELPELGTLNRRQAAAPAGLAPHPRESGQWHGRRSIGGGRAPVRRALYMAALVAAHSNHQLKEFYQRLRAAGKPAKVALTAVMRKLIVLMNHILKNPNFALQN

SEQ ID NO: 87408 - protein, 353 aa, unidentified
MSRIAHQGQIQKVRFEGPVWVGVDVHKNSYAVAVRDQEGHAVQFTMNADNDAFVRKIVSYGQPVAQVVYEAGPCGYSLYRACAAAGITALVAAPSRIPRPVTRGNKTDSLDCRKLADYAARDMLVPVRVPTEEEEMLRSLQRRRHGLTDRIRSTKQLIKSLLLEYHIAEPHGLSSWSKASVEALKGLALGAALRDTLDSHLRELAYLATERHTVDQAIVKATPQAVSQRMRILQSVPGVGPVLATTFACEIFRPERFADAERLSSYVGLAPVVRQSGASAASGSLVRTGQQRLRSLLVECAWIHKGRDAGAELMYRRILARTGHAQKAIVAVARRLLTLLWRLSIENRMYVVA

SEQ ID NO: 87409 - protein, 382 aa, unidentified
MRCAGLSPRNGLGEDRNHGGADMAQVRTWVGLDVHAAKVVAAIADSQSGELAVRRMGGQTEHVAEFCAALPVPVRVAYEAGPTGFGLARALAARGIGCTVAAPGKIERPAQDRVKTDRRDAERLVRLLMIGGLHPVRVPTPAEEAMRDLVRAREDVRGDLMRARHRVAKLLLRHDLRFEGNNWTQRHLDWLGRVELPEPVAQSVLLDGIGAIEALLVRREGLEAQMASLVEGSPWERQVARLRCLRGIDTLSALGLCAEVGDFERFARPAQLMSYLGLVPSESSSGEKRRQGSITKSGSRHARRLLVEAAWHYRRAPRKGRELRRRQAGQPQAVCAISWKAQQRLHRSWVRLDAERGKRRTLCAVAVARELAGFCWAVSTAD

SEQ ID NO: 87410 - protein, 338 aa, unidentified
MIGVDLAKAVFQLHAASMTGQLRFCKKLSRQSFLKFMAAQPPAVVVMEACGSAHYWAREMTGLGHEVKLIAPQYVKPFVKRQKNDAADAEAIVIAAQRPEMRFVEPKSAEQQGRAMLFRARARLVQQRTELVNMLRAFLYELGYVVPQGINNMPRIAAIITEPNSDLPEIAQIECRDLLEQIEAMTVRIATSDRRIKDLARQADMARRLQTMPGVGPMTALAVEAFAPPMESFKCGRDFAAWLGLVPKQHSSGGKTRHGRVSKAGQSDIRQLLIMGAMSRLNWMGRKSIPETSWLARMLARKPRMLVAIALANKMARMIWAMLTKQEDYRTPATAIAA

SEQ ID NO: 87411 - protein, 403 aa, unidentified
MTWFVGVDWAQKAHAVCVLDAAGRVHAQWTTADTAAGLTELCARLRRFGVPAAMGIAIERPSGVLVETLVEAGFQVVAIHPNVVKASRPRYRAAGAKSDAADAYMLADLLRTDGHRFRGLRPLSDETRALRVLVRTRDDLVTLRVAVANQLRALVESGWPGAARLFAEIDSPIALAFLRRYPTPQSAARLGAKRLAAFLAAHRYSGRRSAAELLARLHAAPPRSAGEADAAANGEAVEALVAVLTSLGGQLQALTAATQHAVATHVDGPLVMSFPRAGRVNAAQILAELGDDRARFVSEAHLAAEAGIVPVTYASGRQRGVGFRWACNKRLRRGLTCFADNSRHASPWAADVYGRARIRGCDHPHAIRILARAWLRVLWQCWQTRTPYDAALHRGAVRVCAAA

SEQ ID NO: 87412 - protein, 362 aa, unidentified
MEWFCGLDVGMDESAICVVDDKGEVALQTTVVTDPEAIKAALKPYLGRLRRLGHEAGSLSPWLHPELLKLGLPAVCLETLHVRAALKAQRNKTDKTDALGIAHLMRTGWFRKAHIKSEACYRLRLLLTHRRNLKRKFLDLENAVRHSLKAFGIRLNRVGRGGFAQAVRDAVAQDALVSELIDAMLNARAALWKEYCRLHNLVVKLVAGHALCRRFMQIPGVGPIAALSFMTAIDDPSRFRRSRDVAAYFGLTSRRWQSGCSIDLQGRISKAGDGDVRRALYEAASALLTRYKKKDKVKSWGLALAKRSSHRKATVAVARKLAVIMHAMWVDGTCYCGDPDAAKADVSAGAAVKQRRLLAPLA

SEQ ID NO: 87413 - protein, 412 aa, unidentified
MQTLIERGCGLDVHQATVVACLLMVRRDGKVQKQMRTFGTTTRELVGLREWLLSEGCTHVAMESTGVYWKPIYAILEGALEIVVANAQHIKKVPGRKTDVKDAEWIADLLCHGLLRSSFVPPKSIRELRDLMRYRRKLVESQAAERNRLLKVLETANIKLANVATDVFGMSGRLMLRALIAGKATPQEMAELAKGLLRKKIPELELALEGKLEQHHRFLLELQLQRLEAAEKDLAVLEQRIRQMLEPYAAQLALLDEIPGVDWTLAAVIIAELGVDMSVFGNVSQLASWAGVCPGNNESAGKRKSSRIPSGNVYLKSGLVEAANAAARAKGTYLRDKFFRLKARRGYKRAVVAIAHKILVAIYHMLSQQVSYNDLGDLYLDKLNKNHLTRNLVHRLERLGYAVTLTLQQKAA

SEQ ID NO: 87414 - protein, 441 aa, unidentified
MSAVQFTSPSEKEPLTHRTSESSRFHTVPGVLDASFDVGGDELHLMTVIRGERVRRRIDNRTEEIELMLTWLSRRAKLEGYSNVRVVVEPTGVYHELLFRIARMRGLETCLVSAEAASKMRVVIFGDHGKTDRRDPIAIADLAARGHVLRHRDLPDTFSAMRSAGVLYARAEKNGISAKNRIHRAMRRVFPDFDFSPSFLFGRSGRAVHQCTGFDPIRILRSGEKRLTRRLKRIVPRIRNQSIDRLLKTAKMSARSAPSPATHEINLLDLAQAWQDLLAAEQRKHDARLLLENFYDNARELDPSLPAPQKGLASKLSLARLVAETGPFSDFGSWRELLKYLGLNLCERQSGHFRGKTRISKKGRSLARHVIAQMVVPLVRRTRLLGPYYHYKRDVEKKPGPVAITAAARKLVKILWGWSKSGEKFDSARAFTCHGDLRAVA

SEQ ID NO: 87415 - protein, 363 aa, unidentified
MDQISFPQIVGRGCGLDVHKETIVATIRGSGLEEETRTFGTFTEDLELFRDWLKGHSVTHIAMESTGVYWKPVFNILEKHFEILLVNARHIKYVPGHKTDKKDSAWITKLLLSGLLKGSFIPPQVNRELRDLYRYKRKLVSQTVAERNRLQKILEDANIKLASVVSDVFGVSGQAIIDALIKGETNPVALAALAKGTLRKKQTELQAALRGNLTPHHQFMLKTIRKSLDNIEQIIAEVDNQIEQYLHQFRQEVELLQSIPGVARETATCLIAEIGTDMNVFPDQKHLSSWAGMCPGNNESAGKKKSEKTTKGNKTLKTALTEAAWAASHRKDCYLQRKYYSLIGRRGKKRALIAVGHKILCAA

SEQ ID NO: 87416 - protein, 316 aa, unidentified
MAEMHVGVDVSKDWLDVAQVEGAAVTPSVRFGNHAEGIAELWCVIKVSQAVLVVMEASGGYETLAANTLAAAGAPVAVVNPKQVRDYAKARGRLAKTDRLDARVLAEFGRDLRPPIRALPDHAQRELTELLDRRGQLVQMRAQEKARLTTVMPVARPSIQEHITWLDRRIGQLDIALTARLRNSPLWQVKVKLLKAVPGVGKVTLFTLMGRLPELGRLNRGAIAALVGLAPFNDDSGKRRGHRSIRGGRMEVRNVLYMATLTATSHNPVIKAMFERLTTAGKPFKVAMTACMRKLLTILNAILKTNRPWKNILETP

SEQ ID NO: 87417 - protein, 428 aa, unidentified
MKDIYEQVKRGCGIDIDSLKLWASTFVTSKKGTIEWETKVFDNTVDGIEELIEWLKEKKTTHVAFESTGCYWQMLYSFLEDSFEVIVANPRQTKPLKGKKRDPDDAKQIARLLQMGSIIPSFIPPRNVRELRDLTRQHVNITEDIVRVKNRITKTLREASITLDAHLSDLFGVSGRAMIQGLIAGMPGDEIAELAKRRLRSKIPQIKDSLRFPLSDHYRRILFRYWKQFTFLEEELESLEKDLDEKMKPFLAVIKRLQTIPGCGMKAARGIISEIGNDMSRFSKDKNLCSWAKVCPGNNSSGGKRKSGRNSKGNRYLRRYLGEVAWAAVRTKGSEFRDQYLKKQSRLGKKKAIVAIMHKILRIIYHMLSKGEDYQTNYEREKRKDPRKALIGFKLKNISNEDLISELLSRGMSDIKWDWDSEENAVSQ

SEQ ID NO: 87418 - protein, 316 aa, unidentified
MTFVGIDVSKAQLDVCVRPAGELTRHANDEAGIVELVAKLLDVSPTLIVLEATGGYEAPVVAALALAGLAVAVINPRQARDFAKATGTLAKTDAIDAAVLARFAEVVRPEPRPIDDEQTSELAALVTRRRQLIEMLTAETHRMRACRADRLRRSIYEHVAWLRRQIRDVDSDLDTKLRSMPLWKEKEDLLRSVPGVGPVLSRTLLAELPELGSIDRGKIAALVGVAPLNRDSGTMRGKRTIWGGRASVRAVLYMATLAATRRNPVIRAIYERLVASGKAKKVALVACMRKLLLALNAILRDRRPWLPPATPQQDSC

SEQ ID NO: 87419 - protein, 424 aa, unidentified
MLGVGVDWAESFHDVALGRPGEGVIGQFRIDHGPAGVQGLIGRCLELEPDPAEVRVVLETRHGLLVEALTDVGFTVLPVNPDLVARRRGPAKKKDDAEDARICCLLALDSYLELRKLIPHGEIGAELRAIARDDERAARDERRIGNRLRADLLTVFPAAIDIADGDLGAAVFLKLLARWPSASALATATRQDLETFARSCRHGWPERFAGRVIDAQAQSRLAVRPELARAKAGTIALAAAQLLLLRNQRKAWERRMGELLLGAPRTGRDKTAKDPDPGKAFPGGEIYLSMPGLGDRLAARIAGEIGEHIEQYATPNALQCYAGRAPVTRRSGRSEFVVARRLAYNRHLGEAVQQWAFCSLTRSAWAREFYDEKIAAGDGHNSALRKLGNRWLEVLWHCLDKGVLYDEAIHTANRLKSRTLKPAA

SEQ ID NO: 87420 - protein, 360 aa, unidentified
MNATTVAVDLAKSVFQLAVADASWKVVEQHRLTRTQFERWFANREVALVIMEACGSAHHWARWLNALGIEVKLLPAAYVRAYVKRNKTDAADACALLEAARCADISPVRVKSVEQQALQGLHRTRSLWMGTRTSRINALRGFCREFGITIAQGSRTGVEQISRVLADPSSKVPLLIRGTMKLLVDEIRLLEARIAQLERELTELARQSSACTTLLSIPGIGLLTATAMVAATSGEVTHFKDARHFASWLGLTPREFSSGGSRVLGRISKRGDRYLRMLLTHGARSVLRAATVARGAGKALDGLRGWALAVQGRTNHNKAACALANKLARICFATLRDGESYGANQRLNRKMQRQAFAMPV

SEQ ID NO: 87421 - protein, 339 aa, unidentified
MNNRNLIALDIAKNTFQVCRVSKSGKTQSNKPVSRNQLKELLVSSKPSLFAFEACGSSHYWGRFAESHGHTIRMLPPKAVKAFRQGHKTDETDAQAIAIAAQHEAIKSCALMNIEQHTLQSFESSRRYVGKQCRGLANHIRALTYEYGLTIPKGNSALLKAIPEILEDAENGFPHSLRVILHSLHEQLKVQQRLLKEIEKEKAHQIKTIEPCQRLAALEGVGPVGSAMLYSCIGKGEMFKNGRQAATYPGVTPKQHSSGGKTIIVGIDKKGGNKELRAVLYQGALSVISRLPEEPTTAKQRWLIQLVQRVGVKRACIALANKTVRTAWAMLSSGEAYNP

SEQ ID NO: 87422 - protein, 348 aa, unidentified
MVALGVDAHKRSHTIVAVDANGRQLASKTITTTTKDHLALLNWAEQLADDGEGLLWAVEDCRHLSRRLERDLLAAGQSIVRVPPKLMAHVRDSARTYGKSDPIDALAVARAAQREPDLPVARLDGPDRDVRLLSDHRETLVAERTRAICRLRWHLHELDPGWEPKSRSLDRISTLDAVAARIQNLDGTVARLARGLVDRSRELTLQIKDLTTEITVLVSTMAPALIAIPGCGAITAAKILGETAGVDRFRSRDAFARHNGTAPMPVWSSNKARHRLSRTGNRQLNAALHRIALTQAHWHEPAKLMMQRRKAGGDSGMEALRVLKRRLSDVVYAALRADLQPVAQHVAA

SEQ ID NO: 87423 - protein, 331 aa, unidentified
MRVTGIDVSHKTVMVAIRNNEKTGKPREFDNSTEGHLGVLKALHSAEVTRVCLEATGTYHLDLAVALCDAGLEVMVVNPKAAKRFAEAMRSRTKTDAVDTALLAEFAVRMPFEPWQRPDDQALALRACARRITALNHARTAAKNQLHAAGQTTSTPAFLIDDLELSISQLDAQIETLRQHALRLIGADEHLQGTFDLLITVKGIATASAIQIMGELLVLPQDMRAKQWVAMAGLDPRAYESGTSVHKKPRLSKAGNRYLRIALFMPALSASRHDPSVRAFYRHLIEARGLKKIQAICAVMRKLLLAIHAMLKARVPFDSGRFYHPVEATAS

SEQ ID NO: 87424 - protein, 348 aa, unidentified
MTLVGCDLHSRKQQVAVLDTRTGELVEQELVHEGDAVERFYSALPPPVTIGIETTGYTQWFHALMRQLGHTVVVGEAAKIRAMVVRKTKTDRRDARHLLDLLQHDRFPAVWIPDPDTRDRRALIAPRVRLVRMRTVVKNGLQAIALNQRLALHSALWTQRGLTQLKALALPPHTTRRRDDSLALLAWLTTQIDQLDAHIATVASADPRVQLLLTHPGVGPLTALTTVLVLGPLARFPDSKHVVSYVGLAPAVNASADKQRLGKITKQGNALLRWVLGQAAPLAARADDELRRRYFSILHRRGRPKAKVALARKLLVRLYIMLRDQIDYEEFRRRGRAPRPHQLPVAVM

SEQ ID NO: 87425 - protein, 338 aa, unidentified
MTLYGGIDLHSRFSWLVILDSALKVVFQTKLANDLSHFVGALEPYRAGLAGLAVESTPNWYWLVDGLHDAGYRMHLTNTCAAQQYSGLKYTDDRHDARWLAHLLALGILPEGYIYPAHERPLRDLLRRRGFLVEKRTSMLLSLRGSFECHTGHRVSSNTVKKWTAVEIEELLDNATVARGLTCLLEPIEAMTRQIQILEKEVLARAKPRNEFGLLRTVWGIGPILALTVMLEVGDITRFKKVGNFASYCRLVKTDRLSAGKRKGSGNARNGNPYLSWAFSEAAHFAIRYQDAARRFYQRKVARANGIVAVRALAHKLARASYYVMRDGVEFNPNRLFA

SEQ ID NO: 87426 - protein, 339 aa, unidentified
MKPTPVGIDIAKNVFQVHYVDKQTGEIVSKQVKRAKFLEFFINRSPCLIGMEACGGAHHWARQLIQMGHQVRLMPARFVKAFNIRNKSDAADAKAIWLAVQQPGKPVAVKTEMQQTMLSLHRMREQLVKFRTMQVNGLRGLLAEYGEVAGQGRAKLGKSLPELLGRLSERLPVALIETLREQWAEISRIDERIAAIERRMNEWKKQDPAVKAISEIPGVGLLSATAAVAVMGDAKAFRSGREFAAWAGLVPRQTGTGGKTHLHGISKRGDTYLRTLLIHGARSVLTNAKKPVPWVERIKERRPPNVVTVALANKMARTIWAVLAHGRAYQNGYVSARPA

SEQ ID NO: 87427 - protein, 356 aa, unidentified
MSEGSWVGLDVHARSVVAGVIDRGSGEVRSLRLPPGCDATVAWLQTLPAPVRVVYEAGPTGYRLARACAEAEVYCVVAAPSRVRAAADRVKTDRRDAERLARLLRLGEITPIRIPPLEEEAARDLVRAREDARADLMRARHRLSKLLLRHGLVYDATAWTRTHDAWLRRQRFDGGPLAIVFDDCYSRMLDAKSRRDALDKAIAELAATPPYVDVVERLVCLRGVSTLTAFALTVELGDWHRFRPESLGPFLGLTPSEHSSGERRRQGAITKTGNSHVRRLLIEAAWHQRSPSRRSVTLERRRDGKPLAVQAQAERSGRRLHARWHALEARGKPRSIVVVAVARELAGHCWALATME

SEQ ID NO: 87428 - protein, 492 aa, unidentified
MVLGHVSDIGEPVTAGIPFERVSTTTNPYRRGIPTTMMEDAVTRRKRQFELAYPNAAGIDIGSASHYVAVPSDRADDPVREFKSFTEDLEALADWLSACAVDTVAMESTSVYWIPLYELLESRGFVVYLVNARHVKNVSGRKSDVLDCQWLQQLMSYGLLSGAFRPHDEICALRCLTRQRDMLTKCQSQHVHHMQKALAQMNVQLTNVISDITGLTGQNIIRAIIAGERDPATLAKLRHERVHASEAEIAKSLKGNWRDEHLFALKQAMTLCDTYSAAIADCDHQIQGQLERLYRHEAPAEPERKRGRRRDPMQFDLRTALLRTCGVDLTRINGVETTTALKVIAEVGPDLSRFKSAKHFASWLGLCPGTKISGGKVLSGATKRTANRLAQALRMAAFALSRSKSALGAYYRRLSGRLDKAKAITATAHKLARLIYTMLTKGTEYVDRGQDYYEERYRQRVIHHLNRRAAALGFALTPVEPQPQNLLLKSAT

SEQ ID NO: 87429 - protein, 333 aa, unidentified
MAATAQSAIAVIGIDIGKNSFHVVGLDGRGAIVLRQKWSRGQVEARFANMSSCLIGMEACVGAHHLSRKLKALGHDARLMPARYVRAYSKGQKNDFRDAEAIAEAVQRPTMKFVATKTADQLDLQALHRVRERLVSQRTGIINQIRAFLLERGIAVRQGQRFLRVELPRILATPPDVLSPRTVRVIEGLASDWHRLDERIEGLSSEIEELAKRDAGCERLMSVPGIGPIISSAMVAAIGTGDSFSKGRDFAAWLGLVPRQVSTGDRTILGKISKRGNRYLRVLFVQAAWVVLVKVKPNRWQGHGLKPWIEAAKKRLHHNVLAIALANKLARIA

SEQ ID NO: 87430 - protein, 346 aa, unidentified
MNHNPYVSCGLDISSQKFDAYLMDQDENGVHHVFDNSADGVSECLAFLSAHSYRGKVVMESTGRYHELVATTLFTSGFPTYVINPLRTKKYQQAGIQKVKTDKQDSRMLAEMGIKEKKLDAFTCTQKELGIKKKIALIRSLEEKLQEMKAMIKNYASSQERLGNSLSAFESSLFTIIKDLDRKKDKIEKEIVEEVFPKQDQEATKAKEILTSISGISSYYAALIYSFYSYDKSKDADSWIAYSGLSVSIYESGKWKGAGKLSKRGNHYLRKRNYTAGWGAYMRDDAFNRYYYYLKKTKGRSHVEALTIIGKKVLRIAYYCLKTGTSYDPTILAQQMDLLSPSMSAS

SEQ ID NO: 87431 - protein, 401 aa, unidentified
MEGPIVSIDVSNGNSHYMCFIKNNKRFGKVKKIDHDIEGFKRLLEDIQKLEAETNEKVCAVFEATGVYTKPLERFLSKNSIKTYMINPLESARKRKEEIHNKKTDKLDPISISKVYYDKEEMMELKKKDETHNWLRKKNRLYEDQLNHLRKYKVTFQNQLSICFPGYLDLFKDGYSDIPMTILKKYPHPDLLKNKKAETVARYLEKNTCHTHKVSLEYALKIIEFAKKTYPGCEKDDVEVEIFKILLDKVIETQRECEKTLNEMITVASTLEEYRYILSIDGIGTNLAARIIAEIGDIEEFKSREALVAYAGLDPHIYQSGDQDGKHLKISKKGNKYLRCLLFLAVGCSIRGAKDNPVNRFYQKKKQQSNPLNSKAAKTACTAKLLKIIYGICKNKTTYER

SEQ ID NO: 87432 - protein, 354 aa, unidentified
MPRESKDTIAVLGIDIGKNTFHLIGLSKFGVIVLRQKLSRGQLEAKLANLPPCLVGMEACVGAHHLSRRLKALGHDARLMPAKYVKAFLKGNKNDFRDAEAIAEAVQRPTMRFVATKTAEQLDLQALHRVRSRLVSERTAIANEIRAFLLDRGIAVAKGLHRLRTALPGILATRTDVLAPRLLHLIEDLIGDWRRLDERIDNVSLEIETLAEQDGGCERLMTVPGIGPIISSATVAAIGTGDVFSKGRDFGAWLGLVPKQISTGDRTILGKISKRGNRYLRTLFVQAARVVLLRPANWERYGLRPWIEAAAKRLHHNVLAIALANKLARIAWSVLHHGRNFEVRKMSKPVCQSA

SEQ ID NO: 87433 - protein, 415 aa, unidentified
MKVVFPTCCGVDVHKTFVVATIITTPADSLQPHYQKKRFSTFNSDLNRFADWLLEHNCLDVCMESTGKYWVPVFNILEKRGIRVVIANPKWVKAVKGNKDDTKDSKWIGDLFRIGLVKSSFIPELNIRILREFLRYRYKLVSMKSSEKNRFQNAFTVCNVALDSVVSDMFGKSATAITDYLTSDESFDPDHCVSLLQRSLKKKAEQVLESIEGFSIASEQKARIKIIREHYDFLEKMIAKVDTCVSEMVEKHEGEINLLCTIPGIDRNSAITIISEIGTDMRQFGSSKRLCCWAGLTPGNNESAGKKKSVGISRAGVYLKPALVQVAHAAVKDKASPYYALKYERIAKRRGKKRAIIAIARMILTAVYSMFCTGEVWNPVDLYKVDMPEHLKEQQLAKAIKQATRFLEKQGLTVA

SEQ ID NO: 87434 - protein, 427 aa, unidentified
MNEQTKVCGIDVHKEFLQVCLLSRSGEYSHHRFRHTSDGILALKDLVLTEGCDLVAFESTGIYWYKLYLLLESDVQIIVANAYQIKNIPGRKTDLKDSQWIAELALNGLIRPSRIFPRKDREFRDLTRNREILVQTRTTIKNRIHKILDSAGIRLKPALNDLFGKSGYHLLQGIAGQKDLETTLSTLPSPRIRRRADQIREALQESSLSPLQLQLLKTQLALFDEIEEKIRYLESLLLASLDDDHAEDIAICISVPGISSTAAMTILAEVGDVRDFVSADRLVSWAGLEPSVYQSADTLVTGRITKRGSKHLRWILVQAAQAASRAQDTVFSRFFRRIAYHWGRNKAVVALTRKILSILWHLLLNRERYVESGLKKSVKLPVPSAIPEMSIDEAMAVLLNAGYAVYTPERQSRAKKGVREERPPTPS

SEQ ID NO: 87435 - protein, 349 aa, unidentified
MTVYVAVDFHAREQTVSYCDLADGEIHRRKLRHQHDEVRAFYQQFTGEVIVALEASGYSAWFEQMLAELGHTVWLGNAAEIRRKAPRRQKNDRRDADLMLDLLLKGDFPRVHGFSEESRTVLRQLRYRHKLVKVRTIAKNSLHAIGINAGLPLKRRLLTEPGIAQLQALSLSPVLRQQRDEWLQLIGSMNERIATVEAQLQQRAKDDAAIALLQTHPGIGLLTSLALRYTLLPTARFSTTRQVTAYVGLDCMEEQSAERRRMGSISKAGSKLLRFLLNEAGHTAARHDPELKKFYRRLLQRREKPKAKVAVARKLLVRSFIMLRDQIDYAEFVRRGVAARVARETPSLP

SEQ ID NO: 87436 - protein, 346 aa, unidentified
MSYSTTVGVDLAKNVIQISVVSGRGKELSNRSLTRKKFAEFLGKQKPSLVAFESCASAHYWARAAKRHGHEARIIPAKAVAPFRQGHKTDSNDALAVAEATRRPNIKEAPMKTAEQQGLQAIQRSRELLIGECTALSNHLRGILLEFGVAIPQGFASLLRALPEILEDGDNELPDLYRPTLHRMHQRLLELREDIESMTREVEGLVKHHPVCKRLTAIEGIGPIGALSLYAVMGSGKAFTKSREFSAYLGLTPRQFSSGGKTNIVGISKKVGNRRLRSILIQGARAYVYRMKEPKSLKDHWLKDLIERAGPNRAAVALANKNVRTAWAMVTQGTDYQRREQLEMAA

SEQ ID NO: 87437 - protein, 390 aa, unidentified
MSVSPSVALPAARGEHVTMHVAFELSKMKWKIGIVAPGSSKMSRFTVAGGDRVGLAMLLARKQGEAAARCGHPVRIVSCYEAGYDGFWLHRWLGEHGVENHVLDPASIEVERRHRRAKTDRIDLDKLMRVLLALCRGEPRVCSVVRVPSVEEEDAKRRNRERERLIRERTAHVNRIKALLHGQGIRDVKPLAKSFATQLAVRRTGDGHDLPPLLAAEIAREHTRLRLIVEQIGVIETESRQALHKAPAHATAAARARQLNRLVGIGMAGAQTLANEVYYRAFANRRQVGGYTGLTGTPYDSGETRREQGISKAGNPRARAILIELAWLWLRLQPDSALTRWFKERVGNGKGRIAKIAIVALARKLAVALWRYLETGLVPTGARLRAGVAG

SEQ ID NO: 87438 - protein, 413 aa, unidentified
MAAITCGIDWADGHHDIALADRDGLRLAKQRISDDAAGLAALLALLAEHGDSAGAPVPIAIETSRGLLVAMLRATGRPIHVINPMAVARYRDRHSVARKKSDDFDALVLANILRTDAAAHRVLPTDTELAQSIAVLARAQQDAVWDRTQAANKLRSHLREYYPGFLAAYGHKDKFTTPVARTILAAAPTPAHAAKLTPAKLAALLKRAGRVRGTADEAARARQAFQTPQMRQPPLVEQAMGAKTLALLRQLDAACQSAEDLEKAAVASFNQHPDAEVITSFPGLGSLLGARVLAEIGDDRNRFADARALKAYSGTAPITRASGKKTSVRVRRIKNNRLAAVTYPWTLSALTASPGARTHYDKRRETGDWHAAAQRNLANKLLGCLYHCLQTGTHYDEATAFPNPDSKNLDLAA

SEQ ID NO: 87439 - protein, 372 aa, unidentified
MKRILKIGADVHSSNYTLCAVEPLLEGDVNELFTVDVEPRYQEILRFIEKLKKRFPGDELSITCGYEAGCLGYKLFHDLEAHDVKCVILAPSTMEVPGGKRIKTDKRDALLIAKCLAKGGFSAVHVPTKNDEAVRDYLRMRDDHKQSVKTLKQQINAFCLRHGYKYERTKWTQVHMKWLREIELSEIDRETLNSYLATYGLMTDALERYDARIEELSYMDEYREKVQKLRCFVGIKTHTALSLIVETGDFSRFVKGNYYGSFVGLVPGEDSSGPHTNRCPITKAGNKHLRTLLTECAQAIGRSRPGYKSKELKSRQKGCPPEIVAYADRANDRLRRKFHKMVYRGKHKNVATTAVARELACFVWGMMTDNIA

SEQ ID NO: 87440 - protein, 470 aa, unidentified
MTCPSLISGSTAARSFPRSSARVRSAPGLSEPTNPVVSYRDTSDQTGGTLASVSLWSLPGSLAPTLGVLRGQHALCRLPGAQNRPAWLDRSVASPPLRCAHRPVLVRITNVKGDQSPMITLGIDAHKRTHTVVAVDDVGCQLGTKTTTATTSDDHLEIIRWADRFGPERQWAVEDCRHLSRRLESDMLAAGERIVRVPPKLMAHARDAARTYGKSDPIDALAVAHAALRNPDLPVAQLDGPARELRLLVDHREDLVAERTRCLNRLRWHLHELDASWDPPARSLTSYKNLDAIAARLTSFDGPVARIAAEIVEHARHLTVRERALEREITGIVNKLAPTLLALAGVGALTAAKIVAETADVRRFKHKDAYARHNGTAPLPVWSGNRERHRLSRTGNRQLNAAIHRIAITQARCHDDAIAYIDRRLTDHHNTKTEALRALKRRLSDVVYRALLADAQPAQTAPADLLAAAA

SEQ ID NO: 87441 - protein, 392 aa, unidentified
MEKHSTEFVGLDVHKESTAIGRASAGRAAGRFVGTVGPTLAELLKSLKSLGRPEELSIVYEAGPCGYGLVRDLRSRGYACEVIAPSKIPRRSGDRIKTDRRDAVRLAELARAGELVSVVVPDERDEAIRDLSRARVDAVRARLAARHQLKALLLRHGHRYGRSSWTQAHERYLAKITFAHAAQDATFAEYRQAVSEANERVQRLVEALRDQCTTWRMQPVLEALMTLRGIDFVAAATLVAELGDFKRFAHPRELMSFLGLVPSEHTSGDARHLGKITKAGNGHVRRILIEAAWNYRFAARMSVVLQKRQEGQPKVVRDIAWRAQLRLAQRYRRLSARHLHHNKVCVAIARELAGFIWDIGRHVPIHDMPMKAPKTGGDNPKGYRAIVAPATL

SEQ ID NO: 87442 - protein, 364 aa, unidentified
MKKSTSAARREMKIDWNEVAAVGIDLGDRFSQIVCINAMGKGIGEGRISTTATAMEKQFGTVEPKLIAIETGTHSPWVSRLLARLGHHVTVANSRKLRLIYENQRKNDRVDAEYLARLVRLDRKLLCPVEHRNERAQQHVALIRARDEAVETRTRLINHVRGAVKSMGMRLPSCSSGPFVKRAAAVLPAELKPALEPLLTLITAINEQITKYDRNVERLIDDEYRQVQVLTQITGVGSLTAVAFAVTIGDRKRFAQSRTVGAWVGLTPGQRASGKQDPQQRITKEGDSYLRRLLVNCSQYILGPFGPDCDLRRHGLAIAARGGKNAKKRAVVAVARKLAVLMHRLWCTQAIYEPLRKGPTSIAA

SEQ ID NO: 87443 - protein, 375 aa, unidentified
MTNNTAFIGLDTHKETIAVAIAEDGRDGEVRYYGQIANQPAAVLKLVKKIADKYGKLFFCYEAGPCGYGLQRQIVGLGHECVVIAPSHTPVKKGVHVKNDRRDALELARLHRAGDLTSIWVPDEAHEAIRDLVRARITAMDMVKKYRQHLQGFLLRHGRIFPGKSHWTKTHISWIRELKFEHPAHHILIEENLAAIRDSQDRLARLEQQITKILPSWALAPVVQAFQAMRGISEIAAVILVAEIGDFNRFAHPRQLVSYLGLAPSEHSSGKSIIRGPITKAGTARGRRILIEGAWAYRMPARVGRNMAFRHDGLTKDVLDIAWKAQVRLCQRFRAMRARGKNHNVVVTAIAREMACFIWAIARTVAIPTQVPVTA

SEQ ID NO: 87444 - protein, 377 aa, unidentified
MSTSKEKIVSVGIDVSKDELVVSIILYSLMSQTFRQLTRFTEDNTPAGIGKVIKKIRSKASQNGHCSVRVTMEATGVYYEELALRLFDRHREYHVSVMLPSKAKKLIEGMGNRSKTDRVDADALAQCGAERRLEAWKGIDPYWRELRSLTRTREELQNQKTRLENQIHALTHSGSEAELALESYAVCLEAIKRQVDVLTTQSKAHLRKNKAVWKQVKDLESIPGIGMVTIAAILAETNGFTDFTSIGQLISFSGYDVKLRESGKWKGQSRISKQGNSHIRRAMYMPAMSVSGKVKTGPIREFYDRLAAREGVKGTKMKAQVALQKKLLTYMFILWKKKERFNPDIIDRDRKGRNKKVASPIGETTGDMTTITLPSFA

SEQ ID NO: 87445 - protein, 408 aa, unidentified
MDLQVMYPACAGLDVHKRTVVACALTSAGRQTRTFRTWTGALQSMAHWLASQGVTHVVMEATGAFWKPVYNILEGRFTLVVANPERVRAIPGRKTDVKDAEWLATLLRHGLVPPSYIPDRDQRELRELTRYRTAKTQERAREVNRLQKTLEGANIKLAAVLTDVLGVSGQRILDALLHGEEDPATLAALADWRVKAKRADLEAALVGQVSPMLRFVIQEQLQSIRTLDDQIARCDVEVDRRAPFREEVARLRTIHGVGQRTAEVILAEIGTDMSRFPTAQHLAAWGGMCPGNRESGGKRRPARTRKGSPWLRGALGEAAWSAGRTKTGYLRALFQRLAARRGRKRAVVAVGHALLVIAYHLLRDKTTYQDLGDAYFEQRDRDAVKRRAVRQLQRAGFTVHLEPLPEVA

SEQ ID NO: 87446 - protein, 410 aa, unidentified
MEVVHAHCAGLDVHKDSVVACARHMVDGKITTSVKTFNTTTAELILLSDWLSGEGATHIAMEATGVYWKPVWHILSDGEFELVLANAAHVKNVPGRKTDVNDATWLADLMAHGLIKASFVPDEPTQQMRDLLRTRKQMVRERSSHTQRIQKTLEDANIKLDSVVTDILGLSGRRIIEALIAGQTMPQALATLAHRRIHASTDELEAALRGRVTRHHRFLLKLHLDQIDAFDAAIARIDEEVSANVEPFRIAIEMLAAIPGVGDLSATIIVSEIGIDMSRFPTAGHLISWAGLCPKNDQSAGKRRSTRMKKGAPWLKSTLVQCAWCASRTKDSYLQAQYLRLRSRRGAKKAVCAVAASILTAAYHMLKNGTVYQDLGASYFDNRAKDKQALRLVSRLKNLGFQVQIKPVAA

SEQ ID NO: 87447 - protein, 379 aa, unidentified
MRHVCGLDVHKDSVFVCILNEKGVVFQEKFGVLTPELERMVGVIMEHGVTEVGMESTSVYWMPVWRVIDPYVEQKLVNPYFIRQLPGKKSDVKDAEWIATCILKGLVRGSYVPEERIQRLRQYDRRIFDLNDDIVHKLARLDAALQRCNIRLSNYVSTTDCKSYGDVVDAIARGETSPDALLRCVHGRIVNRHGADVIRSALTGVVTPVDVDVIRQLREEIELASRHRDECQRRMDGLCSEWFPEQYANLQTIPGVKARSATAIIAELGTDMSSFEDAAHLVSWAGLRPRNDESAGRIKARGITHGNKYLRKTLIECAWGASRTRGCFYSRFSHHQTVVRRKSRMKVQVAIARKMLSAIWFILHDGVAYRDFEGDANAA

SEQ ID NO: 87448 - protein, 357 aa, unidentified
MRIIGVDLHARQQTIAMLDTETGELVEKTLEHEAEKVREFYSALPGPVWVGIEATGSMQWFLKLMEDLGIDCQVGNPAKIRAAEPRQQKHDRRDAALLLKLQVENRFPSIWMPSTELRDLRALLKHRHQWVRMRTRVQNALQAIALSHGLRRGKSLWSQTGQHAITSLPLAPHTAHRRTELQALYRQLDEQISKLEERITDQAWQRPGARRLMTHPGVGPITALATEVFLGDPARFTDGKALASYVGMIPSEYSSGGQQRLGGLSKQGNPLLRFLWCEAAIHAVRRDPELKRFYQRKLQQKGLGKARVAAARKLGIRLWIMLRDQIDYQEFCRRGQMRQKSGGARAGIPEEGRGPAV

SEQ ID NO: 87449 - protein, 361 aa, unidentified
MKKPAHHLIAEVPRKRAKVELTIGIDLGDVWSHYCTLNQEGDVIDRGRFRTTAKAIDKWFAPVPHARVAMEAGVHSIWISEQLEQLGHEVIVANVRELRAISHSDRKSDDVDAEKLARYARLDPEILRPISHRTVEQQEALTLIRARELLVRLRTAAVNAVRGLTKACGHRMPASSTKCFAQRGQAAMPPGLKLALGPILTQIAEMTLKIKQYDRDIQRMTQTEYAETQPMMTIHGVGHITALTFVLTLGDKSRFGRSRDVGCYLGLRPKRSQSGERDPQLGITKAGNAYLRSLLIECANHILRPHGRDSALRQWGLHLAARGGKQAKNKSVVAVARKLAVLLHHLWTTQEPYIPFYQQAA

SEQ ID NO: 87450 - protein, 451 aa, unidentified
MSKPQVIDDEEHERVHERVAAVDVAKDSGMVCTRLPHPSRPGARPSTVWTVKARMGAVGKLGRQLKDSGIELVTLESTSDYWRIWFFVLEACGLAVQLVNAAQAKNLPGRPKTGKLDAQWLARLTELGLLRASFVPPAAIRALRDCTRARTRLVQERTRCYQRLEKLLEGALVKLSSAASKLTTESAKDMVKAMIAGQRGPRTLAALARTRMKAKHDDLAEALDGMFDDRHGELAGLLLDQIAFLDERVTQLTARITAAVAAMPAAWGVDGDGTTGPDAGTGPDAVVLPAAARLAEIPGVSQDLARAIIAETGLDMSRFPTAAHLVSWAGLCPSARQPGPRTRAGKKSQGDTWLRGSLGQAATGAARTDTFLGERYWRIARRRGKAKAQVAVAGSILVIIWNLLKDPAARFTDLGPGYYQARTDKVKKIKNHIRQIEALLGHPITITPKAA

SEQ ID NO: 87451 - protein, 344 aa, unidentified
MGEVSTIGLDIAKSVFQVHAVDSSGAVVMRKRVNRLKLLEFFAALPPCLVGIEACPSAHHWGRELQALGHTVRLMPPSYVKAYLKRSKNDANDAAAICEAVTRPSMRFVPIKTKEQQTALMLHRTRQLLVRQRTMLSNALRGHLAELGIVSAKGRNGIGELLRIIADGADNRIAAATRAILDVLARQYSAIGAEIRSIDKSILAWHRSCEASRRLEEIPGIGPIVATALVAEVGNWREFRSGRNFAAWIGLVPKQHTTGGKDKLGSITKQGNRYLRWLLVAGAMAVIRYAQKHGTERRPWLARLMERRPTRVAAVALANKIARMAWAIMVRGERYQEPKLLVAA

SEQ ID NO: 87452 - protein, 417 aa, unidentified
MDTIYSNVAGLDVHQKSIQSGVRCGQQTGKLFREVRSFGTMTRDLRAMADYLESFGVTHVAMEATGVLWKPVWNVLDGRFTLLLVNPRHLKKVPGRKTDVSDAEWIAQLLHCGLLRGSFVPPRPIRELRDLTRHRAQLAGEHTRVANRIHKLLEDTNIKLGAVASDVLGVSGRAILRALLDGNEDPQRLAELAQGRLRKKLPELRLALEGHATEHHRFLLRRLLSHLSYLEAQSNLLSLRIAQKLNELLPAEDQRRLDAIDGVNRTTIENVIAEIGVDMTVFPDEHHLCSWTGICPGNEESAGKRLRSRTRKGNRWLRRALAEAAWAASHTKDTYLAAQYRRLAARRGKKRALIAVGHSILVIIYHVLKHHVEYQDLGGDYFDRLDPERLRRYLVKRLQHLGFDVTLTQKQLDDQVA

SEQ ID NO: 87453 - protein, 354 aa, unidentified
MIIMGVDYHPEFQQTASVDTDTGEFQEKRLAHPEEAEKFYRAVAAQGVKVRVGMEASGHARWFERLLAELQIELWIGDAAEIRTKRVRKQKTDRQDAQLILQLLLENRFPKIWVPSWENRDLRQLLWHRHRTVQARTRIMNQLQAVALNEGLRCKKRLWREAGRKQLESFALAPWASRRRRDLLELLDRLNPTIAELTRAIENEAEKNPGVQRLRTHPGVGALTALAFVLIIGQAERFQCGKQVASYLGLVPLEDSSGKRRRLGHITKQGSSILRFLLVEAAQVTVRSLPQWRSKYFHLAMRRGRKIAKVAMARRLAVCLFWMMRKEWDYEQLKKFGSHAGQPEHRHGVPSNTE

SEQ ID NO: 87454 - protein, 366 aa, unidentified
MKKSIRKTKGQNLEVNWSEATAIGIDLGDRISYYVALDSGGECVGAGRLPTSAEAFEATFGSIGAKSIAIETGTHSPWVSRLLKKLGHRVTVANSRKLRLIYENRNKNDKVDADYLARLVRVDPKLLSPVEHRDERAQQHLTLLHSRDVLIKTRSRLIAFVRGAVKSMGSRVPRCSAEAFVKRARPVVPPMLHAAIEPILSTLEQLAGQIAVFDRRIENLAKDEYRDSQVLMQIRGVGALTAVAFQTTLGDRDRFLHSRTVAAWLGLVPGQRASGQSDPQQRITKQGDTYLRSLLINCAHYILGPFGEDCDLRRHGEMIAARGGKNAKKRAAVAVARKLAVLLHRLWCTHAIYEPLRKAASCPKAA

SEQ ID NO: 87455 - protein, 438 aa, unidentified
MSNKVIFNLDELFISVGIDVGADFSWMSIALPNQQFVGKPYKILHNSIDSLTTAVSKIKEAEELYSLESRIFLESTGIYHYPLFCYLRDKGFNCSVINPIITKNSTNINIRKVHNDRFDSKKAALVGLKPDLKVSLMPSDLALNCRNLCREYYDLMDNRSAYVNKLQGELRMAFPQYLGIFSKVTVNTSLTLLETYTSPSAFLEADKQEIIDIIKSTARFGLTYAQNKYNAIIQAATDANQFGYIIDSNIKRIRLYISFIRKYDEEINSILESLHELVDANEDADFVKQIHLIETFKGAGFLSAVSIMGEIGDFSAFSKPKQLFAYFGLDPAVKQSGKFEGTKVQMSKRGSAIARRVIHMLTLQSISISRNGEAKNPVLREYYLKKCESKPKLVAMGAVSHKVCNMIFAILRDNKPFKIIAPQEHIKQYNAAKCDIAA

SEQ ID NO: 87456 - protein, 343 aa, unidentified
MQISTIGVDLAKNVFQVHGVDSAGKVVITRQLRRKQVIEFFSKIPPCLVGMEACGAAHHWAREVSKLGHTVRLMPPSYVKGYVKRSKNDAADAAAICEAVTRPSMRFVAVKSTDQQASLMLHRTRDLLIRQRTQLINALRAHLAEFGLVAETGREGVGQLAALITDESNREALPFAMKQALQAFVDQLAALELQIGTLDRAIHAHHRANDISSRLETVPGIGVIGATAIASTVTDPSNFKSGRDFAAWIGLVPRQHSTGGKERLGGISKQGDRYLRRLLVIGATAVVRHARQHPQKHPWIMRLLARKPAKLVAVAVANKMARIAWAIMAKGGYYRAPELAAAA

SEQ ID NO: 87457 - protein, 419 aa, unidentified
MGDDVMISVDPHKASNTLAVMDPVTKTVIARQRFMNTAVGYRRLREFAGGWTHRRWAVEGCHGAGRALAQRLVGDGEMVLDVPAKLAARVRVYSQGHGRKSDADDAISIGLAALNSTRVAVVRRDDTLVSLRLLCDRRDELGGLRTQAVCRLHRLLCELTPGGTHRGLRASRAEQLLAKLRPVDPVDVVRCQLAHQHLDDIRALDAKMTAVRAQIAALVDGTGTRLTELYGIGPVIAGRILAEVETIDRFPSKDHFASYNGTAPIDASSGEQVRHRLSRAGNRRLNHALHMMAVTQIRQPETIGRRYYERKRLEGKTPKEALRCLKRRLSDVVYWQLVADRRATITQCGSATTPTRTRPTSTSATTPVPRTAPPRRPPHPTASTGSSHSTGKTAASSASNPRRQQWLTQDILDEAEDAS

SEQ ID NO: 87458 - protein, 458 aa, unidentified
MPRKSSNKAKSQRRRERALLQKVHLNAAGIDIGANAHWVAVPEDRDASPVRSFGVFTRDLVALCDWLKSCQVETIAMESTGVYWIPLYQMLERKGFEVRLVNAHHVKNVPGRKTDVKDCQWLQQLHTFGMLAGSFRPAAQMCVVRSYLRLRDTLSKDCNSLVQRMQKALTEMNVQIHRVISDITGVTGMSILRAILAGERDCLKLAQLKHPQIKSSAQDIAKALDGDYCQEHLFALGTALEFYDSYQLKIMACDRHVQDALSAFELKGKAPAPDVSRMRCAEKRLEALRRHHLEEMTGADLTKLPGLDLLAVERILSEIGLDMSRWPSEKHFCAWLNVAPNNRVSGGKILSSKPRKNANRAAAALRLAAQSAMQSKSAIGAFIRRIKSRLGAPTAINAGAHKLARLVYRMLKFGKAYVEIGQEAYEKFFKERILRNLQRKAHLLGFQVTPITVTVPVS

SEQ ID NO: 87459 - protein, 335 aa, unidentified
MTYIGLDVHKNHSTAAYRDPVTNEICVKKMKTDRDAFVRFVCMLPKPWIVAVEATREAPWICRALLDCGAEVHLANPRQLAPFGKHRRAKTDAKDAELLLDAIEKGYLPEAYLAPLEVQELRAIARTQTTLRGIATMLSNATSSLLCQNGITLPGKRTYSTKNRDSMPQTIEQLSEPYAYSVELLWQLREATEHQTQLLTKQIEKAAKEDEVLKALCQLPGIGALTAFGLVAELGDITRFKTVKNLHSYAGVVPKVSDTGDSHYAGKLPKECNKRLRRLAISAAQSAIRTKKPNEFKETYARLRARHKPANTAKIAAARKVLTRVFHTWKDLVDG

SEQ ID NO: 87460 - protein, 352 aa, unidentified
MKYVGLDWAYRTAQWCALDPGGEIAGEGRFAADRDGLARLVLELGDEVTACLEMMSGALWVRDELVACGWQVQVADARKVKTVAPLAAKTDKVDARLLAELCRRQLVPALWLPSLGDRELRERLRRRMHLVRLRTSAKGRIFGLQTQWGIRISLRRLRRADGMTLLERAGMPAVWRHSISECLALIDFLDARIVPLDAELRPFAQADPRAVLLDTIPGVAELLALTIAVEIGEISRFAGPEKLVSYGRLAPRVRQSGEGRPHTGPLNKSGSRLLGWAAVEAAQQAWRESNPWHQLYTDVSRRSRNHNSAKAAVARKILIAAWHMLSRNEPFKPAPRTGATSVPASSRLALAA

SEQ ID NO: 87461 - protein, 326 aa, unidentified
MTQPATTPTRFIGADVGKAEVVFHDSRGNARHTIPNKPKDLAAFAAKAGLDASCLVICEATGGYEDALLAALLAAGCPAHRADARKVKAFIRSYGTLAKTDALDAKALATYGQERHASLARWQAPDPDRENLQTLVNTRTALVGMRTATRNRLAAPGSGPVQAYLETLVTTLSEQIEAIDEAMAKILREAAALKRAKKALTSIKGIGDTTAIILLALMPELGRLDRRQITSLAGLAPHPNQSGTTERYRRTKGGRPEIKQALFLPAQTAARFNPVLKEAYQRLIAAGKKPIVAIVAVMRRLLVIANARLRDAYADEEKIVLAANAN

SEQ ID NO: 87462 - protein, 323 aa, unidentified
MQGKVLPEPNTMAPVYAGIDVCKEWLDVYVHPTGRSLRVANDHCGRRRLNRELTALGVTRVVMEATGKYHRAAQRSVHAAGFAVAVVDPLRARLFAKACGLLAKTDRIDARLLALMGEALEPAAVAPPPEALQELQELVNARTAATAERTALTNRRGAAQTAFLRAELGRRLIAVKGHVERLDVEIERRIRAVPELARRHVILTSIPGVAAVTAAVLIANFAELGACSGKQAAMLAGVAPVACESGERIGHRAIKGGRLGVRNAVYMAALSASSHNADLTAFARRLRQAGKPAKVVLVAVMRKLIILANTLINQNRPWSPIAP

SEQ ID NO: 87463 - protein, 332 aa, unidentified
MSSHEIVGIDVAARKLVVIGERLALAEYENTAAGRSKLAKALSQSPRPVRVVLEATGIYFLDLACELAAAGIAVMVVNPKATHHFAEAILQRRKNDPVDAAMLREFGRRMDFVPWQPPRHELFAFRALTREAQALSKAVAAAKNRLHAITATQLAPDTLIRALERQIAQNQALVDELVAAALAETKTNRELARLVARTDSAPGFAAKPAPGSEQGAAVLVVGELAVLPPMTARQWVAQAGLDVREECSGTSLARRPRLSKRGNKRLREALFYPALTAARCCPLAGAFVERLVAAGKTRLQAIVALMRKLLHGLHAMWRNDEDFDAEKLFAPA

SEQ ID NO: 87464 - protein, 352 aa, unidentified
MIVLGADTHKRSHSIAAVAATTGELLDELTVQVGQRGFDALLRWARALDGERVWALEDCRHVSGSFERFLIGRGERVLRIPTHLSAGARKSARQRGKSDPIDAIGVARVALQEGLESFPVAHLDGPELDLRLLVDHRERLVRQRVALNSTLQWHLHDLWPELELPGSSLFYDRWAPRVARRLARAEQTMRVRIARDELRRIRELSQAIKALEREIASLVAAIAPQLLSEPGFGPLTAAKLVGEIAGAQRFATPAKLARAAGVAPIPASSGNTQRQRLDQGGNRQINAALHRVIVTRARCHPATRDYIARRQAEGKSTREAIRCLKRYLTRHVWRLRQPPVPVRATPPHPSLS

SEQ ID NO: 87465 - protein, 311 aa, unidentified
MTLCAAGVDVGRDFLDIGLAPAGRVFRTPNSPQGVQAAVRRLARAGVSRVVLESIGHYGARLVRGLAEAGFEVGVVDPKRIAALRLAEGRRAKTDKLDAALIARFALLMSDAARPVPSPKAMEIRALSTRRRQLVEMIAMEKTRLKQALDAVIADSCRRAIAQLGEERARIESRLHEELLVTPENRERARLLQTIPGIGPVISMTLLADLPELGSLDRKAVASLAGLAPHPNQSGTRTGSAHIQGGRPCVRAALYMAAVTAVRSDKGFKSEYLAMRHAGKPAKVALIAIARRIVVVANVIVRTGQHWTKNP

SEQ ID NO: 87466 - protein, 341 aa, unidentified
MQIRSIGIDLGKTTFHLVGLGERGKSVIRKKLSRKQLLAFTANLPPSLVGLEACSGSHFLGRALSQQGHDVRLIPAQFVKPFVKSNKNDYLDAEAIAEAVERENMRFVPIQTDDQLDLQALPRVRERLVSRRTAVINQVRAFLLEPGITFRKGPATLRRQMPEILENAAAQLSPRMRNLLATLWQEWKQLEEQIDCLSADIETICIADPACQRLRQIPGVGPLVATAVVAAIGNGAAFHKGRDFAAWLGLIPKQYSTGGKAKLLGISKRGNPYLRKMFIHGARAAVLRLKRDGSLLGAWMNGLEARAPRNVLVVAMANKLARITWAVLSSGEPYRAAALAA

SEQ ID NO: 87467 - protein, 356 aa, unidentified
MTETLSGEIIIGIDTHKHTHAAVVINTLGARLGTMTIPVSRTGYRDLEAWAKSFGPIRAFGIEGTGSYGAALTRSLQANGHQVFEVGRPNRQLRHQPGKSDPLDAESAARAVLGGQATALPKSGTSAVEMIRHLKIARDTAVKGRTQALLTVKAIIVTAPALLREQLDGITGKMALIRHLAALRPGKLTSTTASAKASLRAIARRWLVLDAEVKTHDGHLEDLTERCAPTMLKAHGIAAGTAAEMLLLVGDNPERIHSEAAFAKLCGACPIPASSGKTTRHRLNRGGNRQANAALYRVVIVRMRGHQPTLDYVRRRTAEGKGKMEIIRCLKRFVAREIFGYLCGQPKSPLAAQSGP

SEQ ID NO: 87468 - protein, 403 aa, unidentified
MVFVGIDWAEAHHDICVVDEEGRVLAKRRVPEGLEGVGKLHALVAEHAEDPVSVVVGIETDRGLLVGSLVAAGYQVYAINPFASSRYRDRHATSGAKSDSGDARVLADLVRTDRHKHRPLAGDSNLAEAVQILARAHQGLVWTRQRQVNQLRNALREFYPGALSAFDDLDAADTVAILERAPTPERGRALSQAKIISALRQGGRERNLEAKAAQIQAQLRLPQLEAPAMLAGAYGHSVAATVAVIKQLNLQIAALEQELAASFEMHPDAEIYLSLPGLGLVLGARAMAEFGDDRTRFLNPKARKSYAGTAPITKASGTRKVVLARVARNRRLADACYLWAFSALTRSEGARHRYDVLRGRGQTHHQALRALANRLVGILHGCLTNHQAYSEHLAWPTQVEVAA

SEQ ID NO: 87469 - protein, 353 aa, unidentified
MNATTVAVDVAKNVFELAGADANWKVIGNARLTRAQFERWFDNRNVELVIMEACGSAHHWARRLQGRGIEVRLLPAQYVRAYVKRNKTDAADARALLEAARASDMKAVGIKSVEQQGLQALHRTRSAWKATRTQRINALRGFCREFGIVVPEGAPKGLERIAQVLADESSALPALLRGAMRVMLEEIRLLEARMGELERELAEIATASAPCQRLLSVPGIGLITSTAMVGAVADPKSFASGRHYASFLGLTPREHSSGDRRVLGGISKRGDRYLRTLLTHGARSVLRAATVARRCGRPLSRLQLWALEVQARTNHNKAACALANKLARIAWAVWVKQEDYRSSPAVNPAATPI

SEQ ID NO: 87470 - protein, 380 aa, unidentified
MLYVGLDVHQKRSSMCILNDDGKVVKQELIKGPWPGVIDRLKRIDEPFRVCYEASCGYGHLHDRIAPLPRASQVSVAHPGQLRLIFKSKKKYDRIDANKIAKLLYLDEVPAVHVPNIDVRGWRKLIEFRQTLLRRRVALKNQVRAILRGEGLTAPRGLWGKKGMTWLGQVELPAGSKLALDLAAEDIAQVNEKMKRVEKELAKIAQKHAGVQLLMTIRGVGIRTAEAFCAYVDDVRRFARTHQVGSYFGLVPCQDSSAGKDRFGHITRDGPPTVRKLLCEATWMGIRHNPQLREFFERVMNDDPDRKKIALVATAHYLCRIMAAMLRSGEVWRDPRKQEPQQEQKQEQKQEQEQEQQDGLRPAVEGAPPRKTPRQKAVVF

SEQ ID NO: 87471 - protein, 390 aa, unidentified
MTTAATEGTTSSTNGGILHLAFELGRKKWKLGFTIGLGQKARKKNVKGGDTAAVLHETAAAKRRFGLPAEARVVSCYEAGPEGFWLHRWLLSIGVENVVVDSASIEVDRRKRRAKSDGLDVEALLKLLCRHTMGEPKVWGVVRVPPPQIEDLRQLHRELATLTEERTRIRNRMRGLLAVHGASIRRWSTVREEVASLRLWDGSALGDGLRQRLEREIERLEIVQRQLRSIKHEMEAELQAAAEPGSALAMMQRLVSLRGIGTQEAWIMVVELFAWRGFRNRREVGGCTGLTPTLYQSGNSSHEQGIDKAGNVWLRRVAIQLAWSWVRWQPHSELTRWFNEKFARAGRRQRRVGIVAVARKLTIALWRYAFGAPLPDAVTGQVEEYVLKVA

SEQ ID NO: 87472 - protein, 405 aa, unidentified
MKNVTDLRQKVKGQKRMELERATWILGIDVGKESLSCALLLKDETFRCRFDVEASLSGFQMILEKVKTETKGDGAVVFALEPTGHYWMVLGQFFEDHNQSYVLVHPLVVARSREVKQLTRGKTDALDARLIAELACRGAVTRTQIPEDDWATIRFFAREYMDREKEIAREKNRMMSYLETALPGFLEVFPRPLGMNSRACLRVLANFREVLQGDIVQFESQVRKHITGKRLMTSRVRRLFDMLQRGDALGLRAGRKTLFWRIINGLDRLELYEKQQDMASNALISLYEQCEFKPYLDSVWGTSPLTNSLVLGFMGDPTSYDTPASLIKMAGCDPVPNESGKFKGKATISHRGRNLLRKAGDRISFLLEKRNTVFQNFIHHLTVRPKNKLTKRQARIACINKYLVT

SEQ ID NO: 87473 - protein, 342 aa, unidentified
MGYFAGLDVSLEETAICIVDEAGHIVREARSASEPDALVAFFGACGLEMERVGLEACSLTAWLHAGLTETGLAAICIETRQAKAAMGAMPNKTDRNDARGIAQIMRTGWYRAVHVKSPSCRSWRALLTARRMLVNKRRDVENGVRALLREAGLKVGTPSRRDFPARVRELTGDNPVLAELGQSLLSVIEVIDKEVVRLTRRALDEVKAEPTCRRLMTVPGIGPLTALAFRATIDQPGRFRKSRDVGAHLGLTPRRYQSGQTDVQGRISRCGDELARTALYEAAHSLLIRSSKWSALRAWGLSVAKRRGMARARVAVARKLAVILHRMWADGSEFRWGKQAVA

SEQ ID NO: 87474 - protein, 337 aa, unidentified
MEYFAGLDVSMAETHVCVMTRNGAVVHQAKVPSTPADIAAELAQVPTCRRVLFETGRMAPMLYHGLSQLGLPVVCVESRQAYQALKSLATHKTDRNDARGLAHLARTGFFKPVHVKSLPAHAVRSLIIARKKLVGQRVTLENQIRGLAVVFGVRLPRALSPAFIKQALRASEGIPGLSAAMRGLIAARAAVFAAIVAIDGDIRRMVRASDACRRLMSIPGVGQLTALAFTAAVDDPGRFRRSRDIGAYLGLVPRRYQSGEVDYTGGISKCGDRRLRTLLYEAANVMLTRYKGPLKLKDWAFAIAKRSTMRKARIALARRLAIIMHAMLRHGTEFKPA

SEQ ID NO: 87475 - protein, 412 aa, unidentified
MPEEKPVELRVSVDVGYRRHSVAMGLSSGEVLEEFEIEHRLEGFQEFFSRIEKHNLQQGYSVAVAMEGYNGYARPLDSMVRQRGYRLYNINNLKLARFKEIFPGSAKSVRIDARKGLELFQLSDHLPLAKEVLQEVSGTPHENEVLKRLTRRRRRLVNERVRVVNNLQADLQAVCPGLLEITSEASNQWFLNFLLSADTLPQLARLRKATLLKIPAVGRKYASLIEGWQKRAHFGAEVEWVSEMIQEDAQRCLDLGDKIKALETKIKQVAKDSKIAKILLSIPGFGAVCTSELAGEIGTIERFSKEGSLALYLGMSTLDNSSGKYQGSKAPKHVNTRAKAAMMIALDRHRKHVPESQRYYEKKRSEGKKHNQTIRALGRHLCRIIYKLLKAEREYQIRPEKRNTKTKVRSRS

SEQ ID NO: 87476 - protein, 387 aa, unidentified
MISVGIDVGKRSHEVCLLDTDGHQIGRFFRLQHSRQGMASLIELLRQQSEPCIIALEATGHYWLALYHHLLLEGFTVVTVNPLQSHAYRRSTIRKVKSDRRDAWIIADLLRIGRVRPGYVPGPDIQPLRDLARFRMELVDQVGDAKRRILVVLDKVFPEYQSLFSSVFIATSRELLKRAATAEEFAALDLKEIAQVIKKASHGRLGMERAERLQQTARTSLGLPYLRDAATVELRCLLSQVEFLEIQVEAIEAAIERLFCQVTQHLTSIKGIGTISAATIYAEIGDIHRFPTLESLVAYAGIDPTIFSSGEFEGTQRHISKRGSPYLRKALWMAATGARRWNPDLDAFFTKKLREGKSYGVAMGALCRKLLGRIYIVLQENRPYEVR

SEQ ID NO: 87477 - protein, 238 aa, unidentified
MQLHSIGIDLGKTTFHLCGAGAAGKVRVKKKFTQKLLLAYTANLQTSLIGLEACSGAHFLGRALRKQGHDVRLIAAQFVKPFVKSNKNDFVDAEAIAEAVDRKNMRFVPIKPDDQLDLPVVATAIVAAIGNGAAFRKGREFAAWLGIVPRQYSTGGKAKLLGISKRGNVYLRKILIHGARAAVLRIKRDRVPIGAWLDRLDARAHKNVVVVAMANNLARIAWAVLSSGNEYRPTAVPA

SEQ ID NO: 87478 - protein, 424 aa, unidentified
MNLTQNDRLNQVTADTLVVGVDIGSETHFARCFDWRGYEFSKRAFRFSNTQVGFLTFIRWVEEMMEKTEKTKVIVGCEPTGCYWLTFQKFLTDRDILLVTVNPYSVKKCKELDDNSPEKSDLKDPKTIAGLVREGRYGTSYLPEGVYAEIREAQVCRDQIMKQHVRLSNQIQGWLQKYFPEYLECYKDFDTASGMMVLEHAPLPKDIIKLGAGGINELWRNAKLRAAGIKRAKTLVEAAQGSVGLSGGEAARLEIWFLINDYQTKTKQLERLDEFLAEEIMKVPHVEKLLAIKGVGLSTVIGFVADVGDIGRFTDPKQVQKLAGLEITKASSGKKKGQPCISKRGRRRLRRTMYESARSLINWNEAFSEVFMYYRYRARNPLGGMQAKIAVACKAIRVFYTILKTGCEFDAEKLCRDIIRPEVA

SEQ ID NO: 87479 - protein, 391 aa, unidentified
MFYVGIDIAKKNHEASIIDSSGKLLDKSISFSNSQAGCDKLISFFGKLKANTSNTIIGMEATGHYWVSLYSYLIDLGFTVYVINPIQSDAFRKMYIRQTKNDSKDSFIIAQIMRFGEFSTTSLVDEDIMALRQLSRYRLALVDECSDWKRKCIALLDQVFPEYSKLFSNTFGVTSKELLSKYPTPEDMLSVDTNSLAELLSKASKGRFGILKANEIQESASNTFGVGFAKDAFAFQIKQIIAQINFIEEQLKELETEISNLLHKTNTIITTITGIGDVLGAIIIGEIGDISRFEKASQLVAYAGLDVAVRQSGDFEGTKTKISKRGSPYLRRAIWLAATVAAFKDPALSVYYQSLRARGKHHLTAIGAVARKMCNIIFAVLRDNKPYVSHI

SEQ ID NO: 87480 - protein, 387 aa, unidentified
MTVLTVTNLPAATHGETVRCLFAIELSKMSWVIAFNTPLSEKISRRTLTGCKWKRLLELIEEVRTRVSRETGRAVEVISCYEAGYDGFWLHRQLEAHGIRNYVIDPASLQVDRRARRVKTDRIDTERLLRSLMAYLRGEPKVWSVVRVPSVAEEDARRLHRERDRLVSERVQHVNRIKGLCALQGIYDYNPLRPQAMAGLEQLRTTQGGALPPRLKSEIKRELQRLELVVEMIATLEAERNAIVEDEASTHVNAKKIQNLYKLKAIGPEFAAVLVGEIFHRDFNNRRQLASYVGFAPSPFQSGNVAHDQGISKAGNRKGRTTGIELAWLWLRYQPDSDLSVWFRTRVGTTKGRIRRIAIVALARKLLVALWRYLETGVVPRGAVLKG

SEQ ID NO: 87481 - protein, 324 aa, unidentified
MAEPALGIDVSKDTLDVNIIVRGKPRGRRFANASEGWRALIAWLGQHQLERVHACLEATGRYSLGVALALHEAGHIVSLVNPAQIKDLSRTKLGRNKTDKVDAALIRDFAALFVPPAWSPPSPALRRLCELRTMRAGFLASRVEWQNRAGSGVADRTASELARTTVAHFEVQIAAVDKAIAETIDGDDDLRTKRDLLLSIDGVGETLAAVILTELPAPEVLSRSTQAVAYAGLNPRQHQSGSSINHPTRISKIGNATLRTALFMPALSAMRCNTVIAAVVARLRTQGRLKGKQIVVAAMRKLLVLCFGVLKTGKPFDPAIAMPR

SEQ ID NO: 87482 - protein, 343 aa, unidentified
MKLIRVGVDLAKSVFQVHGVDRKEKAVWRRRLTRENWVKVLLETIEPGCEIGMESCGSAHHWARKLQEKGFRVKLIAPQFVKPYVKSNKNDANDAEAICEAMSRPGMRFVAVKSVEQQDIQAVHRIRSGLIEQRTAKANQIRGLVGEYGLIAPKQLSHLRVALPLWLEDAQNGLTDRFRRLLNALWGDLLALDARVKELDREIVLIAQSNPLAKRLEQLRGIGPISATALAAAVGDGTQFANGRQMSAALGLTPRQHSSGGKERLLGISKRGDAYLRTLLIHGARSVVRTAEGKTDRLSLWVTRLAQRRHPNVAAVALANKTARMAWAMLKNGTDYEPNRMVA

SEQ ID NO: 87483 - protein, 348 aa, unidentified
MIWIGIDAHKRVHQALALSVDGVLGQRTIANTAVGWTELLRWASTWPERIWAVEGSGSLGRGVAQFLAVRGERVHEVNPRWTAQRRRGLRRPGKSDLLDAQAVARLLREEGESLPLVQAETVASASLQLWSRLRDDLVLDMTRLRNRLHALLLLCDPEYKHVIRSLRSRIGIQAARRYTAPGAGQLDRVREQAVRQVAEQIALLMDQERELRTNIELMVREHFYPLLEIDGVQPIVAAGLIAELGLPRPGVGVPQIAVLAGVAPVEASSAGAIKHRLSRGGNRHLNMLLYLIALAQERAYAPAQVYMARRQQEGRTAREARRALKRHLVRRIWHQWQACWPTASPAAS

SEQ ID NO: 87484 - protein, 455 aa, unidentified
MPRKRTRGTSSGRLSTINPDAAGIDIGSTFHVVAVPSDRDDRPVRTFRTFSSDLHQLADWLTEVGITTVAMESTGVYWIPVFEILDARGFEVLLVNARDVKHVPGRKSDVNDAQWLQQLHQHGLLRGSFRPRDSVVRLRAYLRHRERLVDYAAAHIQHMQKALMQMNVQLHHVVTDITGITGMRIIRAIVAGNHAPEQLAEFRDRRCHASEATIREALIGNYRPEHVFALRQALELYDVHQAKVAECDVAIEAVLGELNAPRVTPDAPLPPVRHAKGQNEPAFDVRAALYTLLGADLSQIHGFGPYTVLRLVAECGDDMTKWPTAKHFTSWLSLAPGNKISGGRLLSSKTRRSSNRATALLRIAAVNIGKTQTALGAFYRRLAARTGKAKAVTATARKLAILFYNALRFGMRYVDPGVSAYEDRYRQRVIHNLQRRAKSLGFTLVAASPATEGVS

SEQ ID NO: 87485 - protein, 315 aa, unidentified
MTSTRVFVGIDVSKDRLDVALRPSAERWAVANDDAGIATLVDRLRALTPALIVLEATGGLELPLTGALAAGLPVVVVNPRQVRDFAKATGQLAKTDALDAAVLAQFAEAVRPALRPLPDAAMQELSALLARRRQLLEMRTAEQNRLGMALPPVRKGIRAHIAWLERHLAQTDDDLARAIRESPVWRERDDLLRSTPGVGPVLARTLLASLPELGTLNRKQIAALVGVAPLNRDSGTLRGRRSVWGGRAHVRAALYMSALAATRHNPIIRTFYKRLCAAGKAKKVALTACMHKLLLILNAMVKHRTPWEDKFAHGA

SEQ ID NO: 87486 - protein, 309 aa, unidentified
MEKVYVGIDISKDSLDVAVYASDKQWRFSNDHAGIVRLCKMLGKLEPALVVFEATGGYEMPLHLSLDKAGLPAALVNARQIRDFARSTGKLAKTDSLDARVISHFAYAIQPTPHSVPETQELKIVQARRIQLLEMITAEKNRLKGAPKVLKARIEAHIAWLNKELAETDRELKGMIEKNPVWREKDSLLQTTPGVGPTLSATLIAQLPELGTLNRRQIAALVGVAPLNRDSGIFHGRRTVWGGRAHVRAVLYMATLVATRFNPVIRGFYLRLCSSGKRKKVALTACMRKLLTILNAMIKHNTPWSYAAC

SEQ ID NO: 87487 - protein, 408 aa, unidentified
MGRAAEVVAPSSSIRTDGGYPVAQVNDLSRSLTAFDPISTLVVVVEMSKASWLVSGAVPGVERQPLKKLEPDATALLRLIERWRNEAVRAGRPISRIALAYEAGRDGFWLARWLIARGIEAHVIHSASVAVSRERKRAKTDRLDAAMLMRVFLGWLRGERGHCGMVAIPTMEEEDARRPGRERESLVNERSRITNRMKSALARLGVRGFKPHLRKAPERLAGLRTAEGTGLPMNIIEEFRRDMARLALVREQISSIEKTRAERLERAPDTGPHAMVRLLARVIGIGIETADMLVREILSRKLRDRRAVARYAGLTGSPDESGLKRREKGLAKAGNARVRRGLIQLAWRFLVFQKDSALARWYRTRTEGPSGARKTTMIVALARKLLIALWRLVTTGEVPDGVKLRPAL

SEQ ID NO: 87488 - protein, 316 aa, unidentified
MMTQIYCGVDACKARLDAYVSTSPTGGVSESFENNAEGIEALRLFACKHGAEMVVMESSGSAERLAYALLWQAGMSCALVNPRSVYHYGQSMGFLEKTDRIDAKIIARFAGAKGVVPMPPPSPAQQRLTAYYARLRQVTSDIVKQKQRLHTAYEDFAQEGIKEVIRLLKAQSDKLSAEIASMIDDDPLWQALATEFTLYKGVASRTVAVLMADLRELGTLSNRAISKLVGVAPLADDSGKRQGRRSIRGGRASVRNVLFLIAGHLARFEPDFIAFKLRLEQKGKPKMQIRIALAHKLLVRLNAKARDIRVLHENAA

SEQ ID NO: 87489 - protein, 396 aa, unidentified
MSTVGIDIGGRTHVVARCRTGESRADREILRVDQSRAGFSRLDAWLGRQPDPVTLVTMESSGHYWMPLASHLGRQGLPVAVVNPLAAKYFARSRLGRTKSDPADARSLAEMAMRDAPVVRDPFAGLELRQAARFAMTLVSEQAKVCQRLHRLVELGFPELGELFEDPTCRTAREVLRIAPTAATARRRRTTTLADANKGPGRRRLGEARAERLHDLATDSIAVPELEAEVTFEIALLLDQHDLLERQIVAADAHVAALLDGELARRLQTIPGVGPSTCAALMAEIGDIGRFETFDQLLAYAGIHPAERSSGRKGASPETSWHMSKVGNAHLRAAAYRMAVVGTVHNPIIAAHYARKREAGKSKMNALGHCMRKALSIVWGVWRNGQDFDPVWGSRT

SEQ ID NO: 87490 - protein, 456 aa, unidentified
MSKLSKSKVGLVEARTFAGMSKVNPNAAGVDIGAHEIMVCMMGEADSQLVRAFGSYTADLQAIGGWLKEHGVETVAMESTGVYWIPLFEELERQGFRCHLISSRSLRRVPGRKSDVLDCQWIQTLHSYGLLESSFRPEADLVALRTLLRHRAQLIQHRSPHILHMQKAMLQMNIQLSQALSDVTGTTGQAIIRAIVNGERDSHKLAELRNYRCKKDDEEIVRALTGTWREEHLFILKQSLELYDFYTQQIETCDTEVERMYALIRAEQEEGELAPLPSSKRHSHSKNAPKNVEVRKHLKRICGVDLTAVHGVSASLAQTIVMEVGTDMSKFPNDKHFSSWLGLAPKNDISGGKVLQSRTLKTHNRAGQAFRRAAGSVMRADCAFGAFYRRQKARLGPAQAAVATAHLIARVVYRMLKYKVEYEPLSVAEYERRYREQQLKYLEKKAAKFGLQLVPT

SEQ ID NO: 87491 - protein, 387 aa, unidentified
MPQPNDLSRSLVALDQNSTIIAVIEMSQSSWLVAGVLPGIERQPCKKLEPSPERLLAVLHRWRDEAVRAGRTITRIAVAFEAGRDGFWLARWLEARGVEVHVIHPSSVAVSREHRRAKTDRLDTELLKRSFLGWLRGERGHCSMARVPTMLEEDAKRPNRERECLVGERTRIVNRMKGTLARLGIRTFKPTLRKAAERLATLHTPEGSPLPPNVSAELQHDMARLSLLISQIREIENARQERLEQEPETGPHAMVRLLARIVGVGIETADMLVNEVLSRRMRDRKAVARYAGLTGSPDESGTKRREQGLARAGNARVRRGMIQLAWRFLLFQKESALALWYRARTADSRLGTRKTMIVALARKLLIALWRLVTTGETLEGVILRPAG

SEQ ID NO: 87492 - protein, 400 aa, unidentified
MQRTCGLDVHKDTVFCAIYNGKSHSEVKEYSTLTSSIQLMGENLKLEFVDEIAIESTGIYWIPVWNILEEMGFKLILVNPYLIKQMPGRKSDVKDAQWIATLLHKGLIRSSLVPCNQIRELRVYSRKYIKIQQRQTSVLQEMERNLEMCNIRITSYVSNISGKSIMKIIKQIIEGETNPENLVMSIHARIVNKHTRKTITESLTGFITSQHRFLLELSLEEYELLEKQSLNCLTKMNELCEQYYHDEMALLMTIPGISSISAMIVIAETGADMKAFENSGKFTGWTGLRPRNDESAGKYKSTATTKGNRYLRATLVQIAWAASRTKGSYFKEKLNQLALRKSRKKALIAIARKIGVLIWNVLYSKQEYNPQKLIIYEPGKIQAKLNYHQKEFKRLEMLLK

SEQ ID NO: 87493 - protein, 340 aa, unidentified
MKRYLGVDLHRNCFTVCTLGEDGKSEIKKWSIHSLADFAQEVHANDAVAVEATGNARHFCQALKERDCRLVVVNPLQFQVVSRSVKKTDAHDAKALAEFLAKDMLPEVRLKEELPAEMASLLQTRDKLVKLRTVLKNKINNLLSARGILLPKESLSSEKGLEQVLQADVGELAKVELVVLVEQIRHLNQGIAKLEAAIKKEGPKLPGYENLKSIKGIGDIGGSTLLSTIGNINDFANEGKLAAYFGIVPRVANSNETERSGRITKRGNRLGRTTLVQCALIAMRYSPYLANYYARIKAARGTGKAIIALARKFLGIIYKTLKNGWVFEDFPRFVLAPARA

SEQ ID NO: 87494 - protein, 378 aa, unidentified
MKQNSTRRQSPKRAPKQSPKQSARQSKKSCQGALAIGMDLGDRTSRYCVLNECGEVVKEAAVATTKKGLGQVFAALKRSRIAIEVGTHSPWVSRLLKSLGHVVFVANPRQLKLISQSSRKDDRVDARTLARLVRVDPELLRPIQHRSEEMQMDLMTIRVRAALVEARTALVNSARGLAKSVGERLPKCDANSLGSEHLGALPKQLQDALEPLLNQVEALSVRIEKCDRQVEQIARTKYPETKLLQQVSGVGPLIALTFVLTVADKERFQKSRDVGCYLGLRPKRSQSGQSEPELRITKEGDVYLRKLLVQAAQYILGRKGPDTDLKRWGTRLAVGGKRMKKRAVVAVARKLAILLHALWSGGEVYEPLRNNAARQVAA

SEQ ID NO: 87495 - protein, 372 aa, unidentified
MQQSSTLYVGLDVHKESIAVAYVAQDHGAEVVSLGTIGTRQCDIDKLLRHLQSKGQQLVFVYEAGPCGYWLYRYLMKKGYVCWVVAPSLIPKKPGDRVKTDRRDARQLARLMRSGDLTPVYVPAVDDEAIRDLSRAREDTLRDLKAAKLRLKAFLLRHDIRYTGRANWSPAHLRWLSEVVCPTPAQQIVFQEYVQTVTEQTARLQRLEHELRDQVKTWRFQPVVEALQALRGVQFTVAVTTVAELGDLTRFTNPRQLMNYLGLTPSEYSSGPRRQQGSITKTGNTHARRALVEGAWAYRYPAKVSRHLQLRLEKLPAAIQAISWKAQVRLCKRYRQLMAKGKNANQVVVAIARELSAFMWAIAKQVVVPPNA

SEQ ID NO: 87496 - protein, 376 aa, unidentified
MMKVRCLGLDVHAETIAVALAEAEGEVRCLGIIPNRQEAIRKLIKKLGPAEQLRACYEAGPTGYVLYWQLTALGVKCEVVAPTLVPVKAGDRVKTDRRDARKLAQSYRAGDLTPVWVPEAATEALRDLVRAREAAKQDQLRARHRLSKFLLRQGQRPPQAGKAWTAKYMAWVRQLQFVQPAQQDTLEDYLHEVEHMGERVARLENKIAVAVKLAPPEMREVIAGLQALRGIAAISAVTIASELGSISRFATARQLMAYSGVVSREDSSGEQQRRGAITKTGNAHVRRVVVEAAWAYRHRPSIGATLRQRQQAVSQPIQEIAWKAQQRLHQRYRRLAAKGKDHRKIITAVGRELLGFIWAIGTQIERAPRPQLAAAA

SEQ ID NO: 87497 - protein, 311 aa, unidentified
MSEFIGIDVSKARLDVSAHGGSSFAVENTEADIGRLCEQLKALAPELVVMEASGGYERLCVAALAAAGLPVALVNPRQVREFARATGVLAKTDRLDARVLAHFAAVVRPPVRPLPDAQHQVLEELLARRRQMVAALVAEKNRLGLARTRLVKRTVREVVSTYERLLELIDRELDELIKASPLWREKEDLLRSFKGIGPVSARTLLAELPELGLLNRKQIAALVGVAPIARESGSWRGRRSIWGGRGQVRAILYMATVTAMRANAQIRVFYLRLRQAGKPAKVALVACMRKLLTILNAMVRTQTRWQPPSAA

SEQ ID NO: 87498 - protein, 339 aa, unidentified
MEYKYFIGIDVSKNTLDISLLVSELGSAKHLQVSNSDNGILTMLKWLQELENYSVKESLFCLEHTGMYNYPLLQFFSKQSANVWVENPIQIKKSLGLQRGKNDKVDALRIAQYAQRAKDRVKLWHPSREVVDKLRHLSALRERLVQTKLKLYTPVDELKKVGNTPMAKVLEKSMSKTMKGLEKDLKAIEAQMKDVIDRDDNLRNLYALVTSVIGIGFVTAVNMIVYTNEFKLFSNHRQFACYSGIAPFEYRSGTSIRGRTRVSHMANKKMKRQLHMASLTGIKFDEALKQYYERKVSSGKNKMSVLNAVRNKLVARVFAVVNRGIPYKKTNYQNQLVLS

SEQ ID NO: 87499 - protein, 434 aa, unidentified
MEEVTDEPLYRDRVCGIDIGKAGMVATIRVPSDKDPSRRAAETRSFGTTKREVLALADWLRCWQVPAVVMEATGDYWKGPFYRLEAEGLECVLADAKQAKNLPGRPKRDPSDSRWLAACFERGAVTACFVATPEFRIIRLHTRYRRDLTEERTREKQRAEKLLESAALKISAVLTDLHGVTGRDIMDHLIAGDRDPKALAQLARARARRKISQLEEALEGAEFITAEHAALLTVMLERIDRVTEEIARLTEVTGQLLAPYEEQLAQAESMPGWGRRAAQDAVAETGAGMTRFRTGGHLSSWAGKTPLDNQSGKRRGQSKSKKGNRYLAAITGETAAAVTKTQTREGARYRRLARRRGKAKALVATGNTQLKASQLLADPGMRYQDLGADYYERQRDIRRQISHHVGKLGALGFEVTLCRRPEPDPDETGTTQAA

SEQ ID NO: 87500 - protein, 392 aa, unidentified
MSQHRHFDASRSLTALEQDSTIIAVIEMSQTKWLVAALIPGVERQPLKKFDAHEETLLNLLHRWRSEAGQAGRNIKRIVVAYEAGRDGFWLARWLRARDVEVYVIHPTSIAVSREHRRAKTDRLDTELLMRVFLGWLRGETRHCSMVAIPTIEEEDARRPNRERRNLVTEQTRIINQMKAIFTRFGIRSLRPTMRKVAEKLEDLRTAEGTPLPQNTLAELRRHLARLRVVRDQIRAVEQERLRKLAVAPAAEKKSPHAMVRLIARVLGVGVETADMLVNEIFSRHWRDRKAVARYAGLTGSPDESGSRRRERGLARAGNVRVRSGMIQLAWRFVRFQKTSALVQWFAARTIDGRASTRKTMIVALARKLLIALWRLVTSGELPQGVVLRPAS

SEQ ID NO: 87501 - protein, 337 aa, unidentified
MRRTTVLAIDLAKKNFQIHGINEKFQKTAKKSLKRDELFQTVINLKPEKVAFEACGSAHYWGRRFQEAGIKIMMIPAQFVKPYVKTNKSDAADAEAIAHAAMNPGTRTVPLKSDWHLDLQMLHREREQLVANRTMLVNQLRAFLYERGKIAKLGKLNAIKLARDTLLEDGFSGEFRSCIERMLEQYNYFEGMIKRNEERIQATADQNPDIQRLLDVPGIGIMTATALAAAIPDKTEFKSGRHLAAWIGLVPKHSGTGGKTRILSTSKRGNSYLRRLFIQGAGALLIWVKNKSDQVSKWARELKDKRGSNKAKVALANKTARIAYAVFCKGADYKVAA

SEQ ID NO: 87502 - protein, 349 aa, unidentified
MILVGCDLHTRKQQVALLNTDTGELWDQELSHVGDDVERFYAALSPLVTVGIESTGYSLWFHALLQRLGHTLLVGEAAKIRAMVVRKIKTDRRDARHLRDLLKDNRFPVVWIPDPTTRDLRALVKHRLRLVRIRTMVKNGLHAIALNQRLALGPSLWSRQGLAQLQALVLLPHTRRRREDSLELLHWLNRHIDELDLHVATAAAADPAARRLMTHPGVGPLTALTTVLVLGPVGRFPSSKHVVSYIGLAPAISASADKYRLGHISKQGSALLRWVLGQAAPLATRGDAALKRIYFAVLRRRGRPKAKVALARRLLIRLYIMLRDQIDYDEFCRRGRTRREGLELARTPV

SEQ ID NO: 87503 - protein, 340 aa, unidentified
MEKVSKCYLGMDVSKLYFDVSLMHVVDHQSGTVEYNRFDNTAEGMKTFKKYLQHHKVPFNSNTLAVIENTGVYHRLIWGFCTVHNVPLYIGNALHIKNSFGLVRGKNDKIDSQRLCRYAYKHEDEIKITQALNPGLLKLKDLMTARTNLVKHQSATKSYIKELGQFQDKSIQKLMEKSHRAALKGLATSIEQLEKDIEKALKEDSSMYTNYTLLKTVPGVGHITAVYMLCWTGNFSGGISGKQLACYAGVVPFSERSGSSIRGKNKVHKMANKDLKKLLHLCALSAIRCYPEFQDYYQRKVSEGKHPMGVLNAIRNKIALRAAAVIREQKEYVNNYKKAA

SEQ ID NO: 87504 - protein, 414 aa, unidentified
MEVVYRRCAGLDIHKQSISACVLIFIPGEEQPEIQKRTFGTFTAELVELKDWLQSCGVTHVVMESTGVYWIPLWSLLEGCFRLLLVNPRHFRAMPGRKTDQKDCQWLAQLLQYGLVRGSFVPPQEIRELRELTRYRVKLLGQRNQMHNRIEKLLQQANVKLSSVASDILGVTGRRILVALVGGNTDAESLAECARGTLRRKKAELAQALTSTLTEHQRFLLREFLEDLEFVEAKMVHIEETIRARLVPHEAILNRLKTIPGVNELTAATLVAELGVEMQAFPDARHLASWAGLCPGDCESAGKRKNTRTRQGNPHVRRVLCQASWAAAHTKHTYLAALFYRIASKGGRKKALIAVARHLIVIAYHLIRAPLVYRDLGANYFDTLHGERTKQRLVRRLEDLGHEVILNPKRPATT

SEQ ID NO: 87505 - protein, 391 aa, unidentified
MSMYFVGIDISKYKHDCCIISAADQQIVSKFTVKNNKDGFEHLLTTLNSLSNPEDIKIGFESTAHYALNLELFLENAHHNFMEVNPVLIKEYKKSTTLRRTKTDSVDCESIARWLMTVEYKPHSKGFYHSYSLKSLTRLRDRLIRQRSFYLVKITNVLDHTFPEFKPFFNERLSKTAIYLLENYGSAEKMAHMNSASYDKLRCASRGKFSIQQFLHLKELAANTVGVNNSIFDIELNSLLTLYNSLCKEIKTLEAEITKLIEEVHPHYMSIPGIGPISAAVIYAEYGDISNFSNPGQMLAFAGIEPGINDSGTESHGGRMVKHGSSQLRYVLLNACLPLIRFDITFATYYAKKRAEGKKHRVAITHVAKKLIRVIYALERQDVDFNVQKLR

SEQ ID NO: 87506 - protein, 411 aa, unidentified
MTDQRQWYAGVDWASESHHVFLTDRDGRKIGERLFKHGGEGLAEMAAWLMATSGAVEPSQILVAIEVPHGPVVETLIERGFKVHALNPKQMDRFRDRFTLSGAKDDSRDAEVMASALRTDPHCFRLLALADPTIIELREWSRITEDLGAERNRLTNRLREQLWRYFPAVLELEDDLGAPWLLDLCEIVPTPDKAVRVRAATIAKLLKRNRIRRFDAAHVLDVLRRPPVVVAAGTTEAASAHVAALIARIRFVNRQLKEAHGRLDTLTARLIPAEQAEPGQKKQHDVEILASSPGVGRIILATLLAEAFDALQRRDYAALRSLTGVAPVTKRSGKSCIVVRRQACNDRLANAAYHWARVAVQIDPTSRAKYAVLRSRGHSHGRALRSVADRLLNITCAMLKTGTLFNPSMAA

SEQ ID NO: 87507 - protein, 368 aa, unidentified
MENHNIAWVGMDTDTKNNQVAVYRGWDKEPAAEWIAGMDRKGMQRLIERLKKEEGEVRCVYEAGPCGYELYRRLRKAGIHCDVIAPSLTPRKPGDRVKTNRRDARNLGRLYRAGELTTIQVPDEKQEAVRDLVRAREDVREDLTRRQHRLRRFLSRQGLVWTGKTAWTQKHWRWIEHITFEDANLQTVLEESIRAVQQSQEQLKAFDARVEENAQKPEYEKKVARYKTMRGVRTTTAMTIIAEAWDLRRYPTAPEFMGSTGLVPGEHSTGDHQHRGRITKAGNAHLRRVLVEAAWQYRHRSMAGPSIKQRRQGQPAAVVAIVERADQRLNRKFRRLVDRYNKKPAVAAVAVARELAGFIWAVGQLPDE

SEQ ID NO: 87508 - protein, 342 aa, unidentified
MEHTTIAVDLAKSVFQVAVSHRPGHLDEERRLSRDRLVPFFAQRPPATIVLEACGSAHYWARQLQPFGHTVRLLPPHDVRPYVRRNKTDRTDAKGLLEANRNEEIHPVPVKSIEHQAIASLHRLRSTWLATRTARLNTVRGLLREFGIFIPIGAQRVVPHVRTLLVEPTPVPVLLHTTLAAACDEIEILEMNMRAVERQLGALAAEMADVTLLQTVPGVGVITATALVALVADIRRFPSGRHFASFLGLTPKEDSSGSRRRLGAISKQGDVYVRMLLTHGARSVVWHAKTAARPTSLQQWAVQAEQRRGRNVAAVAVANKLARIVWAVWAQHRPFAADHRPA

SEQ ID NO: 87509 - protein, 411 aa, unidentified
MRRVIGMDIHRTFAEVVFWDAGRLQPAGRIDMTRSGLEGFARSLTQQDEVVIEATGNAMAVVRVLSPYVARVIVANPMQVKAIAHAHVKTDKIDAGVLASLRAADFLPEVWLPDPETERMRRLVARRDQVVRHRTRIKNEVHAILHAHLVPPCPHADLFGRLGRIWLGAQALPDDERAAIDRHLRELDRLGEDLDGLEREIAHAAIGNPAVRRLLTITGVNMTVAAGLLAAIGDISRFADPQKLVSYVGLNPRVHQSGLGFAQYGRISKQGRAHARAMLVEAAWAASKAPGPLRAFFLRIRARRGHQIAAVAVARKLAVLCWHLLTKNEDYHWARPALVANKIRGMELQSGQPARKGNQRGATYAYNVKELRDREVDVARQAERAYEQFVSQRQQRSPAKRRTGAATEARQ

SEQ ID NO: 87510 - protein, 476 aa, unidentified
MVKSVGIDLAGTGEHKVRCLDERAQLCDGFGFQTTPDGLAKLEERVFSDGSNPVIIFEPTGLAWVLMAVYLRARHPDCRLVRVQSHKVAALRKYLRRSSKSDRIDALTLAKMPFIDSERLEELYLPPAKIYAIQRLARQRKRLESEIATRKKRIGSILSGYLPGLREAFADPWSPQARVFLSTHLNPMATIREGESVLNTFLAKAKPRGKRDKVECHRVYLSCQNAAALCASASSAGVVNDDFFAYLQEEIAREIRLMEFAETESEAIAQHIERLYEELHTSDNLRTIPGVGQHTAPIFLATVGNPSRFRSQSAFANYTGVVPAARQSSDTEAKGLRMTKAGPAIMKWALYQASQIGRRCDPQLAWVYYRQVVYHGKNHKQAMGAVMSHMGARILTVLREDRPYELRDIDGKLISREEAWKLIQSNYKVPEEIKRERRRKTTAAMLKPRIKNQEMAAHRTNEAATAPQPVSLSAIS

SEQ ID NO: 87511 - protein, 456 aa, unidentified
MQNYYLGGDVSKGYADFVILDAHKQIVEPNFQLDDTFDGHCKLYEILSRFLQEHPDGMLFAAVESTGGYENNWLHTLMRFQATLNMKSARLNPFGVNANSKASLRRVITDKISARDVAEYMISHPEKVSYQQEDYWGSLRKLWGFFNMLTKQKTQLFNQLESLLYSANPEIMAYCKKKSPLWLLEVLRRYPTAQKLSEAIPESLARIPHVSAVRAQELIEKAKRSVASRSDGISEELIVDTVEQIIHLKTAIQAQEKKMSDLCSLPEVALLMTFQGIGIASAIGLMIEIQALERFASVKKLASFFGLHPVFKISGDNMGGYHMSKQGRKNPRRILFMVTMASISKNTHIRGIYEEHTKKGMKGMAAVGLCMHKILRIIYGMLKHNQPYEPEIDVNNREKMVQKQMAIIKDKNRRYQSFDDKAPISRRQYKKRTERKVSHSDNFTNCGIIVSTPSPN

SEQ ID NO: 87512 - protein, 356 aa, unidentified
MSSEVKYIGMDVHKEAIVIAVRDSRGHVVMESIVETKASSILQFIRGLQGELHVTWEEGTWAAWLYDLLKPHVHRVLVCNPRRNALLKEGSKNDKVDARKLADLLRTGMLRPVYHGEHGLRTLRELARTYQTLSQDLNRVMNRLKALYRGWGIACGGTQVYAPRYRDEWLGKIEHAGVRRRAELLYQQLDGLQALRRTLRSELLAESRKHKASKLLRQIPSIGPIRAARLVALMQTPHRFRSKRQLWTYSGLGIETHASAQYRFVRGELQRAKKPQQIRGLNRNHNHEMKDIFKGAANRASCGVGPLHDFYVALLDKGMKPEMARLTLARKIAAIALTLWKKEERFNAEHLKTQAA

SEQ ID NO: 87513 - protein, 418 aa, unidentified
MKSMEITAVGIDVSKSKSTVAIRRPGGVIVARPFDISHSNHDLEKLVSILKTTGGDIRVVMEHTSNYWKPIALTLKEAGFYVSVVNAMLIHDFSDNSIRKLKTDRADSLKIANYALTFWNELPPFNDEDETRLVLREQSRMYERLASTATSLRNGLIALADQTFPSIDQAFGHAIKNADGHEKWVDFFSIYWHRDCVLRLSIEKFTESYRKWCLRRNYKFRTNTAHKLYALAQDAVPTLPENNGTKALVLQACKSLNAVCEAKQSTQEEMNRLASLLPEYEVVMQMEGTGPITGPALMAEIGDVRRFKNKKALVAFAGIDAPPFQSGNFESKSRHVSKRGSPHLRRAVFLVANIILTLSHKDNSVFCFMDKKRAEGKHYYVYTIAGSAKFLRIYYARVTEYLRTQEIPVAASCLNGNS

SEQ ID NO: 87514 - protein, 400 aa, unidentified
MIGLDPHKGSHTAHAVNQREERLGELRVRSGPKQLERLLVWAAQFPERTWAIENATGLGYLLAQQLIAAGERVLDVQPKLAARVRLLATESTDKNDAHDAQSVAIAALRAKTPREVGAEDHATVMKLWSKRQRDLSQERNRVACRLHAVLCELIAGGVPDEIYAEKAACLLAGVTATTAVAAARVELAEELVDDLRRLDAQIKASRKRLEEAVVASGTSTTEVFGVGPVVAATVVGITGDIRRFASRDQFAAFNGTAPIEVSSGDRKVWRLRRRGNRSVNHAIHMAAVTQIRHRRSDGRAFYERKLAEGKTGKEALRALKRRISDALYVRMVADARRANAEKAGPGGQAGNDSVASAAGSHPDTPALRPSHSRTRSKATSTTTSARRSGARTPTAARRTA

SEQ ID NO: 87515 - protein, 340 aa, unidentified
MEITTIGLDLAKNVFQVHGVNERGKAVLRRQLKRDQVAPFFANLPPCLIGIEACASAHHWARKLQALGHTVRLMAPQFVKPYVKSNKNDAADAEAICEAVSRPSMRFVPIKNVEQQSVLSLHRVRQGFVKARTAQANQIRGLLGEYGLVVPQGIAYIAQRVPSLIEDAENELPGTFRLLIQRLLDHLKALQAQVDEIEVQIKAWHRASEASQRLEKVPGIGPLTASALVASIGDAKNFDNGRQFAAWLGVVPRQHSSGGKPTLLGMSKRGDAYLRTMLIHGARSVIYRATQKADPDSWLVKLTTRRNKNVAAVAMANKTARTVWALLAHGREFTPDYAAA

SEQ ID NO: 87516 - protein, 385 aa, unidentified
MHQVESECSVLDGVAVFVAIELSKSAWLFAAQASPSGKTSSHRLESGDITGLLALLRRLQARERQTYGGGAVQIVVGYEAGYDGFWLQRRLAAEGITCRVMDPGSLQVNRRARRAKTDRLDAAMLLRALIAWCRGDRAACHMVQVPSVAREDARRTHRERQRLVVERVQHVNRIKGLLATQGINDYQPLRRDRSARLGEVRTKDGHALPPRLRREIERELQRLELVLEQLEAVEAERDRAVAAPAVDDADAAKVALLARLGGIGNELATVLVREGLYRSFTNRKEVAAYAGLTPMPFASGERHREQGISKAGNPLLRKAMLELAWLWLRYQPDSALARWFTDRVGSVRGRIRKITAVALARKLLVALWRYVTAGLMPEGARIKAA

SEQ ID NO: 87517 - protein, 819 aa, unidentified
MQKLSFFIAPLSSSENTSLTSVLSKENICCIARAKKALVRQRKFDVADYTLTALNLMCSPTKSSELTLKSIADAYNKASDNESMTVKCIHKQLQQETTLETVKELCQQLLTLFKSKSLNLKLKENLPADLKALLKRLKVNDIILIDGTEIDLQYSCADNFSCKSKGRPRDDGSLPRPGIKLHVAFSIIKNTFEYIEVTEAVGSERDCVHPERFKNCLIIADRGYISEDLEKRITDSGNLFLIRGKANTAGVITECFDDNGQNITKYIGKTVKAVPEQTGADLTVVSKLTDHKLRVVLRHNQNAKADEQRSVLRTNIPRECLCAKQIFMLYRVRWSIELFNKANKRSNCLQSINSADKNIILTFVLLSLIASLSKTYCGIKAMLKKNIQWISMLKLHKLNTAFSKLFRSLQSLKLSSIYQIFNGVDPLLEILNDRKTAIVSIVKEKKHKRIHTMIINKVAQNVETIIAVDTAKNSFQVLVVNQKTGKKKNGKVQRSKFVEHILKQGPCLIFMESCSASQYWARLFESHGFTVKLIAAQHVKAFLRNKRVKNDERDAEAIYTCGIQPDTKYVRIKTEEEQTVALLHTLRKAAVSERVEISNRIRGILAEFGIITAKGKGNFNNDIQELFEKSEQIHNINLKNSIARLFEDYHRMEDREKELSEQINSLNKENELVQLALTCPGVGELTASALVAEVGDACQFESGREMAAWTGVVPSQHSTGGRSTLGGITKTGNKYLRMLLSQCANAVIITAAHRVKKGSDTHLDRFALRLKAQGKPVKKIMIAVANKILRILWAMLTERKPFENKVNNAEPVSDAMELC

SEQ ID NO: 87518 - protein, 341 aa, unidentified
MDKELYFGVDVSKKTLDLAYYDGETIDWKNAHIKVSNDDAGFKKIGSWVAKVGKDFDTFLFCMEYTGLYNQNFRLWLESKEYIYGMVEPRKMHRFEPDLDDDQRSLDRIKTDELDAFRIAIYCEQNHKKILRNPSKLPSPVYFKLKRLLAERKQNTKQSTLYKQQLHDICAYDTDLSVERKKLLLKNMQENQKAIDKEIDSYMNEDTSIRKNYNLLTSIPGIGRIIALETIVLTENFTAISNPRKYACYIGIAPFKKESGTSVRKKTGVSKKGFSEAKADLSIAVLSAIRNNPSIRDYWIRQRKEKCGGIVLNAVKFKLVLRMFAVIKRGTPYVETDAYKN

SEQ ID NO: 87519 - protein, 449 aa, unidentified
MKKHDLKQRGLPVIHDYAAGIDIGSRFHVVAVPADLAKESVQTFQAFTADLERMANWLVSLGITTVAMESTGVYWIPVYEILEAHGLQVVLANARDARAVPGRKTDVNDAQWIQRLHACGLLRASFHPDREISALRSYLRLRERHLDYAAAHIQHMQKALTHMNLQLHHVVADITGLSGMRIIRAIVAGERSPSSLAALSDKRCKAGVDVIEASLVGNYQPEHVFALTQALSMYDAYQAQLLVCDQQIAQTLIKLSQEKTLPAEPLPKPRHNTRQPNALNFDVRTLLYQLVGVDLTQIHGIGPYLALRLVAECGTDLSRWRTCHHFTSWLTLAPGCRISGGKVLSAHTRKTKNRVTAHLRLAAVTVGRTNTALGAFYRRLAARIGKAKAVTATARKIAILFYNAMRFGMNYQDPGADHYEQKYRERVVKGLHRRAAEFGFTLQPLEGVS

SEQ ID NO: 87520 - protein, 337 aa, unidentified
MTDVQILAIDLAKRSFQVCATAPGGAVLFNRTLSRAKLEMLLREQPPCIVAMEACATSHFWGRFAQSLGHEARLIPPIYVKPFVKRQKNDAADAAAIAEAALRPNLHYVAVKSAEHQARAVAFRTHQAFVGQRTQLINALRGHLGEFGLVVAQGPANLKVVVGMLEDDTVDLPDAVRDVVRLYLDQIALLTQKIDELHFKLRAATKVDDAMRRLCSVPGVGPVTAGAIMAFAPDLRAFASGRNFAAWLGLVPRQRSTGGKVRLGSVSKMGQADIRKLLIVGAMSRIRWIIRKGVLPDNWLGRVLERKPRMVAAVALANKMARIIWAMMTREQSYRMA

SEQ ID NO: 87521 - protein, 326 aa, unidentified
MRSILGIDVSKASFDVALLRETKKVHTVFSNDQKGFKQLHRWLISQQADEIHACLEATGQYGDGIAEYLFGLGHAVSVVNPARIKRYGESKLHRNKTDKADAELIAEFCLKEKPALWEPLSPESKHLRALVRRLDDLQTNHQQEKNRLKSGEQDIYVIANLTEHVHYLEASIKALKKEIQDYIDQTPDLKSKQDLLSSIPGIGNLTAAKLLAEITDISSFDGAPQLAAYAGLNPKGFRSGSSVHKKTRISKQGRSELRYYLYMPAIVAMKSNSVIRALKERLYERRLPMMAIVAAAMRKLLHMVYGVLKNKKPFEPDYDKQFNYLT

SEQ ID NO: 87522 - protein, 349 aa, unidentified
MPMLADIVDVVIGVDTHKHTHTAAVVTAATGAAVEDLTVDTDPDGYAALVELADRHGGLRAWAIEGTGGYGAGLARYLAEQGEWVIELDRPNRPARRNGAKSDPLDAIRAAREALARPHLALPRSDGERTALAVRLAARRSAVEGSRIAQQQLHALVIAAPETLRSRLRGKTTLQMVKVCARLRVDARWDVTTRHTAGVLRDLARRIDGLNGEAAQHEKAILELVRSWRPDLLALRGVGPIVAAVALCAWSHPGRVRSDAAFAMLAGAAPIPASSGQTVRYRLNRCGDRQLNRALHTIALSRLRYDPDTRAYAERRRAEGKTDREIKRCLKRYIARQLYRQLENPPSTP

SEQ ID NO: 87523 - protein, 348 aa, unidentified
MTFYIGVDFHPHQQTVAWCDVATGEIKTRQLMHNTIAVKAFYQAMPNAIVGIEASTKAVWFEALLSEIGHQLLVGNPATIRARARSRHKSDKRDAELLLDLLLKNEFPVLWRRSAENQQILEVLQLRNRFVRQRTQTYNRLQALAHSCGLPQGHIKNLVFQTALKACQVSDVQALLRTQLFTLLDQLNAQIEELETWLKEKADGDADVRLLRTQKGVGYLTGLAVVHTLGDVSRFSRLSKQVVAFAGLDPLEKSSAGKIKFGGISKQGSWLLRFLLGQAAHLAARHDGKLKSFYKKLAKKKSKSVAKTAVARKLLVKLAIMLRDQINADEFDERGRTVGNARTEHGLQ

SEQ ID NO: 87524 - protein, 335 aa, unidentified
MFKFKSFTGIDISKKVFDVALIFPETGAITHQRFNQNKDGFSAFINWLRSHKIKIDDTLICMEHTGLYTNGIIEFLTALKANLWVEMAIKIKRSMGLQRGTDDKASSITIAEYAMRFADRAKLWKPVDSTLLKLRDMIAQRDRIVNSLKQLTVPIEEMKQCGAAKQAKALQRLQLPAISGLKKAKEKIESSINDFVTSEEKINKSISLICSIKGVGLQTATSLYVYTKGFTMFENAKQLACYCGVVPFGKSSGTSVRYKPGVSPFANRKLKSLLHLCAMSALRWDKEIKAYYERKVIEGKNKMSVINAIRNKLLQRIFAVLRDQRLYVENYRVVR

SEQ ID NO: 87525 - protein, 359 aa, unidentified
MNQNVPKKERFFKQVKLTSTDEVYVGIDVHKINCHIAIRLNGVIALTYVTPSDNQGIVRQMQRLQPAMRKIVYEAGPTGFSLVRTLRAASLPAAVIAPSKTLRPSAPQSKSDRLDCRQLAEFAAKDLLVEVTIPTEQEEADRQVTRLRNQIKKKCMCIKQQIKSFLLQYNLPEPEGLATWTLRSLQHLREMSLGPELRFTLDVLLDELDYLLSQLNRVDKQLETLFSQERHDRQIEILKSHPGVGPITSKLFRAEVYQPGRFDKPTQVARYLGLCPRVSQSGQKRVEGRLMKEGQIKLRACLVEAAWAWIGKDPDAKETFRRLLRNTGEPNKAIAAMARRLAIHLWKMLCTEQLYQKPA

SEQ ID NO: 87526 - protein, 429 aa, unidentified
MNFRPIAGIDVGKFFSEMAILSPSNEVIARMKIRHDSSTDVERAVELLIKTEKDFGSRPFVVMESTGHYHKILFHSLCKTGFEVSVINPIQTDSIKNIGIRKVKNDKVDARKIALLYRFQELNTTNIPDEDIECLRNLCRQYYKLNDELTAYKNRLTGIVDQLMLNFKDVFSNIFSKAAIAVLEEYPTPAAILKANRNKLISLIQKNSRRSLKWSTAKYELLVSKSREFAPLSVHNSSNIAMLGVYISMIRTLEDNLAKVLKAIYLLISEDMAKDMPMLALTLELLQSLPGIGLLSAATILAEIGDFSAFSKPGKLVAYFGIDPSVMQSGEFTGTRNKMSKRGSRLLRRVLFTIALANIRTKRNKEACNPVLLEFYKQKCQSKPKKVALGAVMRKIIIYIFAVLRDRKPYQLRSPQEHTQMLAAKHTAA

SEQ ID NO: 87527 - protein, 332 aa, unidentified
MSQTTIKNMQAQDDAVYAGIDVAKATLQLDLQGHQAEFTNEPRGLAQLCRKLQSVPHVHVVCEATGGYEGALVQALHQAKIPVSVTNPAQVRAAARAKGQRAKTDRIDAALLSDYGRRYQPAATQANSPSQQRLVALTQWLKQLIQGQALAKTQAEHHQDPFVRRQHSKLMAHLKAQIQAVETQIHALLAQDANLKQRVDCLDKIEGVGLRTAWMVLAHMPELGRLNRQEAAALAGLAPWTRESGTMKGMRCIGGGRPEVRLALYMASLSTVRCNPVLRSLYQHLRSKQKPPKVALTAVMRRLLIYMNLQIKALISSSAVEDKKNEKQPKPD

SEQ ID NO: 87528 - protein, 412 aa, unidentified
MDVIYPQCCGLDVHKKTVTACLITSIEGLEPVKEIRTFRTMTADLLALADWLQEAGCTHGAMESTGVYWRPVYNLLEGQFALLVVNAQHIKAVPGRKTDVKDAAWIAELLRHGLLRGSFIPSNPQRQLRELTRYRSTLVQDRARTLNRWQAVLEDANRKLASVVTDIYGVSARAMLEAILAGERDGEALADLARGRLRAKRDQLKEALEGRVTAHQSFLLTEHLSTLEYLDEAIARVSGEIDQRLIADQEAIALLDTIPGVGQRAAEIRIAEIGTDMSRFPSAKHLASWAGMCPGNYASGGKRLSGKTRKGSRWLRQVLVEIAHVAAKTKHTYLAAQYKRIAARRGKKRALIAVGHPILTIVYMMLTRKQPYQDLGAAYFDQREQQRVERRLVQRVERLGYEVSLQPRALAS

SEQ ID NO: 87529 - protein, 346 aa, unidentified
MTYYAGLDVSLKEVSICIVDDDGALVAQGTAPADPEGVAGWLKTRSLAPKRIVHESGQLSIWLQRGMVQLGLPAICIDARKAHKSLSARLNKSDSADAEGLAQLARMNWFTPVHIRSEESDRLRALVGGRERLIQLRKDLEGHIRGVLKAFGIRMTGIGQAQQRQGFRDQLAAAGETDPVLCTIADGFIAAHITLCKATADFDRALKAKSKSNPVTRRLMTIPGVGSIVSLSFVALVDDPDRFSKTSDVGAFLGLTPKRHQSGEMDWSGRVSKCGDAAMRGLLFEAGACIIRQVKRFSTLKSWAVRLAGRRGFRKAAVATARKIAVLMLTLWKSETDYQWTQEAKA

SEQ ID NO: 87530 - protein, 338 aa, unidentified
MNLSRIGLDLAKQVFQVHGVDRHEHVVCRRQLKRAQVRDFFRQLPPCLVAMEACGSAHYWARELRELGHTVRLIAPQFVKPYVKGDKHDAHDAEAICEAASRPSMRYVPVKSAEQQAVQSVHRVRSRLVRARTALCNEVRGLLGEFGLIATRRGRAATMALLETVMATEPASLPAPMGELLRELKDELQTLEARIARLERQIQAHVRGDARIQRLLAVEGIGPISASAVAASVGDARQFRTGRQFAAWLGLVPRQHSTGGQQRLGNISKRGDTYLRTLLIHGARAVVRCCANKTDARSRWLQGLLQRRPANVVAVALANKNARILWALLSRETCYRPG

SEQ ID NO: 87531 - protein, 480 aa, unidentified
MAHCIRAAWLALLFLEVGMPARKPHTRPPFTSRLSALAVLHPDAAGIDVGSDFHVAAVAPPGTDLVEVRSFGACTADLFGLADWFRQHGVKTVAMEATGVYWIALYDLLESQGFEVLLVDPRQIQRAPGRPKTDVQDAQWIRRLHSLGLLSGAFRPEEGIRVLRCYLRHRANLVRCAAQHIQHMQKALEQMNVKLTEAVSDITGKTGLSIIKAILAGQRDPAKLAALRDPRCKQDGEQIARALQGNWRPEHLFELKQAVELYEFYHQQISACDQQIETHLKSLQDPTAGEPPPPAKTRKAKRKANAPRFDARSRLYRVAKVDLTAIEGIEETTALVLLSELGTDMTRWPSSKQFCAWLGLCPQVKQTGGKVVSAKVRPGPNRAAQALRLAANSLQSSKSALGAFFRRIAARAGRAKAVTATAHKLGRLVYALLKHGQEYVAKGQQEYEEQYRERMLRSLARKAEELGYELKAREAVQANA

SEQ ID NO: 87532 - protein, 350 aa, unidentified
MIIIGADYHPAFQQIAFVDTETGELQERRLEQPEGAEKFCRELAAQGKRVRVGMEASGHARWFERLLAELNIELWIGDAAEIRRKRERKQKTDRQDAQHILRLLLKDDFPRIWVPSWENRDLRQLLWHRHRMVQARTRMMNQLQAVALNEGLRCRKKLFREAGRKQLEGFRLARWASRRRHDLLELLDRLTPTIAELTQAIEQEVEKCPAAQRLRTHPGVGPLTALAFVLIIGKADRFQCGKQIASYLGLVPLEKSSGNQRRLGHITKQGSSLLRFLLVEAAQVTARSLPDWRSKYYHLSMRRGRKIAKVAMARKLAVRLYWMMRKEWDYGQLTKFGSYAGKPENRDGVK

SEQ ID NO: 87533 - protein, 372 aa, unidentified
MESILYVGMDVHTSNYTLCTYSIEDDREFGLVKFEPDYLNIVRYVKRLKEHHGQETRIICGYEAGGLGYSLYRSLTANSIECVILAPSTMPKAPNERKTDYRDAAKIARCLAYNSYRNVYIPDAEDEAVKEYIRMRDNTKDHIKQLKQRILALCTRWRKEFNGTKKCWTVAHMKWLQHLEFDNPVAQEAFDEYVIQLNEANARLKRYDERIEKWADLPRYAEKVARLTCFCGIKTHVALATIAEVSDFNRFPNANRFASYLGLVPGEYSSGNNINRLGITKQGNSHIRKLLTEAAQCYARALPGRPSAELLKRQRGNDPKVISYANKGNERLKRKYRSIAARKPRPLAVIATARELACFIWGMMTDHLEQVY

SEQ ID NO: 87534 - protein, 368 aa, unidentified
MSETITSFVGLDVHKDSTAIGEAEAGRENPRFIGTVGPDLGQLLKALKSLGKPETMLVVYEAGPCGYGLARQLRSRGYRCEVVAAGKIARRPGERIKTDRRDALTLARLARSGDLVKVIVPDEGDEAMRDLSRAREDGVRARLKARQQLKALLLRHGHRYGGKSSWTLAHERYLAAVSFAHPAQDIAFAEYRQAVREGHERVERLTEALRTQAEHWRLKPLVAGLATLRGIDFVAAVTLTAEIGDFGRFAHPTELMGFLGLVPSEYSTGDTRRQGDITKTGNSHARRVLVEAAWNYRFPARLSRVLQIRQEGQPKAVREIAWRAQLRLAHRYRRLSSRKLHPNKICVAIARELAGFLWDIARQVKLAT

SEQ ID NO: 87535 - protein, 395 aa, unidentified
MFIVGIDVAKRSHEVCMITSDGQTVQRPFSIRNNSTGYNLMLEKIRKHTNIKSQIVFAMESTAHYWLALFTRLRKDGYHVILLNPIQTSAMRDMFIRKIKTDAKDSFIIAELIRFGRYAENNVAQDRLLALKELCRNRFYLVDMAGDLKRKLIALIDRVFPEYEALFETIFCKSSVAVLKKYPAPQKLSNAHLDKLTELLWNSSNGHFGEWKARDLKELARNSFGVEDCDGAYSTLILLMLDQIPSLSGKADALEKEISRLFQSFDTTVTTIHGVGPIIGAVILSEVGDISRFSSADKLAAYIGVDPSVNQSGEFQAAHAHMSKRGSPYLCRCIWMASQVAVQRDPMFRAYYEKKATEGLKYMTIIGHVTRKMTAVVFAILRDHKVYEPVLPTAA

SEQ ID NO: 87536 - protein, 344 aa, unidentified
MMPHFVGLDVSQKMTAICVVDNAGRRLWRGQCPTAPEQIAAMVRRHAGDDSRIGIETGAMTPWLVHELRALGLEVICLDARHARAALKMQINKTDQNDAEGLAQIVRTGWFRSVHVKSLDSHRARALLGARAQLVGMTTRLSNHIRGVLKTFGLLPGAMRGLRFDRKVEVLLQDRSDVAPIVRPMLVAWRQLREQISAFDKAIRVLVRSNSACRLLMSVPGIGVLSVLAYVSMVEDPARFSRSRSVGAHLGLTPRQYQSGEIDRHGHISKCGDTLARTLLYEAAVVIMTRVKKASELKDWALAIAKRSGIGKARVALARKLAVILHSVWRSGKPFRWSEHAIAA

SEQ ID NO: 87537 - protein, 431 aa, unidentified
MTNRLQVGIDFSQKRADVCVLFPNGQPLELHQAFGNSPTGYSLAKHLLLDAMDSYPFEGMDVSGEATGYYWLPFFLQLAADPDLEPHDMQLFLLNPRWVAWFKKCFAQDDKSDQKDAYYIAERTRTHPPRVAWSPQMDSLPLRFYTRFRFHLVQNLAREKCYFSAFLFLKASAYRRLEPFSDVFGATSRLVLTRLPSLDELAELPVEALTAYLHQLSGHHLPDPADNARKLRQVARESFPLDPALALPVQRILDLTLEHIRFLEGQVHQVEAWIATELVAHPAIRQLATIPGVGPVFSSGIGAEIGDTQRFLQGTKWDKRRKRYRPRNLRDAEDAVAKIAGLWWPRSGSGDFEAEDRRMAKSGNRYLRYYVIQGADRMRHNMSDYAAFYARKYREATKHQHKRALVLTARKSVGLVVGLLHRNEPYRSKEG

SEQ ID NO: 87538 - protein, 433 aa, unidentified
MRIIGLDIHRAFAEAVAWEDGRLRRLGRVDMRRDLLAAFAAKLSPNDVGVIEATGNATSATAVVAPHVKKVGIGNPKQVRIIAYAKIKTTIEADVLAQLYASGFLPEVWIADEPTQALRRQVTRRNQIVRQRSRLKTVIQSILHSHLIPSCPHADLCGAKGRTWLIEQVVPQDERLAIDRHLREFDRLGEDLQVIERDLARSALEDEGVKRLMTIPGVDITVALAMKAAIGDVSRFDDPQKLVTYLGLNPSVRQSGQVRPTMGGSPSRAVVMRAACSSRRPGRPLVLPDRCEPSPCGVRARRGQHVAAVATARKLSVVIWHLLMKGESFAWARPSLHAKKLARCGTQGREQGCARPKGSRARLQHKEPPGRRAPLGGAGRGRLCTPRRRLEPTRSEEGRHGCRKRGATIEAARQGSHLGPCSSPRGRPCATGE

SEQ ID NO: 87539 - protein, 346 aa, unidentified
MEHYAGIDVSLESSSVCVMDAAGRVVREGKVASEPEALIAWLRRSGVDFARIGLEAGPLSQWLHAHLREAGFSVELLETRHVRAAFRTMPVKTDRKDAAGIAQLMRLGWFRPVHCKSMAAQELRAILTARKLIQGKLHDVEMSLRGILRGFGLKVGPTTRRTFTGRVRELVAGHPTLEMVAAALLSASDELGCQLARFEALVRALARRDARARLLMSTPGVGAIVALTYVAAIDDPGRFRSSRDVGAHFGLTPRKYQSGETDVSGRISKIGDVGVRTVLYEAANVILTRPVKGSRLKSWAMRVAGRAGMRKAKVALARKLAVVLHRMLADGTAFDATLAAAARASA

SEQ ID NO: 87540 - protein, 369 aa, unidentified
MKNTTKFIGLDVSKEKISVAIADVGREAPRYYGMIPHTAEALRSLVKKLGQSENLYMCYEAGPTGYPLYRLLTSMGVHCDIIAPSLIPQKPGERVKTDKRDAIRLAQLYRAGELTTIHVPSEEGEALRDLVRCREDAKEDELRARHRLTKFLMRHEIRPPDGVNRWTIKYYRWLDTLKFEYSSARVVFQEYYHQLKELQQRVIRLEEEIREQSTKNVHAPMIQAFQSLRGIALITATSLVAEVACFQRFQTAPQFMAYAGLIPSEYSSGERRHQGQITKAGNRHLRKLLIEAAWSYRYSPAVKGDLKKRQQGSPLTVKEISWKAQNRLHKKYYRLVSKGKEKNKAITAVARELAGFIWAISQEIKPIHQ

SEQ ID NO: 87541 - protein, 355 aa, unidentified
MESTKYIGMDVHKETVSIAVMNSAGKLVVESIIETKGATILQFIQGLRGDLHVTFEEGTWAAWLYDLLKPHVTKIVVCDPRRNALLKEGNKGDKVDARKLAELLRAGLLRPVYHGESGLRTLKELSRSYLTISKDLTRVMNRLKALYRGWGISCEGATVYAPHHRSEWLGKITEAGVRRRAEFFYQQLDALQALRQQVRRDLLAESRKHSERKLLRQIPSIGPIRAALLIALIQTPHRFRTKRQLWAYSGLAIETHDSAQYRYVAGQLQRSKKPQQLRGLNRNHNHDLKAIFKGAATKASSGAGPFHDFYEALLTKGMRPSMARLTLARKIAAITLIVWKKGAHFDAEQLKPQAA

SEQ ID NO: 87542 - protein, 368 aa, unidentified
MGTSPPIAMLWASTHKRNINLNQDLGGAQMKAYAGIDLHSSNNYVGIIDENDQRLYQKRLPNRLEDILQALKPFKKSLEGVVVESTYNWYWMVDGLQADGYKVHLANPSAIKQYEGLKHTDDKWDSFWLAHLKRLNILPEGYIYPKETRPVRDILRRRLLFVSHRTAHILSFQSAITRNLGYKISSRDIKKLKESDIENLFSDPFLHLIAKNNISAIRFLGEKIKDIEKAVKSYVQLKPEFKYLLTMPGIGDILGLTIMLEVGDINRFTKAGNYASYCRTVKSEKISNNKKKGKGNCKNGNKYLAWAYVEAANFAVRFYPEPQSFYQRKKSQKNGIVAIKALANKLARASYFVIRDQVPYDASKMFRS

SEQ ID NO: 87543 - protein, 345 aa, unidentified
MNEISVVGLDLAKNLFQVHGVDETGEVMVRKQLTRSQVLRYFARLSPCLIGMEACSGAHYWARTLAGLGHAVRLMAPVFVKPYLKSNKNDRNDAEAICEAVQRPSMRFVRPKTPEQQAILQLHHGRQLLVRQRVALSNHMRGMLSEYGIVLPQGVQVISRRLPAILEDADNALPMLTRHLLAELKAEHDQLLERAKWIETQLKAWHASSAMSQRLAGIPGIGVLTASALVASVGEGQDFRSGRQLAAYLGLVPRQASSGGKDRLLGISKRGDGYLRSLLIHGARAVIHHIRRRLKAGRPGGNPWVEQLLQRCHINEAAVALANKMARTAWVLLTRQERYCPAHPV

SEQ ID NO: 87544 - protein, 410 aa, unidentified
MEHVGMTCGIDWAENHHDIALVDADGRVITKRRVGADANGFSELLGLIAEHGGDPESTPIAIETDKNLFVVALAGADFTVYPVNPRALARYRERHGQAGGKSDPADAIALAHVLRTDKHLHRPLPANSDGALRVKALARQHQEAIWALHQTVSRLRSVLLEFYPQAIKAFPNLQHYAATAVLAAVPTPAAGQRLTSRRIEAIFRRVGRRNDPALVERIRADLRATALRQSDPVETALGSVVVGLLKIVEVMRDAVEELERALTTELAQHPLAPILQSAPGIGAVLAARMLAEIGDDTDRFTTAAGMRAFAGTAPVTRASGRSHYVKARKVRNKRLGDACHWWAFAALTRSPAARAHYDKRRAAGDHHNAALRHLANKLLGNLWWCLQKGELWNEEAAWPHHTLELLPAAA

SEQ ID NO: 87545 - protein, 406 aa, unidentified
MGGDAMSGLKVSFDCFVGIDVSKDKFDACGITSSEAKLFQFSTTMDRKGFEKLKGHLVAFSISSVLIGMESTASYHANLFSYLVSEGYKVLLINPLLISNYVKMQLRKTKTDKKDAVVIAQFLLANGDTLVQRATPSLISDLRDLSRQRESLVDEMTSRKIEIKQLLNITFPELEHMTGIFTKAILKLLQQYPSVFALRDVDLGQLSQMLIADSYGHKREAFAAELIKTAHSSIGSKSTAKEMILKQKIALLLHIEDALQEITVMLIEMSRKLMEEEINIMTSIKGIGDKSAANFLIEMGGDINQYERSGKIIAMAGLDPAVYQSGKHDGKGRITKRGNRHLRRIIWLMTTSVIQYSDVFKVYYLKRRKEGLPYKMAVLATAHKLVRVIYAMLTHRTTFCSQVENS

SEQ ID NO: 87546 - protein, 334 aa, unidentified
MPDLVKLEPLTEPPNSHCKMETTNPQPEATYVGLDIAKDRLDYTVDGLRAAQVPNTPAGHKRLLKALRPFPHARVVCEATGGYERALVATLLLAKIEVCVANPGRVRAFARAEGLLAKTDRLDAALLRRFGQKVQPRLHAPMDPAAVALRELLDYRRQVSDQLVAVRNRLELAGPLLRGRLLGQVEFLQKELAEADRLIDEHIDHDDTLRGKAQRLQELKGAGPVLAATLLAYLPELGQIDDPQLSSLVGVAPYAHDSGRSQRPRHVRGGRAVVRQILYMAALAATRHNPILGAFYARLVAAGKLPMVALVAVMRKMLHVLNRLLADPHFVLAQ

SEQ ID NO: 87547 - protein, 359 aa, unidentified
MAVIEGRERRIVGGVDTHKDLHVAAVVDEQDRVIGTRSFATTRQGYRQMLAWMRSFGDLQRIGVESTGSYGAGLLRFMQQAGIAVLEVTTPDKQDRRRRGKNDDLDAQNAAHAAFAGQRTVTPRSRDGMIESLRVLMACRKTAVSARRVALQLIQNTIVCAPDGLRDQLRSMTRMQLVRTLAAWRPDLTAYRDVDAAYRIAFKSLARRYLELHDEIADLDAMIAAIVDELTPNLVARNSIGHTGAAQLLLTAGDNPERLRSEASFASLCGVSPVPASSGKTVRHRLNRGGDRAANSALHIIAIGRLRTDQRTKDYVARRIAEGHSKLDAIRALKRYLAREVFTLITQRRREINATRIAA

SEQ ID NO: 87548 - protein, 310 aa, unidentified
MEQMFIGIDVSKDRLDVHVRPSDEAFAVTRDGEGLAALVERLCSLTPGLVVLEATGGFEVTVAAALVAAAIPLAVVNPRQIRDFARATGQLAKTDALDARAIARFAETVRPEPRPVPDEQARALGELVVRRRQIIEMMTAERNRRRQLTNRRLIKSVERLLAVLIKELAELDHAIGEGIRGTPVWRERDQLLRSVPGIGDVVARTLIAELPELGTLDRKQIAALVGVAPLNRDSGTMRGKRTTWGGRAKVRSVLYMAALVASRHNPVLAAFYQRLVSLGKAKKLAITAVMRKLLTILNAMLRDKRPWQNA

SEQ ID NO: 87549 - protein, 320 aa, unidentified
MTYIGIDVSKDSFVAAYPGKCGYSTKSFPNTTSGVRKFMQSLPETPHCVMEATGNYSMLLLYLLQESNITVSMENPQKIKHFSRAMMSVTKTDEIDAKLIAMYGEKMNPAPYKIPTESIILLKQKRTVLRQLKKQLTAMINLQYSLSVLPKQDPTAKAATEQTIKFLRKQISKMEEEITNISNKEFKRQMELLTSIKGIGEHIASALIMATGGFTYFSSAKQISRFLGLCPSYQQSGTSVNVKGHINRNGDTHLRSQLYVVAFSSIRFNSACKETYERLRARGKSGKVAVIAVANKLIRQMFAVVTNNRPYIDGYVSSFA

SEQ ID NO: 87550 - protein, 409 aa, unidentified
MQVVYPRCCGLDIHKKTVVACVLLTDADGTVHRFVRAFGSMTADLLALGDWLQFQGVTHVAMESTGVLWRPVFNVLEEGRTLLLVNAQHVKALPGRKTDVKDSEWLADLLRHGLLHASFVPPHPIRVLRDLTRYRKSLVELRTQEINRIHQVLETANLKLGAVASNVVGVSGRLMLRAVAQGESDPTVLADLAKGRLREKLPALRQALAGRVQPHQRLLVGELLDHIAYLEQAIHRVEMNIADCLAEQEHAVQLLLTLPATGPVTAAAILAEIGVDMARFPSAAHLASWAGVCPGNRRSAGKQRSGAATKGNTHLKTILCESAATIARSPGTYLHAFYHRIARRRGKPRAMLAVAHSLLVSIYHILRDHVPYQDLGPDHFDHLHSQRLERHYIRRLEALGFQVQLTPAS

SEQ ID NO: 87551 - protein, 342 aa, unidentified
MSAAFIGLDLAKSVFQVHGVDVHGKVVVTKRLRRDAVLSFFANLPVCVVGMEACAGSHFWARELTRLGHTVRLMAPQYVKPYVKRQKNDRADAEAICEAVQRPSMRFVAVKSEEQQSTLAIHRVRETLVAQKTQLINALRAHLAEFGIVAPQGAGKVAQLTAVVADLEDTRVPALARSILQSLVDQLRDTERRVEELDARLAEQAQADEVCQRLMTVPGIGPTTATALTATIGGATVFESGRHLAAWLGLVPRQNSSGGKERLGGISKAGDGYLRRLLVHGARAVMRWHGTTSPWLAGLLKRRPFNVAAVALANKLARIAWAVMARGEDYRKPAVTAEPATA

SEQ ID NO: 87552 - protein, 386 aa, unidentified
MSSVVIGVDPHKHLNAVVAVSAMGNVLVRRTFDNSADGFTELRALGRQWRVRTWAIEGCNGVGKHLSQRLLAAGERVVDVSTRRAALVRVYAGGNGRKNDDTDAYSIAMVALHTPDLPEVTADSRAQALRLVSQRRKELVGLRTQCVCRIHRDLVALLPGGAPRKLTAARAKELLATVRPRDEVGKLRRQLIVDQIRDLEHWDRKIAAIDAQLVELVDDTPTSLRDLYGVGPVTTALILGEVIDVARFRNRDHFASYNGTAPTDRGSAGNPNPAVNLKGNRKLNHAIHVVAITQIRNPNTEGRVLYERKLAEGKTKKEAVRVVKRRISDAIYRQLVLDAEKAGPGGQAGTTQQSSVTGSTPTAGSSDKPQPGPAVEPRTTPLRVPA

SEQ ID NO: 87553 - protein, 346 aa, unidentified
MKIVGCDFHPGHQQVAVLDTVSGEVKEGKLMHGAGQAERFYRELEAPALVGMEAVGNTLWFEQLMERLGHELWIGDAAQIRASYVRKQKTDKRDAGHILKLLLEQRFPRIWVPNQGQRDQRQLLLHRHRLVQMRTRIKNELQHLALNQGVQKKRQLWNVAGRAELEKLALAGWTAQRRNDLLVLLAVLEKQVATLDEAVSQAAYLDPQACLLMTQPGVGPITSLAFVVTLGDVSRFQRGKQVASYLGLIPSERSSGSKRRLGAISKQGNVFMRTMLVEAAQSAVRHDKQLAKQYRSRCHHKPTGVAKVAAAHKLAVRLYWMLRTQTPYPQVVHNEGNPSHSVVGKH

SEQ ID NO: 87554 - protein, 346 aa, unidentified
MHTDRDVILTVDYHLEHLEVRWLNCATGQEQRRNITTDRRSIERLVAAALAEATPAGGKVIWIMESTTGWARVKELIGCRVEFVLANVLQMPLPPKAYRRKSDKIDTGRIQREFLNGSLPQSYQPSSWWRQVRRLVDSRQDLIVRQTAIKNWIRHFLYHETWTQRQSLWTQEGLRWLKRLSLSESDRLVLNLKLKDLEGIGALLSAVEARMQQVYDQWPEAQRIDAIRGIGMVTAVSILAHIGAIERFRDAEALISYAGLAPGHRQSDGTRHSGRIGGGGTDNHMRYLIIETMQWICQIPRYRPAFERAQAKHGTNVARIIVARQLLRSIYKMLRDQVPFNQMLVA

SEQ ID NO: 87555 - protein, 365 aa, unidentified
MNIIHWIGIDDHADKWTIAQFQSGDDRPSKQFELVPDKKGFQRLLSFAKALDGEVRIVYEAGPCGFELYRRLTKAGLHCQVAAPALTPRKPGERVKTNRRDAAKLAKYLRAGELTFVVVPDEDRESLRDLVRARASVQKDVGRIRKQIIHLLLRYGHRYRDGQSWTLRFWTWLKALRLDGEHSGFVLDEMVGELEHRIEQLKRYDQQMEQAAQRPEYVPYLEALRTLRGISTISAMTLLSELGDLRRFPTAPQLMAAVGVVPSEYSTGDKTTRYSITKTGNAHVRHVVVEAAWHYQRRLSTGRVIKARRKDQPKAIVDIAEKCESRLHRRFHRLTSRNKKSTVAAVAVARELLGFIWAIGQIAHP

SEQ ID NO: 87556 - protein, 349 aa, unidentified
MRFIIGCDFHPSYQQLALLDTQTGEVVEKSLTHENKEGVRAFYDGLPGPARVGVEASGQSQWFERLLGELGHEMWIGDAAQIRARENRKQKTDRRDALLLLELLQQGRFPRIWVPSPAERDARQLLLHRHKWVRLRTQVKNQLQALALNQGVRRKSKLWSVAGRVELEALSLAPWTHRRRADLLKLLDDLQPGILDLDRDVAEQAEARPEARRLMTHPGVGPVTALAFVLTMGPVDRFPRGKQVASYLGLIPSEHSSGGKQRLGHISKQGNAFLRGLLVEAAQSAVRYEPRLRREYLRLAQRKGRAIAKVAMARKLAVRLYWMLRDGKEYAQRVQVRVQDSPRHPVVVA

SEQ ID NO: 87557 - protein, 333 aa, unidentified
MPQSRTLYVGMDRPKASIAVAYVAQEHGAEVVSLGTIGTRQCDIEKLLRQLQSKGQPLVFVDEAGPCGYWLSRSLTKKGDVCWVVAPSLMPKKPGDRVKTDRRDARQLARLRRSGDLTPVYVPAVDEEAIRDLSRAREETLRDLPAATLRRKAFVRRHDIRSTGRAHWSPAHLRWLREVVCPTPAQHMVFQEDVQTVTEQTVRLQRLAHARRDQVQTWRFQPVVEALQALRGVQCTVAVTTVAALGDLTRFHNPRQLMHSLGVTPSEYSRGPRRQQGSMTKTGNTPARRALVEGAWASRYPANVSRHLPLRLAKLPAAIQAIRWKAHVRLCTR

SEQ ID NO: 87558 - protein, 427 aa, unidentified
MAEEKIGLEPEFVAFVGIDWADRKHGWCLEAAGSRKRETGELEHKVEAVEAWVAELGRRFGHRPIAVAVEQVKGALVFLLNKYECLHIFPVPSTMTAKMREALYPSGAQDDPRDADLLLDILGQHRDKLHRLSPDDEVTRRVQNLVEERRKLTAEKTAQSNRLTSYLKIYFPQMVEWFEKLDMPLVCDLLERWPTLEELQTVSREELRTFFRQHHCHRGLRERRILAIGGAIPAGGDRAVIEAKSTVVKVMVQLIRSLLQGIAELDRKIEESAAEHPDFFIFESLPGAGAVMAPRLLAAFGSQRDGYSCADELQTYSGIAPVTERSGKRKWVHFRWACPKFLRQSFHEWAGHSIAQSAWARAYYQQQRDRGSDHHAAVRSLAFKWIRIVFRCWKDRVAYDENKYLAALAKRGSQLGKLVVVGMGTSL

SEQ ID NO: 87559 - protein, 392 aa, unidentified
MDSPPPRHHSATVAFEEANGSEGETMKKHSSKHQSLSSTDVELCTTICVDLAKQVFQLAGEDATGRVIYEDRIKSRQAFHELLLKLPVTVTVLMECGPGAQAWARLLQAKGNPVRILPAQRVAEHRSGAKNDRNDAHAILRAGRDSSIASIPIKSTTALAIQALHRVRRGNIKRHTALGNQMRGLLLEHGVSMPQGDAAISKHVPQALEDASLPLPDVLRELLNELLADWLALGERITTLSRRLEKTAQEDEVAQRLVTIRGVGPIIATAIVAKQTEPRRFASGRMYSAFFGIVPDQHSSGNKIRLGRMSKRGDGYIRSLMIQGAHAVLSQLRPDSDQPDDRRLLRWLSRLGRKEAAIRLANRNLRIIWSLLQSDQVYQRKPKDHTEAAMSS

SEQ ID NO: 87560 - protein, 350 aa, unidentified
MKILALDMGRRKSVACVYAERTGEHTNRTIRTSPQELHDLLVEHAADRLVIEIGPAAGWVCDLAGSLDIEVEVANTNHSAWRWKNTKRKTDKDDALKLAQLSAMNQLPTVHVPARSTRQWRALIEYRQKLVQRQTASKNQIRAILERESMSLPTGTRGFTQKALDALDDETELLKQVETNELWRGMLHVETTYLEHVRGLIKEVERKLNAIAKQDENVRRLQTIPGVGARLSEAVVAVLDDARRFKTAKQVGAYIGLVPKQYQSGQMNRHARITGTGNRTLRTLLVEVAWIGLRFNPWMRQVYERVRAGSGARKKVAIVAVARRLLIRCWAMLRDQTAWRDPTPVGAGTP

SEQ ID NO: 87561 - protein, 417 aa, unidentified
MDARNIAAWVGIDWADQKHAVCLEARGARRNEFREVEQSPEALAAWVAGLRERFGGKAIAVCLEQSRGALIYALMKYDFLALYPINPKQLARYREALHPSGAKDDPSDAQLLMQFVRDYPDKLRRWQPDDEQTRRIGLLAESRRRLVDERTRLGNWLESQLKQYLPLALELVVGHLHAEWFLKLLAKWPTLKALKRAAPNALARLLPGGKDRVQQRVRQIREAQPLVTDAALVDAGALLVQSLVPPLQSLNRAIAEYDRQLALAIQDHPDGPLFTSLPGAGPALAPRLLVAFGSDRSRHASATELQRYSGIAPVTKRSGKAMSIQRRRACPKFLRQTFHEFADHSRKSCRWAMAYYRLQHEHRGKGHHASLRALAFKWIRVLFQCWQRRLPFNEDQYLARLRRKNSPLLVYLPTQNA

SEQ ID NO: 87562 - protein, 437 aa, unidentified
MRRKKNKASKSVNPQVLPIVNPNAAGIDIGAKEHLVAVPCDRDPQPVRTFQAFTPDLHELAAWLKRCGIETVALESTGIYWISLYEVLEQYGFEIRVVNARHVKHVPGRTKTDVLDCQWIQKLHSFGLLNGSFRPDQQIRKLRTYMRLRDNLVVASTQAVHHMQKALFEMNVQLSNVLSDIVGETGLNILEAIIAGERDSTQLAALCSSRIKASRETVAKSLHGNWDSALLFALKVALETYRFCQIKIQNCDSCIQHHLAQFESRVEVINSPQNLKTQLHRVCGVDLTKIPGIKEQSAQIIISEVGLDMTRWNTEKQFCSFLGLCPSNCVSGGKVLRRATRKVYNRAADTLRLCAQSLTHSKSALGAKYRRLKARLGPPKAIVAMAHHFARLVYRMFRYGQNFVEQGIHQYELKFRLQRIKWLKKEARSLDLQLVPT

SEQ ID NO: 87563 - protein, 365 aa, unidentified
MDKQNYTTIGMDVSDKKTQICVMARTGATPKVVMETAIPTTKDGLAKFLATQDKSSPVAFETGTHCRWMHEVAEGMGFKVYVANPCRLRMVTESKTKNDANDARMLARIALADPGLLHPVKLRSAEHQKMLNLHEMRSYLVRQRTGAIVQMRSIAKSMGFRIAKSSTAHFHKLDTKSWPREFRDIAWPMLKNIEQLAVTIRTYDKQIRELAATPTFKAQVDRLMEIHGVGIAVATCFVAVTGGDMDRFGKPRDVGPWLGLVPKQDQSGDIDRQCHITKAGSPLMRRMLVESAQLIMRDSMADTDLKAKGLRICARGAKIAKRKAVAAVARSLAVLMVAMLKKPDAPYTPLSERCGNELLAMRTTA

SEQ ID NO: 87564 - protein, 426 aa, unidentified
MKNTLDGVKYLIDQVMRSCRQRHIKKEYVFFGGEDVNSYAENFANALRTKGFLVANVNAHDAKKQRENLQASTDRIDLMGIATMLLNLRAKCSPAQDGIYRNLRTLVRYRKKLVVMKTEVKNRVHTLVDRLLPGFLNEKNTGIKSFSKSSLFLMEDRFSAQQIRRRQQRTLIKILKRCATPDAENVAAKLHSHAAQVITTPDEYAATFQLSLQHHIKHYRCLKENIDQLPTEIALLLAQTQAAFLTSIKAVGIVLAAGVSSEIGDLSGQKPLNNMTSYCGIIPRVKQSGGVEGHTHTGRVSKRSNHLLKDYVVQSAFHIGLRGPQPPLQDYKRREAAGQHADFGIGRRFLSMAMCLMQSSQVYLPPKLRSSKAQMQERAGYYLTMWPLLRDKWKKAHGHQAAFAKDQPLGQWRQVVQELYEIKLKL

SEQ ID NO: 87565 - protein, 457 aa, unidentified
MPKQRRKKPKSKTNPFSSLPPMNLNAAGIDIGSREHYVAVPQDRDPEPVRTFKAFTGDLYCLADWLESCKIDTVAMESTGVYWIPLYQILENRGFKVFLVNAQKIKNVPGRKSDVMDCQWIQKLHTFGLLNSSFRPTDEICVLRNYLRQRDNLISSASACIQHMQKALTEMNIKLANVISDISGQTGLAIIRAIIAGERDPYKLAAMRDFRIKASIETIAKSLQGNWRQELIFNLGQALALYDIYQSKISECDLQIRDHLGTFPNNVDPMEKPLTPRKSKRPKGNAPKFDLRDELYRISGADLTSIDGIDVLTASVVISEIGLDMSRWRTEKAFSSWLGLCPDNRITGGKVIKRSSRKVINRATHALRMAASTLLRSNTALGANYRRLRTRLGAPKAITAMAHKLARLVYRMLKYGHHYVDKGMEHYEQKFREQRVKYLKKQAKLFNLQIIENTELT

SEQ ID NO: 87566 - protein, 403 aa, unidentified
MNAVVDWTCIKKSITACVLTPEGKEIRTFGTMTDDLEELVEWLKQKQVTHVAMESTGVYWKPIYNLLEGEPIDVLVVNAQHIKAVPGRKMDVKDAEWITDLLRHGLLRGSCIPDRTQRELRELVRYRRSLIEERARELNRIQKVLEGANIKLASVVSDINGVSAQQILRALIEGTDDPAVLAQLAKGRLKQKIGELRRALKGIMGPHQRMMLSEQCRHIEYLDEAIARLSREIEERTRPFHEALELMETIPGVGRQSAEQIIAEIGTDMSRFPTAAHVASWAGMAPGNHERCGETVVRSNEEREQEAEGVSGGMRPRRPNEEHVPIGQVSSDRQTKRSESGECRGRENHLGNHLFGLNAKGTVSRVGSRLLGSATGGRHRAPNGETARGVRVRSETGEDKCVA

SEQ ID NO: 87567 - protein, 387 aa, unidentified
MQALLYCCCGVDVHDEIIETCILKGFDNEPEKIKKQFRTNPSDLKDFAAHLMKHNCFTAAMESTGVYWRPVYEAIEDHCEHFDRIVVTNAAHMRNVPGRKSDEDDAEWAAVLLRHGLLNASFVPERVFRDLREASRLYKKFVGEKSRYTNRIMKLLQAHGFKLSTVLSDILGVSGRNILKILAERGSLSASDIASCLRGRPSHTAKEIHAAVSGSLNPVEQQMLSLLLRKIETAEHDMGAIILIMLEMAEPYVSFLDIVDSVPGFDMLSSIQLLAEISATPHLSFNSSSKLCAWAGLSPRNDESAGKIKSRKILHGNPYVKSLLCQSAWAAVKSRNNPFRDWFWRHKGKMGAKKAIIAVSRQLLKTIYFLIENNTLYDPKVAAANRK

SEQ ID NO: 87568 - protein, 392 aa, unidentified
MYIVGIDIGKNHHEASIVSPEGKQIGPSLRFATTHKGADSLMSFIFKNIGNSPCVFGMEATGHYWYPIYSFLKAKGYTIYVINPIQSDSLRKMYIRQTKNDSIDSFLIAEVIRFGQFGTTSMADENILAMRQLCRYRDSVISSRTEIKLRIGTIMEQIFPEYEKQFSSLWVSTSMGILEKYLTPENIENAPIDELFEIIKDKSHNRLTRAKAISIKEAAADTFGIKIAQDAFSFQLKQLIDRMNFLDKQIEALDCQILEYYEKFDCYLHTIPGIGMIAAATILAEIGDINRFKSSSALVAFAGIDPTVRQSGEFSSTHNHMSKRGSPYLRHAIFLAATARSFHNSPLNAYYKKKRDQGKHHLTATGAVARKLTSVIYAVLRDSKPYEPKSFC

SEQ ID NO: 87569 - protein, 379 aa, unidentified
MVCSPFEVPHTSSELSALAKRLKSLDGETRVVMEATGNYHLPIAMVLHEAGIYVSVVNAMLVHDYGNNSLRRAKTDKKDAVKLANYGLDRWLNLPEFSPEEEIRMQLKTCYRQYQQYSKVQTMLNNNLISLLDTLFPGVNRLFSSPVRADGSEKWVDFVETFWHCECVSGLSQKVFETKYQKWCQKHGYYFREAKALEIYTAACGAVGVMPKTETTHLLITQAVSQLKAASTALAELKKEMLRLAELLPEFPVVQKMYGTGPTLGPQLMAEIGDVRRFHSKKALVAFAGIDAPPNDSGQIAGNHKAMSKVGSSALRRTLFLIMGVYLQNAPMDEPVYQFMNKKRAEGKPYRVYMMASANKFLRIYYATVKAYLDALEAA

SEQ ID NO: 87570 - protein, 403 aa, unidentified
MNAAGIDVSKGKCMVAVVRPFGEVAVKPYEVHHTSSELRQLARTLKSLDGETRVILEHTGRYYEPVAQTLHDAGIFVSAVNPLLIKEYGNNSLRRVKTDKADSLKIARYGLDNWAELREHTPMDTIRYQLKNMNRQYSLYSKNKTALKNNLIALLDQTYPGVNALFDSPVREDGSQKWVDFAASFWHVDCVRSLSEKAFTERYRKWCKGHRYNFNTAKAAEIHALAKELIAMLPKDPCTRLLVREAVAQLNAVSKTVEIFRSEMRRLARQLPEFPAVMSLYGVGDSIGPQLMAEIGDVRRFSHKGALTAFAGVDPMPNQSGDYEAKSTSSSKRGSPDLRKTLFVLMAILLQKAPSEDPVFQFLDRKRSEGKPYHVYMTAGCNKFLRIYFGRIREYLNSLDSAE

SEQ ID NO: 87571 - protein, 352 aa, unidentified
MDTSKYIGMDVHMATTVIAVADKVGKIVAEAVIETKPPAILDFLKSQRGAVHVTFEEGTQAAWLHDLIRPHVAEVVVCNPREISVQDNKADKSDAKRLAELLRTHGLKAVYHGEHGTQALKELTRSYGAILSDSIRVKNRLKGIFRGRGISCTGTTVYSKKGRDQWLQKIDNNAVGSRISKQFKELDCLTELRNEAEKELLAEARKHPATKVLRSIPGIGPVRAAVILGFTITPHRFRTKSQFWKYCGLAVMSEITGEDAVIDGRVVRSRIKPFVRGLNINYNHALKEAFKGAATTAAMGVWRSHFDALVANGTRPSLVLLTLARRIASITLAVWKRGELYDSKKMKIMHAV

SEQ ID NO: 87572 - protein, 359 aa, unidentified
MMVLGCDPHKRSITCGAVEAATGVARGVRTAAAHADGFDVLVRWARGLGSERVWAIEDCRHVSGRLERFLVARGERVVRVAPKLMAGAREGARTRGKSDPIDALAVARAAVREGVGTLPTAWLDERALELRLLVDHREDLVGTRTRDQARLRWHLHDLDPTFTVPPRALDRAVWWQRVRARLQQEPTGVRVQIALELLEQIRGQTASIRALEAELARRVHAYAPRLLAERGCGPLTAAKLIGEIAGIERFATDAKLARNAGSAPIPASSGNRTRHRLDRGGNRQLNCALHRLAVNKGLWDPDTAAYLARRQADGKTRKEALRCLKRHLARRVWKLLRTPAPSHTPSVTIHCNMPTHALT

SEQ ID NO: 87573 - protein, 376 aa, unidentified
MYRIIKIGMDVHSTNYTLCAMEPTIGSEDRIYGEVQVAPDYKEILLFITSLKQKLGLSNDYSIECGYEAGCLGYSLYNQLVGAGIKCVILAPTTMLTQQGQRVKTDKRDARLIAQCLCYGGYHSVYIPTGEDDAVKEYVRMRDDHKLALKKLKQQINAFVLRHGHQYEGTKWTIKHVTWLRKLNLDPMYRETLNEYMASYEEQEAKIERYDKRIEEIAAEAHYQENVKKLGCFLGIRTHTALSLIVETGDFKRFAKGNTYAAFLGLAPGEHSSSTSVNRLGISKAGNTHLRCLLIEAAKGICKGSIGHKSKELRSRQSGQPAEIIAYADKANTRLRSKYYKMTRHGKKKNVAVAAVARELACFVWGMMTGNTNIAA

SEQ ID NO: 87574 - protein, 343 aa, unidentified
MQITTIGLDLAKSVFQVHGIDATGQVVVRKSLRRSQMLPFFAKLPSCLVGMEACGTSHHWARKLIQLGHEVRLMPPAYVKPYVKRGKTDAADAEAVCEAVTRPTMRFVPVKSSEQQAALSIHRTRDLLVKQRTQLINMIRGLLAEFGVDIPKGLERALLMARQIVDGKAPDVPIEAAKIVGTLSQQALDTHVRLREIDRDLAIWLRGNDVARRLMTIPGIGPIGATALAASVTDPHQFRSGRQFAAWLGLTPLQKSSGGKERLGRITKMGDKYLRKLLVVGMTALVRRARQNPEGDPRLADLLARKPTRVATVAMANKTARIVWAIMTRGETYHAGHRPALAA

SEQ ID NO: 87575 - protein, 269 aa, unidentified
MQTITTIGLDIAKSVFQVHGVDAGGQAVIRRQLKRRYVLAFFQKLTPCLVGIEACASAHHWSRELQALGHTVRLMPPAYVKPYVKRQKNDATDAEAICEAVTRANMRFVPTKTPEQQSGLVLHRTRHLFIRQQTAVINSIRAHLAEFGIVAPVGRHGVEELLNGVADPNDKRVPEIARACLSALGAQLRRIKEQILEFDRLIRAWHRSNEMSMRLDEAPGVGPVLATALVAAVADPKSFRSGRNFSAWIGMVPKQHSSGGKNRLGNISK

SEQ ID NO: 87576 - protein, 361 aa, unidentified
MSIAFGSFVGVDLHKCTVTLTAVDAAGEITRLKISTKSTGKIDAWLRSLPGPVHLAVEACPFVKWFIDRFRPCVERTDIADATELSSRRGKRRKTDWNDSLDIAMRLSRGECPLGFIADEELMQLRKLGRHWRHLSRLLSRAKHSMKSMLNAANIRGPKFDGAAAQRWLLANRDLLKPVQQQTFADFIDLVMLTERHRERLRREIMFATRSTRFAPIVSLLLSVPGIGEIWAAIIAAEIGPFDRFPNADTLEFWAGLTADMKESAGRTQSGNITKAGSVTLRWALCQAAMTLCLSDARQEAIRQRLVRRIGKPKANVAMGRRLLRVLYAMVRDGKTFERGPARDRTAAANRARLGRKRQVA

SEQ ID NO: 87577 - protein, 412 aa, unidentified
MEVLHRVIAGLDVHAKQVVACLRVQIGQRCRRTLRQFPTTTPGLLELHAWLIEQGCPIVLIESTGVYWRPVFNILEGSVEVILANAHHVKTLPGRKTDLRDAEWLADLGAHGLVRSSFIPPAPIRELRELTRYRKALIQARSSEMNRVQKVLESANIKLGTVVSDVFGASGRAMLRALVAGERDADRLAALAKGSLRTKLDQLIPALTGRFSDAHGFLLRQLLDHVEYLDRQIATVSAEVARLCGPFEEPLALLETIPGVGRATAEVLLAETGGDMRHFPTAHHLASWVGICPGNNESAGKRRTGRTRKGNRWLRAALCEAAWAASRSKGTYLQSQFRRLAFARGKGGKRAAVAVAHSILIAVWHMLAHRVPYRDLGPLSLTTREPERAKRVLVRKLEQLGYHVSLAAKVAA

SEQ ID NO: 87578 - protein, 356 aa, unidentified
MVKSNKLDFTGQPVYIGLDVHKKSWSVSIHTAACEHKTFTQPPDADLLVNYLRRNFPGASYHLVYEAGYSGFWVHDQMREKGVACTVANPADVPTKEKERRTKRDRIDCRKLARSLRAGEIEGIYVPCRPRLEDRSLVRTRQSMVRKQTRCKNQIKAILFFYGVALPEDWAERRWSGKFVRWLESIRMEKASGDVALKIHLEELKHLRQMIAALDREIRILARTEEYKTQVRLLRTIPGISTLTAMVLLTELQTITRFASLDQLACYVGLVPDAHESGETEHSGSITKRRHAQLRASLVEASWTAVRKDPALLMAFQKACKRMRKTRAIVKIARKLLNRVRYVLKNQRPYTLGVVQ

SEQ ID NO: 87579 - protein, 299 aa, unidentified
MEEISTIGLDIAKSVFQVHAVNKAGEVVVGRQLRRRQVLPFFSRLAPCLIGMEACATSHHWARELTGLGHEVRLMPPRYVRPYVKRNKNDAADAEAICEAVTRPTMRFVPIKTAEQQSVLMVHRTRELFIRQRTTLINAIRAHLAEHGIVAGVGRNGVEALLRLIIKGEDDHLPAVARECLMALAAQLELVRKQILDADRRVRAWHRSSALSKRLEAIPGVGPLIATALEASVPNPHAFRSGRDLSAWIGLVPKQSSTGGKERLGSISKAGNRYLRKLLVVGALSVIKRAKQLGYTRHP

SEQ ID NO: 87580 - protein, 410 aa, unidentified
MTITGIPLPSIPVAGVDTHTDTHTVAAVAATGQHLATATFPATTSGYAQLALFLHTHGVDTVGVEGTNSYGAGLTRHLVDAGYAVVEVLRPSRAVRRRNGKSDPVDALAAARQVLTGEALSIPKDSTGPVESLRTLYITRKQLVATTVRIMNTIKSLLITAPDDIRARYSSMTNHAMVLALSRCRPQADDHAPAHAVASSLKILAATYLQVRERCDDLEARISALVSSINPYISNMVGSGPLIAAELIVSIGENPERIPSEAALAQLCGVAPLPASSGRTTRHRLNRGGDRRANSALYRIAVVRMGCDQRTKDYVAKRTAEGLSKKEIIRCLKRAIVREVYRVLCAQSSRPEPRDLRRPDLKQRRQAQHLTQAEVAGRLGCAPARISDIETGKRPLTELAAAYENLLQSA

SEQ ID NO: 87581 - protein, 379 aa, unidentified
MEAQVKKIDFTGQNIYVGFDAHLKSWKVTIMAEGIVYKTFTQPPQPEVLNNYLKNNFPGGTYHTAYEAGFCGYWIHDKLLSFGIKSIVVNPADIPTTDKERVQKEDKRDSRKIARSLSSGTLMPIYVPSIHAQRDRSLLRTRSMLVRDLARYKNRIKSFLFFYGISIAPSFSNPQSHWSNRFMLWLESLEIDNGSGKEALRILINECKNLRISILSVNKQIRQLSNTERYKDNVKLLKSVPGIGLLTAMIILTELEAIERFSNIDKLCGYIGLVPSTKSSGEKERTGDITPRGHNVLRTAIIESSWTAIRNDPSLMHSYLTFIKRMESNKAIIKIAKKLLSRIRYVLMNQKPYVCLTEKETYKNKNMSETVTCPLQSLN

SEQ ID NO: 87582 - protein, 318 aa, unidentified
MMEQTYTGIDVAKDSFVVATKLVGKVATSLHQNDKKGINSFLKSLPDYSWCIMEATGVYSLQLAIALYEKGIKVSVVNPLQIKRFAQTKLKRTKTDKVDAVLIAEYGERMQPKLYEPPAPFMRKLQQQRMSMKLLVKSKRSFLNQLHALSQLEEADKAALKACKAVLTSIEKQIGRLEEQMQQLAEEHCQELFTLLQTIPGISTKSAIELIIVSGGFRNFTSARQFSAFIGISPCINESGTSIRGYRGISRIGDKNIRAMLYMCAMAAKVHNKACQELYDRMVAAGKAKKVALVAVMNKLIKQVFGMVKSGEVYVENC

SEQ ID NO: 87583 - protein, 340 aa, unidentified
MDYYAGIDVSLECSSVCVVDSTGKIVREAKVQSEPEALIDWLKGLGLDLARIGLEAGPLSQWLYAAMRKGGLAVELLETRHVRDAFKSMPVKSDRNDARGIAQLMRLGWFRPVHCKSLDAQEVRAVLTARKLLQSKMLDLEMSLRGMLRNFGLKVGPTTPTRFARRIEELVNGHATLETIAKALLAVHAALLHELNGFEKRVRGMARSDARVRLLMSAPGVGAIVAMTFVAAIDDPTRFKSSKGVGAHFGLTPKKHQSGEKDVTGRISKLGDGSVRAALYQSAHIILTMPVKGSGLKSWAAKLARRAGMKKAKVALARKLAVVLHRMWIDNSPFRPAAAA

SEQ ID NO: 87584 - protein, 315 aa, unidentified
MPNMIAQSVGVDISKDTLDVHLHPAGASRRFANDAKGFSALIACLKGFAIARVVFEPTGAYHHAFERRLAEAGLPLAKVNPRQARRFAEAIGRHAKTDAVDAAMLARFAMLIEPPARPIVSATLDEMKELHVARRALVKDRVAALNRDKTRRSALLKRQAAERLRQIERQIAAIDAALRAQLAADPALKARFDILVSIPGVGETTALTILVEMPELGAIEHKCAASLAGLAPIARDSGRRSGKRFIRGGRAHLRQALYMPTLVAVRFNTVMRAKYNAFLAAGKPPKVALTAIMRKLIILANALLRDGRTWTAKLA

SEQ ID NO: 87585 - protein, 319 aa, unidentified
MAQNDSVVAGIDVAKDKVDVCIRSLSQRQSFPSTAEGRRVLIRWLRRHKVGKTAMEASGGYERDWAKALREAGIQVRIVDPKRVRSFARSAGRLAKNDSIDAEMIAWFAETFGEALHQVHDADREKLVHMVNARQGLLEMQTELQNRGEHSVPEVVKRMQARLLKKIAAELATLEVAIAALVKVTPRFAELAEIIESVPGLAGTTSAGLIAAMPELGQASDKAAAALLGAAPYDDDSGKRRGERHIKGGRRRIRNLFYMACLGAATRHNPVLKAFYQRLLAKGKKKKVALVACMRKLIVILNIMIARRETWDPSRYAPS

SEQ ID NO: 87586 - protein, 343 aa, unidentified
MSDKLYFGVDVSKHWLDIAYYDGMDVDWKHGHIRVDNDERGFAQLGRWLDRLCVGKGTCIFCMEYTGLYSQEFRQWLERMKIVYGMVSPRKMHRFEPDLGENERALDRIKTDEMDSFRIAIYCKEHSMKIRRKPSHLPSDAYFKLKRLLAERRQYVKQSALYKQQLHDIGKYDTEASRHRKEAELASLTEKKLQTSKEMETIIREDADIRRSYDLLLSIKGIGLVVAAETVVLTENFTSITNPRRYACYIGIAPGRKESGVSIQGSDHVGRKGFTQAKADLSMAALHAIHYDKGIRAYWLRRKTEGKHSGVVLNAVKFKIVLRMFAVIRRQKPYVEMEEYGKK

SEQ ID NO: 87587 - protein, 339 aa, unidentified
MQVTTIGLDLAKNVFQVHGITDDGNVAFNRALRRAQVLSFFEKFESCLIGVEACGTSHHWARELTKLGHNVKLISPAYVKPYVKRGKSDAADAEAICEAVTRPTMRFVEVKTPEQQAILAVHRTRDLIVRQRTQTINMLRAQLAEFGIVMPQGIYHALQFARDCLNGAQADMPEVAGDVIIELCDQLLFFHSKILRCSRQMNQITTLEKRVTLLRTIPGVGQITASAIVATVGSGKQFNNGREFAAWLGLTPLNKSSGGKERLGHISKMGDQYIRRLLVLGMTSRIRSIRTKPEKFDPWFADILSRKPSRVATVAMANKTARIIWAVLTRNEPYKVRAV

SEQ ID NO: 87588 - protein, 342 aa, unidentified
MDIHAVGIDLGKNLFHLVAMDATGKVIIRKRCSRTQLLTFTANIRVWRIGMEACSGSHFLARALQQQGHDVRLMPAQYVKPYVKTNKSDYIDAEAIAEAVQRPSMRFVPLKTEEQLDLQAVHRVRERWVMRRTAVINQVRGLLLERGITLPKGRSHLEEALPEILAEAHIRFSESISVLLAQLRCELDDLGTRIEEMDALIARISKENESCRRLTTIPGVGPVTATALVAAIGNGSAFKRGRDLSAWVGMVPGEFTTGGKQKLLGISKRGNSYLRRLFVQCARSLLRFRERQGAPFGVWLAQLIGRAHQNVAVVALANKLLRIAWAVLYKNETFRSSLPVSV

SEQ ID NO: 87589 - protein, 387 aa, unidentified
MYYVGIDIAKLNHFASVVSADGEVLVKPFKFTNDNDGFCKLLSVLASYEHSSLIIGLESTAHYADNLVEFLVSKRYQVCVINPIQTSTMRKNNIRKTKTDKVDTLVIARTLIAQPHRFFSQEDIDLMHLKNLGRFRQKNIKERTRLKIQLTAYVDRVFPELQYFFKSGLHQKAIYALLKEAPTPELVASMHLTHLAHLLEVSSHGHFNKEQAKELRILAQKSVGSSDRALSLQVTQSVEQIELLDRQIKDVESQMADIMLGLDSVIMTIPGIGYINGGMILGEIGDIHRFSKPCQLLAFAGLDPSVYQSGNFNASHTKMSKRGSRVLRYALINAAHNVVKNNATFKAYYDAKMAEGRSHYNALGHCAGKLVRIIFKMLTNDVTFSLE

SEQ ID NO: 87590 - protein, 350 aa, unidentified
MNVNHYIGFDVHKKTASYCVKTADGTIVEEGKLRATHDALRQWAGKRREPWHGAMEATLFSGWIYDTLRPFAAELQMGHPALMKAIAASKKKNDKLDARKIADMVRCNLLPACYVAPPEIRELRRMLRYRNLVVGQATRMKNKMSGMLMEVGAEYNKRQLHGKQYFTNLLDTLEEVPESVKDLLRLSRGAMEMFETTQQQLLARLGKDPLLAQRVMLLKSIRGVGPVTALTWALEVGDPHRFPSVAHAVSYCGFTSALVSSADKQQRGPISKQRNAHLQTVLVEAAKLAPQWNPQLAAVHAREVARGNRNRATLAVARKLVAYLLAVDKSGQRFAVYHPPAVETEAPKVA

SEQ ID NO: 87591 - protein, 366 aa, unidentified
MWEAPVRNQRTSIGLDVHARSVVACGLDGETGELFERRLTPDHQEILGWIRSLPGPVAATYEAGPTGFGLARFLLAQGVECVVAAPSMLQHPSGDRVKTDARDARHLARLLHLGEIVAVAVPSVQTEAARDLVRAREDVRGDLMSARHRVSKLLLRQGIVYYGGKAWTGTHDVWLRGQRFDAPGLQLAYDTAYDTVLAAVDRRNRLDTAIAEMAAAGPYTQVVARLGCLRGVSTLTGFGLAVEIGDWNRLDGRRIGAYLGLVPTESSSGGTRAQGGITKTGNGHARRLLIEAAWHHRAPYRPGVGLRRRWDAASPAARARGQAANRRLHTRWQNFDARKKRPVVANAAIARELAGWCWSLAVLENN

SEQ ID NO: 87592 - protein, 385 aa, unidentified
MVIIGVDPHKRIHVASVVEPATNRQVAALQIEASLAGYRRLLRWADKFGERSWAVENTRGLGCHLAQWLLARGEAVEDVPSTATARVRELSRGGRRKNDVIDAAAAASVAALHGDATPVLAEDITTVLGLLDERRANVTTQRTRLINQLHAVFRDVLPGGAPKGLTAAIASALLAGIRPVGPVEAARKQLARDLVAEIRDADRRLKLLTAQIAQTVAATGSRLMEVDGVGPVVSGRLLARTHRMSRFATAAAFASYAGVAPVEVSSADRLRHRLSRGGDRQLNLALHVVAVNQIRMPGSAGRAYYDTKIAAGKTEKEARRCLKRRLADHIWRLMIKDEHGAAGPGGQQGATMQSSAAGSTPTTSSSDKSLPEPATPDSTTGQTAA

SEQ ID NO: 87593 - protein, 324 aa, unidentified
MIFIGIDISKLTFDAAYSLNARTIHKQFSNNPKGFEAFFLWINKSKKEVYTCLEATGIYSFDLAQYLSQKKINVMVVNPIITHAFFKMELNRNKTDKADAQLIARYCEHVVVTGGYEKKSYQPKDADYEAIQRLVTRCDQLEKSKTQENNRLEASANKQTSRSIKRLQKAIDNEIIRVKKTISDIIKNNQELYQQVELLVSIKGIGERTAWSILAYIGDINFFSNAKQMASYAGLTPKVIQSGTSIDKSSLSKLGHKRLRKSLYMPALVAIRYNPILKAVYERLVNNGKPKKVAIVAVMRKLLILSYGVLKSEKPFDINYQMTD

SEQ ID NO: 87594 - protein, 437 aa, unidentified
MSQPSSLTALSAHEKRQLAAHTGAVVGVDAGKFAHTLVVRPAGGADAKPVSFPVTREGFETALTAIHAAAPGVAPRDILVGIEFAGTYGFTFAHYLHDQGFPVVSVLAAHTKHWKEVTHNQALKTDAKDAAVVTDLVAQGKFVGFAFLEQPYAELRYLVSAREHVTTLRNAAITRLIAVLDVVFPEYERLFGDLAKPTALAVLAAFPGPAALLTAPKRRVLAVLRRASRGHVGVARYEALVAAARDTLALPGAQGVLKDEVPLIIERIELCHAQLATLKARMIDILAGLPDAQALLTIPWVAPVTAATFLGCVGNPKAYTSSAQVLKLAGLSLVERSSGVTQGRRRLSKQGKPVLRRHAFMFALRSVRADGLYRADFERLLKNNGGKKLAALAAISRKALKLMFRVARECRPYVPTADWRSSDQHTTRTSTEGRSAA

SEQ ID NO: 87595 - protein, 345 aa, unidentified
MPIVGGLDIHRKQITFDYPGTVTGQVCRGQVSPADREHLRAWLARFAGCEDAAFAVEGCTGWRYVAEELAAAGVTVHLAEPADTAFARGRKRHAKTDKTDCRHLRQLLAEGRLPECWVPPSRVLECRALLELYHDLRAEHTAWVQRIHAVLFHQGAPALGEGTLRTGPGLAALRDVSAAWLSPAGQLQVATALEVLEALEARLHAVRHQLLDAARHLAGAKVLAERLYGVGPFAALAMTCWLGGEGRFSSSRQAVRFAGLDVTVWSSDRKGPPGRLSRQGPPVLRWAVYEAGKTHARASAPDHRYYAQVKDRCNGKRAALSEARKILRQACHILAELGDDALAAV

SEQ ID NO: 87596 - protein, 342 aa, unidentified
MQTVTTIGLDIAKSVFQIHGIDAAGNVIVRRKLKRRYVLPFFQKLPPCVVGIEACASSHHWSRELQALGHTVRLMPPAYVKPYIKRQKNDVADAEAICEAVTRPTMRFVATKTPEQQSCLMLHRTRHLFIRQQTSVINAIRAHLAEFGIVAPVGRNGVEQLLVVANAGDNRLPEIARACVLALGAQLQTLKAQILNFDRQIMAWHRSSEASKRLDDIPGVGPALATALVASVADPKAFRSGRDFSAWIGLVPKQRSSGGKDKLGSISKQGDRYLRSLFTAGALAVIRYAKIHGTKHRPWLTALLARRPTKVAAVALANKIARMAWAMMARGDRYKEPIALAA

SEQ ID NO: 87597 - protein, 454 aa, unidentified
MRPSGVDRDARPVGSRAGAQQPSASTGKDEAPRQADTFETQTKEGTKVSDFLIWVGVDWGSEAHQVCAMDGSRKVIFETSVPHSGEAISKLAKRLLKLGSVETIAVGIETPRGAVVETLLEHGIAVFALNPKQLDRFRDRHTVGGAKDDRRDAFVLADSLRTDLHAFHRVRIGPAELVELRELSRTRDELTAERIAIGHRLREQLNRYFPQILLLGSVYESRWLWELLEMAPTPAAATKLSTSKLRLLLKRYRIRKVTADEVRDVLRSEPLHVAPGVVPACERHVRLLVPRLRLVDDQKAVVEKEIEALVRSLSAEEGKAEHRDAQLLQSLPGLGTLGCATMLSEAWEALQSRDYHVLRSLCGAAPITKQSGKTRVVLMRRACNPRLRFTLHHWVGIAVNRDVFWKARYATMRAAGKSHNRAVRALGDRLLAVLCAVLKSGVPYDGTRLQKQAA

SEQ ID NO: 87598 - protein, 342 aa, unidentified
MQIDILGIDLAKRVFQLHGADRQGRTVYAAKVMRAAFLETVRESRPRIVAMEACGSAHHWARCFRAMGIEVRLISPQYVTPFVKTNKNGRNDAQAIVEAASRPTMNFVTVKSVEQQDIQAVHRVRELLVQQRTALINQARGLLAERGVSIAQTRQAFKREVPKIVGTCEGEVTNVCQAMVLEISQQIHALEERIKHAETWLKSFMKQSALCRKIAAIDGVGTITATAMVASVGEAKEFKNGRHLSAWLGLVPRQHSSGGKSQLRGISKRGDKYLRTLLVHGARSVLRYAVGKTDVQSRWLQDLIARRGYNRAAVALANKNARVIQALLSSDAPYRPSAPVAH

SEQ ID NO: 87599 - protein, 374 aa, unidentified
MNIIYIGVDFHARQQTICYLKTETGELVTCELQHQDKQAVRAFYAQFPGPVVIGLEASGYSPWFEALLEDLGCEVWLGDATEIRRRARWRQKNDRRDAELILDLMVHKEFPRLHRPAIESREVLRMLRYRQKLIKIRTMSKNSLQALALQSGLAKGSRLFTKAGQQELNSAVMSPVMQWQCEHWLQLLQPLNQQLLETMVWLKLQSKGDIQITRLRTHPGIGLLTSLCLVHTLQPISRFRNQRKVAAYAGFDPVERSSAERKCFLGISKAGSRILRYLLVEAAQTAVRKDEDLKRFYKRLAERRGRPKAKVAAARKLLIRAYIMLRDEIDYAEFRRRAVAARLARRGQGPNVPAVLIGQPASADYRDDLPSASQ

SEQ ID NO: 87600 - protein, 319 aa, unidentified
MFQITVGVDIAKKKFDVALLMESKYKHKLFTNDEAGFEAFIVWLLTFNLLSRPLICMEATGAYSQPLADLLVAKGYPVSVVNPAKVKAFAQSELSRAKTDKADAKLIARYALSMQPGLWIPPPPAIRRLQALTRRIEHLLEIQQMERNRLDTADESITASINSLLNTVEDEIKTIRQAINDLINDNPDLDNRRKLLESIPGIGSSTIAHLLIALSSHQGFTNAKQVVAFAGLAPYLRESGPWSGKTRIAKSGDPILRKALYMPALCAWKHNPVIHDFCERLKANGKNGKAIACAAMRKLIHIAFGVLKSGKPFDPLWAK

SEQ ID NO: 87601 - protein, 436 aa, unidentified
MRGCRCSMIMGFTKPIEHFNLQRKKVITMNTLYVGIDVSSKSNVVYLMLPNGDKHSNFSVANSHEGSTLLVKKIYSALTSHSLDTVLIGLEATSVYGDNLVYFLREDATLAPFNRKIHVLNPKQVKKFHDTYNDLPKNDYVDSFVIADCLRFGRINKEVYMGDYRYKALQNLTRARFFAVQNLVKEKQRFMNVLFKKYSTMTQEKVFSDDFSTTALAVYDEFESAEALANMDLHELTDFIIEKGKNRFPDPDAVAKAIQKAARSSYRLPKTVNDSVNQVLSISITSMKALESQIKEFDKAIKALMELLPNVLISIPGIGPVYSAGIMAEIGDINRFDNQASLAKYAGLAWKQHQSGGFEAEVTRLIPSGNRFLKYYLCEAAFSLVRCDKEYSDFYHLKYKEVNRCQHKRALALTARKFVRLVFRLLKDNRLYCPAK

SEQ ID NO: 87602 - protein, 420 aa, unidentified
MKVVYRTCCGVDVHKSFLVATIIKTTSGVEPSYQKKRFSTFNNSILHFKEWLVKNQCRDVCMESTGKYWVPVFNLLENEINVTIANPKWVKAVKGNKDDTKDSKWIGDLFRLGLVPGSYIPCKLIRILREFTRYRYKLTSCRTSEKNRYQNALTVCNVALDSVVSDIFGKSATSVIDYLIEQSDNSINHEEIASRLLRSLKKKSDSVIESIEGYQMTDSQKYRMHLVRAHMDYITSTINDIDTMLDSLIAPYENAVQLLCTIPGVDRNSAITVISEIGTDMAPFSNSKRLCCWAGLTPGNNESAGKKKSVRIARACVYLKPALVQVAHAAVKSDKSPYYKQKYERIMKRRGKKRAIIAIARMILTAIYQMLSTGETWNPTDLFKIDMPEPMKEKQKEKAIKQAMKLLIRQGKISESQLAS

SEQ ID NO: 87603 - protein, 317 aa, unidentified
MTDTETGAFIGIDVGKMYLDIAVWNSEVYWRVSNDGAGIEKLINRLQKLSPVLIVVEATGGLELPVVTALALAALPVAVVNPTRVRDFARSTGQLAKTDKLDARVLAHFAQAVRPQVRPLRSEEQEYLAALVTRRRQIVQMLTAEKNRKSSARPQIRKRVQKHIDWLTEELRALDEDIAKFIHSHPLWREKEALLRSVPGVGPVTACTILAELPELGTLNRQKIAALVGVAPLNKDSGRKRGKRRVFGGRASVRRTLYMATLTATKFNPVIKSFYENLLRRGKEKKVALTACMRKLLIILNSILRHQRPWQVRPARP

SEQ ID NO: 87604 - protein, 304 aa, unidentified
MQLYAGLDLHSRNTYIGILDQEFNRIFKKRVANNLELILKTLKPFGRQLKGLVVESTYNWYWLIDGLMDAGYQCVHLANPSAIKQYEGLKHADDQHDAFFLAHLLILGILPQGYIYPKKDRPVRDLARKRMFLVQHKTAHILSLQSLIARCCAKKVSSNEISHLTLQDLQTLLEEEHLVLCAQANLDSIRFLTQLIKRIEKTINKKIKLNPAFQNLLTVPGIGNILAMTIMLEVGDISRFAKVGNFASYCRCVSSQRLSDGRSKGHGNRKNGNRYLSWAFVEAAHLTRRHCQPQRCINFRFFTS

SEQ ID NO: 87605 - protein, 411 aa, unidentified
MGYFIGIDISKGSFNYSVIDEKCKQIESRKLSMDRIGFDKFKKVTDKYKESIVACKSTGSFHINLISFLLSFKREVALINPSLIKRFSSSVSLRKTKTDEIDANVIALFVCKNREHIHYLMLDDIDSIVPIARLRESIAKDIAKTKTQLRQYINITFPELEKNYNIFTLAILNLLKHYPSANKVNSASNMEIYRVLKHKNAGRAVNITHKDIKELAKNSIGHSSFEYEALVEYDVLYLLFLIEKIEKIEKQFTDKINKSKKDDVDILTSIKGIGDVTASYFIAEIGNIDRFKNKRKLIAYIGTDPSIAQSGSSINKKGRISKKGSKSLRRTLYIMAMGTLRTNSYFKSYYLKKRQEGMQHRKAIVALMNKLVRVIYALLKKREKFSLKKANSTSFSSNPSACSCSAAACSP

SEQ ID NO: 87606 - protein, 440 aa, unidentified
MRHGTRMGNCRVQESVAHRISMSKEKRKVCGIDVHKSFLVATILDREGSYETRRIRQDPESLYALREWIVTERCESVAFESTADYWRSLYLVLEDRVPVTVANAHHIKHIPGKKTDITDSRWIAQLELNGLIEPSRIFSGEKYDLRSLTRSRELLVRNRTELKNKIHHLLDASGIRLSSVLSDLFGKSGSIILKGLVQNKPLEEIIASLPSKMRGSTDAISAALPAAIPPVTLILLQSYLKLVDDLDAEIKLLEGRIRESLTAKSRELQILTSIPGIGFIGASTLIAEIGNVHDFEDADKLAKWAGLTPSVYQSANVTRTGSITKQGSKHIRWILVELAHIAIRSPGRIKSFFERLLPKKGYKKSIVAVARKMLRIVWHLLVHNEVFVDDRPRSKQVKFPKLPKKIQSFGINRMIELFSKATEVIIRDHNQEIFRLGLTD

SEQ ID NO: 87607 - protein, 320 aa, unidentified
MTTSSSSMALWVGIDVSKDFLDVHVRPTQDAFRVANDEAGIADLVARLQQRPPAGLVLEATGGYEIPVVAALAAAGLAPAVVNPRQARRFAEGVGRLAKTDPIDAAVLAHFAEAVRPEPRPVPDADARLLGDMLARRRQLVQMRVSELHRLPTATGPIRKGIQRHIDYLDRQIKSIEDDLATAVKASPAWRARDELLQSVPGVGPQVSRTLLAELPELGTLSGRQLAALCGLAPFNRDSGRRRGPRSIYGGRSHVRAALYQAALVAMRWNTPLKGVYEGLVQRGKAKKVALIAVARRLLVILNALVRTGSPWQEKLAVGT

SEQ ID NO: 87608 - protein, 328 aa, unidentified
MQPGVPTKGFMLGDNLMTDKQVVGVDVSKEWLDLAVAGSGKSERIDNKEQAVTRWLKRVEPGLVAFEATGGYERVLQRCLRDRGIVFVRVHPNEVIAYRKSRGIKAKTDRIDARLIADFAAEVASRRGRKLGIAADEVLRELVSRRRQIQRSVHAEKCRLAIADSKAVRKSIRLVIASLSRSLKTIQTEITRHLRADADASELSQLLETVTGIGPVGSSTLLADVPELGHISGKQVSALIGVAPITRQSGKTSDYSRTGHGRPAVRGILFNAARAAIRHPSPFKDFYDRLVLEHHKPGKLALVAVMRKILVTANAVARDRQPWRYSKP

SEQ ID NO: 87609 - protein, 435 aa, unidentified
MTSKLQKIHAQGAGIDVGSRQFFVGIENQEVKSFDTFTSGCHQVVEYLQQHSVTSVAMEATGVYWVTLHDMLRDVGIEVAVVNGRHVKHVPGRKTDVKDCMWISELHSYGLLKKSFIPEAQVKEMRHYMRLRENHIEQKVKAVQRMDKALVMMNIRLSSVVSDVQGGSSLRIIQAILKGERNSEVLLNLCDSRILKHKKEQMQQCLKGFYKPEQLFALKQSWEQYGFIEKQIAGCDVCIEKLLESLTINKPEPVLNEKPKRIYHNKPNVKNLHKMVQQLYDGKDLTVLPGITSYSLLKFFSVTGSDLKNWKTENHFTAWLGLAPNQYQSGKIKKYKRVKTNTEAGQILKECVQPLLRSKHLALGVFGKRISSRRGPSIAIKAMARKLACWIYRMINNGLDFVENGIKQYEERQKKDTLKWLEKKAKELNYTLSPC

SEQ ID NO: 87610 - protein, 347 aa, unidentified
MNERTANVERLAIDLAKNVFQLAGEDARGQVVFEERLKSREAFSAFLRQLGSRVTVLMETGPGAQAWARELQGRGVRVRILPAQRVAEHRSGAKNDRNDCRAILRADRDDTIQPVVVKSTEALAMQALHRVRSGYLRRKTAITNQIRGLLLEHGIAAPQGVAALATRVPRILEDATQPVPALLRELVGELWAEAVHLSARVEALSARLETAAREDPLARRLMRVPGIGPITATALVAKEAHPERFPNARQFAAYFGLVPEQHSSGPRVRLGRMCKRGDGYIRSLTIQGAHTVLRQLRDDRQDPDSRRLRRWNERHGRKGAAVRLANRNLRIAWALLCREDDYRRTPA

SEQ ID NO: 87611 - protein, 407 aa, unidentified
MDLLKTVFGIDISSWKSNVCIMVNGQKVNDYAISNDMVGFNQLLGDLKQVTNPQIIFEATGVYSRRLQAFLDMHELRYVMMNPLEAKRKTKDDLHQNKTDKLDALYLAKLQSEHPQRLAYVQSEEYQELMANNRIYEQASHDLITNRNRLHKAIQLTFPEIEHLMVNPRGKNYWSIVLRFPHPDILLETKEADIIDFLKGLSGIGKKRANDIAQSLIRLAKVACPAVKKNSAHIRGLKMAINNILSAEEECQTALQEMEKLAPKRDLEILTSIPGIGKNTALRIISELGDIRRFNNPSQLNAFVGVDPQVYESGNLTAHLSISKRGTAIGRKVLYLAINQIQSAKKVGNPCHIADYYEKRKRSSETASHKKAAIASIHKLLRTMFALIKNDQLYSYDVAKHNQRLLS

SEQ ID NO: 87612 - protein, 369 aa, unidentified
MPQLKVRYVGLDVHKDTIVIAVAEQGRSAAFDVGKFPSDWESLRKRLEKLADGFTLKLCYEAGPTGFELHRRLVEAGYDSQVIAPSLIPTKPGERIKTDTRDAAKLATCLRAGVLTPVYVPDTDTEALRDLERARTAAKNAETTCKHQLGKFLLRHGRRWEQSNWTLAHMAWVRKQSFDHEAQRRVLRHYIKTLEDATERVNALTKDIEELVAVSTLAPLVTALQSMRGVATISSVVIAAEIGDLRRFDKPGAFMSYLGLVPSEHSSGKRTQRGSITKTGNKHVRRILIEAAWHCLKPAKMSRALRARNALVSDEVSKIAWKAQKRLHRKFQHLMLEKGKAPQVAVVAVARELAGFLWAIAQEERLLAA

SEQ ID NO: 87613 - protein, 455 aa, unidentified
MPKRTTGDRPELNPVNVGAAAIDIGSKMHMAAIDPTCTDAPVRAFGTFTQDLHDLADWFKACGVTSVAMESTGVYWIPAYEILEQRGFEVILVNARYAKNVPGRKTDVSDAAWLRQLHSYGLLRGSFRPDAEIATLRAYLRQRERLVEYAAAHIQHMQKALMEMNLQLHHVVSDITGATGMRIIRAIVAGERNPDVLATYRDVRCHSSIETIRAALVGNDRDEHVFALTQSLELYDTYQAKMLDCDRKLESLIAALTDRGAKPVGKLSRPRVKTKQVNTPSFDVRAALYGVLGVDLTEIHGLGPSLALKLIGECGTDLRAWPTAKHFTSWLCLAPGNKISGGKVLSSRTRRSSSRAAALLRLAATTIGRSDTALGAFYRRLSSRAGKAKAVTATARKIAVLFYNTLRHGMTYRDPGADHYEEQYRSRVLANLKRRAKSLGFVLQAVPCDAEVAVS

SEQ ID NO: 87614 - protein, 343 aa, unidentified
MQIRTIGVDLAKNVFQVHGVDSAGKVVITRQLRRKQVIEFFSKIPPCLVGMEACGTAHHWAREVSKLGHTVRLMPPSYVKGYVKRSKNDAADAAAICEAVTRPSMRFVAVKSTDQQASLMLHRTRDLLIRQRTQLINALRAHLAEFGLVAETGREGVAQLAALITDESDREALPFAMKQALQAIVDQLAALELQVGTLDRAIHAHHRANDMSSRLETVPGIGVIGATAIASAVTDPSNFKSGRDFAAWIGLVPRQHSTGGKERLGGISKQGDRYLRRLLVVGATAVVRHARQHPQKHPWVMRLLAKKPAKLVAVAVANKMARIAWAIMAKGGYYRAPELAAAP

SEQ ID NO: 87615 - protein, 424 aa, unidentified
MTDTVLPEVGALVGLDWARDKHDVAVQIVGQPTIEFAEIAHTPEDVSTWLRALATRCNGRPIAIALETSRGPIVHAVLELPNVVLYPVNPRSLARYREVFSPNGSKDDQPDAALLLSLLLNHRDRLTAWMPDDAQTRTLRALVEQRRRFVDWRRGFVQSLQDALRMYYPAAHTLAGEDLSTPMACAFLRQWPTFEQVKRARPTTLRTFYRRHRCRNAARIDERIAHLASAQPLTTDPAIIGPYHHLMLALVTQLEAMTTHIDALDAMIATEFAAHPDAPLFADLPGAGATFAPRLLVALGTNRDRFPAAAAVQQHAGIAPVTKRSGKSQYVEWRWATSTFVRQSFHEFAQYSLPHCRWAKAYYAEQRRRGKSHHAAVRALAFKWIRIIWRCWYDRTPYDDARYEQALRTRGSRYQLPIQVLEPA

SEQ ID NO: 87616 - protein, 457 aa, unidentified
MPRKKAKSKSDRTLQMVHPNAAAIDVGATLLMAAVRADRTADPVRSFGTFTTDLHRLVDWFAECGVDTVAMESTSVYWIPIYELLDARGFAVFLVNARDAKHVPGRKTDVSDAQWLQRLHSYGLLRASFRPKGQFTQLRAYVRQRERLLEYAASHIQHMQKALTEMNLQLHHVVADITGATGLRIIRSILSGEHDPKTLACLRDYRCHASIETIEKALTGNYRAEHLFALEQALALYDAYHEKVSACDARIEAVLKDLSIGRGHATGALTPSRRRTDQVNGLAFDVRSALFAVLGKDITKIDGFGPYLSLKLVAECGDDLSAWPSAKHFTSWLGLAPNNKISGGKVLSARTRRSGSRSAALLRLAAVTVGRTDTALGAFYRRLSARIGKAKAVTATARKIAVLFYNAVRHGMEYVDPEASFYETRYRKRVVDNLHRRAKAFGFVLQPLEPTPDGAVS

SEQ ID NO: 87617 - protein, 626 aa, unidentified
MLGVELTLGPRPEDPHMQARHRRRPAPSVSLDHLGQPRGLLSARVQAVGPEHFGIVAIDPAKSRSCWMLADFYGRVLIPPTVVDHRRDAFDNAIARLRRATAETDIRDLIVAVERTGRYHLPVLRAFAAAGFETRIVHPNISCHFRRAGSFGTKTDPIDVNAGIFRAAVNGFGLREPDRDPIYAALQLRVRQRRDLVQKESLLRCQVLEHLQAVRPGYAGCFDDIFNVNIGLVIPTRYATPAAVAAAGLEGLVQSARLARARVQQRTLVRILGWAQGAPDPDPDAALHREWLIALSGDRTTKLKQIAAVERQLVGLLVQTPYVRLLALAGINVVNAADFAGEAGPMANYATARIITGRAGLYPRRYQSDRVDCSGGLARRGNRRLRQALLWGADTLIRCNDHFRVLAAKWTDRGRDPRAVRVQVAGRYARIAFQMVTGRGAFHHPACQGPPAVLSKLIEFHDAHEMDIEITRTDLQRAAAQLPAAERERERADLAARSRGPHPRRGRKLRRFDAVAAAVLPRLGPGGSVASGSSPSGEAPSRGEGRDVVVTDYIPSHDDKNDLGTTPTTPAPSAACAPAPPRGRGDRSRRGGGPAPLSAILPAVLKQWLGGEAQRVLESTESGETP

SEQ ID NO: 87618 - protein, 338 aa, unidentified
MKLYAGIDLHSNNSVVSVIDEEDRVVYEKRLANDLERIVVALMAFKEALVGIVVESTFNWYWLVDGLMAAGFRVHLANPAAIVQYEGLKRTGDEHDARWLAHLLRLSILREGYIYPKAARGVRDLMRRRMQLVQSRSTQLLAMQTQLTRSTGRSLRAVELKRIRAGELDARVDDHNVASALRANLAVVHTLNAEVARLEREIVAQVKLAAQFEPLLSIPGIGQTLALCIMLETGEVTRFTKVGNFASYARCVDSERVSNGKKKGEGNVKCGNRYLAWAFVEAAHFAVRYNARIERYYARKAAKTNKMVAIKAVAHKLARAAYHVMRTHEHFEEARAFA

SEQ ID NO: 87619 - protein, 348 aa, unidentified
MIIGIDPHKASHTATAVDPATNTPVASLRIDASIAGYRQLLRWADQFAERRWAVENAKGLGCHLTQWLIARDEHVVDVATTATSRVRELSRGGRRKNDVIDASAAASVAALQGDAVVATADDETTVFALLEERRANLAAQRVRSVNQLHALMRDLVAGGARTALTAKAASTALRSVRPTTPTGHARKALAWDLIRDVRSLDAQLVKIAEQMTDALETYGSSLLDIDGIGPVLAVRLLGRTGRPSRFRSADAFASYTGSAPIEASSGERVVHRLSRSGDRKLNSALHLVAVTQVRMRNSAGRAYFDRKIEQGKTRNEAMRCLKRKLASHIWRRMLADERSRTEVIKIAA

SEQ ID NO: 87620 - protein, 332 aa, unidentified
MNSFVGIDIAAKSFDVVVRQDNKNSKVVTYSQHKNDFKKLIDKLVKLSPEHIVMEATGIYYLDLAKALFKAGLPVSVINPRSFKNFADTLLKRTKTDSVDASLLAEYGQRMTPALWTAPDESLMELRDISRQINRLVHMNTKAKNILHALCATEGTNKHVIEDEKEGILFNEKRIERMRNLAMELIKANEKLKRQFDNITSAIGIGDNSAICMMGELNILPKDLKAPQVCHYAGLSVRLTQSGTSVKSPGRLSKAGNTYLRNAFFMPAMSASTHDPNVRAFKEALVLHGKKNIQAICAIMRKYLMGVWACIKNDTPFDSSKLFSEEHKSACA

SEQ ID NO: 87621 - protein, 357 aa, unidentified
MVVGKSQTEDIVMQIQSIGIDLGKTTFHLVALNGHSQVVIRKKFSRQQLLVFTATLPSSLVGMEAGVGSHFLGRALGEQGHEVRLIPAQFVRPFVKSNKNDYCDAEAIAEAVERENMRFVPIKTEDQLDLQALHRVRERLVSRRTSVINQIRAFLLERGISFRKGPASLRRQMPEILENADEKLTARMRRLLDFLWQEWKHLQLQIESLSEDLEKIANSDAACVRLQQIPGVGPLVATAVVSAIGNGAAFHKGRQFAAWLGLVPRQWSTGGKPKLLGISKRGNPYLRKMFIHGARAAVLRVKREGSCLGQWMSGLESRAARNVVIVATANKLARISWAVLSSGNDYRPLHPAVDCSS

SEQ ID NO: 87622 - protein, 381 aa, unidentified
MRTAYVEQHSANEPVLAVALELAKASWKVALSDARRNPRLQTVDAPQPLARLEQVLQQIEQTRARWALPASVKVVVVYEAGQDGFWLQRALQARGVETLVIDPASLLMERRARRAKTDRLDALRLVEALLAWLRGERRRFQVVRVPRVEDEDRRHWGRERQQLQRELQQHRNRIEKLLTTMGCWTRLDRAGRQRLAAGELRDWAGQPLGAALQARLQRELQRWQDARTQLRRLEHEQPLRFGARQADQVARLTQLRGIGTVGARQLVLELFWRQFRNRRQLGASVGLVPSPYDSGTLHADQGISKQGNPRVRALLVEQAWLWLRYQPNSALSHWFAKKAGTDGRRSRRVAIVALARRLVIALWRYLERGELPAGATLKAVS

SEQ ID NO: 87623 - protein, 354 aa, unidentified
MTDLSMPDPDRLVTLGVDTHLDTHVAAVLDARGQWLDSISIPTTSAGYHALLDWAAAFGTIDQVGVEGTGSYGAGLARWLTAHGLVVLEVDRPDRRARRQHGKSDPLDAESAARAVQAGRASGIPKAGTGAVEAIRALRIARGSAMDARSRVTNQLHALRVTAPDTLRDELRALSLSGLVRRASGFRLPALIDEPSAATRMGLRSLARRHQALSVEIAALDGHLRRLVSRAAPGLLARPGIGVDSTGQFLVTAGDNPARLRSDAAFGMLTGTSPVPASSGKTVRHRLNRGGDRQANRALHMVVLTRMAHHQRTRAYVARRTAEGKTTKEIMRCLKRYVAREVYGLLLESPGLTT

SEQ ID NO: 87624 - protein, 429 aa, unidentified
MKIIYPRVCGIDVHKKFIVAVICISESVEPIYLKKRFSTFHNDLIRFREWLIQNDCQNVCMESTGKYYIPVYNVLESHISNIVVANPKWVRAVKGEKDDDKDAKWIADLFKFGIVRSSFIPQKDFRILRELTRYRYKLVNMRSSEKNRFQNALTSGNCKLDMVFTDVFGKSASNIIDLILSDNPYTDEDILSKVHKKCKASPDMILDSVNGTDLTPVQKARIELVNNHIKQLSSNIQKLDKLIDLMIEPYEDYISFLCQIPGVSRNSAIIILSEIGIDMNQFTTSRRITSWAGLTPSSNQSAGKKKSVRISRAGVYLKPCLVEVAHAAVKDKSHPYYANKFNKISKRRGKKRAYIAIARKILVAAYHMLLTGEIWNPADLSEVETPVEQRLKYVKNNLKSDIKQLLDIGLTVEELTLMIQQNANIIATQ

SEQ ID NO: 87625 - protein, 356 aa, unidentified
MSEKLNSKIAVIGIDIGKNSFHIVGQDRRGALVLRQKWSRGQVEARLANLPPCLIGMEACTGAHHLSRKLQALGHDVRLMPAKYVRPYCKGDKNDYRDAEAIAEAVQRPTMKFVATKTADQLDLQALHRVRERLVSQRTGIINQIRAFLLEREIAVRQGLRFLRAELPDILAKRTDVLSPRMLRIIEDLSGDWRRLDERIEGLSSEIEALARQDQGCARLMSVPGIGPLISSAIVAAIGTGDPFSKGRDFGAWLGLVPKQMSTGDRTILGSISRRGNRYLRTLFVQAAWVVLVKVGPKQWERYGLKSWIEAAKKRLHHNVLAIALANKLARIAWAVLHNGRTFEYVKTNATASRSA

SEQ ID NO: 87626 - protein, 387 aa, unidentified
MYFVGIDISKFKHDCAIVDELGDVITPSWSFQNDREGFSLLKELLDALDGEKKIGLEATGHYGQNLKLFLENNDFSFMEFNPLLINRFVHSKSLRKTKTDSIDALMIAQYLMTVEYKPYPPSFYTLEKLKSLTRFRDSLIRQRSKQLVELTNILDKVFPEFKSFFKGRFSATALYILFHYASPEKISNMNSKSYEPLRRLSRGRFSMVDFVELKTLARNTVGSTCDYLLQEMEITIDIYNQLQSKVEEIELQIHNCVLGLTPPMLTIPGIGVASAAVILSEFGDLSKFNSPSKLLSFAGMEPGYFQSGTSESTGKMVKHGSSHLRYAMMNCAQTVINNEPTFAAYYAKKRAEGKEHRVALTHVAKKLLRVIYTLQTKELSYNPDLVR

SEQ ID NO: 87627 - protein, 409 aa, unidentified
MEVLHPHCAGLDVHQKTVVACVRNAQSGRVETETRTFPTSTRGLLLLASWLHEHDVTHAVMESTGVYWKPVWHVLDDGDLILTLANARDVRNLPGRKTDVNDAQWLADLLAHGLVRPSFVAPQPIQELRDLTRTRKQLVRERAQHVQRVQKTLENANLKLTGTLSDVMGKSGRAILDAIVAGESDPAKLAALAVGKARAKHAELLEVLNGRVREHHRGMLRLHLKMIDALSATIGEVDDALGKALAPSKALMKILATIPGVSDVTAQVILAEIGSDMSRFPTAGHLLSWAGLCPRNDESAGKKRNTRIRKGSPWLRATLVQAAWAGAHAKGTYLRALFLRLQRKGAKKATIAVAASMLTAVWHMLREGVEYKDLGADHFARRDEKKAVGRLTRRIEELGYEVEIKKKAA

SEQ ID NO: 87628 - protein, 310 aa, unidentified
MKTKVFVGVDVSKDSLDVAIGLEKQILTFANDQKGVDALIEKLSRIGPELIVFESTGGYERLAASSFVEAGLPVVIVNPRQVRDFAKSAGILAKTDAIDARVIVRFAAAVKPDVRPLKDRQTLELTAMVTRRRQIIEMIVAENNRSKLANKRSKKDIKDHIRWLEKRLDKIESDIDKMIQISPIWRCKDNILRSVPGIGPITSASLICDLPELGVLSPKKIAMLAGLAPLNCDSGKFRGRRRIWGGRSSVRSGLYMATLAATRCNPAIKIFYQRLTAAGKCHKVAITACMRKLLIIANAMLRDQTLWQQN

SEQ ID NO: 87629 - protein, 410 aa, unidentified
MDSNYQHFVGIDWATVEHEVHAMNAEGKRVSACSFKHSGDGLADLCTWLHKLGDPATIAVAIEVPHGAVVETLLDRGFVVFSINPKQLDRFRDRFTVAGAKDDRRDAMVLADSLRTDGHLFRRLAAQPAKIIELREWSRMHDELQGDRNAIVNQMRAQLARYFPAFLVVAGDPGEDWATRLLELVPNHAAALATKPARVTKLLKEHRIRRIDAEEVLKHLRSTPVFSAPGTATAAIAHLELLGERVRLVNKQLRACKAKLESSLGDLAKESPEGQRNEQRDVTIIQTMPGIGVIVAATLLGEAAGPLRERDYPALRALAGVAPVTRRSGKKLVVVMRTACHPRVRNALYHWSRVAVQNDPVAKARYAALRARGKSHGQSLRAVADRLLGVLCAMLRDQTEYRPPQEVAAA

SEQ ID NO: 87630 - protein, 417 aa, unidentified
MTVRRAKGERVIFVGVDWAEAHHDVHVADEAGKRLGKARLPEGVDGIARFHELVGAHATDPAEVVIGIETDRGLFVTALVAAGYQLYAVNPMSTSRYRDRHSTSGAKSDAADAQVLSDMVRTDRHNHRLVAGDSEGVEAIKILARAHQSMVWSRGRQTNMLRSTLREFYPAALVAFEDLTSPDALEVLRIAPTPTLGAGLSRSKIAAALRRGGRQRRIDERAAEIQAALRTLQLQAPAVVATAMGASVAASVAVIAEMVTQIDRLAGELSVGFEQHPDAEMVRSLPGLGTILGARVLGEFGDEPNRYVTPKSRKNYAGTSPITRASGTKKTVLARHVRNRRLADAIYLWAFASLGPSPGARAYYDARRAAGDGHHQALRALGNRLVGILHGCLAHHVAYDEAVAWGHRSPTTLTEAA

SEQ ID NO: 87631 - protein, 401 aa, unidentified
MNEFTPEQHGIETASALEMVRTAENVDIHVAYVGLDVHKETIAVAIAEPGRGEPIYRGEIANKPKSVEKLLSKLSETYDGGLLLLCYEAGPCGYVLYRQIIASGHDCQVVAPSRIPKAPGERIKNDRRDALKLARLLRGGDLTAVWVPDQEQERMRDLSRARDDMKGQERKARQQLNAFLLRHGYHWPRGKSRWTPAHENWLAGLKMEHPWQQVVLEEYIAGERAAGERVAQLNDHLMRALPEWSLAPVVDSLIALRGVDKLAAIVLLAELGDISRFDSPKQLMGFLGLVPSEHSTGTRRRQGGITLTGNAHARRMLVESAWSYRFPARQTKHLKGKARNATAAAKQIAWKAQTRLCGRYRTLTRAGKNTKLVCVAIARELAGFIWDIVRQEMPRLAPQQG

SEQ ID NO: 87632 - protein, 390 aa, unidentified
MTSLKHSGNVWLGLDVHKDSIAAGVLGTQESSPRIELIGPGPDAVRRLIKKVSGSPERVRACYEAGPTGYELHRLLTGLGVRCEVIAPSLIPKAAGDRVKTDRRDAGRLARLLRAGELTAIRVPTPTEEAVRDLCRARADVVEDQRRARQRLGKFLLRHGVVYPGGRAWTVSYYQWLDQVRFAERALIETFRHYRAILAERDAALTAIDADLRPWCARDPFAAQVRRLACYRGVAELAGLTFATEVCDWRRFPSAPSFMAFTGLIPSEYSSGGSQHRGHITHAGNEHLRTQLVESAWTYRYCAQIGRGLARRQAGNPPQTLARSWAAQRRLCARYRRLAAQTRPHRRGHRDRPRAGRVPLGRNDRGRLTMTTHPAGTPAGSGHHPRHPNT

SEQ ID NO: 87633 - protein, 394 aa, unidentified
MKLVGIDVGKNSHHFCVMDKETGEFNVTPSSFSNNKEGFDFLINSLKPYSKKSILLGMEDTGHYHVALLKFLLSNGYTVALINPKTTDLTRKMEGGITKNDKLDTITICDVLDTPERKKQYRITKVDRFDLYEQRQLTRHHHNLKEELNVYCNRLQKSIDLVFPEFNTLFSSKYSIVYMNLLKTFGSAEAIASTDIRTIRKCFEVKGRGGRISLTPEKLKECAKNSIGISSEVETIQIKHLVSQITLIKEQIAEIDKKIEEFSITNNSPILSIPGISHFSGTSILAELGDIGNYSKPSQIIKFAGVAPYHYESSQYNAQHTGITKKGSKYLRKTLYQIILTVINNNPVFKKYYLLKISQGKGHRCAQGHCIRKLLRIIYHLLETGQSFDPALLR

SEQ ID NO: 87634 - protein, 403 aa, unidentified
MNRNAVGIDVSKGKSMAAILRPYGEIVSSPFEIKHTSGNIQSLIQQIKSIEGESRIVMEHTGHYYEPLARELSLAGLFVTAINPKLIKDFGDNSLRKVKSDKADAVKIARYTLDSWTELKQYSLMDEIRNQLKTMNRQFGFYMKHKTAMKNNLIGILDQTYPGVNTYFDSPAREDGSQKWVDFAAAYWHVDCVRKMSLNAFVDHYQKWCKRKKYNFSRDKAEEIHGAARELVPVLPKDDLTKLIVKQAIEQLNTASKTVEELRTLMNETAAKLPEYPVVMGMKGVGPSLGPQLMAEIGDVTRFSHKGAITAFAGVDPGVNESGTYEQKSVPTSKRGSSSLRKTLFQVMDCLIKTKPQDDPVYAFIDKKRAQGKPYYVYMTAGANKFLRIYYGRVKEYLMSLPE

SEQ ID NO: 87635 - protein, 321 aa, unidentified
MHTHYVGIDVAKAKLDCVLLLPDGKIRSKVIENNHKGFAVLTEWLKKYEVNNAHVCMEATGIYWEGVAVYLSNHDMAVSVINPAQIKAYGQSKLVRTKTDKVDARLIAEYGKERTPSLWEAPSQNEQKLRALVLRLESLQGMRTQENNRLESADKTIRSDIGKHIAWLDEEIKALIKKIRDHIDHDSDMKDRSDLLESIPGIGERTIAMLLAYRIDPCHFSNARQAAAFAGLDPRQHVSGSSVRGKPRMSKIGHSLLRKSLYMPAMVAIYKTDWGKCFRKRLAASGKAPKLIIGAMMRKLIHVAFGVLRSKQPFNPALHVV

SEQ ID NO: 87636 - protein, 365 aa, unidentified
MVNHIFVGIDLGDKNSVARIAVNRGKTERMTFVNNRRGRARLFEELGRRAEKQTDVQIVMAYEASSCGFILHDEAEARGIRCWVLAPTKMEKSVEQRKHKNDDRDADDVLEKVRAHVLAGNRLPTVWIPDRQMRDDRELVRSRMELVEKQTRLKTQIQMLVKRYGVEKPSGCGAGWTIRHRQWLEGLSECDALGGGARAALQSLLRQLSFLEAEIERMEKPIHQLAQQSRHKPIIDELTQEQGVGLITAMVYRTEIGHAGRFGRGRRVGKFVGLTPTSHESGQQQDRKGHISRQGPPRLRKILCQASWVHVQRDPQAKRFYQQLVSRNPKKKKIAIVAVMRRLAVRLWHRMRAAELRMTTMTEMN

SEQ ID NO: 87637 - protein, 343 aa, unidentified
MQTVTTIGLDIAKSVFQVHGVDAAGQVVVRRQLKRRYVLAFFEKLPPCLIGIEACASSHHWSRELRALGHKVRLMPPAYVRPYVKRQKNDAADAEAICEAVTRANMRFVETKTPEQQSCLMLHRTRHLFIRQQTAVINAIRAHLAEFGIVAPVGRNGVEELLGVVADASDKRLPEIARACLAALGAQLRMLKAQILEFDRMINAWHRSNETSKRLDEIPGVGPALATALVASVADPRAFRSGRDFSAWIGLVPKQHSSGGKDRLGGISKQGDRYLRSLFTAGALAVIRYAKIHGAKHRPWLTALLARRPTKVAAVALANKIARMAWAMMARGERYKEPVALAA

SEQ ID NO: 87638 - protein, 403 aa, unidentified
MIGDQATFQQEGGTPMNYVGIDYHKKYSHVTAIDEEARVIRSKRLENRPEAFEEFFKRLEGPSEAVLEASRTWGVMYDLLEAIDEVDSVQLAHSQKVRAIAEAKIKTDKIDSHILAQLLRADLIPAAYIPGKQTRSHKEMIRQRVFLVRMRTRLKNRIHVLLDRLHIPLPSVTDIFGKRGTDYLRKLNLPGVDGEILKEDLDLLEVFNRLIKEAEGEIASLVGEDPRVKLLRTVPGLGPILAAVVALEIDRIERFSLPSKLASYAGLVPSTYASGGRIFHGKLIPMTNKWLRWALVEAAWGSIRKSPYCRIYFESHKRHKGPHTAAIALARRLIEIIWHVLMENRNYEERLPRFYRPEKAAAAQSLSKSKPAAGDGLRSSQRGIAQRQREQNTNLSPAALTAT

SEQ ID NO: 87639 - protein, 350 aa, unidentified
MIIIGVDYHPEFQQLASVDTETGEFREARLKNPEQAEQFYRELAGRGAQVRIGMEASGHARWLERLFGELQFELWMGDAAQICSQRVRKQKTDRQDAQLILQLLVEERFPRIWVPGSENRDLRQLLWHRHRMVQARTRVMNPLPAVALNEGLRSKKRLWRERDRQPLEWFQLGQWASRRRQDLLQLLDQLNPTILELTQAVEREAEKCPPARRLRTHPGVGALTALGFVLILGEAQRFHCGKQVASYLGLVPLEKSSGSRRRLGHITKQGSSILRFLLVEAAQATVRSLPEWRSKYFHLMQRRGRNIAKVAMARRLAVRLYWMWRRGLNYEQLQKFGSHVGQPGNPYGVQ

SEQ ID NO: 87640 - protein, 328 aa, unidentified
MECIGIDVSKNTLEAAIVRKTGDFSEKVLRSHSFNNNTKGLEGLLSWAERTALSPETLFVMEATGTYYELAADFLYNAGMSVVVELPNKIKSFAKSRNVKTKTDKVDAKVIAAYGLHCATRRWKPMTENLAHMRTYIRQTCSLIKERTACKNQLHALEHSANTPEMLKRDLLDRIETLTKYIEKYQGETLRIAAEDGEFYSRAVKVASIKGVSLLTVLAVLCETNGFSLCTNVRQAVSYAGLDISLNDSGTFKSKGRISKRGNARIRYALYLPAITASHYGPESIRKLYSRITDRRPDAKKVAIVAAERKLYTLIYTLWKKNEPFKVL

SEQ ID NO: 87641 - protein, 343 aa, unidentified
MNAIYYIGLDIHKKAIVYCIKRIDGVIVDQGTVTAERKALNRWLANLPGPWHGAMEATIFTGWVYDFLKPHALELKVAHPEMLKAITAAKKKNDRADAEKIADLLRVNLLPECYMAPVELRELRRVLRYRNMIVRTAVKMKNKISGLLMEVGATYDKKRLHGKKYFAGLLERVEDVPDSVKELLALSRNGFEMFHAVQKQLVGALRDHTLIRERVNRLMTIRGVGEVMALTWVLEIAEPHRFRSARQAISYCGLCSAQHESAGKEQRGPISKKRNKHLQTMLVEAAKIAPLWNEQLAQLHEKELARGNRNRATLAVARKLVEFMLAVDRRETGFKPLKQIQAA

SEQ ID NO: 87642 - protein, 361 aa, unidentified
MTGMVTYAGLDVHARSTHAAAIDVSTGEVLRARFGPGVEEPVAWLAGLSGPVRACYEAGPTGFGLYRAASAAGVDLEVIAPGKTPRGPSDRVKTDRKDAELLARLLLAGSLTSVVVPPVEVEAARELVRAHDACRRDLMTARHRVSKMLLRHGRVYPESSTWTVAHRRWLAAQQFDETASELVFADLIASVDGLSARKTAIAERLSRLAEDEAWWPTVARLRCFRGVDTLTAFALHLELGGDWQRFKRANALSAWLGLTPSLHQSGESSRQGSITKTGSALARRLLVESAWHYGRDPRIGVTLKNRQQGQPDHILQIANRAQHRLHRVYHRMRGRGKAHNVIVVACARELACFLWAAATAD

SEQ ID NO: 87643 - protein, 516 aa, unidentified
MPPCAAAKTNYEKRNKTFIIEKRHTTEHVESNRATKDLWTLSGYKCRPFFKHKPIGYEPVDLFLKTGYSAFTITKGQSLPEYYQGGTKMAVYRMKTCCCGVDVHKDFIIAVIAKFNGSEVTFTKYERFSTFTGGIREFKEWLRYHNCYEVCVESTGKYYIPLYRIVSDEQFHVDVVHPKYVRAPKGKKNDRRDAKRIADMYMRDHIAEYSFIPPADILAIRDLTRYRRKTVNAITAEKNRLANCLTVSCIKLDGVLSDIHGKTGQAIIGQIVEQGSCGFDPKPFIDKRVKASPEKFEEALDGNVTPSVLTIMGVIQERLNYLSNQKAELEPRMESLAKDFSRQIEILDSAPGIDIISAICIIAEIGVVMGAFDSLKQFLSWVGLVPQNNESAGKKFSTRIGKGNAWLKPIMVQCALSAIKDKKHPEIRKKYLSIKKRRGHGKAIVAIAKRLMTAVYFMLQRDEMYNPISCADHAPRRGTLRVDSLLAHYQSKGYTLVNNNGEVLAQQSVKSIETVA

SEQ ID NO: 87644 - protein, 265 aa, unidentified
MIDGILGIDVCKNTLDVSISSYTKVRTKSFTNSPDGWRHLLDWLIAQKIQRVHACLESTGRYSLGIACALYEADHVVSIINPAQIRDFVRTKLGRNKTDGVDASHIREYCELFKPSPWAPPSEAHRRLGELQTIRSGIIAGLTEWKNRKNSGIVDAEAQALADATISHFTSQLGAVDKAIALTIDNDCDLQSKRDLLLSISGVGETLAGVVLAELPGPDVLRSSAEVVAYAGLNPRQHQSGTSIDRATRISKIGNAVLRARSWRW

SEQ ID NO: 87645 - protein, 378 aa, unidentified
MGKLIRIGMDTSKSVFQLHGVDSADLPVLRKKLRRQQLLSFFEKLEPTRIGIEACGAAHHWARELKALGHEVVLLPAQYVKPYVKRGKNDAADAEAICEAMSRPSMRFVPVKSVEQQAALMLAGTRDRLVRRRTQLTNTIRGCAAEFGLIAAKGLGKIEPLLLRIETDAMLPELAKELFAAHAKEYAQLKGQIEKIEAKLMAWHRHSELSCRLVKIPAIGPIGASLLAMKVTDPKAFRSGRDFAAWIGLTPKDHSTAGKTRLGVITRAGDEALRSTLVAGATALIQQAQKGRGHPSPWLVELLKRKPPKLAAVALANKTARVAWKLMVSGEPYNPAQARPVSREGRAAALYEGSASHPSLAPIATPGRATFAAATRNA

SEQ ID NO: 87646 - protein, 377 aa, unidentified
MKRKYYIGLDVHKDSIAIAYTWEGSRSAATYHGECGGSNLALERALRALARKLGVAFKDLNVCYEAGPSGFVLARRLCHLGLHCVVMSPSKTERKANERIKTDKRDAKNIAKLFRNGDIVEVRVPPALDEAVRDLCRARTDASDDQSRAKQRLNSFLLRNGIRYSGKARWTPAHMRYLRELVLPAQAQKIVLEEYIQAIDTAMQRQERLADKMKQLLEHWEWKPIVKALMACKGFQEVAAMTLTAELGDLRRFTHPRTLMAFLGLVPDEHSSGGKRRQGGITKCGNSHARWMLVECSQHYRRTPKISAALSRRQEGQSKEVKALSWRMQNRLNKRYVKLKMRGKRENKVIVAIAREMCAFLWELQNKIELPIPAPSA

SEQ ID NO: 87647 - protein, 359 aa, unidentified
MTSMPTLVPPRRVIVGVDTHKDVHAAAVLDERGALLGTALFAADRAGCRDLIDWSTDYGTPLRFGIEGTGSYGRGLAAAVRRGGHDVVEVARPNRADRHRRGKCDVFDAENAARAVLAGQARAIPKADEGIVEMIRHLKIAKDAAVKARSAAMQSIKAMLITAPAELREALEPLPDMALLRRCAALRPGELTSVTATAKHSLRAIAQRWQHLHAEITSHQHQLKILVDQLAPQLSTAVGIGPDTASALLIALGQNAGRLHSEAAFAKLCGACPIPASSGKTIRHRLNRGGHRQANAALHRIVIVRMKYHDPTRAYVTRRTTEGKTKPEIMRCLKRAITREIWARTQHLRQTTPQPLDAL

SEQ ID NO: 87648 - protein, 337 aa, unidentified
MIVIGVDVHKQSLTAVAVDEAGRALAEVTVAAAPELLGWSASLARERLWALEDCRQLTRALERTLVAAGEGLVRVPPKLMAPQRRAGRTRGKSDPIDALAVARAALREPRLDHPRPGEQRLRELKLLVDHRDDLIDERRRAQQRLRWHLHELDPEWAVPLAALDRGVWLDRLGRRLARLEQTAQVRIARELVGRCRSLTRMILDLDRELQTAAAQTAPALLALPGCGAISASKLLGEIGPIERFESDAQLARHAGVAPLEASSGKHRRHRLDRGGNRQLNCALHRIAVTQARVHPPARAYLERKQAEGKSRREAIRCLKRQLARTVYTTLKNAPLLT

SEQ ID NO: 87649 - protein, 427 aa, unidentified
MKTCILRPANAVQPQSARPQPRPPQPRPAPRATAGACRGDPVPPAAPGPALFVGLDVHTASIAVSLAPSGSTEVRRYGLIGGTHDDVLKLARKLAAARPQTELRFCYEAGPHGYPLGRCLRSHGYECILVAPSKMPRLPGDRVKTNRRDADQLARLHRAGELTALHVPDPADEAVRDLIRARGQVQRQQHRARQQLKMFLLRHNFRYAGTKAWTQKHLNYLATVKLPFAEQQFVFQEMVDVITEAGQRLARYEAQLPRVVALWRWEPVVKALMSLRGVALLTAATLVAELGDLHRFGTARQLMGYLGLVPSEDSTGDQRHQGGITKMGNGMARRALIEAAWNYRTPARLSRELLKRQEGLPKEVKDLAWNAQTRLHHRYKYLTGVKHKKATVAAAALGRELSGFVWALGRLVRPRPQKEEGTKPVAA

SEQ ID NO: 87650 - protein, 287 aa, unidentified
MNTQQTALSKLSIAIDIHKRSWEVHCATDLFAGKSFSMPSDPEQLLKYVSKHFPGYEVSAAYEASCCGYHAHRCFKSYGRRSLVVNPADIHRKGKEKHTKTDRIDAQLISRELKDGRLDGIHIPDVDHEELRTLFRRGNDVVKDFRRIKSYIKMQLLFFGIKEPEEFDNDHWSHKYRRWLDDIVFKNPTAKATLESRMRFFRFVDQELRDVSTQLRRYCKRHHKKDYLLLRRIPSIGGMVACGILYELGDLRRFKTIKHLAGYVSLAPSLHQSGDHQGKNVKRSLSK

SEQ ID NO: 87651 - protein, 407 aa, unidentified
MNAVGIDVSKGKSMMAALRPMGEVALPPKEYPHTEVGLERMALDILALGEDTRALMEATGRYHEPVAAALHEYGIRVTVLNPLFIKQSGGGSIRKVKTDKADAMKIAKYALDNWVDLREYTPMEPIREQLKLCSRQYNLYMKNVVALQNNLISLTDKVFPGVNELFSSPDRADGSQKWIDFVITFWHCECICLVSEAAFTQRYRKWCKRKGYHFSERKAAELYMGSMGHITTLPRNSNTKLLITTAAKELASAKATLAVLRAEMNRLAQQLPEYETVRAMYGVGETTAVQLMAEIGDVRRFPRRSSIVGFAGVDPAVDDSGKHISKSNPTTKRGSPHLRKTLYQIVCTYLRKAPADEPVYQFLDKKRAEGKPYFVYMTAAQNKFLRIYYARVKECLIAADTRELSED

SEQ ID NO: 87652 - protein, 433 aa, unidentified
MSANHTTEETAPFAAFAGIDWADQPHAVCLYAAGSDRAEHSTLEHTPEALAAWIGRLRERFGGRPVAVAVEQRRGALLHALMGQPLLVLYPIHSTVLGKYRGAFVPSGAKDDRGDAFWAADLLRHHHAQLRAWKPDDTATRTLARLVEDRRQAVNLRTRLVQKLTAALKEYYPQALGWAGHQLSAPLAWDFLERWPTLAALKQEPIEAVREFYRRHHGSNREVIEARCEQIAQAQALTSDAAVVEAGTLKVAMLVGQLRALAPAIARYEERIAELFGCHADAKLFAHLPGAGPALAPRLLAAFGGDRERFATAAEVQCFSGVAPVTVRSGQGQWVHWRWACPKFLRQSFVEFAEQSLSRSSWAAACYEQQRAKGKSHPAALRALAFKWIRILFRCWRDRQPYDESVYLAALQRRGSPLMARINSAAAVPATAA

SEQ ID NO: 87653 - protein, 384 aa, unidentified
MKTNSSAPQTLYLGLDVHKAETVIAILESDRDAEPRHYGSIATTQHALERAMRRIVKKQDIQLSDLHVCYEASGCGFWIARRLIQMGVRCDVIAPSLIPVKSGDRVKTDKRDAMKLAKNLRSNDLVSVNIPDSTDEAIRDLCRARTDAVDDLRRAKTRLLAMLRRLGYNYDGKTHWTEAHKRYLRHLTLPDKAHNRVLEDNITTIDFHVKRIAKLEEGMLQLLDDWQRKPLVDALMAFKGFKHVAAMVTVSEIGTFSRFEHPKKLMAFLGLVPTENSSGTKQKRGGISKCGNPHARWILIEQATHYRVPPKVSAQLSARQEGTAPWIKELSWKTQTRLSHRFKMLKKRQLHHNKIKVSVARELTAFIWELGTRIEAKQDTATQN

SEQ ID NO: 87654 - protein, 325 aa, unidentified
MNEQVDAIVGIDMSKKKFDLALLRNDKFKHKVFPNTKAGHEAMVTWLQKNNVATAHVCMESTNVYGEALAEHVFDQGYTVSIVNPARIKGFAQSELSRTKTDKADAQVIARFCAALKPDAWTPDPQEIRELKALVRRLESLMEMKQQEVNRLHVAQDIVVSRLREHIDYLDQEIKTTKQHIRDHIDNHPDLKEKKILLDSIPGIGEATIHVVLSEFANIEKFNNAKQLAAFIGVAPKERQSGSSVRGRTMMSKTGRSQLRKTFFMPALVALRYNPILIQLKQRLTDAGKSKMVIVGAAMRKLVHLIYGVLKSGVPFDPDYVNRKA

SEQ ID NO: 87655 - protein, 323 aa, unidentified
MTRIICGVDVSSRWLDASIGRTGTPQRFPNNPVGIAQLADHCLAQQVELVALEATGGYERQAFALLSEHGLPVAVLNPRAVRQFAQSMGRLEKTDAIDAAMIAWFAEVNGAQPRTLSQPGQLELRALVTRLRQLTDLRTAQKNQQRLIADPRVQASFDELLAVLKRQMRTLAEAIATLITADPLWRELDLAFRTIKGVADRTVARIMAEMPEIGTLSNKAVSKLAGLAPLAQDSGRHQGRRAIRGGRASVRDLLFIVASVAGRHEPDFIAFRERLAGAGKPPKVVRIALAHKLLVRLNAKAREIRHHLQSATEPVLQSLVPQS

SEQ ID NO: 87656 - protein, 355 aa, unidentified
MSQEKYIGMDVHQATISVAVMDAQGKLIMECLLETRAVTIVEFIRGLHGTLSLTFEEGTSAAWLHDLLKPHVGRLVVCDPRKNALLKDGNKSDRIDARKLAELLRGNQLHPVYHGEHGVRTLKELGRSYLTITQDVTRVMNRIKALYRSWAIPCAGTTVYSPRHRAEWLAKIAEPGVRVRAERLYQQLDLLQPVRLEARRELLAESHKHSAVKLLRQIPSIGPIRSALLVALLQTPHRFRTKRQLWAYSGFAVETHDSGEYRSVRGKLQRNRERMTVRGLNDNHNRDLKNLFKSAAISASTRPGPLRDFYVARVEKGMRPTMARLTLARKMAAISLTVWKKGVEFDPQQLQRQAA

SEQ ID NO: 87657 - protein, 332 aa, unidentified
MNMHAQGGVVSGVGRANAGIDVSKLHLDACVGDQHRRVPNDADGWQELINQFKSTDVDLVVIEATGGYERELVWALQRAGIAVARVNPRQSHDFAKSMGELAKTDKVDARILRDFADVLARHKDRAKYITPMEDVRRQELAVLMTRRRQLIEMRVAEGHRLEQASARAARSIKAVLGMLDKQIAAIDADADSHLDRHFKQQRALLDSVKGVGPVAILTLSAALPELGRLKRRQIAKLVGVAPLANDSGERSGKRRIWGGRAEVRAVVYMAALSAIRYNPVFKVFYERLLQAGKPKKVAIVACMRKLLTILNAMLRDKTAWDLSKHENFIQQT

SEQ ID NO: 87658 - protein, 406 aa, unidentified
MRLFIGDDWAEDHHDVEVMDAGGRVLAKKRLPEGAAGMARLHELIGIQLGEDAQDAEVLVGIETDRGPWVAALVAAGYVVFPVNPLQASRYRERRGVSGAKSDGADAHMLADMVRTDWHQLRPAAGDSAEAGAIKALARMHKTLIWDRTRQLQRLRHQLREYFPGALEAFDDLAAPDALELLAKAPDPARAARLTRAQVSAALKRARRRNIADKTVAIISALRSAQLGQPPAVTSAYAATVRSLIAVITALEEQVTVLQVQVEAHFGQHPDAEIYLSQPGLGSLLGARVLAEFGDDPHRYASSKARKNYAGTSPITRASGKKKTVMARYIRNDRLIDALMAQAFTALNASPGARAFYDQQRADGAGHNDALRRLANRLVGILHGCLKTRTLYNEAAAWSHRGKLAA

SEQ ID NO: 87659 - protein, 315 aa, unidentified
MVDVPCFIGIDVAKAQLDIALRPAGERWAVPNDASGIAPLVDRLQALHPTLIVLEATGGLERAATAALAAAGLPVVVVNPRQARDFARATGQLAKTDALDARALAHFADVIRPTPRLLPDAQTQELRALLGRRQQLIGMRTAEQNRLVGTNTRLAKDIEAHITWLNAGIATLDDDLETMLRASPLWRENDDLLQSAKGIGPVCAHTLLLELPELGTLTRQQIAALVGVAPLNCDSGTMRGRRTIWGGRAHVRTVLYMGTLVATRYNPQIKVFYERLLAAGKVKKVALTACMHKLLTILNAMLKHRTPWQPQEVQN

SEQ ID NO: 87660 - protein, 376 aa, unidentified
MSAGDSRHMHPAEGDLEMIVVGIDPHMKTHTAVAIDAATGVSLAEMTVTCDRAGHDELLSWARALSAERYFAIEDCRHVSGRIERHLLPRGERVVRVPPKMMAGARASARTYGKSDPIDAACIARAALREPGLPHATLAGPEADLRLLTDHRDDLVAERARIIKRLRWHCHDLEVGLELPARVLDRYVWLDRLEQVLGALAPSMRQRVALEQLKRCRELTAAVRGLEREIRTLAAALAPELMDIPGCSAISAAHLLGQTAGASRFSGEAAFAMHVGTAPLPVSSGKSERHRLNRTGNRCLNSTIHIIAVTQLRMHPPAIAFIERKRAEGMSTREALRCLKRHLSRVVFKTMLRAERARTAEVIDVDFGPAAIDAAV

SEQ ID NO: 87661 - protein, 322 aa, unidentified
MEPTIVGIDIAKKKFDVALLLGEKTKSGAFHNTPAGFATFARWLTTRHGVERIHACMEATGTYGEELALYLYRAGHVVSVVNPAKIKGFAQSELSRTKTDKADAALIARFCRAMKPEAWQPPAPEVKKLQALVRRLEELSGMLTQERNRLATADEVVRPSIEGVILVLQERIKHLRQLISDHIDQNPKLRANRDLLQSIPGIGPTTSAMILAEFGDVERFGDARHMASFCGLTPRHRQSGSSVRGKSRLSKTGSSRIRRALYMPALSAIRYNPVIIAFRTRLLANGKSRMVIVGAIMRKLVHIIFGVLRSGRPFDPAIAAAA

SEQ ID NO: 87662 - protein, 348 aa, unidentified
MSITMIGLDTAKSVFQIHAVDAAGKPQLKRKLRREEVIPFFEQQERCTVVLEACGAGHHWARVLTQLGHEAKLLAPEAARPFVKKGKKNDAADAAALCPAASRPEATFVPVKSPEQQGVLALHSVRTLLVKQQTMLANAMRGLATEFGLVVAKGIHKLDELEAQVQAEASMPATAKQAFAELHGQSQAAATRIAGLEVQIVAHARQDATARRLATIPGIGPITASLITATVGDSIGSFKSARHFAAWLGLVPRQHSTGGKTRLGRITKAGNSEIRRMLVLGATSMVFRAGQWNSAAGAWLRGVLERRPVRLATVALANKMARIAWAVMTRGETYQAKGRAPAAAAAVA

SEQ ID NO: 87663 - protein, 472 aa, unidentified
METAYRRCCGIDVHKKSVVVHVLPPHGQVDGTPLEREFRTFSRDLRSLRGWLKNCRITEAVMESTGQYWRAVWNILEGEVPRLILVNPTHVKALAGRKTDRIDSRRLARYLENRELDGSFVPRRDIRELRDLTRGRVHLLEEVNRVKNRIGQMCEAGNIKVSSVATDLFGASGRRMLDAIVEGRRDPGWMADYARGRLRSKKQQLQQALDGSFTPHQRWMLGEELGHLDSLQAQIARMETEIEQRMEPYGEQIRRLSTIPGVERITAWTILAELGPDMSVFPDARHVASWAGMCPGNRQSGGKRMSGRTRKANPYLRRGLCQAAWAASHTKQTYLSALYRRLRSHLGHNKAIFAVAHQILITAYVLLRRGEDYRELGPDHFDRQNKPKVVSRLVDRLTRLGYYVTLKPASDDPNPITPLTEATSPSSELHPLSTTEPTISAPSGPLSTGKRRRGRPCKCAERGTECTHIARP

SEQ ID NO: 87664 - protein, 443 aa, unidentified
MKNERSLTQGDFQLVHPNAAGIDVASEMHFVAVPAGRDQQPVRKFGSFTQDLHELARWLKKCQIDTVAMESTGIYWIQLYLILEEYGIEVFLVNARHIKNVSGRKSDVQDCQWIQQLHSYGLLRASFQPDLFGRELRTYMRHRKNLTQSYAMQVQLMQKAFEQMNIKLHNVLTDITGKSGVAIIEAILSGARDAKYLASLADSRVKAPMEEIIKSLQGNWRNEHLFELRQAYELYQFFKLKIRECDHQIEHTLQQQDTSSSNQDGDQNRKQRGKNTFDFNATVYLKKILGVDITEIFGISEVSALQIISETGIDMSKWATQKHFVSWLNLAPNNRISGGKQLRSKKIKKKNKAGQAFLIAASSLLRSNHWLGTFMRRISARHGAPVAIKATARKIALIFYKMIKEQTEFNPLPIETYNQLFKERKLQYIKNQASKLGFQLIQV

SEQ ID NO: 87665 - protein, 442 aa, unidentified
MSETSSEPKFAALVGIDWGDKKHAWALQVEGSSQIERGEMLHTPEAIQEWVAELRRRFPTGCVAIALEQSRGPLVFALSKYEHLVLYPIHPTSAADYRKVFRPSGAKSDGPDAVLHLDMLVRHRDKLRSLHPDTPQTRTLQLLVEDRRQLVNERTRYSNRLRADLKSYYPQVLQWFEDLYTPVALDFLERWPTLEDLQKAKPAMLHKFFQQHRCRDDAHHQARLQAMRTALEATTDLAVITAGRAATCTAVRLLSTLHQSIQEYDRQIDQLAKAHPDFVIFDSLPGAGEVLVPRLIAAFGTQRDRYQHAAEIQQYSGIAPVTQASGQQHWVHWRWSCPKFLRQTFHEWAEKSIPYSDWAHAYYRAQRDDKNKSHNAAVRSLAYKWLRIVFRCWKDRKPYDESIYETALRRHKTAPDPQPSPFELNVRWTSCGSFQKIALKTP

SEQ ID NO: 87666 - protein, 316 aa, unidentified
MTTSSVVVGVDVAKDRLDVAVRPSGEAWSEANDDAGVRALVARLRPLGPALIVCEATGGFERAAIAALAAAGFPVVVANPRQVRDFARATGQLAKTDQLDAEILALFAERVRPTPRPLPDAAAQLLDAVLTRRRQLLEMLVAEKNRLGFAPKPLHRGIQAHIRWLERQLDDVTTELAGLIEASPVWRARDDLLQSVPGVGPIVSSTLLGELPELGTLSHKQIAALVGVAPLARDSGTLRGKRMVWGGRASVRTALYMAALCGRRWNPTLKAFYERLKAAGKPTKVALIACARKLLTILNAMMRDQSPWTCTVQYSC

SEQ ID NO: 87667 - protein, 366 aa, unidentified
MLYLGIDQHARQITISLRDESGDVLQARQVSTQPEKIQAFFQQLTRERLRDGDSFVAVLEVCGFNDWLIRMLQDYRCHKVILIQPEERKKCKTDRRDAAALSELLWVNRDRLLQGKPVRGLRQVEIASSTDQENRRLTTLRKDAGQARTRLVNRVRHILRRHNLQWQMPTRRFPTKAGIAWLKQLALPEIDRLEMNHLLTDVEQVQQRLKDLEQVIAQRCGVSAEAGLIASMPGVSYFTATSLACRVGRVERFPRARSLANYWGLTPGCRNSGENTQRLGNITKAGSGMARWLLAQVTHKVLRKDARLREWFKRIKRRRGSIIARVAVMRKLATIIWHMLSKRKTYAECRVLAEAGGKEKEKQECV

SEQ ID NO: 87668 - protein, 458 aa, unidentified
MYRELQPFREALSQELKASLSPAAAGVDPNKLLQTYLDRLTMYIGVDVADQTFTVLATDASQQVLGSLQGCANDPNGFQCFISWARELRDQHGLRIIAVAAETTGIYYWALWDFLGEQPDIARVLFNPRTTEHMGEVLSKKVRNELVDALLLAEQLRLGSTPEVIVQQDTDLLTARYYSRAARDLAQQINRKKNQLRALLRAYCPPLSQVFPGSKLHHPAVYALLQECVFPEEFVQAGAEVLAAILAAHCRHAFGLAQAQQLVQACQQALTRPVGRDVIRHLVHGYIEDIATFQQRKAFYLKTGYALIENRQETKLLRTVKGAGISNTLALVSELGDVSRFPSGQHLASFLGLTTSKHISGATLYRSKRITKQGSPNGRYAAVNIAQHLSQRVPRYQAMYQRIKGRKPPGKGHFIALVAIARHFIANVLYDMWCNKRPFFLKDEDYRQYRQKQSRSED

SEQ ID NO: 87669 - protein, 343 aa, unidentified
MEHFAGLDVSVKETSVCIVDDTGKIVREVKVASEPEALLAMLKNPAYHFKRIGLEAGPLSQWLYSALAEAGLPVICVETRHMRAVLKAQINKTDRNDARGIAQMMRAGLYRPVHVKTLRSQKLRMLLTHRKLLQAKAIAVENDLRATLRNFGLKVGVVGTVKFEARIKELVESIPDLAELVEPLLVVRRTLREQIGILHRRLLAIVRDDDVCRRLMSVPGVGPVVALTYRATVDIPIRFRNSKAVGAVFGLTPSRHQSGESDRTGGISRCGDEMMRVMLYEAAQIMLVRSVKWSWLKAWAVKIARRRGLKKAIVALARRLAVIMHRIWVDGTEFQWTREEAAA

SEQ ID NO: 87670 - protein, 367 aa, unidentified
MKKISTAAAKQTRNFQDQKLTIGLDLGDRTSWYCVLDGAGEVVLEQKLSTTPKVMKEVFGGMPRSRIALETGMHSPWVSRLLSELGHEVIVAHARNVRLIGESRKKDDRLDARTLARLARIDPQLLTPVKHRSAQAQSHLMVIRARAGLVRARTSLINTARGLTKSYGERLCGCNPRNMNPEKAQGLSPELQAALAPLLVAIESLSEQIREYNERIEGLAQQSYPEVALLKQVKGVGTLIALTYLLTLEDPHRFRKSRDVGCYVGLQPGRRNSGQSEPQLHISKEGDPYLRTLLVQGAHHILGPFGVDSDLRRWGLKLAERGGKNGKKRAVIAVARKLAVLLHRLWVSGEAYEPLRNCQEVAVPVAA

SEQ ID NO: 87671 - protein, 375 aa, unidentified
MSKKKQTAAGLGAIYARVCGMDVHKDVVVACVRILDMKDGTVQSTLRRFGTMTADLLELRQWLAQEQVTHAAMESTGVYWQPVFNILEGHFEVWVVNAQHIKKVPGRKTDMKDAEWIAQLLEHGLLRPSFVPPPEIRRLRMLTRYRVQLMGDRRRDIVRLELMLEDASIKLSSVASSLKTVSARAMLTAMINGETDPLVLADLAKGRMRRKIPDLAQALTGHFDANHARLARSMLRRLDLVEQALAELDAVIVQACQPWAHQIELLQTIPGVGPKVAETIVAETGGDMSRFPTAAHLAAWAGLAPAMNESAGKQTPAGKRHGNKWLTAMLVEAAGSVGRMHGKNYLAAQHARLMRRRGMGRAQVAVAHSMLVAAY

SEQ ID NO: 87672 - protein, 429 aa, unidentified
MTKISHKTEQPVLVAIDIAKHRNEVLIAVPGRQRRRRLTVRNAREDVDRLVETLAAFEVPVQVGFEPTGDYHRPLAWLLHQAGFDLRLISSLSLARTREAMHNSWDKNDPKDAQVMLHMMQTGLTQIWHDPLVHGVNDIQELSKTHAVISQTKTEFWHRLRTHYLPLYFPEVERFMGNSRSDWFLAFLEQFPTPGSITCMSEDAFIEAAWDVVGKKVSKARLLADIYATAADSIGLPVDQETPAIRMFRLVLGQGRHLIAQRDQIEQQASDLLGTHPDFVRLRTIPGIGPINALTILAEAGDLRRFGHHRQFLKYCGFNLSTQQSGVFRGQTKLSKFGNARLRRTFWMAGQVAIRQRENSFRDKYERYIARDHSDPHLKRKALTAVAAKIARTAHSVIKTETDYRPFFEGRGPRRKDPALQVPLRHASS

SEQ ID NO: 87673 - protein, 366 aa, unidentified
MPSVSHLGPTHLGLDVHKDTISVAILTPDRDGPDVERIPHDEASVRRLVGRLGDPRWLRACYEAGPTGYELARLLHSMGVRCEVIAPSLIPKAPGDKVKTDRRDCRRLARLHRAGELVAIRIPSVQEEAVRDLCRARADMVEDRTRARHRLSKFLLRHGRPWRGGNAWTLTHERWLLQQRFEEPALAATYAHYRAVLQGRDAALEAIQADLAVWYDLPPFADAVHRLSAYRGVTRLGALTLASEVCDWRRFGRAAAFTGFCGLVPSEYSSGNRVHRGRLTKAGNAHLRAQLVESAWAYQHRPGVGVDLHGRQQGLDPQVVARAWAAQLRLCGRFRRLAARKDSKNVVVTAIARELAGFLWAEMLVA

SEQ ID NO: 87674 - protein, 392 aa, unidentified
MFQWGLIDLVKEINQTSDRIVTIGRMRAWIGGWCSPTIVLLRRLQPKKGVEMGRSIGVDLHKNCFTACYMNKSKYELSEFKVSPEGIAKFKDGLKKSDEVAVESTGNAGYFAREIKTRVKRIAIINPTQFKIISHSIKKTDEHDAITIARYLSKGLIPEVRMRTEEQSRISSLIGTRDKFVKLRTAMKNKVHNILNANGIVTKKEMFSSEKALDKVCQMDLDREYIFELEIVVRQVKSLNKSIEEISKELNERGKKLKGHKNLTSIKGIGDTNATILLSAIGNVEDFADDKKLAAYFGIVPRVSISNETSHYGRITKMGNKIARTALVQSTLIAIRYNPYLRSFYEKLKSKKGSGKAIIATSRKLLTIIYRTLKNDWVFEDFSNYKLAVSNS

SEQ ID NO: 87675 - protein, 349 aa, unidentified
MLADQLDYVIGVDPHRDAHAIAVVEVVSGAVVFEATVAADSDGYARALSLVDEHGAAGRRAFAVEGTGSFGAGLTRFLSGRGERVLEVGRLRRERRSGGKTDALDAVRAARGVLSQRWPATPRAGGERQALQALVAAREGAVNARRAGLCQLRDLLITTPEPLRSELRPLTRARLLRRLAATRPHGREDAELRGSLLALRSIARRVLALTGEERELARQIENMTRKLAPQLLDQPGVGPHAAAQLVLSWSHQGRIRSEAAFARLAGAAPIPASSGQTIRYRLDRSGDRKLNRALHMILVTRKRTHPATIAYIERRLHEGKTRREANRCLKRYLARKLYRLLEHGPPLTT

SEQ ID NO: 87676 - protein, 312 aa, unidentified
MSHHLFVGIDVSKAYLDVAVLPQQERCRCTNDEAGWAELIARLGDPQGTLIVMEATGGYQFAAAAALATAHFDVVIANPRQVRAHARARGLLAKTDKLDALAIADFAARQQPPVRPLPDEQTRLLQALMARRGQLLEMLTMEKNRLQQAPPALAQPITKHIQWLKKELAKLDDDLDDQVRHSELWREKDELLRSVPGVGQVTSRTLLAELPELGQVNNKQIAALAGVAPLNCDSGQFQGHRTIWGGRATVRTALYMAILSAIRHNPIIRTYYQRLTKVGKPPKVALVACMRKLLVILNTMLKERQRWQPRLA

SEQ ID NO: 87677 - protein, 354 aa, unidentified
MRGAVHMQISTIGLDIAKNVFQVHGIDTSEKVVVRKQLRRRQVLAFFEALPPCLVGIEACATAHYWARELTKLGHQVRLMPAKDVKAYVKRNKNDAADAEAICEAVRRPTMRFVQVKSAEQQGQLMLHRTRDLLMRQRTQVINALRAHMAELGIVAAQGRDGIKELLKIIAREEDMRLPTDAHTSLVVLAAQLQALQTMIRSIEKRIVVQHRSNEASKRLETIPGIGVIGATAIAATVPDPKVFRSGRDLAAWIGLVPREDSTGGKQKLGPISKQGDQYLRRILVVGAHAVLKRARQHPDKYPWLTQLLARKPFRVVAVALANKMARIAWALLARGGTYRAPALTAATQGVRRR

SEQ ID NO: 87678 - protein, 403 aa, unidentified
MFALGIDVAKQSHRYLLLNPDGKKIRSSSFENSSQGFQSLWQQLQDLKIPQEDLLIGMEATGCFWENLYSFLKEKGFSTVLLNPFHVKKFREALGKKAKTDDIDALIIAQFLRTNEYVQSQVAEETVQSLRELTRLRFELLNENKNYHRQVCSLLTLIFPEYEQTILKNPFTATSSAILEKFPTAKKLAQAKPKQIEKIVRSTPGNPFDLPEIAALLTAAKKSIYSGRAEEARSTSLRILLTQVASLSASIKKLEEEIHKILSPQESEENFPGDNVLTIPGVGEKTLAAVLSYLGEEGANFPSSTHAVGYVGYFPKIHQSGQTQRENKICKRGPKVLRWALYMAAVASVKHNPEMKALYQRKCSQGKTKKQALICVGKKLLQIILAMLKSGKPYNPQMVFKQA

SEQ ID NO: 87679 - protein, 359 aa, unidentified
MNATTVAVDLAKNAFQLAYADANWKVISTSRLTRSQFQRCFHNSSVSLVIMEACGCAHYWARQMQTLGIEVRLLPARYIRAYVKRNKTDAADAAALLEAARCADIQPVRIKSVEQQALQSLHRTRSLWMSTRTSRINALRGFCREFGIDIAQGARVGLEQIARALADPNSLLPQLLRTSMRSMVDEIRLLEVRISDLEKQLGELARQSAACTTLLSVPGVGLLTATAMVAATSGEVSHFKDARHFAAWFGLTPKEHSSGSTRRIGRISKRGDRYLRMLLTHGARAVLNAANLATRMQRPIDPLRRWALQIQQRSNHNKAVCALANKLARICYAVLRDHEPYAAARLNHKLQQATFAMPA

SEQ ID NO: 87680 - protein, 341 aa, unidentified
MKLYTGIDLHSSNSYVGIIDETGKRVFKKKLPNDPWVILNTLAQYKNDVVGIVVESTFNWYWLVDLLMAEGYTLHLANPTALQKYSGLKYADDEHDAFWLAETLRLGILPEGYIYPKEDRPIRDLLRKRSHLVRLRTSLVVSLQNIINRNNGFKLKKNKIMASTTNHVTPFLEANEDLALAGKVSKDSIDFLTRQIKAVEATVEGKVELREPYARLLTIQGVGKILGLTIMLETGPISRFDKAGNYVSYCRKVSSKWISNDKRKGKGNKKNGNKYLAWAFSEAAELARRYYPEARAYYNHKLKKTNVAIAHAALAHKLARAAYYVMRDQVPFMPEKLYGSS

SEQ ID NO: 87681 - protein, 340 aa, unidentified
MQQYVGLDVSMEDTSMCVLNQAGDVVFEDKVPTRPAAIARVLRRQAPEAIRIAFETGSLSNWLWHELKALGFPVLCLDARHAKAALSARMNKSDRNDARGLAEMARMGWYREAKVKSMESRHVRATLAARAKLVDIRRDIENQMRGLLKSLGIILGKTGSWSLPAKIRASLREAPYLRPLIEPLLLAHSALVTQIVKYDRQIKDLARADQTVRRLMTVPGVGPVTALAFASTVDDPQRFKRSSDVGAYLGLTPRRYQSGELDRTGRISKRGDRLTRYYLFEAANVLLKVVKRGSALKSWGTRLAKRIGSKKAKIAVARKIAVVLHCIWTDGTQFEWSKAA

SEQ ID NO: 87682 - protein, 400 aa, unidentified
MLSIGIDVSKGKSTVCGMKPGGEIVYAPFEVQHTREGMSELVSLLHNSGEEVRAVLESTGSYHCPVVAALLENGIFVSVVNSLRMKRFCSQSIRKVKTDRIDAMQIALYGLAYWQELQPTRLPEDTYRELQLLARQYYQMTSMLIKAKVDFNALCDQVLPGMQELMSDHAGRHKLSDFVLRYHHTTHILEMGETRFRKDYCKWAEKKGYRNCERMAVLIFATAQNGIPVLPNAPSTQIVITEAIRVLHTVEASRDAILTQMQALAKTLPEYSLVREMPCIGDTLAPRLIAEIGDVRRFHSKRALIAYAGIDAPPYQSGKFCANNRHISKRGNRYLRKTGYEVMQSYVMHKPANDPIFTFIEKKRGEGKSGKLAMVAGLNKFLRVYYGKVTELYRSLPAIE

SEQ ID NO: 87683 - protein, 310 aa, unidentified
MDRIVVGIDVSKDRLDVVVRPSGETFAVDRNAAGVETLAARLRELLPHIVALEATGGFETVVAAGLGAAGLPVAVVNPAQVRAFAKAIGQRAKTDPIDAAVIAHFAEATSLEPRPLPDEQTRLLADLVGRRRQIVVMIGAERQREQRLIAPRLRKSIARLIKALEKELASMDADIDDAVKGSPAWRAKEELLTSVPGVGPVISRTLMAELPELGQLSHKQIAALAGLAPFTRQSGKWRGKSFIGGGRTAVRAALFMGAMVAKKHNPLLKAFFDRLVAAGKPKMVALIAVARKLLTILNAIVRDNQPWQTA

SEQ ID NO: 87684 - protein, 351 aa, unidentified
MKSEQTAQPKLYIGIDIHKRSWKIHCATDLFSGKSFTMPPKPDVLKTYVSTHFQYHEVSTAYEAGCCGYYAHRSFEGYGWRSLVVNPADIHRKGKERFTKTDKIDAQLIARELKDGRLECIHIPEVEREQLRSLFRRRNDLVKDFRRVKSYIKMQLLYFGVSIPEAFDNDHWSHDFRGWIDAIIFNHPTARETLDSRMRSFRFIDKELRDVSSKLRAYCRKHYKQDYYLLRSIPGIGGIVACGIICELGDLRRFNNIKHLAGYVGLSPGVHQSGDNQRATGITMRAHRLMRSYFIEASWQAIRTDPVMQAYYRKHLGKNVKNIIVKVARKLLSRTLAVIKTETPYTIGVIE

SEQ ID NO: 87685 - protein, 425 aa, unidentified
MNSNTNQKINQVSEKTLVIGIDIAKRTHYACAVDERGRVLQKSFPFSQTREGFDAFYERLLALRATHEKSEILVGFEPTGHYWMNLAAYLQAHGIPFIMVNPHHVNRSKELDDNLQTKNDQKDALVIARLMRDGRFSYPRILEGVEAELRNGTTLRAKIQEDVNALQNRMIRWLDRFFPEFKLVFKNFGKMAYAALEKTPLPIDLQGKTPDELLFLYRQVDGMKSPQLPKAKQLVEVAQSSIGLTEGLVMARIEIATLLSQYQLMQAQLDELTTQLIELARQMTDYAYLASVPGIGDVTIVELLSEVGSLTQYEHPRQLMKLAGLTLRENSSGQHKGQKRISKRGRRKLRALLFRVMIPLIRHNEAFKQLHDYYTTRTVNPLRKKQSIVVLCGKLLKILHTLCKKKIHFDLRQMMKDLYCLGEAA

SEQ ID NO: 87686 - protein, 318 aa, unidentified
MPEPIHVGIDVAKDTLEVANGSEASTQSFANDDAGHDALVSTLRAHSVDLIVMESTGGYEAPCACALQAAGFAVAVVNARQARDFAKAMGYLAKTDRIDARVLAEFAAVLAQRPEREKLLRALPCEEQQRLHALVLRRRQLVQMLVGERNRLAMSHRAARASIQALIKAIRKQIVEIEGELVSHVARHHADLAALLRSAKGVGPNTCMVLIADLPELGQLSGREISALVGLAPFNRDSGTMRGKRVIFGGRAQVRCALYMATLVAMRHNRVIKTFYERLLAAGKPKKVAIVACMRKLLTILNAMVRTGKTWDETYHFA

SEQ ID NO: 87687 - protein, 404 aa, unidentified
MLIVSIDIGKTINTGYCRCPDGKDVKPFEFSNHAEGFRKLWDRICWTKTANRLEEVVVGFESTGAYGEPLVHYLRQKPVKLVQVNPMHTKRMKDLQGNSPGKTDRKDPKVIADIIGLGHALSVVIPEGAAAELRRLTLARERSIQRRTALYNQLQDLVFILFPEFLQVMKNVKTKTAHYLLRHYPTPQDIARCGFETLTSILKRVSRGKLGRARSQALYDGAEQSVGLSEGRKGILLEIDEIVSSLEACNRFIEKMEEEMLPYLQQIPYSNSLLSVKGIGEVTVAGLIGEVGDFRQFHTLREVMKLAGLDLFEISSGKHKGNRHISKRGRPLLRKLLYFAAINTVRKGGVMHASYQRHLDRGMPKTKALIAIARKLLGILFALVRDHSQYVETYSQKEVLKLAA

SEQ ID NO: 87688 - protein, 344 aa, unidentified
MSIVRNVVGGVDTHADFHVAAAVDSNGGLLGIESFPADSAGYEGLLGWLSAFGAIGKVGVEGTGSWGVGLARFLADTDIEVVEVDRPNRQTRRKVGKSDATDAVAAARAALSGAASVTPKARNGPVEQMRVLLVARRSARHQRIQTLNQLRHLVFTAPEPTRVRFKDRYKTGLVAEAANMRPRKGSDPVIYTTNLVIRNLARRVKAFNTEMKQIDRMLISLLEQTAPSLLALHGLGPDTAASLLVTAGDNPNRLHSESAWAHLCGVTPIPASSGKVTRWRLNRGGDRNANAALYRIVLTRMSSHQQTRTYVTRRRTEGLSTAEIMRRLKRYVARQVFKHLPAAA

SEQ ID NO: 87689 - protein, 366 aa, unidentified
MKKISTVQTFKSEIFREQKLTIGLDLGDRWSFYCVLDEAGKIILEQKVPTTPEAMKQTFSRIPQSRIALETGTHSPWVSRLLTELEHEVIVAHAQKVQLITKSNRKDGRHDARTLARLARIDPDQLGPVRHRSVQAQIHLTVIRARAELVSARTALVNAARGLVKSYGQRLPKCGTQQVSRELAAKLSAELREVLEPLLKEIESLNECIQEYDERMEKIAKEVYPEVSLLKQVKGVGTQIALTYVLTIEDPHRFLKSREVGCFLGLKPGRRNSGESEPQKKISKAGDRYLRTMMVQGAHYILGPFGEDSDLRRWGRKLSERGGKNAKKRAVVAVARKLAILLHRLWVSGEVYEPLRNSQNAVRAVA

SEQ ID NO: 87690 - protein, 405 aa, unidentified
MVDIMVSDFKKGRYNLMKIFVGIDIAKLNHFAAAISSDGEILLEPFKFTNDADGFQLLVSKLESFDKNSIIIGLESTAHYGDNLVRYLVAEFYQVCVLNPIKTCQMRKNNVRKTKTDKVDTFVIAKTLMMQDDLRFITFFDLDMMDLKALGRFRQKTIKQRTRLKIQLTTYVDQVFPEIQYFFKSGLHQNAVYALLKEAPSPKEIASMHMTHLANLLKVNSHGHFTKELAKELRVLAQKSVGANDSAISIQITQTIQQIELLDSQLEKTEAEMTDIMKFNDSVIMTIPGIGYINGGMILGEIGDIHRFSNPNKLLAFAGLDPSVYQSGNFQAKTTRMSKRGSRVLRYALVNAAWNVVRNNATFKAYYDAKRAEGRSHYNALGHCAGKLVRVIWKMLTDEVEFNLE

SEQ ID NO: 87691 - protein, 346 aa, unidentified
MMIIGCDYHPSWQQICWVDTATGETGEQKLEHASGEAARFYRQLRAPALIGMESTGNCQWFVEMATETGHDVWIGDAAKIRASDSRQQKHDRRDAALILKLLLEGRFPRIWIPSGEEKDLRQLLIHRYKLVRIRAQVKNELQHLAMNQGVTKKRKLWSKTGEKVLRELPLKPWASQRRKDLFRIREMLNAQIDVLDQAVVEVAEKNEKARLLMTQPGVGPITSMAFVLTMGDVNRFQRGKQVASYLGLIPREYSSGGHQRFGSISKQGNRFMRMLLVEGAQCAVRCDPGMRSEYLHRCHRKAKGVAKVAAARKLAIRLYWMLRTNTGYPGVVRVESSSRVPLVSAS

SEQ ID NO: 87692 - protein, 316 aa, unidentified
MANSKTFVGIDVSKNSLHVAVRPDGTRWSVPNTEDGIAELLNRLKTLAPTRVVLEASGGYETTLTAELLAAGLPASVINPRHSRHFAQATGRLAKTDGVDADVLALFGEAILPPVTPLPDKAAQELLALVNRRRQIVAMITAESNRLATASEPIRPGIRAHLEWLRSQCNDLDNQLRSALRACENWRELDRLLQSVPGVGPVMSATVIAKLPEIGTLDRRQIASLTGVAPFSRDSGQYRGSRSVWGGRGGVRHVLYMATLAAIRHNPDIRQFYQRLLAAGKKRKVALTACMRKLITILNAIVRDRTPWQPRSAVPA

SEQ ID NO: 87693 - protein, 357 aa, unidentified
MTAEQRQRTMFVGIDVHKNTHTAVGVSPFGEKLFEVTVGNYKNDFEMLIEKVTKNQGVFSPYFGLEDCHGYGERLSAYLYEGGHEICAVPSVMVDRAREKATHPEKSDSLDAFGVAKVMMQNIDSLPAYRISEDSKKAKQIKELSLDREYLIEEKTRLKNHLHNLLHRIWNTEYQEKYKDPFTLKALRYWSKAKQACDPFLLRSMKRKVKRLIDIHYEVLDLEKEMETLLDQNYTVHTASGCGVTIAGMIVGEIGDIARFHSPGALAKYAGCSPREYSSGKTHRHRKTRSGNRRLNCAFHRMALSQISRSGNEKAKTYFKKKISEGKSKSQALVSLRRHMVNIIWCMMKHKTAYRNA

SEQ ID NO: 87694 - protein, 366 aa, unidentified
MSEIIRIGMDTSKTVFQLHGVDAVEQPVLRKKLRRRAVLAFFAKLAPTKVGLEACGGAHYWARELKALGHEAVLLPPQYVKPYVRRGKNDAADAEAICEAMSRPRMRFVPAKTAEQTAAQMLIGVRDQLIRRRTQLTNAIRGYAAEFGLTAAKGLSHIEPLLARIENDQALPELAKELFATLRQDYARLKLQIREIHAKLAAWHRNNELSQRLAEVPTVGPIGACLLAIKVTDPHAFRSGRDFAAWIGLTPKDHSTAGKQRLGAITRRRRGLAPGAGRRRHGRGPAGPQGQRPSVRLAGRYRQTQAAQTRRRGPRQQERSRLVEVDGQRRTLQSPSGARPLRSPDRQCSVALASSRPLRAAFGGGP

SEQ ID NO: 87695 - protein, 466 aa, unidentified
MENNCILYVGMDVSKGKADAAILKVSDRRSVKPKFLRKKLSFKFVKSEVASFLETVRSYSDVNCTSICFALEVTGIYSTNVYDYIKANLYENESIKFLNTDFVNQWRIAHNIAKSDPLDAQTISTIIGTDLDVQYVNDNVFENKNGYQDLKALVHRHYQIKKIYSQEINRLIAQCDCLFPELQYVFEPKSAAFIAVLSSYPTTHDIINASRVEVFDVVYEATKHRCSMDKVDKLFELCQDTLVPDDISSYGKSIILDLVENIKNIKGQLKSIERYIKDIASLNPAYKLLLTITGCGPITAATVIAETGNIRRFKNADCFVSYSGTSPRNKRSGTSVETMGKISKKGSRYLRHAIYMIAEFARRHNPVLKHQFERIKNGNKKRHKLANIAIANKIARYIYSIMKNKSSFVILHDHIMRLPEETRDTFFNSISLDFPKNTRKQIYQYSDINGELHRFVYIKTDEMIPA

SEQ ID NO: 87696 - protein, 337 aa, unidentified
MKYCGIDLHSNNSVVSVLDEQDHVVAEKRLPNDLAKIIGLIKPWRTELAGIVVESTFNWYWLVDGLKEAGFTVYLAHTTAIRKYEGLKHSGDEADARYLAHLLRLGILPTGTILEPEHRAIRDLARKRMQLVRSRTTHILAVENITARQNGSRITSNQVKQLTAQKVDAMPLAADVALAIKTNVAVITTLSEQIDLLEKRLLADMKARPDYTLLTSVPGIGKVLATTILLETGPIDRFKAAGNFASYARCVDSVHTSNGKKKGQGNTKNGNKYLAWAFVEAAVYAMRLNAEAKRSYERKKAKTNNVVAIKALAHKLARACYHMLKEGRPFDVTRCFA

SEQ ID NO: 87697 - protein, 348 aa, unidentified
MEQLTRIGMDTSKHIFQLHGVNAVEAPILRKKLRRKDMMAFFAKLNPTVIAIEACGASHHWARLLQSFGHEVKLIAPQLVKPYVKRGKNDAADAEALCEAMSRPTMRFVPIKTPEQQAALMLMGLRDWLIRNRTQLTNAIRGYAAEFGLTAATGQVHIAPLLERIAADETLPTLARDLFSLQAADYAQLQVRIEEVEAKLLAWHRADECSRRLSKIPGIGPIGAAMLIMKTPAPEMFRSGRQFAAWMGLTPKDHSTAGKVRLGVITRAGDEGLRSVLVVGATSVINQVRRGNSRSAFAPWVMALLKRKAPKLVAVALANKMARIAWKLMVSGQAYADKSAAPAMAGAI

SEQ ID NO: 87698 - protein, 344 aa, unidentified
MKYYAGLDVSVKETSVCILDETGEVFREVKVPSHPEDLARVLAEPDRPLERVGLEAGPLSQWLFGGLAERGVPVVCIETRHTKAFLKAQINKSDRNDARGIAQMMRVNLFRPVHVKTQRSQLRRALLTARKLLQEKATAMENDIRGLLRNFGLRVGAVGGSGFEARIRELVEGAPELQEIMVPLLAARRALRDQFADLHRKLLAVVKEDKVCRRLMTIPGVGPVVSLAFVATIDVPARFRNARSVGPALGLTPILHQSGESNRIGRVSLCGDAMMRGLLYEAAQVLLTRVTKWSWLKAWAMQVAKRRGQRRAIVALARRMAVIMHRMWSDGTDFRWTRQAKPAA

SEQ ID NO: 87699 - protein, 337 aa, unidentified
MSSIHILGIDLGKHSFHAVAHNYSGKEVLRRKYNRNQLLKFIVNLEPTTIAFEACGGAHWLARKCSEFGHRVRLIPPQYVKPYVKSNKNDFIDAAAIAEAASRPSMRFVAVKSEEAQVIAAIHRVRNAYVKERTACMSRIGAILLEFGLSFPRGHAKMKVLFQWLAEQNQSLPKSLMTELISIHEHYSYLNEKVKCQDQKLQAIVGNNYQAQLLKTVPGIGDLTATLCVADVSSANNFSNGRDMAAWLGLVPRQFSTGGKTKLLSMSKRGNKQLRTLFIHGARAVLSRLETAGKVFGDWLVNLRASKPFNVVVVALANKLARIAWAVLYHRQAFKAA

SEQ ID NO: 87700 - protein, 322 aa, unidentified
MQKDLLYCAIDVCKDRLDVDGTALALPEQLNNDQAAYRQLIKAAKKYSGPVQFVFESTGPYHLGLALALWEAQMPLSILNPARVRYFAKAQGKAKTDPLDKQVIGAFAQAFRPAPTPAPDELSRQLTELLQRRDELITSRVAEQNRLGQCRHGLIKKQIGRLIAQLTEQIKQIDGLMNKLARSSAELQSKIEHLCQINGVGQLTALTLLITVPELGTLGRNRISRLVGLAPLNDDSGNQTHKRYIQGGRKRPRNALYMAALTASQHNAVLSPFYQRLLQAGKPKKVALAAVMRKLLICLNALLRQHLEHTGPSEAQPIYNKV

SEQ ID NO: 87701 - protein, 339 aa, unidentified
MKKFLFIGIDFSKSKFDVSVLESIEQKNVSQATFENTETGYKECLQWTGKQSKIKREDWRFCGEHTGIYSRGLSDFLAKKNLFIWLENPLQIKRCSGVKRTKNDRFDSLVIAQYACRYIDRAMAYKPAEKEIDALRLLVAYRSRLVKNKVALEVSANEMRRVIKRDTTARFIYESSMREIERIKKQISDIEKKMHEMIMTSQLKENYLLINSIKGVGMQTAVMLIIQTNNFENFENARQLACYCGCAPFPNESGTIDKGSHISRLANKELKVLLSQCALSAILHNDEITAYAQRKIAEGKPKRVIINNVRNKLIQIIFAIVKSKMPYRENYLNPLAKAA

SEQ ID NO: 87702 - protein, 400 aa, unidentified
MLSIGIDVSKGKSTVCGMKPGGEIVYAPFEVQHTRKGMSELVSLLHNSGEEVRVVLESTGSYHCPVVAALSENGIFVSVVNSLRMKRFCSQSIRKVKTDRIDAMQIALYGLAYWQELQPTRLPEDTYRELQLLARQYYQMTSLLIKAKVDFNALCDQVLPGMQELMSDHAGRHKLSDFVLRYRHTTHILEIGETRFRKDYCKWAEKKGYRNCERMAALIFATAQNGIPVLPNAPSTQIVITEAIRVLHTVEASRDAILTQMQALAKTLPEYSLVREMPCIGDTLAPRLIAEIGDVRRFHSKRALIAYAGIDAPPYQSGKFCANNRHISKRGNRYLRKTGYEVMQSYVMHKPANDPIFTFIEKKRGEGKSGKLAMVAGLNKFLRVYYGKVTELYRSLPAIE

SEQ ID NO: 87703 - protein, 384 aa, unidentified
MKKDSIAKLQVTKSQIRRMGAKQRLTVGLDLGDRSSRYCILNEAGEKASEDQLPTTKAGLDSLFAKMAPCRIALEVGTHSPWVSRHLAAMGHEVLVANPRKVRLITQSVKKNDRMDAEQLARLARVDPQLLAPIRHRGPEAQGDLAVIRARAELVDCRTALINTVRGLAKPMGERLKSCDADYVKESLADGLNEATQNAIRPLLKSVEEITKQIGVYDKKIQEIEKRYPETKLLKQVNGVGTLIALTFILTLEDAERFEHSRDVGPYLGLTRKQRDSGDSQPELGISKAGDVLLRRLLVQAAHCILRDGAPDSDLKAWGLTKVQAGAKTGSGKKGSKRRKKKAAVAVARKLAVLLHKLWVTGEVYDPQYNRKAVEAAKGKAKAA

SEQ ID NO: 87704 - protein, 381 aa, unidentified
MLWFGRRYESMRIAVGMDLHKKSAVCFAVFAGEGQATLKEQDFLDRFNKEHRTQPSEPENMAVIAKALDGHEVHVLVENSTKTFDTYWVLTNLGCHVTVAQARDLYRITKSVRKNDNNDSMELAFYMRRRLYGENEFAECVMPTHDWMMRREICRTVTKEKLHLADLKRRTRSHMLLHGIKLSREYRDIFSKKAIQEMERSNDICLRIFCSEAKTIKKRTDEEVRVIEHLFDGIRMYELILSIPGFGRVTAAYLSSMIMDINRFSNSSQFTASFGVVPKQRESSETSHRCATTHRGDAEMRRLLKQATWVHVNNVDESVVTEMFKRLKARGKSHNEALIACVRKMLTVVRAVLISDRPYTADIRLLERTRDMADPEDCPEE

SEQ ID NO: 87705 - protein, 320 aa, unidentified
MDAHGTIVVRKRLYRAQVMAFIAQLPPTLIGMEACGGAHDWARCLREHGHEVRLMAPQCVTPYRQANKNDRRDAEAIAEAMTRPTMRFVPMTSVAQQDLQALHRVRERLMKARTALINETRGLRHAYGIIVPQGAAPFRQHVLEQLTTEDAKLTPHSLGLFRQLLEELDALEARVATYEAQLAQVAQTHPVCQRLMTIPGLGALTAPALVAAVSETAQCKNGRQCAAWLGLGPRQHSPGGTARLLGISQHGESSLRTLLVHGARSCLRGVGQKRDRRSQWGQSLMDRRGWNKAAVALANKQARGAWVLMGTEQVSRVAEA

SEQ ID NO: 87706 - protein, 401 aa, unidentified
MKTVLSVDVAKNKSMIMLMNSDGEILIDTKEIKHNLEDFEKAKEEIKEINPENLTVFMESTGTYHLPVERYFKENGFNTLVINSLTTKNNYDTIRKTKTDKKDCYRLAKLFFVNEVEYHDLSKKDLYANLKAMTRQYFYLLQQNVSCKNRYKRLLNICFPELEKIFKSTRIYDDTALNFIKEFPHAEIVKEKRIDALYNNLYKTNGRNLNFYKRLSETIKIASANSYPGVDKENKDVKNLSDMAKIVQNNNNVINELRDKMIETAKQSPYYKIINSFYGIGDTLIAEILGELGDITRFDSPKEIIAFCGLDPTIKQSGKSINVKGAISKRGNKYARYILFNCSQMVVKLGASNYPEHPVYIYYQNKKAEGKHYYESLTACSTKILRMLYSMCKNNKQFLEN

SEQ ID NO: 87707 - protein, 310 aa, unidentified
MGVCVGVDVSKDHLDWTLGADGETCRVPNSVRGAARLVASLKKLSFSLVVVESTGGYERRLIEALDRHSIPVALVNPWRVRRFGEGLGVLAKTDPLDARVLAIFGERATPPQRVPVSATQRLLADLVRRRRQLIGIVVGEKSRLENACREVRRDIQSLIQVLERRVAKLDERIDAAIVDDPDKSEVREILESAPCVGPGIARALVVDLPELGALNRREISSLCGLAPFARDSGRKSGYRRIRAGRAAPRTALYMAALNGSRFNPVLKRMYDRMIEAEKPPKVALIALARKLLTILNAMVRDRARWTEAPS

SEQ ID NO: 87708 - protein, 402 aa, unidentified
MAGRTAGIDWASEAHEVCVSEEGKVAERFSVRHDEEGLAALAVKLAKADITRVAIERPDGILVEQLLAAGFEVLAIHPNQVKAARPRFAVAHGKSDRFDAYVLAELARTDAHRFRVLVPDTEETKALKTLTRAREDLVGIRVELANQLRAQLQAFWPGTLIFAAIDSPISLAFIKRYPSPADTRGLGAGRMAAFLARNSYSGRTDPAELVERLNAAPKGTAGPAEQEARRAVVLGLVSSLEPIVSEIAALDTQIRERLAAHPDAAIFAPLFRDRRTAICPATLIAELGDSRGRYPTEAAMAADAGMSPVALESGKLHVATFRRACDKRLRSAVATLADSTRHWHPWAKDVYRRARARGQDHPHAIRTLGRAWIRVLWRCWQDGVPYDSALHGNSSRLQPMGG

SEQ ID NO: 87709 - protein, 313 aa, unidentified
MSELYVGIDVSKDRLDVATSDGRELHVANDAAGHRQLCELLVRERPQLIVMEATGGLERAVAAELAAVSLPLRVVNARQVRDFAKASGRMAKTDRLDARVLVAFAQAMKLEPRELPSEELQTLQALIVRRQQLIEMLMMEKNRLRTAHKEVKRSLKKVIELLEEQLRHADQDLGSALRECGVWREKVELLESVPGIAQLTALKLLASLPELGTLNRREISALAGVAPFNRDSGRWSGKRSIYGGRALARGALYMAALVGVRHNAVLRVFYQRLRAAGKPAKVALTACMRKLLTIINSLLRHRQRWSPKLMDTA

SEQ ID NO: 87710 - protein, 353 aa, unidentified
MRTIIAFDSHKHYTFARVENEHGEHPEEFRIEHRRGNIAAFLSRQPPGSPVAIETIGNWYWIVDEIERAGMVPRLVHARKAKMMFGCINKTDKLDAQGLNLLQRAGTLPTVWIPPAEVRDKRELPRTRMVFAVERTKLKNRIHSVLDKYGLQDAFEDISDIFGVTGRRVIICALEQLPSHTHYTTELLLEQLDQTEQKIKVIEARMKELFKETEQHTFLKTMPGVGFILAVVILQEVGDIGRFASAERFASYSGVTPRVQASGGKVRYGRLRPDTNHYLKWAFSEAGNAVAVNRNRFPARHVSQLYNRIRGRKGHAKAVGAVARHLAEATYWILTKNEGYRDRGLLEVSPTGA

SEQ ID NO: 87711 - protein, 351 aa, unidentified
MIIVGVDYHPSVQQVAFLDTETGETGERRLNHSDGEAERFYRDLQRRQVKVRVGIEATGHARWFERLLAELKFELWIGDPARIKAARVRKQKTDRQDAQLLLRLLIEGRFPQIWVPSPENRDLRQLIWHRHRLVQMRTRAMNQIQAAAMNEGVRRKKTLWSKTGRRQLEALPLAPWATRRRQDLLELVDRLNTTIDELTAAAEQEARKRPEVLRLMTHPGVGPITALAFVLVLGSPDRFGCGHQIGSYLGLIPCEDSSADRQRLGHITKQGSSLLRFLLVEAAQAAVRWDPDWRRRFVHLAMRRDRRIAKVAMARKLAVSLYWMWHKGFDYPQTLQFGSHAGEPGYVHGVK

SEQ ID NO: 87712 - protein, 485 aa, unidentified
MKTVYLGLDVSKGYADFVAMNEAGSELGGWGRFDDTRAGHDQVQARMAAVWARAPETQVVVGVESTGGYERDWLGLCHRLRRAGWALTAYRLNPLVVKRYHERQLHRTVTDRISAAGIAAYLRTGRRRQDQLWVAGELEGALTLYRTVRRLVRLQADLQNQLQALLSRCHPELVACLRGGLRQWVLALLRQYPTAAALAQADPAVVARIPYVTPAAAARLVAAAAASVADQTDPATGRAVMVLVDEIAHLRLQVRRLQTELAEQLRADPGVQIIDSIPGFGIWSAICLRLELGDIHRFPRPAELVAFAGLDPQHHQSGDTTINRGISHRGQAGVRAILYPVVRAAIRCNPAVGALYTRLRARGKTDAQAVVAGMRKLLHLVFACWVQGVAFDPSRWEQVAGKAQEMAQRAAMAPTSAAAVPLATCLAAPVSKREAKRRKAAHSPQGPCGVVPQKRPEFERPPSALIIPIRTPSCQGDHAPDFSSC

SEQ ID NO: 87713 - protein, 372 aa, unidentified
MQQDSAIFVGLDASKLKIAVALAEDGRQGEVRFLGDIEHTPEAVRRLVTKLAGQYRRLLFCYEAGPTGYGLQRQISALGHDCAVIAPSLIPKRPGERVKTNRRDAITLAQLHRAGELTRIWVPDPGHEAVRELVRAREAAMEDLRAKRQHLQSFLLRHGRIFTGRKPWTRAHARWLAELAFEHPAQHLVLHEYRQAIEDAQARLERLTRQVTEVLSSWSMAPVVEAYQALRGVAFLTAVTFVAEIGDVRRFETPRQLMAYLGLVPCEHSTGDRVRRGSITKAGNTRARRVLIEGAWTYRFPARLSRLLQERQAGLPKIVRAIAWKAQVRLCGRYRKLMAAGKRQTVVTTAIAREMAAFLWAIGREIEPRPAV

SEQ ID NO: 87714 - protein, 395 aa, unidentified
MFIVGIDIAKRSHEAIIIAEDGQVVRKAFSFRNNCTGYNLLLEQVRRLTLVKSQIVFAMESTAHYWLALYARLLKDGYAVMVLNPIQSHSLRELYIRKAKTDARDSLIIADLVRFGRCKASNVPQDKILALRELCRSRAYLVDMAADLKRKLIALLDRIFPEYESLFDSVFSKASIAVLSKYSTPQKVKNANLRKLTDILMESSNGHFGEWKAHQLKEAACSSFGIDDSGGVYSTLLGMFLEQILSLTAQADSLEKQIFVFFQEFNNPLTSIPGVGTVLAATILSEIGDITRFSSADKLLAYAGLDPSVKQSGEFKSNQNRMSKRGSPYLRRAIWLASTVAVHRDPMFQTYYEKKISEGLHYMNVIGHVSRKMTAVIFAVLRDGQPYQPILQSAG

SEQ ID NO: 87715 - protein, 348 aa, unidentified
METFQYHLGIDLHKKTSYWTLMDHERTILYRRNLPTSEEGLEQGVREMGIDPKQVEAAIEPVSQWGWYGDLLERAGFTVHLVDAYKSKLIAASKLKNDKVDAKILAELMRSGFLPTAHRANQDIRDLREFVRHRAFLVRMRSRIRGRIHQILWKHGIINPFSDLFGKKSLEWLKGLEFRSPYASERDEFIELWHGLNQRIAEHDSKCKFMVSQSKEMGVLTSLPGIGVITALTIMAEVGDFSRFERPEQLTAYAGLVSSSYSSGEHTRLGHITHRGSVWLRTAMVEATVTVNPKWGHLYGFYARIAVKRGSKVARVALARKMLGLCWHLIKSGEPFKHRMPLADSVKR

SEQ ID NO: 87716 - protein, 387 aa, unidentified
MYFIGIDISKFKHDCAIIDEAGDTVTASWSFANNCEGFSLLKQLLDALDGQKKIGFESTGHYGHNLKLFLEANNFSFMEFNPLLVSKFVRSKSLRNTKTDSLDAVSIAQYLMTVEYKPYPPSFYHMDQLKSLTRFRDSLVRQHSRQLVELTNILDKVFPEFKPFFDGRFSATALYILTHYQSPEKIANMNAKSYEALRKKSRGKFSMVKFTQLKTLAKNTVGRSDAFLLKQMEITIDIENQLDAKIDEIESQILECIRALNPPILTIPGIGELTAAIILSEYGNINKFENPAQLLSFAGLEPGYYQSGLAEHQGHMVKHGSSHLRYALMNACLPLITYEPVFAEYYAKKRAEGKPHRVALTHVAKKLLRVIFTLQTKNISYDPTLIR

SEQ ID NO: 87717 - protein, 318 aa, unidentified
MNTNTLQNINVGVDTGKPQLDIYVRPLDIYFTVPNTDKGISDAIKVIKKHKPQRVVIEATGRLEMPFILACDKAKLPYVVANPLRIKRFAEAIGQRAKNDRLDAELIAHYAERVQPELTKLKSENIRLMSDLVTRRNQLLTMQTMERNRLQILPKNISSTITPILTALKNQLEKVEAKIEKLIESCPEYQAKNTILQSMPGVGKILAASLISNVPELGFITNKQASSLIGVAPITRESGRFKGKRMIKGGRPQVRTVMYMAMMSAIQCNPVFKATYERLLAAGKPKKVAIVACMRKMVVTINSMLRDGAMWDKDSVKN

SEQ ID NO: 87718 - protein, 313 aa, unidentified
MSNLLPQTIGIDISKATLDCHVHPAGIERQFANTTKGHKALIAWAGQWEVERIAYEATGTYHRAVEVALGHLPCVKLNPERARRFAQAMGTLAKTDRIDARLLARMAATLQPPVRPARSPQQNQLAELVNARDGLVRDRTALKNREKNLNVTLLKRQCSQRLEQIARHIEALDAEIARLIAADEKLARRHDILTSIAGLGTLTANQIIATMPELGSLDNKQAASLAGLAPVARQSGQWKGKSFIRGGRANVRQALYMPALVAARFNPDLKAKYQQLIAAGKPAKIAITALMRKLIVTANALLRADRIWLQSPA

SEQ ID NO: 87719 - protein, 356 aa, unidentified
MQRGVDTHKRTHVLVALDDEGRHLGTRTIPNTPAGWAEALAWARGKQHHHRRWGVENGGSLGKGFAQFLLAQFLLAQGEVAVQEVRPQRTAQYRRRGRTQDKTDQADALAIARLLLAEGAHLPAIQRDDVSTALRLLSDHRDNLPVDRTRLINQLHAQMLQINPGYQERSGALTARRGLRYCRDLTLPEADGVTQTRLLIARQLVGQILRLEEEITTVTTALSERVRASRMPILALCGVGEVIAARLLGELGTVPRVPSAAALAALAGIAPVAVSSGGRGGFRLNRGGNRQRNRVIHLMALSQRRCDPRAQAYYAKKRAEGKTRRAAMRCLKRRLVDVLYRCFTRDADAQPVAVAA

SEQ ID NO: 87720 - protein, 348 aa, unidentified
MAHFVGLDVSVKETSVCVVDDTGKVILEQKVPTEPADIIALLTSLGVTYGRIGIEAGPLSQWLVNALTAVELPVICVETRHMKALLTAQQINKTDRNDARGIAQMMRVGLFKPVHVKTLAAQEQRMLLTSRKLLQRKLLDVESDLRGTLRNFGLKVGVVSRSRYEARVRELVEGFPRLAAIVEPLLSVRRVMRQQFAVLHKMLLDMVRGDPVCRRLMTAPGVGAVVALTYRATVDQPQRFVHSRAVGAHVGLTPKRYQSGEIDYDGGVSKCGDALLRTMLYEAAHSLLTHSRRWSWLKAWGIRVAQRRGMRRAVVAVARRLAVVLHRMWVDGSEFRWRKDNAAVPAVS

SEQ ID NO: 87721 - protein, 408 aa, unidentified
MNGTDERRSRHAGVDWSWETHAVCVVDDEGQVIERFTVAHSAAGLAQLIERLRRLRAPAVAIERGDGPVVQALLEADLQVFVITSRQVKALRLRYGTAGNKDDRFDAYVLADVLRTDQRRLAPLTQDGPDTTGLRMLVRARKDLVAARIAAHNQLRSHLLGAFPGAVGLFAALDSPISLTFLARFPSAQRARWLSQKRLAAWLTSVGYCGRQSAIDLMAHLREAPAGMDGAAAEAAEAVTEQLVVLLRTLRDRIDVLDDRIAEALQLHADAHIFCSLPRAGTVRAALLLAEIGDCRGRFPTEEALAAAAGVSPSTRASGRSHAVVFRHACDKRLREALIDFAADSRQASPWAKDIYDRARARGARHPHAVRILARAWIRVIWRCWTDHTTYDPARHGGLIKLTERAAA

SEQ ID NO: 87722 - protein, 339 aa, unidentified
MTIMRIGVDLAKNVFDVHGVDEHEKPALRKTIKRADLLPFFVHLPPCIVAMESCGSAHYWARELIKLGHTVKLIAPQFVAPYRKGNKNDQNDAQAICEAASRPDMRFVAIKNEEQQAILAMHRIRALLVSERTALVNQIRGLLMEFGEVLPLGREKLRMLLPELLEDAENGLPHLLRTLIHRQYRRLCDLDHEIAQYERDITIQVQQDEDAKRLMEIEGVGPLTASALLASVGDIGQFKNARQFTAWLGLVPRQWSSGGKNRLGRITKRGDVYLRTLLVHGARAVMRFVEKKSDRKSLWVKAVKERRGFNKAAVALAAKHARIIWSILSNGTAYRVMPA

SEQ ID NO: 87723 - protein, 457 aa, unidentified
MTTLLYWRRRVKPAGDKKTHHSQTMNTSHPYDLVIGLDRSDKKADLCLITTATGQRRAQTIDTAPEALWEWLRQLRQEHPQARVGLCLEQPAVHLIAFLESYDWITLYPINPITLQKYREAFVTSRAKDDAKDADYQADLLLTHHAKLKPWAPEDSQTRAVQQLVFHRRAVVDERTGLTNRLIALLKSYFPQALVLCGEDLWRPLATRFLLKWSSLQAVQKTKPATLKAFYYLNGSRSAKLLEQRLALVEKAVPVTDETALIASFALRVQLIGRQLQLVTRTIADYDQQIAQAYAAHPDHAIFASLPGAGPVLGPRLLASMGAQRERFGAAADLQQYTGIAPVTKKSGGSCYIHRRYLCPKFHKQSFHEYAKESILWSRWAAAYFLQQRTKGSPYHTAVRALAYKWQRIIFRCWQNRTPYQEASYEAALRKSGSPLVALFDKVELGKSPFKNPMKKS

SEQ ID NO: 87724 - protein, 367 aa, unidentified
MAKGITHVGLDAHQETIHAAILLSGRREAVVEAFANTSEGIRRFVRRLKEQAPGPIEGCYEAGPLGYGLQRSLIALGLDCVVIAPSLIPQKPGDRIKTDRRDARKLADLLRAGLLTEVHAPTPAQEAVRDLCRAREAVKEDQKRMRHRLSKFLLRRSIRWTAGRKAWTVAHGQWLRGLRLEHRADQLILDDHLFALEQLEGRLAAFDAQIEAFASQEPYAEPVGWLRCFRGIDTLTALSIMAELHDLRRFASPRALMAYVGMVPSERSSGGQERRGALTKAGNRRLRRLLIEAAWHYRHRPAVGYRLKKRREGQPAHAIAVADRAQQRLHRRYRRLVERGKPHNKAAAAVGRELVGFVWAALQPQAS

SEQ ID NO: 87725 - protein, 421 aa, unidentified
MAQQVFDRLLERVAGLDVHKAQVTAAVRVPDGDGGRVQHVAEFSTTVRGLMALRDWLEAHRVTDLAMEATGVYWRPVWAILEDRFKCILVNARDVKQVPGRKTDVGDAAWIAQLLEAGLLRASLVPPKPIRTLRNLTRYRKTQIEERQREANRLHKILEDTGIKLDCVASDILGKSGRAMLDALVAGTTDPVVLADLAKGRLRAKIAALTEALEGRFDSEHALIVSAILAHLDFLDEQIDRLSDAIGAQLGPFAQAVELLCTIPGVARRTAEVIIAETGGDMSAFPSARHLASWAGACPGNDQSAGKRRSGRTRKGSRWLGIALTEAALASTRTKDTYLAAQYRRLRPRRGHKRALGAVKHSILVAAWHMLSTGELYREPGGDYFERRRDPEREVKRLVAQLQRLGQNVTLAAADSRPAPA

SEQ ID NO: 87726 - protein, 373 aa, unidentified
MDNYREVFVGIDTSKSRNAIAIAEAGRRGEVRFFGEIDNTHEATRKLVAKLAPRYQKLHFCYEAGPTGYGLHRWLIDLGQSCDVVAPSLIPKRPGDHVKTNRRDAEGLAKLLRAGELTAVWVPDEMHEAIRDLVRARDAAVRDLRAKRQQVTSFLLRQSRSFPGRSAWSKAHARWLAEQKFQHHAHHLVLQEGIGAVRDASERIVRIEKAIAELAPQWSLAPVVVAIQAMRGIDFIAAVTFLAEIGDLSRFANPRQLMGYLGLTPSEDSTGDSVRRGGITKAGNGRARKTLVESAWTYRFPARVGVAKLAKIQELPKPVVDIAWKAQTRLCARYRALVTKGKKPTVAVTAIAREMAAFIWAIAREVQPLQIAA

SEQ ID NO: 87727 - protein, 462 aa, unidentified
MEEVEFKFSVDWTKPAFFCGLDVHKYELAVAVYSKDDSQSEFLKTNVFSTDSAGLRMFWQFVKKYNPQGFVMEATGIYHHVIFRFLQKMRTKVHWPFKIFVINPADASGIPGRQKFDRIDAENLARYLSIGLFRDGKPIIEVLEDLKAIFRSASRIEKDRTALKNRIKKTLDRVGIRPRGLNMNHEWVREFLHHFIGQDLSLGECLNEIIADKNILKGHRNKILKNLKKFIPYFEFSLTSAQKALIRQDLVELDFKTARKSILAVEIDQMMLDRPGLRQRAHALSSVPGISPFSAVWILAEIGNIQQFPTKRQLLAYCGCCPRIVSSAGKVYSAHISRHSNSYLRTIFYNAAVVTCNLLKKDSALKEYARHVRKRKGLYSMKLVYCTVAAKIVKIVYAILRDNVVFEPDHGKTLRMQAPSCVNEDFAVSDRKLIRRARNSLKRVNEVANIGLLGEHSIKLAE

SEQ ID NO: 87728 - protein, 383 aa, unidentified
MNDLIRIGVDTSKSVFQLHGVNAAEQPVLRKKLRRRQVIEFFQKLPATRVGIEACGASHHWGRELSALGHEVVLLPPQRVKPYVERNKNDAADAEAICEAMSRPRMSFVPVKTAEQQAALMLVGVRDQLVGRRTQLSNAIRGYAAEFGLVAAKGTDKIEPLLVRIASDENLPPLAKDLFATLGNEYVRLKPELRKIEARLMAWHRGNELSRRLAEIPSVGPIGATLSVMKVGNPHAFRSGRDFSAWLGMTPKDHSTAGKVRLGTITKAGDEASRSVLVAGATSVIQQVRKGRGHPSPWLVALVKRKPPKLAAVALANKTARIIWKLMVSGERYNPQRAPQRFVPPTDSLAPGTRRQGQAACGGDLRSALTACALRAPSAPPSA

SEQ ID NO: 87729 - protein, 342 aa, unidentified
MQITTIGLDIAKNVFQVHGIDAAEKVVVRKQLRRGQMMKFFAALPPCLIGMEACASAHYWARELTKLGHEVRLMPAKDVKAYVKRNKNDAADAEAICEAVGRPRMRLVRAKSAEQQGRLMQHRARDLLLRQQTQVINALRAHMAELGIVAAQGREGLKQLLKNIADEKDARLPIDARASLIVLAAQLQALHTMIGSIERRIVVQHRANEASKRLECIHGIGVIGASAITATVNDPGAFRSGRDFAAWIGLVPRQDSTGGKQKLGPISKRGDRYLRRILVVGAISVLRRAKLNPEKYPWLTQLLARRPFKVVAIALANKMARVAWALLASGAKYRAPRLAAAA

SEQ ID NO: 87730 - protein, 316 aa, unidentified
MFYAGIEWSDQHHDALVMNEAGRQVGRLRIDHTPEGLAKLTSFLEQMTGPGQKEQLACIVETSHGLLIAHLLEAGWPVYPVNPCTVDRRRAASGAKTDAIDAYLLAKTGRADFADVHRLTPDSEIVQELRTLTRDQDSLIQMQTRLVNQLTACLKDSYPVALALFCKLQQKSTLIFLQTYPTPEMALEASCEQIAHTLKQAGHTRAKQVAPAICETLHQPQLQGSAVTTRSKSRLMLALVAHLLPLLAQIAEYDEAIHELFLRHADSGIFLSLPRAGKRLAPRLLAEIGDSRQRYPDAANLQALAGTSPVIFQSGT

SEQ ID NO: 87731 - protein, 355 aa, unidentified
MSTIADDDRRVIAGVDTHKDFHVVVVLDEHGRHLDQATFPTTTRGYRNLTGWMTGFGEVLGVGVEGTASWGAGLSRHLRARGLNVIEVNQPDRHRRRRRGKSDPIDAEMAARAVLAGDATAIPKAGDGPVEALRQLRLARTGAMKARTAAANQLHSVCDTAPETVRTQLRGLTTRRKVAVASRYRPGDPLTPTGGAKRALATIARRWTALDTEIRELDQAIKAILDAIAAPLLARHGVGYDTAGALICTAGDNPDRLGSEASFAALCGTAPVPISSGNTQRHRLNRAGDRNANSALWTIVMVRLRSRHAPTVAYHERRVTAGHSKRDAIRCLKRFLTREIYTDIQHITNDLAIAA

SEQ ID NO: 87732 - protein, 416 aa, unidentified
MDTMYERCCGLDIHKKTIEACFRSGKKKTHMSFGTTSAELRKLTMWLVENDCQSVAMESTGSYWKPIFNILELSGTDMKIIVVNARHMKNVPGRKTDVNDAEWIAELLQHGLLRPSFIPDREQRELRELSRYRKSLVGERAREINRLQKMLEGGNIKLTSVVSEVTGYSSRRLLDRLLRSDEPMTEEVISELVHTSLVGKSKELETALDGLLSELQKELLIKVLDHIDDMSRRIADLDDFCRKQMERYEDALDKLDEIPGIARRTAETILIETGLDMSRFPTAKHFARWAGLAPGNNESAGKRSSGRTTKGNPTLKSTLIQSAKVAARKKDSFFKARYQKIAARRGANRASVAVAHSMLIAIYHILKSGERFKDLGEDYYNQFNKEKKKNYYLKQLTKLGVNLKEATLLISIQAAT

SEQ ID NO: 87733 - protein, 461 aa, unidentified
MKIRLGVDVACRAAHQVSCADEYGVMLWVGHRFRTDPDELEALWRKLPPDAAEVMVVMEPTRNAWVALAAWFRRHGATVVMIPPEQSADLRAYYAKHAKTDRLDSKTLARLPLLHPEGLHREDTLGPGEMLKRAVKVRSGLVHRRTTSMARLDALLEILGPAWVAAIGSDMSLTALRFLARYGDPRTVKRLGPARLAEFFRRSSRGAWHHERADAVIEAAETTLRLWGADGLDFDALAADIAVEARLALAVSEEIKELDKRIAHAYERVDPDGIVRSAPGVGRIGAPQIAGRLGEATRFANLPAVRSFAGLVRRQDSSGIAARAGGPTKAGDACLREALFIAADHARKIDPTLAARYHRLITEGGKHHNSAVCTVAAVLLTRIAACLRAGRPYQLRDTDGTLITEQRGRQIVTDRYTIPAAVRASRRHLTSTTRTSRRNERAQEGVARRSEAPPVPEPACT

SEQ ID NO: 87734 - protein, 325 aa, unidentified
MNLSVVLGIDIAKLKFDVCLIKENGKAKHKVFANTTSGFEQLVAWLISYQVGSLHVCLEATGSYGEALATHLFDAGLTVSVVNPAQVKAFAASRLTRTKTDKVDAELIARFCLAQQPAPWQPPAPEVRGLQALVRRLDALIEMRVAEENRLSSGVSIDAVRESLETHIAYLVEEIKDTERLIREHINNHPDLKEQSDLLDSIPGIASTTAALLLAEITNFKQYKSARQVAAYAGLVPRERRSGSSVRGRTCLSKIGNARLRKALYFPAITALRCSAFFQQWASGMRERGKSKMAVIGAAMRKLIHLAYGVLKTGKPFDPNWAKTV

SEQ ID NO: 87735 - protein, 367 aa, unidentified
MSSVASAAGLIHLGMDTSKNTIMVATLLPGEENPVTDRIANEEAAIRRLVGRFADRSLLRAWYEAGPGGYELWRLLASMGVACQVVAPSLIPKGGSDKVKTDRRDSRRLARLGRAGELTPVRVPSPAEEAVRDLVRARGAVMEDRKRAQQRLTAVLMRHGRVWRGASYWTAAHRSWIAAQRYGEPALASAISYYRATLAVREAELAAVDAELAPWAAREPLAPAVARLGCYRGIAELGGLTLAAEVVDWRRFPAARAFMSYTGLVPAEYSSGERTRRGHITKAGSEPVRTALTEAAWSCRHAPAIGAGLRRRQAGASPDTLARSWTAQRRLHARYVHLVHDGGKAAPEAAVAVARELAGFIWAEMTA

SEQ ID NO: 87736 - protein, 348 aa, unidentified
MATACLVTLGVDTHKDLHVAVTLDQVGRRLGVATFPTDDAHHGRLWDWASGFGPIGQAGVEGTGSFGYRLAQFLTGSGVTVFEVNRPNRVARRRRGKSDPVDAEAAARAVLAGDATATPKNRSGPAGQLRALLVARRSAVKARTQTEQQLRSLILELPDLLRAQVDRRRIADLTTACVALAGADGTSIALGALARRWQHLDAEVADNDQHITTIVRRVVPGLLARPGIGPVCAAQLLVTAGDNPDRFHSEAAFAALCGVSPVEHSSGKTVRHRLNRGGDRAANSALWVIANNRLMHDPQTRAYAARRTATGASRKEILRLLKRYIARQVFPEIRHALSPPDALPNSAP

SEQ ID NO: 87737 - protein, 371 aa, unidentified
MGESSKTLFVGLDVHKDTIAVAYAAEDRSAEVVSLGMIGTRQCDIDKVLRKLESKGASLAIAYEAGPCGYWLYRYLTRRGLSCAVVAPSLIPRKPGDRVKTDRRDAVTLARLLRSGDLSSIYVPTVDDEAIRDLSRAREDTVRDLKRHKVRLKAFLLRLDIRYEGRATWTAAHLRWLARVVCPTPAQQIVFQEYVHAVSEQTQRLGRLETELQTAVTTWRLSPVVEAVQALRGLNLTGAVTLIAEVGDLTRFDTPRKLMSYLGLTPSEYSSGPHRRQGGITKAGNGHARRALVEGAWAYRYPAKVSRHLQLRLERVPAEAQAIAWKAQVRLCKRYRLLSARGKHVNQIVVAIAREMAAFAWAIARTVPIAA

SEQ ID NO: 87738 - protein, 419 aa, unidentified
MTDCDITASAPVLAAIDISKERHEVLIEAPDKKRRHRVSVLNNLDEFDRLISLLRSYQRPVRVAFEATGNYHRALAYQLGSAGFEIKLISSIALARTREALHNSWDKNDPKDAQVILHMMTIGAEQFYHDPLMRGTNDIQELSKTHDMISRSKTELWHRILTHYLPLYFPEADRFHRSSRSDWFFAFLELFPSPHFIAAMSKEAFIEAAWDVVGRKVGKERLLADIYATSARSIGLPVAPDSDAICMFRMVLAQGRSLIAHRNQIEARAVAMLKDNPDYQLLCTIPGIGLINALTILAEAGDLRRFQHHRQFLKFCGMDLSTIQSGMFRGQTKLSKYGNARLRRTLWMAAQVAILQRANSFRDKFERYITKDRHNPHLRRKASTAIAAKMARTVHAVVKSGEPYRPFFEGTIHSGRTLL

SEQ ID NO: 87739 - protein, 391 aa, unidentified
MVCVGIDVAKDKHDCCILDSDGMVRADCFTIPNNMDGFKQLLQTIRNCTKKSDKIKVGLEATGHYSYNILGFLLDNDLAVYVMNPLHTNLYRKSLSLRKTKTDRVDARTIATMLLSDVDLKSYTDAAYHNEELKSLTRYRFEKVQERAKLKQSVSRLVTILFPELEQLVPILHIASVYSLLSEYPGAKQVSEVHLTKLTNLLATVSKGRYGKDKAIQIRDAAKTSIGSVMPAKSLELKHTIKLIRELTSEIDEIEDSIQQIMDELHPPLLSIPGMGIHSAAMILGEIGDFSNFESPDKILAYAGCSPSTYQSGKLTNCYAHMEKRGSRYLRYALYNATKYVCHWNPVFAEYLAKKRAEGKHYNVALSHATKKLVRLIYALQKSGKTYLTAA

SEQ ID NO: 87740 - protein, 410 aa, unidentified
MPLFCGIDWATDHHDVAVVDDDGRLVARGRVGNDAAGFAQLLTLLAEAGDNVEHPIPVAIETDRGLWMAALRETGRVIYPINPLAASRYRARYAVSGAKSDATDAVLLANIIRTDPDAHRPLPADTELAQAIRVLARAQQDAVWARQQIGNQIRDLLKDFYPAAIIAFAELPTGGLARADARTILAAAPTPSQAGKLTPARLRRLLVKAGRRRDLDRDVERLRQVFTDTYLHQPPAVENAMGIQLSALLRQFEAACAAAEELAEAASAHFERHPDAEIITSFPGLGMLTGARVLAEIGDDRARFADARGLKAFAGSAPITRASGKKTVVTHRHIKNRRLAAVGSIWALTSLRASPGARQHFDARRAAGDWNRQAQRHLFNKFLGQLHHCLHTGQRYNEHRAFPPPLPLAA

SEQ ID NO: 87741 - protein, 388 aa, unidentified
MILVGIDVAKNKHDCLITNSDGEILANSFTIPNSLEGFQSLCSKILACSTNDSQIKIGLEATGHYSNNISEFLLNKNFPVFIINPLHTSLYRKSQSFRKTKTDKLDTHTICSMLQTQKLTPYAPVSYHSQELKSLTRYRFRLVDECSKLKVSFSRLMTIIFPELEPIVKNIQVNSVYHLMKKWPSAKEISKCHLSTLTNLLITNSKGHYRMEKAIIIRDAAKNSIGTCTPIQSLELVQTIDRILLLRSQISVIEENIECIMKQIDSPMTTIPGISTQTAAVIYAEVGDFSRFSSAEKILAFAGMEPSVYQSGEYSSTHGKMVKRGSKYLRRTLFLAAENVSHREPSFAAYLAKKRSEGKHYNVAISHVAKKLLRTIYAMEEKHQAYHA

SEQ ID NO: 87742 - protein, 373 aa, unidentified
MDEDRTVCVGLDTHKAKIAVAIAEPGRSGEVRFVGEIANQPDAVRRLIERLADKHGRLRVCYEAGPCGYSLQRQIMALGHDCTVTAPSLVPRKPGDRVKTNRRDAVTLARLHRAGELTAVWVPDPTHEAMRDLVRARTAAMETVRRARQQLQGFLLRHDRVFTGRKTWSPAHRRWLAELRFAHPAQQIVLQEQIDTIEEAERRRDRLGQQIRELVPDWSMAPVVTALQAMRGIAFLSAVVLVAEIGDFRRFANPRQLMAWLGLVPSEHSSGSKVERGGITKAGNGRARRVLVEGAWSYRFPARVTSPIQARLDEVPEAVRAIAWKAQLRLCARFRRLVAAGKNANLVATAVAREMAAFAWAIACQVQFRGAAA

SEQ ID NO: 87743 - protein, 420 aa, unidentified
MERSHGRQDSDRRSARVRLLNPPTLETTMQVVADQAAAPSAIQTDLRAIFVSLELSRSTWLITSLSPGGGEKMSKHSVQAGDIAGLLKRFAQLKEKARARTGWDFPIIVIQEAGLDGFWIHRVLQSEGIESHVVDAASILTSRRRRRAKTDRIDGETLVRTLMAFKRGEPRVCSMARAPTPQEEDRRRVCRERRTLVGERVQHVNRIKGLLFAQGVFGYEPLRKGRRERLEDLRTGDGRPLPVRLKAQIIRELDRLEVLLEQLKTVEAERDALLKPASAEAASPAAMLARLKGIGPETAAVLWSEGLFRQFDNRRQVAAYAGLAPTPWQSGSIDHEQGVSKAGNPRLRTTMVELAWLWLQNQPTSVLSLWFHERVRRLGGRMRKTTIVALARKLLIALWRYTTAGVVIEGAVMKAAPATI

SEQ ID NO: 87744 - protein, 407 aa, unidentified
MNVNATVNCVGIDVSKGKSTIAIMRPLGEIVKSPYEVKHTSSELKMLADTLNGLEGETRIVMEYTGKYYLPIARYLYDAGFFVCVIHAKLMHDFANNSIRMIKTDKADAVKIANYGFTNWDSLKPFSAEDETRMLLKALNRQYNRYMKQSVASKNSLISLLDQTFPGLNDLFPGGRKPDGRLKWVDVASKFWHCECVSNHSLQYFKKAYNKWCMENNYRGSDDKAEAIYNLAKECIPSLPKNDCTKAMVQEVTKNLSNTYLSISSTQKEMERLASMLPEYPVVLGMNGVGTTLGPQIMAEIGDVRRFPKRENLIAFAGVDAPPFQSGKFESRSRHISKRGSSELRKSMFQVIGCLCQRSMESDPVYQFVTRKKIEGKPYYVCMVAGCNKFLRKIEGSRNKGTHFYWS

SEQ ID NO: 87745 - protein, 412 aa, unidentified
MKDLLEISCGLDVHKEKIVACILTGPLGKPTRSEIREFTTLIPDMIALRDWIVSQNCHHVAMESTGIYWMPIYEILEDAFSGDITLLVVNARHMKNVPGKKTDMRDSEWISTLLRAGLLNGSFIPEKRIREFRDLNRYRKSVIRDITSQKNRIEKFLQSSGFRLSSFISDIFGASGRNIILHLMEHGQIDKTALDSCLKTKTRNRIDEILMSVNGTLSEHQKTFLKILMTHYDSLKKHLAEIETSLEEDMAPFALQVEQLNSIYGISTTASCAIIAEIGIDMEPFKTAEHICSWAGLCPGNNESAGKRKSASVTKGNPYIKSMLCEIAWVIAGKRNTYLSAWYWRIKQKKGAKKAIVALARKLLVIIYTMLKQGTLFDESCFETRRKNCEQKQLSRYIRELEKHGYHVEAQS

SEQ ID NO: 87746 - protein, 508 aa, unidentified
MATPTTRRKPAPAAGAPHAQAQAQRPPDQRHKTRAQPKREAPGPGASAPVEALPVQHPHAAGIDIGSRSHWVCVGFTTEAASCLIREFPAHTDGLKAIAAFLREHQIDTVALESTGIYWIPLFELLAAEGFEVLLVDPSYTHQLRGRPKTDRRDCQWIYRLHSVGLLAAAFRPDEETCRLRAYLRQRANLVRAASRHVQHMQKALEQMNLKLTEVLSDVTGLTGRAILRAILRGTRAPEKLARYRDKQCKASEAEIAQALTGTYREEHLFELKLSHEAWQFTLRQISQVDGQIVLQLGRMKSDRALPPLKPKPRPKRRANSPGFDVRAALYYVVGLDLTEIEGISELTALTVISEIGPGVSRFASVKKFCSWLGLCPNWKKTGGRVKSSRTRRGVNRAAQALRVAAQSLHHSKGALGGFLRRMKGRLGAQAALTATAHKLARIVYQALRHGLTYVRRGQEEYEAQMKEKLLKALRRKARQLGLEVVEKTSAGIPTTTAPPARLQTARK

SEQ ID NO: 87747 - protein, 345 aa, unidentified
MYRTRVGVDLAKEVIQVCTYRNKKVQSNIEMTPEEFLYWLINNKPATVIFEACSTSNYWKQKAIEAGHDARLISAKLVATVRQNQKTDKNDALAIVQAASLPDVTFIGGKTVEQQQLQSIKRLRELAVKQQGASHKQLVSLLLELNIRISNRKGGIISAIEGVLEDATNGLSVECRAAIHTAKEQLSVLIKSVHRYDDCLKNSVAAHPDCKKLMKLEGVGTTNAINLYLALGCAEIGTFSKGRDASACIGVTPIQYSSGGTVKLGSIGKYTKNSLLRSQLICGAMATIRHVVKREAKTQKEVWLKALIERRGKKCAAVALANKTIRTAFAILTQGTEYKAAPITA

SEQ ID NO: 87748 - protein, 425 aa, unidentified
MSCLLHPTRVIDLPESSRKAVPIMTAPARPAPVVVGGSDTHADTVHVAAISTLGREVADREFPTTAAGYRAAVAFLTSHGPVDQVGIEGTSSYGAGLARAVTNAGLQVIEVNRPSRADRRRQGKSDPLDAYHAARAVLSGRATSDPKDQSTEAIRSLHNTRRSAVKARTAATNQITAMLITAQDGIRSKYRALQGQPLITALAKCRTAVVDSVDAAVLTALKALAHRHQFLTAQAEELSTLIDALVTTANPALRAAFGVGPDTAAQLLITAGANPDRLRSEASFAALCGVSPVPASSGKTTRHRLSRGGDRHANNALYRIALSRMAHEPRTKQYVARHVAAGRSTKEILRMLKRAIAREIHRLLTHKVALPEYADLRPARQAKNITVTAAANAFNIWPTVISRIERGLQRDDDLANRYRTWLQAA

SEQ ID NO: 87749 - protein, 316 aa, unidentified
MTNKIYDLNIGVDIAKQKFDVSFSDQRVASFENNLAGFNQLLKEIKDKSQTRVVMEATGGYEKPLAHFLQNQGVAVSIVNAKRVRDYAKALGLLAKNDAIDAKVIRMFADAVNPKLLLTASDTQQALDAQAHRREQLVKQRAMEKQHLETIGNKEAVRSIKRTIAFLNKEIERIEKAIKALIKADSTLTEKVDRLSAIKGIGDITALTLIADLPELGQLTNKEISALVGVAPFCRDSGTQKGKRTTWGGRTQVRSILYMAALSAVQYNPPLKAFYNRLLMKGKTKKVALVACMRKLLTVANSMLRNRTEWNPNMEN

SEQ ID NO: 87750 - protein, 318 aa, unidentified
MSEPVFVGIDVASATLEVAWSGCSDTWQVANDDAGIAELGRRVAELAPALIVLEATGGYEFSAASALQLQGLAVAVVNPRTARDFARAMGLLAKTDALDAKLLASFARVLHQHPERERFIKPLPDEARQRLQALVQRRRQLIEMQTAEKLRRRQAHAASVGSVERVLDFLAKELADNDAAVSAHLQRHHAELSTALATVPGVGQTSVAVLIADLPELGKIDRRRIAALVGVAPMNRDSGQMRGQRSIWGGRHDVRRTLYMATLVAVRFCATFRAFYERLLASGKAKKVALVASMRKLLTTLNSMAKHGIRWNPMMHDS

SEQ ID NO: 87751 - protein, 342 aa, unidentified
MNLPIRIGMDTSKSVFQLHGVDENEGVVVRRQFRRAEMIRYFERLPPVLVAIESCGSSHHWARLLQSFGHEVKLIPPQYVKAYVKRGKNDAADAEALCEAVTRPSMRFVPVKSKERQAACMLLTVRERLVSVKSQLSNAFRSYAAEFGIVGPAGRQNVTALIKRVLEDDSLLEMARDLFRLQAEEYAAVQARLAKIEAKLMKWHREDDISRRIATIPGVGPIGSSMLSMKAPPPETFRSGRDFAAWLGLTPKDHSTGGRQRHGGITKAGDSVLRSTLIVGATALLRHIRKGRHKPTLWLPSLLERKPPKWVAVALANKFARIAWRLMISGGVYNRPVAAMPI

SEQ ID NO: 87752 - protein, 339 aa, unidentified
MNEFTKKKHFIGIDISKDKLDLALVNEKSPGVFEDKIVGNSFKGFDNIQNWLSKQKIKFEDCLFCMEHTGTYGLLLFAWLGQMGIDYCVEPGLQIKRSLGMSRGKNDKIDARRIADYAFINRAKLTSFSLPSTLLLQIKQLLTYRDQQTRIKVSLKNSLKSHDQYQRVSGLQSISDSIKDQIDECECRIEGIEEQIKDLIKSDETMKKNFNLATSVKGIGLVIAAFMLVTTNNFTGFENGRKYACYSGIAPFDDTSGKYKGKTKVSHLANKRMKTLLSNGANSARQWDPELRVYYDRKIQEGKEHNLVINSIKCKLVNRVFAVVKRQTPYVNIYQQNFA

SEQ ID NO: 87753 - protein, 427 aa, unidentified
MVAVGQTSIQGGRPLNEITYSLFVGVDWGTETHQVCVLAPDGQIVEERKVSHSATAVAEFLDWLSTKAPERASVAVAIETPHGAVVEELLARNFKVFAINPKQLDRFRDRYFPAGAKDDRKDAMVLAGSLRTDQHCFRSVGVSEPLVVRLRALSRLDEDLNLCFQRHCSQLRQLLHRYFHHLLQLSPTADEPWVWALLELAPTPHKAARLTLSRIEEVLRQCHIRRIDAWQILNVFRGPTFSLAPGTVDADSEHAIMLLPHLRLLHQQRLDVAHRIDRILEELSTPNEKIPSHSRDVELLLSLPGVGRLVTATLLAEAAPLLAERDYLGLRAYAGVAPVTRQSGKKAAVLMRYGCNLRLRNALYHWSRVSMQHDPRSREHYHRLRNKGHSHGRALRGLGDRLLALLCAMLRSQTLYDPNRRKCAANP

SEQ ID NO: 87754 - protein, 355 aa, unidentified
MSQTSNTAIAAIGIDIGKNSFHVVGHDARGAIVLRQKWSRGQVEARLANIPPCLIGMEACVGAHHLSRKLASLGHDARLMPAKYVRPYSKGQKNDFNDAEAIAEAVQRPTMKFVATKTAEQLDLQALHRVRERLVSQRTGIINQIRAFMLERGIAVRQGIGFLRTELPTILATRTDALSPRMLRVIEELAGDWRRLDQRIDGLSGEIEALARQDQACSRLMTVPGIGPIISSAMVAAIGTGDVFSKGRDFGAWLGLVPKQISTGDRTILGKISRRGNRYLRVLFVQAAWVVLVRIKNWERYGLKSWIEAAKRRLHHNVLAIALANKLARIAWAVLAKGRGFELTRTGDAGVVQPA

SEQ ID NO: 87755 - protein, 290 aa, unidentified
MPHYVGLDVSQKTTAICVVDEQGRRLWRGACVTDPGAISARVLRHAGVVDVKVGVETGSMTPWLVHGLRSAGLDVECLDARRVKAALQMRLNKTDENDAEGLAQVMRTGWYRPVHVKSFDAHRARALLGARAQLVGMTTRLSNMIRGVLKTFGLLPGAGRGLRFDRRVEALLEGAPEIGFIVRPLLATWRQLREQVAVFDKAVLRQVKADPICRLLMTVPGIGALSSLVYVSTIEDSSRFSRSRAVGAHPGLTPRRYQSGETDRSGHISRCGNGLARRLMHEPAIVILHL

SEQ ID NO: 87756 - protein, 344 aa, unidentified
MDNHTQYSGFAGVDLAKKVMQIHFVAGDGEITDKQVKRAEFLDFFRNRSKCLIGMEACGASRDWARKLEAMGHEVHLMSPKAVKPFVSGQKNDYNDAIGIYKAMFNGVRRVPVKSTEIRDLQTLRRIRSQVTKDRVKEINHVRGLLAEYGIVMGKSITAFNKGISSALESLKERGGVSPLVAEELRTTVESIKTKIERQKKLDREIEQLARGCKNYENFLKTPGVGPFTAAMLCVLLCDPDIFANGRKFAAYIGLAPRSRGSGGKYFVTSIPLKFNCDSESRAVFVECAQAIARYKNKSPWVEDILRRKPKKVALIAIANKLARQVWAMANKGENFKQMAILTA

SEQ ID NO: 87757 - protein, 311 aa, unidentified
MTECTIGIDISKTHLDAFRQQDQAARQFENTPLGIRALIRWLGQVPVARIVFEPTGPYHRALETTLSGKFPLVKVNPLQARRFAEACGTRAKTDAVDARILARMGAALKLEPDAPISENHLVLRDLQVARTALVKERTRLRNRGHVQVNPVLKRQIKARLTLVERQLAELDAEIARHIASDEALQRKREILCSVPGLGPIAAALILTFLPEIGTLDRKRAGSLAGLVPHSRESGQWKGRSFIGGGRKPLRDALYMPALVAMRFNPDLKAKYAALRDAGKPAKVAIVTLMRKLVETANALVKADRTWTQKTA

SEQ ID NO: 87758 - protein, 350 aa, unidentified
MTTIALRITGGVDTHLDVHVAAALDDRGSLLGVANFATTPSGYRELFSWLQGFGEVELVGIEGTGSYGAGLTRHLHDNGIAVVEVDRPNRQRRRRRGKSDPEDAVAAARAAQGGEARGLAKTRDGNVESMRVLRVARSSARRSRTQAINQMRSLISTAPDVLRSELRELSIYQVLTLTAAYRPGVGRDVVSLTKRSLKMLAKRAIALEEEVREIDAILKALVAETAPELRAVIGVGTDVASALLVAAGDNPERLKSEATFAHLCGASPIDASSGKNERHRLNRGGDRSANSALWHIVLTRMVCDPRTRHYIERRMKEGRTKKEAVRCLKRYVAREVFRQLPRRQLRLDSP

SEQ ID NO: 87759 - protein, 367 aa, unidentified
MNEPITYVGIDAHARELHLAMLRWDRAEPSEWTLPNEPRAIERLRRRLEREVSGIVECCYEAGPTGYALQRRLSVGRVRCRVIAPSLIPERIGDRIKTDRRDARKLAQLLRADLLTAIEPPSEDAEAVRDLIRARDDARVDLMRSRHRLSKLLLRRGQVYPRTPWTKAHREWLAQLAWPHAAERQVVRDYELAITHTHARLDELDGAIAEIALTAPYRAPVAALRCFRGIDTLLAMTLLAELYDLRRFPHPRALMAFVGLVPSEHSSGDRRSRGGLTRTGNTLARRMLIQAAWQYNHPPRLGAPLQQRRVGQPAAVLAIAIKAEQRLCHRYHRLCARQKPKSLVIAAVARELVGFIWAMMQLPVTRA

SEQ ID NO: 87760 - protein, 341 aa, unidentified
MLKQKLIQSTAKSKSGIKSYDHYVAIDWALENMAIAHMTQSDEKPGLFEGESDISVLKKYLSSLKGRTLITFEETGSAQWLYLELLGHAERILVCEPFHNKLLNEGPKTDKIDAGKLCELLRAGMLKEVYHSGSAIYELRTLVSGYDDVVKAGVRSLNQKEALERDHRNKGKDAEFISGILDKSIEFYRPSKKEYEKRFKKFCRVNKMARNQDNIPGIGMIGAVKIIASVVDGRRFPYAGKYYSYCGLIKHEKISGKRKYGRRKPWYSRALKSVYKTAARAALKGNNAFRHYYDHLLGEGVAQHNAEQAVARYIAQVSYGMLKSGHSYDPNRFKEIKLKIK

SEQ ID NO: 87761 - protein, 350 aa, unidentified
MMIIGCDLHTRYQQVAMVDTETGETLECRLEHANGEARAFYAALQGQVRVGIEATGYTHWFEALLAELGHELWMGDAAKIRAAVVRKQKTDARDAAHLLDLLRENRFPKIWRPSPEERDLRQLVWHRQKLVWMRGAVKNQLHALAMGEGVCRKKQLFTVKGRQELEGLALGPWASYRRQELLRMYDEMAAATAKLDLEVERAAKSLPLAVRLMTHPGVGPVTSLAFVLILGPVARFERSKQVVSYLGLNPQEHSSGGKQRMGSISKQGNPMMRSLLVEAGHTAARLDPELKRMYQRLKFRRGASVAKVAVARKLAVRLYWMLRSAADYAQLVRMQGSPWATLVESSPSLG

SEQ ID NO: 87762 - protein, 412 aa, unidentified
MPVPEALFYVGIDWATETHAICVLTAAGRIKTQFMIDHTAAGFADLLRRLGRLTGNPGDVPVGIERPDGRLVDALLEAGFPVVPVSPNAIKTWRDGEVLSGAKSDVGDATVIAEYLRLRAHHLRPATPYSAQTRALRTVVRTRDDVVDMRVAATNQLSALLDMHWPGAKVIFADVESQISLAFLTRYPTYASAESLGEKRLHTFIVKHGYSGGRTAAELLARLRSAPAGTLDPTVTVAARDAVLAMVAVLTAINTARKALDVSVVAHLGEHPDAAIFTSLPRSGQINAAQVLAEWGDSRAAYDSPDAVAALAGVTPVTKASGKYRAVHFRWACNKHLRKAITCFADNSRHASPWAANVYAQAIARGHDHPHAVRVLARAWIRVIYRCWNDGVPYDPNKHGNASKLHENPAAA

SEQ ID NO: 87763 - protein, 338 aa, unidentified
MGEIATIGFDLAKNLFQVHGIDAHGKVLARRQLRRAEVLGFFAKLSPCLVGMEACATAHHWAREIAKLGHEVRLIPPAYVKPYVKRGKTDAADAEAIAEAVTRPTMRFVAVKSAEQQGVLMLHKTRDLLTRQRTALINALRGHMGELGIIAPQGAQNVAKLIEALRAAGEEVPELARSALHALIDQLGLLEIGIRKAEAGILAWHKANEASRRLATIPGVGPITASAIAATVPDACLFRSGLQFAAWLGLTPQPRSSGGKERLGRISRQGNAYVRRLLVTGMTAVLRYTRADSSRNPWAAKLLERKPARLVTVALANKTARVAWALLARNESYAAPAA

SEQ ID NO: 87764 - protein, 370 aa, unidentified
MQFIGVDLHTNKFTCCYRDDGSGQEKKGKKETATFNLSGYGIAQFRQTLTPETYVLVEATITTFAFVRLIQPFVKQAIVANTYELKQISLARKNTDKIDADILCRILKMQVLSGEQTISPVVVPPEEIQELRGLFTTYRLYKKQTTQIKNRIHSLVKEKLYGFTQEQIFGKSIRKRVRALESGTAMCFQINELFDLLEHYEGRIQCLKDKIEEQAEPYMKEIKILTSMKGIGIFTAIAIIADIIRVDRFKNSKTFTSYLRSAPRVASSNTSVSIKGTNKKGRKLAATLVTQSLTHVLKASPKLNKWYTELTKHKKPGLVRTGLRRRVFAEMYQMLKKGEYHYGREERIHEAKIRQYERFLKKRKNLLKTA

SEQ ID NO: 87765 - protein, 344 aa, unidentified
MTYYAALDVSLRSVNVCVIDEQGEIRAETKLDSEVDDIAEYLHGLDYDVSSVGLEAGTLTQYLTYGLQSAGYEVICMEARQVKAALSAMRNKTDKHDARGIAQILRSGWYSRVHVKSLESHHIRLLLSSRRAVLSKCVDLENEVRGLFKVFGIKLPPKLGHGAFDKTVRGTIEADAALAHALLPLLEARLVLYRTFRELDNRTRKMAQRDTVCQRLMTAPGVGYITALTFKAGVDDPTRFKRSRTVGAHFGLTPRRFQSGEMDNPGRISRCGDPDVRSTLYTAANALMTRSSKWSALKVWGMQLAKTRGHRRAVIAVARKLAVILHRMWIDDTQFRWGTEAARS

SEQ ID NO: 87766 - protein, 347 aa, unidentified
MKNTVIGIDISKKSTDWCLMRGTEVVSYHRVDNEIAAIEGQLQELMDSYLIDRCELMVCAEHTGHYIYPLAIACQNKHVDLWLENGYNIKCEARKERGKSDKEDSRRIAEYGYKNRQDARYYSVPTQEVAALESLLAERADYVVERAKLKGQLQDQKDYTDPAVYKAKAKRLRKLIRQYDKLISEIEQELERLMRENETMGHQAALLETIPGIGRHTAMRMIAATKGFTLFENGRQFCCYAGTAPFEYRSGTSIRSKNRVSQRADKSLKAMLHLCALTVARRSNPNHFSDYYQRKVDEGKNPMSILNAIRSKLVLTMFAVIRTDQPYSPEIVHNYVEKFSIKPIAIS

SEQ ID NO: 87767 - protein, 350 aa, unidentified
MVVVGADVHKRTHTFVVVDEVGRKLGEMVVKATTDGHLQAVRWARTQFGIELVWAIEDCRHLSARLERDLLTAGQRVVRVPPKLMAQTRASARTRGKSDPIDALAVARAFLREPDLPVASHDEVSRELKLLVDRREDLVGQRTSIINRLLWRVHELDPDRAPKPRSLDLAKHRRLLGDWLQTQPGLVAELARDELADITGLSEQINALSKRIGERVRVIAPALLSLPGCAELTAAKIIGETAGVARFKSEAAFARHSGVAPVPVWSGNTAGRVRMTRSGNRQLNAALHRIAVTQIRLDGPGQTYYRHRLAEGDCSSEALRCLKRRLARTVFGHLHTDQTNRQEPCQPAAA

SEQ ID NO: 87768 - protein, 311 aa, unidentified
MDATVVGMDVSKNQLDVHIRGQNESFVVPRDAEGLAALIERLRPLEPLAIGLEATGGFETFVAAGLASAGLPVVVVNPAQVRAFANALGKRAKTDPIDAAVIAHFVEATAPEMRPLRDEETRLLADLVARRRQIVAMIVAERQREMHAPARVKKSIVRLLKALRRELDSLDGDIDESVKGSPIWREKEDLLASVPGIGTTIARTLLAELPELGTLDRRKIAALVGLAPWTRQSGQWRGKSFIGGGRASVRAALFMGAMVAARYNPALKAFRDKLVAAGKPKLVAIIATARKLLVILNAIVRDKKPWADQTA

SEQ ID NO: 87769 - protein, 416 aa, unidentified
MKEWEHITHYAGFDWAKDHHDVIILDASGKIIADFRFAHSAGGWEQFREKLVAYPNIAIAAETKNGVAIERMLEMELCVFPVHPKSAKSYRQRKVPSGNKTDRIDAWALADALRLDGNNWKPLAAQDALIKELRLLCRDEIALIRDRTALITQLRQALYEYYPIALEAFDDWTMPAAWAFVVAFPTPEALLKAGQRKWEKFLHLHKLARPETYQRRLEIFARATSFAGSASAINARSRLAVARARQLELLEKQLDDYRREIHRLFSSHRDAALFGSLPGAGEKIAPRLLAEIGEDRALFTDAVALQCLAGTAPVSFQSGQVHRVRVRHHCNKLLRHTVHLWANLSRDSCPWAAAYYDALKKKGKTHAGALRALGHRWLKILWKMWQSRTHYDADFHMRNQVKHGSWVLSLCQGAAK

SEQ ID NO: 87770 - protein, 342 aa, unidentified
MKSTTIAVDVAKEVLEVAVSVRPGQVREQHRLSRTAFMKFCTDQPPATFLLEACGSAHYWGRRLETLGHHVVLLPPHATRPCVFRNKTDRTDTRGLLEAYRNEDIHPVPVKSVPQQALTALHRLRSTWLAARTARLNTVRGLLREFGCTIPLGAHHVLPRAWDLLADADSGLPDALRPALAEACTEIRDLEGRIRVVEAQLQALADQTPAVARLRSIPGIGLITATALVAFVGDVQRFPSGRHFASYLGLTPRERSSGLIRRLGAISKRGDVYLRMLLIHGARAVLWAARKRRTPDRLRAWALHLQKLRGHNKAAIALANKLARVVWAVWKHDVDFREVPAA

SEQ ID NO: 87771 - protein, 345 aa, unidentified
MAIIGCDLHPRYQQIAMVDGGTGEIVTRRLEHEKGEAGAFYASVEKPSLIGIEATGYTQWFERMLAELGHELWVGDPAEIRARAVRRQKTDTRDAEHLLDLLRTHRFPRIWIPTPEERDARQLLKHRDRLVRMRTSVKNQLHFLAMSQGVCRRRKLWSAAGRQELEGLKLGAWASRRRRELLELLDELQPKVTELDEAVEAEARRRPEVVRLMTQKGVGPVVGLAFVLTVGPVERFANSRKLVSYLGLNPSEDSSGDRQRLGHISKQGNSMLRWLLVEAGQSAAQFDPELRRKYRRVQLRRGAKVAKVALARRLAVRLYWLLHEARLEASEASEAEPQAAGSHAK

SEQ ID NO: 87772 - protein, 369 aa, unidentified
MDDITYVGLDVHKATVCVAVAESGRGGEVRQIGVFENRPEILIKLAARLSKGGRPLSFCYEAGPCGYGLHRLLTGHGHDCIVVAPSLIPIKAGDRVKTDRRDALMLAKLHRAGELTPIWIPDAAHEAMRDLVRARATTGRVLSKARQHLQSFLLRHDQIYRGARAWTLAYRRWLTTVRFAHPAQQIVLQDYIHAVQDAEARLDRLTRQIEELLPGWSMAPVVTALQAMRGVALVVAVTVVAEVGDFRRFANARQLMAYLGLVPSEHSSGATVRRGGITKAGNVLARRVLIEGAWTYRMPARVSRKLHDRNEGLSPTVRDIAWKGQIRLCSRYRRLAASGKPKVVVTTAIAREMVGFIWAIARITQPTPG

SEQ ID NO: 87773 - protein, 339 aa, unidentified
MFEFSTVGVDLAKNVIQVHGVDADGKVVLRRQLRRNQFLSFFEGRAGCLIGMEACSGAHHWGRRLQEMGHEVRLMPPSYVKPYVKRGKTDAADAEAICEAVTRPSMRFVPVKSEMDSAALVLHRARDFLVGQVTQTGNAIRAHMAEFGIVTAKGSKRVAELADKLDALPEAARLPIQVLFDQLAETQDRIDRLTDEIEEVHRQSEVSRRLASIPGVGVLTATAIAATTPDVGNFASARDYAAWLGLTPKQHSTGGKPRSGGISKMGNRYIRRLLYLGAMAQIMVRRRSRHPGTDWLARKLATKETRVVAIALANRMARTIYALLRDGASYRPQVRVMPA

SEQ ID NO: 87774 - protein, 400 aa, unidentified
MRTVFGIDVSKASSEVAILVNSEKVHSYSMSNDAIGFSRLLKDLKSVQNPEIIFEATGVYSRRLQAFLEDNNYAYTRLNPLEAKKQLDSLRVRKTDKIDAEKLAESQFFLNRKTTYIQKEVYQNLHDLSRFYQNLTEDIVRAKNRLHKVLQVTFPELEQLLSTPTGEQYWNLVIAFPIKNFVLEVSETELTEFIRQSTSKRISEKRASSLADKLTELAKQSYPTVKKTSPILEEVKYYAQELLRLSQGRRVVLDQMISLAQPLPEYDILLSIPGIAETTATSIIGELGDIRRFQSANQINAFIGIDLRHYESGNYLAQEHITKRGNPYARKILFKCIHNIASASHTNPCHIADFYEKRKRQSQVSSTKPHTIASIHRLIRTMYYLITHNKLYDYHLAKNQ

SEQ ID NO: 87775 - protein, 349 aa, unidentified
MEIDTIGIDLGKTVFHVVGLSRAGEVVVRRKFSRTQLLRFTANLRVRLMGMEACGGSHFLGGRLREQGHEVRLMPAQYVKPCVKTNKNDYVDAEAIAEAVGRANMRFVPIKSNEQLDMQSLHRVRDRWVARRTSVVNQMRGLLLERGITFRKGRRHAEASLPGVLEDSENGLSGPLRMLLSQLQSELRQLQIQIDEADTLIAKAAREQEACQRLMAIPGVGPLTATAVVASIGSGAEFRKGRSFAAWLGLVPKQESTGGKQKLLSISKRGNHYLRRLFVSGARAVLQCRDKQSPGLSAWLGQLASRVHTNIAAVALANKMARVAWAVLAKSEAYRPPLAVISTEALVCN

SEQ ID NO: 87776 - protein, 357 aa, unidentified
MKKQWIRLGCGLDISKKTFHGCLGGYTQESRFIVHAQKKFANTSSGIIAFLKWLEKHKQKLDETGSLPFQLLLETTGVYHEGVLFAAHEAGVAVCLEVARRVKLYLRSIGQESKNDKLDARGICQMACERKFQLWKPFSDNIYQLRSALRHRKSLINSRVRLDNQLHAANFSKTASKDVKASYKRLIKQMEKEIKALEKHIVELYEQDQVLAERLNPIIESVLGLGLFTALTIIAETNAFSLITSRKQLASYVGYDIIENQSGNKKGKTKISKKGNARIRSVMYMGALSVIRSGKGPLYDLYLRVRHRNPKAYKKANVAVQRKLLLLVYTLFKKRERFDLEKYTLKTSKDMKVVAPN

SEQ ID NO: 87777 - protein, 453 aa, unidentified
MKKRPPRRRPWTQPASASPSLLERINPNAAGIDCGAAAHYVAVPADRDPTPVRAVPTFTADLHRLADWLTACGVTTVAMESTGVYWIPLYEILEARGLAVVLVNARHVKNVPGRKSDVVDCQWLQELHSVGLLRGSFRPPAAIADTTHVHRMQKALVEMNLQLPLVLTDITGVTGLRIIRDIVAGQTDPHALAQHRDVRCQASEADIIAALTGHYRPEHLFVLRQNLELFDMYHQQRAACDAAIEAHLAPLAAQAPPPATPLPAPRTQPKPRDNAPRFDMRTPLHQLTGVDLSQLDAIGPYSALRLLAEIGTDMSRGPTEKHFTAWLTLAPQNKISGGRLLSSKTQPSANRAAGILRLSAMSLSRTETALGAFFRRLAYRVGKAKAITATARKLAILVYRTLKDGLLYQDPGAAAYTAHHRARVLRHLRQRAAALGFALVNRDTGEVLEGTVS

SEQ ID NO: 87778 - protein, 354 aa, unidentified
MADQIAVVGGVDTHTDFHQAAVIDTVGRHLATAPFPTTPDGYRRLLEWMRLHGDVLTVGVEGTGAYGSELARFLRANEVTVVDVDRPDRKARRVNGKSDPVDAYAAATAVLSGRAHGRPKTRDGIVEAIRSLRVVRRSAIKSRTQTINQIRTLIVSAPAEVRERLRGLPTYQLIAQLARSRPGADLADPTCAVRTALRRLARRYQHLTEEIAEADAELDPLVAQAAPGLVDLIGVGTETAAQLLITAGDNPDRLKSEASFAHLCGAAPVSASSGRTNRHRLNRGGDRQANHALYTIALVRMRYDPRTRLYVARRTAEGMSKKDIFRCLKRFIAREVYKYLTSMNIPQLHLLQAA

SEQ ID NO: 87779 - protein, 389 aa, unidentified
MAIETRCPASTAAGETLFMALELGSTTWKVAFATTRGMRPRVRTISARALSQLRAEIGTAKTRLGLCADAPVRSCYEAGRDGFWVHRALAAEGIANVVVDPASIAVDRRARRTKTDRLDAIALVIQLMNAAAGDRRGWHELRVPSVQAEDDRQLQREWDAVREDHTRVRNRIHGLLATQGVRVKLTADFLEQLRGAQLWDGTPLPAELVARLERDWTQLQHVDDRLTRLKELRQARVAPDRTDVVATQTRHLAELKGIGVNSALTLSTELFAWRGFANGREVGAIIGLTPSPYRSDQRMVEQGISRAGNRRVRALSIELAWSWLRWQPGSELSRWFHARFGQHGRASDWDCGGRPEAHDRVVALCGDRHGAEGRRAEGVSRGASESHRP

SEQ ID NO: 87780 - protein, 334 aa, unidentified
MQNVTLIGIDLGKHSFHVHCQDKSGKALLRKKFTRTKLIEFLAGCSSATVVMEACAGAHFMARRIADLGHEAKLISPQFVRPFVKSNKNDFVDAEAICEAASRPSMRFVQPRTESQQAMRALHRVRESLVRDKVKTTNQMHAFLLEFGISMPKGIAVIKRLSTVLAENELPPYLAQLLIRLHDHYQYLVMQITELESALEQELSRDETGQHLMTIPGIGPITASVLSSQLGDGKQYDCSRDFAASTGLVPRQYSTGGKNTLLGISKRGDKNLRRLLVQCARVFIQRIDYQSGKLADWVRTQLARKHSCVVCCALANKLARIAWAITTQKTVFEK

SEQ ID NO: 87781 - protein, 340 aa, unidentified
MEDVAVVGVDLAKSVFQVHGIDARGQVVLRRKLNRSKLLSFFAKLPSCLVGMETCASANYWARELVALGHEVRLMPPQYVKPYVKRSKNDASDAEAICEAVTRPTMRFVGVKSGEQQSVLVLHRTRLVLNRQRTQIGNAIRAHLAEFGIVAPVGRIGLDRLFAVIADDSDQRVPAAARTCLAMLVEQHRLVLRHLLETDRAIRAHSRATEIGRRLQEIPGVGPLLASALVATVPDPHVFKNGRSLSAWLGLVPRQNSSGGKERLGGITKAGDTYLRKMLFVGALAVIRYAERHGTKRPWLLKLLTRRHPRIAAIALANKIGRIAWALMTSGERYHEPVIA

SEQ ID NO: 87782 - protein, 409 aa, unidentified
MDRLVERCAGIDVHQATMVVTVRLPAGEGGRTSVTETFGAMAADLLALRDWLQGHHVTDVAMESTGVYWRPLYYLLEEDFRVVLVNMHHLSHVPGRKSDVRDSEWLAQLLECGLLRGSLVPPAPIRDLRDLTRYRKRQIEDRAQEVNRLHRVLEDAGLKLATVMSDIMGVSGRAMIEAMLQGTTDAVALAELARGRLRAKLPALQQALQGRFRPHQAFLVTQILAKIDFLEETTARLTEEIDRRMVPFEPVLARLITIPGVARTNAIVLVAETGGNMAAFPSAAHLCSWAAMCPGQDESAGKRRSGHTRRGNRYLRGALIEAGNAAKRARGTALQARYHRLKQRRGHKKAVLAVGHQILEIAYYLMRDDVTYRELGADYFSRRDRDRATRRHIKQLEALGYAVTLAPAA

SEQ ID NO: 87783 - protein, 342 aa, unidentified
MAPQMSVLGIAIAKLVCHVVGMDDTGAVVLRKRIARSEWLAFIANVPPLRIGMEACGSAHYWARCVREHGHDVRLIAPQCIKAYVKSPKHDARDAEAICEAVTRPTRRFVPIKRVEQQDLQALHRVRERLIKARTALVNEIRGLLSEYGIILPPSITKFRALIVDQLHKEQAKLTTLSAEVFWQLYDAFRALEKRLEYYDEKLAAIGQAHPACQRLQTIPGIGPVTATALIAAIGNVTQFKNGRQLAAWLGLVPREHSTGGQPRLLGISIRGDRYLRKLLVHGARATLRWVDTKGDDRSQWLRALIARRGKNRAAVALANKNARIVWALLAHNQEYRVRTVI

SEQ ID NO: 87784 - protein, 324 aa, unidentified
MYLGIDLSKAYFDVTLRNEQGEKTTAHFDNTPAGFVGLEKWLKGQGGREVHVCMEATNVYWEPVAHFLHAKGMTVSVVNPARIKGFAMSQLRRNKTDKQDSDVIVDFCQAMHPKAWTPPSAAVSKLRSLVRLRATLVKTLTQHKNRLTDAQDDEVKACWQRLIDTLEAEIAQVESQIEHHIAQHPALQATATLIRSVKGLGKIATWTILAEMPDLAEYEDAHAAAADAGVNPAHHESGDTVRHKPKLSKVGKAAIRGVLYLPAITAIQHNPIVRALAERLAQRGKPKKVIIVAAMRKLLHLAYGVVKNKIPFDPLYPASPLPAT

SEQ ID NO: 87785 - protein, 343 aa, unidentified
MQIVSVGIDLGKTTFHLVALGAAGKVLVRKKFTQRQLLTYTANMQTSLIGLEACSGAHFLGRALRKQGHDVRLIAAQFVKPFVKSNKNDFVDAEAIAEAVERKNMRFVPIKTDDQLDLQAIHRVRDRLISRRTAVINQLRAFLLERGLVFAKTPAKLRAALPDVLENADLDLTPQMRNLIDLLWNEWKSVEDQIEGLSLELERISAADPGCTRIRQIPGIGPIVATAIVAAIGNGAAFRKGRDFAAWLGVVPRQYSTGGKARLLGISKRGNVYLRKILIHGARAAVLRIKRDRAPIGAWLDALDARAPKNVVVVAMANKLARIAWAVLSSGEDYRPHSNLVTA

SEQ ID NO: 87786 - protein, 356 aa, unidentified
MNHLGIDVGKRKCRAALKDDKGKILDEFFFGNDGDGIHNLLSRIQSHGKCSTRAVLESTGNMWMKIHDTLEENEIDTKLANPYKTRIIAEAKIKSDKLDARILSDLLRTDLIYESYVPNKEDRDRRSLVRHRITLSRTKTKLVNKVHSILDKYDYQTNLTDIFSKSGIEWLRSLSSQVTPVDRIILDSSIASIETINQQIATVSKEISKYASSLDNKDVKILLSITGIDIFSAMLISTEIVDVKRFSTPWKLVSYAGLAPSIRESSGKTKTGKITKQGSPWLRWILVQCALTAIRYDAHLRTFYDRIRNRKGHATAIVATAKELLVIIWYMLNRNELYRYMDKQRYEQKMQKLEQR

SEQ ID NO: 87787 - protein, 313 aa, unidentified
MPTPLNFGIDVAKDTLQIAWAESPAELCLANRRRAIADWLAKLAPGSRIAMEATGRYHLLLAELAHAAGMIVYVLNPCDLLHYARAVGLRGKTDRVDDRLIGRYIVREHAELHPYVPPTPVQREIDQLLRRRATVVETKTRLRLSLHGMVGLDADLRIALKRLDGLITKLDQRLRQLATHQAESLRRVESVLGVGPLLGVALTNTFERVPLRNGDAAVAFVGFDPRAKDSGQCIGRRRLSKRGPAELRRLLFNGARSASKTKLWRPLYERYRARGLSTIEATVVLARKLVRVAFSIYRHGTTFDPARFARGLT

SEQ ID NO: 87788 - protein, 350 aa, unidentified
MIIIGCDYHPGFQQIAFVSTDTGEVGERRLEHTEEAEQFYREVGKHGEVVRVGMEASGHARWFERLLHNLQFELWIGDAAEIRTKRVRKQKTDRQDAQLILQLMLENRFPRIWVPDAENRDLRQLLWHRHRLVQMRTRVMNQLHVVALNEGLRRKKALWRPEGRAELQGLSLAPWAGRRRQDLLDLLDRLTPKIHELNGKLEQIVEQRPVTRQLSTHPGVGPLTALAFELVIGTPERFACAKQIASYVGLVPSEESSGDRRRLGHISKQGNVLLRFLLVEAAQVTVRSDAQWRSQFFHLAMRRGRKIAKVAMARKLAVELYWMWRRGWDYRQMQQLGSHAGEPGHPHGVQ

SEQ ID NO: 87789 - protein, 615 aa, unidentified
MSITTPLERIGVGIDTARYGHRVSFLRPDHQPAAKPLTVLESRAGYQALHQRLEQLHQQHPQAHFHVRIDAAGQYAANLEHFLRTLPLPLTLSIGEPKRNKDYQKAHFPKRTTDDTESQAMARFAVVELPPATAAVGPAMTMLREVAGRLQAKVKQSTQALNRLHNLLARVFPELATLTDDLSASWVLRLLEKYPTAQRLGQARLSTLQNIPYLTPELAAQVHLVAQQSVACLSGDIAETLLRDLVAQVRHTQQAENQMRALLSDAYDALPPSPHLQVVTVPGIGVATAAALLAQAVDIQRFGTPQRFVGFFGVFPEEDTSGVDKYGQPLPPGTQRMSRKGNDLVRHYLWNAARSAIVHNPAVRALYQRLRAKGKRGDVALGQCMRKLLHLVYAVWKTNRPFDEQHFAWQTPEQAGPTAQPTSSPAIDTEPTPASGVTASTAAASNGPSLDPAVQGAAAPVSNETAVGHTRDVPATEVVTTATATVAPTPAAVKPAPPVNRGARPRVDFAFLRQQVTMEQVLRHLGVFDSLRGRGQQRRGPCPIHGQPGNPQPTFSANLGKHLFQCFHPECGAQGNVLDLWAAVHKLPLYEAALHLAETFHLPRNREEEPVSGTR

SEQ ID NO: 87790 - protein, 433 aa, unidentified
MEVMHERVAGLDAHKAMIVACVRLIVGGKVSRECRTFETTTAGLEALLGWLTEAGCTDVAMEATGVYWKPVWNILSDGAFELIVANAAHIKNVPGRKTDVNDAMWIADLVACGLIKASFVPEEEIQELRSLLRARKQLTREQTSHIQRIQKTLEEANIKLDSVISDILGISGRRMIEAMIAGVRNPLRLAELADRRIKASPKALYDALHGRLTDHHRFMLKLYLGQHDSLSEAIARIDRQVHGLIIRMDAEVKAGQATFRALIILLCSIPGISTLAATVILSEIGRDMSRFPTSGHLVAWAGMCPGQNESPTGQARGLKAHGKRKSSRLRKGAPWLKTMLVQCAWAASRKKDSYYKAQFNRLRGKRGPKKAICAVAASMLTAIYHMLKDGTFHQDLGADHFDRRSTEVKAKRLVAQLTKLGFQVQLQPLAEAA

SEQ ID NO: 87791 - protein, 350 aa, unidentified
MKKLFIGIDFSKEKLDATIILACGMNEIGSREYGCFPNNTTGYRKLCNWVKTNAWNTIAEEWLFCGEDTGSCSIGLSKWLYGKGYDIWIENAYAIKHSSGIQRVKNDKADSAIIAEYAWRQQDKVVPFEPLNESLAQLREIFLYRHKLVGQRVAMELRKEDKSQSNKSKAISFINRKSKHLIAEINKTIAECDKAIDSIIEANEELKENYAIITSIKGVARQNATCMLVYTNNFKKFGYDPRKIACYYGVAPFGKQSGTSVNTPAHTSHFANKLIKSLLGQAAHIAKIYNPEIRDYYQRLISKGKKPQVALNNVKNKLIRIIVALVRKKVPYDQNTYKKLYKTEKKKDGC

SEQ ID NO: 87792 - protein, 400 aa, unidentified
MNPVVGLDVAKGESEAQAFLDKDKPFGKSFKIKHITEDLDTFISFLKVIERKTGVRPAVILESTGHYHTPIIQCLEESQYLYILVNPIISHQAKKTSLRKVKTDAFDAYQLCILYYKEEFEPYKKRGLRLLNLRTLSRQYEAVTNLYIQAKLQFHTILDQVFPEYRGVFGDLFSRVSLQVLKEFPTSEDVLRIGEAKILERIVEMRIKRSAGWARERAAKLIDSAKRNPFQQGVYQSQLFSLDMYITMLLQYQEHLSSIEAEIDVLAEEIEECKIIQSIPGIGGKIAATIISEIGEIDRFNHPKKLVAYAGIDPSVHSSGKFTATINHITKRGSSRLRHALYMAVLCGIRSSRNKKLKEYYDRKRNEGKPSKVAMIACVNKLLHWIYAMLKRNEQFLDFA

SEQ ID NO: 87793 - protein, 342 aa, unidentified
MEVVSIIGVDLAKRSFQAHGATADGHVLFRKKLSRAQVLPFFARQPRCTVAMEACATAHDWGRQIGALGHEVKLIPPIYFKPFVKRHKNDAAAAEAIAEAASCPTMRTVAVKTQEQQSRSVLFRTRDLFVRQGIQLINALRAHLAEFGRIAPKATTSIRRLREILEDLNNGLPQMVTDIGSIYIGQITTLTEQISRLEKQVRIEATRDDTARRLQTMPGIGPVTAMAVTAFAPPMEVFRRGRDFAAWVGLVPRQHSTGGKQKLGRTSKMGQRDIRRLLVIGAMSIVKVAVHKGAPEGSWLQKMLNRKPRMVAAIALANKMARRVWAMLVKNEDYRDPAIAAA

SEQ ID NO: 87794 - protein, 342 aa, unidentified
MKYITMDAHTEWTEIVVGNERGKAILHKTVKTGAKALREVVQNVRGPATIVVEESTLAGWLRTELADLVDAFIACDPRHNRLIWGAEDKNDRNDAVRLLELAALDQLKPVYHADADRYGLKELVLTYHRAVRDVARYHNRIKAKCRQHGLGCVPASVYAGPQRKEMLARFPWADTRRAMRHLLSTFDALARQRDKLYHALVRRGRRIEAVRRFQQLPGVGPVIAITVFAIVDTPFRFANKKRLWKYAGLALREKSSANVTLARGASRQGSRWLKYVVMQAAIEAIQHGNNEFAEQAQRMRQAGVHEGNARRTVARKMLATIYGIWKSGEAYQPTEMTASRNR

SEQ ID NO: 87795 - protein, 319 aa, unidentified
MAQNDVAVVGIDVAKDKGDACIRKLSLRQTFPSLEQGQRKLIAWLRKHKVTKAVMEASGGYERTWARALRDAGIEVRIVDPKRVRAFALSAGRLAKNDTIDAEMIAWFAETFDEIAGQPRDAAREELQALVKARKTLQDQQMRLQSQGEHDAPAAVQKAYARVLKSLASEMARFEAAIAAKVKATPEFAERAEIIESVPGLAGTTSAKLIAGMPELGQVCNKIAPALLGVAPYDDDSGRRRGERHIKGGRRWVRNAFYMPCLSAATQHNPVLKAFYQRLIAKGKKPKVALVACMRKLIVILNTMLTRRQKWDPSCYALS

SEQ ID NO: 87796 - protein, 418 aa, unidentified
MKKSETFKLKSISSDTLLATVDMGMDSFTGYARCPDRSEIKTSDYANNHGGFQAYWEILVRTMKIKGLKQIVLGFESTGPYARPLMHFFEGKRVRLVQVNPFHTKKLKELTGNSPNKTDQKDPKVIADIIELGHSLSVVIPKGAAAELRQLSEARERANKRLTALFNQLHSLVFFSFPGFLQVIKDIKTKSALHLLKHYGNPQDLLALGPDSLIQVIKQTSRGRFGPEKARALFEAATIWLSSGGGCDSVDLEIKEMVRAIENERSFVAQLESRMPQYLKQIPYSSLLLSMKGVGLITVAGIIGEVSDFTHFKTQKEILKLAGIDLYEISSGKHKGQRRISKRGRPLLRKLLFFAAMNTIRKGGTMHQTYQKHLTKGMPRIKALIAIARKLLCIMLALVRTQSVFSVNRKTGFTAAAV

SEQ ID NO: 87797 - protein, 328 aa, unidentified
MHFIGNDVSKKTLDIACFDKARKRWSKPCKVSNTKPGWDVLIGWAEKQTQAPPEAICIVMEATGVYHVKAASYLSKAGLNVIVTNPGRSAEYAKSQNRLNKSDKLDAQSLQRYGSQLQKYHWFIPDLPEISQLRALLSRLRQLGKDLQRERNRLEKCAFQEDSRWAQSSVQRQIKAITREQKLAQHQIDQLIKDNANLKRDQDLMCSIKGIGKITSQWLLPLLSAQRFNSAREVAAFLGLVPCHKSSGTSLKTRGKLSGRGNADLRARLYMPAMSAARTDPEMKIFYQGLLAKGKSKKAALTAVMRKLVHVCYGVVKHQTPYIENYAA

SEQ ID NO: 87798 - protein, 355 aa, unidentified
MNDTKFIGLDVHKTSISAAVLDQDGRLVMQSVFATPAAGILSFIHGLRGTLRVTFEEGTHSTWRYDLLQPHVAEVLVCNPRKNALLKSGNKSDQIDARKLAELLRGRMLSAVYHGQTSTLTVKELGRTYTTLTQDTTRVMGRLKALYRSQAIATEGKKLYTRRRRESWLAQLTQVGQRYRAERMLQQRDALQGLRRQARRDLMVECRKHTATAWLASVPFLGAIRAAWLLARVQTPFRFRGKRQFWAYCGLALETRSSADYHFVAGELRRSKKPVLIRGLNPNHNHDLKNIFKAAATTASTFPGPFRTFYENLLGKGMKPDMARLTLARKIAAIPLTLWKKGERFDPEQLKSQAA

SEQ ID NO: 87799 - protein, 356 aa, unidentified
MSHDVKYIGMDVHQEAIVIAVLNGSGKLVMETIVETKASSILQFLHGLRGELHVTWEEGTWAAWLYDLLQPQVQEVVVCNPRRNALLKEGSKSDKVDARKLAELLRTGMLRPVYHGENGLRTLRELGRSYQTIGKDLTRVMNRLKALYHGWGIACAGTQVYAPRYREEWLRKIAQAGVRRRAELLYQQLDGLQALRRNLRPEFLAESRKHKAAKLLRQISCIGPIRAARLIALMQTPHRFRSKRQLWTYSGLGIETHDSAQYRYVGGQVQRSKKPQQIRGLNQNHNHEMKEIFKSTATRASCGTGPFHDFYAALLAKGMKPEMARLTLARKIAAITLTLWKKEERFDAEQLKTQAA

SEQ ID NO: 87800 - protein, 371 aa, unidentified
MKENTIFVGLDVHKDSIDVALADAGRDGNVRFYGTIGGDLESLHKVVRKLQSTGSTLRFVYEAGPCGYDIYRSLTKQGLDCIVVAPSKIPRKSGDRIKNDRRDALNLARLHRSGELTAVYVPLEEDEAMRDLTRGREDAVKALRVARQVLLAFILRHGYRYSGRSYWSKAHWNWIADIKMPHRGQQIVLQEYVHAVQEQAERTQRLTQQIQELVPQWYLAPLVKALQALRGVSLIVAATTVAEIGDLTRFDSAKQIMAYLGLVPSEHSSGGTTKRGSITKTGNGHVRRVLVEAAHTYCHPARESRALLARLDGMPPEIRSIAWKAQLRLCGRFKKLMAKGKNRNTVITAIARELAAFMWAIACTFLPAQEV

SEQ ID NO: 87801 - protein, 315 aa, unidentified
MSENKVEVFVGIDVSKSTLDVRIEPPGESFHVANDDAGVKGLCARLSELAPTLIVMEATGGLEMRAAGELAARGLCLAVVNPRQVRDFAKASGQLAKTDRIDTQVLCGFARAIRPAARPLKEALTQELDDLVSRRRQLVEMRVQESLRLQGASKVQAKSLKAHIAWLDKRIKSIETDLGTRLRSCDAWRVKDDLLLSIPGVGEITSRSVLSRCPEIGRLNRRQIAKLVGIAPLNNDSGKYRGQRHVWGGRADVRSVLYMATVSAIRCNRVIKAFAERLKSAGKAPKVVIVACMRKLLTIMNAMIMSNTPWTPKTA

SEQ ID NO: 87802 - protein, 347 aa, unidentified
MTKNQSQFNTATLIGVGIDVAKDSLMFCKKYDSGDKTIFEIKNKNTEIRKIANEIKAEKFLGKIIVESTGRHHLVSAPEINKNNLDIRVINPLLANKYIKSSIRKIKTDKRDAEVLAEIAIKEERLPNKFNSDKNALKIKKKVSLIATLDKQTQKMTAVMNEFKKTSEDIGLKLSIVEKRIFKTIKLLKEQKKELKKEVKMMAIKSEYKKEIAKRYKSIPGVSDYLASLSTIFFKEEEHSKHSKQWVAFAGLDVSVRESGNWRGKGKITKRGNGYLRKRLFQAAWGAVMNNENFKKYYEHLREKGRSYVASLTIIARKIIAIMFSLSKNKCCYDDSKKLFSLNTETK

SEQ ID NO: 87803 - protein, 375 aa, unidentified
MRSFRERGRQGVRLPSWLVAGIVPGLERHPLKKLNVDPDALLRLLHRWREEAVGAGHAIERITIAYEAGRDGFWLARCLRARDIEAFVIHSTSIAVSREHKRAKTDRLDTDLLKRAFLGWLRGEPDHCHMAAIPTLNEEDARRPSRERENLVSQQTSLINRMKACLVRLGIRNFKPTLRQASERLETVRTPEGAPLPPNTLIELRRDMARLRLVRDQIKEIEAARMQRLSQAPEEGPHAMVRLLSRVVGVGVETADMLVHEILSRPLRDRRAIARYAGLTGAPDESGRRRREKGLARAGNARVRRGMIQLAWRFLQFQKDSDLVRWFHARTSDGRSGIRKTMIVALARKLIVAFWRMTTTGEVPQGVTLGCVTVS

SEQ ID NO: 87804 - protein, 373 aa, unidentified
MENSITYVAMDTHKKEHKVALHYPRHEEIVRFVIKNTARDIKRLVSKIKKQVPADVKFCYEAGICGFTLKRRIEALGCECAVIAPSLTPQKPGERIKTDRRDAAKLLAMFKAGLLTEVHAPDKKQEAGRELTRCRQAAQENLKRVRHQLETFLTRHGYIYADGIHWTQKHLFWLRSLEFEQSLLRDVFDIYFTEMQHCTQRLASLDKEVEKLSESESYKEVVGFLRCFHGIGTLTAITMITEIFDFGRFSSPGELMSYLGLTSSENSSGQKERKGPITKTGNKRVRRLLVETSWHYRHPYSVSSILRQRRKDQPQWVIDIADRAGQRLRKRYWYLVNKGKMPCKATVAIARELTGFIWSVFREYEVRNGVEAA

SEQ ID NO: 87805 - protein, 416 aa, unidentified
MNAVGIDVSSRKSTVAVLRPLGEVVCLPFDVTHDIAGLASLVEKLKAIDGETRVVMEHTGRYYEAVEKALHEAGLFVCAVNPLLIKEYGANSLRRVKTDKADAIKIARYALDNWADLRDFTPMDAIRYDLKTLNRQFQLASKQRTASANNLIALLEQSFPGIRKCFDSPVRSDGTQKWVDFAHSFWHVDCVRKQPFPAFCERYRKWCKRHAYLFKLSNAEEVYALAKRAVVLTPKSKVVKVLVQEAANQLSSISRSVEVYRAEMDRLAAMLPEYPVVMAMYGVGKSYGPQLMAEIGDVRRFERKQALVAFAGIDPMPNQSGDKNVRSNKSSKRGSPYLRKTLFNVIRTYLQCAPQDEPVFQFLNRKQAEGKPFYVYMLAAANKFLRRYYAKLRDYFASLDTLQSVDPIPTTLKASL

SEQ ID NO: 87806 - protein, 403 aa, unidentified
MWFVGLDWADAHHDICVITDVGKQIGSLRIAHSPQGFENLKEFLHSITGPNKEEVACIVETNHGLLISWLLEAGYPVYPVNPKTIDRHRRPSGAKTDKIDAYLLAKYGRSEMADLRRLEPDSAIVAELKALTRDQDGLVRSQTRLVNQLTACLKAYYPVALKLFSKVQQRCTLAFLQAYPTPQDAMAASVEQIAHVLKEAGHPTAAKVAPKIFQTLHQPQLTADAITTRTKARLMQVLVKQLLPLIEEIAHYDKVIEELFLTHADSKMFRSLPRAGKRIAPRLLAEIGDGPDRYADAASLQALAGTSPVLFESGNYSKPHRRYACSKPLRNALQQFAWQSTQTAGWARDYYQRKRKEGKSHTVAVRALANVWVRILFAMRASHSCYCSATFEEAQRKHALRAA

SEQ ID NO: 87807 - protein, 386 aa, unidentified
MSEPEHNKHTMPKPLLYIGLDVHAQSIAIAIAERDGEVRNYGSISNDLHALEKVLTKIKKAHPGIELRVCYEAGPTGFVIARRLTQLKVHCTVVAPSLIPNRSGDRIKTDRRDAVKLARLHRAGELTAVHVPDAVDEAMRDLCRARTDAVQDLRRSRSQLKAFLLRHGYRYSGKSAWTEAHRRYLRELVLPHAAHRIVLEDALRVITASEERITRLEEGMQTLLEEWSMKPVVEALMGLRGFQLIGAMVITSELGGAWRFAHPRQLMAYLGLVPTESSSGQKRCQGGISKTGNSHARWLMIEASHHYRLPPKVSKELAARQEGLSADIKKCSWQAQTRLHKRLVQLLARGKHRHKAQVAVARELTGFVWQIFRLMEPQMTAGVSKA

SEQ ID NO: 87808 - protein, 381 aa, unidentified
MLDQTAHNPVPTVYAAIELSKKSWVVAIMQPVKDQPSIYRIKGGAFSDLVMRLRTATRGGERLLVCYEAGYDGFWLARSLKTEKIDCRVLDPASLQVNRRARRVKTDRIDVLMLVRALIAVDRGDRHVCSIVRVPTIEEEDARRSHRERQRLIQERTAHINRIKGLLFGQGIRGVEPRLRRSRIDFSDLRTGEGLPLPARLRAELEREYARLDLVEAQLRVTEAERDSADAQDPSIEHKRKMLIQLRGLGPASAAILTREIFARRFANRRQLGSYLGLTPSAYDSGSTIRCQGISKAGNSFARRVMIELAWLWRKYQPDSALAKWYEQRAAGQSPRIRRIMLVALARKLIVALWRYVEIGLVPAGAMSCVMNNAALEAAAA

SEQ ID NO: 87809 - protein, 409 aa, unidentified
MQVVHSCCAGLDVHKKSVYACVIRCDSDGRKHQQIRSFSTMTQDLLALGDWLKEAGATHVAMEATGVYWRPVWAVLEGQFELLLVNPHHIKVIPGRKTDARDCEWIADLLQHGLLRGSFVPPTEIQDLRDLTRYRAELTQAQNRVANRIQKLLEQANVKLGSVASNALGLSGRRMMEAMIAGEEDPQRLADLAQRALRKKIPELRLALNGKVRDHHRFMLKEYLDEWTALGERIGRIELEIKRLIDPFERAVTLWQSIPGIDWVTASNLVAEIGVNMDQFPSAQHLASWAGLCPGNNESAGKRMSGKTREGNKWLRRTLCQASWAVTRKKDCYLSSQFRRIAARRGMKRAVMAVAHSMLVIAYTMLKTDRSYHELGGTYLEQINKDQLQRYYVKRLQRLGLTVTVQPAA

SEQ ID NO: 87810 - protein, 356 aa, unidentified
MAVYVGIDVHKKYCQAALMDESGRIQRELRFDNTLNGASGLVNLARSIDPQVKAVVEPSANYWIKIYDKLEDEGVEVKLSNPSRTKAIAEARLKTDKQDAKTLAYLLRGELVAESYVPTKKNRERRALIRHRASIMRMRVEVKNRIHALLDKHDLSYEYTDLFGKEGLEWLRSLNLPNIDQQILQSNLQILETLNTEIRNADIQIAKDAVNEEQAKLLMTMPGVDYYAAMILLSEIGDVKRFASREKIASWVGLAPQVHQSGETHWTGHITRKGSKRARWILTQCAQSARQHDPKMRAFYERIEQKHGSSKAIVAVARKMLAIMYVMLTRNEPYHGENRQLTEQKHKRLDRIANMA

SEQ ID NO: 87811 - protein, 367 aa, unidentified
MKKHSSIDQSLSSTDLSACTTLAVDLAKQVFQVAGEDVLGQVRFEQRIKSREAFYEFLQKLPPHVVVLMETGPGAQAWARQLQDQGNSARILPAGLVAKHRSGPKNDRNDALAILRAGRDEKICAVPVKSVAALAMQALHRARQGYVRRRTAVSNQMRGLLLEHGVVLAQGDVAISQKIPRVLEDATQPVPALLRELIDELLAEWRHLGERISVLTGRLEVAANADMTAKRLMTVRGIGPVTATALVAKETKPERFPNARKFAAYFGMVPDQHSSGEKIRLGDMTKRGDAYLRSLMIQGAHAVLQQLRPDSQQPDDRRLLHWMSRLGRKEAAIRLANRNLRIVWVLLQNDQTYRRHAGDGQQATMSH

SEQ ID NO: 87812 - protein, 365 aa, unidentified
MKKISTAAAPKIEKVEGQKLTIGLDLGDRSSWYCVLDEGGEVLLERKLATTPKAMKEVFGGMPRSRIALETGMHSPWVSRLLSELEHEVIVAHARNVRLIGESRRKDDRFDARTLARLARIDPDLLGPVQHRSRKAQVDLTVIRARAGLVRARTSLINTARGLTKSYGERLRRCSPRKVSRELAEGLSPELQGALQPLLEEIESLSERIGEYNERLQQIAQESYPEVARLEQVKGVGTLIALTYVLTLEDPRRFRKSRDVGCYLGLRPGRRNSGQSEPQLHISKEGDPYLRTMMVQSAHHILGPFGADSDLRRWGLKLAERGGKNAKKRAVVAVARKLSILLHRLWVSGEAYEPLRNQRVLTAAA

SEQ ID NO: 87813 - protein, 467 aa, unidentified
MAAKTKKQEQQRPTTQSLPIMEPNAAGIDIGATEHWVAVAPDRDEQPVRKFGTFTSDLYAIADWLALCQVQVVAMESTGVYWIPLFEVLVERGFCVDLVDARHTKNVSGRKADISDCEWIRQLRSYGLLRGAFIPSADIGVIRSYVRHRQMLIQYAAIHVQHMQKALTLMNVQLHHVISDITGVTGMRILNAILHGERDPQRLAEMKDVHIKNDTDTIARALQGHYRQEHLLALKHSYDLYQTYQSKVADCDQQIEQYLNTLQSKADPDTLPKSERKRKRKPQRNEPHYDCRREMYRLTGVDLTRIDGIDASAAQIIVSEIGRDMSPWKTEKQFSAWTTLAPNHQISGGKILRRRPKRSANRFALVLRLCAQSLLHSQSALGAYCRRICGRIGTPKGLTATAHKLARLVYRMLKYGDRYVDIGQEQYEKKYKERLLLNLRKKASEFGLVLVERPALDLNSPAPQGVS

SEQ ID NO: 87814 - protein, 402 aa, unidentified
MNCVGIDVSKGKSMIAVMRPFGEVVVSPFEVRHTANELSELAGLLKSLDGETRVVMESTGNYHAPVAWLLHDAGLYVSVVNAMLVHDYGNNSLRRAKTDKKDAVKLANYGLDHWLTLPRYIPEEDTRLMLKICYRQYQQYSKVQTMLKNNLISLLDTTFPDANRLFTSPPRADGSEKWVDFVAAFWHCECVCGLSEKAFTAKYQKWCRKHGYNFSQDKALDIYASACGRFGVMPKTNTAKLLVEQAVSQLQTTSAALAALKQEMQSLAASLPEYPVVMGMFGVGPTLGPQLLAEIGDVRRFHSKKALVAFAGIDAPPYQSGQIDVRSRSISKRGSASLRRTLFLVMSVILQCAPIDEPVYQFMDKKRSEGKPYRVYMMASANKFLRIYYASVKAYLESLEHD

SEQ ID NO: 87815 - protein, 433 aa, unidentified
MPTNHPYDLVIGLDRSDRKADLHLIDTRTGTVQKQTVATSPEALHDWLAQLRQNHPQARVAIGLEQPAANLIVFLETYSWITLYPINPISLQKFRETFVTSRAKDDGKDAQYLAELLLSHHDKLKPWQPDDSQTRQLQQLVLHRRAVVDQRTGLTNRLKALLKQYFPQALDLCGEDLWRPLATAFLLKWPTLQSLKKARKESLKQFYYLQGSRSQTLIEQRLERIDKAVPLSDELALLQSYTLRVQLLCKELQLLLKTLEQFDQQIGKVFQQHTDRPIFEAFPGAGPVLAPRLLASMGSERERFARPDNLQCLSGVAPVTKQSGGKCYIHRRYCCPKFLRQSFHQYAKESILHSRWAAAYYGQQRNKGCGHHTAVRALAYKWQRIIWKCWQTRTVYKEAIYEAALKKNKSPLVGLLDQIELGKSPVKTRAKKS

SEQ ID NO: 87816 - protein, 344 aa, unidentified
MNNMHYVGLDVHKKTIAFCIKLIDGKIVEQGTVSTNKNELAAWAKTLPNSCIIAMEATMFTGWIYDFLQPYALEIKVAHPEMLKAIAAGKKKNDKLDAKRIADLLRCDLLPECYMAPTEIRELRRILRYRNLIMRQAIQMKNKISGLLMELGAEYDKKRLHGQKYFYELLENLHDVPQSVINLLKLSRSNLEMFKDSQKKLLLFLQNNPIIQHRVELLKTIPGIGEVTALTWILEIGDPHRFAKNRQAISYCGLCSAQKESAGKSSRGPISKKRNKHLQHVIIEAAKLAPIWNEQLALVRTKEIERGSDFNTATLEVARKLVSYMLSVDKSGCPFEYRGLKKAA

SEQ ID NO: 87817 - protein, 369 aa, unidentified
MADYREAFVAFDVAKIKHAVAVADSGRAGEVRFLGEIENRPVTIERTIRKLAKRYDRLHVCFEAGPTGYGLYRQVGDLGHDCMVVAPALIPKRSGERIKTNRRDAVTLARLHRAGELSAMWVPDIVHEAVRDLVRARQAGAEDLRRKRQQLLSFLLRHGRIYDAGGHWTLAHRRWLARQAFEHQAAQIVFQETSDAIEDAAQRLHRLDEQLAAIVETWSMKPVVEAYQAMRGASFLVAVIFAAEIGDVRRFETPPQLMAFLGLVPGERSTGDTVRRSGLTLAGNRRARRALVEAAWTYRYPARVSEPLRARLEGLPKAVRDIAWKAQVRLCARYRRLAAAGKKPPVIAAAIAREMAAFLWAIGREVAPS

SEQ ID NO: 87818 - protein, 348 aa, unidentified
MSKSNQYVGLDVSLKETSIAVIDEADKIVWRGRVDSTPEAIAAALKKHAPRAVRIGLEAGQLASWLYHGLKAKDLPVTCIDARHAKAALSLKVNKTDANDALGLAQIMRVGWYREVAVKGHDCQALRALLIARAQIVSQVTTLKNCVRGILKVFGRVLPKKLRSAFIVSVREVIAGDTALEPILEPMLRALAATMEQLQVYDRAANRHARSDETVRHLMTAPGVGTIVAMGYITCVETPARFASSSSVGAYLGMTPRRYQSGEVDKAGRVSKCGDGMVRGLLFEAAKVLLSRSAKPSDLQAWGRALAKRIGGKKATMAVARKLAVILHRMWTTGEAFRWTVSPAPAAR

SEQ ID NO: 87819 - protein, 367 aa, unidentified
MKKVSTAATEQNRNFSQQRLTIGLDLGDRNSWYCVVDEAGQIQLEQRVGTTAKGLREVFGAMPRSRIALEIGTHSPWISRLLSGLGHEVIVANARKVRLIGESRKKDDRLDAQTLARLARIDPELLYPVKHRSAQAQSDLMMIRARAGLVRVRTGLVNTARGLSKSYGERLRGCNVRNMNPEKTEGLSPELQAALEPLLAAIESVSQRIAEYNQRIENLAQQSYPQVGLLKQVKGVGTLIGLTFLLTLEDPRRFRKSRDVGGYLGLQPGRRNSGRSEPQMHISKEGDPYLRTLLVQGAQHILGPFGPDCDLRRWGLKLAERGGRNGKKRAIVATARKLAVLLHHLWVSGEVYEPLHNSCRVAVTAAA

SEQ ID NO: 87820 - protein, 522 aa, unidentified
MAFKRSRHSSKSGAAEFLQQPNGVVHARVQKVGPEHFGIISVDCAKARSKWMLADFYGNILIPPTEVAHNRVELAAAVKQVRTGLAKHDLRDCLVAVERTGRYHHPVKNAFRKADFETRVVHPFTTKQFRQPADPDNKTDDTDLKAIHRAAVNGFALLEAAPVESWRQLQLFIRHRRDLVRKSSALACQIREHLDAALPGYAACFDKLWESNVAFRLVQQFGSAQGMLEAGQTALGEFLYQQKVRFQQRTLVTVLTWAKSAAAPDVAADLHRQIALAYHDDHARKSLEIIRLEREIAHRLAQTPYILLLSCPGINVVSAADFAGEMGPIENYANSRSITGRAGLFPARHQSDRVDYTGHLARRSNRALRAAILGIADNLILCNAHFHNLANLWKLAGKDPRMTHVKVAARFCRIAFQMVAGRQVFRHPCLRQRGYILDKLLAFHVEQQTPMQETMRDLHYAITHIPKSEHAAEAKPLHERMQTTRERGKKGPQPIRELIAIVLARLGVGVINSNPSGEEDLT

SEQ ID NO: 87821 - protein, 362 aa, unidentified
MHNHRTLVGLDVHARATIAAGLELESGELWFRRVGGPPRSVVDYLEQLPGPVLATYEAGPTGYGLARAAAAHRIEVRVCAPGSIPRKPGERVKTDRRDAERLVRSLLAGELSFVRVPSVEEEQFRDLARCREAARADLMRSRHRLSKFLLRREVEFPGPGASWSDPHHKWLRALEFADHPSRSVFNDYLAAVVSLEQRRAGLDAQIQIAAPTSPWAQTIANLRCLRGINTVTAYGVCCEVGDFRRFEHPATLTAYLGIVPSEHSSGETSKRGPITKAGSPHARRLLVEAAQHYRHKPAIYKTLAARQRGQDPRACEIGWRCQQRLHRQWQRLRVQRGKPGNVVVIALARELATFVWEVGQLH

SEQ ID NO: 87822 - protein, 423 aa, unidentified
MVMRKADTRKVKVVKDNTLIVAIDVGMEMNHGYCTTPDGRDIKPFKFDNTREGMDKLWGMVMTSNNRFQCKEIIVGYESTGPYGEPLVHYLMKKQVMLVQVNPMHTKRVKEISDNSPLKTDDKDPRVIADIIKLGRTLSIVVPEGDAAYLRRLNNSRERHVKERTALVNQLQQLVFLLFPEFKKVLKNIKCRTPLYLLNKYPTPEAISVLGKDALGEEIRKKSRGKFREQHADMLINLAKNTVGIREGVAGISMDIRHILVQLEMLKSLITEIENEMEIALGRIPYSSKLLSIKGLGIVSVAGIIGEIGDFNKFQTQGEIMKLAGLDLYEISSGKMKGRRRISKRGRSLLRKILYYAAIQTIRKNGILHDYYTRLTDRGMKRIMAIVAVSRKLLGIIYAIVRDDSEYIINFGSIKRQVIKKAA

SEQ ID NO: 87823 - protein, 349 aa, unidentified
MKYYTSTTEYNCGIDLHSRQMYVCVMDQKGKKLVHTNIKNNDFAFFLKLIAPYRHDLTVCCECMFGWYWLADACQEANLTFVLAHALYLRMIHGGKNKNDRVDSEKLAHLLRSNLITPSYVYPAERRPLRALLRQRVYYVWSRAELLARINSHQLAQNRVPPKQGRSNRDPWLDNLLDAEDNALRKAALQNDMAMIAHFDQQIAKVEWELKRETKKVASRDYILLTSVPGIGNCLALTILHEIGEISRFPSVKDFLSYCRLVKGTVASAGKIKGLRGAKLGNPYLRWAFGQAAMLAKRNYTELETLTQRLQAKNGGNKFKANTVLAIKLARAVYFMLKNKTPFDPERMT

SEQ ID NO: 87824 - protein, 410 aa, unidentified
MELLHRRCCGLDVHKETVVACLRLVVDGKVTTEVRTFQTITSDLLRLSEWLAANECTHIAMEATGVYWKPVWHILDDGEFALVLVNAAHVKNVPGRKTDVNDAMWLAELLAHGLIRASFVPDTQTQEMRNLLRTRKQLVREQSSHVLRVQKTLEDANIKMDSVLSDLMGKSGRAMLEALIAGETNPTKLASLADRRVKASPQEFREALRGRVTKHHRFLLRLHLNQIDALDAAMATVDAQVEANLGPFRTAVELLMSIPGIKSLGAHVIVSEIGIDMSRFPSAAHLISWAGICPRNDESAGKRRSNRLRKGAPWLKTTLVQCSWAAIKKKDSYLQAQFYRIKARRSSKKAIMAVAASILTAIYQMLKDGTMYKDLGRNHFDRRSTDQQKKRLVKRLADLGYAVEIKPLAA

SEQ ID NO: 87825 - protein, 366 aa, unidentified
MKKVSTVAAKPSKKISQQKLTVGLDLGDRNSWYCVLDESGRIQLEQRVRTNAKALREVFGEMPRCRIALEIGTHSPWISRLLSELGHAVIVANARKVRLIGESRKKDDRLDAQTLARLARIDPELLYPVKHRSAQAQADLMMIRARAGLVRARTGLVNTARGLAKSYGERLRGCNVRNMNPEKAESLSPELQAALEPLLNAIESLSERIVEYNERIEQMAQQSYPQVALLKQIKGVGTLIALTFLLTLEDPHRFRKSRDVGCYLGLQPGRRKSGQSEPQMHISKEGDPYLRTLLVQGAQHILGPFGMDCDLRRWGLKLAERGGRNGKKRAIVATARKLAVLLHHLWVSGEVYEPLHNRSRLTVAAA

SEQ ID NO: 87826 - protein, 376 aa, unidentified
MQATQERGYEVNTVLYMAMELSNSKWKLGFGNGAKLRRKSIDARDRQRCLEEVSLAKSKLKLPADAKVVCCFEAGRDGHWICRWLESEGFEVLEIDSSSIETARGRKHVKTDRIDVEKLLDLLIRHHCFGLRRAFRVVRVPSVAAEAGQRLHREDEYLLKQRTRISNRIKGLLVAQGVAEVSLKGDFTGYLNRIRLWNGEALTAELKTELVRMHAQYAVFDSQLKALASAYAQELHSDTPLAEHRRRLERLKSMGPKTSRILSAEMLAWRTFANSKVVGAFAGLTPTPSQSGDTETEQGISKAGNRRVRRVMIELAWLWLRWQPDSALSQWFNRRFAHGGKRMRRIGIVALARKLLIALWRYTEHGVLPEGAILKA

SEQ ID NO: 87827 - protein, 345 aa, unidentified
MNKLVSTFPSTVFCGIDVSASSLAVAVIEPDRAVSQREFANSASGHKALLVWLSKHDAKVRISLEATGIYSLDLALALDAAAYIELAVLNPKLVNRFAQTLCRSKTDKADALVLAEYSQRMPFTAWQRPGVNQLRLRTLGRHIASLVLEQANLKNRLHNAESTATVPRAVRLDLKQAQAALQRRLAKMRREAMKLVEAEDQLRQRFALLASIPGIAEISALHILSELVLLAPAMTVRQWVAYSGLDPVHHVSGTSVHKPSHISRAGNRHLRRALYMPTLSAVRYDPHMRVFYQALRKRHKTGLQALMAVERKLLHAIYGIFKSGHPYDGKLLFPNIRLEVESIAG

SEQ ID NO: 87828 - protein, 341 aa, unidentified
MDQCVGLDVSVRTTSVCVMDVTGRIIKEGKVASEPDAIGGFLRSIGGDFKRVGLEAGPLSQWLYSGLAAAGFPAICVETRHMKAALSAQINKTDRNDARGIAQMMRVGLYKPVHVKTIRSQEIRMLLTARKFTQTKLIDTENNLRGLLRNFGLKVGIISRAKFELRILELLEQSPHLRLIVEPLLEIRRVLKQQYQRLHKAMEQMAEADEVCRLLMTAPGVGSLVALSYRAGVDEPARFARSRSVAAHFGLTPARYQSGEIDKDKGISRWGDATIRWALVEAAGSLLRANTKWNPLKAWGMQVAKRRGLHKARVAVARRLAVILHRIWVDGTPFRWTAKTA

SEQ ID NO: 87829 - protein, 320 aa, unidentified
MSDRFAVGIDAESRTLVVAYYGTKGSARIANSASAITKWLSALPARSRIGVEATNRYHELVVQAAQKAGHAVFVLNPRDIKHYAKGVACRGKTDAGDAQVIARYIAKEADNLHEHVARSPAQERLHVLLQQRDSLVRNKATLHLSLGTDAADSAIFGRIFSGLKEAIAMLDREIQRLCRSGEQSDLYRRIMTIPGIGPTVAAFVTHHITRWPLASSDAWVACTGLDPRPNESGARIGRRRLSKRGNAGLRQILYMAAMGLTRSKGGKPLYLAIRERGHSSTASFNILARKLARIAWGVFKSGRDFDPAMLKVGQACFQQA

SEQ ID NO: 87830 - protein, 342 aa, unidentified
MSEVSTIGFDLAKRVFQVHGVDVDGAVTIRRQLRRSEVVTFFAKLSPCVVGMEACASAHYWARTLAKLGHEVRLIPPARVKPYVKRGRKNDAADAAAIAEAVTRPHMEFVPVKSEEAQAVLMLHRTRRLLVTQRTMLGNALRSHFAEYGIIEPEGQGGLARLVVCALDAPDAALPQAAREAMAMLAAHVRETDAKIDALDHEILRWHRNDADSQRVASIPGIGPLIASAIVAAMGDPKRFKTGRDFAAWLGLVPSQNSTGGKTVLGPITKAGDRYLRSLLVVGATGTLWRRRKEPGTWLAGMMARGKTARQISVALANKMARTAWAILAKGGLYHEPAAQAA

SEQ ID NO: 87831 - protein, 343 aa, unidentified
MHSTTIAVDLAKSVFEVAVSRRPGKVGERHRLSRGQFSRFLAEQAPATVVMEACGTAHFWGREAGARGHRVVLLPPHAVRPYVLRNKTDGADAKGLLEALRNDEVRPVPVKSVDQHVRAGLHRLRSAWMATRTARLNTLRGLLRELGFTIPVGARQVLPHVGALVSDVDSGLPGALRPILAEAAREIRELEVRVREVERSLETMARGSEVLVRLRTIPGVGLLTATALVAFVGDVQRFPSGRHFASYLGLTPRESSSGLRRRLGAISKRVDPYLRMLLIHGARSVLLHAKKKTAQRDRLRTWALDRERARGHNKGAVALANKLARIVWAVWRNGRAFGITAPE

SEQ ID NO: 87832 - protein, 295 aa, unidentified
MIVIGADTHKRSHTLAAVDEATGRALGDMTVAATARSFGELLRWARGVGGERVWALEDCRHVSGSLERFLLKRGERVVRVPPKLMAGARESNREPGKSDRIDAVAVARAAIREGLQTLPVAQLAGVELDIRLLVDHRDRLVKQRTALINDLRWQLHDLWPELEIPLRALTGQRWQQRLARRLARAEQSARVRVAQDELNRVRELTRAITDLEGELASLVVAFAPRLAADPGCGTLIAAKLIGEIAGIARFASDAKLARLSGAAPIPASGCTGCSSGWTSSTSSDGISFRNLDGGL

SEQ ID NO: 87833 - protein, 406 aa, unidentified
MFYGGIDVAKHRHEVCIMEQDGNVILQIFVDNTKDGLDKIIHNLKRLEIEVGNVEFCLEATGHYWLGLYCHLAELGYKVHVINPIQSDALRNFYLRKTKTDRKDAQLLADIVRFGHVSATKLASETVLKLQSLSRLRFEFVRQVGGLKNRVLAILDRIFPEYPQCFSNVFISTSRELLKSFSAPEDLAEADLSELTVFLNKHSRGRLGPERARQIQTLAKGSFGINLALDAFTLELRLLVEQIEFIEEQISVIEDAIDKVMEELRPNKDTAYRHVLETIPGIGPVLAASIIGEIGDINRFLNAKALVAYAGLDATVRASGQFEGTRNRISKRGSPVLRHSIWLAAVAARRFNPEMKQFFEKKRSEGKHTQVATGAVARRLVHLIYSLWKNNRPFDPDYQWSPVISA

SEQ ID NO: 87834 - protein, 331 aa, unidentified
MFPVGIDVSKNTLDLCILYDGIKGRIKTRNIQNNRHSVENILRWLRLQHCGPEDVHVVMEATGVYHERLATELHDAGFRVSLANPHRSREFARGMGIMTKTDKVDAYMLACYAFLKKPHYWEPPAPEIRYLGALLRRRDVLLGDALREEKRLEKYLSTDTPADIISSCRRMAQLLREEVSNIERQIKAHIKASPALRRDYTLLNSIKSVGPQLGMHMLVVLRSHNFVSAEQAAAFLGVVPIEKRSGTSVRSRPRMSKIGPPQLRAKLYMSALCGKIYNKRMRNIYDEMCLRGKPKMVAIGALMRKLVHWCYGVLKTGTVFNDEGLKQVLST

SEQ ID NO: 87835 - protein, 334 aa, unidentified
MKELKSCVGIDISKDSFEVCIRQLKDDRSVIKATRSFQNDYPGFEKFLSWTLSKVSNPIFVMETTGVYHEDLTHFLYESDQKVSVVLANKMKHFAKSLNMKTKTDKADAQMIAQYGLERPLEWWKPMMPQMKDLRDLCRERLSLKKDLVRSKCQVHGLRHAHSTLDVVLKLKEQQIEFLEKNIQIIETEIIRITEQDKEFNQRVKNIEAVKGLRLLTIVTVLCETNGFTQFNNIRQVVSYAGLDIAERQSGLFKGKTRISKKGNARIRECLYMPALSATSYNEPIKALYERVVERNPTIKRKGVIAGMRKLLILIFVLWKKNEAYNPGFQWAAH

SEQ ID NO: 87836 - protein, 467 aa, unidentified
MKTKAKKRKTKSRKKRSAIKNLNSLSAININAAGIDIGSEEHWVAVPQDRDENPVRLFGCFTSDLHAMAKWLKKCGIDTVAMESTGVYWVPLFQILETQGFDVKLVNARHVKNVPGRKTDVQDCQWIQQLHTYGLLSGSFRPDDSICILRSYWRHRDNLIRYAAAHIQHMQKALTEMNLQLHRVISDITGVTGMRIIRAILNGERNVVKLAQMKDPRIKKSTETIAKALEGDYRREHLFALEQAVELYYFYHQKIEACDQQIEDYLKQLNSKVDPGVDLKPVKRTKQISKNEPSFDLATHQYHLTGVDFTKIDALNVTTVQTVLSEAGLNPQSFGVSKRFTSWLGLCPENRVTGGKIKSARTRKVVNRAAKAFRIAANSLKNSPSALGGYYRRMRALHGPAKAITATAHKLARIFFHLWVNGGNYHDLGADYYEQKYKNRIVKNMKKRAKQLGFEISLHPISNPGVS

SEQ ID NO: 87837 - protein, 403 aa, unidentified
MTMYKTCGLDVHKDTIFCGVFDGKHHQAVKEFSTLTSSITSLGEYLKSEAIEDVAMESTGIYWIPIWNILEAMGFNLTLVNPYLIKQMPGRKSDVKDAQWIAALLHKGLVRGSLIPCKEIRELRTYSRKYIRLQQRLTSILQEMERNLEMCGIRITSFVSNISGKSVMKVIHALVEGENDPEVLAGYIHGRIVNRHKRETIVESLRGHTTPQHLFQLELSLEEYELLCGQRDRCEEEMSRLCHLHYPKELALLQTIPGISLLSAMIVIAETGADMKAFENSGKFAGWTGLRPRNDESAGKFKSTATTKGNRYLRAILVQVAWAASRTKGSFFKEKFSKLCLRKNRKKALIAIARKMAVLIWNVLYYKEEYNPQKLIVYEPGKVQAKMDYHQKEFKRLENLLKN

SEQ ID NO: 87838 - protein, 366 aa, unidentified
MPSGLLKTFPPDMEFTMIARRDAACFVGIDLHKDTLTACTITAKAREVSYRKIACVAREQVREFLADLPRPSVVAIESVGFYRWLWAEAEPIVDQVVLADARGCRALAGRRIKTDREDVLNVAELLMTGRLPTAWAPPSHIQRVRDLTRHRNGLSRDHAKTLHRVKSIMNRLNRPGPARMDAAGLQRYLLASVERIEADDLTMLWQHQRRLVEVEQDRSAIERRIIDVMRADEFRRLREILESIPGVGLITAATAIGEIGDFSRFPDAKAIGRYAGLTPTGYSSADKHRLGRICKTGSPDLRWALQQAAWTAIRCAPAFTKVACKISKGEKKKKAAAVAVARKLLVLMWALVRKDELYKAREPIAA

SEQ ID NO: 87839 - protein, 385 aa, unidentified
MVSVLHTFGSDMKYHLHVHSLITFGGVDEFGVYAEDLTAMAQWLKDKHITSVAMESTGMYWQNLFIELVNTDIKVILTAGKFTKNINRKITDVMDCQWIQKMHALGLLPSSFLPDETTESLRTLCRHRDNIVAHEVNCTHKVSKFLKWLNFRLDVVVRDITGLTGRTIIADICNGNLNPQSLAKHRHGNSRKSEEEIAKALVSNDNPEFLLGLKQEFSRINFVLKLIEECDAEIVKLLTVIINSDVNPIDDMPSKKPDKRVNKNTIKGIDLNITAYQYFGGVDLLTIPGVSFSTVLTFMSEIGRDGIKKFDTAKRFASWLRLAPNNRISGGKNLSRHIPKGSNRLKIALRNAANAVGNLKESDLERFFKKIAYRKGRQAAITATA

SEQ ID NO: 87840 - protein, 367 aa, unidentified
MKKISTATAHAIRKVESQRLTIGLDLGDRSSWYCVLDETGEVLLEQKLSTIPKTMREVFGEMPRSRIALETGMHSPWVSRLLSELGHEVIVAHARKVRLIGESRRKDDRLDARTLARLARIDPQLLAPVKHRSAKAQADLTVIRARAGLVRARTSLINTARGLTKSYGERLRGCNSRNMKPEKASGLSPELQAVLEPLLAGIESLSEQIREYNEQIEHLAQESYPQVALLKQVKGVGTLIALTYLLTLEDAHRFRKSRDVGCYLGLQPGRRNSGQSEPQLHISKEGDPYLRTLLVQGAHHILGPFGADSDLRRWGLKLAGRGGKNGKKRAIVATARKLAVLLHRLWVSGEVYEPLRNSSQAMLPAAA

SEQ ID NO: 87841 - protein, 309 aa, unidentified
MSAYAGIDVSKATLQVALFPKADDLCVPNTEEGLASIAEYLSAHQVERVLVEATGGYERLSVKLLANAGFKVQRINPVRSRQFALAMGKRAKTDPIDAQMLAMFASSLEEKGFAKPDEEREVLLELVNLRGNLLQQRDDNRRRIKQAVLPCVVEIYLALEASLKVQIKSVDQLVTAQTRRVDSELLQRLEAVKGVGPVTIASLFCYLPELGDLGRGQIAALAGVAPYNNDSGTKTGKRQIYGGRSKLRRAAYMCALVMVRHNPDFKERYARLRAKGKCAKVALVACMRVLLIRLNAMARDGTPWRDHTV

SEQ ID NO: 87842 - protein, 341 aa, unidentified
MDIVVLGIDLGKNSCSLAGLDASGRVIMRRRMRRSSVESFVNGLGRCIVAMEACCGAHHLGRVFAAQGHETRLMSPEYVRPYVKAQKNDELDAEAIAEAATRPTMRFVAVKSQSQSDIQSLHRARERLVSERTALINHLRALLLERGIVAPQGRRKLQEELLVFADEDGIEALSPRIRLLIEDLRSEWRALDERIAAFDAEFVRMAREDEAVRRLTTIPGIGTINATALAAAVGNAQAFRRGRDMAAWLGLTPRQMTTGGKSRLLGISKRGNRYLRKNLIHGARAVLPYLVQCETPLGGWARGLLARAHKNIVVVALANKLARIAWAVLARGRTYEAASAA

SEQ ID NO: 87843 - protein, 337 aa, unidentified
MRYIGVDLHKTQFSVCWMEEDGSNKFERYPMNVEGLRRFREKLDGECEVGVEATGNSKYFYDQIVGTVKKVRVINPLQFKIISESVKKNDREDSRVIAEFLSKGLLPEVRVMDKGRREIKSLIQTRDKLVKLRSSLKNKIHGILLEHGIQSKREMFSSQKGLKKVLDMPVSETSRFELEVIVKQINSLNEGIKELEGKIKDKGKKLKGQKNLQSITGIGELSSTIILSTIGDIGDFENKKKLAAYAGLVPRVHESNGKFKNGRITKRGDKIFRTTLVQVTLIAIRYNRYLRGFYERLKVKKGSGKAIIATTRKMLDIIYDTLKNDWEFKDFNNFVLV

SEQ ID NO: 87844 - protein, 351 aa, unidentified
MKSMAKQVQGEELFVGIDLHKHRWHVTIRAADIEIFSSSIAGRWQELKKVLNRYKGCRIHAVYEAGFLGFWLFDHLTSYGVDCIVTPPSLIPQEHGNRVKTDRLDSRKLARLLAKGLLKNIWVPSAEERFHRQVIRRRRQLVGDRVRTQNRIKSELYFYGIDLPASHGQWSQVYFTNLQRIKFNNRWMQQSFNQLLEQYEFLSAQIDKQTQLLKQLAQLPLYRDRVKILRSIPGIGLLTAMEILLELQDISRFRRAEQLAAYVGLTPSQYSSADKIRMGRITGAGKNTVRSALVESCWQLIRKDKAMRKRYEQIKARAGGKRAIVAVSRKLLLCIRRLLLDHRPYEYEPVG

SEQ ID NO: 87845 - protein, 350 aa, unidentified
MLIIGCDFHSRFQQIAMMSEQTGEVIERRLEHETGEARAFYGALPTPVRVGMEATGYAHWFERMLAQQGHELWIGDAAEIRARMVRKQKTDKRDAMHLLMLLLENRFPRIWSPSPAERDLRQLLRHRFKLVCLRTSVRNQLHALAMGEGLCRKKKLWVPVGRKQLEALALDRWADRRRRELLDLLDRLNPPIEELNQAVEQEAEKCSRAVHLMQQTGIGPVTALAFVLTLGPVERFQRSKQIVSYLGLNPSEDSSGGRQRLGAISKQGNSMMRHLLGEAAQTASRFDPELRRMYLRLKFRRGSAVAKVAIARKLAVRLYWKLREHSSSVPLARMQGSSKIPLVGANPSQL

SEQ ID NO: 87846 - protein, 345 aa, unidentified
MEVTTIGLDIAKNVFQVHGVDDGGGVVIRRQLRRSRVMPFFEKLPPCLVGIEACATAHHWAREIAALGHEVKLMPAKYVKAYVKRNKNDAADAEAICEAVGRPTMRFVPIKTPEQQALLMLHRTRKLLVRQRIRLVNAMRAHLAEFGIVAGVGRNGVDRLIKLVEAGDARIPAPARDCLLVLRDQLALARQQISAADRRILAHHRESELSRRLEEIPGVGPLIATALVASVPDPHAFKSARDLPAWIGLVPKQSSTGGKERLGHISKAGNRYLRSLLMIGAFSLIKRAKLGKGKHRPWLIDLMARRPIKVAAIALANKIARIAWALMTRGTRYREPQVEPMPHAA

SEQ ID NO: 87847 - protein, 412 aa, unidentified
MNVIHPSCCGLDVHKKTVVACLIVSAAKGEQRKEFRTFRTMKADLLALVEWLKTAKCTHVAMESTGVYWKPIFNVLEGQMEVLVVNAQHLKAVPGRKTDMRDAEWIADLLQYGLLRPSFIPSAFEREIRELTRYRTRLIQTRSRSINRLHKTLEDTNIKLTSVATDIMGQSAQAILKALLDGQTDPQVLAELAKGKMRAKRELLAQALTGTLEAHHRFLIAEHLTLIESLDERIEQADREVAERLKPYEESITRLDTIPGVNRRSAEVFLAEIGTDIHRFPSAEHLASWTGICPGNNESAGKHFSGKMRKGNRWLRSALVEAANAAARTKNTYLSAQYYRLVGRRGKPKALVALGHTLLVIVYYLLLREEEYQELGGNYFDERDRQAVEKRLVRRLENLGYQVALQPVSSAS

SEQ ID NO: 87848 - protein, 409 aa, unidentified
MLKIVYPNCCGIDVHKTFIVAVIAITNNQGITEYHRKRFSTFTNGLIQLRDWLEYYSCFDVCMESTGKYWIPVFNILEEHTNVCLAHPKYVKAIRGKKTDKKDAQWIADLFKHDLVASSFIPPLKIRQLRDLFRYRMKLTQLQVSEKNRYQNCLTWSNLQIASVVSDVFGKSAQAIIKSILDNPEDKPTIEQLVHKRMKNKIQDLEIAIEGALTPEQAEKIRVIKAHYDALAICKEDLEQMIRELGQDYQHQVKLIQTIPGFKEDLSALRIISEIGCDMTVFDSAAKLCSWAGLVPANNESAGKKFSTRISKGGKYLKPFLVQIANAVVKSDKHPELRNKYLKLKKRRGHRKAIIAICRRLLVSVYQVLRKQEDYNPVLQGLTEIRNPDKTMSVQDAVRFAQQHGFNVA

SEQ ID NO: 87849 - protein, 419 aa, unidentified
MTSDFEWYAGIDWASEQHRVCLLDGGGGPAGEREFAHSGDGLAELCAWLIAMSGCEPHKIAVAIETPHGPVVEMLIDHGFAVHSINPKQLDRFRDRFTVAGAKDDSRDAQVLGHSLKTDAHAFRRLVVDDPMIIELREWSRLGDDLKQERNRLANRLRQQLWRYYPQMLELGGDDIAADWLLALWDEAPTPAKAAEISTQVIAPLLKAHRIRRFEAADVLRILRQKPLTVTPGTIAAASAHIRILAERLRLVNRQVKETNRKLDRLCRKLGQAPESEAGNRPEQRDVAILRSLPGVGRINLAALLTEASEPLKRRDYHALRLMSGVAPVTRRSGKACLVIRRLACNARLARAVYHWARVASQCDPISQKRYAALRQRGHSHGRALRTLGDRLLGLACTLLRRQVLFDPDYHCKEVAAAA

SEQ ID NO: 87850 - protein, 328 aa, unidentified
MKFEHIIGIDVSKATVDFCILGEVQSDGTLENRPKKLQLFFKSLKLDPRKTLVCLEHTGVYNIHLVEVLCKLGFHVWLESALRIKRSIGMVRGKSDKIDAGRIAKYAFLHQEQANLWIPSREIIKSLKSLLSQRARLIKAKLILITPIEELAGLGLKKNLATLKRSFRSSLAALKNDIKALTSAIHKVILSDEKLKELFSYITSVPNIGPITAAKILVSTDEFKKIVDAKKYACHVGVAPFEHTSGTSLKGKSRVSHLADKEMKTMLHLASLSSISRSGEFKDYFDRRVKEGKNKMLVINAIRNKLIHRIFACVKEKRNYVKKGLQVA

SEQ ID NO: 87851 - protein, 373 aa, unidentified
MEERSKIHVGLDVHKDSISVGAAEPGRAPGRLICKVPHDVNRLLRALAKLGTAEQLHIVYEAGPTGFGLQRALKARGFVCEIIAPSQIPHRPGDRVKTDGRDSIQLAECSRAGQLSAVWIPDLQDESIRDLSRAREDAINSRTRARQQLTGFLLRHDVRYKGKTAWCAAHHRWLATLNFGAGAAQTAFTEYWLAIKSADERVERLTTALQTSITGWRFESVVGALQVLRGIAAVTAIGLVAEIGDFSRFAHPRKLMGYLGLTPSEHSSGGRLSRGSITKTGNSHVRRLLTEASWHYRFKARIGKSALIRQQDLSESIREMGWKAQLRLTQRFASLHERSLQANKACIAVARELAGFVWAIGMQALREKAEATT

SEQ ID NO: 87852 - protein, 339 aa, unidentified
MNITTVGLDLAKNVFHVVCLNEHNKEVKKRMLRRNQVRQFFAQLPACTVAMEACATSHYWGRELIALGHNVKLIPPQHVKPMVLGNKNDYNDACAIAETVNRPKITFVAVKTTEEHDMQAIHRMRSQCLRDRTALSNSTRGLLGEYGISFSKGLAVLRRKIPELLEDADNGLSLRFRNLLARRYEQLVEIDEHIAFYTKELELLSKQDDACQRLQTIPGFGPIVASAFRSTIGDGRAYVRGRHAAASLGLVPRQYSTGGKNVLLGISKRGDKYLRKLLVHGARTVVLHAANRDDPLSLWINRIHERRGYNKAAVAMANKMARMGWAVLMYNTSYEPTLV

SEQ ID NO: 87853 - protein, 366 aa, unidentified
MKKNSTVAMGRKQIFKQAKLTIGLDLGDRTSHYCILDEAGNVILESNLPTTLNGIRQAFGRIPRCRIALETGTHSPWVSRQLAQMGHEVIVAHARNVRLIGESSRKDDRLDARTLARLARIDPGLLSPVRHRSAQAQIHLTVIRARAALVGTRTALVNAARGLTKSYGQRLKKCGTEQMNRDSSQGLSQELREALDPLLREIESLNERIAEYDRRIEQIAKEVHPEVARLKQVKGVGTLIALTYVLTLDDPHRFRRSRDAGCFLGLRPGRRNSGQSEPQLHISKEGDRYLRTLMVQGAHYILGPFGQDSDLRRWGLKLAERGGRNAKKRAVVAVARKLAVLLHKLWVSGEVYEPLRNNHKVQSAVA

SEQ ID NO: 87854 - protein, 431 aa, unidentified
MLKINPLSTLYVGIDVSSKSNYVCALDFFKNKYINSSFANNQPGAEELALKILECLNQHPDLTMVVAALESTSVYSIHIANYLSSCEELMRFKPYVFVLNPKCTANYKKSYIGLGKSDPIDAFVIADYARAGNIESEPWRGSQFLALKRLTRHRLHLVECMTREKTYLISNLYLKFSELQMLEGDDQPFCDIYGATSSSVLMEYLSPEEILASSEEDLIAFLAEKSRNRIKDISKTADLLKKAARDSYRLDKSLYEPLNVSIASSFNCIETFKREIKVIDNAIEKEIKGLNPNAFIILQSIDGIGPVFAGGIIAEIGDITAFHSSDALAKYAGLTWKSNQSGDFDGEDTPMIKAGNRYLRYYLGEAANSMRKHNVEYGAYYRKKYNEVPKHQHKRALALTSRKFVRLVYGLLARNQLYSGVSLDTSIKDSS

SEQ ID NO: 87855 - protein, 439 aa, unidentified
MRSYAGVDWASEKHDVLVADAAGERLLSATFAHDEQGVRSLCRALVRLEVELVAIERPDGLLVERLLDAGLRILALHPNQVAATRDRFRVSGGKSDRFDAFVLCELARTDHHRFRVLEPDSDQTKALRALTRAREDLVGTRTALTNQLRAELERFWPGPLGLFTDLHSRISLAFLERYPSPTDARGLGQARLHGFLAREHYTGRQTPAQLLAKLRRAPATRVGELELLTRRQLVLSLVATIKTINEQIKQLERQIATAIRAHPDGAIFLSLFKNPSSVICAAELLAEIGDCRARYPTRDTLAADAGQAAVAKESGKYKAATFRWACNKRLREAVGTLADSTRHHNPWAQDLYASARARGHDHPRAIRTLGRAWCRILWRCWQDRVPYDPARHRALQQHITVTIPTLSGPVVDHPATQRMLAGAVASAANPREQEVTAAP

SEQ ID NO: 87856 - protein, 361 aa, unidentified
MAKVRSWAGLDVHARSVLAVTLDADSGELRSARLPGESAKVVEFLAKLPGPTRVAYEAGPTGYGLARALVAAGMGCVVAAPGKIERPAQDKIKTDQRDAERVLRLLMIDALHAVRVPSVEEEALRDLVRAREDLRGDLMRARQRLSKLLLRHGIVYEDTSSTWTQRHRAWLRAQDLGGGAQATLLDYLGGIDTLECRRGQLEATIAELVPSSPYAQTVARLRCLRGIDTLSAVGLAAEIGDFGRFDRPGKLMSYVGLVPSESSSGETRRQGKITKTGSKHARRLLVEGAWHYRKAPARGVTLQRRQDGQPASVIAISWQAQRRLHQLWRRLADERGKRRTIVAVAVARELAGFCWALDRAD

SEQ ID NO: 87857 - protein, 426 aa, unidentified
MNEADDIRLKEFRQLKKEIRGSGEYLIVGIDVAKEKHHAFLGTATGKTLLRRLIFENTIEGFEKLMTQVEATKVSHGLGKVVFGLEPTANYHKPLGEHLIRCGEMVVLVSGVAVNRNRELLDGRWDKYDDKDAANIADLISQGKCLFYEYPEMRLRDLRNLLSLKRKLKKQEHSYRVRIRNQLLAQYFPELDRYSGRPEIEAIIRWCLDPSRIAGFENDQFMNLIAPGRKSPALHRRLQAIQELAVDSIGCTMGEGAALESQVMVDGLRHIREAIKATQSKIEELCRPFPEYACLLTIPGFGPDVSAKVLGALGNPYRFLNRKQVLKTAGLDLNANRSGKTSDAAVPVISKQGKGDLRYALYQAAFIASTQNRNFIRYYTHQLMGREKEKGIKTKRWVKLSAKLLIIAWTLMKKKEPFDPRHFIPA

SEQ ID NO: 87858 - protein, 347 aa, unidentified
MLIIGCDFHPGFQQIAIFDNRTGEMQEKRLQHRGEAEQFYRSLAGQEVRVGMEACGHYPWFERLLAELGFELWFGDAAQVRASVVRKQKTDRRDAEHLMHLLIEDRFPRIWVPSLEVRDVRQLLVHRHKQVQARTRTKNQLQAMALSHGVQKKYKLWTQAGRAELEQLPLLPYAAQRRQKLLEELDAGEAEIGELDRRVAEEARQRPEAVRLMTHPGVGPVTALAMVLTLGPAERFESAKQVGSYFGLIPSEESSGGKQRLGKISKQGSSFLRFLLVEAGQTAARYDPQLKRFYRRLASRKNRGVAKVAVARKLATRMYLMLREGWTYAQLNQAVMSVSPSHSVAGE

SEQ ID NO: 87859 - protein, 411 aa, unidentified
MQVLYPRCCGLDVHKATIAACVLVADGHTKQKHLLRCKTMTHDLLALAEWLAGFGVTHVAMESTGVYWKPVWNVLEGRCELLLINAQHFKAVPGRKTDMKDCEWLADLLQHGLIRGSFVPPTATRDLRDLNRNRTILVQQRTAISNRIEKLLEDANIKLAAVASHVLGQSGRAMLHAISAGEADVDTLAGMARAKLRNKIPELRVALNGTIRDHHRFVLKQWLLELEAVEKRIASFELEIEQRTEPFQEVVDRLMSIPGVDRITACALIAEIGTKMSQFPTAQHLASWAGICPGNHESAGKRLSGTIRKGNPWVRRILCQAAWAASHTKDTYLSAQYRRLAARRGKKRAIIAVGHTILVIAYYLIARGERYRELGGGYFDEIHSEGLKRHLVKRLEGLGHKVTLESPIPGC

SEQ ID NO: 87860 - protein, 449 aa, unidentified
MREPQEIEDAEYEQILERVCAIDVAKASGKVCTRVPHPSRPGKRRTRVRDVDATTNAILELGGHLVGEGIEKVTLESTSDYWRIWFYLLEAVGLDVQLVNARDIKNAPGRPKTDKLDSVWQAKLTERGMLRPSFVPPAEIRRLRDYTRLRTDLIRERTRHWQRLEKLLEDALLKVSAVASTLDTKSVRDMLEALIAGERDPKVLAGLARGRMKAKHAELLEALTGKFDDHHGELARMLLDQIDHLTGQIGTLTTRIGELIAVIPAAQGVDADGVTGPGAGTGPDAAVASAMTRLDEIPGISVHGAQVILAEIGLDMTRFPTAGHLVSWAKLCPRTIQSGAKNHSGKAGKGNPYLKGVLGEIAAAAARTDTFLGERYRRIVKRRGKLKALVAVARTILVIIWHLLADPAVRYHDLGAGYYASHTDTGRKTRNHVRQLEALGYTVTLAPAA

SEQ ID NO: 87861 - protein, 368 aa, unidentified
MSKTITSFVGLDVHKDSTAIAVAEAGRELPRFLGTVGADLGQLLKALKSLGKPETMLVVYEAGPCGYGLARQLRSRGYSCEVVAAGKIARRPGERIKTDRRDALTLARLARSGDLVKVIVPDERDEAMRDLSRTREDAVKARLKARQQLKALLLRHGHRYGGKSSWTLAHERYLATVGFAHPAQDIAFAEYRQAVREGQERVERVTQALRTQTEHWRLQPLVAALSSLRGIDFVAAVTLAAEIGDFSRFAHPTELMGFLGLVPSEYSTGDTRRQGDITKTGNGHARRVLVEAAWNYRFPARISRILQIRQEGQPKAVREIAWRAQLRLAHRYRRLSSRKLHPNKICVAIARELAGFLWDIARQVKVAA

SEQ ID NO: 87862 - protein, 411 aa, unidentified
MSETNNIDDHGYTVFCGLDVGKAVHHACALNPAGRRLHDKALPNDEAALLEVFEKLAVHGHVLVIVDQPASIGALPIAVARSLGIEVAYLPGLAMRRIADLHPGEGKTDARDAYIIADAARTMPHTLRRVGTDDDTLAELTVLAGYDDDLAAQSTRLTNRLRDALLHVHPALERLVGPRLERGGVLDLIVAAPTPQALRDLGEHGITEIMRPRSPRLAKTMPTKILAALDAQTVVVPGTAAFGRVIAGVATQLRDVRTERDTLAVELEDRLEAHPLAEVLTSMPGNGFRTALKILTIVGDAAAFPTAGHLAAYAGLAPVTRRSGSSIKGETRSQRGNHALKSALFLSAFASLADPTSRAYYDRKRAQGKRHNAALICLARRRIDVLYAMLRDRKPYQQPAPAEPESSPAAA

SEQ ID NO: 87863 - protein, 345 aa, unidentified
MVIWLTHIQGRQNDRIQRLRIRPVFIGVDVGKDTHHAVAINRSGKRLFDKALPNDENKLRSLISDLKQHGQILLVVDQPAIIGALPVPVARSEGVLVGYLPGLAMRRIADLHAGEAKTDARDAAIIAEAARTLPHALRTLKLADEQIAELSMLCGFDDDLAAQTTQASNRIRGLLTQIHPALERVLGPRLKHPAVLDLLQRYPSPEKLASLGEKKLAAQLCKLAPRLGKRLAADIAQALAEQTVVVPGTNAAAVVLPRLALQLITLRKQRDEVALEVEQRVLAHPLYPVLTSMPGVGVRTAARLLTEVACRAFASAAHLAAYAGLAPVTRRSGSSIRDEHPSRQG

SEQ ID NO: 87864 - protein, 403 aa, unidentified
MNAVGIDVSKGKSMVAVMRPLGELVVKPFEVHHTANELKDLSDLLRGLDGEVRIIMEFTGRYYQPIARYLVEAGFFVGVVHAKLIHDFGNNSIRKVKTDRADAIKIANYGLSNWISLKRYTPEDETRLLLKTCNRQYNQYMKLKVSLKNNLIAILDQTFSGLDEMFTSPVRADGHEKWVDFAEKFWHCEIVSSMNRAKFTTQYSKWCQKHGYNRSDSKASALYELALNQVATLPPTTQTKALIVQAISQLNFVSVSLAELRRQMQQLAASLPEYPVVLAMSGVGETLGPQLIAEIGDVRRFSHKGALVAFAGVDAPPFQSGVFESASRSISKRGSPALRKALFQVMKSILKNSPSDDAVYQFLDRKRAEGKHYYVYMVAGCNKFLRIYYARVKEYLITLENIS

SEQ ID NO: 87865 - protein, 353 aa, unidentified
MPRKSSVRIVTTIGIDMGKTTLHMVGLDSCGAIVLREKVSRGRIVSRLANQPSCLIGIEAGMATHYVARELAALGHDVKQVPPTYAKPKPFRQGHKNDFRDALAVAEAVQRPTTRFVPPKSNEQLDLQALHRVRWRLVSQRIAVINQIRGFLLERGIIVRQGLRFLRQLLPDILAKRTDVLSPRMVRIVSDLAGDWRQLDDRIETVTDEIETLAKNDDSCRRVMTVPGIGPIISSAMVAAIGNGSAFSRGRDYSAWLGLVPKQMSTGDRTILGRISKRGNSYLRMLFIQAARVILVRPANWPKHGFGAWLVRAIQRLHPNVLAAALANKLARIAWTVLAQERSYEARVTTAEA

SEQ ID NO: 87866 - protein, 367 aa, unidentified
MVDIMVSDFRKGRYNLMKIFVGIDIAKLNHFAAAISSDGEILLEPFKFTNDADGFQLLISKLESFDKDSIIIGLESTAHYGDNLVRYLVAEFYQVCVLNPIKTCQMRKNNVRKTKTDKVDTFVIAKTLMMQDDLRFITFFVLDMMDLKALGRFRQKTIKQRTRLKIQLTTYVDQVFPEIQYFFKSGLHQHAVYALLKEAPSPNEIVSMHMTHLANLLKVNSHGHFTKEQAKELRVLAQKSVGANDSAISIQITQTIQQIELLDSQLEKIEAEMTDIMRFNDSVIMTIPGIGYINGGMILGEIGDIHRFSNPNKLLAFAGLDPSVYQSGNFQAKTTRMSKRGSRVLRYALVNAAWNVVRNNATFKGLL

SEQ ID NO: 87867 - protein, 350 aa, unidentified
MKQVSMIGLDLAKNVFQVHGIDEAGKVVVRRQLRRGQVEKFLAALPPGVVVGMEACGGAHHWGRVVEKLGHQARLMPAAYVKPYVKRNKNDGRDAEGVCEAMGRPTMRFVPVKSVESQAVLVLHRTRRLLVRQRTMTANAFRSALTEFGIVAAQGLKGLHSLMEALEDPASAIPDTARMALLVLARHWERLNADICKLETQIVGAAKTDAVARRLMAIPGLGPIGATAILAAVPDARVFKSGRDFAAWLGLTPRQFGSGGKQRSGGISKKGDRTLRTLLTLGATAYLKVERARGPRDPWLRALLARRPFKVVAVAYAAKMARIIWAMLVTGEFYRATGQRRKPAVQAAAA

SEQ ID NO: 87868 - protein, 394 aa, unidentified
MGKLYVGIDISKDRSSANGVDDHGKSRFEISFDMDGAGFDELLKAIEANSDGYENVVAAMESTACYHINLYSFLSAKGIETVVINPLLIANFAKLSLRKTKTDKKDASTIAQFILAHKDSVTQLAVSQDLQDIRDMARERESLCHQISATKVEIRRLLHTTFPELESMCNPFTKVMLHFIHRFPSARLVSVAKANIIAKTLKEKPCSCRIRFTPAELINIARKSIATVSPGKEIILSGKIDTLLHLQKRRDELTKTLTKYCEASIVEDLKIVTSIAGIGNNTATTFLAETGRIDNYASHKNLIAFAGIDPTVYQSGKYEGASKISKRGNRHLRRVIWIMTVRVINHNPMFRKYFLKKRNEGQPFKKAVFATAHKLVRVIFAMLSHRTYFQEECI

SEQ ID NO: 87869 - protein, 385 aa, unidentified
MAPIRMPEAVIGLDVGKSSHWACVATRDGEILLSAPVANREGDLDSLFGRFPDALVVVDQSRNIGALALARARAAGMSAAYLPGLAAHGAARLFAGDAKTDERDAMVIAKTALGIPDALLPVGNPGPTVAAARALAAQRNFLTCENTRNKNRLRSILLESCPAFEALVDLSDGPQLRLMASLGGAWSVADAGPRRAAALTRGAARGKIEALVRSTASSTRPDASVVAAEDRAVKLLARRISENSAEIEAITAEISALLEGDDTYRCLLTVPGIGPKTASELAISIDIEDFPSHDRLASYCGLAPRNRQSGTSISSVTASRQGNKRLKNLLIFSCNCLTRTEGRWGDYYTRCRERGMSHGKALKALARKRLKVIYAVMRDRVPYAA

SEQ ID NO: 87870 - protein, 408 aa, unidentified
MQKRENLLYVGIDLHKESHTAVMVNCWNEKLEVIVIENKPSEFKKLAEKVNRKSRHLGLDPIYGLENAYGHGRSLAVWLIENGYIVKDINPALAYDQRKSAPMLRKNDEHDAYCVATVLINQLHTLPDAKPKDNEWTLAQLVNRRDLLVKDGIRFKNGLHEQISMAYPSYSKFFSEIDGKCAMYFWKTYPSPAHLQEKTAEELTIEFKEISSIIRKVKAEMILDCIQHDGNTFREYQESRDFITTSLVRDLEHQKEELAGLDQEIEKILLSFDYKLTSMPGIGTSIASKLIAEIGDIRRFPSADKLARFAGVAPVKFSSAGKDKEQSSRQGNRQLHGLFYFLAVTMVSKPKNGVPNHPVFYDYYMRKIGEGKTKSQALVCIMRRLVNIVYGMMKNKTEYREPIREEEQ

SEQ ID NO: 87871 - protein, 414 aa, unidentified
MKVVYQICCGVDVHKKFLVATIITTTKGVQPHYQKKRFSTFNTELTRFVEWLKENSCADVCMESTGKYWVPVYNILEMHGIRTTIANPKWVKAVKGNKDDTKDSKWIGDLFRLGLVPGSFIPKKEFRVLREFTRYRYKLTSMKSSEKNRFQNAFTVCNVALDAVVTDMFGVSASSITEYLISSETFDEEYCKSLLRGSLKKKAETVIDSIQGYCIEPEQKQRIQFVRKHLDFLENEISQVDMVIDSMVEKHEGLISLLCTIPGVSRNSAVTIISEIGNDMSQFGSSKRLCCWAGLTPGNNESAGKKKSVKIARAGVYLKPALVEVAHAAIKAKESPYYRIKYEKIAKRRGKKRAVIAIARMILTAIFKMISTGEVWNPTDLIKFDMSDELKQQQIQKQISQALSFLKKQGIPVG

SEQ ID NO: 87872 - protein, 425 aa, unidentified
MYLNAKTNHPAATPVPDPVAWIGLDWGHKTHAFALQERARPQEEGTLTQSSEHLHQWLDGLAKRFNSQPVSLAIEASRGAVILALLEYPWLTIYPINPVTSARYRQAFTPSRASDDLPDARVLLELVRDHAAKLRPLAVPDPQTVKLGGLVELRRRFVDQRTKVLQQLIDLLRGYYPQALELVEDLNTNLAVDFLSRWPDVISLKAARPATLRQWYYNHNLRRPELLDERLKLVEKAVPLTRDEARLSVAVLQLGGLLDQLRALRKHVAVLDREIKSAFAAHPEAYLFRDLPGAGAALAPRLCALFGTDRTVYETPASLQQVLGVAPVLEKSGQRGWVHWRWAAPAFLRQSIVEWAGQTVMYSAWARVYYDRMKAKGKGHWMILRALAFKWLRVLWKCWQSRTPYDEIRYQKQLSHRRSPNALPA

SEQ ID NO: 87873 - protein, 404 aa, unidentified
MWYAGIDWADTHHDALVLDEKGHQRGSVRVDHTPEGLAKLNTFLETISGPLEKEQMACIIETSHGLLIAFLLEKGWPVYPVNPRTVDRHRAASGAKTDLIDAYLLAKTGRADLADLRRLTPDSEAVQELKALTRDQDALIQMQTRLVNQLTATLKAYYPVALQLFAKLQQHSTLIFLHTYPTPQAAMGASVEQIIQVLKQAGHTRAEQVAPTIFQTLHQPQLTANAVTIRTKSRLMLALVAQLLPLVEQVAEYDKEIERLFLSHEDNEVFSSLPRAGQRLAPRLLAEIGDERTRYADAASLQALAGTSPVLFQSGNYAKAHRRLGCIKPLRNALHQFAWQSTQQEGWARDYYQRKRAEGKSHTVAVRALSNVWARIIFAMLTKHEMYDSATFETSQRLHARRLA

SEQ ID NO: 87874 - protein, 319 aa, unidentified
MAQNSRVVVGIDVAKGKVDGCIRSLSQRQTFPSSAQGRRKLIAWLRKQKVDRAVMEASGGYERDWAKALREACFEVRIVDPKRVRNFARSAGRLAKNDVIDAEMIGWFAETFEDAPSQTHDAAREELAALVKARKAVIDLRTRLQSQNEHAVPGAVQKAHARVLKGLDAEIAKLEDAIVVTVKATPAFAVRAEIIESVPGLAGMASAVLIAGLPELGTVREEVAAALLGAAPYDDDSGKRRGERHIKGGRRWVRNALYMPCLGAATQNNPVLKAFYQRLIAKGKEPKVALIACMRKLIVILNTMIARGEKWDSSRYALR

SEQ ID NO: 87875 - protein, 356 aa, unidentified
MSNSNKLDFTGQPIYIGLDVHKKSWSVSIFSEHCEHKTFTQSPEVDKLVNYLGRNFPGALYHSVYEAGYSGFWIHDRLEEKGIDCTVVNPADVPTKDKERATKRDRIDCRKLARSLRSGEIEGIYVPSRAKLEDRSLVRTRQSMVRKQTRCKNQIKSMLLFYGIHLSEEVIMSHWSRRFLGWIENIQMERASGDIALKAHLEELKHLRQLIASLNRAILALARTEEYRVPVGLLKTIPGISTLTAMTLLTELYEITRFPSLDELSSYVGLIPETHGSGEKEHTGEITERRHSQLRCLLVEASWVAVRKDPALLMAFHQYCKRMRKTKAIVKIARKLLNRIRYVLKNQMEYIPAVVQ

SEQ ID NO: 87876 - protein, 341 aa, unidentified
MQAPRHIGIDLHRNRFTCCVRLENGRNYLSEWKLEELPRFVKKLRPNDEIAVEVTGNTRLFYEAVAPHVARVVAVDPNQFRVISHSVKKTDPNDARNLALYLDKDLLPEVRMKDKTQAQLASLTQTRDTLVKLRTSLKNKINNILSAHGINLEKEALSSEKKLQGILAMRFDPMVKIELEVIVEEIRSLNQRIAKLEKTIADEGSKREGHKNLTSIKGIGPLSGSILLSVIGNINDFEDEGKLAAYFGIVPRISHSNETERSGRITKRGSKLGRTALVQCALIAQRYSPYLKRYYEKMKARRGTGKAIIALARKLLGIIYRTLKYNWVFEDFPNFVLAEAA

SEQ ID NO: 87877 - protein, 432 aa, unidentified
MHRRLLMYTNTNTIPLYIGIDIGKNVHSFGAYAGANLNLVHAAEDVHSNKAGFEHFQKWIQGRLNKYHPITIGLEPTGIYHEPWVYAIRQAYGNAVTLKFLNPYQTKQKRKQLQNGRSRKTDPIDVEAIAHCLRDGQGSTACLAQKQEAQFQLWMTEYHQVRKRRQRLLTNLSTQMDRLWPGALVDVRRFKNAHPDLEPPTPLLLSRPFDRQLLQVIIKHRPNPHDWKHQSLEAIEVFFRQHGRRCGPKTAQKVSEVVNHALLLPSYLTKELAIRLQEDFSLFQRVSQRLDMLKRRAEDLVPHTKAAVLTTFSGISHFLAAQYLAYVIDPARFDHADQIWALAGFDPGRNDSGDRRFTGEISRRGQPGFRSTLYQIGLNTSQCCSVIRKCKQRALQRGKGRVGATVHAAHKANRICFHLLAHQVAFDPTKAR

SEQ ID NO: 87878 - protein, 340 aa, unidentified
MSIVTIGLDLAKNVFQVHGVDADGGVVLRKKLRRSEVLRFFEALPRCVVGMEACATAHHWARTLSALGHEVRLMPPAYVKAYVRRQKNDAADAQAICEAVTRPTMRFVPIKSAERQSVLVLHRSRDLLVRQRTMLINAVRGHCAEFGLIAPQGALRMTDLVMQIRSADKAYLPPIVKSAMLLMVAQLDALMAQINRLGRALLAWHRQDEASQRLASIPGVGVITATALAATVTDPTHFRSGREFAAFLGLVPRQNSSGGKERLGRISKMGDRYLRKLLVVGATSVIRRARTSTLGAAVWIRSLLERRPARVVTVAMANKTARIAWALLARGDVYRAPSHA

SEQ ID NO: 87879 - protein, 411 aa, unidentified
MVKENFIYVGIDLHKETHTAVMIDCYNQKLGEITFPNRPADFPKLVTKVKKCNTDAKEVVYGLENAYGYGRPLAVWLIDKGYFVKDVNTAISHRQAKHRGAMYRKSDSDDAGAIALATLNMLDKLPDACPNDAYWSLGQLVHRRDNIMKQRTRLVNQLHEQLCIAYTSYKQFFNDISRPTALYFWEHYPSRKYLKGKSVEDLRAELVPVSHNKCSTKTCEKILDAVASDKVKNNAYQDARDMVTLSIVSDLQHYDIQLAEVDKMLEQMYKMLGCTLTTIPGVNVITAVKILAEIGDIKRFSNANKLAQFAGIAPLHLSSSGKGKDLATKQGNRRLQATIYFLAIQMVQISSKGTPRNPVVRAYYEKRKAEGKTSQQALICISRRLISIIYGMLKNGTEYRMPVVENAGEKL

SEQ ID NO: 87880 - protein, 355 aa, unidentified
MDSAKYIGLDVHKESISIAVMNGAGKIVMECVIETKASMILQFIGGLRGDLRVTFEEGTWAAWLYDLLKPHVTKLVVCDPRKNRSMREGNQSDKIDARRLAELLRLDHLNPVYHGEHGLRTLKELVRSYLTITKDLGRVMSRVKALYRSWGIPCTGKQVYTSRHRAEWIGKISEPGVRRRAEFYYQQLDALRILRQEVRRDLLAESKKHKAWKRLGQIPSIGPIRSAELLGILQTPHRFRTKRQLWTYCGLGIETHSSADHRMVEGQLQRAKKQVEIRGLNENCNHDLKNLFKGAAVVAATKPGPFEKFYAELLAKGMRPEMARLTLARKIATIVLIVWKRGVSFDAQHLKPQTA

SEQ ID NO: 87881 - protein, 343 aa, unidentified
MEKTDGVETFVGIDAHSRQCSIKAISRQGEALLEKDVPTRAAALKKALRGLPRPVWAMVESSYLAPLLREMMEASVDRLVVCETRENRWISHSEDKGDQADADRLSRLLRMGEFKAVHVPAGLGRDRQEVLRLYQKAQGDVIRTKNRIKGKYREHGVSLPGKRVYAEGHRKECLALVRRPQARFLLEVLYRKLEADEASSQALLNRLVGLMRSNPGYESLQGIPGLGKVLSSVVAAVIDDPNRFANKRKLWNYSGLGVRTRWSGDPSQARISGNKSGNRLLKYAALSAANAALRGENRFSRHYRKMIGEGADPAMAKRTVARKILATALVLLKTGAAYEDNQV

SEQ ID NO: 87882 - protein, 406 aa, unidentified
MEDNSATNFIQEVLPMSLYFVGIDISKYKHDCCILSAADQKVVSKFTFKNDLQGFEQFLSALSSLSSPEDIRIGFESTAHYALNLELFLENAHHSFMEINPVLIKEYKKSTSLRRTKTDSVDCASIAHWLMTVEYKPHSKGFYHAYSLKSLTRLRDKLVRQRSFYLVKITNVLDHTFPEFKPFFHEHLSKTALYLLETYGSAERMSRMDSASYDKLRSLSRGKFSPRQFLRLKELAANTVGVNNSIFDTELNSLLTLYKSLVKEICILEEEINRLIREVHPHYMSVPGIGTISAAVIYSEYGDISNFSSPAQMLAFAGIEPGINESGTESHKGRMVKHGSSQLRYVLINCCLPLIRSDMTFAAYYAKKRAEGKPHRVAITHVAKKLVRVIYALERQGIDFNAQKLR

SEQ ID NO: 87883 - protein, 378 aa, unidentified
MGSALEVQRRLALKQDSNKPRQSPKRRTFRADMVLTIGVDLGDKNSRYCALNKQGEVVAEGSVGTTRKAIVEKFQGLPSCRVALEVGTHSPWVSRLLAELGHEVLVANARQVKLISESSRKTDRIDAEMLARMARADPSLLRPIRHRSAETQAVLTKVRVRATLVETRTSLINTVRSLAKVAGERVPACAADSLGMADLKDLPAEMQQTLEPLVRHIESLTEAILKSEKELAQIARRDYPETEQLQQIKGVGTLIALTYVLTVEDAGRFKRSRDVGCYVGLRPKRSQSGERSPELPISKEGDIYLRRLLVQGAHYILSRLGPDTDLKRWGVKLAARGGKNAHKRAVVAVARKLSILLHRLWVSGEVYEPLRNHRAPAA

SEQ ID NO: 87884 - protein, 352 aa, unidentified
MQCIAFDSHKHYTWALVQDEKGKVLREQRINHTQGALQEFLDEFEPGSPVAVETIGNWYWIADGIEAAGMVPRLVNARRAKLMSGSINKTDKLDARGINSLQRSGTLPTVWIPPRELRDIRELPRTRMVLVRQRTKLKNRIHANLAKYGLKTDGATDLFGVRGRGIIRQCLEELPMQTRYATQALLEGVDQLDVKIGRLEERMRELFGTTEDLANIETLPGVGFILGVVILTEVGDIERFPSASHLASYAGMTPRVHASGGHVRHGRTRPDVNHYLKWAYAEAANVSMMHRRRHPQRHVSRLYTRVRSPRGHAKAIGAVGRHLSEATYWVLSKHETYRDPAAEQTGESKKEA

SEQ ID NO: 87885 - protein, 375 aa, unidentified
MDTMYERCCGLDIHKKTIEACFRSGKKKTHMSFGTTSAELRKLTMWLVENDCQSVAMESTGSYWKPIFNILELSGTDMKIIVVNARHMKNVPGRKTDVNDAEWIAELLQYGLLRPSFIPDREQRELRELSRYRKSLVGERAREINRLQKMLEGGNIKLTSVVSEVTGYSSRRLLDRLLRNDEPMTEDVISGLVHTSLAGKSKELETALDGLLSELQKELLIKVLDHIDDMSKRIADLDDFCRKQMKKYEDALDKLDEIPGIARRTAETILIETGLDMSRFPTAKHFARWAGLAPGNNESAGKRSSGRTTKGNPTLKSTLIQSAKVAARKKNSFFKARYQKIAAKRGANRASVAVAHSMLIAIDRKSTRLNSSHRT

SEQ ID NO: 87886 - protein, 360 aa, unidentified
MKIQRTSVGLDVHARSVVACALDGDTGEVFQRRLTPDHGEIVAWLGDLPGPVAVTYEAGPTGFGLARGLTAAGIVCEVAAPSKLIRPAGDRVKTDTRDATHLARLLHLGQITAVTVPPASQEAARDLVRARDDCRTDLMTARHRISKLLLRQGIVYSGGQAWNGKHESWLRAQRFDNPALHISYEAAFDAMLACVDRRDRLDDAISAMAADSEFTAVVHRLGCIRGVATLTAFGLAVEIGDWHRLTGRSIGAYVGLVPSEYSSGDSRTQGGVTKTGNGHVRRLLVEAAWHHRSRYRPGAELRRRWELASPAVRARGQAANRRLNSRWAGFDARKKRPVIANVAIARELAGWCWSLATMPE

SEQ ID NO: 87887 - protein, 421 aa, unidentified
MTGDFRIVGFDCGEDEHGAVLLGTDGEVERTIEVVNRRDEIERALAELMLAIGPGSRLGVVVESKRSHGRIVADVAQALGCRVWQVNTVALNHSRALEGQPRKDDEWDAYLGGRMAFLGMRGCRLVVESTDEERALSRLTRAYGRLRKVHTQAVSRLRASLLELAPEMLHNAWEGPKVGSKAVLYLLERWPGFEGLERARLRSIEGILHTCRYGRRAPGVAKKLREMARRIEVEPEERAAFTMEISLLVHQIRECKESMDRLHTEIAERVQRHPVGAKLLEMRGIGPVIAGVLVSELLPVARTSTEPKCATYSGVTPLARKSGKSLDSDRLAQGVNKHVLHALYTSSVVAIKHSPIDRAYYQKKLRGYKGHRKPHVAAFIALSRQRHKLIYKLMTTAARYDTDTLVASHLDRIERNRVEAA

SEQ ID NO: 87888 - protein, 377 aa, unidentified
MHSENIAAYVGLDVHKETLAVAIAAPERLGEVRYYGTINNEAQAVRRLFQKLQGLYGNILSCYEAGPCGFGLYHQLTAMNIKCQVIAPSRIPKSPTDRIKNDHRDAISLARLLRAGELTPVWIPDLTHEAMRDLIRARAAAKRDSRVARQRILSMLLRTDKHYAGKHWTGKHRTWLANQSFSQPSQQIAFQHYCQSLEQIEDRILQLDQEISRLLPEWSLCNLVCQLQALKGVGQLIAITLVAELGDFSRFSNPKQLMAFLGLVPGEYSSGNSIRPRGITKVGNSELRRLLYEAAWSYRTPAKVGAWLIYYRPDSVTQYSKDIAWKAQQRLCSRYRSLTAKGKKSQVAITAVARELTGFMWDIAFAAQSSFSQQKQN

SEQ ID NO: 87889 - protein, 411 aa, unidentified
MQAITERCCGLDVHQETVVACLLIGAPEARPTKEVRTFRTVTRDLEALRDWLRAAGATHVGMESTGVYWRPVYAVLEGCFELIVGNARHIRNVPGRKTDVKDSEWIADLVRHGLIAKSYVPPQPLRELRELLRYRRKLVESQTAERNRLLKLLETANIKLASVASDVFGVSGRAMLRALIVGEASPEAMADLAKGQLRRKRADLMLALEGRVEEHHRYLLAMQLRRLEAIEADVATLDKRTGERLEPYSAAHALLMQIPGVDWVVAAVLIAEIGVDMSVFVSVYHLAAWAGVCPGNHESAGRQKSGRARKGNIHLRTMLVGAAISASRTKGSYLKDKFHRLKARRGAMRAALAIAHKILVSAYHMLAKNLPYRDLGEAYLDQIGQTRTVANLKRRLQRLGYNVTIQPKPAT

SEQ ID NO: 87890 - protein, 344 aa, unidentified
MLHAGLDLSRRRLEVCLIGDAGEVVEHTAAPPDADGLRHLAGRLRGQPVRAVIESMTGARFVHDTLEELGWEVLVADAQKVKGLAPLACKTDKIDARVLAELSWRDLVPAIWLPDPSIRRERELARYRLHLVRHRTTLKNRIHATLMTFGHPCPVSDLFGHAGRELLDRLAIPDPWRRNVDVSLELIDDLELQIASLTVELRRQGADHRYIPLLVTAPGFGWINAFTVASEIGDIERFASPTKLCGYTGLCPRVYQSGASDRRGPISKQGSRYLRWALFEAALHACNHPVYAERYQRTKKRLGRQRGPKVAQIDLSRKLTEAIWHMLTRNEPFAPAGARFRLAA

SEQ ID NO: 87891 - protein, 354 aa, unidentified
MKLYAGLDVGLEETSLCIVDGEGLTVREVKVMTEPAAIRSAVEGYADRLERVGVEASSLGIWLYRELQPARLPIIVVEARHMRVSLSTMRNKTDRNDARGIAQMMRLGWYRAVHVKNIDMQKMRTLLTSRKLLKRKLIDLENHIRGALRAYGLLVRGIARGAYEARVRELIERSDPIFVMTIEAMLDVRRAILEGYDRLHRVLLQVVQHDAVCRRLMTVPGVGPVAALSFKVGVDDPRRFARSRTVGAHFGLAPRRHQSGTSIDYEGRISKQGDVAVREALSEAAASLLLRVRKWSALRAWGLRIAKRSSMLCAITAVVRKLASILHRMWVSETDFHVGFGAKVTQRLRLKPAR

SEQ ID NO: 87892 - protein, 354 aa, unidentified
MSQTLKTAIAVVGIDIGKNSFHVVGLDQRGAIVLRQKWSRGQVEARLANMPPCLIGMEACVGAHHLSRKLKELGHDARLMPARYVRPYSKGQKNDFRDAEAIAEAVQRPTMKFVATKTADQLDLQALHRVRERLVSQRTGIINQIRAFLLERGVAVRQGLRFLRAELPRILATPPDVLSPRMVRVIEGLAGDWRRLDERIEGLSSEIEAVARQDTACERLMSVPGIGPIISSAMVAAIGTGDVFSKGRDFAAWLGLVPRQISTGDRTILGKISKRGNRYLRVLFVQAAWVVLIKPKSWERHGLKPWIEAAKKRLHRNVLAIALANKLARIAWSVLARGRAFEVRKVDEAAAQPA

SEQ ID NO: 87893 - protein, 383 aa, unidentified
MKAVCGLDVHKDSIFLCILHSDGELFEQVFGVLTFQLEEMRKLLQKHHVFEVCMESTSIYWIPIWRVLSPHFTLRLVNPYFIKQLPGHKSDVKDAQWIAECTMKELVRGSFVPPEIIQQLRQYDRRIFDLNAEIVRKVSKVDGVLQRCNIRLSNYVSNIECKSYRDVVRRLSEGVTNPNELMKLVPGRIVNRHGVETILASLTGVVSQAEIDVLRQLHEEIDIAESHRNECQQRMLEICEKHFPEELERLQKIPGIKERAATSLIAEIGTDMSKFETANHLASWSGLRPRNDESNKKIKSRKITHGNVYLRNTIIQCAWAASRQKDSFFSRFSYHQTIVRRKNKMKVIVAVARKLLIAVWHVLHDKTDYVDFKPDREESANNG

SEQ ID NO: 87894 - protein, 357 aa, unidentified
MFAESVDVVIGVDTHRDSHALALVDAGLGALIVEERVEANREGYRRALKVASGCGQRRLWAVEGTGSYGAGLARYLQQRGERVLELERPARSGSRGRAKSDALDALRAARAALTGEPLAELRSGGRREALRVLLVSREASVAVRRKGLNQLRALVLTAPAELRERLLGLPKGELVKRCIALRARPGQQPQLRGTLLALRSCGRQVKLASREAATLERELAALVQQLSPQLLSHYGVGPITAAQLLVSWSHPGRLRSEAAFARLAGAAPIPCSSGKTIRHRLDRGGDRQLNRALHTIVLARRRGDQRTIAYVQRRISEGKTEREAILPRRLRRTMIVAPLLSLSEGSTTPTPRAKEHP

SEQ ID NO: 87895 - protein, 476 aa, unidentified
MNKRQGNLQAPDAKPKRRRRNKGMCLEDRPVLEPNAAGIDVGAREMFVAVPPGRDEKPVRVFATFTEDLERLTDWLEQCGVTTVALESTGVYWIPLFEILEQRGIRPCLVNARHMKNVPGRRTDWHECQWLQFLHSVGLLRAAFRPGQDVCAVRTILRHRNELVAAASQHVQHMHKALTQMNLQIHHVISDITGSTGRAIVDAILAGQRDGAELAKLRDPRIKADTETIRKSLEGNWRPEHLFTLGQSRDLYRIYQQQIVNCDLEIEKMLQGFAPRIDPGEKPLPPDRKRNRAGSKRRRKNGHPHPEFDLRTEAYKLFGVDVSQIPGLEENALPLFSEVGRDMSRWPSAAHFVSWLALCPDNDISGGKLLWRGARRVKNRAGHLFRMAAYALHRSLTPLGNYLRRMKAKLGPQAATMATAHKIAVIFYTMIKNQVEYDETIWDARDAQREKKLQAKLKRQAKQLGYELVPIEPQAA

SEQ ID NO: 87896 - protein, 346 aa, unidentified
MNSTTVAVDLAKNVFELAVADAEWRIVERHRLNRTRFARFFVHRAPCQVVMEACGSAHHWARRLVAEGHTVRLLPAHYVKPYVGRSKTDRADAAALIEAARSSQIRAVPIKTLEQQQLQSLHRLRSQWLSTRQRYLATLRGILREFGIVIPLGPSVAKAQVGATLAAADSAIPEGLRPALAQILQEIAPLEEKILSVERQLATLTRADERAQQLREIPGVGLLTSTALLSTVGDIQRFPSARHFACWLGLTPSERSSAERRRLGKISKQGDVYCRTLLVHGARSALLAAHRAQRAGKPLDRLRHWALNCERVRGHNKATVALANRLARIVWATWKYQRSFDGNWAA

SEQ ID NO: 87897 - protein, 354 aa, unidentified
MPEPCAGTDPHARFLGGGSAATRSRYPTDTGTGQVCRGQISPADREHLRAWLARFYGREDVAFAVEGCTGWRYVAEELAAAGIAAHLAEPADTAFARGRKRHAKTDKTDCRHLRQLLAEGRLPECWIPPGHILDCRALLETYHDLRAEHTAWAQRIHAVLFHQGAPALGEGVLRTEQGVAALRAAAAAHLSPAGQLQVATALEVLETLEARLHELRHQLTDAARHLAGAKVLAARLNGVGPVAAPAMTCWLAGKDRFSSSRQAVRFAGLDITVYSSDRKGPPGRLSRQGPPVLRWAVYEAGKTHARASAPDHRYYAAVKDRCNGKRAALSEARKILRQACHILAELGDDALAAA

SEQ ID NO: 87898 - protein, 387 aa, unidentified
MTKNKGRVVGLDVHPDSFAGAVVEGSDPAQARVLSSSTRVELEQLEQWALRHTCTEDRLVLEASGNAFAVAARLRTIGRKVEILDSHRAGKVGKVYCANDRVDAVKIARIYLSALSPIVWQPDEKTLERREVFSAYQAVVKESTRAKQQLRSMLNEHCVRLEKGFRLCHPNAIRRLVALREWTPARTMLLQQLHGTLVAARARRTLLRRHMAQEIVAEEALLRLTRLCGINLVTLYGVVAAVGDVRRFSHSKKLVAYLGLNPSVSQSGNFEGSGALKRHGRGALRALLIQSGKKLLEVNNPLQKWGLAVAARRGRNKAAVAVARKLCVALWHVLMGHTIGVLERLDTLETKLSKFATELGPVALAAFGYNNKAEFVEKKLYVLRSYP

SEQ ID NO: 87899 - protein, 343 aa, unidentified
MKLIRVGVDVAKNVFQVHGVDRSEKAVWCRKLRRENWLKVLRETVEPGCEIGMESCGGAHHWARQLQAHGFRVRLVAPQFVKPYVKSNKNDARDAEAICEAMSRPHMRFVAVKTIEQQDLQAAHRIRAELTKQRTAKANQIRGLVTEYGLVASQELGQLRRALPCWLEDAQNGLSGRFRRLLDGLWGDLQALDERVAELDREITRLAQNDPLAKRLQQLRGVGPITATALVAAVGNGAQFSTGRQMSAALGLTPRQKSSGGKERLLGISKRGDTYLRTLLIHGARAVIQMAKDKDDRLSQWVTRLAVRSHPNVAAVALANKTARMAWAMLRNGTDYQPDLVAG

SEQ ID NO: 87900 - protein, 331 aa, unidentified
MGCDIAQDTFAFCLRDHSKVVCQGEVSNSKKAIQAWLKELKQVYHVDLTSVIFCLEHTGIYGMILMRTLHTRSLIVCVEGASNIKLSLGLQRGKNDRVDARRIAEYAMRYTDRLKQWKPKREVLERLQLLNGMRSRLVKALKVLKGHTKEAGRFLGKNEYMLLKKGTQESINAIESNIDRADKSIEALIKSDEILKRLSDLVTSVDSIGMVTCAAILVKTNEFQDFREAKKFACTSGLAPFEHSSGKSVRGKTRVSHRAHKDLKTLLHMCALGAIGRKGELHDFYERKVSQGKNKMSVINAVRNKLIHRIFAVVRDGVMYQKNYQYNLAMS

SEQ ID NO: 87901 - protein, 294 aa, unidentified
MSYTTRFVGIDISKSTLDICVLPDEQSASFANSAAGIADLLAFLSAFEEIERLVLEPTGGYERLVVTALQAARLPVAKVNAKQIRQFARACGQLSKTDRIDAFILADYARRMETRVLRQRSSQESALADLVSRYRQLSHMIVQEKNRREKGNGQTKDWIEESLCFLLEQRQAVVDAMTLCLSADAELGRKAEVLMSLTGIGLRTACFILADLPELGHVGKGQIAKLVGVAPLNRDSGLMRGKRMIAGGRRHVRDALYVAALPAIRFDPTMRAFFLPSSKRESRERWLSSQSCAK

SEQ ID NO: 87902 - protein, 363 aa, unidentified
MFTERTSVGLDVHARSVAAAAIDGVTGEVLQTRLTPSYEHIRSWISDLPGPVAVAYEAGTTGFGLQRALTGAGIRCEVVAPSKLQRPSGDRVKTDARDALHLARLLRLDEITSVSIPSVSQEAARDLVRAREDCRGDLMRARHRLSKLLLRHGIVYYGGRAWTGAHDRWLRTDAAPRLGMPATRMAFEADYDHVLTMQARRGRLDAAIQDMAADSEFTPIVRRVSCLRGVSTLTGLALAVEIGDWNRFTGNTIGSFVGLTPSESSSGSSRAQGPITKTGNTHVRRLLVEAAWHHRPRYHVGLVMRSRWDQASPAARARGDEGNRRLHGRWVGFLERRKRPTVANVAIARELAGWCWSLAVMED

SEQ ID NO: 87903 - protein, 344 aa, unidentified
MNQHTVIGLDLAKSSNAVVALSAQGRELWRKTLTRSKLLPFLAQQQPCLIALEACSGAHHVARQLQQQGHQAVLYPPAHVKAYLRGQKNDYNDALALAEAAQHGRIRPVAVKTVEQQDALLIVQQRRQLKEEQTRLGNRIRALLAERGVVLPQGVAALRRGIPRILEDAENGLSITARHLLERVYQRYLVLLDELAWYDTQLQCHAREDATCRRLCEMPGMGPIVASVIQGWMGDGRQFSRGRDASAALGLVPRQYSTGGRDVLLGISKRGDRYVRSQVVNGAQAVLRCVEGKEDSLSRWVVRLKARAGHNKTVIALANKLVRIAWVIVARGERYRPQPIDRHG

SEQ ID NO: 87904 - protein, 343 aa, unidentified
MKLSRIGIDLAKNVFQLHGVDHSGKTVWKRRLKRNQWLKAVLDQGEPGCEIGMEACAGAHHWARELESRGYLVKLMAPQFVKPYVKSNKNDANDAEAICEAMSRPHMRFVTVKSIEQQDIQATHRIRSELMTQRTAKSNQIRGLVTEYGLVAPLTLRALRAAIPCWLEDAENGLTDHFRTLLHGVWTDLVTLDDRVLELDQTIQKLANSNEVTRRLQQLRGVGPMVATALVATVGDAHQYHRGRQMAAAIGLTPRQHSSGGKDRLLGISKRGDVYLRSMLIHGARAVVSQAKHRDDRLSRWVIGIAQRRHPNVAAVALANKTARMAWAMLRNESDYDPDFAMS

SEQ ID NO: 87905 - protein, 345 aa, unidentified
MKHYTGLDVSVKETAICIVDETGKICREVKVPSHPDDLIAVLRDPAWNLERVGLEAGPLSQWLFEALARAGVPVICIETRHVKAFLKAQPNKTDRNDARGIAQMMRVNLYRPVHVKTLTSQKRRALLTARKLLQGKAIAIENDIRGLLRNFGLKVGNVGVVKFEERICELVDDMADLQEVMDPLLTARRKLREEFSRLHKKVLDISRNDEMCRLLMTIPGVGPVVSLAFTSTIDIPQRFKNSKAVGPILGLTPKLNESGESKRVGCISLCGDAMMRTLLYEAAQTLMINVRKWSWLKAWAMNIAKRRGMRKAIVALARRLAVIMHRMMSDGTEFCWTRDDLPAAI

SEQ ID NO: 87906 - protein, 387 aa, unidentified
MSQVSDLSRSLVPFDQNITLTVVVELSEASWLVAGLIPGVDRQPVKKQEPEPVALLRLLERWRVEAVRAGRTIGRIALAFEAGRDGFWLARWLQARDIEVHVVHSTSVAVSREHRRAKTDRLDTAMLMRVFLGWLRGERGHCRMVAIPTLGQEDAKRPSRERESLVGERTRIVNRMKAALARLGIRGFKPTLRKAPQRLDALRTPEEVSIPPNTLDEIRRDMVRLAVVREQIDVIERARLARLEQAPAAGPHAMVRLLARVIGVGLETADMLVQEVLSRNLRDRRAVARYVGLTGSPDESGRRRREKGLAKAGNARVRRGLIQLAWRFLRFQRDSTLAQWYRTRTGGPKGARKTTMIVALARKLLVALWRMVTIGEIPAGVALRQVI

SEQ ID NO: 87907 - protein, 398 aa, unidentified
MTESSDYESVQVFISVDVGKDTHHAVAINRSGKRLFDKALPNDENKLRSLISDLKQHGQILLVVDQPATIGALPVAVARSEGVLVGYLPGLAMRRIADLHAGEAKTDARDAAIIAEAARTLPHALRTLKLADEQIAELSMLCGFDDDLAAQTTQASNRIRGLLTQIHPALERVLGPRLDHPAVLDLLQRYPSPEKLASQGEKKLAVQLCKLAPRLGKRLAADIAQALAEQTVVVPGTNAAAVVLPRLALQLITLRKQRDEVALEVEQRVLAHPLYPVLTSMPGVGVRTAARLVTEVACRAFASAAHLAAYAGLAPVTRRSGSSIRGEHPSRRGNKALKRALFLSAFAALRDPLSRAYYTRKMSQGKRHNQALIALARRRCDVLFAMMRDGTFYTPQAS

SEQ ID NO: 87908 - protein, 342 aa, unidentified
MTAIGVDTHKATLAACAVDPLGSPIAEATFQNDLKGHLAFIAWARSNAPEATIGIEGSSSYGAPLARSAQQAGLCVREVPPHLSRAERRRTRRPGKSDPGDALAIARVTAREASLPPIRLPDQTTELRLLVEAREDLIGEATRVRNRLHAHLIILLPGYGGTVANLVAAHNRTAVGRRLRGNHAVQAELARSLLARLVALGREVDDLTRRITAGVAGHPLLRLPGAGAITVARLIAEVGDVRRFRTADALAALAGVAPIPASSGQVQRMRLNRGGNRQLNRALHVIAVSQARFHPEAKAYVTRRIEVDGKTWREAIRALKRRLVRPVYRLLLEGSNLQLAAA

SEQ ID NO: 87909 - protein, 412 aa, unidentified
MNQDKLYVGIDVSSKNNVCYLMYSDGSKHSSFSVPNNRNGAKIIVDRVTSVLLLQDIPQVVIGMEATSVYGDNLMRFLRESGSLGRFERSLHMLNPKQVKKFRDAYSDLPKNDHVDSYVIADHLRFGRINKEVYMDDYRYEALKTLTRARHQLVQELTREKQRFLNTVFISFSGLTQEKIFSNKFGATSMALIEEFSSLDELAYMSTDELVDYIRKKSKNHFENPEEIAEAVQRAAKNSYRPPQVIADAAKQMLAISMNTIRLLQKQIKEYDKAIEKMLEAFPQTLTSVKGIGNIYAAGIIAEIGDINRFPSQASLAKYAGLVWTQHQSSDFEAEDKRMIQGGNHHLKYYLCEAANALRRCDSEFKRFYALKYKEANKHNHKRALALTARKLVRLVYTLLKTNRLYIPPEEY

SEQ ID NO: 87910 - protein, 423 aa, unidentified
MMKLKYSICCGLDVHKNVIVATIVTTNKDGISEYLQKSFSTINSDIQRFHNWLIENNCYHVCMESTGKYWIPIFNYLENDIDICLTHPKYVKAIKGKKTDKKDSKWIADLYKFDLVRCSFIPPKDFRQLRELSRYRFKLVCMKSSEKNRIQNCMTISNVGIASVLSDPFGKTATEIISYLLEHTADSMDEKAVRKLIKKGAKAKSDEIIEAIKGYTIETDQAKKLELARGHLEYLDDMITQTEVELYVRIKPYYEFVEFVSTMPGMTELSSTIVLAETGVDMDIFDDAKHLCSWCGLSPANNESAGKKKSVRIAKAGDYLKPMMVQCALAAIKSKKQPYFAIKYGRIKKRRGHKKAIIAIARMMMVCIYHMVSEKKPFTPTDYEELMDPQNHVESVVLNENNVFAYLESLGYDSSKLVKRNDN

SEQ ID NO: 87911 - protein, 347 aa, unidentified
MDHVGIDVHKQESQICILTEAGELIEQRIRTEPQRFAAVLGDRPRARILIEASTESEWVARCLESLGHEVVVADPNFAPMYATRTRKVKTDRRDARALAEACVLGAYHAAHRLSDPQRHVRGRLLVRDALVRTRTRYISLIRALLRQHGYRVPSGSAEAFFHRVLALALPGRLLSTIAPLLAVMRHLNTQLTYSDAVIERVTAHDERVQRLRTVPSVGPVTAAAFVATIDDVQRFRHAHQVEAYLGLVPRELSSGETQRRGHITKAGHARMRWLLIQAAVSILRRRPPQAEALRLWALHIAARRGKHVAVVALARRLAGILYALLRDGSVFDPPRSPRPALAATLQG

SEQ ID NO: 87912 - protein, 339 aa, unidentified
MRAYAGIDLHSNNNYLGIINEQDQRLFKKRLPNNMDVILSALEPFQRDLRGIVVESTYNWYWLVDGLQDHGYRIHLANPSAIKQYEGLKHTDDKWDSFWLAHLLRLHILPEGYIYPKEERSVRDLLRRRMMLVRQRVTHILSLQSMITRNLGINMPGSDIKKLTGDDAERLFKDPCLVLAARNNISIMKFLKEKIHLIEQSVLSRVKLRKEFAPLLTLPGVGKILGLTIMLEVDTINRFPKVGNYSSYCRCVKSVRLSNGKKKGSGNTKNGNKYLSWAYVEAAHHAKRSYPYAQRFFQRKKAQTNGIVAVKALSNKLCRASYYVMRDRVPFDEEKLFRL

SEQ ID NO: 87913 - protein, 342 aa, unidentified
MKFYCGIDLSARDCHLCVIDEQLQVVLQLKLRNEINQICRFLGPYKANLKIVVESTFNWYWLIDGLQAEDFEVVLAHTLGLYLITGAKVKTDRRDAYSLAKLLLVGAVPAAYIYPVETRPVRDLLRRRLHLVQVRAGEYGSLRRLLLRQGVLSQRQQEIKTATEAELEQWLEHPLVRLHASQELQRIELYSQQIGELEKSILQIAVTNQSYELLRQLPGVGQTIALTILYEVGELSRFANVKVFSSYCRVIPGIAQSGQVTRRGRGSKQGNHYLKAAFSQAAVHAVRCYPQVRRYYQRQLKRHQGPGRKLVCYNIIAHKLAQAAFHILKEQTEYRAELLFGR

SEQ ID NO: 87914 - protein, 330 aa, unidentified
MKITHIVGIDVSKRTLDYHHYNGLEKSHTIPNEDKGYRNLLRWLKSSVAKDVKGIMIVMEHTGYYTYKLEQFLFKNKINYCKKPALDIKRSCGMIRGKSDKADAKLISKYGWMRKEELDPSQPVNDTQLELQQLMSHRDKLVADRASYQSRLKELKIQLADKLSSQVIKSSEYLVNTLSVEIKQIESAIEALLQENEALKSNYLLVKSVRGIGFATAVHFLIATENFTCFDNHRKFACYCGVAPFENSSGTSVRGKTKTSSLANRKLKSLLTMAAICAIQHDPELKEKYQQKVKEGKAKMSALNIIRAKLIERIFAVIKRQSPYILKIAA

SEQ ID NO: 87915 - protein, 339 aa, unidentified
MDKWEVCGLEVSARELVVAEGTKPVQRYANTAAGHGKLVETLTRGGKRVRVVLEATGMYGLDVTLALSRAEGVEVMVANPRSVRDFAKALMQRSKNDPLDAVVLAEYAKRMPFRAWRRPSENRLALWAITRRIHALVEICRGEKNRHHAAQISQTTPACVRRDVERSLRSQQRALKQLRLQARKCIAAEAELEREYRLLVSVPGIAENSALQILSELAMLPEDRDIRQWVAYAGLDPSEHRSGESVRKRTRLSRTGNRHLRRALYMPALTAIRWEPHLRGFYEHLVQRGKRKKQALLAVARKLLHAIYGMFRTNSPYQGSRVFRLPQPEPMLVSSQELS

SEQ ID NO: 87916 - protein, 402 aa, unidentified
MNCVGIDVSKGKSMIAVMRPFGEVVVSPFEVRHTANELSELAGLLKSLDGETRVVMESTGNYHAPVAWLLHDAGLYVSVVNAMLVHDYGNNSLRRAKTDKKDAVKLANYGLDHWLTLPRYIPEEDTRLMLKICYRQYQQYSKVQTMLKNNLISLLDTTFPDANRLFTSPPRADGSEKWVDFVATFWHCECVCGRSEKAFTTQYQKWCRKHGYNFSEDKALDIYASACRHFGVIPKTDTAKLLVEQAISQLRATSAALAALKQEMQSLAASLPEYPVVMEMFGVGPALGPQLMAEIGDVRRFHSKKALVAFAGIDAPPYQSGQMDVRSRSISKRGSASLRRTLFLVMSVILQCAPIDEPVYQFMDKKRSEGKPYRVYMMASANKFLRIYYASVKAYLESLEHD

SEQ ID NO: 87917 - protein, 343 aa, unidentified
METTRHIGVDLHRNCFTACTRLENGRNYVTEWKLEQLPKFVNQLRPSDEVAVEMTGNTRLFHDAVAPHVKRVVAVNASQFQVITHSVKKTDPHDARNLALYLAKDLLPEVRMKDKARAQIASLTQTRDTLVKQRTALKNKINNLFSAQGLLLSKESLASEKGLKAVLEAQLDVLVELELKILVQQIRSLNHSIAELEETIRRESQKLDGHKNLTSIKGIGGLSAGILLSIIGDIGDFSEEGKLAAYFGIVPRISNSNATERSGRITKRGTKLGRTTLVQCALIAQRFSPYLKTYYERKKKSRGTGKAIIALARKFLGIIYRTLKYQWVFQDFPNFVLAEDATA

SEQ ID NO: 87918 - protein, 431 aa, unidentified
MDTQQFEVIRPKCAGLDVHKKSVVAAVCTSDPVTLTASYKTRVFNTTNSDIAALRDWLLAQDCHDVCMESTGKYWIPIFNILEPHMHVILTHPKYVKAIKGKKTDKRDAKWIANLFRFDIVKASFIPPADIRALRELSRYRLKLSYMRTAEKNRYQNSMTISRIRIDCVLTDPFGLSASRIMDYLLSDEPFDEETCRSLIDRRVKASKDEVMDAVHGYHILEEQKFKMTHAKAHMDFINKSIDGIEAELFLRSRQYDTQIKQIATVTGITELSALFILSEIGADMSVFESDRHLCSWSGLTPANNESANKKKSTRCSKAGQYLKPLLIQCALAAVKSRKEPYFAIKYQRLAKRRGKKKAIIAIARMMLTSIYHMLSDNEDFHPDDYEATVNPPKQKPVILTLDNTLQFLREQGADPETLKLIQQQCAAQDG

SEQ ID NO: 87919 - protein, 355 aa, unidentified
MTSTQYIGMDVHKESISIAVRNAAGKIVMECVIETKASTILQFMDGLRGDVQVTFEEGTWAAWLYDLLKPHVTKVVVCDPRRNALLQEGNQNDRVDARKLAELLHNNQLRSVYHGDHGLRTLKELVRSYLTITQDLSRVMTRVKAVYRSWAIPCTGKQVYAPRHRAEWLAKINEPGVRRRAEFYYQQLDAQRCVRQQVRRELLAESKMHPAWKRLCGIPSIGPIRAAVLLGILQTPHRFRTKRQLWTYSGVGIETSSSADHQVVKGQLERKKKPVEIRGLNRNYNHDLKNLFKGAAIVAATKPGPFAEFYAELVAKGTRPEMARLTLARKIATIVLIVWKRGVCFDAQHLKPQTA

SEQ ID NO: 87920 - protein, 365 aa, unidentified
MKHVTTYVGIDAHKKDLFIAMLIGQEATPVTWTVPNEPNAVRRFVRRLERDAPGPVRACYEAGPCGYVLQRQITTPRVSCHVIAPALVPRKPGERIKTNRRDARKLAELLRANVLTEVRPPTPEEEAVRDLCRARDDAREDLQRCRHRLGKFLLRRGLHYNGRNWTRAHRQWIDSLAWTNAAERVLLEDYQLAIDHVEARLIELDRRLVEIAEAAPYREPVGWLRCFRGIDTLTAMLVLAELHDFRRFKSPRALMAYLGLVPGEDSTGEKHRRGRITRTGNALVRRLLIETAWHYQHRPSVGAALMRRRKGQPGRVIAIADRAQQRLCRRFRRLAEQHKPAPKIAVAVARELAGFLWAALQAPAA

SEQ ID NO: 87921 - protein, 456 aa, unidentified
MKIPQSTIRLLTGRLVKILLNREVSTMKSNTQNAKIEAITEKTLVLGIDVGSETHYARAFDYRGVEYSKKPFKFSNTEAGFVTFKAWVLDIKEKHGKDKVIPGMEPTGHYWFNLGKFLQDNEMKPVLVNPHHVKKSKELDDNHPTKNDRKDPKVIAGLVREGRYMIPYLPDGVYADLRTASNIRFQLQAELTRIQNRINRWFNIYFPEYKTVYGKPDAKSGILILKEAPLPEDILTLGIDGVNQIWRDAKLRAVGKARAKTLIEAAEHSVGSKEGAVSARMEIRMLLEDYESRNIRLQEVMGLIEGLVNQIPMAEKLLEIKGVGIKTVSGFLAEVGDIRRFNDPKELQKLAGLALVENSSGKHKGKTTISRRGRKRLRYLLFEVAMSLVAKNPEFRELHNYYTTRRLNPLKKMQSLMAIAAKLLRVFYAILTKGVGYDPKKMVNDIRRPAAYAQAA

SEQ ID NO: 87922 - protein, 490 aa, unidentified
MKGQRAKRNQKNQKTSKTTSDKATPGKWDEMNRKQRREMMRQMQSGDLSLEVIHPDASGIDIGNESHYVAVPPSRDSQPVRCFGCTTAELKKMAEWLTQCGIRTVAMQSTGVYWIAVYDILEAAGMEVYLVNARETKNLPGRKTDVQESQWLMKLHTYGLLRNSFRPSQEIRILRTYWRQRHDLVRSAGRHIQRMQKALTQMNIRLANVISEISGMTGQAILKAILDGQRDPRELAAYRDHRVEASEEEIAQALEGNWQEDQLFVLRQEQAGYEFCQQQITECDQQLEKYLARLEDRTQGATLPKETRKGRLNKKKKRNPQFNLREELFRMTGTDLTQIDGIDVTVAMTVVSEVGWDMSKWKTENHFVSWLKLAPDNKISGGKVIGKGRTPTNNRATTVLRMAATTLRASDTYLGAQFRRLRTRLGPPVATKAMAAKLARLLYRMLRYGMKYVDKGAELYEAQHRKQQVIHLKRKAAQLGFQIIEVADAA

SEQ ID NO: 87923 - protein, 544 aa, unidentified
MTPHKDYVLEPCPPAPMPLLPPSPVLSEALQVYHPHAAGIDIGEAEHWVAVPPGCDPQPVRRFGTFTADLDTLADWLIDCGVTTVAMESTGVYWIPLFELLEARGVQVLLIDPRQAKRVPGRPKTDRLDCKWLQRLHTYGLLAGAFRPEAHVCVLRSYLRHRQMLLTYAAHHIQHMHKALEQMNLKLTQVVSEITGVTGMAILKAIVAGERDPQHLAKLRNPHCHHDADDIAKALQGTWRAEHLFALRQAIELYDFYHQQMTQCDQQIKAHLATFDDKSAGQPLPPKARRHKKTNEPRFDARTPLYRLAGVDLTTIEGIEEGTALVILSEIGTDMHRWPSVKHFCSWLGLCPQHKISGGKVRSRRVRPGAHRVTVALRLATRSLHHSQSALGAFFRRMKGRLGTPKAITATAHKLARLVYHLLAHGSASLQQGLDAYEAQYRARQVTTMATQAKALGYTLVPLTAPGEDRLPWPRRPCPSSQSASHALQRHELQEQRGRSGLSTPRQFTLPIHRDSPAVAAPSNIPLPLFQKGLTSWDSSLGIS

SEQ ID NO: 87924 - protein, 398 aa, unidentified
MAMMIGVDPHKGSHTAVVIGPGEEPLGELRVESSPGQAGDLLKWAAQWPDRTWAVEGAAGLGRLLAQQLVAAGELVLDVQPKLAARVRLLQAGDTGKNDPHDAQSVAVAALRSGACRPVAAEGHTVVLKIWARRHRDLARARNQVACRLHAVLCELVPGGVRRQITAGQAASVLERVTLSGPIGAARRELAAQFLEDLRRIDGQLRETNKKLAAAVRASGTTVTEVFGVGPVNAGTILGDVTDVNRFPARDHFAAYNGTAPTEVSSGGRKVYRLSLRGNRRINHAIHMAAVTQIRHSHSDGRAYYEKKIAQGKTHKEALRCLKRKISDAIYARLRADAKMAARPAGEGPGGQTGNGSGSSAAGSHPEHRLFGQATPGPATAPGPARAPAAPTPPTKRS

SEQ ID NO: 87925 - protein, 397 aa, unidentified
MPEIWAGVDIGKTHYHCVVINADGKRLLSRRVANDESELLALIGDVLEISADALWAVDLNHGGAALLIGLLVSHGQPVAYLTGLAVHRASATYKGGEGKTDAKDAFVIADQARVRRDLGLLRPGDEIAVDLRTLTTRRLDAVFDRTRQINRLRAQLLEIFPALERALELTNRGPVVLLTGYQTPAAIRRAGASRIETWLKNRKVRGAAALAKTTVEAAQAQQTALPGEKLAAAMVVRLAKGVMALDEEIAELDALIEVKFCEHPHAEVIRSLPGMGAKLGAEFLAATGGDMDAFGSPDRLAGFAGLAPRPRDSGRVSGNLRRPRRYHRGLLRTMYLSAMVSLQCCPASKAFYDRKRGEGKGHKQALLALARRRLNVLWAMIRDGECFHTSPPVTRAA

SEQ ID NO: 87926 - protein, 373 aa, unidentified
MGERITWVGLDAHKRAINVAVLLGREKQPQEWNVENKPATIRRLVKKLVREADGGEVRCCYEAGPCGYALQRQIEAAGPVICEVIAPALIPRKPGERIKTDRRDARKLAELLRAGLLTEVQAPTPEQEAVRDLCRAREDAKEDLLRCRHRLGKLLLRRGMVYRGGKKAWTQAHRKWLRSLTFDNASDRTVLADYLLAIEQVEQRIQTLEQQLAAAADSEPLREPVGWLRCFRGIDTVTALTLVAELHGIERFASPRQLMAYVGLVPSEHSSSERTRRGGITKAGNSHARRVIIEAAWHYRHPPRLSAALNKRREGQPAAVIAIADKAQHRLYRRQRHLVTHGKTATQAVVAGARELTGFLWVALLHQHQGVST

SEQ ID NO: 87927 - protein, 349 aa, unidentified
MIVIGIDPHKQTHTAVAIDKATGQVLAELTVRARRQGFERLVEWSRHLDRQRLFAIEDGRHVSGHLERYLISRGERSVRVPPRLMGEARRADRVRGKSDPIDATAVARAALAHPDLPAATLAGPEREIGLLAAHREQMVNERTAIQSKLRWLLHDIDPDLAPGPRMLDRFATLDRLQTRLRELAPTADVRICLDLVARCREITVRANELERELAPLVDATTPELVQIPGCAVLTAAKIVAETAQIGRFPTEGHFARYAGTAPVPASSGAVHRHRFNRRGNRQLNAALHRIAVTQLRIHQPAKDYVAKKRSEGMSKTEAIRALKRRLSRVVFKTMTSVNRPTDGLIAAVA

SEQ ID NO: 87928 - protein, 438 aa, unidentified
MSNKVFFNLNDLFISVGIDVGADFSWMSIALPNQQFVGKPYKILHNSIDSLTTAVSKIKEAEELYSLESRIFLESTGIYHYPLFCYLRDKGFNCSVINPIITKNSTNINIRKVHNDRFDSKKAALVGLKPDLKVSLMPSDLALNCRNLCREYYDLMDNRSAYVNKLQGELRMVFPQYLGIFSKVTINTSLTLLETYTSPSAFLKADKQEIIDIIKSTARFGLTYAQNKYNAIIQAATDANQFGYIIDSNIKRIRLYISFIRKYDEEINNILESLHELVDANEDADFVKQIHLIETFKGAGFLSAVSIMGEIGDFSAFSKPKQLFAYFGLDPAVKQSGKFEGTKVQMSKRGSAIARRVIHTLTLQSISISRNGEAKNPVLREYYLKKCDSKPKLVAMGAVSHKVCNMIFAILRDNKPFKIIAPQEHIKQYNAAKCDIAA

SEQ ID NO: 87929 - protein, 357 aa, unidentified
MGTITIGVDLAKQVFSVCEVDATGRILRRLTLKRDAFFSWLAQRPAGTVVAMEACSGAHHWARRCLEYGLVPRLMAAQFVRPFRKNPLAKNDPNDAEAIATAARQGNMRFVPVKDIDQQTRLSWHRVREGYKVEGRAIANRLRGLLAEFGVVVAQGEGALRRTLADLDAYPELSAEFKELLRALTGHWAQVVAALAVCERRIEAHARQDARCVRVRQPVGVGALTADAMVASVGNAKEFKNGRQLAAWLGLVPSQHSSGGRARLGMISCRGDAYLRTLLIQGARSSLERAKRVSLDKASPEQLWIRSLACRMPFGKIIVAIANKHARQIWAMLAHDVDYDPHAYRQHPLQQHREAAV

SEQ ID NO: 87930 - protein, 474 aa, unidentified
MKEHKKAKAKTKSELSKTIREQEPNAAGIDLGAEEIWVAVPADRDQNPVRRFEAFTEGLLAIVQWLVGCGVRSVAMEATGVYWIPLYQLLEDAGLKVCLVNARHVKNVPGRKSDVRDCQWLQYLHSVGLLLGSFRPAQTICATRSIYRYRQNLLSLAGQHLQHMQAALEQMNIKLHHVIDDLSGVTGQAIIAAILSGQRDPVQLAKLRDRRIQASEQKIVKSLEGDWRKEHLFVLAKAWAQYQEVQKQIQDCDRELLEYTRELEACTTVGKPVKVVRLEAQLLGAEPVSNPAPKKKARRKTSKNQPEGPWQGELERFFGVDLTVIPGISVLTTLTLMTELGNDLSAFKTEHHFASWLCLCPDNETSASKVLRRGTRRSQNRVRQALRMAASSLHHDKSYLGDKYRRLRARLGAPKAITAMAHQLARIIWILITRQVPFDLNLFAEQQRLNDQRWLKRLAASARQMGYQLTPVAA

SEQ ID NO: 87931 - protein, 338 aa, unidentified
MFVIGIDPHKASHTAAVLDVHEQLVGEVRVCADRSQRDQLLAFAASFEPRCWAIEGATGTGALLAQQLVAVGEIVLDVPPTLSARVRLLDNARSDKTDAHDARSAAVVALRHSNLRVVGLEDHSTVLRLLAKRHHDLVAHRTRAICRLHTLLCQLIAGGLPRKLSATRAAAELRRIRPADAVAVERRRLALEFLGEVRRTDTDLIELKTRIATAVTHAATSVTDVIGVGPIMAAYLIGYSGDVRRFPTAGHYARYNATAPIEASSGPNARHRLNPRGNRQLNHALHIAAVTQVRNDTPGRAYYLHKQAEGKTKKEAMRALKRRISDAVYHQLCADATR

SEQ ID NO: 87932 - protein, 412 aa, unidentified
MQTLLERGCGLDVHQATVVACLLIVGKDGKVQKQVRTFATTTRELIGLRAWLLSEGCTHVAMESTGVYWKPIYAILEGALEIVVANAQHIKKVPGRKTDVKDAEWIADLLCHGLLRSSFVPPKPIRELRDLMRYRRKLVESQAAERNRLLKVLETANIKLANVATDVFGMSGRLMLRALIKGKATPQEMAELAKGLLRKKIPELQLALEGKLEQHHRFLLELQLQRLEAAEKDLAALEQRIQQKLEPYAEQLALLDEIPGVDWTLAAVIIAEMGVDMSVFGSVSQLASWAGVCPGNNESAGKRKSSRIPTGNVYLKTALVEAANAAARAKATYLRDKFFRLKARRGYKRAVVAVAHKILVAIYHILSHRVSYNDLGDLYLDKLNKNHLTRNLVHRLERLGYEVTLTPQQKAA

SEQ ID NO: 87933 - protein, 334 aa, unidentified
MKSDIVHIGVDVSKEKLDIYMPAKKEGLRPTIMEADNDTKGFRVLRDLARKAGAMVCVEPTGGYELELIAFMHRFNVPVAYADALRVRQFAKAEGNLAKNDSIDAALISRFADKIGVRALAPAEIDAVELKRKTKFRQNLMDSRTALACRLETEIDAEMRLMIKEQIRHLDRLMNKLERSCRETMSRNQAMNTLRKRFVEVGGVGDITAIAILAGLPEIGTLSDSKLNRLVGIAPEEKQSGTMQWQRRIWGGRKDVRNALYMATVASIMWNSILGGYYRKKRAEGHPHKWAIVPTMRKLLSLLNRIARDPNFRPTPEPDSTKLNAHVGRRKKAA

SEQ ID NO: 87934 - protein, 424 aa, unidentified
MEVIHECVAGLDVHKNSIVACVRSVSGGKTKREHRTFGTSTDELLALREWLTSLECELVAMEATGVYWMPVWKILSEGEFELIVANAAHIKAVPGRKTDMNDATWLADLAAFGLLKASFVPNEEQHELRSLMRTRKQFVRDQTRHVQRIQKTLTEANIRLDSVISDIMGCNGRRMIQAMIEGVRDPRKLAALADKRLKKATPKELYDALHGRLTDHHRYLLQLHLHQYDELEASIKNIDKQVEQRTLRMDQEVAADKAKFSDLINQLATIPGVSQLSALTILSEIGTDMSRFPTAGHLVAWAGMCPAQKESAGKRKPTRLRKGAPWLKTMLVQSAWAAKNQKNSYYRAMFFRLKNRRGPQKAICAVAASLLTAIYHMLKDGTFHQDLGADYFDRRPPQFKVKRLVQQITQLGYEVILQPTAKAA

SEQ ID NO: 87935 - protein, 343 aa, unidentified
MKISTIGLDLAKLWFQVHGVDATGHVAVRRRLRRSEVLAYFRSLEPCLVGMEACATAHYWARELIALGHEVRLMPPAYVKAYVKRNKNDAAHAEAICEAVTRPTMRFVPVKDAEQQSVLMLHRGRSLLVRQRTMLVNALRAHMAEFGITAPQGLVHVEYLATVLDDDGAPLPELARSILRMIVAQYNDTSARIHALERQLAKWHRESRISQLLATIPGVGIMGASAIAATVTDPNLFKNGREFAAWLGMTPKQNSSGGKERLGRTSKRGDKYIRCLLVAGAVAVLRHTRNRTTKDAAWVRGLLARKPTKLAAVTLANKTARIVWAVMARGEGYRSKEQFEPAL

SEQ ID NO: 87936 - protein, 367 aa, unidentified
MPVASLSRRGAVHLGMDVSKNSISVGVLHVDDADAVVDKITHDEPSVRRFVERFGDRSRLRVCYEAGPTGYELYRLLASMGVSCDVVAPSLIPRAPSERVKTDRRDARRLARLHRAGELVAIRVPSVAEEGVRDLCRARGDVIIDRRRARQRLGSFLLRHDRVYRDGNTWTLRHAAWLDRQRFDDPAVMATFVHYRSVVQMRDATLECLDAELVGWFDQPLFADKVARLAAYRGIDRLGALTLASEVCDWRRFATAQAFMGFCGLVPSEYSSGDRTHRGRLTHAGNVHVRTQLVEGAWAYQHRAGVSLHLAKRHHGVPADTITRSWAAQQRLCRRFRILAARKDSTNVVVGAIARELAGFVWAEMTA

SEQ ID NO: 87937 - protein, 391 aa, unidentified
MIYVGIDVAKDKHDCFITNFDGEVLFKAFTIANNLDGFNDLYQKIVSVTEDITKVKVGLEATGHYSYNLLGYLIDKSLPTYVINPLHTNLYRKSLSLRQTKTDKVDARTIASMLMSDVNLKSYSDTSYHNEELKSLTRYRFDKVKERAKLKTSVSRLVCILFPELEKLVPTLHIASVYALLSEFPSAKHVATAHLTRLTNLLSESSKGRYGKDTAITFRDSARASIGSNMPAKSLELKHTIKLIQELDSEIDEIENEIKIIMDEINSPILSIPGINYRMGAMIIAEIGDFNRFDSPDKILAYAGFSPSTYQSGQLDGAYAHMEKRGSRYLRYALYNATKYVCHWDPTFAAYLAKKRAEGKHYNVAISHAVKKLVRVIYHLEKTKQQYIKVA

SEQ ID NO: 87938 - protein, 370 aa, unidentified
MKECSEAFIGFDTAKKKHAVAIADVGREGEIRYLGEIDSSPLTIERMIRKLAGRYEKLHFCYEAGPTGYGLYRQVRGLGHDCSVVAPSLIPKKSGERVKTNRRDAVSLARLFRAGELTSVWVPDTVHEAVRDLVRARETASQDLRRKRQQLLSFLLRHGRIFSGRQHWSRAHLRWLAQQKFDHPAQQIVFQDAVDAIDDAAARLRRLDEQVAAIVPSWSMAPVVEAYQAMRGVSFVVAVTFVAEIGDLRRFDNPRQLMAFLGLVPSERSTGERVRRAGLTLAGNKRARRVLIEGAWSYRYPARVSQTLQARLEGLPKAVREIAWKAQIRLCARYRRLNAAGKKLPVVIAAIAREMAAFLWAIARHVAPAA

SEQ ID NO: 87939 - protein, 353 aa, unidentified
MEEKYVGIDIHRDYGVACVQDMEGKIIDEFRFGNNIEGINQVKEKLGNNKTHIAIESTGNMWVVLWDKLEEMKSDLHLVHPLKTKAIASNKLKNDKLDAKMLAKLLRGDMLVCSYVPPHDVRDERETVRLRASLVRMRTQVINKIRSIFHKYCIKYRGPLYQKSGMEFLTTLDLRPVDMSAIKSYLETLKTLNTQIDSVNSQIADNNNEDVRLLMSVPGIDYYSAVLIHSEIGDISRFPSHNKLASWVGLVPSMHQSGTSFYIGKITKEGSKRLRWILVQCAHASIRANTKINGFYAKIAKRRGDNKAVVAVARKLVKIIYPVLTTRNPSLYGDRIKTEKKIKRMKKIAERTN

SEQ ID NO: 87940 - protein, 435 aa, unidentified
MYSLFFMEPYRKEHIMHNKNYISVGIDVGSAFSFMTILAPDETVILKPFKITHNNKDSLERAVSEIKKAEELYSLESRTFLESTGIYHFPLFCYLVDCGFNASIINPIITHSTKNGNIRKVKNDKIDSKGIAKLGLSKDIPVSQFPAKLVLELRSLTRKYYDLTDERSAHINKLKGDLHTVFPQYLDVFCDVTGKTSTMILRQYGTPDKILRGHKKTMIEKISKASRKGLAKASERYEKLCAAANAAKTFGCQIDSIYFNIFLTLDLVEKLDSALDSILNRIRQLITFNKNEKFIQQIKLLNTIPGVGFLTAVTIMCEIGDFSAFRNPKQLFAYFGLDPEVNESGKFVGTQLHMSKRGSRIARRAIFAVALASIRTKRNGEGINPYLRKYYELKSGQKPKMVAIGAVMHKVCNIVFAVLRDEKAFELRSPEEHCK

SEQ ID NO: 87941 - protein, 355 aa, unidentified
MIVAIESHQGAIDMQVTTIGLDIAKNVFQVHGVDAAEKVVVRKQLRRSQVLEFFKALPPCLIGMEACATAHYWARELTKLGHKVRLMPARDVKAYVKRSKNDAADAEAICEAVRRPTMRFVQVKSAEQQSQLMLHRTRDLLMRQRTQVINALRAHMAELGMTAAQGNAGLRELLAIIAGAADERLPAEAHASLIVLAAELQAMRTLIASIEKRIIAQHRSDEASKRLRSIPGIGLVGATAIVATITDPKAFRSGRDMAAWIGLVPRQDSTGGKQKLGPISKQGDRYLRRILVVGAHAVLKLARRKPEKYPWLTQLLARKPFKVVAVALANKMARIAWALLVKGGPYRARALVAAA

SEQ ID NO: 87942 - protein, 309 aa, unidentified
MNEYNINIGIDVAKNHLDVCILPYGKTKRFKNNELGIASLIEFIGDKEPIERIILEPTGGYEELILEILSEKNYKISLVNAAQVRAFARANGILEKTDKIDAKVLADYGAKIPSRLYIPLSLPLKQLRKYVQRRRQLLHMIVEEKNRLKKERDNEMIILIKETLEYLNKQKDILEKRIIEKIEADKQLKHIKEILVSMKGIGSVTAAVLMCEVPELGKLNHNQIAKLIGVAPLNRESGMMRGKSKIYGGRGYVRDSLYLAALPAIRFEPVLRDFYLRLKNNGKPGKLAVIAVVHKMITILNARLRDFYA

SEQ ID NO: 87943 - protein, 408 aa, unidentified
MNTLYVGIDISSKSNIVYMMLPNGDKHSNFSVANSHEGSIQLVKRIYSALTSDSLDTVLIGLEATSVYGDNLVYFLREDATLAPFNSRIHVLNPKQVKRFQDAYNDLPKNDYVDSFVIADCLRFGRINKEVYSGDYRYQALRNLTRARFFTVQNLIKEKQRFMNILFKKYSTMTQEKVFSNTFSATALAVYEEFASAEALANMDLHELTDFIIEKGKNRFQNPDAVAKAIQKAARSSYRLSKTVNESVNQVLSISITSMKALESQIKEFDKAIKVQMELLPNVLISILGIGPVYSAGIMAEIGDINRFDNQAALAKYAGLAWKQYQSGGLEAEVTRLIPSGNRFLKYYLCEAAFSLVRCDKEYSDFYHLKYKEVNRCQHKRAHALTARKFVRLVFRLLKDNRLYCPAK

SEQ ID NO: 87944 - protein, 349 aa, unidentified
MSHKLNSGVAVIGIDIGKNSFHVVGLDQRGAIVLRQKWSRGQVATRLANVPPCLIGMEACVGAHHLSRKLTSLGHDARLMPAKYVRPYSRGQKNDFRDAEAIAEAVQRPTMKFVATKTAEQLDLQALHRVRERLVSQRTGIINQIRAFLLERGVAVRQGLRFLRAELPRILATPCDVLSPRMVRVIEDLAVDWRRLDERIQGLSSEIEVLARRDAGCERLMSVPGIGPIISSAMVAAIGSGDAFAKGRNFAAWLGLVPKQISTGDRTILGKISKRGNRYLRVLFVQAAWVVLIKPKSWQRHGLKPWLEAAKKRLHYNVLAIALANKLARIAWSVLAHGRTFEASKVQTA

SEQ ID NO: 87945 - protein, 450 aa, unidentified
MRSKPNLTPVPEEIPDAEHELVIERVAAIDVAKASGKVCVRSPRERRRVSKVWDVAATTGTVSDLADQLTELGIEKVTVESTSDYWRIWYYLLEAAGLEVQLVNARDVKNVPGRPKTDKLDAVWLAKLTEKGLLRPSFVPPAPIRQLRDYTRLRVDLTRERARYWQRLEKLLEDALIKVSSVASKMDTLSVRDMIEALIAGERDPRRLADLARRRMKAKRSALIAALDGRFDDHHGELARMLLDQIDALSAQIVTLTTRIEALLEAAEPDDAGDRAHPPDDVGAAPAGPSTVERLTEIPGIGPTAAQIILAEIGRDMTQFPTAAHLVSWAKLCPRTIQSGPVTRGGKTGKGNPYLKGALGEAAAAAAKTDTFLGERYRRIVKRRGKLKALVAVARSILVVIWHLLNDPVARFRELGSDYHTRRIDIERSLRTHIAHLTAMGYRVTLEPAA

SEQ ID NO: 87946 - protein, 341 aa, unidentified
MSEVTMIGIDLAKRVFQLHGACANGTVVFRKKLTRIQLLAFMSQQSACVVAMEACATAHSWGREFEKLGHTVRLIAPNYVKPFVKRQKNDVADAEAIVEAASRPTMRFVELKSEAQQARAMLFRTRQMFVGQRTQTINALRGHLAEHGLVAPQGAIQVKRLADAVADETIGLPEDVRELAKVYLVQIENLSAQIAVLDRKMKSAAKEAEAARRAQTMPGVGPITALAIETFAPDLNCFRRGRDFAAWLGLVPKQTSTGGKPRLGKTSKMGQRDIRRLLISGAMAVLQAVERFGKPHNGWLIYMLERKPRMLVAVALANKMARGLWAMVTKQEDYRNPATMA

SEQ ID NO: 87947 - protein, 413 aa, unidentified
MQKNHIEFEQVVERGCGMDVHKEILVATIQGKGIKTVTKSYSTYTSSLIKLKRWLKKHGITHIAIESTGVYWKPVFNVLGEDFEILLVNARHVKNVPGHKTDKKDSRWLAKLLLSGLLKGSFIPNQAIRELRDLTRYKTKLTNQVSAEKNRVHKILEDANLKISVVLSDIFGVTGRKFLNEIIKGKYKPETLLYMVHGSVKASKGEIKEALTGYVTCHHRFMLQTILKNISRIEETLQELEDQIAKVTEEYGDIIELLETIPGVGHDGAIGIIAEIGLDMDKFSTHKHIASWAGMCPGSNETAGKNKSGRITYGNQYLRSLLVEQGWAASRTKNTYLSSKYKSLVGRRGKKRAVIAIGHKILIAAYFIIKDKVAFNELGEDHLNNFRKDQLVKYYKKQLEKLEPNLNFDNEVA

SEQ ID NO: 87948 - protein, 370 aa, unidentified
MAQGSTLFIGLDVHKESIAVAYGSEEREAEVVFLGTIGTRQGDIDKVIRKLQAKGKALHFVYEAGPCGYWLYRYLTKKGLKCWVVAPSQIPKKAGDRVKTDRRDAMQLARLLRSGDLTPIYVPGVEDEALRDLVRAREDTLKDGKAAKVRLKAFLLRQDIRYEGRATWGPAHLRWLAEVICPTPAQQIVFQEYVRAVSEHTERRQRLEAELQTLVQTWRWLPVVEALQALRGVQFTVAVTLIAELGDLSRFDNPRQLMSYLGLIPSEHTTGEHRRQGSITKTGNSHARRALIEGAWAYRYPAKVSRHLQLRLEKLPKVIQDISWQAQVRLCKRYRRLMARGKNANQVVVAIAREMAAFVWAIARTVTGAH

SEQ ID NO: 87949 - protein, 354 aa, unidentified
MNIVSVRTLSFTERQAQKMTYFGIDVHKGTSTVKWFCPAENKRGRKRIETTPKAFAELLSSLPRPWIIAYEATRQAPALTKMLRKLDADELHLAHPRALREIGKLQKAKTDDKDAGLILTLLEVGMLPEAYLAPASVEDMREVSRGYKHLRQTCTKYLNALRHLFNKSGLSCDASKLLTHKGRQQVEKLLMELPALAAITGTMYWHLVQQLDEQCAALLELMYAQLKEHPAGAALLAIKGVGTVTAFGFLAEIGEPERFANCGRLHSYAGLVPKASQSDDRYSTGHLPQDCNKHLRYLAVCAANSAVRCKGENKAKTAYDQVKGKTDKRANVGKIAAARKILTDVLWEWRDAVK

SEQ ID NO: 87950 - protein, 439 aa, unidentified
MPTPSLLVLDATAAAIDVGSEQLHVSIAGGPPKVFGTTTGELHALRDYFLAHGVRSVAMEATGIYWLCPYEVLEKAGLQVVVVNGKYVKNLPGRKTDMSDCQWQATLHAHGLLKPGFVPPEHVRRLQDYLRLRTDHIVMAGSHEQHMQKALERMNLKIHDVISDLTGMSGLKMVEAIVTGERNPVALLALCDPQIQKNKAGRLRAALEGTWKDEHLFALRQAYELWQFYQKKIGECDQAIEKVLKVVAGPEDPKNPAPPATKRGGVNAPHINGLHGMLCRLCGGKDPTQLPGVADYVLLQLLSEVGTDLGNNWRTEKHFTAWLGLAPGSRNSGKRRATQRRFRNRAGRLFCVIARSVGRSVDKALGGFYRRLKGRKGGLVANLALARKIAELFWRLMVHGIGYVEHGLNKYQEQVAQTEQRLLQKLARKYNLVLQPKVA

SEQ ID NO: 87951 - protein, 350 aa, unidentified
MSKLLHEGGWTMEARYAALDVSDKTTHVCVVDGAGTIVWRGVCATDPEALATVLKKRCPGVMRVVLETGPLSAFLYHGLIERGVPAICVCARHAKGVLSTRINKSDPHDAEGLAQLARTGWFKVVRIKEEATHIARAHLKIREQLITSRQAMANQLRGLLKLFGLRLGKVTTPGKRRERLETLFAQRPELRPVMQPLIEGIEGLEDQIKRSARLLAAGAEADPVAARLMSVPGVGPFIALTYKSSIEDPGRFARGEDVGAYAGLVPRRNQSGERDYKGRISKAGDAMLRSALYEAANNLLARVKRPCALQAWGKKLAETKGPKRARVAVARKLAVLLHRLWLSQTEFCWT

SEQ ID NO: 87952 - protein, 441 aa, unidentified
MKRKIGKKKGMKVPKHLEHINRYAAGIDIGSKSHFVAVPEGTDEKPVREFSTFTGDLERLADWVIACGVTTVAMESTGVYWIPVFEILESRGLEVKLVNARHVKNVPGRKSDVLDCQWLQQLHTYGLLRGAFRPADQVCTLRAYVRQRSTLVRSAASYIQRMQKALAQMNLQLHHVVTDITGTTGMRIIKAILDGERKPDALATLRDPRCRNSQATIARSLKGNYRPEHLFSLRQAVELYDVYQTKIADCDRQILNQITSFDDSPDAMPPATMGDALIRMSGVDLTSIDGIDTTTALKILSEVGTDMSRFASAKHFASWLGLSPGTKVSGGKVLSSATRPSANKAAQALRMAAFTLFNSKSALGAYLRRQRARLGAPKAITATAHKLARLIYAMLTHGTAYVDAGQDYYEERYRLRVVQNLKRRAQELGYELVTMQKIATA

SEQ ID NO: 87953 - protein, 415 aa, unidentified
MALKIVYKICCGIDVHKTFVVACIASTDKHGVTSYERHRFSTYTKGLKNLLQWLLEHNCKDVCMESTGKYWIPVYNILEKDCSIVLAHPKYVKAIRGKKTDKKDAKWIADLFKHDLVAGSFMPPADIRQLRDLMRYRFKLTCFKSSEKNRLQNCLTVSNIQLGNVVSDTFGKSAQAILDKILENPEDTSFDLEPLVFKSLKKKLPELRDAIDGYITPEQAGKLKIIKAHYESLESRKAELEELILALAAPYQQEFAILQTAPGISSDFTAIGIISEIGTNMEAFPSAKHLCSWAGLTPTNNESAGKKKSVRVSKAGCYIKPLLVQCANAVVKSSKHPEMRNRYLRLKKRRGHKKAIIAIARMLLTALYHMLKNGENYNAELYQKSDLLPVDREITVEQALMIARNQGYKIKSATA

SEQ ID NO: 87954 - protein, 342 aa, unidentified
MTYYAGIDVSLEYSSVCVVDGAGKIIREQRIASEPEALIAWFRGLGFGLERIGLEAGPMSQWLYAAMRAAGLAVELLETRHVRDAFKAMPVKSDRNDARGIAQLMRLGWFRPVHCKSMAAQEVRALLTARKLVQSKLLDVQMSLRGLLRGFGLKVGATTPSRFAGRIRDLVEGNATLEVIAAALLVVHETMRRELAGFEKRVRSIARSDGRVRLLMSTPGVGAIVALTYVAAIDDPARFKSSKGVGAHFGLTPKKYQSGETDITGRISKIGDEGVRTALYEAGHIILTQPLKGCTALKSWAMRLAKRAGMRKAKVALARKLAVIMHRMLVDGTLFASAAVAA

SEQ ID NO: 87955 - protein, 418 aa, unidentified
MSEDETTRGSRRYVASDIHKKYSVIGGVDREGRVVLHAVRVEHADLEGWLQKNLLPTDHVVIESTTNAWHIYDLLEPLVERVVVANPARVKQIAQARVKTDVRDTFILARLLAANLVPDVWVPPVHVREMRQLLSQRRQLVETHTQIVNRMHSVAHRHHLSHARGKRFNEKNTAWQKDKRLSKVEQFQLELEMENRAYIEKQISRIGKEVAKMCHQKPWADSMTYIMQLPGFGVITGMTVLAAIGEIQRFGTPQHLASYSGLTGGLDQSGTHLVQKGITKEGRKELRWAMVEAAQRAVKSDPHWKRKFQEMEKRMHRNQAIVAVARQLLELVWYVLTRRQPYRHFSQERIAYKYLTWAWQMDEAARDGLTRQQFTRYYLMRLGIGHDLTRIALDPKHPRKISSEAELLTLRPELDHIE

SEQ ID NO: 87956 - protein, 336 aa, unidentified
MYNYIGIDVSKSSLQVYIELKDENINILNNKKSIGSLYNKLKKYYKNDYKNLVFIFEPTGSYSSLLKHFCANNNILCYIVNPRQSYNFAKALDNRSKSDIIDCKMLYEFKVMINTKDIVIPVINHIQESIGEYLSYYKISQKQRNALSNHLEAITSKNGNKIIITELKKDIKKLKDKENNIIKKLLLLISKDDILLNKFNNIKTIKGIGDISAIALIHLFITYPQANKQQITALSGLDSIEQTSGSSINKKSRISKRGSSIYRSLLFMPVLSAIRSNPYITVFYDRLKANGKHSTLAQIAVMKKLILIAHSLYKNDTIFDNELYEKRISYNIENIA

SEQ ID NO: 87957 - protein, 412 aa, unidentified
MEAIVSRSAGIDIGKAMLKATVRVQGGQRGKTRREVRTFGTTTPQLLALRDWFVAEGVTLVGMESTGVFWKPVYYMLEDVVECWLLNAQHLKKVPGRKTDVSDSEWIAELVAHGLVRPSFVPPPGIRRLRDLTRYRTALTQDRTREIQRLQNVLEDAGIKLDCVASDIMGKSARAMLAALIRGERDPQVLSELALGRMRPKVGELQQALVGRFGDHHARLCSKMLAHIDDLTATIDELTGEIGVEIEPFQCIRKRLRTIPGVSDRLAENLIAETGGDMSRFPTPQQLASWAGMCPGNNESAGKHFSGRTRKGDRWLRGALGEAAAAAARTKGTYLSARYRRLAGRRGKKRAKVAIGHDILVAAWYIMREGVDYADLGADYLNTHAMDPRRKATRLTEQLQALGYRVTLEHVA

SEQ ID NO: 87958 - protein, 340 aa, unidentified
MDHLDLLGLDIGKNTFHLIGHDAKGKELLRKKFNRNRLLEFVARLKPCTIVMESCGGSHCLARKLMSFGHQVKLIAPQHVKPYVTGNKNDYIDAEAICEAASRPRTRYVAIKTVEQQVLSTQHRLREALVGHRTQTINRIHGFLLEFGIVFPATKAAMNQVHQILDDPAAELPRQLKSFIEHLLEEMKRLNDEIKAIDRSIKEQVEADDAGARLMSIPGIGPIIASALLADVGDASNFHSSRDFAASLGLVPRQYSTGGKTVLLNISKRGDKYLRKLMIQGSRAVLVHIDKRTDALGTWCRDLLIRKHPNKVACALANKLARVVWAVLARGVSYNAPSMA

SEQ ID NO: 87959 - protein, 445 aa, unidentified
MFIQSQYDSQCCYFLFIKVVILMMKLKYSICCGLDVHKNVIVATIVTTNKDGISEYKQKSFSTINSDIQKFHNWLIENNCYHVCMESTGKYWIPIFNYLENDIDVCLTHPKYVKAIKGKKTDKKDSKWIADLYKFDLVRCSFIPPKDFRQLRELSRYRFKLVCMKSSEKNRIQNCMTISNVGIASVLSDPFGKTATEIISYLLEHTADSMDEKAVRKLIKKGAKSKSDEIIEAIKGYTIETDQAKKLELARGHLEYLDDMITQTEVELYVRIKPYYEFVEFVSTMPGMTELSSTIVLAETGVDMDIFDDAKHLCSWCGLSPANNESAGKKKSVRIAKAGDYLKPMMVQCALAAIKSKKQPYFAIKYGRIKKRRGHKKAIIAIARMMMVCIYHMVSEKKPFTPTDYEELMDPQNHVESVVLNENNVFAYLESLGYDSSKLVKRNDN

SEQ ID NO: 87960 - protein, 386 aa, unidentified
MKDETFVPREYDVFAGLDVDKKSIAATFSSPQGFIRSLHMPYSVDYLLNHVRKHFGDQKVAFVYEAGPTGYGLYDGLVAQGYRCLVAAASMIPRAPGQRVKTNRLDSRGLSESLRGGQLKSIHVPSPIYRELRHLTQLRDTVVREAAAHKQRIKALLLLEGIGFPPATAGRQWTLRVKAQLRKLRCSRIVRFKLDQLLDSLEFCEKQVVSSTKEIRRFCKEDVELFQSIEYLMSIPGIGWIVASQLLARMGDWREIDNVRQLGSFLGLVPTENSTGDSVDRGSITRAGDGRLRSKMIQAAWSAIRQDGELREFYRSVCQRNPRGKGARIAIVAVARKLSTRIYAVLKKQRPYIVRKQVHSAPLTQEETSPQGTTRRCAEPGETDNS

SEQ ID NO: 87961 - protein, 343 aa, unidentified
MDHFAGLDVSVKETSVCIVDDMGKIVREVKVASEPDALLAALNNPAYHFKRIGLEAGPLSQWLFSALAEADLPAICVETRHMRAVLKAQINKTDRNDARGIAQMMRVGLYRPVHVKTLRSQKLRMLLTHRKLLQSKAIAIENDLRSTLRNFGLKVGMVGKVKFEGRIKELVENQADLATLVEPLLIVRRVLHDQLGILHRRLLDIVRNDDVCRRLMTVPGVGPVVALTYRATVDVPARFKNSKAVGAVFGLTPSRHQSGESDRPGAISRCGDEMMRVMLYEAAQVMLTRTNKWSWLKAWAMKIARHRGMKKAIVALARRLAVIMHRIWVDRTEFRWTREVVAA

SEQ ID NO: 87962 - protein, 416 aa, unidentified
MRESSLSNSDNSAAGGYAIWCGVDVGKSEHHACALDRNGKRVYDRPLPNDEAALVAVLTGLQQHGKVLMVVDQPAAIGALAIAAARSLKIDVGYLPGLAMRRIADLYPGEGKTDARDAFIIADAARTMPHTLRRVGTDDETLAGLSVLAGYDDDLAAQTTRLTNRLRECLLHIHPALERLLGKHIDRLGVLDLLAAAPTPAALRDLSPEAMTELMRARSPRLATSLPAKILTALDTQTLTVPGTTDFGRVITGVAAALRDTHLERAALAADLEARLEAHPLFTVLTSMPGVGFRTALKILTIVGDGSAFPTPGHLAAYAGLAPVTRKSGTSIKGETRSQRGNHALKSALFLSAFASLGDPASRAYYDRKRAGGKRHNAAIICLARRRVDVLFAMLRDRQPYRHPALPTTNTATPAA

SEQ ID NO: 87963 - protein, 402 aa, unidentified
MNAVGIDVSKGKSMVAIMRPFGEIVSTPFEIKHTVSDIRSLVELINSVEGESRIVMEHTGRYYEVLAHQLSEANLFVSAINPKLIKDFDNDSLRKVKSDKADAVKIARYALDKWQNLKQYNVMDELRNQLKTMNRQFGFYMKHKTAMKNNLIGILDQTYPGVNTYFDSPARSDGSQKWVDFASTYWHVDCVRKMSLNAFIDHYQNWCKRKKYNFSQSKAEEIYGKAKELVPVLPKDAITKLIIKQAVDQLNSASTTVESLRTLMNETASKLPEYPVVMAMKGVGTSLGPQLMAEIGDVSRFTHKSAITAFAGVDPGVNESGTYEQKSVPTSKRGSADLRKTLFQVMDVLIKTHPQDDPVYQFLDKKRAQGKPYYVYMTAGANKFLRIYYGRVKEYLSSLPES

SEQ ID NO: 87964 - protein, 359 aa, unidentified
MLYLGIDQHRKQLTVCVRNEQGDVTLRRQVSTEWGRARAFLAGIREEADEDGFVVMLEVCGFNDWLVRLLAEYDCRELILVQPEKRSKKKTDRRDANALCEILWINRQRLLAGKRVQGVRRVKLPNQEDGEARQVTEFRKRLGQLRTRTINRIKHLLRKHNLEQECPTKGLDTIAARKWLGKLALGPMDRLEMDLLLKQWVVWDEQIKQVEAEIGKRQATHKTAAVVATIPGCAAYSSLALASRIGQIERFPRGASLANYWGLTPGCRNSGEATDRLGSITKQGSAMARFILGQLVRHVLRCDRRMKSWYQRIKKRRGSKIGRVAVMRRLATIIWHMVKYEEPYMIGGPPAARVVSPSQ

SEQ ID NO: 87965 - protein, 367 aa, unidentified
MTKSITVAVQQTRDFAEKKYTVGLDLGDGWSWYCVLDEGGDVVFEHKLSTTPKALREVFGAMPHSRVALETGTHSPWVSRLMKELGHEVIVAQASKVRLMGESRKKDDRLDARTLARLARIDPELLGPIRHRSARAQADLIMIRARAGLVRARTALINAARGLTKSYGERLRGCNPRNMEAEKRKGLSAELQLALEPLLRAIESLSQQILDYNKRIEQMARDSYPEVARLRQVKGVGTLIALTYVLRLEDPQRFRKSREAGCYVGLQPGRRNSGSSTPQLHIRKEGDPYLRTLLVQGAQHILGPFGVDSDLRRWGLKLAERGGKNGKKRAVIAVARKLAVLLHRLWVSGEAYEPLRNQRAVELPAAA

SEQ ID NO: 87966 - protein, 424 aa, unidentified
MDKEIDPLKKNSKSPRKKEQTSKRTRLERPVQRKTKEVLAELVDKLRGKLERKATSASPGEAGPRAELRPNLDRLRVGVDLGDQKSQYCILGLEGETLSEGQVGTTQADVAEFFGAIVAARVVIEVGTHSAWVQEIIAGCGHEVLVANPRLMEGSRRRKRKNDRIDANKLARLGRVDPQSLHPIKHRSREARQDLVLLRARDALVAVRTELINTTRGLVKSMGTRLPRCSSRSFGHKAGAAIPEAVREALQPLVQLAEGLSACIAGYDRRIEELASQKYGHTKMLRQVKGVGPLTALAYVLTLENAERFSKSRSVGPYLGLVPKQEDSGESQPQLGISKAGDTMLRKLLVGSAQYILGPFGPDTDLRRYGLRLCERGGKNAKKRAVVAVARKLAVLLPRLWVTGEVYEPLDYRASGTMTQPAAA

SEQ ID NO: 87967 - protein, 329 aa, unidentified
MAVSPTWIGIDVSKAELVLARAGQRTPWTEPNTAAGHAAIVRRISAGGAPHVVLEATGQWHRDLCDALANAGIPYTQVDGYKLRSVARSQGQRWKTDAADAQLLVTYGVTLAPAATPPRPAVLRRLATLVARRDDLIGDRTREKNRRKSTTDAVVIASAARIERLLTMEIRTMDQLIAETIAADPACAARYALLTSVPGWGFVTAATLIALLPELGTLSRKQLNALVGIAPYTQDSGVYKGLRRIAGGRALVRKALYVAVHCGATLCKNPVIRTSVTTLQARGKPYKVAIVATMNRLLGIVNAMIRDNLRWEDTAASQGLGTRPARSCP

SEQ ID NO: 87968 - protein, 304 aa, unidentified
MNAKTYGLDVAKRVFQMYWVDAQTGEIVNRRFGRDELIRFLAQRPAGRVALEACGSGHWWARKIKAVGHEVVLLHAKFIRPFVQTNKTDAADARAIWTAVQQPEMRTVAAKTEDQQAMLSLHRMRALLVKFRTMQVNQLRGLLYEFGATFRAGRVAGLAEIRARMVELEEALPGTLIGSLQDQLQRIEALEQDINRLEQQIGAWQKQEAACRAIAAVPGIGKLTATALVATMGDAKTFKSGREFASFLGLVPRQSGTGGKIRLGSISKRGDPYLRTLLIHGARSVLYHAKVPTPWQRDSGTTTG

SEQ ID NO: 87969 - protein, 422 aa, unidentified
MKQEQKRRCCGMDIHKDTIVVCVLPAGRGEGSALRKTYRSFRNDLIRMRTWLRQLQVTDIAMESTGVYWRPVWNVLEDEGFRLLLVNPAQVKALAGRKSDGRDCKRIAEYLQDGRLDGSFVPPKEIRELRQLVRHRISLLEERNEVHNQIRDLFETASLKLSSVATNLMGVSGRRIIEAMIAGEDSAELLSWKVKGRLRAKEQEVREAMKGFFNDFHRDMLASFYEHYKFLTSQIEKFEARIAERMKPHQERIELLSGIPGVDKVVAWHLIAELGTDMSVFPSAGHCASWAGLVPGENESAGKKKSMRCRKGNKVLRRILSQAAWGASRKKRSYLRTFFYRIRARQGASKAVMALAHKILVIAYQMLKTNTPYQELGGDYFDRLNAEKVARQCIRKLESLGLKVQVISQGGVESVSPGLSTH

SEQ ID NO: 87970 - protein, 356 aa, unidentified
MSRDIKYIGMDVHQEAIVIAVLNGSGKLVMETILETKASSLVQFLQGLRGELHVTWEEGTWAAWLYDLLQPQVEQVLVCNPRRNALLKEGNKSDKVDARKLAELLRTGMLRPVYHGENGLRTLRELGRSYQTISKDLTRVMNRLKALYRGWGIACAGTKVYAPRYREEWLSKIAQAGVRRRAELLYQQLDGLQALRRSLRPEFLAESRKHKATKLLRQIPCIGPIRAARLIALMQTPYRFRSKRQLWTYSGLGIETHDSAQYRYVGGQLQRSKKPQQLRGLNRNHNHEMKEIFKSTATRASCSKGPFHDFYAALLAKGMKPEMARLTLARKIAAITLTLWKKGGRFDAEQLKTQAA

SEQ ID NO: 87971 - protein, 381 aa, unidentified
MTTAATHHAQSHTTEATLFVAFELSEKTWKLGFTTGHGQKPRERTVTARHHEHVLNEIAQAKRRLGLPDTAPVVSCYEAGREGFWLHRFLQARGITNHVVDSSSIEVNRRRRRAKSDGLDVRKLLSMLMRYAQGERQVWQVVKVPAVEAEDHRHLHRDLETLKQERASTTTRIQGLLSSQGIRLTSLSKLPEQLEALRLWDGSPIPPGLRRRVLRVYAHHTFLSEQIAEVEAERRAQLQTSTEAHIDKVRQLMQLKGIGINGAWLLVMEFFGWRAFKNRREVGGLAGFTPTPYQSGESAREQGITKAGNRHVRWMTTELAWSWLRFQPDSALSCWFRERFGSGGKRLRRIGIVAVARKLLIALWRFLETGVFPAGAVLKEG

SEQ ID NO: 87972 - protein, 386 aa, unidentified
MQTVADQSEAPTAIRTNLGAIFVSLELSRSTWLITSLSPAGGEKMSKHVVRGGDVAGLLERFAQLREKTRARTGKVFPFVVIQEAGLDGFWIDRVLQNEAIESHVVDPASIATSRRRRRAKTDRIDGEALVRALLAYKRGEPRVCAMVKAPTPKEEDRRRLCRERKVLIAERVRHVNRVKGLLFSQGISGYEPLRRDRRERLDTLQTGDGRLLPDHLKAQVRRELDRLELLLDQIKAVEAERDVLLAAQQAPAPAAMLLDIKGIGPEFAAILWSEGLFRHFDNRRQVASYAGLAPTPWQSGSVDREQGVSKAGNPRLRTTLIQLAWLWLRHQPQSALALWFEERVRRNGGRLKKKTIVALARKLLIALWKYVTAGVLIEGAVMKAA

SEQ ID NO: 87973 - protein, 390 aa, unidentified
MFYLGIDIGKFHHAAALMDQRGKVIATLPSFPNTRSGFHKLLALITAHLPPAEELRIGMEATGPYWIPLAEWLKAHGWIPVILNPIKTASLRNYGVRGSKTDNIDSVLIANTLRIEEEQPQQASPKLSEELRHFTRLRADMVKDRTRIALRVTSLLDRLFPELLSSFSKTLAPSCLTLLAAAPTPARVLALGEERLTTLLRKASGGKLKATRAKEIMDKAAVSVGITTQASEEVLALLLEQINLIGSQLTTLDHRITKLYKQAGLYFTSIAGVGTLTAGTILGEFGSVTRFTQAKQMVAFAGVDPKLRASGQHQGQVHISKRGSPYLCRALYLACQGAVRNDDYFHSIYQRHRDNGKSYKEAIIAVMNRFIHVLYAIWRDNRPYYPLTSA

SEQ ID NO: 87974 - protein, 403 aa, unidentified
MIFVGNDWAEDHHDIHVMNTDGSKIAARRFPEGVAGISDFHALIAQHATDPAEVVVGIETDHGLWVASLVGAGYQVYAINPKAVARYRDRHHVGGAKSDAGDAKVLADLVRTDAHNHRVLAGDSSAVQAVKVLARAQQALVWSRNREVNRLRNALREFYPTALDAFEDLHARDALAVLGRAPDPAGGARLTLSQVKAALRAGGRRRNLDATAEKIQAVLRAKQLHAPAAVAAAYAVVVKAQVGVITALNTQLADLETELEQSFEQHPDANIILSLPGLGDILGARVLGEFGDDPERFADAKSRRNYAGTSPLTVASGKKRAVLARHARNQRLYDAIDQWAFCSLQASSGARTLYDHRRDAGDTHHQALRALGNRWVGILHGCLKHRSTYDEHTAWGHRQPAAA

SEQ ID NO: 87975 - protein, 365 aa, unidentified
MQKISTMRTSGKNIFQGQLTIGLDLGDRSSAYCVLNEAGEIVLEHKLATTPEAMKQVFGSLPRCRIAMETGTHSPWVSRLLTALGHEVIVGHAQKVRLITKSRRKDDRLDARTLARLARIDPALLSPVKHRSAQAQLHLTEIRARAVLVSARTALVNAARGLVKSYGERLRKCGTQQFGRETTSGLSTGLREALEPLLREVESLNERIQEYDRRIEKMAKQTYPETALLKQVKGVGDLIATTYVLTLEDPHRFRKSRDAGCFVGLQPGRRNSGESEPQMRISKEGDEYLRTLLVQGAHYILGPFGKDSDLRRWGQKLSARGGKNAKKRAVVAVARKLAVLLHRLWVSGEVYEPLRNSRKAMSAAA

SEQ ID NO: 87976 - protein, 361 aa, unidentified
MGYERIIALDLGKFKTVACVLEPATREHRFETIAMSPSELHELLAGSVTPSPRHTLVVFETCDTAGWVHDVCSVLGVSTICTHGNGQAWQWRRVKRKTDRDDALKLARLALMDQLPAVHVPAPQQRQKRRLILHRRSVVSRRTASRNAIRSIFNQQGLTLVRGNKQWTRTGIEQLREHARPIADCEVIDLWRGRLQVELQLIEAVDQQLKQIDAKLDELSKGDERVKLLQTIKGVGPRTAEAVVLHLDDPNRFKSADEVANYAGLVPRQLESGQMSRYGHITRRGPALLRSMMVEAAWVVWRHNDWAQAWVQKISRGSRARRKIAIVALARKLLTILWSMLKHNTPFRSPDCRPAAAALTT

SEQ ID NO: 87977 - protein, 338 aa, unidentified
MKTYFGVDYHKKFSHGTIMTESGKILKQGRFSNQPESVARFLDGYGDGECFSVLEATRNWTVMHDILEDLTSDVTLAHPLKVRAIAEAKIKTDKISSTTLADLLRCDLVPAAYVCSPRARVIKNLLRHRMFLVRLQTMVKNRIHVLLDRHPETSQQRSASGLFTKTGISELRQLELPRYDHHILNSELDLLEQLQEQIKQADRWLTEVGKKDKRVKHLMSIPGIGRAFALLIVSEIDDVGRFRTDKKLHAYAGLVPSTYSSGGHTFHGRITKTGNKYLRWALVEAVWPAIQKDVSLNQYYRRIAHRKGANPAKIATARRLLTIVYKLLKENRRYHYGA

SEQ ID NO: 87978 - protein, 451 aa, unidentified
MLIQGSSDPPQLVRVGIDAAVVAQHEVCIRATDAQGRVRTDRFRVQPTLAGLRSLSNRLAEMPGVVAVAEPTSMTWLGLSVALRNAGCDLSLLGARHAARLRGAISGKHKSDVIDADVLARAGEVFDLHPLRPVDPGQLALRRACVRRGAAVIDGNRHLRRLISLARWAFPDVWNGFRGSLPTAVAVLDRWPHLAQLAATRRSTLTAVVALHTRGVADVPDRVEAIRSAAAAWAAFWAGHLDLDALSFDVTEHLTDMADAKARTQRATGQAQRYWRQLYGDDELLLSVPGMGPVTASVIRGFLADGTGFASGKAAASYVGLNPSTWSSGTVSQPSRAITKEGPAVLRLAFFQAANAARRQDPQLAGFYHQLMTEHGHCHTQACVAVARKLVERTWTVLSRGTPYQIRDLDGQPISRLEAKKMIKQVCTVPDQVRAKARAHSAATNRAKLTR

SEQ ID NO: 87979 - protein, 342 aa, unidentified
MKFYCGIDLSARDCHVCVIDEQLKVMVQQKLRNELPKICQLLAPYQGNLKIVVESTFNWYWLIDGLQAAGFEVMLAHTLGLYLITGAKVKTDRRDAYSLAKLLLVGAVPAAYIYPVETRPVRDLLRRRARLVQVRAGEYGSLRRLLLRQGILSSKQQEIKTASETELEQWFEHPLVRLHASQELRRIELYSQQIAELEKTILELAKPERSYQLLLQLPGVGQTIALTILYEVGELTRFANVKVFSSYCRVVPGIAQSGNVTRRGRASKQGNHYLKAAFSQAAVHAVRCYPKVRRYYERQLKRHQGRGRQMICYNIIAHKLAQAAFHVLKEQTEYREELLFGR

SEQ ID NO: 87980 - protein, 342 aa, unidentified
MTIVTVGIDLAKNVFAVHGVDAAGKPVLVRPSVARDKLLELIASLPPCLIGMEACSGAHHLAREFDKLGHTARLMAPKFVAPYRLSGKRGKNDAADAAAICEAVTRPQMRFVPLKSADQQGQLMVHRARQGFIEQRTATLNRIRGLLSELGIVLPLKAATVRRQALQHLEDLPGWANTVIGDLLSEVSHLDERIAQYDRHIGLMARHSTQAQHLMQLAGIGETTATAIVSTVGNGHDFVCGRSFSAWLGLVPGQYSSGGKQRLGRITKAGDAYLRSLLVMGARVVLAAAMNSKAPKQDPLSRWARALAERRGYWRAVVAIAAKNARLCWAVLQRGDNFKIPA

SEQ ID NO: 87981 - protein, 349 aa, unidentified
MLADELDFVVGVDTHRDRHMLSVVAAPTGAVVAQRSVAASGRGYVQALRFANEQAQGARVWAIEGAGHYGAGLARYLSGRREAVLEAGRSPRGERRLQGKDDGLDATRAARAALGNDELALPRAGQRREALRLLLVARRSAVEVRRRGLVQLRSVIVTAPDRLREELQALPERRLLERCSHFRRSSSLPVDELAAKLVLRTLARRIEAATAEANELEREILAHIRALAPRLLDEAGIGPIVAADVIVAWSHPGRVRSEAAFARLAGVAPVPASSGQTIRHRLSRGGDRQLNRALHTIVLQRRQHDATTQAYIARRVAEGKTRRDATRLLKRYLARHLYRLLQQTEPLMT

SEQ ID NO: 87982 - protein, 345 aa, unidentified
MRFYNKQHKYYCGIDLHTKTMYVCIIDQEGTILVHQNLKAEPESLSKSIAPYLPDIAIAAECIFTWYWLADFCALHQIPFILGHALYMKAIHGSKTKNDRIDSQKIALLLKSGMLPQAYTYPAEMRATRDLLRRRMHFTQFRAELIAHIQNTRHQCNMPDFYQKIAYKSNRKGIVELFDEPSVQKNVQCDFEVMKTLDQTIADIELFITQQVKEHNPNDYVILQSFPGIGKVLALVILYEIHDINRFPKVQDFASYARLIKPRKESAGKTYSGSNRKIGNRFLKWAFSEAAILLIRESDEIKKYHQSLKNKHGKAKALAILAHRTGRTVYFMLKNKQAFDMKRFI

SEQ ID NO: 87983 - protein, 340 aa, unidentified
METRGKKHVWVGLDVSKETFFAAVDILDEDGGKKPVNCLSTKEFELTEIGSGSFLEWVSQSFAEYDFSIVMESTGCYSKRLKEFLHEKQSDLPISILNGRQSSNYMKSLGTLHKTDKGDAQALARFGTERSPKPALPDDPVRTSLKELSRERSALLKAKAALENRSDSLFAAFTKDINNRAIVALNLQISAIEKEMERCIKANAELRHEAELMKTVPGVGLTSAYGFLAELGSLKQYSSRRLSSLSGLLPHVFISGTSVNKSCLSKRGSSRVRQLLYLDCMTAVDKIPELNAQYQNLVSRGKAKMTARCACMRKLLLIIRAVVVEDRPYEKNPKKMTKTA

SEQ ID NO: 87984 - protein, 370 aa, unidentified
MAQPTPLFVGLDVHKDSIAVAHAQGQSADPPVFVGAIGPRQADLDKLVRRLQAKTPDLVFAYEAGPCGYGLHRYLTGQGFRCQVVAPSLIPKKPGDKVKTDRRDAVDLARLLRSGDLTRVYVPTVEDEALRDLCRARDAAVITLKNAKLRLKAFLLRLGRHYVGRADWTEAHRRYLAKVVCPTPTQQIVFQESVRAVDEQVDRVHRLEAELLERAPAWRLYPVVQALQALRGVQWLVAITVVAELGDLTRFDSPRQLAAFVGLIPSEYSSGPARRLGGITKAGNGRARRALIEGAWAYRHPAKVSEHIQRRIDALPKPIQDIGWKAQVRLCKRFRRLVARGKHPNVAVTAIARELIAFMWAIAKVVPVTV

SEQ ID NO: 87985 - protein, 428 aa, unidentified
MIPAVIERCAGIDVHKKFVMVCVLIGPADSNPTPQIRRFSTFNAELERLRKWLLELQCNRVAMESTGPYWKPVFNVLEEAGIEMVLANPQQVKNLRGHKTDPKDAHWLAHLFRHGMIRPSYIPPKPIRELRDLTRRRKQLVRNGAMERNRVQKLLEEANVKLGSVLSDVFGASGQNMVEALMKGEATAEQIAQLAQRRARKKIPEIQKSIEGHRLNQTHRDLMQQCMTHLAFLEEQIEEIDQQIQNKIRSYGLSEAYELLQTVPGMQAEAAATVLAEVGDDVQAFPSAAKLSSWAGVCPGNNESAGKRKSSHTTKGNPYLREVLLECAWASSRKKNSQMQHRYRRLLGRRGKKRAAVAVAHALVQAVYYVLSTRKPFVDTAEPPRSPGQVRRLVRHHTRRLRKLDCWTRRTKSDNKGNSMAQNQQTSG

SEQ ID NO: 87986 - protein, 356 aa, unidentified
MKTRIPQVLRQTFTIGLDLGDKSSAYCVLDAEGTAISEQTVRTTPKALSDCFGSMAIGRIALETGTHSPWVSRLLSGIGHEVIVANARHVRLIAQSRQKDDRLDARTLARLARVDPKLLSPVTHRSAQAQADLSLIRARAGLVRSRATLINMARGLVKTNGERLQGSSSRIIKSDVSMDLSPALRVSMEPVLASIKALTLQIREYNRKIIELGKTSYPEVALLTQVHGVGPLVALTYILTLEDPHRFEKSRDAGCYIGLQPARRNSGTCQPQLHITKQGDPYLRSLLIESAHHILGPFGVDSDLRRWGLTLASRGAALGKKRALVGVARKLAVVLHHLWATGEVYQPLHQTTAAAK

SEQ ID NO: 87987 - protein, 379 aa, unidentified
MDHAITGTPAETILHGALELSKNSWLLALQFPDRAQPSLYPISGGDTEGLMAKLTAAGDRWAKMSGKAPSIVLCYEAGYDAFWLARFLKARGIECLVVDPASMQVNRRARRAKTDRIDVGMLLRALIAWGQGDRHVWSVVRVPSVDEEDLRRSHRERDRLVRERTAHINRIKGLLFGQGIRGINVKSKYKTLQIDKLVTGDGCPLPPRLASEITREIVRLALIQEQIATLERERDQAPTPCKATEKKRVQLMCLTGIGPAIAAVLTREVYYRQFDNRRQVAGFLGLATSPHDSGDVERSQGISRAGRGQVRGTMIQAAWLWLKHQPKSAITRWFVQRTAGQSGRIRRIMIVAVARKLAIALWRFLEQGLVPQGAMLANR

SEQ ID NO: 87988 - protein, 391 aa, unidentified
MIVVGIDIASMKHDYFMIQADTGVVFSGSSITVTNSEEGYKKLHGDIQAFCGATGDQEIRIGLESTGIYHTNIIAFLIAKGYQVMMINPILTNMVRKASKVHAPKNDNLDSQTICKYMIDNPDKFLPYTLSLYKFQTLKSICRKRFFIVDELRKAKIVVNNLVHIIFPEFKSLFSNIYGTSAISILKEYGTPKKLSKARRTKLEEMLHGRCKCSIDDILEAAKHSVGISDECYAFELTDAIEEMEHIQHRVEKYDAQIKLLVDELCPNLLSVPGIGYTTAGLIAGEIGNIKRFHSAESLVSFSGLDVVVYESGKYKSKNLMPSKKGSRYLRYALFQVARIIWQHDPVYKAYYEKKQAEGKHYFVIMGHIEKKLCRLVFSLMNSGNSYELRS

SEQ ID NO: 87989 - protein, 356 aa, unidentified
MPMNTKSNSISFKNQTFNIGIDVHKKSWKVTIRTNNLHLKTYSMDPVPAELYKHMKNTYPDGIYQSVYESGFCGYWIHRELAALGFQNIITNAADVPTSHKEKDRKDDYIDSAKLSRELENKSLNGIYILTTYQESLRSLSRFLKQYSKRNTQVKTRIKSFLAFLGATVPEALTISDWSRNYIKWLSELNFTEDANRFVLDEHIEELEHIRKKRLKLLKQIRTISKTISTISLLRTIPGLGQITAFALYTELIDIKRFSDFSSLASYVGLVPSTSSSAEKMTVKGMTQRHNSHLRNILIEAAWIAARVDPAMTLAYNTLTKRMKKTRAIIQIAKKLLNRIRYVWLHQKEYVPAVVE

SEQ ID NO: 87990 - protein, 372 aa, unidentified
MNYNTVYVGMDVHKKSFSLCAYTIEAEKASHYQRTEADYKKVLNYLEFLRTIYGDNANFICGYEAGCLGYTLYHQLTANNIKCIILAPTTMLEQRSKKRIKTDKRDAEIIAKCLAQHNYSPVHIPTAKDEETKEFLRMRDDHKLALKKVKQQILAFCLRHNYRYDGNSHWTAAHLKWLKALTPEALYKEILDEYLLTYQTLSDKLERLDKRIEELSTQDEYKEAVKKLCCFIGVKTHTALSVLVEVGDFKRFASAQRFASYLGLVPGEDSSGDDQNRLGITKAGNRHVRLLLTESSQCYARGQVGFKSKELKARQSGNTPAVIAYADKANERLRRRYYKMVLNKCKKHNVAKTAIARELACFMWGMMTDNIA

SEQ ID NO: 87991 - protein, 423 aa, unidentified
MSNSILCVGADVHLDEIVLRAVDKADGHEVIERFRVTNNLPGAEAAATVIAQASTELGYTHLQIGWEATGMLWIPFHRHLSSNILLQPFESTFICFNPQLVAKFGEGLVLRKPKNDDRSAFDIAVRLRFGELPVSYLPSDFWQGLRRLTRYRYRLSRNLSREKMRFQSYSFLKCSDWKRVKPFSDVFGATSIALLTECTTAELKAMTHDQLADLIRHRGRHRFYDPHATARAVQQALRSSYPIEPQMDEMVTAALAAGWDHIRFIKRSMKRLDKLIARHIDPVPNPIITVKGLGSVITAGILAEIVDISRFPEHKHLAQYVGLTWEKRSSGRFVSQNTRLTKVGNSYLRYYLVLGSNTLRQFNLEYKAYYWRKYNEVSKYQHKRALVLTARKLVRLVHALLTKNVPYVRPRTPNSPMEDVALQ

SEQ ID NO: 87992 - protein, 356 aa, unidentified
MGLYAGCDLHAKSNYWGVVDGEGKRVFKKKLRNDAGAILEMLRGMGGDLVGVVVESTFNWYWLVDVLMEGGYWVHLANPTKMQKYSGMKYVDDEDDAFWLAEMLRLGVLPEGYIYPKEERPIRDLLRKRGHLVRVRTSVLLSLKNIVSRNCGKGVKSYILKGGKGVGGLLEGNEDLALAGQVSKEVIDYLSGKIEGVEKAILGRAEIRESYGGLLTLPGVGKILGLTIRLETGPIGRFGDVGNYVSYCRKVPSRWLSDGKWKGQGNRKNGNRYLAWAFSEAAELARRFHAEPRAYYQRKMAQTNAAVAHSALAHKLARVAYYILRDGVRYEPEKLFGSNRAGAESLKGGLAKSHET

SEQ ID NO: 87993 - protein, 371 aa, unidentified
MKSIIYIGMDVHKKTYSLCALLKETGEIIGETKIPADVSLIIKFIENAKKSVDSDDVQIKTGYEAGCLGYSLYWQLAEKGIECDILAPSTMHRSAKNKVVKNDRRDAKNIATNLANGTYKSVYVPTDEDVEIKEYIRMMHDFKIELKKVKQHINAFLLRFGHHYPGKSKWIPAHIKWLKELELSDMYREILDEYLSQLEILTEKIERFKYRLEELSQKETYNEKIGQLRCIKGIDTTAAMTMHAETSDFDRFPTANAFASYCGLTPGEDSSGESYHRLSITKQGNSMIRTTLIEAAQVLVRGTIGKKGKKVKSKQKDQDVKVIDYADKAVIRLQKKYHRMIFRGVKRNIAITAVARELACFVWGIETGHIS

SEQ ID NO: 87994 - protein, 340 aa, unidentified
MDVRTLGIDLAKNLFHVHGVDGQGRTVVQRQLRRRQLLPFVAQLQPCLVAMEACGGAHYWAREIAKRGHEVRLMSPRFVRPYVKSNKNDARDAEAICEAVGRPSMRFVAVKSQAQQDMLALHRVRSLLIRERTALMNQMRGLLAEYGIVVAQGAAPLRRALALILEDRDNGVSELMRELLGEMSERLRLSEHRLKGYDRRVAEFARADERAGRLMAVEGVGPLTATALIAAVGNARQFRSGRELSAWLGLVPRQHSSGGRSVLLGISKRGDRYLRTLLIHGARAALRFAVRKRDPRSRWIGAVRERRGANIAAVALANKNARVLWALLAHNEDYQAPAAA

SEQ ID NO: 87995 - protein, 339 aa, unidentified
MKIVAVFVGLDYHQDGVQVCVMDGEGQVLGNRKVRNSVAPIVAAIRRWGPPAAVAIEACCGAADLAEKLHQEAGWSVSLAHPGFVARMKQNPDKTDYGDARLLADLLRVGYLPKVWLAPEEIRRLRRLVRYRGQLVDRRRNVKLRIRALLRENRLRCPWQVSAWTQRWLKWLSQTEELGADDRWLMDRHLEELTRLNNLVEEAEARLKGWAVDDAVIQKLMSFHGIGLITAVTMRAEIGRFDRFQSGKQLARFCGLCPRNASSGERQADAGLIRAGNPQLRRVLMQLGQRLACRQDGRWAGLVCRLLRRGKPRNVVVAAVANRYVRWLYHQMQPEQLAT

SEQ ID NO: 87996 - protein, 390 aa, unidentified
MYYCGIDVAKRKHAIALLDEHGQPVQRPFTIENTRAGFDHLLHALAQLQGPVLIGLEATGHYWWALYEDLTRHDHPVVVLNALQVHAFRKSGVRKVKSDRTDASWIAEFLRFSQPEPAQPTTAVFLQLKEVSRFRYHLSDQIGDCKRKLLSILDRVFPEYETLFSSVFLNSSRQLLAKAASAQELATFDLAELTEFLKTSSRSRFGRTKAETVQTVARQSVGVRFLADAAQLEVRCLLAQIDLLEEQRAQVDGALAQLMDQIPQHLTSIPGVGPTTGAALLAELGDVQRFDAPEKLVAYAGIDATVYQTGQFEARQMHMSKRGSPYLRHALWQAASMAIQYDDELRVYYDHKRQEGKSHGTALGAVCRKLLTRVYIILKENRPYEVRTKH

SEQ ID NO: 87997 - protein, 355 aa, unidentified
MERYIGMDVHAASCTLAVISETGRKLRDFPVETNGQALVEAVRMIPGRKHLVFEEGLQSAWLYETLSPHVEEIVVAGITESRGPKSDKRDAYGLAEKLRVGNLDKSVFKAPRQFARLRELSRIHMTLVGDVVRVQSRIKSLYRSRGILVSGVNVYGVRPREDWQKQLGSSAQTRAMRLYDHLDFLLEQKKQAESDLLREASKHAIVRILETAPGFGPIRSARLVPIVVTPHRFRTKRQFWSYCGLGLVTRSSADWIQTSDGSWVKARVPQTRGLSRQHNRFLKYLFKGAATTVITQRNKDPIHARYERLLDGGTKPTLAKLSLARMIAATVLRMWKDEEEYDPERAGLPSKTREG

SEQ ID NO: 87998 - protein, 344 aa, unidentified
MNHYAGIDVSLESSTICVVDGTGKILRETKVASEPEALIAWFRSSGLALERIGLEAGPLSQWLYAALREAGFAVELLETRHVRDAFKSMPVKSDRNDARGIAQLMRLGWFRPVHCKSIEAQETRAVLTARKLLQSKLRDIENSLRGVLRGFGLKVGKTTELTFAARIRELVAGHPRLELVAKALLEAHAVLRREFNGLDKHTQKLARSHPQARLLMTTPSVGPIVALTYASAIDDPKRFGSSKATGAHFGLTPKKYQSGQTDYTGRISKIGDASVREALYQAAHVMLTKPIKGCSALKSWAMRIAKRAGMRKAKVALARKLAVILHRMLADAKPFNPTAKAAAT

SEQ ID NO: 87999 - protein, 416 aa, unidentified
MKKQSKHNFIYVGVDLHKSTHTAVIINSENEKLGEITIENRVPEFSKLIKFVDKKNKEGLTPVFGLEDVGGNGRSLAVYLCQNQYTVKAVNAALATSLRKSRPHSIKSDSWDAQCVAKVLYDEIWNLPDADPQDIYFTIGQVVGSRMNMMKSFTILRHQLHTQLAYNYPKYQSFFSDMFGKGAMAFWNEYPSPRHLKNVSEEELTLFLRKASKNSLSTKKAKAIKELVEQGGDTERENQEYFDFLIREYIAEAKYKQDALQRYDEQLKSLMNQLDYKLETMPGIDTLTAAKIVAEIQDINRFSSADKLARYAGIAPVPYSSGGNHRMRKSKQGNRVLNQIFYMLALQQIQMSKKGDPRNPLARQYYDRKKEEGKTRMQAQVCVMRLMVNIIYSMMKKKTPYRQPEPVTEVPQKLAS

SEQ ID NO: 88000 - protein, 340 aa, unidentified
MKITILGIDLAKNVFRLHGVDAEGRPVLRKQLRRAQLLPFMRQLTPCLVGLEACHSAHYWGRELEKLGHAVRLMNPRFIKPYLKGEKNDANDAAAICEAVSRPSMRFVPVKNPAQQDIQALHRVREQLIRNRTALVNQARGLLGENGIVVAQGIGRLRQALPSLLEDPDNRLSGLFREMLGEMAERLRWLDDRCRRYEQRIEQLFRTDERAQRLGQIEGVGPFAATALLAAVGNAREFKSGRELAAWLGLVPRQHSSGGRNVLLGINKRGDRYLRTLLIHGARSALRVAERRRDQRSIWACRLKLRRGPNVAAVALANKNVRVMWAMLTRGEDYHRPAAA

SEQ ID NO: 88001 - protein, 343 aa, unidentified
MKIIRVGVDLAKNVFHIHGVDRKGNPVWRRRLIREKWLKVLLAQIEPGCEIGMEACTGAHHWARLLQARGFTVKLIAPQFVKPYVKSNKNDAKDAEAICEAMSRPGMRYVGVKTVEQQDIQAMHRIRSELIGQRTAKANQIRGLVAEYGLVAPQQLGRLRAAIPGWLEDAENGLTMQFRELLQGLWNDLLTLDERVGELDREISRIAQSDPVATRLQQLRGVGPMVATALVAAVGNARHYGKGRQMAASLGLTPRQHSTGGKDRLFGISKRGDAYLRSLLIHGARAVVSQAKHKDDRLSRWVTAIAQRRHPNVAAVALANKTVRMAWVMIRKEKDYDPGFVVT

SEQ ID NO: 88002 - protein, 315 aa, unidentified
MAMPVLVSKPIVGVHVAKNELVIYQAEFDLLEAIPNTKAAIKQWLKALPGTVAIAIEATNIYHLEFADLAYEAGCTIYMVGGYELSHYRKGVKVRAKTDALDAKLLARYLKNEAEDLHPWTPPTPLYRQLLSLFRRRAALVQARVGLVQSWANEPLLKAAFAEQVKSMQQLEVLVEKTIKDHLKEAGLLGQLKRCLKVEGIGFLTGARLIAAFQRGDFRNANAFIAFLGMDLRVAKSGQKDCRRSLSKRGDPEARRLLHNAAMSASRTAAWKGFYEAQRARGFSTTQALVMLARKLARVVFALLNGQSEYQPKTN

SEQ ID NO: 88003 - protein, 407 aa, unidentified
MEVVYRCCCGIDVHKKVIVACLVNGGKQELREFGTTTSEIKTLANWLTESGCEMIAMESTGVFWKPLYNLFELMDLDAMIVNAAHMKALPGRKTDVKDAEWIADLLRHGLLKASYIPNREQRELREITRYRKSLTEERCREVNRLQKILEGANIKLDSVVKDITGKSARKLLQRIIDDDIPDSDEVSKLVHGRMRPKLDQIVASIEGITTPLQRKLLAQIIDHIDDLNRRIGELDKLVQEYMAEYEAAIEAIDEIPGIARRSAEVILAEIGLDMGRFPSAAHLCSWAGVCPGNYQSAGRRKHGKTTKGNKALKTILTQCAKSAKTVKSSYFFAQYQRISARRGKNRATLAVAHSMLIAIYHILKNKTAFHDLGSDYYDSFNRDRKINSYLKRLKALGWEPDAIPSSA

SEQ ID NO: 88004 - protein, 310 aa, unidentified
MNSLKETLSVVYTGLDIAKATLQLDLLGRAHSLPNTAAGHRQLVKLLRAVPGAHVVCEATGGYERAVVAALQAGPVPVSVLNPALVRHFALAQGQRAKNDPLDAGVLSAYGAALQPAATPLPDAALAQLRALVQWRNQLVEQRNALRNHAEHATLDFVEQGLARLEAHLDEQMEAVETEMAAALERAPQWQEPVARLEALDGVGRLTAVSVLSQMPELGQLNRGEAAALAGLAPWTRQSGPWEGQRHIGGGRAPVRRALYMSAVALARMKESTLGKFYAKLRAAGKPAKVALTAVMRKLLVQMNHELKPS

SEQ ID NO: 88005 - protein, 342 aa, unidentified
MSAAFIGLDLAKSVFQVHGVDVDGKVVVTKRLRRGAVLAFFANLAPCVVGMEACAGSHFWAREITRLGHTVRLMAPQYVKAYVKRQKNDRADAEAICEAVQRPSMRFVAVKSEEQQGTLAIHRVRETLVGQKTQLINALRAHLAEFGVVAPQGAGKVSQLTAVVADLEDTRVPSLARSALQGLVDQLRDTERRVEELDVRLAEQAKADKVCQRLTTIPGIGPITATALTATIGDATVFESGRHLAAWLGLVPRQNSSGGRERLGGISKAGDGYLRRLLVHGARAVMRWHGKTSPWLAGLLKRRPFNVAVVALANKLARIAWAVMARGEDYRKPEAAAEPAQG

SEQ ID NO: 88006 - protein, 482 aa, unidentified
MKKRNIFQNQSQEILAIFEMAGNRSKVMCVPMDYAKKDHVVMFCNGNGKILRKPFSVKNSPEGKNYLIDQVTKSCLHHGIKPEHIFYGGEDCGSYADNFIFALRSESCLVAGVNAHDAKKQRENMQASTDRLDLMGICKMLVSCRGNCSPAQSGIYWNLRTLVRQRRKLVSISTAVRCRIHTIVDRIFPGFLNEKKSGVFPFSKGSLALMENKFSVHQIRRRKPSSLSKFLARHLVHHPDRCTEKLQKYASQVLLPPADHIAALQISLEMQVTLLNCLQDNIDHLNKEIAHSLAQTPGAFLTSIRGIGITLAAGVTAEIGDPYKQKSLSNLVSYSGIIPKVKQTGGAQGKTRVKKVAKRCNRILKNYVVQSAGHIGMFGPDDLKSDYKRRDAQGQHADFGMSRRFLRMAISMMKTSQTYLPKSLRENTAKMGDRAGYYLSTWPKLTEKWHKVQALDIAFDKSMPLGQWRNIVQELYEIELSL

SEQ ID NO: 88007 - protein, 296 aa, unidentified
MYVGLDLHKVTINATVMDENGNVLNEVKIKSEPDSLRNFSDSIPFGSDIVIESSSTWYWAYRILSERHNVTLSNPLKTKAIAESKVKTDKVDSLTLANLLRGGYIAESYIPPRELMQLREMVRYRASLVRVRSIIKNRIHAHLLMYNIKIDGTPFTKEFIKTLRELNDYKINGYLNVLEVLNKEIDDISNRIKEIANDNEDAKLLMSIPGISFYSALFIISEIGDINRFPDSGHLVSYAIAPSTRSSGNKVYHGPITKQGSSYLRWILTQVTWANIRKEPNGTVGNFLPQEEKGKR

SEQ ID NO: 88008 - protein, 313 aa, unidentified
MTAGAFVGIDVAKDTLDVHVLPTGQQLHCGTSVAEVRQLRGRLRRLRPRLVVLEATGGYGTTLAAELQDAGLAVAVVNPRQVRAFARAVGRLAKTDAIDAEVLALFAQKIEPPARPMGDAASRAMKALVARRRQLVAMRTAERNRLSRVDSVEVKDSIQTMLDTIAQQLADTDRRIHQAIKASPLWLEKAALLESVPGLGRVTAAALVAELPELGHLSRRQIAALVGVAPMNRDSGTLRGRRMVTGGRTAVRNALYMATLVATQWNPVIRTHYHRLCEAGKTKMVALVACMRKLITILNAMLRNNQSWNPRLA

SEQ ID NO: 88009 - protein, 415 aa, unidentified
MNWNENTHFAALDWAREHHDVVVLNQHGVVVDALRFDHTPAGWQEVRILLAKYPGLPVAIETNQGLTVEQLLACEVRVYPINPKSAERYRERHAPSGVKDDYRDAWTMADALRLDGGRWRPLVRLDPRIAELRLLCRDEIALIEQRTALVNQLRSALHDYYPAALEAFTDWTTPATWAFIIAFPTPEALQAAGKRRWTAFLHLHRLWRDTAQHRLDVFGRATALVGSPAAIAAKSLLAITLAQVLTALEKNLNEYRRRIASVFAQHPDHALFGSLPGTGTKIGPRLLGEIGDDRERFPDVEVLQCNAGTAPVTVQSGAKIYQRLRHSCNNTLRATVHHWANLSRQRCSWAEAYYQAHRKKGKSHACAVRCLGQRWLRILWKMWQTRTPYDEALHLRNQIKHGSWLAAEKPASPAW

SEQ ID NO: 88010 - protein, 343 aa, unidentified
MDHFAGLDVSVKETSVCIVDDTGRIVREVKVASEPECLLAVLTNPAYHFKRIGLEAGPLSQWLFSALAEAGLPVICVETRHMRAVLKAQINKTDRNDARGMAQMMRAGLYRPVHVKTLRSQKLRMLLTHRKLLQSKAIAVDNDLRGTLRNFGLKVGMVGTLKFEARIKELVENLPDLAVLVEPLLIVRRVLREQIGILHRRLLAIVRDDEVCRRLMTIPGVGPVVALTYRATVDVPARFRKSKAVGAVFGLTPIQHQSGDSDRPGGISRCGDEMMRVMLYEAAQIMLTRTNKWCWLKAWAMKIARHRGMKKAIVALARRLAIIMHRIWVDGTEFRWTREVAAA

SEQ ID NO: 88011 - protein, 343 aa, unidentified
MKLHVLGIDLGKTVFHLVGLDSTGRVVIRKKCSRTQLLAFTVNLQVDLMGMESCSGSHFLGRALPEQGHQVRLMPAQYVKPYVQTNKSDFLDAEAIAEAVQRPRMRFVPIKTEEQLDLQALHRVRERWVMRRTAVVNQIGSLLLERGLTWPKGRRYVDQQLPRILEDAELRLSGSFRVLLAQLQLELEQLTARLEQMDGVMQQTAKENEACQRLTEIPGVGPVTATALIAAVGNGSDFQKGRNLAAGMGIVPRECSTGGKQKLLGISKRGHAYLRTLFVQGARSVVQQRHKQAPGLSHWLAQLLARAHQNVVIVALANKMVRMAWAVLCKNERYRAPVLEVTT

SEQ ID NO: 88012 - protein, 425 aa, unidentified
MISIGIDVSKKKSMAFAMNEKGEVFMAPTEFEHTVEGLEVLVEKLRAMPQPLRVVLENTGYYHWPVVSHLLEAEIFVCIVNSILMNKFAKVQMRPGKTDKLDAVTICRFGLAHWNELVCCATSGETRETLRLYSRQYSEYMKMMTQQKVNFGCLLDKVMPGIQSLLCDEGGRSKLSDFVIQFWHFDRITAKSESAFSESYCKWAKKRGYHVNESKAHAIYALSQNGIPTLPCTEATRLLVTEAARVLIRLEDSVKLIILQMGQLASSLPEYDTVISMKGVGPKTAPRLIAEIGDVSRFHSAKALVAYAGLDAPPFQSGQFESKRRKISKRGDKYLRKVGYEIMLSLMSSKPKEDNAVYLFMCKKRAEGKYYLSAYMAGLTSSFIFTMPASGRYTLLLPLQLIHKHTGAAFPRCPGIPVSFSYFLS

SEQ ID NO: 88013 - protein, 376 aa, unidentified
MRDGITHVGLDVHQEEIAVAVLPTGSHECVEFRVGGDERGAGKLVRRLKQLCDGGAVECAYEAGPCGYALQRRLEAEGVGCIVVAPSLVPVKPGERVKTDRRDARKLAEHLRAGLLTAVCVPSAAQEAVRDVCRCREGVREDLMRARHRLSKMLLRRGVVYREGKNWTHKHRRWLLGLRWEHQGERVVFGDHLQAIEQIEERLRGLDAQLERLAEEEPYREPVGWLRCFRGIDTVNALTIVAELYDIVRFGSARQLMAYLGMVPSEHSSGQSRRQGGITKSGNRHVRRALVNAAWHYRHRPAVGQALRARRRGQPAPIIALADRAQQRLHRRFMHLVLHRGKLRQKAVVAVARELAGFLWAALVLYPSARTPEAAH

SEQ ID NO: 88014 - protein, 349 aa, unidentified
MDFYAGLDVSLEATNICVVDGDGKVVREAKLETDPDAIELFLAEWGIHLKRVGLEAFSYSAWLFTALAEKGLPVICIETRHAKAALNAMLNKTDRNDAKGIAQMMRTGWFRAVHVKSEAAQTLRALLVGRKALLGMVLDMENMIRGLLKPFGLKVGEISVGRFATRVHEIVAGKKELEAIVTPLLDARNAMRLQLAKLHRLALTAARSDSAVRRMMTVPGVGALVALTFRATVDDPARFKKSTNVGAHFGLTPRRYQSGQTDRIGSISKCGDELTRAMLYEAAIAILTRIHKNFKLRLWGLRLARKKGLKRAATAVARALAVLLHKIWTDGTTFRFGAGGKRGRVAAAM

SEQ ID NO: 88015 - protein, 444 aa, unidentified
MVSALSANRWMGHKARIKKCYLKPKRATLQPSNQQVKKHMPQKTCGIDIHRDLIVATILNENQQQKQTQTFQNSQDDIQNLKNWLKQQQCNQAVMESTSIYWVPLYLALEESKFEVTLANAHQVKGIPGRKTDQTDSEWLAHLLQAGLIKPSYVPTKHLRELRELTRLRVKYVQNRTQYKNRCQKVLNRVNIRLRTVLTDIFGKAGMEILNGLMEGKTIETILETTKNKQLKNRCEEIKSVAKGALSENDIFVLQQLTVTIDNINSQIRSIEARIEMLANERDVEIVSSIPGIGKRSAAAILAEIGDANRFSNSKQVASWSGLAPSIYQSAGTTVLGHITKQGSRWLRWNMVEVAHAAVRAGGRFKRMFLRIASKKGVKTAYVAVARKLLTVVWHLLVNGEKYVEEGFSKVVFKVKQSYRGQVPLETMVEVLRNAGYTVTVNSG

SEQ ID NO: 88016 - protein, 312 aa, unidentified
MTSEAFVGIDVSKRWLEVRVHGAAESKKIGNDPDGFTSLVGEMKAVQPQLIVFEATGGYESRAVKALSEAGFAVAVANPTRVRRFAEALGILAKTDKIDAQVIAHFASVVQPAANGRQTPLEEQLAAFVERRRQLLVELVAEKNRLSTCSACVREGIEEHLAWIEERVDDLEAKIHACILQKADWRARAEIIDSAPGVGPVTASTLVAGQPQLGQRRPKKIAALVGVAPFNKDSGPKRGKRRIFGGRSGVRRTLFMATLSATKHNPVIRAFYETLLKRGKEKKVALVACMRKLLVFINAMVRKGETWRFSPA

SEQ ID NO: 88017 - protein, 358 aa, unidentified
MQIHFVGLDVHKQLIVFCVMDAMGTIVSEGKVSARREALDQWVLTLPKPWCGAMEATLFSHWIFHHLAPHAAELKMGDPGRMKAISSGKKKSDQLDARMIANLLRSNLLPECFVMEPELAALRRQLRFRRTVVEQQVRSKNLIAGMLMQAGVEYEKKRLHGKKYFANLAEHNQWIDAHLQPLLRFSRAQIETMGTMDRQILRLLENHPRLRARIEALQQIEGVGPVTALTWALEVGSPKRFASIGNAVSYCGLTSALRESAGHQKRGPLSKKRNAHLQSALIECAKLAPQFNAKLAEVRQKEIDHGADANRATLEVARKLVAYLLAVDRCFFASLIGSQPEQRCSAQGHPARVVGSRK

SEQ ID NO: 88018 - protein, 327 aa, unidentified
MMFIGIDISKEKIDLSWLRDQLTNKIKTKVFKNKLQDFVTIEKWLLNTTKSAANEFIITLEPTGVYHEALMYFLYEQGFNIILANPGKAKKYADALNIIHKTDKSDATMLAHYGCAKHAVVNYWQPEALEIRELKALIRRLDALESNRQREANRLEASEFSNVSARVCQSIKVTIAFLDDEIKQLKSDIDNHIDNEPDLKRNRKLLESIPGIGPVLSRELTYLFAAKKFNKAKEAAAYCGLIPRHNESGKLKGRTSISKLGPARIRCKLYMAAIVAGQWNKTIKRHKLTLINNGKTPMQAVCANMRKLIHICFGVIKNQEAFKLQES

SEQ ID NO: 88019 - protein, 438 aa, unidentified
MSRKKKMEMEIINQNAAGIDIGSRSHFVAVGQALEDVKEFGVYAEDLTAICVHLKQYGITSVAMESTGDYWQNLFTELIKHNFDVILCNGKFTKHAKGKKTDVKDSRWIQKLHSLGLLTSSFLPDETTETLRTYCRQRINLIHQASTASRKMQKYLKFLNFRLDVVVKDVCGLTGLKIIEDICKGNLDPDLLAEHRHYNCKKSKEEIAKALHGNNREDFLFGLKQEFESYEFFQKQIKACDRKIQKFVNNVLKKTPNQLKLKTSDKPYKRFNKNTVNIKNFNQVAYQYFNGVDLLAIEGVSYATILSIMSEIGPEGFRKFKTSKEFVSWLRLAPNNKISGGKVLSSRVPKGSNRLKIALRQAANAIGNLKDTDLSDFFRRIAYRKGRQAAVSATARKLGVIIWTMITKKVPYKPSKEYLFLDQKRKLGIVKRAPTPYY

SEQ ID NO: 88020 - protein, 392 aa, unidentified
MIYVGIDVAKDKHDCFAMNSDGEILIEKLTIQNNFDGFNSLFNSISQFNESFENIKVGLEATGHYSNNILNFLTSKGFNVYVINPLQTNLYRKGQSLRKTKTDKLDARFIATMLITENLKPYSNLSYHISELKSLVRHRFRLVQERSKFKTSLSRLVTLVFPELEKIVWSISQNSVLYLLNELPSVKDISECNLKHLTSLLEKYSKGKYSRDKAIEIRELARKSIGTNSRSLSFELKQVIQTVLFLQSQIDDIDKELKAIVDKLDSPIMSIPGISYVSAAFILAEIGDINNFDSPAKLQAFAGLDPSTYQSGKYTATHSVMVKRGSKYLRWALLNATRLVCMRDKTFNDYKNSKLAEGKHYFVALSHTSKKLIRVIYYLLKTNKSYQLQKVA

SEQ ID NO: 88021 - protein, 425 aa, unidentified
MNLLILKGVPMSLKIVYKICCGIDVHKTFVVACIASTNDIGVTSYESHRFSTYTSGLKTLLQWLLNRNCKDVCMESTGKYWIPVYNILENDCSIVLAHPKYVKAIRGKKTDKKDAKWIADLFKHDLVAGSFMPPADIRQLRDLMRYRFKLTCFQSSEKNRLQNCLTVSNIQLGNVVSDTFGKSAQAILDKLLENPADTSFDLEPLVYKSLKKKLPQLRDAIDGYITPEQAGKLKVIKSHYENLESRKAELEELILALAAPYQQELAILQTAPGIRSDFTAIGIISEIGTNMEAFPSAKHLCSWAGLTPTNNESAGKKKSVRVSKAGCYIKPMLVQCANAVVTSKKHPEIRNRYLRLKKRRGHKKAIIAIARMLLTALYHMLKNGENYNAELYRKSDLPPANREITVEQAIIIARNQGYKIKSATA

SEQ ID NO: 88022 - protein, 355 aa, unidentified
MTTTQKQSCMYVGIDVHKDSHTAVGISPFGEKLFEITVGNYKDDFENLVQKVKEKSGTLSPFFGLEDVRGYGERLAGYLYDKYPVYHVPSILVDKERQNATHPEKSDSLDASGVAKVMMTSIDSLLAYTISEESEKAKQLKELSVDREDLVLERTRLKNQVHTLLYRIYNTEYTNKFKDPFSQKALRFWRSAKPKCDPYLLKTMKRKVRRILDIHVEVTELEKDMTTLLEENYTIQTASGCGVVVASAIIGEIGDIQRFKSPASLAKYAGCAPRERSSGKKVRHIKSRSGNRRLNCAFHRMALSQISRSGNDKAREYFKRKISEGKSKSQALVCLRRQMVNIVWNMMRYKTVYRN

SEQ ID NO: 88023 - protein, 333 aa, unidentified
MSKFKHFLGVDVSKEYFDAVVILDRNKEKSIHSQFVNDYKGIKSLCKWLKEQGSTFENTLVCLEHTGMYGKLIIKCLMIEKFSLWVEMSLKIIRSIGVQRGKNDKVDAQRIAFYAMKNVEEAVIFNAPRMEINKMRNLLSLREKLVATKASLLRNVKELKAFDLEVARLSEKLQKSTIKGIDLDLKNIEKQLDKTINDDENISRIFTLVTSVIGIGKVTALFLICFTNEFTMYRTPRQLACYAGVVPFEHTSGKSIRSKPKVHYVANKKLKKQLHMCALSAITSDPELKNYFNRKVEEGKNKMLIINNVRNKLVHRVCACIRENKMFEKRQVA

SEQ ID NO: 88024 - protein, 360 aa, unidentified
MTYRTTEARTAAGLTVGLDVSDIYTSLCTLDEEGNVAEEGRVRTTTPGLERWLHGLAPCRMVLEVGTHSPWMSRLLAGFGHEVIVANARQVRLIAESDRKRDRTDAEVLARLGRLDPALLRPIQHRGPEAQQDLALLRARDTLVRTRTGLINHLRGAVKAAGGRLPACSASSFHRKAEPDLPSALRHALLPILAIIADLTARIREYDQVVERALDERYPVGRVFQQVVGVGPLTALAYVLVIEDPGRFQKSREVGPYLGMVPRQSQSGERAPQLRITKAGDALLRRLLVQSAHYILGPFGPDTDLRRWGLRLAGTGSSRAKRRAVVAVARKLAVLLHRLWVTGEVYHPLLAESEAAAHVG

SEQ ID NO: 88025 - protein, 398 aa, unidentified
MLSIGIDVSKGKSTVCGMKPRGEIVYTPFEVQHTREGMSELVSLLRGSGEEVRVVLESTGSYHCPVVAALLENGIFVSVVNSLRMKRFCSQSIRRVKTDQIDAMQIALYGLAYWQELQPTRLPENTYRELQLLARQYYQMTSMLIKAKVDFNAICDQVLPGMQELMSDHAGRHKLSDFVLRYRHTTHILEMGETRFRKDYCKWAEKKGYRNHERMAALIFATAQNGIPVLPNAPSTQIVITEAIRVLHTVEASRDAILTQMQALAKTLPEYSLVREMPCIGDTLAPRLIAEIGDVRRFHSKRALIAYAGIDAPPYQSGKFSANNRHISKRGNRYLRKTGYEVMQSYVMHKPANDPIFTFIEKKRSEGKSGKLAMVAGLNKFLRVYYGKVTELYRSLPQ

SEQ ID NO: 88026 - protein, 316 aa, unidentified
MYVGIDVSKDHLDVASDDGALEARFANDEDGHGQLVMRLRELSPQLVVMEATGNFQLELSIVLASAKLPMAVVNPRQVRDFAKALGILAKTDSIDARTIASFGATVKPEAQPLPDDQALELEAMMTRRRQIIGMIASEKNRLKALVGPAKKSWAEKSIRDTLSHLIKQLNQLDKDLHKRIERSPAWKAKDDLLKSVPGIGKVTSLTLSIDLPELGTLDRKQIAALAGLAPLNRDSGKSIGKRRIWGGRASVRTALYMACVASLRCNSVIQALYARLTQVGRKPPKLALVACMRKLLTILNAMVRESRPWSPALAGA

SEQ ID NO: 88027 - protein, 470 aa, unidentified
MFRQVSAMQKNCDKNSKPDKEVGIEGLPVIRPNVAGIDLGSETHWVCAPNVERTGLEVETFGATTPELERMAEWLKARKIESVAMESTGVYWIAPHEVLERHGLEIVLVNTRELARVPGRKKTDRVDCRWTQRLHSCGLLKGSFRPNEPVCMLRTLVRDKGNLVAEAGDWLRRMQKSLDQMNVRVHRAVSDIDGVTGMRIVRAIVAGERDAHELAKLRDRRCGKSEEEIVEQLSGHWREDHLFSLRQALKMYDAIQERIADYEREILRKLAEMERAECHGQEPPKLKNPQKAKAIQKRGEEPLRQALYRLSGVDLTGIDAIGVETVQVVLSEYGPDLSRFPSEKQFVSHVTLAPRQALSGGKPVKKKKRGSASTRVAAALRMAALSLRHSQTALGAYYRQISRRIGGDVAVFATARKLATLIYRLLRWGQPYVDVGAAAWENRYRQARIQRLAATAKDLGYQLTPNPTKA

SEQ ID NO: 88028 - protein, 357 aa, unidentified
MDKFIGFDIDHKHTVACVVQAGQPDRYRKLRTDVGQLREWLKMQREPGDRLHLTFEVSGLSGHLYDGLVDVVDRLEVSNPTKLTWIYRTAKKNDRIDARKQAVLLSMNELPRVHMPREGVREWRRTIQHRRNLVNTMTQTKNRIRSLLKSQGLKRSHRGTWWNTTNRTWMRQEAEHGDGLWREVLGDLLELLELQQQQLQRVTRRLDAHLDELPAAWLLMTIPGVGPRTVEAVLAYTDEVRRFRRGKQYGAYFGLTPRLDESGSRRRTGHISKQGPSVVRWLIVESAWRAVRHSPALRAFHERVMHGQRQRNKIAIVATARKLLTIMRAMLMTGETFNESLVSEQFVPAKRSKDRVA

SEQ ID NO: 88029 - protein, 316 aa, unidentified
MQAYLGIDVAKRKYDVVLLAGDRQRHRVFDNDESGFAALLAWLGDQAGSLHACMEATGGFGDDLALFLHEHKIVVSIVNPLRVKAFGQSEMVRTKTDKVDAGVIARFCRSQSPEPWQPASPRMRELRALVRRCAALKEMRVQELQRRTQGTPSSLVASSVERTIEWLDSEIAAINRAVTDLIRNDEALHRSFALLTSIPGLAAQSAAVLLAEIPDFRAFSHNKQITAYVGLSPQEHQSGSSVRGRARISKIGNARVRAILYMCALSARHHNPILKDFADRLKESGKAPKVVLVAVARKLLVLAYGVMKTQRPFETA

SEQ ID NO: 88030 - protein, 424 aa, unidentified
MQQPKANRMKPWQDLTHYAGFDWAKDHHSVVIVNSEGSIVADFEFEHSIEGWKGFVEKASAWPNLAMAIETSQGPAVDQLLQREYTVYPIHPVAAQSYRERKAPSGTKTDHLDAWGLADALRLDGQRWKALQPLDPITQQLRLLCRDEVALIEQRTALVNQLQQALAEYYPAALEAFEDWTDAFTWEFILAFPTPQALVTAGKPRWEKFLHTHKLWRPETAEKRLKLFSQADQFKACDPIVRAKSQLALTLCKVLVTLAQQLALYRKQIETLFQDHPDHDLFGSLPGAKKYLAPRLLAAVGSDPNRYGNYQALQCIAGTAPVSYQSGKINKVRVRWSCDKFLRHTMHLWADCFRKASAWGQAYYQKKRADGMSHACALRCLGQRLLKIVFRMISDKKPYNAEFHACNQQKHGSWVLKLVDESVA

SEQ ID NO: 88031 - protein, 372 aa, unidentified
MQSDGITYVGLDVHKRTIAVSVLYPERTESLEWQEINDATVARRLARKLLREAPGKVVCCYEAGPTGYVLQRRLRSEQVMCLVIAPSRTPVQPGSRVKTDRRDARKLGLLLRAGLLTEVHPPSEEQEALRDLCRCRVDVVEDLQRARHRLGKFLLRRHYLYTQSGNHWGTRHMAWLRTLHFQDPASQATFDSYLLAVDQLGERLVQLELQLAQFGTQEPYREPVAWLRCFRGIDTITAVSLVAELHDFRRFRSPRELMSYLGLVPGEHSSGEKERRSPITKTGNGHARRLLVEASWHNRHRPALSLPLKKRRLGQPAWVLAIADRAQERLWRRWNRMTFRGKPTQKVVVAMARELTGYLWAVLQGPEILGTE

SEQ ID NO: 88032 - protein, 332 aa, unidentified
MKYKVFIGIDVSKLTIDVHLHGIGASKTFSNEEKGFALFLSWVKKHSKQSEPAEMIICFEHTGMYSIKLATYLNDIGIPFAMLPALQIKQSIGIRRGKNDQIDAQRIAEYAWLHRETIQATLLPAKSILKLQSLLTLRNRLVCDRGGYEATWKEQKKALEGKEHKGIFQVYKSLIMNLTVQVKKIEEQIKAVIESDEAVKLNYQLLTSIKCVGPVLAANMIAYTHNFTRFATWRKFACYVGTAPFEHQSGTSIKGRTRVSSLSNKQLKKLIHMVAICACAYNPEMKSYYKRRVSEGKNKMSTLNVIRNKIISRMFAVVNRGSGYVDLMKYAA

SEQ ID NO: 88033 - protein, 337 aa, unidentified
MAISLFSFSFFFSLGFFPLTKTNMNAIGIDMSKNSFHAAFDEQEVLKFVNSKEGINEFLEKLKTKNIKLKDCTIGVEATGIYHLLFCTQLSKIKLGVVVINPLESHRMITSTLRAVKTDRHDALAIRKMVLLGSGYLFTDTPSVLALKALVSEREALVQLQTMTKQRKHVHSIRENSIDMPIYDSFYNLIVVLKQEIQNIEKRMQTYSIETQSLLKTIPGVGKVTAAALVAFIGDIKRFSSPEKLVAYIGLDCRVYQSGTSVKGKGYISKRGNSYLRHILFSAALIARLHNPTLKRYFIKKTNEGKHYFSAMCAVERKLVHIIWAVWRRGTSYQERP

SEQ ID NO: 88034 - protein, 430 aa, unidentified
MEKAMVDREESFGVLVGIDWGDEAHRVCEVVVATGKKREYSLANRPEDLVEWAGSLRERSGGRCVGVCVETTRGSLISFLLCQEFVAIYPVNPASLKRFREAFCPSLAKDDPKDAEFLLLLLSRHRDQLRRWEPEDEATRELGMLVEGRRKLVEERVRLSNRLKAQLKSFYPLALEVLGGEVDTPMACDFLSRWPKLEKLKKVGSERLRKFFHEHHVRSEERIEERLERIRTAVPLTRDRAIVEAMAMGVEVGSAQMRVVIEGIEKYDERIAERFGEHADAGLFGNLPGAGPVMAPRMLVVFGTDRERYESAEELQSMTGVAPVVVASGKSRDVRCRWLCPKFVRQTLVEFAWQSTKGSRWAKAYYHAQREKGSGHNAALRALAYKWLRIIYRCWKDRRPYHEERYVEALKRAGSPLAARLEREAMQPCG

SEQ ID NO: 88035 - protein, 385 aa, unidentified
MKNGSDSTASATHLSGRQDPALLIGLELASKSWRLCSGRLGSPRERQKRLEVNELGYSLRAELKRAKERLGLPEDAPIVLCYEAGRDGFWPCRYLQQLGIQVLVVDPSSIEVPRRQRRRKTDRLDARKLLAQLRRHVGGEHKVWSLVSVPSEAAEDERHLYRERQALVRDQTRLRNRISSKLAIYGIKLASDGRFPKRLEQVQTRYRTPLPAAAMQGLQRLWQHLQFVQAQIKAVERAQATRVKTATTPAAQQIRQLMQLRGLGPESSTLLVDECFGWRPIRRARDVGPVAGLVPVPFASGSMSRDQGISKTGPRRLRAGAIELAWGWVRHQPRSTLTHWFLERFNQRNKRERRIGIVALARKLLIALWKYLQYGELPEGAVLKA

SEQ ID NO: 88036 - protein, 314 aa, unidentified
MAQMVIYAGVDVSKDWLDIALWPKRLTLQVSYDAMGLRELLAWLRHHNVVRVGLESSGNYERELMDALGEQSIEVIRFNAQRVRMFAKAMGRLAKNDQVDAHVIARLTAIGADEPATERRRDLEPLIEHLHMRSQYKEWITACDSRLEHTHDKALRRNIERQRAAFAEKIAVLDRKLASLIAEHEDWRRLEQRLRGVPGVGPVLAQTLIALLPELGSLSRRAIAALVGVAPFDDDSGNRRGERHIKGGRFDVRSVLYMAALVAIRRNPKIAAFAARLSGKKPKVIITACMRKLLVMLNAMVRDATDWQAKPAMA

SEQ ID NO: 88037 - protein, 429 aa, unidentified
MICAAVERCAGIDVGKEFLAVCVMTGPLQGEARKQTRRFGTIIAELERLRDWLKQEEVTHVVMESTGSYWKPVFNVLEDAVKVLLANPQEVKVRKGHKTDDKDGWWLAHLLRHAMIHPSFIPPRVIRELRDLTRRRKKLLGAGTGEKNRVQKILEDANVKLGNVLSDVFGVSGQLMLDALLKGKAEPAEIAEFAQRRAKQKIPQIIAALEGHRMSDHHRKMIGYSLEHMRFLEDQIGKLDTDIVAKIKEAGLEREWQLIQSAPGLKETSAANVLAEIGPDMSQFPSVRHISSWGGVCPGNNRSAGKNKSSHTTGGNPWLRAALTECAWAAAAKKGCFLKEKFWRITTKSGGKKAPAIVAVAHTVLGLVYEALRTGEPYQERKVPDLNPGQKDRMIRHHVKRLGKLGVTVRSNPLKREKKAAKTKNAKRT

SEQ ID NO: 88038 - protein, 478 aa, unidentified
MKAQSTRPSRRVVKAIRPADQLPVLHPHAAGIDVGATEHSVCVPADAVPAGESPVRQYKAFTGELDQLVEWLQACGVQTVAMESTGVYWIPLYQKLERAELEVVLVNARHLKRVPGRKTDVLDCQWLQQMHSYGLLRGSFRPADDICVLRTYLRHRSNLVAGCSQQVQHMQRALDQMNIHLHHVVSDLDGETGFAILDAILSGQRDPKALVQWRDARCRKSTVAEMEAALQGDWREEHLFVLKQAREGYRALQGQIVECDGAIEKVLERVAVNPSAVPEAQRPQNPVATPVEAGAKKKRRKRSRGNAPRQDLTTPLQRICGVDLTRVVGLNMLSVLMIISEIGVDMSRWPNAKAFCAWLGLCPGNKISGGKVLSSRTARVVNRVAILLRTLAPTLGRTDTWLGVFHRRMKARLGPAAANTATAHKLATILYHLLKYKEDYIDVDRIVYEEKFRRYRVNRLRQQAAELGYEMVELKEAA

SEQ ID NO: 88039 - protein, 356 aa, unidentified
MSCLTGPAGVDPPDRKGSTIMTNQEHNIGGIDSHKDTIHVAVITSVGREIADHEFVTTTAGYRRAVAWLIAHGPLHAVGVEGTSSYGVGITTELVRAGTRVVEVNRTRPAERRKQGKSDRLDAYRAARSVLSGEASTDPKRASIEPLRALNVARRSAVKAQQAAWRQIGALLVNAAPELRDHYRDLPDAKLIAALTNTRPAQLADAGRADTLFALRSLARRHARLGEEITEIEHRMLARATAANPALLAVKGVGPVIGAQLLITAGDNPARLHSSASFAALCGTAPIPVGEGDGEGDQGWFPWSIVAVRWPLRWHSSVTIYSVLSAAWWVGKWALTVTAAASGVVGFEVVLSSGRT

SEQ ID NO: 88040 - protein, 342 aa, unidentified
MEKVSIIGLDLAKRCFQAHGARADGGVAFRKKLSRDKVLTFLAKHPRCVVAMEACGSAHHWGRAIGASGHEVRLIPPAYVKPFVRRQKNDAADAEAICEAAVRPAMRFVAVKTEEQQARAMLFRTRDLLVRQRTQLINALRGHLAEHGVVVPQGPANLKGLAEAIGSETTPLPLLVVELSRVFLDQIDGLSKTITELEKVTAQEATRGATMRRLQTMPGVGPITAMAIETFAPPMAVFRRGRDFAAWLGLVPRQHSTGGKPLLGRTSKMGQRDIRRLLIIGAMAVVRLASRKGGPEGSWLRRLLARKPRMLLAVALANKMARAIWAMLTRGEDYRVPAAAVR

SEQ ID NO: 88041 - protein, 372 aa, unidentified
MEVIYGVCCGVDVHKKMIVACLKTGKNKELRQYGTTTRELTELANWLLEANCEMVAMESTGSYWKPIYNVLEMLGLDVIIVNAHHIKTVPGRKTDIKDAEWIADLLNHGLLKASYIPDKAQRELREVSRYRKALIQERAREKNRLEKILEGANIKLSSVLKDITGLSARKLIKGAIEGGVTEDNIDDMLYSTAKEKRKELLIAMDGVMTNVQKLLVKAILDHIDDMTRRIKELDKIIDKEMKDYDDAIKALDEIPGIGEESAQTILAEIGLDMSRFPTAANLASWCGLSPGNNESAGKRKRGKTCKGNKTLKTTLIQCAQAAIKKKDSFFKAKYERLTVRRGNNRAKVAVAHSIIIAILLFLNLCSAIRQYR

SEQ ID NO: 88042 - protein, 359 aa, unidentified
MIVIGIDPHMKTHTAVALDAATGAVLAETTVSCDARGHDELLAWARGLPGDHYFAIEDCRHVSGRVERHLLPRGERVVRVPPKMMAGVRHSARAYGKSDGIDAEAVARAALREPDLPTASLAGPEHDVRLLVDHRDDLVEERKRIQKRLRWHCHDLEVALELPPRVLDRYVWLDRLEVVLCALPGSTRRRIALDQLARCRDLTVEVRSLEREIRSRMRKLSPELLEIPGCSAIGAAHLVGQTAGASRFGGEAAFAMHVGTAPLPASSGQSTRHRLNRSGNRRLNSTIHMIALTQARMHQPAIVYMERKQSEGMSYREALRCLKRHLARVLFKTMLRAESGRAGQVITPSFRPEPVALAV

SEQ ID NO: 88043 - protein, 423 aa, unidentified
MSYRIAGIDVHKKMLAVVVADVEVHGEYQFERIRYGSNPEPLRLLAAWLIEHEVEEVVMESTAQYWKPVWGALERYWKPSCQKREGAGPMSGTLHLAQARSNRGRRGRKKDFPDAERLVKRLVADELILSFVPDAEQRLWRTVTRRKYQLTRNKVRLQNQLEALLEEAHIKLSSLVSDLLGVSARRMLKAIADGGTDPAALAALADKKLRATQAQLCDALGACTELQPVYRRLLKMFLEELHLIEQQIGQLDQEMAALLSQHPESVQRLSEIPGLGVDSAQQIIAEVGATAATFPSGKHLSSWVGACPGDEESAEVSQSHRSPKGNRHMRRILNQAANAAVKAKGTIFEIVYRRLVTRLGHNQTIGAIAHRLCRLIWIILHQGVRYEERGPSVNTKSRRQRTSRMIRELRNLGYRVEPLGTPA

SEQ ID NO: 88044 - protein, 413 aa, unidentified
MQVEYERCCGIDVHKETVVACLIVPDAQGHPVKETRTFSTMTGDLQALGRWLAEQGCTHVVMESTGVYWKPVYNLLERQFALLVVNPTSIKKLRGPKTDVADAEWLADLLRHGLVRGSFIPSAEQRALRDLTRYRTQLLDERTREVNRVQKVLEDANIKLASVATDIMGVSGRAILQELLEGEGEPALLAELAKGRLRNKRALLEQALTGKVQAHHRFLLVQHLSHIDYLDEQIAQLDSEVAERMRPFEAALASWEQLPGIRQRNAQVIVAELGADLQQFPDAEHCASWAAICPGTNESAGKRHSGKTAKGNRWLKRALTEAAHGAARTKKSYYAALYHRLAGRRGKKRAIIAVAHSLLVTGYHLVTQGVDYQDLGRDYFDKRNQETIKRRAVKRLEQLGYQVDLTPVPALAG

SEQ ID NO: 88045 - protein, 436 aa, unidentified
MSCLKNPTKEVIPMKKRIYRRMPVNDFQPNSITHADLGGKLVFAIDVAKVDMVAAIAAADGRVLQTLCWKAPEENLRVLAILRHFRLAGIPVEAVMEPSGTYGDVLRHQLEQDAFPVFMVSGKRTHDAMEIFDGVPSLHDAKAAAIIARLHADGLSTRLRDEGPDRRQLRAALSIMDLHQERYLQLVHRLESWLARHWPELPMLIELTSSSLMALLARIGGPADVAAAPDKATKLLRGISHRLIADDKIAAVIASAHASVGVPLVGLERDALMAIADDAYRAHRAFASAKTKVEALAATTPAAALAPVVGHTTAAAVFAEVGDARSYSCTRAFLKAMGLNLKEKSSGTIHGQIKITKRGPSRVRQYLWLAAFRWIQKDPIANAWYQRKKQRDGGRASRAAVALMRKLAKALYHVGRGATFDSSKLFDVRRLQLSEG

SEQ ID NO: 88046 - protein, 319 aa, unidentified
METVQFEQLISVGCGIDVHKDVIVATIRKSNKDYQTKSFTAFTSSLIDLRDWCKSEGVTHIAMESTGIYWKPLFNILEEDFEIILVNARHIKNVPGHKTDKKDSIWISKLLLSGLLKGSFIPPVEIRELRDLVRYKKKKTQFIASEKNRMIKFLEDCNIKLSSVVSDTQGVSATKIINDIIDGKNDIIHLLTHIHGKIKANKEDIVKALTGRITPHHQFMLKMIRETIDENEKLITKIDAQIDLCVAKYEVELQLLQTIDGVGRDTAITVISEIGVDMNNFENEHHLASWAGLSPGTNESAGKKKVPESSTETNTFNRD

SEQ ID NO: 88047 - protein, 341 aa, unidentified
MRYIGLDVHKDNITACVLTSMGKPKFEKNFVKDSESWNLSELMEYGDKEGFCVMMESGTYAYQPFRFFSDQGVETHVVHAQALKVITQSDKKTDKKDAQTIARMLRLWKKGDIDLQMAFMPTREQCELKDICRYREEISRKISDETRRIKSHMSRNCEYLPDDFDNFQAQRARNYVRFNFSSDITLMNRMAVLEGLFKERDSVKSEVESRLPDSKEVDLLMTVPGVARQTAVQIMSMIVDIDRFDDAEKLCAYFGMVPRVRDSGGKEHHGRMTKSGDKMMRAIMERVTESHVRNCDSSVTQYYKRKCSEMGTKKALITASRKMLSVIFAMLKSGSDFRLAA

SEQ ID NO: 88048 - protein, 367 aa, unidentified
MHAQGREPVNSVLPFNGVKNTIMTNLPINATAESIHRLFAGVDVGADELVLVIRKNGKPFDPQKYANTRSDRARLVNKLLKLPGIKVCLEATGIYHFDLAIALHDAGIPVMVVNPKASHNFAKVLMRNSKTDVVDANTLAEYVERMDFVAWTRPSNQVLALRGFARRIDALTSQKAAAKNHLHALSATRETPKALLRDAKLAISQLEKRIDALAVEAMILITDDPSLKRIFELLTGIKGIAQTSAIALMGELLLLPPNLSHREWVKFAGLDPKAFESGKSVHKKMRLSKAGNRHIRSALYMPALSAKQHDPHISAYFHHLVDNGKKPLQAVCAVMRKLLHAIHGMLKHDQPFDNTRFYAIPAPIIAE

SEQ ID NO: 88049 - protein, 348 aa, unidentified
MRFYNTQHPYYCGIDLHARSMFTHILDQEGKTVFERDLPAGPDAFLEAVQPFRQGLVVGCEYMFAWYWLADLCEDHMVPFVLGHALYMKAIHGGKAKNDRIDAGKIAGLLRGGMFPLAYVYPLAKRETRDLLRRRCFFVNQRSQLTAHIVNTGSQYNLPPLTKKLCYAGNRSDDLAERFQHPSTKQSILADLKLIDAYDAQIDEVERTVLRTAKIDNPVTLQLLRTIPGIGKILSLVLLYEIDQVSRFPEVGNFLSYSRLVRCEHESGGKKKGSGGKKIGNAHLKWAFSEAACLMLRAMPEAKKWLQRQERKRGKKKALAVLEAKIGRTVYHLMRKQQPFDAQRFFCS

SEQ ID NO: 88050 - protein, 344 aa, unidentified
MVTTIGIDPHKATHTAVAIDETEQVLGELTVPADRYQTIRLVEWASHLDGDGRLWAVEAAGGLGYLLSQQLITHGERVVDVPAVLASRVRVLGSGRSDKNDPNDARSVAIAALRQPSLTRVRREDHGQVLRMLAKRHLELTSLRTQAVCRLHSVLMQLRPGGIPKRLSAKQASRALQGMRSLDAVGDQRRQVARTHLADIRRLDRDIKANKVLIRQAVAAADTTVTDVYGVGPIVAAFLIGYTGDPLRFATADHYAAYNGTAPIEVSSGGKTRHRLSMRGNRTLNHAIHMAAVTQIRFDTPGRVYYDRKIAEGKTKKEALRTLKRRISNAVYRQLVTDQQRATR

SEQ ID NO: 88051 - protein, 346 aa, unidentified
MRYSTTVGVDLAKNVIQISVVSGRGKELSNRSLTRKKFAEFLGKQKPSLVAFESCATAHYWARAAERHGHEARIIPAKAVAPFRQGHKTDSNDALAVAEAARRPNIKEAPIKTVEQQGLQAILRARDRLIQECIAQSNHLRGILLEFGIAIPQGFAALLRTLPEVLEDGDNELPDFYRPTLHRMYHHLLELREDIDAMTREVGHLVKNHPVCGRLTDIEGIGPIGAMSLYATLGSGAAFSKGREASAYVGLTPRQYSSGGKANIIGLSKRVGNRKLRSVLIQGALAYVYRMKEPRTSKDRWLKELIERAGPRRAAVALANKNVRTAWALIAQGTEYQRRGQLEMAA

SEQ ID NO: 88052 - protein, 344 aa, unidentified
MKKVLIGIDFSKEKFDVAIIVKSTSTQEHSLFDNKVSGYRKMIKWINSVVEDIPCSSWLFCGETTGGYSRMMSDWLYAQGYDVWIENALVIKRTFPLKRLKNDTVDAFMIAEYALRFEDRAQLYEPLSQALTELREIFLYRHHLVRHRCSFEVRRIEKRFTQQKSANKNVISQSARHIITEINKEIAKCDEKIKEYIESDDQLSSIFAIVTSMPGVGTINAVSLMVYTNNFTKFAYNPRKIACYYGIAPFGRDSGTSVHTDPRVGFIANKTLKSLLTQAALASVRTCPQIAKYYQRLIERGKKPMVALNNVKNKMIAIITAMVRTGCMYQPDNICLATQSVIVK

SEQ ID NO: 88053 - protein, 341 aa, unidentified
MSLIAPVFSFDLNGYTGSGLALQDKAEKSLMQITIGIDISKETLDAYRLPDNQHIQVANGRAGHKSLVRWIGKQNGSLVVFEATGAYHRNLEAALAANGTAFAKVNPRQARRFAEATGRLAKTDRVDAIMLAKMGAILGLKAHEPKTEALHILRELITARRALMKDKVAAKTRLQTTRQTLLKNQINARLKQIKIQIQQVDAAITEKVAQDEALSNKLAILTSIPGIAETTAFSMLIEMPELGTLEGKQAASLAGLAPMSRQSGKWQGKERIKGGRAFLRRAIYMPALVATRYNPGLKAKYDQLIRAGKSGKVALTAIMRKLVVMANALLRDGRTWSELRP

SEQ ID NO: 88054 - protein, 386 aa, unidentified
MKTVAGLDVHKDSVYLCILRENGEKIERVFGVLTPQLESMRDFMAENKVSEVAMESTSVYWIPIWRVLVDSFELKLVNPYFIRQLSGRKSDVKDAQWIAECVMKELIRGSFIPPPLVQQLRLYDRRIFEINAELVRMYSKIDAILQRCNIRLSNYVACTDCKSYKAVVKQISEGVTSPQELLRHVHKRIINKHGEDTILAALTGVVSDAEIDMLAQYVAESALLEDNKNKCIEKMREICNREFKEQMKNLQEIPGVSERSALTVLAEIGPDVNAFPSAKHLVSWCGFNPRNDESNKKIKSNKITHGNRFIRIASVQCAWAASRTKDCYFSKFYAFHTQVRKKFKLKVVVAVARKMLVCIWHILKFNVPYKDFAPRKPAVEDCTQLA

SEQ ID NO: 88055 - protein, 377 aa, unidentified
MTKIIRIGMDTSKSVFVLHGVDAAEKPVLRKKLRRGQVLEFFAKLEPTKIGLEACGGSHYWARELQALGHEVVLLPPQYVKPYVKRNKNDAADAEAICEAMSRPTMRFVPVKTAEQQAALMLAGTRDGLVRRRTQLTNTIRGYAAEFGLTAAKGLDKIEPLLARVAADEKLPRLAKELFAAYGREYAQLRRHIATIDAKLMAWHKHNELSRRLVEVPTIGPIGASLLAMKVTDPHAFRSGRDFSAWIGLTPKDHSTAGKTRLGVITRAGDEALRSVLVAGATAVIQQVQKGRGHRSPWLVELLKRKPPKLAAVALANKMARVAWKLMVSGERYNAARIGVTAAAREGRGAALRGGFAPRPSLASRTTTPEATAMTNA

SEQ ID NO: 88056 - protein, 342 aa, unidentified
MLHAGLDLSRKRLDVCVLDDSGELIVQTTAPPDADGLRGLASRLSVGEPMRAAIESMNGARFVHDQLELHGWEVEIADAVRVKGLAPLACKTDRIDSRVLAELSRRDLVPAIWLPDPSVRAERERARFRLHLVCHRTALKARIHATLLAFGHPCPVSDLFGASGRRLLDRIGLPQPWRANVDASLLLIDDLERQIGEIERDLRRLGADHRYVSLLQSAPGIAWVLGYTIASEIGDISRFPSPAKLTGYTGLCPRVLQSGQSDRRGALAKNGPKYLRWALLEAATQACRHPIYSDRYQRNNKRLGRQRGAKVAQIDIARRLTEAIWHMLTRNEVFAPAGAVLP

SEQ ID NO: 88057 - protein, 296 aa, unidentified
MEYFAGIDVSLEQSSVCVVDGTGKIVHEAKVASEPEALAGFFRGLKTGVTRIGLEAGPLSQWLHAGLAAAGFEVVLLETRHVKAALSAMVIKTDRKDARGIAQLLRMGWFRPVHAKSPAAQEVRALLVARKLLQTKLLDVEFSIRGILRGFGLKMREVSKGRFAARVRELAAGHAMLERITEPMLRAREALRTEYARLHGEMLAIVKPDPVCRRLMTVPGVGALVAITFKSAVDDPRRFARSRVLGAHFGLTPRKYQSGETDVTGAISRVGDAMVRMALYEAAHIMLSRVWRGGAA

SEQ ID NO: 88058 - protein, 412 aa, unidentified
MQVLYERCCGLDVHKDTVVACLIVVGPDGNPIKIIRTFTTMTADLKRLAQWLTEQGVTHVAMESTGVYWKPIYNILEGLFEIIVVNPTSIKKLKGKTDVTDAEWIADLLRHGLLRGSFIPSAQQRALRDLTRYRTQLTDERTREVNRLQKVLEDANLKLASVATDIMGVSGRAILTQLIQGQTDPATLAELAKGRLREKRELLEQALSGTLKPHHRFMLIQHLGHIDYLDEVLAKLDAEVEEQMRHFQAAVDRWDQLPGINQRIAQVIVAEAGADLKQFAKAEHLASWAAMCPGNHESGGKRKSGRTNKGNVWLRRALIEASHGAARTKKSYFSAMYHRLAGRRGKKRALVAVGHSVLVTGYCMITRQVDYKDLGNNYFDERNKEAVKRRMVKRLEQLGYQVELKPAVPTPA

SEQ ID NO: 88059 - protein, 366 aa, unidentified
METIYIGVDFHARQQTICYLKTETGELVTCELKHQDKEVVRAFYAQFVGQVIVGLEASGYSPWFERMLEELGCQVWLGHATEIRRRARWRQKNDRRDAELILDLMLHNEFPRLHRPAVQSREVLRMLRYRQKLIKMRTMSKNSLQAIALQAGLAKGSRLFTKAGQQELGTAEMSPVLHWQREHWLQLMEPLNQQLLETMVWFKSQSKDDDRITRLRTHPGIGLLTSLCIVHTLQPVSRFRNTRKVAAYAGFDPIERSSAERKCFLGISKAGSRLLRYLLVEAAQTAVRKDEELKRFYQRLADRRGRPKAKVAAARKLLIRAYIMMRDEIDYAEFRHRAVAARLARRSQGPANVPEVLIGQPASPEQ

SEQ ID NO: 88060 - protein, 349 aa, unidentified
MNTSNKPKADSSLCESMFVGMDVHKNYLQVAVLDEKGKVLDNSRVDNNLAKVNEFFDSLHPDSKTKVVMESSGMWYNIYECLSKRHLDVRLSNPVKTRAIASAKIKTDKLDAIKLADLLRGGYIAECYIPTRGTMELRDIVRHRAALVRMRTKLKNKIHSIMFMRGTSISYVGTHSFTKGYIEKLKELNDYRINGYLCIIESLNDEINTVSKKILLLAQEDEIAKLLMTVPGIGYYSALLIISEVGDIDRFPDSYHLCSYAGLVPSTRSSGGLTYHGSITKTGSKYLRWIMLECVHAHIRNEKNSNVAQFYHRISRKKGNSKAAVAAASKLVKIVYWIMKERRVYNRSQ

SEQ ID NO: 88061 - protein, 338 aa, unidentified
MTAVTVGIDLAKNVFAVHGVNAAGKAILVKPLVRRAKLLELIATLPACLIGMEACSGAHYWAREFQKMGHTVRIMVPQLVSPYRMGGRHGKNDAADAAAICEAVARPNMRFVPVKSIEQQGQLFVHRAHQSYVSERTTLINRIRGLLSELGIVLPQAFKAFLSGVAQVLEDLPGYCNQVIGDLLNELFHIEEKIKNSEKLIPQLARDNSAAQLLMQFRGVGPMTATAIVASIGNGHDFRNGCQFSAWLGLTPRQQSSGGKARLGRITKAGDSYLRTLLVLGAKSVLLGAAKNDDPVSKWALQLKERQGYGRALVAIVAKNARMCWAMLHLKDEFRFPS

SEQ ID NO: 88062 - protein, 387 aa, unidentified
MSEAFDPRKSATAFDQASTLVAVLELSGKSWRAGASVPGVSRRPMRQLAARDIGGALKAIEQWKSEASKAGHEVRRVVVGYEAGLDGFWIARALRERGIEVYVMHPASISVERRGRRPKTDRIDVDILLRALLGWLRGEPRRCTMAPIPSEAEEDIREPGRQRETLTAARLKVENQMRSLLARFGVADFRPRLKKAPEHLEKLRTFDGRPLPPNTKASLERLLSRHRLLSQQLKEIETARERVVAIADPDRIERMIQALAGVVGVGVETATTLVHEVFSRRFRDRKALAGFVGMTGTPYDSGGSKREQGISKNGNPRVRRMLMQLTWRWLIFQPHSALAQWFLARTQGAKGRMKKIMAVALARKLLVALWSYVETGVVPEGARLAAA

SEQ ID NO: 88063 - protein, 332 aa, unidentified
MNAVSTLGIDLAKNTFSVHGVDANGVVTVRRTISRGKLAELVARLPPCLIGMEACSGAHEWARRFAAAGHTVKLMAPKFVLPYRKSGKNDGNDAEAICEAVCRPNMRFVPIKSVQQQSDLSLHRVRQGFVEERTATFNRIRGLIAEFGYVLPIGVEQLRRQVPDLLERLPERVARCVRDLLEHAERLRSKALEYEREIRLSVRDNALARRAHTRPGIGSITASAVVATVGNGHDFKNGRQFSAWLGLVPRQYSTGGKTRLGHITKRGDPYLRTLLVMGARSVLQRAYRESDPLSRLALALQQRRGYHRACVAIAAKNARVVWALLAKESASA

SEQ ID NO: 88064 - protein, 362 aa, unidentified
MDNATHVGLDVHRDTIAVAVLSPGDTSLDERTIPATNEAVTRLVRSLRARGPLVACYEAGPTGYDTQRLLERLGVPCEVIAPAMIPRRPGSRVKTDRLDARNLARLHRAGELVAVRVPAPSEEALRDLVRVREDLKAERRRARQRIRSFLLQHGRPWRGTAGWSRRLEDWAGAQQFDEPVAQATFEILLASQSARAAEVDALERKIAEAASSSAAADQIARLRCLRGIDTLIAVTIASEVCDFGRFPTGPAFMAFTGLVPSEHSSGMSSRHGSITKTGNRHVRRVLVEAAWAYRHRPAIEVELRRRSQDQPADVRAFCWKAQLRLHARYRRLSPVKGSRKAVVAVARELSGFVWALMNDRID

SEQ ID NO: 88065 - protein, 341 aa, unidentified
MYFIGVDHHKQWSVMTILDEPGKEQKHGRVENRREAVRRFLEGYEPFMAVIEAGYSSYVMADLLRELGGEVKMANAAEVKAIAHARIKTDKRDSRTLARLLRSGDIPEVVQRTAANRGAQRVMRLRAFRIAKRTELKNKIQALLAQQREEIRMEVERREEGLFSRKGLELLGRLTLPQPDQMILDDLLESYKESQEHLQKTDKIVKNLYEQIEEARRIDTVPGFATTLSVVVAVEIGDINRFESASRLHSYAGVIPTTHASGGRIYHGHITKSGNAWLRWAALEAVIPATRASLQIRGLFTRLARRKGANVAKVAVARRLLTIIYRLLKEKRSYIQVPSAA

SEQ ID NO: 88066 - protein, 360 aa, unidentified
MVVQRTNVGLDVHARSVVACGLDRQTGEVFEQRLTPSHEEIAAWIRSLPGPAAAVYEAGPTGFGLARSLRAVGIDCEVAAPSKLMRPSGDRVKTDTRDARHLARLLMLGNVTAVAIPSREQEAARDLVRAREDCRGDLMSTRHRLSKLLLRQGIVYSGGKAWTGKHELWLRCQRFDDPALQLAYDTSFEAMLATIARRDRLDRAIEQMAADSEFTPVVSRLCCVRGVATLTAFGLAVEIGDWHRLTGRSIGAYLGLVPTEYSSGASRVQGGVTRTGNGHARRLLIEAAWHHRARYRPGATLRRRWDAASAPARARGQLANQRLHARWQTFDARKKRAVVANTAIARELAGWCWSLAVLDG

SEQ ID NO: 88067 - protein, 362 aa, unidentified
MAMKAMALVGLDVHARQTHAAVLAPDTGEVRVCKLRMAPVEVVGFLEGLGTVRAVYEAGPTGFGLARAARERGIDVRVAAPGSIPKGSGDRVKTDRRDAIRLARLLAAGELAFAFVPSVADEAFRDLVRAIEDVRGDLMRARHRLGKFLLRRGERYPGPGGTWTHAHLKWLRALDIDDACSHAAFADYLAAVELLSARRASLLVALEAQIPESSHAPQIARLRCFRGIDTLSSAGLCAEVGDWRRFLQPMRLSGFLGIVPSERTSDTKRRQGSITKAGPSHARRLLVEAAQHYRYPPRIGPALARRQAGHDPRVIAIAWRAQRRLHQRWQHLHRDRGKPSGVVAIAVARKLAAFLGEAATLD

SEQ ID NO: 88068 - protein, 343 aa, unidentified
MQISTIGVDLAKNVFQVHGIDGQGKVVLVRRLRRQQIMEFFGKLPSCLVGMEACATGHHWARELMKLGHTVRLIPPSYVRAYVKRSKNDAADAAAICEAVTRPSMRFVPIKTAEQQATLTVHRTRDLLISQRTQLINALRAHLAELGLVASQGRDGVMKLVAIVTADNDLQALPTVMREALQVVVAQLASLQQQIRELERCIHAQHRVSEVSQRLESIPGIGVIGATAIAATVTDPNVFKSGRDLAAWIGLVPRQSSTGGKERLGRISKQGDQYLRRLLVVGATSVVQHARRHPDKHPWIAKLLAKKPAKLVAIAVANKTARIAWAIMNKGGIYRAPALAAAV

SEQ ID NO: 88069 - protein, 370 aa, unidentified
MKIIIYVGMDVHKASFTLSCSSVTTQETFATVKISPDAKAIKKYLDGVSLSRSEECEFVCGYEAGCRGYTLYHQLTAMNIRCVIMAPTTILRNSKRVKTDRIAAENLARCLAYGGYKSVYIPTAQDEAVRDYLRMHDDHKLMLKKIKQQINAFCLKHNKIYPGNKSKWTQAHVKWLNALEFDGYLQDAFNEYMITYRELTDKVERLESQIEQLAELEEYRDKVKKLICIKGIKTHTALSLIVETGNFSRFQSAERYASYIGLVPGEHSSSEDQNRLGITKAGNRHMRMFLTEAAQCYSRGVPAKKSKDLKSRQKGASPEVIAYADKASIRLRRKYIRMELVNKKKANVAKIAVARELACFIWGMMTDNIA

SEQ ID NO: 88070 - protein, 340 aa, unidentified
MAIVVGLDVHRSQITYDALNAATGEVMTGRIAPADRATLRAFLARWSGEDVQAAVEATTGWRFVVEELQRAGADVQLAEPAETTAARGPKRRAKTDRRDARHLRDLLLEQRLPQSWIAPEHILELRALVRLRKTLVEQRTEWLQRIHAVLFHHGVRLAVSRLDGRDAREQLTALNVSPAAQRQITVALAVIDHVNAQLAPLDKDLRAFARAQPGCRALMGHYGIGPQVACAILAELGDTRRFSSSRQAVRFAGLDITVHESDGKRRAGHLSRQGPPVLRWAAFEAAESACKPASPDHAYYLQLKERVGANRAVLSIARKLLRRAHHTLRELGDEALAPAA

SEQ ID NO: 88071 - protein, 336 aa, unidentified
MKASTIGLDIAKTIFQVHGEDATGQVVIQQRLGRKRLAEFFAKLPPCLVALEACGTSHYWGRTLRAFGHDVRLIPAAYVKPFVKRNKTDARDAAAICVAARRPDMRPVAIKSEAQQASRALQRSRELLIKQRTQLMNSLRAMLAEFGVVAAQGYRGFAELRRRLADGEGLPETLVAALRLLAAQLDSLTSAVDALEDRIKSVAKADPTMRRLCGVPGVGFLTAHAVVAAIGDGRQFRSGRDFAAWAGMTPRENSSANKRRTAGVSRQGESRLRKLFALGAATLMRNARSRDDRATRWQRGILARRPMKVAVLAQAAKTARIVWAVLTSGEPYAPRA

SEQ ID NO: 88072 - protein, 331 aa, unidentified
MNYSHFVGLDVGKKTFDASLMSADEKELSHKSFDNTPTGIQSLLDWIAGYHLSLSKLLFCAENMGSYVTELSVSSVSMGFSLALVCPLTIKKSIDLQRGKNDRIDAKRIANYAVLHYRKLELYKLPDKDLVRLRGWIIIRDNLVKQKVSSIKLLETFSWMAKLADVTESISFLEEQLKSIKERILEVEEDMEQLIAASTSLYTNYLLLRSIKGIGIINAIVLLCVTDNFQRFDNPRKFACYCGVAPFEHTSGISIRGKTQTSSLANKEVKVYLTRAAITAISWDPQMKAYYKRKIVEGKHKASVINAVRAKIIARSFAVIRRQTPFVTLAV

SEQ ID NO: 88073 - protein, 338 aa, unidentified
MELKRIAIDTSKHVFTIHGIDVNDRPVLRQELRRGRVETFIAKLPPTDVVLEACAGSHHWGRIFERLGHRVSLIPPQYVKPFVKRGKNDRNDAEAISEAASRPTMRFVPVKGVEDQAAMLVVKHRQMLVAQRTQAINALRGHASEFGIVVAKGGQHVATLLTLLDENAAIPVVARAMFGEIGQHIAHLDDKIAALDKQLLEQHKANPVSRVLAEIPGVGPITAITMALTVNPADFGSARHFAAWLGLTPREHSTGGKRRLGRISKAGNERLRQLLVVGATAVIRYARPGSKSASGWLLQLLDRKPRKVAAVALANKMARIIWAMMAHGEAYRRQPKAV

SEQ ID NO: 88074 - protein, 420 aa, unidentified
MNSLTNQEFTVFIGIDWADTKHDFCLQPANSDQREFGQFPHTVNGIDEWASSIQQRFGSTLAVALELSKGPIVYALQKYDFIVLFPVNPSTLAKYRQAFKPSRAKDDPTDAEYALELLLHHRDVLKPLHPQSAQMRTLLYLVEQRRRIVGDKTRFTNRLRNALKQYYPQALDWFADSDTYVFCDFITRWPTLLQVKRARRASLEVFFSEHNVRFPKLIEERINSIKNAAPLTNDVAVITAHQFQAEILVDLLRVALQSIDRYDKEIAAIAPTLPDYALFNSLPEAGALLAPRLLVAFGEQRDRFQGADEFQKYSGVAPVTERSGNKSWVHWRWQSPTFLRQTMVEWAAQTINKSYWAGAFYRQQRAKGCPRQTAIRALAFKWIRILFRCWQTHTPYDESKYLNALWRRGSPLLKQLGETT

SEQ ID NO: 88075 - protein, 341 aa, unidentified
MTYCGLDMGKKSSHFCLVDEKRKVLEEGKVRNTEVDIRRVFGKRPPMRICIEASTKSFWMADRLRELGPAVVVVDPGKTKAIGAGLIKNDKLDARVLATLCQADLMAAVDQPEESERLARMMVVARDGLVRSRVSMMVMVRSLLDSEGIDLRHATAEGFPAAVKELFPELQPAMVAALEPLVKGNEDLSEQVALCDKTLKVAARDNPTMQLLMTAPGVGVIVASCFVNAIRDPKRFETSRDVGAYLGLVPKLYQSGTVNRKGGITKHGNRQARWALSMAANNILACTKKKSALREWGIKLSKKRGRKKAVVAVARKLAGILWAMWKNNTSFEARLPQAKAA

SEQ ID NO: 88076 - protein, 429 aa, unidentified
MNVLPVAGIDVGKEFSEMAILSPTNKIYARMKIFHDSFKKVDKAIDLLKKTEKDFANRPIVAMESTGHYHKILFHAFAKAGFEIVITNPLQTDSIKNLGIRKVKNDKVDARKVALLYRFHELKITSIPNDTIDCLKSLCRQYYKMTDQLTAYKNKFIGIVDQVMLNFTDVFKDVTCKTALALLERYPTPSHMLEGNRDKIISLISEISRKGIKRATSKYELLIQKAKDFEPLSIGSPANVSLIQININMIRTLEKSISDIEDAISKLIEDDKKQDMPVLALTLELLCSIPGIGPMTAATILAEVGDFSAFQKPNELVAYCGIDPSVKQSGKFEGTQNKMSKRGSRFLRRVLYTSALANIRKNRSGELNNPVLYEYYQKKCVSKLKKVALGAVMHKLVAIIFAVLRDKKPFELRTPEEHEKQLTAVNKAA

SEQ ID NO: 88077 - protein, 387 aa, unidentified
MQASTVSTPITDRINTIFVAIELSQKTWLVTMHSPDKDKISRHKVQGGDHAGLLALIDRVRDRAARTLGAVPAVVSCYEAGYDGFWLHRLLMAAGITNYVFDPSSIAVDQRARRVKTDRIDGETMLRTLMAYLRGEPRVVRIVRVPMPEQEDARRNTRERHRLTKEQTAHTNRIKALLRLHGFAVGQPRRRDWLNWLAAQRDWQGQGVPPRVLSEIENEHARLMLVRKQLDALARTPAAADPAPAVAEMVRRSELLQRLKSLGPAFATTLTQEAFYKDFHNRRQVASYFGLAPSPWQSGGTDRDQGISKAGNPRARCSAIELSWLWLRHQPDSELSRWFRQRTLNAGKRTRRIAIVALARKLVVALWRYLTTGLVPAGAVLKSAAVQ

SEQ ID NO: 88078 - protein, 341 aa, unidentified
MQVTTIGLDIAKNVFQVHGIDANEKVVLRKQLRRSQVIAFFKALPPCLIGMEACATAHYWARELTKLGHEVRLMPAKDVKAYVKRNKNDAADAEAICEAVRRPTMRFVRIKSAEQQGQLMQHRTRDLLMRQRTQLINALRAHLAELGVVAAQGDRGITELLAVVADDRARLPVDARASVIVLAAQLASLQTMIGSLEKRIQAQHRANEASRRLETIPGIGVIGASAIAATVTDAMEFRSGRDFAAWIGLVPRQDSTGGKHKLGPISKQGDRYLRRILVVGAISVLRRAMQSPDKYPWLTQLLARRPFKVVAVALANKMARTAWALLAHGGTYRAPELAAAA

SEQ ID NO: 88079 - protein, 401 aa, unidentified
MKDVLVLDVAKGKSMFILSSDVGEVLSEPTEYAHNKDNLGLIDSNINKLNIKDNLTVVMEATSIYHKAPERFFKEINYHVIVFNPLIGKEITNTIRKTKTDKQDCIKLTNLFWKGSIPDRNYTEDEIYTKLNELSRQYYHLDEGLTRHKNRYKELLHLCFPEFELCFKDEKIYDLTALNFIKEFPHAYIIKEKRVDALAYNMANTNGRHINYYKRKANTIKEYAHNSYPGVNKNSKNVDNLKQLANIIIDITEQKNDVKNQMIELAKQIKNYKSIVSVFGIGDLSASLIIAELKDITRFNNIKQINASCGLDPTIVQSGKSINYHGPISKRGNRYAKRILFNCSRNIVTLSAKCDKENPIYVYYQKKKQEGKHYYACLTACSTKLIRIIYALCMNNSTSQN

SEQ ID NO: 88080 - protein, 338 aa, unidentified
MAIVFVGIDLAKNVFAVHGIDEHGKPALVRPAVPRARLHELIASLPPCTVAMEACSGGHHWARLFAACGHSVRLIAPKFVAPYRMSGARGKNDAADAAAICEAVQRPSMRFVPVKSIDQQARLMVHRARQGFVEARTATINRVRGLLSECGIVLPLKATTVRRAAGACLGDLPGWANTVVADLLSELHRLDERIEQYDRHIAAIAREDERARQLMRLPGVGPTTATAILAMIGNGHEFKCGRQFAAWLGLTPGQYSSGGKTRLGRITKAGDAYLRTMLILGARAVLVAAKNKTDAVSRWAMALEQRRGYCKAVVAIAAKNSRMCWAMLARGEQFKLPA

SEQ ID NO: 88081 - protein, 412 aa, unidentified
MSYERNAVGIDVSNGRSTVSVLRPFGEVVLLPFEVKHTTEELSALADKLTAINGETRVVMEHTGRYYESIEKVLHEKGLFVSSVNPLLIKQYGNNSLRNVKTDKADSMKIARYALDNWADLRDYTPMDKIRYDLKTLHRQFNLASKQKTATNNNLVSLTEQVFPGIRKIFESPVRRDGTQKWVDFIFTFWHADCVRKHSLKAFTERYQKWCKRHGYNFNAVKAEEVYAHAKTVVVLIPKDSITKTIVQEAARQLTSISRSVETYRAEMNRLASMLPEYEVVMKMYGAGESTGPQLMAEIGDVTRFERKQSLVAFAGVDPVPKDSGDKTSKSNKSSKRGSPYLRKTLFIVMSTILQNMPEDEPVYQFLDKKRAEGKPYYVYMTAGANKFLRRYYAKVMEYLKEKEKAETDSTQ

SEQ ID NO: 88082 - protein, 386 aa, unidentified
MSLRAAVEAPTTAAATRSIIYLGMDVHKDSITIAVLPEGAKVPTRLDRLPNDWPKLKRWLERVARDGELRSCYEASGAGYVLHRALQAWGYACEVIAPSLIPQRAGVQRKHDKHDAAALARLDRAGELVAVRIPSEADERVRDVVRCREVFQREILKSRHYILKFLARRGFVFREGTNWCTPHLQWLQHLTTDASPLAPEDRLVYREYHALLLYKLQRRDELDRQIEQLALLPTLAPMVSRLQCFRGISLHSAMVLATEIVDWRRFERPAQLACYLGLVSREHSSGERMRLGSITKAGNSHCRHVLVQAAWSYRHRPQTSVDLKRRQQGQPPAVITHAWKAQQRLHQRFTHLSYRKRPQIAVVAVARELIGFLWAAMQDVPRAQAA

SEQ ID NO: 88083 - protein, 342 aa, unidentified
MRLYTGIDLHSSNSYLAIIDETGKRVFKKKAPNDPEQILSALAPYKDTIIGIVIESTYNWYWLVDALMAEGYKVHLANPTAIKQYQGLKYSDDQHDAFWLAEMLRLGILPEGYIYPKEDRPVRDLLRKRSHLVKLRTSLIISLQNIICRNNGFRLKTNDVKALKTDRVAPFLDQNEDLALAGKISKESIDFLTLKIKAVESVIEQRMELREPYKNLLTLQGVGKTLGLTIMLETGPISRFAQVGNYCSYCRKVSTKWISNDKKKGKGNKKSGNKYLAWAFSEAAEIARRYYPEARAYYQRKMQKTNAMIAHQALAHKLARAAYYIMRDGVPFMPEKIFTQSA

SEQ ID NO: 88084 - protein, 323 aa, unidentified
MNKDIKYFGLDISHLVFDVTDSDGNYYQFKNGLSGFKKFAKLLGSQSHCVMEATGYYHYQLAYYLLEDGIKVSVENPLSVKRFIQMRLSRIKTDKSDSKLICDYAQQVELKLWKGNSKEVQECLQITRALSVYTKQGTMLKNKLHGESVLGEPSKAVVRSLKRSLKQLEKEMNTLEGRLLVLVKESHQDLFTRLKTIPGIGRKTAIMLIVLTGGFERFSSSGELCSYAGLTPVIRQSGSSIKGRPRISKMGNQKLRNLLFMCSFTACKHNKACRDLYERIVAKGKSKKLALIAVCNKLLKQAFAIAKSGLIFDNEYKSALAKN

SEQ ID NO: 88085 - protein, 363 aa, unidentified
MHYIGIDWADSSHQIAVLTAEGQCISEFAIDHTSDDVMSKLCQQLELLAPVQVSIERLDGLLIDQLLEAGIEVYVIPPRIAAHRRPRKSKDDRGDARLLANLLRTGDEDCRRLERHGSTVETLRQLLQAFEQLQRQQLRTSNQLRQIVKQYYPVLLSMFSDVATHISLTFLETYPDPNQAQRLTYTELEQFLKAHRYTHIRRLDTIYQRLRKSPLEARVWQGFSVHAQALVPILRLLNQQITALKREIRETFARHLEASWWQSLLGSGELTSPRLLACIGDNRSVFPTAAVLQARAGTVPVTRRSGKSHAVRFRWACDKTLRKALVDFARNSIEHSGWARSYYFDQLERGHDKPRAMRGLANR

SEQ ID NO: 88086 - protein, 402 aa, unidentified
MNAVGIDVSKGKSMVAIMRPFGEIVSAPFEIKHTASDINSLVELINSVEGESRIVMEHTGRYYEVLAHQLSEANLFVCAINPKLIKDFDNDSLRKVKSDKADAVKIARYALDKWQNLKQYNVMDELRNQLKTMNRQFGFYMKHKTAMKNNLIGILDQTYPGVNTYFDSPARSDGSQKWVDFASTYWHVDCVRKMSLNAFIDHYQNWCKRKKYNFSQSKAEEIYGKAKELVPVLPKDDITKLIIKQAVNQLNSASTTVESLRTLMNETASKLPEYPIVMAMKGVGASLGPQLMAEIGDVSRFTHKGAITAFAGVDPGVNESGSYEQKSVPTSKRGSSDLRKTLFQVMDVLIKTHPQDDPVYQFIDKKRAQGKPYYVYMTAGANKFLRIYYGRVKEYLSSLPES

SEQ ID NO: 88087 - protein, 349 aa, unidentified
METAYDGRQVVGMDLHRRRSVLVRMTADGRRLGTARITNSPAELRKAIAAAGKHPRVVLEATYGWYWAADVLQAAGAEVHLAHPLGVKAFTYRRVKNDEKDAADLADLLRMGRLPEAWIAPPEIRELRELTRYRLKLVQRRSGFKEQVHAVLAKLGTPVTCTDIFGVWGNTWLDGLALPQPYAGKVASLRTLIGELGSEIAVLDAVIADLLARHDGYHALQVLPGIGPVLAAVIVAEIGDIRRFSCPAKLCCWAGLTPRHRESDTKVARGHITKQGSPVLRWAMVEAIQHQPASSPVRGVKDRIIARRGKEAKNIAKTAAARHLLTGVFYAMRDGHVRSLAARTTQAAA

SEQ ID NO: 88088 - protein, 335 aa, unidentified
MTKKAQSELANFAGIDVGAQQLHLVRRSNGVSSKPQAFANTPRERRELAKKLAKVPNLIVCLEATGVYHQDLALALHDAGVRVMVLNPKVAHNFAKVLRRDSKTDPLDADTLAQYAERMPFEPWARPSTAALQLRAFSRRIEAVKDKKRAAKNQLHALRFSPETPKSVLQDALKEIEQLEQRLVTLTKEARTVIASNPTLHGCYELLLSVKGIAQTSAIALLGELAMLPAGLTHKQWVKFAGLYPRHNDSGTSVHKQPRLSKAGNLHMRKGLFMPALSARTHDPHVQAYFEHLVAAGKKPLQAICAVMRKLLHAIHGMFKNNQPFDNTRFYALPA

SEQ ID NO: 88089 - protein, 438 aa, unidentified
MISAAIERCAGVDVGKKFLAVCILVGPLEGEPRMEKRRYGTTMAELEELREWLRSEGITHAVMESTGSYWKPVFNVLEDAVKVYLANPQEVKNRRGHKTDDKDGWWLAHLLRHAMIYPSFIPPRSIRELRDFTRRRERLLGDATSERNRVQKLLEDANVKLGNELSDIFGVSGQCMLEALLKGEATPEQVAQLARGRAKKKIPQIIAALQGHRMSSHHRKMINYTLDHLRFLEEQIIQLDEDIAATIRQAGLEPKWQLVQSVPGVGATSGAKILAETGGDMRVFPSVKQFSSWAGVCPGNNRSAGKSKSSHTTRGNRWLRSTLVECSWAASVKRDCFIKEKFWRIVSKTREHKNGPALIAVAHTLLKLIYQAFSTDNPYKEHGTPALDERQKQRIIRHHVRRLGKLGIAVYSTQPAATAGIRRPPAALILDPATEPCR

SEQ ID NO: 88090 - protein, 305 aa, unidentified
MYDSTTTVAVGLDVHARSIRLAAVRADELLEERTLPYDEEAVERLLRRWPLVRCCSEAGPTGFGLYRHLVDRGIDCAVVAPGLVPQRPGDRVKTDPRDARKLARLLAGGLLEPIHVPSPELEAARDLVRAREDARLDRMRDRHRLSKFCLRHGRLLPTSSWTVVRRRWLGEQRFEHAAEQITFETYLHALDLVDARIEALEQAIRKTAEQAPWRELVLRMRCLRGIDTLTALALVAEIGDFSRFRSAEEFRAFVGLVPSECAHRRQGSITKVGNSPACSSRPPGTRAGGRRSATNSPAASVAKTP

SEQ ID NO: 88091 - protein, 377 aa, unidentified
MSKIRFVGLDVHAETIVVAIAESAGEVRSLGSIPNRPESVRKMIGKLGPVEKLKCCYEAGPTGYVLYWQLTQLGVACEVIAPSLVPVKQGDRVKTDRRDAEKLARCYRAGELTSVWVPDAAHEALRDLVRAREAAKKDQLRHRHRLGKFLLRHGKRPTGAGEPWTKKYLNWIRIHVRFEQAALETTLAHYLGEVDHVSERIAKLEQAIDEAVKQAPPEIRAVIEALQALRGVAQTTAATVICELGSLSRFESPRQLMGYSGLVPREHSSGSKTQRGAITKSGNAHLRRVLVEAVWAYRHRPNVQGRVLRRQKALALSEEARQIAWKAQQRLYKRFVSLTARGKTSGQAMTALARELLGFVWAIAVDTEKQFPLPKAA

SEQ ID NO: 88092 - protein, 336 aa, unidentified
MSAYIGLDVHKDYTFATVLDQTGRVVVQRKLENEHVPSFLEKFNVLKVGLESSTYIVPLYRALVDKGFRVEVGHPKKTRYIAEARIKSDRVDSKAIAELVRLDALPQSYMPPPEIAALREKVRRRAFLVRQRAKLMAKIRVVLAYEGLKPPEGLSLFTRKGVDWLESLGLEPINCYLRLIMAFNGEIRRLSLELRRVAGLDEDVRLLMTVPGIGYYTALLIKAETGDVKRFKNGEHYCSFIGIVPSTYSSGGVSRHGGITHEGNPWLRWAYFEAAITHVKYDTAISRAYHRIAGRRGRKVALVATTRRLALCCYSVLKNRRPYRAFPHGQALHNSS

SEQ ID NO: 88093 - protein, 619 aa, unidentified
MSAFPRLAAIGVGIDTARYGHVVSFLRPDRQPAAKKLLVMENHEDYQALHERLEQLHQQHPQAHFHIRIDAAGQYAHNLERFLRGLPWPMTLSIGEPKRNHDYQKAHFPKRQTDETESLAMARFAVVETPAATPAVPEEKRLLAEVAGRLQSQIKQTTQAVNRLHNLLARVFPELANYANNYAAAWVLELLDKYPSAVKIGRARLAVLNKIPYLPKAKARELQQAAARSVGSLRGPVAEALVRQLVAEVRHSQTAENELRQMLISSYRALPASKHTHLTSIPGIGEVTAAVLVAKIIDIDRFATPEALVNYFGIFPEEHTSGVDKKGRPLPPGTMVMSPRGNDLVRGYLWMAALSGIRSNPALRALFCRLKAKGKRGDVALGHCMRKLLHLVYAIWKTGKPFDSNHYPWLQGNESPVTEATANPASVQAAPSEAGATKPAPGNATNDKAVGHKREQVPERQVVTTAPSKVEAARVPVKPVAARAARPKVDFAYLRQQVTLEQVLSHLGILGLFQGKAQQRRGPCPIHAEAPATMPAKKYTCSVHFGKNVFHCFQTKCAAQGNVLDLWAAVHRLSLYEAALHLAETFHLARNREEAPVPPARSGASKTSSHGAIITANGA

SEQ ID NO: 88094 - protein, 268 aa, unidentified
MQVTTIGLDIAKNVFQVHGIDAVEKVVVRKQLRRSQVLAFFKALPPCLIGMEACATAHYWARELTKLGHKVCLMPARDVKAYVKRNKNDAADAEAICEAVRRPTMRFVQVKSAEQQSQLMLHRTRDLLMRQRTQVINALRAHMAELGMTAAQGNAGLRELLAIIAGAADDRLPAEAHASLIVLAAELQAMRTLIASIEKRIIAQHRSDEASKRLRSIPGIGLVGATAIVATITDPKAFRSGRDLAAWIGLVPRQDSTGGKQKLGPISK

SEQ ID NO: 88095 - protein, 463 aa, unidentified
MARNNTSKKRKKPVHSLKAIQPDAAGIDLGSREHWVAGPPLKDNTANVQRFGTTTPELLRLADWLKEQKVKTIAMESTGVYWIPLFEVLDSRGFEVILANARQVSHVPGRKTDMLDCQWLQLLHACGLLRGSFRPSDDICRLRALLRERNTMIDQRSDWIRRIQKSLDQMNVCVHHAVSDITGVTGMAIIRAIVDGERDPRALAQMRDRRCRKSEAQIAEHLTGNWRVEHLFNLGQALKMYDHFCQVVAEYDTEILAYINSLQPSVDDDETVPPLSSKSKARDIAKKGQEPMRKALYQLTGFDLTTIDGIGVDTAAVIVSELGFDFSAFPDEAHFVSYLRLAPNLSVSAGKKVPSKLKATTTSRVAGALRTAALALRNSKTALGAFYRRISSRKGASVAVFATARKLAQIIYRLVCYGQAYIDIGAKAYEAQYNHRRLKYYTKALKDMGYKVKPLEAEQAKAA

SEQ ID NO: 88096 - protein, 343 aa, unidentified
METFVGLDVSLGETSVCILDKDGTRIFEGKVTSEPAPIARLIRKRAPGVVRVGLESGPTSVWLTHALTAEGLPVVCLDARHAHAVLSVQINKSDLGDARGLAEMIRVGWFKAVQVKSLNAHERKALLIARHQLVDMRVRIDNQLRGILKTFGLVIGKCGRGQIGQRAQELSKGQPGIDGVVASMVAVRDSLLEQIIVCDRAIRRLAKKDDTARRLMTVPGVWPVVALAYISVIDDPKRFTHARDVGAYLGLTPKRYQSGEVDLTGRISKCGDGFARTCLYEAAGVLLTRVGRWSPLKAWGVRLMKRIGATKAKVAVARKLAVILHCIWTDGIEFWWTKEAATA

SEQ ID NO: 88097 - protein, 350 aa, unidentified
MLVPKTKTYTYFIGIDISRNELDFAVMQGNDFLFHREIKNTIDDIQTLVTELKQLPKFTTSKAIFGMEQTGYYTNHLLNYLKKIRANIVLENALHIRMSMGNIRGKYDKIDAIRIAQYVYKNRDNVKFYVPKRMVIQKLVHLSSLRSRLISTSKALETPIKEQTEFINKGINKQTSGLCKDSIKALKTDITRIDESILEVINEDEVIKRLFTIITSIPSIGRVTAIQIIISTNEFRDISDPKKFACYAGVAPFKRESGLFTTKAKISPIANKKVKALLHTCAVGSIRYFPEIKEYYKRKTEIEGKPKMAVLNAIRNKLILRVFACVNQDRCFEKEYIRPADELRPIHNLL

SEQ ID NO: 88098 - protein, 397 aa, unidentified
MIAVGIDVSKSKSTVAILNGDGSIRAKPFDVHHVADELQALVDYIKRTSDPPTILMEPTSHYHYPLLKAFTEAELPVCLINPYQMKKYGDTELRKAKTDKRDSLRIAQYALEKSYSLIPYTPQDQKYEDLRFLSRQYSQRISTLTVAKVQLLSLLDETMPGITTILPLKSRDPDNCVLLRFIKRFKSFDVIRKMGKTRFLDSYQVLVKKTKDRFAGSKGLAIYELVLNSVTTRGENPLSAMTQDQCVDLVSTSQKAADEINLQMRIIAETMPEYKVLRSMAGVGDRLGPIILGEIGDIRRFHNGKALNAYAGNDAPPYQSGQFESRNRHISKRGNPALRKACFEVMQALKLTKPQDDPVYLFLLKKEQEGKPYNVAKMAAVNKFLRIYYARAMELYK

SEQ ID NO: 88099 - protein, 356 aa, unidentified
MEGKRFVGIDLGKRTYVACAISRGGSLEQWHGKTDGVGRDHLAVRLRYGDVVGVEAGSTAFHIARRLQTVGGVRVVVLDPGKLAVIYASMKKTDKEDALKIARLLETMREEYLPIVPLPTEAEEDMRRLAGSQIFLKKERTRLINRFHALFMTAGITTVTKKDLARDESRRSMLEMLFGVYEEVAGHLVAILAEVEQQIAKLDQSIRNALIDRREQAALLMSIPGVGPVATATFLGYVGDGSRFETASQVSYYAGLVPRLDISGETQRLGHITKSGNPAIRRAMIQAAWTAVRSPLGNPFRDVFERIAATRGRGIAIVAVGRRILELMYTLITHGEYYKYSSAAERQRKLRRYKVA

SEQ ID NO: 88100 - protein, 357 aa, unidentified
MCAQSNIQDRQGQHVYAGFDVAKKSWHVSIHVGSQFYRSFTQPPRAEVLGTYLQHNFPGATHHSVYEAGFCGYGPHRELLAMHVENVVVHPADVPTTDKEHRRKNDPVDSRKLSRSLSLGELRPLYVPSQQAEQDRMLVRMRYSFVKKQTRCKLQIKSLLAFSGISIPADMDERYWSRRFIAWLQQLRLATDTGTSALHALVEELLFLRTQLAAFTRQIRRLSQSEVYQRLVTLLRTIVGISELSAMLILTEIIDILRFRDQEHLASYAGLVPDEHSSGDLQKVGRISRRRNPALRAQLVECAWISIRNDPSLALAFERLSHRMGKHKAIIRIARKLLNRIRFVLIHQQPYKPVVAG

SEQ ID NO: 88101 - protein, 385 aa, unidentified
MTKRHITDDAVGYKLLLELLAEHGDTEDNPIPVAIETSRGLLVAVLRSGKRKVYAINPLAAARYRDRHSVSRKKSDPGDALVLANSLRTDMHAHRPLPDDSDLGRAIAVLARAQQDALWNRQQLANQLRSLLREYYPAALDAFATWTNGLCRPEARELLKTAPTPTRAARLTRTQLQAALKRAGRKRGIDTEVDRLRDVFRAESAHQPPLVEDALGKQMLALLVQLNAACTAADQLAEAVEDAFPQHPDAEILLSFPGLGIQLAARILAEIGDDRSRFADARGLKAYAGSSPITRASGKRSSSTRRWVKNDRLNHAGYLWAFAAPNGSPGAKAHYRRRRDEHGDWNAAARRNLFNRMLGQLYHCLQKHELFDERTAFPIELAAAA

SEQ ID NO: 88102 - protein, 419 aa, unidentified
MQQRTFGKLGDISALTLGGGGIGQVWGPTTREEAMATVREAWEAGRNEMDPPLCGSTAMSHNEFKKISEPIEPQEASPMKPAMNVLGIDIAKHVFHAVGMDNTGEIVFRKRLSRHDLIPFMAKLPPVLIGMEACGGAHYWARRFREHGHNVKLMAPQFVKPYVKSNKNDSRDAEAIAEAVTRPTMRFVPIKDVDQQDIQALHRVRERLIGERTALVNEVHGLLHEYGIVIPKGVAKFRQAVIGKLESEKDKLTSLSQEMFWKLIEEFAGLEKQLAYYQEKLEALATTHPECQRLMTIPGVGPLTATALVAAVSDASAFKNGRQFAAWLGLVPRQHSTGGKDRLLGISKRGDSYLRKLLVHGARTTIRWVGRKTDRRSPWIRQLVERRGKNRTAVAVANKNARIVWALLTSHQDYQLATG

SEQ ID NO: 88103 - protein, 381 aa, unidentified
MDTATRDQECNSEPVLFMAMELSASKWKLGFTVGLGQKPRERTIDGGDLEALSEAVARAKRRFRLAEDARVVSCYEAGRDGFWIDRYLRGQGIENVVIDPASVEGNRRRKKRKTDRLDLGKLLRCLVRWHGGEEKVWAVVRPPSDEAEDARQFHRELEVLKGERTRHVARIKSLLVSQGIQVKRVSTDFVTELEAARTWDGSPVPPQLRDRLVRELARLQVLRQQICELEGQRREAIRKVTDRRMQQIRHLMRLRGIGENGAWLLVMELFGWREFRNRGEVGSIAGLTPTPWASGDEDREQGIDKAGNRRVRAMMIELAWCWLRYQPRSELSMWFEQRFGGGSKRSRRIGIVALARRLLVALWHFLRDGWVPKGAVLTAPG

SEQ ID NO: 88104 - protein, 412 aa, unidentified
MEVIYPCCCGLDVHKKSITACVLWAEAQGKNRKEKRRFGTFTHDLLQLADWLGECGVTHAAMESTGVYWKPVWNILAEQFKVLLVNAQHIKAVPGRKTDQKDSEWIADLLQHGLLRGSFVPPRPTRELRDLTRYRVSLAQEINRIANRIQKVLEDANIKLASVATDALGASGRAILKAMLAGEQDPARLAEMAQGKLRNKIPELKLALEGRMTEHHRFLLRQLFDHLRFTESKLGEIEQEIDKRTRPFADKVTRLCTIPGVDQVTAWGLLAEIGLDMNQFPSSEHLSSWACLCPGSFESAGKRLSGKMRKGNVSLRRCLSQAAWAISMTKNNYLSALYRRIAARRGAKRAIMAVAHALLVIAYHMLKRKEDYRELGADHFDWIDVNRTRRSLVRRLERLGHKVTLEPLAQTA

SEQ ID NO: 88105 - protein, 316 aa, unidentified
MNETIVEKFVGIDVSKSTLDVCIEPDEKTLHVAYDEAGIKQIVDRLKEVSPTLIVIEATGGLEIRIATELASKGLQVAVINPRQARDFAKATGRLAKTDQVDAAMLAAFAKAIRPQARPLRDEDTCALNDMVSRRRQLIDMRVQETLRLGTAASKPLQKNLSKHIAWLDKQIAEIDADLTKRLRKSDVWRIKDDLLRGIPGVGTVTTLTVLAKCPELGTLNRREIAALTGVAPLANDSGKHRGKRFIWGGRADVRAVLYMAAVSAIRCNEPIKAFAERLKKAGKPPKVVIVACMRKLLTIMNSMLKNNEPWSPKFA

SEQ ID NO: 88106 - protein, 326 aa, unidentified
MAKSITICAGIDTGKRKLDVAIDGSPERLQVENTSEGHRALVEWLRRHRVKRVGIEASGGYEQAVVAELRRKRFVVVVFQPAQVRAYARFRLQRAKNDKIDAALIAACTAAVKEIHPAPDPRLLPLAEHLTMIDQIGEDIARLKNRLETCRDERIRQAWKQEIARLETNERIELKALVAAIRKHSDLAKRLDLIHSVGGAGLPTAVAVLVRMPEIGQISREQAAALAGLAPYDDDSGDQLGARHIWGGRERLRRALYAAALPASFRWNPQLIALYKRLIAAGKEHKRALIACARKLLIFINTVVARGTPWQDQPEAAAIATGPSTA

SEQ ID NO: 88107 - protein, 378 aa, unidentified
MKKNELYIGLDVHKETIAVALAEDGRNGEVRNVSTIPNDLYALERLLRRLRGTHEATVHVCYEAGPCGFVIARRLAKLGIDCVVVAPSLIPKKSGDRIKTDKRDAANLARLLRSGDLKPIYVPDPTDEAIRDLCRARTDAVEDRTRARQRIKAFLLRNGYSHKDERSWTPGYMRYLREVQFSHQAMKVIQEDYLHAIEVAQERVNRCEKAMQELLADWQLRPAVEALMGFRGFRIVAAMILVSEIGNITRFLHPRHMMAYLGLVPSESTSSDKRRQGGITKCGNPHARWILIESAQNYAQPPRVGKDLAGRQEGQSQRIKEVSWRAQNRLHLRFKKLQGRKLQRNKAIVAVSRELIGFIWEALRELPCYVQNHELSKV

SEQ ID NO: 88108 - protein, 347 aa, unidentified
MVTFGVDAHKRTHTIVAVDGNGRQLASKTISTTTKDHLGLLTWAEQFADADGLLWAIEDCRHLSRRLERDLLAAGQSIVRVPPKLMAHVRDSARTYGKSDPIDALAVARAAQREPDLPVARLDGPDREVRLLSDHRESLVAERTRAICRLRWHLHELDPSWEPKSRSLDRLSVLDQVAARIENLGGTVARLARGLVDRCRELTLEINDLTAEITTTVTNLAPALIAIPGCGAITAAKIVGETAGVDRFRSKDAFARHTGTAPLPVWSSNKARHRLSRTGNRQLNAALHRIALTQAHWHEPAKLMMDRRKAGGDSGMEALRVLKRRLSDVVYAALRADLALAAEPVAA

SEQ ID NO: 88109 - protein, 360 aa, unidentified
MMLYLGIDQHRKQLTVCVRDEQGDVILRRQVSTEWDRVRGFLAEICKRGGKAGWVAILEVCGFNDWLLRLLDEYGCREVLLIQPEKRSKRKTDRRDANALCELLWVNRERLLAGKRVQGVRRIQAPTDREAEDRQLTELRKRLGQLRTRSINGVKHLLRKHNLEQECPTKGLDTIRGKKWLATVALGPMDRLQMDLLLAQWKLWDEQIKTLEAEIGRRQAESPTAAVIATVPGCRAYSSLTLASRIGSIERFPRPSSLANYWGLTPGCRNSGEATDRLGSITKQGSATARFILGQLVLHVLRRDGAMRAWYARIKKRRGSKIARVAVMRRLATILWHMLKHHQAYQVGGPPRQKLRRKTA

SEQ ID NO: 88110 - protein, 343 aa, unidentified
MKLSRVGIDLAKNVYQLHGVDRSGKTMWKRRLKRHQWFKVLLDKIEPGCEIGMEACAGAHHWGRELQSRGFTVKLIPPQFVKPYVKSNKSDAKDAEAICEAMSRPNMRFVTVKNVEQQDIQATHRIRAELITQRTAKANQIRGLVAEYGLVAPKRLSSLRAAIPCWLEDAENGLTADFRSLLHGVWADLLALDDRVGEMDKLIKRLAENHEECVRLQQLRGVGPMISTAIIASVGDARQYRSSRQMAAAIGITPKQHSSGDRDRLLGISKRGDVYLRTLMIHGARAVVATAKHKDDRLSRWVTGIATKRHPNVAAVALANKTARMAWAMLRNETDYDPDFAIR

SEQ ID NO: 88111 - protein, 319 aa, unidentified
MITIGIDPQKRSLTAVALDPHSRLLGQQRLATTGQASRQLLAWAQQWPQRRWAVEGASGLGRGIAQLLVAAGEPVLDVPAKLAARARLLGTGSARKTDLADACSVATAAIHHRQLRPVAAEDQTVIFRLLSDRRDDLVAERTRTLSRLHVLLSDLQLGGAARELSATRAAALLRKIRPITAVDVERKRIARELLADVRRLDRQVKTASQAIGTAVGEHGTTLTQVYGVGPVLAAKLVGHAGDITRFPDRDHFASYTGTAPVEASSGDVRRHRLNRGGNRQLNTALHLIAVCQIRDPAQGKPSTSASWPRPRRRRRPAGA

SEQ ID NO: 88112 - protein, 433 aa, unidentified
MQDVQDEPLFAERVAGLDIAKAEVEVTLRVPSETTAGRRQQETRTYGTTRRELDSLADWLHCWAVTRAGMEATGDYWKPVFFLLESRGFDCQLYNAGQVKALPGRPKTDRADSIWLAKITERGSVASSFVPPEPVRRLRTHTRYRRHLTQARTAEKQRVEKLLEDGHLKLSSVISDIHGVSGRAMLEALAAGQRDAKALAQLARGTMRGKIRRLEEALDCSFFTAEHAAVLAMMLAAIDCYTAQIEALTARIETLTEPYLRQVEQLDQIDGIGAICAQDIIAEIGADMTLFRTASHLVSWARWSPQVKQSAGKRKGSNATGRGNPYLGAALGEAVICAGRTQSYLGAKYRRLARRMPKKKALVATGNSMLTIVHTLLSDPAASYQDLGADYYEQRMHARRQARNHVRSLERLGYKVTIQALNPDTGEFLTPAG

SEQ ID NO: 88113 - protein, 309 aa, unidentified
MEPKQWVGIDVSGKRLEVFVRPIQRILKVANSPAGLATLVSELLGIDPALIVIEATANWHLAAVAALSGAGLPVAVINPRQARNFARATGQLAKTDPIDARLLAHFAEAIHPPVRVLPDEQTQELAEWVQRRHQLVEMLTAERNRLRAMSGSARADIETHIDWLEKRLVRLDEELERLIADNPVWKDLSALLCSVPGVGSVVSATLIANLPELGSLSHKQIAALVGVAPLNRDSGQTRGHRTTWGGRAPVRTMLYLACVVGIRFNPIIRRFYQRLKQAGKPSKVALVACMRKLLVSLNAMAKTQTQWQS

SEQ ID NO: 88114 - protein, 330 aa, unidentified
MVELGIDVSKTKLDCTLLLDVETLRCRSKSVPNTLDGVKALLQWVERHSGCTAEHVRAALEPTGVYHEAATLALYEAGVRVYVVNPAQLRDFAKGHAVRTKTDAKDSLVLALCVAQVKKLIAWQPAPAEIRELRALMSRLDAVEGELRAELNRQEKAQIAADPALVLRSIAQAISFWQAERERLQQAIDEHIDRHPGLKSEQERLLSIPAVGQKTANRMLCMLHGGQFRSASQLAAYLGLVPVEHQSGTSIRGRPRLSKAGNARVRAALYMAAVTAIRHNPDVRTLYERLLSRGKAKMSALCAAMRKLVHICFGVFKNAQPYRPQIDQIA

SEQ ID NO: 88115 - protein, 344 aa, unidentified
MEHFAGLDVSVKETSVCIVDDAGRIVREAKVASEPEALLAVLNNPSYRFRRIGLEAGPLSQWLYSALSEANLPVICVETRNMRAVLKAQINKTDRNDARGIAQMMRVGLYRPVHVKTLRSQKLRMLLTHRKLLQSKAIAIENDLRGTLRNFGLKVGVVGAVKFETRIKQLVENLPDLALLVEPLLVVRRVLREQIAVLHRRLLDIVRDDEVCRRLMTIPGVGPVVALTFRATIDVPARFRNSRAVGAVLGLTPCRHQSGESDRTGAISKCGDEMMRVMLYEAAQILLVRSTRWSWLKVWAMQIARRCGLKKAIVALARRLAVIMHRIWVDGTEFRWARQAAAAA

SEQ ID NO: 88116 - protein, 371 aa, unidentified
MVKAVKYVGLDVHKETIAVAVAEGERGGEVRFVGTVANEDDAVRKLVKRLTSPGVTLNVCYEAGPCGYGLHRLLTKLGQNCIVIAPSMMPRRPGDHVKTDRRDAMTLARLLRAGELTAIWVPDEAHEAVRDLIRARRNAQDDAIGAKQTVRSFLLRHDRRFGGRAAWTKMYWRWLSEQRFDFPHQQLAFEEMQKRVLEAQARVGRLEAALAEAVDAWCFAPLVRNLQVLRGIRLVSAATLVAEVGDLTRFDNPKQLMAYVGLVPSEHSSGARTKRGRITRAGNAQARTMLIEAGWSYRLPAREERRYRERVIEMPEDIQEIGWKAQVRLCQRYRRLAAAGKPQPKVTTAIARELVGYAWDIARRVSPAVAG

SEQ ID NO: 88117 - protein, 338 aa, unidentified
MTIVAVGIDLAKNVFAVHGAGASGKPELVKPDVKRKKLLELIASLPPCLIGMEACSGAHYWAREFQKFGHTVRIMAPKFVAPYRLGGKHTKNDAADAAAICEAVTRPQMRFVPIKTLDQQSHLFIHRAHQGYVAERTALINRARGLLSELGIVLPQAYKAFKQGVHQVLEDLPGYCNQVIGDMLSEIAHLDERIEQDAKLIAKLAKEDEQSRRLMQLSGVGPTTATAIVASIGKGHDFRNGRQFSAWLGLVPRQNSSGGKTKLGSITKAGDSYLRMLLVLGARALLLSAPNKTDPVSRWALQLKERRGYSKAVVAIAAKNARMCWAVLSLGEGFRVPA

SEQ ID NO: 88118 - protein, 341 aa, unidentified
MQTTKYFIGFDISADDFSASCITSPDNLVFSTQKFSNNIDGSNEFLTLLSNNNIKQSDAIICMEATGVYSENISYFLASKGFTISIEAPHKIKNKTKDSPRKNDFVDALSIAEYAYRYSDKLPIWKPINEIIEQIQVLLTTREHLSVQMIANVNALKTLKHKYYQTPLANQIYEQTISKLKEHIKQIDQEIKTLVDKDDSFKNNISLAKSVPGVGLLLAANLLVLTKGFTEQLNYKHIAAYSGICPYEQISGTSLHKPPRSRMCGPAKLRKLLYLAALSVRTHNQNFKKYFLRKQAEGKNNRLILNNIENKLLKITCAVINSGIAYTENFKSINPELLKTA

SEQ ID NO: 88119 - protein, 403 aa, unidentified
MLFVGVDWGEAHHDLCLLDQDGGVLASRRIADGLAGVGELHALVAAHVEDPGRVVVGIETDRGLLVGALVGAGYQVYAVNPRAVSRYRDRHRSARAKSDRGDAKVLADLVRTDRHNHRQVAGDTPLAEAVKVLARAHQSLIWARQRHVNALRSALREFYPGALAALGAQLAEPEALAMLTAAPTPELGRRLTRAAVRQALVGAGRRRNLQARVVAVHDALAAPQLAAPEPVEAAYRQVVDALVALLGSLNRQVAALEEQLSARFAAHPDAAIVRSLPGLGMVLGARVLAEFGDDPHRYATAKGRKAFAGTAPVTRASGLRTTVVARAACNQRLVDACYLWAFAALTASPGARRCYDVHRARGATHHQALRALGNRLVGILHGCLARRVAYQEQIAWPAADAAG

SEQ ID NO: 88120 - protein, 358 aa, unidentified
MSSKAFVPRDYDVFAGLDVDKKSISVTFTDHQGFIRSLRMPYSVEHLVNHVRKHFPDQKVAFAYEAGPTGYGLYDGLVASSYPCLIASPSMIPKAPGQRVKTNRLDGVSLSENLRGGQLKSIHVPSTVYRELRHLTQLRDTFVSEMVGMKQRVKSLLLLEGIGFPPAPAGSQWSFMVKAKLRKLPCSGTVRFKLDELLDSLEFNEKRVVKTTQQIRRFCQTDPELSRCIKYVMSVSGIGWIVASQLLARIGDWRELKNVRQLGGFLGLVPTEHSTGDRTDRGSITHTGDGRLRSKLIQASWSAIRQDSELREFFGSVCQSHARHLASRVAIVAVARKLSVRISVVLMKQRAYVVREKV

SEQ ID NO: 88121 - protein, 347 aa, unidentified
MRFYNRQHRYYCGIDLHVKTMYICVLDGTGQVLVHRNVKSTPEALLELLAPYRDDLVVAAECMFTWYWLADLCAAEGITFVLGHALAMKAIHGGKAKNDKIDSHKIAVLLRGGLLPQAYVYPAGMRSTRDLLRRRLHLVRKRGQLLAHIQNTRAQYHLPEFGRRLAYPGNRDGVVDHFPDPSVRKSIEVDVTLIDQYDALVTDLELTIVREAKRHDGDAFHRLRSVPGIGKVLGLTILYEIHDITRFDRVQEFASYARLVKCQKQSGGKTLGTSGAKMGNVHLKWAFSEAAVLFLRHTKEGKRLLARLEKKHGKGKALSILAHKIGRAVYYMLSRGTVFSMEKFLAA

SEQ ID NO: 88122 - protein, 473 aa, unidentified
MGKRSGGNGMTRGDRRQPARRERLRGLLPRGGAVIGIDLAEDKQVLAVIDHDVRVLARKTVKVKAFRLGEALDWAVAQAKVKGFERVTVACEPTGPRWMQVQRLCAERGLPLVCVQPLMSHIAREQQDYTTHKTDESDCVLIGRLAAELHCYIPEELDETWAHLRHLGRRRAQLITAATASVQRIRDFLSVAWPTVTEACAGPFESVTWLAALQVVTGRCGGDTARLAPMGPEEFTAVVRAAVPAWGGKNGWGKICGQVFAALTDTEGVVTWSRRGLLRRVADELGDLQRTRAQLRATEADMVMVLGELGLSRLGDIPGLTAVGAAAILAETGDPRRYDSSSSLVKHAGLSPAGNASGAFEGQAHISRRGRPGLRLTVWRAVWPMLQFNPVMAAKYAALTQAAAAAAADAGSQPARAAAAAARARRAKARVACAASLLRWIYSMVVHGTRWDAAAASGAAACQHAPRCQPEAA

SEQ ID NO: 88123 - protein, 350 aa, unidentified
MQIIGCDYHPGFQQIAFVDSETGECGERRLEHTDEAEQFYRELHQRRVQVRVGMEASGHGRWFERLMAELGFELWIGDAAAIRTRRVRKHKTDRQDAELLLRLLMEDRFPRIWVPSWENRDVRQLLWHRHRLVQMRTRVVNQLHAVALNEGLRRKKALWRPAGRVQLESLALAPWASRRRQDLLQLLDGLQPAIADLTAAIEQEAAKRPEALRLMSHPGVGALTALAFVLIIGEPERFANGKKLSSYLGLVPSEESSGDRRRLGHISKQGNALLRFLLVEAAQATVRSDPDWRRQFLHLAMRRERRIAKVAMARKLAVRLFWMWRNGWDYAQMEKLGSRAGQPGTAVDVR

SEQ ID NO: 88124 - protein, 411 aa, unidentified
MDVVYARCCGVDVHKESIAVCVLIREPGQGEQKHKAHFSTVTAELLRCADWLGSLGVTHVGMESTGVYWKPIWNLWEGQFQLRLANASHLKRVPGRKTDDTDCEWIAQLLQHGLLPTSFVPGSELRELRELTRHRSQLVGDHGRVVNRIQKVLEDANIKLASVASDVVGKSGRLMLEAIITGQTDAVQLAGLARGLLRRKKAKLEQALEGRVRSTHRFLLQQYWQQLQFLEQQLASVEQQIDSQMPGFREAAALLDTIPGIDSVAAWGIIGEIGVDMRQFPSAQDLTSWAGVCPGNNKSAGKRLSGKTRKGSRWLRQKLCQAAWAASRTKNSYLSAHFHRLAARRGRRRAIVAVAHTLLVICYHVLQRGCPYRDLGADYFLRANADNLRKYHVKRLQQLGYEVQLTGPAAA

SEQ ID NO: 88125 - protein, 347 aa, unidentified
MNFYTQQHKHYCGIDLHAKAMYVCILDQSGAILVHKNLPTTPEAFLRIIAPYREDLVVGVECIFTWYWLADLCSKEGIAFVLGHALYMKAIHGGKAKNDKIDAHKIAVLLRGGMLPQAYVYPAEMRATRDLLRRRCHLVRKRAELLAHIQNTNSQYNLPEIGKKLAYKANREGVEDHFPDPSVRKTIEVDVSLINHYDQLLGEVELYITRTAKTHDVQTFTRLQSVPGIGKILALVILYEIQDISRFPRVQDLVSYCRLVKCAKESGGKRLGTSGKKIGNVHLRWAFAEAAVLFLRQNQPGKEHFAKLERKHGKGKALTVLAHKLARAVYYMLSRKQAFDLQRFVAV

SEQ ID NO: 88126 - protein, 343 aa, unidentified
MEYYVGLDVSLKQTSICVVDQTGSVVREGVVDSDPEAISVYVRSKAPDAVRIGLETGPTSTWLWTELKELGLPVICIDARHAKAVLKMQINKSDRNDAIGIARIMQTGWFKEVHVKDIDSHSVRALLASRALLVKIKRDLENHVRGLLKNLGLVIGRAKFNVFAVRTEELIEGRPELIATIRPLLEARNAVGQQVSELDRKVMRLARHDAQVRRFMTVPGVGPITALAFKATIDDPARFKRSRSVGAYVGLTSRRHASGEVDWTGRISKCGDAMLRSYLFEAAGVLLTRVPKWSAVKAWGVRLAKRNGLRKAKVAVARKLAVILHRMWIDGTEFNWSKEEIAA

SEQ ID NO: 88127 - protein, 346 aa, unidentified
MSEIKRIAIDTSKSVFTLYAVDGGERAVWRGNLRRREVLNFFARQPPVEVVLEACGGSHHWGRCLLALGHRVRLLPAQYVKPFVKRGKNDRNDAEAISVAAAQPSIGSVPVKSVEQQAAAMLLSVRELLVRQRTQLVNAMRGHAAELGVVAPLGNKGLVALRSEIAVTDEAAVPVAAKQAIALLGREADRLEGQLAAIEARLMQQHKADPLSRRLATIPGVGPISALSFSLRVDPRQFKSGRHLAAWLGLVPRERSTAGKQRLGAISRAGNERLRQLLVLGATAVIRYAKPRPATPGQPATAAWLQQLLARKPRKLAAVALANKMARILWAMMTSGDVYRPRPAAV

SEQ ID NO: 88128 - protein, 410 aa, unidentified
MRRVIGMDIHRTFAEVVFWEDGKLRPAGRVSMTRAGLEGFGRSLGKDDEVVIEATGNAMAVVRVLSPYVARVIVANPLQVKAIAHAHVKTDKIDAGVLASLRAADFLPEIWLPDADTECLRRLVARRNQVVRHRTRIKNEVHAILHAHLIPPCPHADLFGRLGRTWLARQIMPDDECAAIQRHLRELDRLGEDLGVLDREIAQAAIEEPAVKRLLTITGVNLIVAAGLVAAIGDVRRFPDPQKLVSYVGLNPRVRQSGLGLAQHGRISKRGRSHARAMLVEAAWAASKAPGPLRAFFLRIRARRGHQVAAVAVARKLAVLCWHLLIKDADYQWARPALVANKLRAMELKAGQPVKKGNKPGSAYAYNIKALRDREIELARHAEQAYERFVSQWQPRRAKRRTGAANEERH

SEQ ID NO: 88129 - protein, 404 aa, unidentified
MAAVTIGVDPHKASHTAVAISTAEGPLGELRVRASAGQVERLLAWAAAWPERTWAIEGAGGLGHLLAQQLLAAGERVLDVQPKLGARVRLLAAGSTSKNDPNDARSVAVAALRSPACEQVRPDDHAAVLKIWSKRHRDLGRARTQVACRLHAILCELVPGGVCKEIIAAHIADLLESITPSDAVQAARCELAAQFIEDLRRIDARMHDTKKKLATAVRASGTSLTQIFGVGPIIAATVIGAVRDVSRFPDRDHFAAYNGTAPIEVSSGRRKVYRLSLRGNRRVNHAIHMAAVTQIRYRHTAGRAYYDRKLAEGKTPKEALRSLKRQISDAIFARLQADARRAATARARATGPGGQPGNDSVASAAGLHPAHRLFGQATPGPVSTLRPQPAKTSPGAIRKPRRTT

SEQ ID NO: 88130 - protein, 322 aa, unidentified
MSVTVLGIDIAKQKFDAALLVDGKTKHKACKNSAEGFETLMVWLEKQRIQKVHACLEATGNYGEDLAIYLHEAGHIVSIVNPARIKGFGQSELIRTKTDKIDAALIGRFCLAMKPGPWIPPSPEIRSLRALVRRVDSLIDMRSQEKNRISTAHESVIFLIKEHIAYLNQEIEKIRQQIADLIGQDPNLKRKHDLLDSIPGIGKATIPHILAELDDLEKFDHVRQLVAFIGLAPKETLSGSSIKGKPRLCKIGHARLRKALYMPALVSIQCNPVMIAFYNRLKDKGKNGKVIVCAIMRKLVHVIFGVLKSGKKYDPNYKPAFA

SEQ ID NO: 88131 - protein, 391 aa, unidentified
MFFVGIDIAKRRHEACMVNQHGEKIGKPLSFPNTQAGGQHFLNWLLKHSGDLQMVRVALEATGHYWLALFSFLRKHGIKVQVINPIQSDAFRSMYIRQTKNDTRDAFIIAELLRFGRFSTTQLANEDLIALRQLSRFRFSLVDSISDLKRQVICLLDVIFPEYESLFSDTFGKTSSELLLEYTTPEEILAVDTDELTDFIARHSRHHLGREKAEQIQSAAGSSFGIDYALDAYRFQLRLLLEQIRFAEKQLSDLEKVITQRLEKLDRHLVTIPGIGSVLAAAILSEIGDISRFSSGVKLVAFAGIDPSVKQSGEFTGSRNHMSKRGSSYLRRALWQAATVAKMHNPVLKQFYLNKVSQGKHYLTATGAVTRKLTYIVFAVLRDKLPYKAVQ

SEQ ID NO: 88132 - protein, 343 aa, unidentified
MDYFAGLDVSVKETSVCIVDDAGKIVREARVATEPEALLQVLTNTLYRLKRVGLEAGPLSQWLYSLLAEAGLPVICVETRQMRAMLKAQINKTDRNDARGIAQMMRVGLYRPVHVKTLRSQKLRVLLTHRKLLQSKAIAIENDLRATLRNFGLKVGMVGTVKFEARIKELVENLPDVAVLVGPLLVVRRVLREQIGILHRRLLAVVRGDDVCRRLMTVPGVGPVVALTYRVTVDAPARFRNSKAVGAVFGLTPSKYQSGQNDRTGRISRCGDEMMRVMLYEAAQSMLVRSTKWSWLKAWAMKIARHRGMKKAIVALARRLAVIMHRMWLDGTEFRWTREVAVA

SEQ ID NO: 88133 - protein, 348 aa, unidentified
MRKKDIVKKDDIMRKDDIMKSVFLDPANLYVGIDLHKKYYTGTIMDSAGKIVCRDNFPPTLRGAGTFFNFVPPATKMAIEACSLWRGAYKLLIKLGYHVVLAHPAKTRAISGTKKTDPVDSRDLADLLRVGYLPQVYIPDEDMYILKCAARHKADLVRIRQMLQCKIKSYLDREGIFYKNSWSKENLAILRSLHPHVAHYVEGVETMNRLIKDSLKEIRALAHNTYLAGILQTAPGIAEFSSLMILGEVSDVKRFETRKNLVSYGGLCPGIYQSGDKCYPVKNRACNTWLKWIMYVCSRRATRMDTKYTKHYERVKKRKGKKVAKRSTARKMLEDVWCMLTYEHPYIP

SEQ ID NO: 88134 - protein, 324 aa, unidentified
MNLPPLGLDIAKLKFNACLVGAGGKLRHKVFANNPQGFSQLSDWLKKQGVQQVHACMEATGTYGESLAAYLHQQSHLVSVVNPAAIKGYAQSHLSRTKTDRVDAALIAGFCGERRPPAWCPPAPEAQQLQALVRRLESLIEMRTAEENRLCSGITVEAVRESVEELIAHLSEQIKRTQALIRDHIESHPNLKRQRELLDSIPGIGETTAAALLAEVPDFSQYQSARQVAAFAGLVPRERQSGSSVRGRVRLSKIGNARLRKALYFPAVTALRCSPFFQAWADGLRQRGKSKMSIIGAAMRKLIHLAYGVLKTGKPFDPQWAKTA

SEQ ID NO: 88135 - protein, 400 aa, unidentified
MRVIFGIDVSKVSSEVAILVNGEKVHNYTMSNDAIGFSRLLGDLKTVHKPEIIFEATGVYSRRLQTFLDDNGYAYTRLNPLEAKKQLDSLRVRKTDQIDAEKLAQSQFVLNRKTTYVQEEVYQNLRDLSRFYQNLTEDIVRAKNRLHKALQITFPELENILSTPTGEQYWNLVIAFPCKDFVLDLSKNELSKSIRQSTSKRISDKRVAYLAEKLTALANQSYCAVKKTSPILEEVRYYGKELLRLSEQRQTVLDQMVELAQPLPEYDILLSIPGIAETTATSIIGELGDIRRFQSANQINAFIGIDLRHYESGNFLAKEHITKRGNPYARKILFKCIHNIASASHTNPCHIADFYEKRKRQSQMTSTKSHTIASIHRLIRTMYYLIMHNKLYDYASTQNR

SEQ ID NO: 88136 - protein, 366 aa, unidentified
MIKKLLKQVVGIDVAQKKIDVSLGRMDIEVNTEVYAFKVFPNSEKGFASLLLWVKKNTEVDVAVRFVMEATGVYHEALAYHLSTRAYSISIVMPNKITNFFRTLEIKTVTDKSMSEAIAQFGLEKKLDNWIAPQKVYRELRQVTRERDQLIGERTMNKNQLHAEQTEAYPNERTVKRVMDRIIMLNKQIRQIITEVTEMNNNDSEVAAATKLITTIPGVGLLTAITVLAETDGFSLIHNRRQLTSYAGLDVKEKESGTSIKCKPRISKRGNKHLRKAMHLPALSAIRHTERYKATFTSIVGRTGIKMKAAVAVQRKLLEMIYTIYTTKQPFDIDYLQKEAKKKQELKDVKEKESNSIELLPVQAGM

SEQ ID NO: 88137 - protein, 358 aa, unidentified
MNIIGCDLHARQQTIAMVDTESGEFTEKTLSHEGIALREFYAGLEPPVVVGIEATGAMQWFLELLEELGIECQVGHPAKIRAAETRKQKHDRRDARLLLDLLVMKDRFPKIWMPSIEQRDLRTLLRDRHQWVKIRARLQHTLQAIALNHALRRGPALWSAAGQNALQALPLPPYSSQRRTELLRLYVQLQKRIQALDKEVDVQARQRPHARRLLTHPGVGAVTALATEVFLGDPNRFATGNQVASYIGMIPCEHSSGKRQRLGKLSKEGNSLLRYLWTEATLHAVGKDPELKRFYRRKLIQKGMGKARIAAARKLGIRLWIMMRDQIDYEEFCRRGTLRQEGKAHAGMPDFNSGPALQ

SEQ ID NO: 88138 - protein, 350 aa, unidentified
MTIIGCDYHPGFQQIAFVDTETGDYGEQRLAHSEGAEKFYRELAAQGKKVRVGMEASGHARWFERLLAELNFELWIGDATEIARKRERKQKTDRQDAQHILQLLMENRFPKIWVPSGENRDLRQLLWHRHRMVQTRTRIMNQLQAVALNEGLRCKKKLWREKGRQQLEAFRLAPWASRRREDLLQLLDRLNPTISDLTQAIEQEVEKCPEARRLRTHPGVGALTALAFVLIIGRAERFQCGKQIAGYLGLVPLEDSSGNRRRLGHITKQGSSILRFLLVEAAQVTARSIPEWRNKYVHLTMRRGRKIAKVAMARRLAIALYWMWRKGWDYEQLRKFGSHAGQPGNRDGVK

SEQ ID NO: 88139 - protein, 328 aa, unidentified
MDYKYYIGVDVSKYTLDFTVLHEGRYLMHEKVTNSQKDIQTWLKKMMVTYKAGGKKTLFCVENSGLYTALLQRELVRRKVPLWMEAPLQIKLSMGLQRGKNDKIDSRRIAHHAYTNRQKAILWQQPREVIEYLKKLRSVRERLIMAQNTLKQELREMKGFVKRTINDNLSSHCDRSITALKEDLKLVNQTISSTIAEDDRLDQLFGWLTSVDGIGTVLATEMIIATNEFKSFTSPKKFACHCGVAPFRYTSGVSLQGKAKVSKQANQRMKRLLHIAAIAIIQREGDCRAYYQRRIKQGLSKMSVLNAVRNKIIHRAFACVRDQRPYVK

SEQ ID NO: 88140 - protein, 497 aa, unidentified
MDWPVVEHRDQGPGTFGGAVGGAKLVEQGNEVGGALGSAGMDEQAPVHRIKGAEHRPFFRLTGRLDAQLGAAPGPAAGQIGMRERLGFVEEHQINRPHRSFGLQIGKVLTARRDRGCVLAPFESVARAAEGKMGWTPSAPVSPGGVGCSAFLSKEDPMPVIRIGLDVAKNVFQAHGVDEQGTVVLRKQLRRREVLSFFASLPPCLIGIEACSASHYWARELTALGHQVRMMPARYVKPYVQRGKSDALDAAAICEAVSRPTMRFAAIKSVEQQSALTLHRAREILVKQETMLANLIRGCLGEFGIVAPLGIRRMAELVGIIRDEADSRIPPHARIAMTAVADQLGDLQRRIKEIEQAIRAWHRNNDASRRLATIPGVGVITASAIAATVATPTEFKSARHFAAFLGLTPKQHSTGGRQRLGRISKQGDGYIRRLLILGGTALVRYARGAGGTVWAKQLLARRPARVVTVALANKAARIIWALLVRGGVYRSAAPQAA

SEQ ID NO: 88141 - protein, 412 aa, unidentified
MQVVYARCAGLDVHKKTVSACVSVCEPEGGKQQQMRVFGTFTSDLLALADWLKEQGVTHVAMEATGIYWRPVWAVLEGQFQQMLVNPQHIKAVPGRKTDAKDCEWITDLLQHGLLKGSFVPPTPIQDLRDLTRYRAELRQSQNRVANRPQKFLEQANIKLSSVASNALGVSGRQMLEAIIAGQEEAGQLAKLARGKLKNKIPELERALEGRIRDHHRFLLAEYLDEWEAFGERIARLEAEIDKQIRPFEPAAALWQTIPGVDRVTACNLVAEIGVDLKQFPTAAHLASWAALCPGNHESAGKRKSGKTRDGNKWLRRSLCQAAWAVTRKKNCYLSAQFKRLAARRGVKRAVMAVAHTMLIIGYHMLKTGRSYHELGGNYLEQINKDQLQRYFVKRLQRLGLKVTVEPVLEAA

SEQ ID NO: 88142 - protein, 419 aa, unidentified
MKVVYPTCCGIDVHKSFLVATIIKTEGITPSYQKKRFSTFNNEILRLKRWLLENNCRDVCMESTGKYWVPVYNLLEDEINVVVASPKWVKAVKGNKDDTKDSKWIGDLFRLGLVPSSFIPPKKIRILREYTRYRYKLVSCKSSEKNRYQNSFTVCNVALDSVVSDMFGKSASLITDYLIQTDSFDPEYCKSLLQRSLKKKGEAVIESIDGYKIAPAQKERMIMVKGHLNYIENAIEMMDEGIDKLVEPYENHIALLRSIPGVDRRSAISIISEIGIDINQFSDSKRLCCWAGLTPGNNESAGKKKSVRITRAGVYLKPALVQAAHAAVKSNESPYYKNKYERIAKRRGKKRAIIAIARMILTAVFHMFKTDESWNPSDLFKVDLPPVLAEKQKQKAIQNAIKLLVSQGITVLTESPPAA

SEQ ID NO: 88143 - protein, 349 aa, unidentified
MNYVGIDFHKNYSFITEMNEAGVIKRQVKISNARNTLTNYLDKLPSHSKLAIEATCNWYYFYELVEDHDIDIFLAHPLKTKAIASARLMNDKVSSATLAHLLRADLLPTAYIPDQHTRDIREVLRMYAFLIAQRTRLKNRVHAILMKNGLSCPYKDIFGKKSLHWLSDLTLRACYQDAIASYTRLAEAFNHEINLLKQTIEELAYDHPYARILDTHPGISYYSGLLIAVEIGDIQRFPNHGKLCSYAGLVPTMHASGGKVRMGSITKQGSKWLRWILVECALHAIRKSSHYHALYMRVAQKQGSGTARVAVARSMLRAIYAMLKVNRPYKERQLRSAPWGHNLIKGSEI

SEQ ID NO: 88144 - protein, 429 aa, unidentified
MEVLHPRCCGLDVHKDTVVACVRLVIDGKPVKEVRTFATTTASLIELSEWLTETKCTHVAMEATGVYWKPVWHILADSGFQLVLANAAHIKNVPGRKSDVKDSDWISDLLAHGLIRPSFVPDGSTQEMRTFLRTRKQFVHEKGSHILRIQKTLEDANIKLDSVITDIIGVSGRNMIEALIAGERDPAKLAALADRRLKASQQTLRQVLRGRVTAQHRFLLRLHLDQIDALDAAIARIDREVEASIAPFRTAVEQVRTVPGIKSLAAQTILSEIGIDMTRFPSSGHLISWACICPRSDESAGKRRSTRIRKGSPWLKTTLVQCAWAATRKKGSYLQAQYYRIRARRGPKKAIVAVAASILTAIYHMLKDGTMYQDLGPNHFDANAKERQKNRLLKRLADLGYDVELTPFPTGVAPAEALAAEALAAEALA

SEQ ID NO: 88145 - protein, 354 aa, unidentified
MSQKLDSEISVIGIDIGKNSFHLVGQDRRGNIVLRQKWSRGQVEARLANVRPCLIGMEACVGAHHLSRNLQALGHDARLMPAKYVRPYSKGEKNDYRDAEAIAEAVQRPTMKFVATKSADQLDLQALHRVRERLVGQRTSIINQIRAFLLERGIAVRQGLHFLRAELPTILAKRTDVLSPRMLRVIEDLAGDWRRLDERLAALSDEIMTLGRQDKGCERLMTVPGIGPIISSAIVAAIGTGDAFAKGRDFGAWLGLVPKQMSTGDRTILGSISRRGNRYLRKLFVQAAWVVLAKISPEGWERYGLRSWIEAAKQRLHRNVLAIALANKLARIAWAVLHKGRAFECVKTNAPRTA

SEQ ID NO: 88146 - protein, 402 aa, unidentified
MVSDFMKGRYNLMIYVGIDIAKLNHFASAISSDGEILMEPFKFTNDGDGFSLLESNLASICDDKDNIIIGLESTAHYGDNLVRYLVASFYKVCVLNPIKTSTMRKNNIRKTKTDKVDTYIIAKTLMFQESLRFVTFYDLDLMDLKQLGRFRQKTIKQRTRLKIQLTSYVDQVFPELQYFFKSGLHQKSVYALLKEAPTPKAIASMHMTHLANLLKVNSHGHFTKEQAKELRVLAQKSVGASDSALSIQITHTISQIELLDSQLEQVEAEMADIMKFNDSVIMTIPGIGYINGGMILGEIGDVHRFSNPNKLLAFAGLDPSVYQSGNFQARRTRMSKRGSRILRYALINAAHNVVKNNATFKTYYDKKMAEGRSHYNALGHCAGKLVRIIWKMMTDNVEFNLD

SEQ ID NO: 88147 - protein, 316 aa, unidentified
MTSTRIVGIDVSKATFDVAFSAEARAVYSNDPSGFTRFRQALADGDHVIMEATGTYFLKLATFLSEQGITVSVINPAVISYFARMRLVRAKTDRVDANIIREYGCLETLPVWMPTEDVFIELNQLDSHLHGLQGDRNRVIGRLEALQQCARINAYTLEDLQLQLTDLEGRIKQCEKELVVLTEAHFPELLTLLTSIKGIGKKTAIMFIVLTHGFTRFTSPKHFASFLGLSSFIRQSGTSVRGAGGISKMGNPRMRQLLYMAALTARTKNQACKTFAERLANNGKPVKVVHIAVANKLIRLAFAVCLKQQSYSECYA

SEQ ID NO: 88148 - protein, 430 aa, unidentified
MKSTQNKKIQQVKETTLVVGIDVGSQKHYFRAFNWRGIELTKKPIPFSNSMVGFNAFYEEVTRIMEQNDLEEILVGFEPTGHYWFNLGQFLSGKNIRFVMVNPLHVHRTKELDDNSPSKNDRKDPRIIANLVRDGRYFYTYMPTGVYAELRNASNRRFVLTEELIRSKNRLQKWIAVYFPEYKGIYTHIDAKGGLMVLKTAPTPEKITKLGVDGIIQIWKDAKLRGNGHKKAMLIVHAASQSIGLTEGLEEARMEIQDLIEDYELQLKRLEKVNSLIENLCRQIKYVDKLLEIKGIGIITVAGFIAEVGDITRFDKAKELQKLAGLELVADSSGKHNGKTRISKRGRKRLRYLLVQAAVSVIGKNEEFRQIHEYYTTRHNNPLKKMQSLIAVACKLIRVFYVILTKGKSYDASRLLEDIKRPVTTKTKAA

SEQ ID NO: 88149 - protein, 343 aa, unidentified
MQTITTIGLDIAKSVFQVHGVDAGGQVIVRRQLKRRYVLTFFQKLSPCLVGIEACASAHHWSRELQALGHTVRLMPPAYVKPYVKRQKNDATDAEAICEAVTRANMRFVPTKTSEQQSGLVLHRARHLFIRQQTSVINAIRAHLAEFGIVAPVGRHGVEELLNVVADPNDKRVPEIARACLSAFGAQLRMIKEQILEFDRLIRTWHRSNEMSMRLDEAPGVGPVLATALVAAVADPKSFRSGRNFSAWIGLVPKQHSSGGKNRLGNISKQGDRYLRGLFVAGALAVIRYAKIHGTKHRPWLTALLARRPTKVAAIALANKIARMVWAMMARGERYKEPFALAR

SEQ ID NO: 88150 - protein, 404 aa, unidentified
MLFVGVDWAEDHHDVCVMSEDGRVLGKRRVPDNVAGIGDLHGLIAEHAGDDEPVVVGIEIDRGLVVYSLLAAGYEVYAVNPMASARYRDRHATSGAKSDPGDAKVLADLVRTDRHNHRPIAGDSDLAEGVKLVARAHQSAIWGCQRQLNALRSALREYYPGALVAFGTDLASTDALAILAIAPTPELGRGLSRSKIASALRKGGRQRNVERWTEEIQSALRSEQLGAPELIAHAHGLIIRSAVALITTFNEQIVELEGALSEHFEQHPDAKVVLSLPGLGTVLGARVLGEFGDDRTRFSSPKSRKNYAGTSPVTKASGHSRIVLARHARNRRLGDACDQWAFCALTKSPGAKRYYDELRARGKTHRQALRQVANRFVGILHICLERGVLYDEAIAWPTDSAVAA

SEQ ID NO: 88151 - protein, 344 aa, unidentified
MNITRVGVDIAKSVFHVHAVDRHESTQWQAKLKRSQWLESLCERVDPGAEIGMEACASAHHWGRELQKRGYRVKLIAAQFVKPYVKSNKNDRVDAEAICEAMSRPGMRFVAVKSIAQQDTQAVHRIRAELVGQRTAKVNQIRGLVGEFGIVAPVGIQKLRRAVPQWLEDAENGLTDDFRALLAGLAEDLRYLDERINSLDDRIAQCVKEDPVARRLLELRGVGPLTASALAGALGDGKAFTKGREFAASLGLTPRQHSTGGKERLLGISKRGDSYLRKLLVHGARAVIRHAKDRDDGLSQWLNELTARKHVNVATVALANKTARIAWAIVHNDTAYDPALVAAQ

SEQ ID NO: 88152 - protein, 407 aa, unidentified
MEITCGIDWAEAHHDVALVDHDGQRLANQRIDTGITGFGALMALLADHVEDPSTVAVAIETEKGLLVAALRAAGFTVYAINPRAVARYRERYAQAGGKSDPGDAVVLADILRTDKHLHRALPAVSELGAAVKVLARQHQEAIWARQAAVNRLRSLLVEFYPQALAAFPNLTHKAALEILGAAPTPALGLKLTRSRIVSLLRRSGRGNRPGLAERIMAEFRAPALRQPERVEAAFGQAVAALVDTVTAMQAGIAKLETTMNAEFAEHGDAKILGPAPGLGPILAARVLGEIGDDRARFEAAANLRAFAGTAPITRASGKSKTVRTRHIRNRRLADACHWWAFAAISASPSARAHYDRRRAIGDSHNAALRNLANKLLGRLWWCLQNNEPWDDHAAWPPPPQNHQQVAA

SEQ ID NO: 88153 - protein, 351 aa, unidentified
MKICAGVDVSAATLEVAWRTANGPLRRRTFVNDSSGHQALIKELRRERLPVFVVMEATGIYGLDLALALDRASGVEVMVANPRTIADFGKALLQRSKTDRLDAETILLFAERMPFVPWHAPSTTILELRAITRRIATLGKMMRAEKARQHTAEASKAVGAILHKSARNTVAMLEREIVTLRNAARKVIDGDAQLKRRMELLTSIKGIGSISAVQILAELMLLPADMTDRQWVAHAGLDPRLVQSGTSVRLTARISKAGNHYLRGALYMPALTAGRYEPHVVGFRAHLLARGKKPKQIHVAVMRKLLHAIHAMFRSDTVFDGSRFYRLAAGAAGTSGIASSAISEVSAAHHP

SEQ ID NO: 88154 - protein, 322 aa, unidentified
MSLPNPLCVGIDVSKTTLDIAATSAFAQFTTNNDADGFDAIIAELRKHSVALILMEATGGLEAAVACSLQADGFEVAVVNPRQARDFARAMGYLAKTDRIDARVLAQMAEVIHRHPERERFIRALPDAERQVLAAMVVRRRQLIAMLVAERNRLHPAHPQSRKSINIIIQALENELARIDEDMNRHIQSHFKELTERLSSIKGVGTITAAALLAEVPELGRLSRREISALIGVAPVNRDSGTMRGRRTIFGGRAGPRTVLYMATLVATRFNPVIKAFYMRLLAAGKAKKVALVACMRKLLTILNAMLRKNEEWNESYHHITP

SEQ ID NO: 88155 - protein, 350 aa, unidentified
MSSTFTSTIATIGIDLGKNTFHLVGLDRRGAIVSQLKLSRGQIERRLANVPPCLIAMEACSGSHHIGRRLTALGHEVRLIPAQYVKPFLKGHKNDYRDAEAIAEAVQRPTMRFVAIKTPEQMDLLALHRVRSRLVGQRTGLINQIRGFLIERGITVRQGVLPLRKALPDILSSNAEVLSPRMVSLIADLMQDWRRLDERIETVSTEIEALARQDESCQRLMTVPGVGPIISSAVVAAVGNGAGFKQGRDFGAWLGLVPKQESTGDRTILGKISKRGNKYLRTLFVQAAHVVLARRPGAAKRALWPWIEQASRRLHRNMLAIALANKLARIAWAVLARGRAYEPRVPAHAA

SEQ ID NO: 88156 - protein, 347 aa, unidentified
MRFYTQQHQYYCGIDLHARKMYVCIQSNIGKIVLHKNIKTDPQIFFEIIFPFLPEIVVGVECMFSWYWIADLCHEHCIPFILGHAFYMKAIHGGKTKNDKIDSRKIAALIRGGNFPLAYPYPKGMRSTRDLLRRRIHLVRKRSELLSHIQNTNTQYNLPVIGERIKYKANRKGIAERFEDPSVNKSIQIDLAMIDTYDKLLKDVELYILKHAKAHDANTLYLLQTVPGVGKILALVMLYEIHDIGRFPLVQDFSSYCRLIRPGKESNGKKTGKGNKKIGNPHLKWAFSEATVLLLRHSERAKKLHQKLVKKNGEGKALGILSNKLGRAVYYMLKNKEAFDMNKFFSN

SEQ ID NO: 88157 - protein, 450 aa, unidentified
MRSKPKHRPVPEEIPDADHELVMERVCAIDVAKASGVVCVRTRREHRRVSKVWDLESTTGAVSDLAGQLMELGVEKVTVESTSDYWRIWYYLLEAAGLDVQLVNARDVKNVPGRPKTDKLDAVWLAKLTEKGLLRPSFVPPAPIRQLRDYTRLRVDLTRERSRYWQRLEKLLEDALIKLSSVASTLNTLSARDMIEALIAGERDPRRLADLARGRMQTKRSALIKALDGRFDDHHAELARMLLDQIDTLSAQIGTLTARIDHLLADDDPDDADGGGSVADQVAAASTRPGAVERLTEIPGIGQTGAQIILAEIGLDMTQFPTAAHLVSWAKLCPRTIQSGPVRRGGKTGKGNPYLKGALGEAAAAAAKTDTFLGERYRRIVKRRGKLKALVAVARSILVVVWHLLIDPFARFHDLGPDYHTRRIDLQRRMRNHIAQLTAMGYHVTLEPAA

SEQ ID NO: 88158 - protein, 370 aa, unidentified
MTHVTSIGLDVHARSVAACAFNLYTGEVTQRAFGTDAEEMASWIKTFEEPKAVYESGPTGFALCRRLRELGVDCIVGAVSKMQKPAADKRRKNDRRDAAFLARLLATRNVTEVWVPPLEVEAARDLSRALDDARIDLQRSRQRLSKFLLRRGHVFDEVDALGRKKGAWTRAFWRWAEGLRPQEKAAAHAFDHYVTCVRCAESDKRALERLVLAEARGERWKDRVGALASIKGIDVISAFSLVTEAGLFSRFPTAGSYASWVGITPSEHSSGEKEAWGGITKTGNGASRRILVESAWHYSSCSPKPKAAPTGYEVSRHIKSRADDATARLVRRRESLRAAGKRACVANVAVARELACWVWEIGRRAEGTLG

SEQ ID NO: 88159 - protein, 339 aa, unidentified
MKTIMIGLDIAKTVFQVHGVDKAGNLVHRRRLRRSQLEAFFAGIDPAVIGMEACGSAHHWARLLESLGHEVRLMAPAYVKPYVKRNKTDGRDAEAICEAMQRPTMRFVAVKSVEQQAVTTLHRARALLVRQRTALANTLRGLLAEFGMVAPQGTRALRGLIEDLGGTSAVPPLTVETLVRLARQWEGLDADIQALDRRIIAAVRDNEAARRLMEIPGVGPISASAVLATVGDARQFRSGRGLAAWLGLTPRQNNSGNKRRSGGISKQGERHIRTLLILGASAHLRHEPHRKTRDPWLAGLMARRPVKVAAVARAAKTARIIWALLTRGERYRAPVSSRT

SEQ ID NO: 88160 - protein, 341 aa, unidentified
MMGNVTTIGLDIAKSVFQAHGVDAAGEVVVRRKLTRGRVLAFFESLPRCLVGIEACSSSHYWARELTARGHDVRLLPAQYVKPYLKRQKNDAADAEAICEAVTRPTMRFVPVKSPEQQSVMMLHRVRLMLNRQRTQISNALRAHLSEFGVVAPIGRNGIEQLLVVINDESDTRIPADARLCLRMLEAQLRVVKEQILENDRRVRASARETELGRRLMEIPGVGPLLASAFVATVADAHAFKSGRCLSAWIGLVPKQNSSGGKEKLGSISKAGNRYLRQMLVVGAMAVIRYAERNGTRRPWLVQLMARRTTKVAAVALANKTARMVWALMTSGERYREPVIA

SEQ ID NO: 88161 - protein, 342 aa, unidentified
METRRYIGIDLHRNCFTACVRLENGRNYLSEWKLEDLPRFAKKLRASDEVAVEMTGNTRFFHEAVAPHVARLVAVDPNQFKVISHSVKKTDPNDARNLALYLAKDLLPEVRMKEKTEAQIASLTQTRDTLVKLRTALKNKVNNILAAHGINLAKEALSSEKTLAGVLQMPFDEMVELELQVIVEQIRGLNQSIGKLEQTIKDRGQKLKGHHNLTSIKGIGNLGASILLSVIGNIHDFADEGKLAAYFGIVPRVQNSNETERSGRITKRGTKLGRTTLVQCALIAKRYSPYLARYYDKIKSRRGGGKAIIALARKFLGIIYRTLKNDWVFEDFPNFVLAEATS

SEQ ID NO: 88162 - protein, 390 aa, unidentified
MSQSFDASRSLTAFEQDSTLVAVIEMSQSKWLVAAVIPGIARQPLKKLDADAGALLKLLQRWREEARKAGREVTRIVCAYEAGRDGFWLARWLQAHAIEAYVIHATSIAVSREHRRAKSDRIDTELLMRSFLGWLRGEKRHCSMVAIPTMAEEDARRPSRERENLVGEQTRIVNRVKAVLALFGIGGFNPRLRKAVQKLETLHTAEGTPLPENAHAELRHDLERLRLVHDQICTIESERLRRLAQAPAAATGPHAMVRLIAKVLGVGIETADMLVNEVLARNLRDRRAVARYAGLTGAPDESGKRRREKGLARAGNGRVRRGMIQLAWRFLIFQKDSPLVRWFRERTADGRSTTRKTMIVALARKLLIALWRLVTTGEMTEGLKLRPAGT

SEQ ID NO: 88163 - protein, 387 aa, unidentified
MEVLYQSCAGIDVHQANIVVCILHGPLTSTRPKREMATFDTTTKGLRACHDFLSQFHVEAVGMESTGVYWRPVWHALCDDFELILAQPAHMKAIPGQKTDKKDAHWIAKLTRIGLLPRSFVPDETIQELRELTRQRKHYVESRNRETNRIHKILQSGGIKLTTYIEDIMGLSGRNLLQLLVDGTPITPRIVHQSVYTSLKKKVPQLLEALDGYFSDHHRFMLKQSLEIYDFYQKQIELLEERITVYLSQYENHVETLDSIPGIDVITASVIISEVGVDMSQFPTFGHLASWAGLCPGNNESAGKKRSTKIRHGNSYLKKCLCQAAFAARNQKGSTLADRFYQIQSRRGSQKATIALAHQLLKIAYILLKEQMTYPEFLAQKRLLGTS

SEQ ID NO: 88164 - protein, 411 aa, unidentified
MDVLYPVCCGLDVHKKTITACLRFPSARARAEEVRTFGTTTRELLRLADWLTAAGCTHVAMESTGVYWRPVYHILEASFEVLLVNAQHVKAVPGRKTDVKDCQWLAQLLEHGLLRGSFVPPAPLRELRELTRYRRQLVQEHAREANRVQKVLETANIKLGDVATDVLGVSGRAMLHALIAGERDPERLADLARGALRQKAEALREALVGRFTLHHAFMLQGLLDHIEFLDQQIARFDERIEEQTRPFGPAIERLDTIPGVGRRSAEQILAELGDDMRRFPTAAQAASWSGICPGNHESAGKRRSGRTRKGNAWLRSTLVESARAAVRNRGCYLSAQYHALARRRGDKKAVVAVGHSILVAAWHILRDGVEYRDLGPDHFDRLNRERLVQYHTRRLAELGLTVQLPGAQATA

SEQ ID NO: 88165 - protein, 338 aa, unidentified
MNKYSGIDLHANNCVVVVSDEEDHICCEKRVPNDLAKVIALLEPYRSDLVAVAVESTFNWYWLVDGLRTAGFEVKLVNTAAIVQYEGLKYSGDEHDARHLAHLLRLKLLRFGYVFEPEWRAIRDLARKRLQLVRTRTTHILALQTIFARQNGGHLSGDAAKAFAVEDIARLGWSDDVTMAAQLNVLAIQAMERGIAIVEHRLHDRVKLTSEYALLKTVPGIGEILSTVIMLETGPIERFTSAGNYASYARCVGSGRFSNGKKKGEGNRKNGNTYLAWAFVEAAHFAARYNDAAKRFYERKRARTNTALATKALAHKLARACYHMLKGQVAFDEKRCFS

SEQ ID NO: 88166 - protein, 444 aa, unidentified
MAVRKREDEVFPNAAAVDIGASSHWVAVPPHSTDDAVHEYGVVTDELNSMAQWLLACGVDTVVLESTGVYWIPVYEVLEQRGLKVWLVDARQIKYVPGRKSDVQDCQWLQKLMSLGLLRAAFRPGPQVCVVRAVARQRDVLLAGQASWVQRMQKALVQMNIQLGEVLSDVMGATGQAIIRAIVAGERDAKILARYRNGRVKAGENDIARSLVGNWREEHLFVLAQALAIYDDIQRHLDVCDAKLQALMSQLGASKVDLGRAPRAGSKARVEFDLRQMLANWAGVDLTRINGLAATTVLKLLSEIGPDLSRFASVKHFCSWLGLCPGTKISGGKVLSSGTKRAANRARQALKLAAQSLWHSDSALGAFYRRLSARMDKPRANTATAHKLARMVYFMLMRGEAFVDQGQQRYEQQQRQRSVAALKRRAAALGFKLTPTGASSAAVV

SEQ ID NO: 88167 - protein, 339 aa, unidentified
MTEEKGFIWAGIDVSKRTFFAAIDIENEAKKLPVAKLPAKEFKRSKDGVASFIKWADELLEDQEFAVVMEATGSYSLELISLLKNQRTDLRISMQNPRMVSDFIRSLNQPHKTDKTDAQAIARFGTERKPEEVSLPEPHWAELRELERLRSAMVRVRVELENRAESLFTAFARRTNQRTIGSLNMEISELEREIKHLVIEHEDIHSEVRILTSMPGVSFVSACAILAELGSLKQYDQKQISAVSGLAPRRMSSGSSLNKSFMGRNGSKRLRQILYLDSIYAVAKVPLLNSMYDRLIAKGKSKMTARCACMRKLLLILRAMVVNNKPYEENYSKTFPKSA

SEQ ID NO: 88168 - protein, 458 aa, unidentified
MAAKHKAKRKPRFQVIHPHAAGIDIGSRFHVAAVAADRDEDPVRTFGSFTGDLHRMADWLKSRGITTIAMESTGVYWIPVYEILEARGFEVLLVDARDSKNVPGRKTDVNDAQWLQQLHQFGLLRGSFRPKQEIVTLRAYLRQRERLLDYAASHIQHMQKALDQMNVQLHHVVSDITGVTGMRIIRDILAGTRDPALLAAHRDRRCKASAETLAEALTGNYREEHVFALRQAVELYDCYQEQVAKCDQEIERVLGELQQEVEVPETPLPKPRHRGGRQHNAPLFNVREALYGLLGVDLTQIHGMGPYLALKLIAECGTDMTRWPTAKHFTSWLTLAPGSKISGGKVLSSRTRPSSNRAAALLRLAAVTVGQTDTALGAFYRRLSARVGKAKAVTATARKIAVLFYNTLRYGMEYVDPGAAYYEERYRQRVLAGLRRRAGALGFALVEHPDSAFEAAVS

SEQ ID NO: 88169 - protein, 343 aa, unidentified
MQITTIGLDLAKHWFQVHGVDADGRVVARRRLWRSGVIAYFRSLEPCLVGMEACATAHYWARELTALGHTVKLMPPAYVKAYVKRNKNDAADAEAICEAVTRPSMRFVPVKDAAQQSVLMLHRARSLLVRQRTMLVNALRAHLAEFGIVAPQGLRHVEILTKTITRQQPQLPELARSILQTIVDQLNGTMARIQEIERRLARWRRQSRVSRLLATVPGVGIMGASAIAATVADPSLFRSGREFAAWLGMTPRQNSSGGKERLGRTSKRGDKYIRCLLTAGAVAVLRHARNRPTRDGEWVRALLARKPTKLAAVALANKTARIVWAVMMRETGYRPTAVFGQPA

SEQ ID NO: 88170 - protein, 429 aa, unidentified
MRTESTPGARGPVFCGVDTHADSHWLCVLDWRGRKVLSRQFPADAAGYEALAGAIAAAGEPACVAMEGTSSYGAGLTRHLASLGMPVREALSPARMQRRRPGQGKCDEADAERAARAAMSGSKLGTPKSQDGWVDGVRCMLAARSGAVKARTSAINTARSLLTTAPEGLRSRFRGMAGPRLMEELPSVRAEGALGAALGALADLWAAARDAALDMERAIEASLEENCPALLAMYGCGPVSAAKLAVAAGDNPGRLRSEASFAAICGACPIPASSGKTVRHRLNRGGDRQANSALHEIARQRVMRDPETAEYAERARGRGKSDREVMRCLKRYVAREAYRALMHPHEIRRPEDASELVAARRAAKVSQVRAASILGTSEKYISMLERGQRELKPIRRAYEAWVEAGLPLDWDRQAFEAERKMDSKKHLAK

SEQ ID NO: 88171 - protein, 242 aa, unidentified
MSGAVVGIDIAKRKFDVALFLKGKFKHKACMNNKQGFEDLSRWLKKQGVEHVRVCMEATGTYGDELATYLYDAGHLVSIVNPVRIKGFAQSELLRTKNDKVDAGLIARFCVAMNPGTWTPPPPEIRRLQSLVRRADTLIDMRTQEQNRLGTTHETIEPSIKEHIGYLDQEIEKLKRQIAEVIDHDPNLRGKRDLLDSIPGIGETTIAVILSALHVFEGVKCVQKTVAFIGLAPKETLSGSSI

SEQ ID NO: 88172 - protein, 411 aa, unidentified
MKNNIKTTKMQLAKKHAVKPQINDAQTKKVSIEREQVSERLKHSLRNRGRRARAVKQVSCYVGMDLGDKNSNYCFIDAKGNIFAEGTLATAQAELNELFSSIPKCRIAIEVGTHSPWICGLLKSHGHEVIVANPRKVEAIHKNKRKNDKIDARTLARLVRVDPELLYPIQHRGDPARQDLVLLRAREGLISARTKLINCVRGQVKSLGGRLPNCSAESFHYTVVEKIPDSVKESLLPLVHQIGEMSQTIRTFDAQVIRMSEQKYPETERLRQVRGVGPITSLTYVLTLEKPERFEKSRDVGCYLGLVPRQDESGEISKQLRITKTGDSMLRQLLVSCGQYILGPFGEDCDLQRFGLKLAERGGKNAKKRAVVAVARKLAVLLHRLWLSGEKYEPLYNSQLQTKTLAIAANG

SEQ ID NO: 88173 - protein, 349 aa, unidentified
MEHVGMDLGKKESQIAIITEAGELIEKRMRTERDRLVTYFKDRPKAKILIEASTISEWVARLLEELGHEVVVADPNYAPMYAQRSRRVKTDKRDALALAEACRLGAYRPAHRTSDEQCHVRALLTVRDSLVRTRARWVTLAQAIVSREGFRVPTGSSGCFGERAERLELPEPLTAEIAPLLTMLTPLNEQIGIMDETLSDLSHKDERVQRLMTMPEIGPVTAAAYVATLDEAGRFRGAHQVEAYLGLVPREWSSSEVQRRGQITKAGNSRMRWLLVEAAWRLATHKKRPETQALREWAERIARRRGQRVAMVALARKLSGILYAMLRDGVAYDPAELKGAVRSKAEQVA

SEQ ID NO: 88174 - protein, 387 aa, unidentified
MKRNDLSRSLVAFDQHSTLVAVIELSLKSWLVAGLVPGVERSPLKKQGADPDALLALLERWRAEAHKAGRAVERVVVAFEAGRDGFWLARWLRAREIESYVMHASSIAVAREHRRAKSDRLDTQLLMRSFLGWLRGEAKHCSMVAIPTLAQEDARRPHREHETLVRERSRIINRMKATMIRLGIRTFNVKLHRAADQLAALRSPEGLGLPANTLDELRRDLARLQLVREQIKEIEQARLERLKAAPQAGTHPMLLMLAKVLGIGLETADMLVHEVLTRNLRDERALGRYGGMTGAPNESGSKRGEQGLAKAGNARVRQGMIQLAWRWLMFQKDSALAQWYRTRTAGARGDIRKTMIVALARKLLIALWRYVTTGVAPEGARLRPAAI

SEQ ID NO: 88175 - protein, 338 aa, unidentified
MKLFGGIDLHSNNNVTVLIDERDEVVYRKRLPNDLRLIIEQLSPYQSLLEGIVVESTYNWYWLVDGLMEQEHRVHLANTAAIQQYEGLKYTDDDSDARWLAHMLRLGVLPQGYIYPKEERAVRDLLRKRSQLVHHKTAHLLSVQNLYTRNTGSSLSANRIKKLTPEQVDGLFTLGDVGLAVKANLSVMRCLEAEIKSLEEIVKERVKLRPAFRYLLTVSGIGQTLALTIMLETGDIRRFPRVGNFASYCRCVGSEKISNGKRKGKGNTKNGNKYLSWAFVEAANFAIRYEPLICRFYQRKKAKTKAVVALKAVAHKLSRACYYVMRDQVPFDVARAFA

SEQ ID NO: 88176 - protein, 350 aa, unidentified
MSLKLNSEIAVIGIDIGKNSFHLVGQDRHGALVLRQKWSRGQVEARLANLPPCLIGMEACVGAHHLSRRLQALGHDARLMPAKYVRPYSKGQKNDFRDAEAIAEAVQRPTMKFVATKTVEQLDLQALHRVRERLVRQRTGVANQIRAFLLERGVAVRQGLRFLRTELPIILGSRADVLSPRMIRIIEELACDWRRLDERIDGLSNEIEALAHQDPACKRLMTVPGIGPIISSAMVAAIGNGAAFSKGRDFGAWLGMVPKQTSTGDRTILGPISRRGNRYLRVLFVQAAWVLLVRVKNWERYGLKAWIEAAKKRLHHNVLAVALANKLARIAWAVLHKEREFECKVRAIAS

SEQ ID NO: 88177 - protein, 384 aa, unidentified
MQKPNDLNQSRIVLKQDSTLIAVIEMSLSSWLVAGIVPGVERQPLKKLAVDESALLKLLNRWREEAEKAGRRIERITVAFEAGRDGFWLARWLRARGIEAHVIHASSVAVSREHRRAKTDRLDTELLKRAFLGWLRGERDHCKMVAIPTTKDEDAKRPNRERQSLVGEQTRIVNRMKAALIRLGIRGFNPKLKKAAGRLEDLRTPEGEPIPPNTLAELHRDMERRRLVSDQIRRIEKARLERMEQAPGDGPHAMVRLIARVVGVGIETADMLVHEVLSRKLRDRRAVARYAGLTGAPDESGSKRREKGLAKAGNARVRGGMIQLAWRFLLFQKDSALAQWYRTRTEGGRNRKTIIVALARKLLIALWRLVTTGEVPAGVVLRAG

SEQ ID NO: 88178 - protein, 350 aa, unidentified
MKDVSIIGLDLAKRVFQVHGVDDQGRVTVQKRLSRSELPVWFGGLQPCLVGMEACATAHYWARELSKLGHQVRLIPPAYVKPYVRRQKNDRADAAAICEAVSRPSMRYATIKTIEQQGVQILHRSRDIIVRQHTQLINALRAHLAEMGLIFPQGNIGTARAIAAVQETENADFPAFIRQVLFSLIEQIKNLKKEIAVLDKQMTAWHRAHGDSQRLVGIPGVGVVTATAIIAAIGDGKQFRSGREFAAWIGLVPRQNSSGGKEQLGRISKKGNTYLRRLLVTGATTQLRGNRRTQPPGGIWLEQLLRRKCARVATVALANKMARIIWAVLSRGENYRAPVIAVDSVVAVAM

SEQ ID NO: 88179 - protein, 408 aa, unidentified
MNDQSLIVAGVDTHKDTHYAAVISVTGEHLGAAQFPTTDAGYRALEGFITCRGALLRAGVEGTNSYGAGLTRHLHEAGIEVVEVIRPARQTRRMRGKSDEIDAYAAAHIALANNNTVTAKTGTGIVEAIRVTNAARRSAMKARTEVIVQLKSLIVTAPESIRTEFRDLTTTRLITRLTGSRARVGDDEVASRTRTALKRLAARYQQLDEEIAGHDTDLAQLVDTVNPALVQARGIATVTAAQLLITAGDNPDRLRSEAAFVMLCGASPLPASSGKTTRHRLNRGGDRAANSALHKIATVRLATDPETRNYVTRRSAEGKTKKDILRCLKRAIAREVFHLITTPQPAADSSDLRPARKRLGLSLTEVADALDCAISKISLIERGTIRDTRFLHRYRAWLNENQPHQIAA

SEQ ID NO: 88180 - protein, 402 aa, unidentified
MNSVGIDVSKGKSMIAVMRPFGEIVVTPYEVRHTGSELGELAKLLGSLNGETRIVMESTGNYHLPIACALYDAGFYVSVVNAMLIHDYKNNSLRKVKTDKKDAIKIANYGLDQWLELPRYTPEEDIRLILKNYYRQYQQYSKVYTMLKNNLISLLDTAFPGANLLFSSPPRVDGSEKWVDFIATFWHCECVSDLSEKAFVTKYQKWCKKHGYNFSQEKAVHIYTEACGRFAVMPKTDATKLLVEQAVLQLQATSSALAALKKEMQELASSLPEYPVVMKMFGVGPTLGPQLMAEIGDIRRFHSKKALVAFAGLDSPPNDSGQVTNNHKRITKRGSPALRRTLFLVMGVILQNAPVDEPVYQFMDKKRAEGKPYRVYMMASANKFLRIYYASVKAHLDTLEKA

SEQ ID NO: 88181 - protein, 446 aa, unidentified
MATRTVGIDLGIRGPHVATMVDGEGHPIGAPVRFRLVAAELRQLVQQVRHGLAADDQVVVVLEPTGMAWLPLARWLGRAGCTVIRVKGQRVKALRRYLSEHAKTDLRDAELLGQIPRFGVQGLRPLYVRSAPQHALNRLTKQRLRYQEEMCSIRRRLLDLIRWAQPALERALPDLQTTVALAVLEQYFDPQRLHRLGPRRLEGSLREHVGGNHPGHGSFIEALAQRLLEAAEATLALHGRDDVDFGRLQLEVDQEITLLRMHRTHMVALEREIETLYTALHTPAVLRTLPGIGNTLGPSLFAVLHTWQRFGSQRRLRGFCGLFPTRNESGGVDRPGQSITQGGHNRLKRDLILAADVARTVDPELAAVYYRCMVEKGHHHRQALCAVATRLINRLHAVWKSGRPYVLRDLQGQPLTVPEAKALIAATLCVPDVVRRTRRRNPAPAA

SEQ ID NO: 88182 - protein, 450 aa, unidentified
MAQRNRAGGRAGLQLTHPDAAGIDIGSASHFVAVPPQRDHEPVREFKSFTADLMRLADWLAACGVKTVAMESTGVYWIALYELLDARGFEVLLVNAWHVKNVSGRKSDVLDCQWLQQLHSYGLLRGAFRPADGVCALRSYARQRAALLRTQSRSVQHMQKALVQMNIQLANTIADVAGQTGQAILRAIVAGDRDPHALAALKNSRIRASDEDIAASLQGHWRAEHLFALKQALDAFDFCARQLAECDAQIEAQLETLRKTEADPAKGKRRGAARNAPKFDLRARLFQMCGVDLTRIDGIDVTTALVVVSEIGADLGRFPSDKHFTSWLGLCPGTKITGGKVMSGKTKPCANRAAQALRLAAAALRTSQSALGAYYRRLCARMDKPKAVTAAAHKLARLIYAMLTKGEEYTDHGQDYFEQRYRQRVLLNLKRRAQQLGMTLVPVTTAPQPA

SEQ ID NO: 88183 - protein, 341 aa, unidentified
MKLIRVGVDLAKNVFQVHGVERNEKPVWRRRLTRDKWLRVLLDTVEPGCEIGMEACGGAHYWARKLQERGFTVKLIAPQFVKPYVQSNKNDANDAEAICEAMSRPKMRFVAVKTVEQQDVQAVHRVRRGLIEQRTAKGNQIRGLVSEYGLVAPRELVQLRRAVPLWLEDAGNGLSVRFRRLLKALWCDLRLLDERVSELDREIALIAHSDPAARRLQQLRGVGPVIATALVAAVGDGGQFANGRQMAAALGLTPKQHSSGGKDRQLGISKRGDAYLRMVLIHGARSAMRTAKGKSDRLSQWVMALAARRHPNVVVTALANKTARIAWAMLRRGTDYQPELI

SEQ ID NO: 88184 - protein, 442 aa, unidentified
MSTFVGIDVAKAAFVVAVRDENGDLIVEHRRFETDEIGLKKFVGFLGDLEVKQGQVHLAVEASGNLHLNLISYLLEATPDILIYALNPLMVKRCAGVQLHRNHTDPADAKHVAWVLAHGWQNLHPWQHSPFVDRLRCLVHQRDRLIDDRIRGQNRLHALLNISFPEFTRVFRDPATPLALHLLHQNPTATHFVRRQRPALAKQRPQGNGRHALGSQRADALITLAKHSVASACSQEDAMSLRMTVEQLQLLQRHILQIDQRICSFFTEPNPATTSDQNTAPLPDDTDHKLRHELQLITSVPGIGIITGAAIMSRALDIAQFESADAFSAFIGTCPHRFQTGTSRDTATLTSYAHRPTRAHLYMGTQSAIQSFLPLRFYFQRHLNNGLKYKQALAACMNRLIHWAYGVVKNDTPFNPQKIIDTCRHEFPDEWNHFCLQHKTLY

SEQ ID NO: 88185 - protein, 341 aa, unidentified
MSKVTVFVGLDYHKDSIQVCVMDPAGAVLLNRSCQNEAHAVALLVAFHGDDVHGAIEACTGAADLADELITHHHWDLSLAHPGYVHRMKQSPDKSDYSDAKMLADLVRVGYLPKVWLAPADVRQLRTLVRYRQQLVNERRTVKLRITALVRDARIVGPAVRRWGRSWRAWLATVAGLGSEARFVVDCHLADLRRLDEAITRVEARLAAVTAEDPVVAQLVALRGLGPVTAWALRAEVGRFDRFRTGKQLARYCGLSPRNASSGQRQADAGLIKAGNELLRTVLLEAAHRLIRFDDRWKTLAASLQVAGKPACVVAAAVANRWVRWLFHHVEGGSIELKTAG

SEQ ID NO: 88186 - protein, 346 aa, unidentified
MQYYIGLDVSLAETSVCVLDETGDIIREAKVNSDPADLSAFISELDIPVRLIGMETGQLSNWLYHGLREADLPIVCVESHHMSTALKAQRVKTDQNDARGIAHMMRMGWYKEVHVKSPENSRCRGLLSSRQWLVARRVDLSNQIRAHLKTFGYKMGRVHWRHNFEKRVHELLADDPGLLAAIMPMLRARAVILKEIAELEKQIRAIVRANSVCRRLMTIPGIGPMNAFAFVTAIDNPYLFRRSRDVGAFFGLTPSKYASGEIDRDGSITKCGDYLVRGFVYEAANSILAHLRRPCALQSWAQELARRSSTKKARVALARKLTVIMHRMWIDGTTFDWREPVAKATA

SEQ ID NO: 88187 - protein, 468 aa, unidentified
MKHNQQRKRTGKAERRVSVSLFERIQPDAAGVDCGQKSHFVAVPPERDPEPVREFRTFTADLQRLAEWLAQCGVKTVAMESTGVYWIPLYEILEQRGFEVVLVNARDVHNVRGRKSDVRDCEWLQQLHSVGLLRASFRPAAAMVPLRSYLRQRAILVEELTARVQRMQKALTEMNLMLHTVVSDITGATGLKIIHAILAGARDPERLAVHRDGRCHASHQELVAALTGNYREEHLFSLRQNFTAYRFHLQQIAECDAAIEAWLNTLAAQQPPPSAALPAPRAKITKKHAPAFDIRTPLHVLTGGADLSQIHSIGPQAALQLVAEIGTDMSRWPSEHHFASWTTLAPNNKISGGRLLSSRTPPSANRVAVILRRCAMTLGRTSTALGAFYRRLALRIGKAKAITAAARKLALLVYRALSGKLAYHDPGADTYLKLNRARELKSVRRRAKLLGFDLVDRSSGEVLLNPVS

SEQ ID NO: 88188 - protein, 458 aa, unidentified
MRRKREAGKVRQSLPVVHPHAAAIDVGATMHMAAVGPDCAGEPVRSFGTFTADLHRLADWFEVCGVTSVVMESTGVYWIPVFEILQDRGLEVFLVNARDAKQVPGRKTDVKDAQWLQRLHAYGLLRASFQPKAEIAELRAYLRQRERLLEYAASHIQHMQKALTEMNLQLHHVISDITGATGMRIIRAILAGERDPAVLAGLRDIRCHSSSETIEKGLTGHYRAEHLFALEQALALYDTYQHKVVACDQRIEAVLKALSAHRPDPASLPAPRRRMSRQANEPSFDLRGALYAVLGQDLTRIHGLGPSLALKLIAECGTDLTAWPSSKHFTSWLCLAPGNKISGGKVLSSRTRRSGSRAAALLRLAAATIGKTETALGAFYRRLSTRIGKSKAVTATARKIAVLFYNALRHGLDYADPGASYYEERYRKRVIDNLHRRAKAFGFVLQEVGVVAPAGAVS

SEQ ID NO: 88189 - protein, 361 aa, unidentified
MNRNANSQSAGQMIGLINGQQVVGLDIAKSVFQLHSVDMGTGEIVNMQLKRAKVLEYFANHQPCLIGIEACGGAHHWARELQALGHSVRLIHAKAVRPFVSGNKTDATDARAIWLAVQQPGTKFVGIKSEEQQATLVLHRQRELLMKMRVMQTNALRGLLYEFGATFGRGKNALFSEIEAALETLLAKNSFPQYVADSLREQVGRIKALDQDIKSIEQRLQERLKSNAQMKRIAHIPGVGLLTATAAIATMGEASAFKSGREFCAWLGLVPRQSGTGGKVKLLGISKRGDTYLRTLLIHGARSVLSHSKEPVPWLEQLQQRRPTNVVIVAQAAKMARTIWAVTAKEQNYQRGYQSTRPQTA

SEQ ID NO: 88190 - protein, 351 aa, unidentified
MQIVGALDVHRSQITAKTLDLDSGEVRYGRISPVTRESVREWLSRFAPGEAEFALEGTTGWRFVVEEIHAAGLSAHLADPAETAARRGRKKRAKTDKADCDLQLELLVAGRLPESWIPPAHILELRTLVRTRKALLDERTGWQQRIQAQLFHQGVPRGIKLRTAAGRAALAEAGLSAAGRELVTLGLRMLDVLDRELDPLDRRLRAFARRQPGCKALIAELYGVGALLAPAILAELGDCRRFSSSDDVVRHSGLDVTVHESDSRRAAGRLSHQGPELLRWALYEAAQCAARPSSPDYGYFLEVQERIDSDRAFLSVARKLVRRAYHILRKLGDDAIAPVDDPPTGEVALAA

SEQ ID NO: 88191 - protein, 452 aa, unidentified
MDQGNNGLSRGDRNRNVRLAVLRAAVPRDHAILGIDLAQSRQAAVLADHDSRVIARWRPRCSPWKLGELLERALRKAISAGFAGITVACEPTGHRWMVISQLAAERGMPMVCVQPLVTARAREAEDCTRGKSDDRDAVLIARLVAQLHCYLPEQSGAAWARLRHLGARRSRLIESCTACVQQLRDLLEVAWPAVLQAAADPLGSSTWLACLPVALAGGDGDLAAVHAAGREAFIAAGRAALPAWGARRICARIAAAGYAALASEAGIAAQRPGALERAAFVLGDWQVLRGELADVSDRMLQALGELGILEVAGSIPGVSALSVAAILAETGDPSRFATSRAMVKHAGLAPCENSSGNHAGQPGISRRGRPALRLAAWRAVWGALRHNPVYAARHAALTGRAKDPLTTEQARAAIAAALLRQIHAITTRRVPWDAAIAAGQRRPGQEVTAKAA

SEQ ID NO: 88192 - protein, 421 aa, unidentified
MPNIEIGVDFMVKENFIYVGIDLHKETHTAVMIDCYNQKLGEITFPNRPADFPKLVTKVKKCNTDAKEVVYGLENAYGYGRPLAVWLIDKGYFVKDVNTAISHRQAKHRGAMYRKSDSDDAEAIALATLNMLDKLPDACPNDAYWSLGQLVHRRDNIMKQRTRLVNQLHEQLCIAYPSYKQFFNDISRPTALYFWEHYPSRKYLKGKSVEDLRAELVPVSHNKCSTRTCEKILDAIAGDKVKNNAYQDARDMVTLSIVSDLQHYDKQLAEVDKMLEQMYKMLGCTLTTIPGVNVITAVKILAEIGDIKRFSNANKLAQFAGIAPLHLSSSGKGKDVATKQGNRRLQATIYFLAIQMVQVSSKGTPRNPVVRAYYEKRKAEGKTSQQALICISRRLISIIYGMLKNGTEYRMPVVENAGENR

SEQ ID NO: 88193 - protein, 357 aa, unidentified
MISKKISVKSKKNNSCSLTENESYDHYIALDWSEKNMAIARMGKKDTVPKIIDVPSDLKELKLYLSKLQGKKILTIEETTTSQWLYVELYEYADRIFICDPYRNRLLTDGPKTDRIDAGKLCKLLKNGMMKEVYHSTNQMYELRKLVSYYDDEVRAGVRLLNQKSALYRAENKSWKKKQELEASRVNKFIVAQLDEKIESYREKKKKYEEEFEKISKKSKVLRSLKSIPGLGPISSVTILSIVIDGRRFKSSNHYLSYCGLVKHEKQSGGRSYGRRSPRYSRRLKAVYVSAAVRVASTENPLRQYYEYLLNEKKLPVYNAKNALARYIAKISLGIIKSGEKYKPYKWRESKKGKEAA

SEQ ID NO: 88194 - protein, 404 aa, unidentified
MSVHVAPVTSSTIVVAVDVGKTSALFSVTDAARRRLVGPSEFVMTGSGLTAAAARATAVVPPAGRVKVGVEAAGHYHRPVLDHRWPDGWEVLELNPAQVAEQRRVQGRRRVKTDVIDLEAITELVLAGYGHPVTDRDVVIGEVSAWAGHRSRRVATRSATKNQLLGQLDRAFPGLTLALPDVLGTKIGRLIAAEFADPARLAGLGVNRLIRFAATRDLQLRRPVAERVVAAARDALPTRDAVIARQILAADLVLLADLDDQIHAAETTLESLLPRSPYATLTSVPGWAVVRVSNYAAALGDPQRWPGPRQIYRASGLSPMQYESAHKRRDGGISREGSVALRRALIDLGIGLWLNDPAAKTYAHALKGRGKHGGIIACALAHRANRIAHALVRDHATYEPTRWA

SEQ ID NO: 88195 - protein, 412 aa, unidentified
MDVFCGVDWAEDHHDIALVDRDGTLLARRRISDDAAGLAQLLALLAGHGDRDQDPVPVAIETPRGLLTACLRATGRPVYAVNPMAVARYRDRHSVAGRKSDHGDAVVLANVLRTDAHAHRPLPADTELAQAIAVLARAQQDAVWARTTAHNKLRSHLREYYPAFLAAFHPTRGGITRPEARTILAAAPDPATAATLTPAQLRALLRKAGRRRGIDAEATRLRQALRAPQMRQLPLVEQAMARQTLALLRQLDAACAAASDLEHAAIESFNQHPDAEIITSFPGLGPLTGARVLAETGDDRSRFTDAKGLKAYAGAAPITRASGKITAVRHRRVKNQRLAAAGYLWAFAALTASPGARAHYDRRKTNGDRHAAAQRNLFGRLLGCLHHCLATGQHYNENTAFPTTTAKLPQAA

SEQ ID NO: 88196 - protein, 321 aa, unidentified
MKHHTSIAAPVVAGIDVSKAHLDVYLYPVGKCRRFNNDKTAWRALRGWLAEAAPDHVVYEATGRYHKGFERYLGGHGLPIARLDPRRARRFAEAIGVQAKTDPGDACVLVQFGAFLKPATTALSGPALEQLKELVAARRGLIQQGTRIANRGKTAIAPLLKRQLKQTGAQVERQIKAIDKACRQIAASDPALAQRLAILLSIPSIGEITAMAVLAEMPELGELNDKQAASLLGVAPIARDSGAFQGKRHIRGGRAKLRQALYMAALVATRFNPDMKQKYQALIKNGKPPKVAITAIMRKLIILANALIKENRNWSEIRPCQ

SEQ ID NO: 88197 - protein, 422 aa, unidentified
MEAFNVSDFAALIGIDWADRKHDICEVNRDTNTQLLSVISSEPKSINTWALELKQRYNGRPVAVACELKKGPLIYALSKFKHIVLFVINPSSVAKYRAAFSHSGAKDDPTDAIIQVEILQLHMDKLTVIRPDSEDVRCLAQLVEYRRKLVQDRVNLTNKIATTLKNYYPHVIDWFKEKDTQIFCDFLLRWPSLAHAKKARKQTLLDFFNQHNSRYPLVNEKRIKEIKDAEILTEDMAVITPNLLLIECLVPQLKQLMMAITRFDDEIKTLYKQHTDRAIFDSLPGAGPQLAPRLLAAMGSNRDRYKCAADIQKYAGIAPVTERSGKKEWIHWRYSCTKFLRQTFVEWAGLSVRYSFWAKAYYRQQEAKGKPHNTIIRSLAFKWIRILFRCWKTHTPYDESTYLTALKSKGSPLLKFAVESGL

SEQ ID NO: 88198 - protein, 387 aa, unidentified
MTVRTVNNLPAATHGETVRCLFAIELSKQSWVIGFNTPLSEKISRRTLSGCDWKGLLELIEDVRARVSREMGRAVAVMSCYEAGYDGFWLHRQLEAHGVRNYVIDPASLQVDRRARRVKTDRIDAERLLRSLMAYLRGEPKVWSVVRVPSVAEEDARRLHRERDRLVLERVQHVNRIKGLCALHGIYDYHPLRPQATARLEQLRTAQGGELPPRLKSEIKRELHRLELVVEMIATLEAERDAIVEDEASTHLNAEKIQNLHKLKAIGPEFAAVLVGEIFHRSFDNRRQLASYVGVTPSPFQSGSMAHEGGISKAGNRKGRTTGIELAWLWLRYQPDSDLSIWFRARVGIMKGRIRRIAIVALARKLLVALWRYLETGLVPRGAVLKG

SEQ ID NO: 88199 - protein, 337 aa, unidentified
MDYFAGLDISMDETHVCVLDREGMVVRESKAESTAQAVANELAKAPSCRRIVFETGRMAPILFHGLSQLGLPVVCVESRQAYQALKSLATHKTDRNDARGLAHLARTGFFKPVHVKSLPAHAVRSLISARKKLVGQRVTLENQIRGLAVVFGVRLPRALTAAFIDNALRASEGIAGLSAAMRGLIAARTAVMSAVTAIDADIRRMTRASAACRRLMTIPGVGQLTALAFVAAIDDPSRIRRSRDVGAYLGLVPRRYQSGEVDYIGSISKCGDRRVRTLLYEAANVMLTRYKGQLKLKDWAFAIAKRSTMRKARIALARRLAIIMHAMLRDGTEFASA

SEQ ID NO: 88200 - protein, 396 aa, unidentified
MLRADPHEGRPGRRLQEVATYSTMTRSLLRMADRLAELEVTRVVMEATSDYWKPVYYLLEAHGFETWLVNARDVKHLPGRPKTDKLDAVWLCKVAERQMIRPSFVPPPEIRRLRDLTRYRCDLVEARTAEKQRVEKLLEDAQIKLSVVASDIFGVSGRQMMAALIAGQRDPKVLAQLARGRMRGKISQLEEAFTGYFTDHHSYLLVKMLARIDALNADIAELEDHIEEMVAPFATAVERLDEIPGLGPVAACAALAEIGLDMTRFPTSGHLVSWAKFAPGVKESAGKKKGRGSTGHGNRYLAKVIGEAAVAAGKTDTFLGERYRRIARRRGAKKAIVAVGRSILVIIWHLLSDPEARYHDLGSDFYDKRINPERKKRAHIHQLEALGYKVTLEPAA

SEQ ID NO: 88201 - protein, 409 aa, unidentified
MRYYLGVDWADQTHAVWVVDESGAKITAHAVAHTAEGLGEWGRALDEWRAQGIDLWAAIERPDGRVVDFLLDHGVVVYPVNPKALDRARDRFRQSSAKSDPFDARVLADFLRTDHTHLRALQPSSEAAQELKLLTEDCQRHIRQQTRLVNQLTATLKAYYPRALEVAEVTSALAREFLPAYPTPAAVTALTERQWQRWARAHGLSAARAGDLWAVLRQPHLPVPAHVVRAKARLMQALMEQLMPVVTAVAQYRKAIDDFFASMPAARWARTLPIGKHGITAPTLWARLGDAPGRWESFRHLQAHAGAVPVTKRSGKQQVVHFRFACDKALRHVVDQVAFLSLLSSAWARAYYDQQRARGHSHRQALRALGAKWLKIIFVMWQRQVPYDEQYHLATMTRQQRQRGQKQCA

SEQ ID NO: 88202 - protein, 391 aa, unidentified
MPEDAPRPAQAAIRTDLGAIFVSMELSRRAWLITSLSPGGGEKMSKHWVPASDVSGLLRRFAELRRKAAARTGRDFPIIIIQEAGLDGFWIHRVLQSEGIESHVVDAASILTSRRRRRAKTDRIDGETLVRTLMAFKRGEPRVCSIARAPTPQEEDRRRVCRERRTLVGERVQHVNRIKGLLFAQGVFGYEPLRKGRRERLEDLRTGDGRTLPVRLKAQIIRELDRLEVLLEQLKSVEAERDALLKPATDEAASPAAMLARLKGIGPESAAVLWSEGLFRQFDNRRQVAAYAGLAPTPWQSGTIDHEQGVSKAGNPRLRTTMVELAWLWLKNQPTSALSLWFHERVRRLGGRMRKTTIVALARKLLIALWRYTTAGVVIEGAVMKAAPVTI

SEQ ID NO: 88203 - protein, 360 aa, unidentified
MSDLRTASPSSSGIVIGVDTHKFVHVAVAIDHLGTRLASCSASADRAGYAELVVWAQTLGHIEAFGIEGTGSYGVGLASYVRRQALRVVEVSHCDRRKRRNNGKSDTLDAESAARSVLAGLATAVPKSADGAAEMVRQIKVARDTAVKARSAAIIALKTLLVTAPCELRESLQPLTDRKLIDRCARLLPGVLDDTTASTKHALRALAARWLALASEIDTHDEGLDAITMAAAPTLRQAFGIGADSVAEMMIVAGDNPTRVRSESAFAKLCGVCPIPASSGVTHRHRLFRGGHRQANAALYRIVTVRMRWHQPTIDYVARRTAQGLSKRDIIRCLKRFVAREIYHALLTDHRARNAVTAAA

SEQ ID NO: 88204 - protein, 334 aa, unidentified
MYKVVPKEQIFKERPMLKTILGIDVAKSKLDVALMIGDKTLVKKFDNNKKGFKLLQGWLASLHIEQVHACLEATGTYGEAIAEFLYEQGHRVSVVNPFQIKSHANSQLRRNKTDKADARIIADFCSKAETEDWHPLPPEVKQLQALTRRIEALAEMLQMEENRKEVAPDAARPSIDRMIETLKTEIDSITRLIKDHIDNNPNLKRQSDLLQTIPGIGEKSVRLLLGELQFGQFKSARDLAAHAGVTPRKSQSGTSLNSTRLSKIGNSRIRKALYFPAITALKYNEVIKQFAQRLSQNGKTPMQIICAVMRKLLHIAYGVIKSDRHFDPTLALNA

SEQ ID NO: 88205 - protein, 336 aa, unidentified
MVAGTFGSLHKEGLMKMAKPNIISAGIDTSKDKLDVAIHGIVGGFIVSNDAAGWAVLAERLQAVGVGRIGIEATGGYERGALRALQQAGFEVVVLQPLQVKAFARLRLRRAKTDKLDAALIAHCTHVMDAHNKMPPDARFDALADLLTYIEQIGEDIVRFKTRLEQTRDERVRKLVQDQIRAFQKQKIAELKRLRDQVRAHDDLAERYRLVMSIPAIGIVAALSLVVRMPELGQVSREEAASLAGVAPFVHQSGTHKGETHIGGGRARLRRALYMPAFVGALHWNPALMALYQRLIARGKSHKCAVVACMRKLLIFANTVVARGTPWETNGPITIA

SEQ ID NO: 88206 - protein, 416 aa, unidentified
MTEQLNIVCGADIHQRFLIATILCRDGRTWTNRFSMNINGLLDFKTWLLSYGCQKVAVESTGRFWIPVHMVLEGTIDVIVANAYKIKHTTKKKTDLKDSEWLAELCLNDMIEPSRIFPKEDRELRNLTRAREAYVRDLSKEKNRVNNILESCSIKLASVISDIFGKSGMHILNGLLSGICIEEVLRDIPDKRVRVKKSEELREALTGKLEVSDIFLIRQSLQIINQLKACILELDEEIRSRIASRPMDLKIAMSIPGIGMVSAYTILAEVGNYMDFRKPEQLAMWAGIVPSVYQSADKLITGSITKQGSKHLRWILVQVAHAITHKKGGKLKKFFLKIKGKKGYLVAIVALARKVICILHHLLVNQEMYEEEGRTAHKDAIILEKKDQKIPPIEDMIHYIIQAGYKVKKIKSGVGG

SEQ ID NO: 88207 - protein, 421 aa, unidentified
MKSSVASKVRQVPAGYIVVGVDPHKHKHTAVVITQDFIIRARFKFGNTRQGFETMLERVRTEMVKTDCRGVIFAIETGGHYWRNLAYFLDDKGISFRFISQFTLKRRREGKDLNRSKNDYRDSEVAAQLLCTGEFTESRLPEGAYAELRAAHNAYRRLVKERTRITNLMKGLLDALFPEFTHVFKDPCGLTALSVLSTCPIPSVIAGMTAQEFVATVEARHQGRLMRRKLGMLHHVAKTSIGIKAGARSVACEVSFLVEKLGLIRQHICSLERTLVSLVDETEEGKYLLSIRGLNYIAVAGLLAEIGCFKLYRSAKQIIKMAGSNPTESESGGKRGTHTPMSKQGRPVLRYCAWTSVIPMLRLNPDFRAWAKRRRERPVYANPLNGREVVGAALNRLLRLAFALVKKQTFYQAPELARIAR

SEQ ID NO: 88208 - protein, 345 aa, unidentified
MRKLIAGMDLHSNNVVIGLMDMDGKRVAHQKVECRLSEVVKFLAPYKKRLEQVAVESTYNWYWLVDGLQALRYPVVLANPAGMEQYSGIKHADDTNDAFFLAELLRLKILPTGYIYDPHLRPVRDLLRRRLTLVHQRTALMLSFKSLYTRTSGQEMTLSRLKELEIKEAQDLYDHPANQLIAGMQIKHIEQLTESIEKTEKAVLGCARQLPLYSKLTTLPGVGTILGMTITMEVGDIKRFAEAGHFASYCRTVEAKRTSNNKKKGPNNSKCGNKYLAWAFVEAANFARRYDEQCRKWYERKAAKRGKVIGTKALACKLAKAAWHLMALGSDYDAKRMFGQPATTQ

SEQ ID NO: 88209 - protein, 348 aa, unidentified
MAFIGVDLHQNSFTVCRLDCDGSETFATYQLCRADLDRFCLGLDADDEVAVEATGNSAWFRDEVISCVGRVVVVNPRQFQVIRKSVKKTDRNDARALAVFLSKDMLPATRVKSKAENELASLVHTRDLLVKQRTRLLNKIHALFNRHGVKLKKAGLSSRRRLLALESGRFSTLEQVELKVLRDQALSLTATIAELDGEIEHAAQGLAGYDSLVSIKGIGPRAAAVFLSGIGDVDDFETADKLAAYCGIVPRVNQSNETDNRGRITKRGNKLMRTTLVQCTLIAIRYSGYLNAFYRRVKEERRGSGKAIIATARKLLKIIYDTLKNGWVFEDFPAFKIAGETIPAGQSS

SEQ ID NO: 88210 - protein, 400 aa, unidentified
MLSIGIDVSKGKSTVCGMKPGGEIVYTPFEVQHTREGMSELVSLLRSSGEEVRAVLESTGSYHCPVVAALLENGIFVSVVNSLRMKRFCSQSIRKVKTDQIDAMQIALYGLAYWQELQPTKLPEDTYRELQLLARQYYQMTSLLIKAKVDFNALCDQVLPGMQELMSDHAGRHKLSDFVLRYHHTAHILKMGETRFRKDYCKWAEKKGYRNCERMAALIFATAQNGIPVLPDAPSTQIVITEAIRVLHTVEASRDAILTQMQALAKTLPEYSLVREMPCIGDTLAPRLIAEIGDVRRFHSKRALIAYAGIDAPPYQSGKFCANNRHISKRGNRYLRKTGYEVMQSYVMHKPANDPIFTFIEKKRSEGKSGKLAMVAGLNKFLRVYYGKVTELYRSLPAIE

SEQ ID NO: 88211 - protein, 399 aa, unidentified
MPRPNDLSRSLVALDQDSTIIAVVEMSQSSWLVGGVLPGIERQPRKKQEPSPARLLALLHRWRDESVRAGRTITRIAVAFEAGRDGFWLARWLEARGVEAHVIHPSSVAVSREHRRAKTDRLDTELLKRGFLGWLRGERGHCSMARVPTIAEEDAKRPNRERECLVKERTRLVNRIKGTLARLGIRNFKPTLRQATERLATMRTPEGTPVPPNALAEVQRDLARLRFVVGQIKQIEEARRQRLEEQPERGPHAMVRLLARVVGIGIETADMLVNEVLSRPMRDRRAVARGACPRAGQRPDPGAGLTGAPDESGAKRREQGLAKAGNARVRRGMIQLAWRFLRFQKNSALAQWYHARTADRRGATRKTMIVALARKLLIALWRFGTIGEPMDGVTLRPAS

SEQ ID NO: 88212 - protein, 320 aa, unidentified
MLSFCGIDVSKDRLDVMVLPEEQCCSVPNDAGGWAALVERLRNFSIAAIGLEASGGYERGVARALLAAGISVRQVNPFKLRQFARASGVLAKNDPLDARMIASFVAIMPTRPAQLQAPAAERLAEMLAVRRQLSAEKVAAENASRLLEDAMLQRLSRRRIGRLAADIDVLDERMVEIVATDAALAHRYRLLTSMPGVGAVLACTLLALLPELGRMSRKQVAALVGVAPYAFESGTLKGRRCIWGGRAHVRHVLYMAAMSASNWNPVLKAFHDRLKAAGKLPKVTIVAVMRKMITILNAMVRDDVTWADRYIGRHSVPTAR

SEQ ID NO: 88213 - protein, 442 aa, unidentified
MSNAVYSSQSEFAAFVGIDWADRKHVWALQVSDSLLFEQGELDHTPEAVEQWAAALARRFPGRLVAIAVEQSRGALCFMLSKYEHLVLYPVHPNSLASYRKSFRPSGAKDDPDDASLLLDLLVRHRDRLRRLNPDTVETRTLQFLVEDRRKLVDERTRISNRLTDYLKLYFPQMLDWFDQVRSPLVVDMLERWPTLEELQRAKASSLRQFLTRHNCRSQSKIQERLERIRRAVPATRDAAVLTAGRSAVTTLVQLLRQLNGAIRAYDEQIQQRAQNHPDFAIFDSLPGAGPALVPRLMVALGTQRDRYQSAYQIQCYSGIAPVVESSGQQLWVHWRWCCPKFLRQSFHEWALHSIGFSDWARAFYDQQRSHGKSHHTAVRALAFKWIRVLFRCWQDRTPYDETKYSRALQQRRRKPPLPQPVAVDLQLKKVAGFWKLSANPS

SEQ ID NO: 88214 - protein, 331 aa, unidentified
MYFSQFIGVDISKNTLDAAIYPAKDKKMDFFHFDNTQKGLGEMMRWLRRRGIKPSEMVICAEHTGVYTNPLIAFADKKGLALSLNSPLDIKRSMGIARGKNDIVDASRIAEYAHRHQDKLKLYEKPSDAIMKLQYLLTERRQYMRQRTALINLNSAMGKYETPEARTRNDSAIHHCEKLVKKVEEQMLTVLCTEPDVKRNFDLVSSVKGIGLINALNTIVYTNNFKSFETPRRYACYIGVAPFDHTSGTSVKGKTQVSKICRTQQKAELSMAARSAIIHDPGIKRYYLRKMKEKGGGNDAHGVVLNAVKFKLILRMFAVVKSGQPYKVLTY

SEQ ID NO: 88215 - protein, 332 aa, unidentified
MNMHPQGGVASRDQRPNAGVDVCKQHLDVCLGTTEQRVVNDASGWNELIAKCRDANVDLVVLEATGGYERGLVCALQGADIMVARVNPRQARDFAKSMGVLAKTDQVDARTLRDFADVLARHKDRAKYITPMFDEHRQQLADLMTRRRQLVDMRVGEGNHLEHATAKQSVRSIKSVLKTLDKQLKAIDQEVDDHMDRHFKSQRTLLDSVKGVGPVTILTLTAALPELGKLGRRQISKLVGVAPLADDSGPRKGKRRIWGGRANVRAVVYMATLVAIQHNPVIKVFHSRLIAAGKPKKVAIVACMRKLLTILNAMLRDQASWNAAKHVNPISA

SEQ ID NO: 88216 - protein, 392 aa, unidentified
MNAVGIDVSKGKSMVTILRPFGEIKHTSSDIHSLIKLIHSIEGESRVVMEHTGRYYEALAHQLSAADLFVSAVNPKLVKDFNNDSLRKIKSDKADSVKIARYALDKWQSLEPYSITDELRAQLKVMNRQFHFYVKQKTAMKNNLIGLIDQTYPNANTYFNSPTRSDGSQKWVDFVSTYWHVDCIRKMSLNAFVEHYQNWCKRKKYAFNKSKAEEIYTKTKELVPVFPKNEITKHIIRQAIDQLNSTSVTVETIRTLMNETASKLPEYSIVMQFKGIGPQLMAEIGDVTRFTHKGALTTFAGVDPGVNESGSYAQKSVPTSKCGSSNLRKTLFQVMDVLIKTMPQDDPVYQFMDRKRTQGKPYYVYMTAGANKFLRIYYGRVKEYLSVLPDPS

SEQ ID NO: 88217 - protein, 375 aa, unidentified
MKEKLRFLGMDVHAETIAVAVAEPDGEVRSLGTIPNRMESVRKLIKKLGPVEKLRVCYEAGPTGYVPYWQLAELGVHCEVIAPSLVPVKAGDRVKTDRRDAEKLARSYRSGDLTAVWVPDEGSEALRDLVRAREAAKQDELRARHRLGKFLLRSGHRPPTGVRAWTHLHLIWVSQIRFTQVAQESTRLDYLHEVEHMRERVLRLEQAIVEAVKLASPALQEVITDLQALRGIAHISAVTIAAELGQVSRFAGARELMGYCGAVPSENSSGKRTRRGSITKTGNAHLRRIVVEAAWSYQRPPAIWAGLRKRQQSASEAANEIAWKAQHRLHKRYVRLAAAGKDKRKIVTAVGRELLGFIWAIGTKAEATVTQRIAA

SEQ ID NO: 88218 - protein, 437 aa, unidentified
MTESSDYESVQVFIGVDVGKDTHHAVAINRSGKRLFDKALPNDENKLRSLISDLKQHGQILLVVDQPATIGALPVAVARSEGVLVGYLPGLAMRRIADLHAGEAKTDARDAAIIAEAARTLPHALRTLKLADEQIAELSMLCGFDDDLAAQTTQASNRIRGLLTQIHPALERVLGPRLEHPAVLDLLQRYPSPEKLASLGEKKLAAQLCKLAPRLGKRLAADIAQALAEQTVVVPGTNAAAVVLPRLALQLITLRKQRDEVALEVEQRVLAHPLYPVLTSMPGVGVRTAARLLTEVACRAFASAAHLAAYAGLAPVTRRSGSSIRGEHPSRRGNKALKRALFLSAFAALRDPLSRAYYTRKMSQGKRHNQALIALARRRCDVLFAMMRDGTFYTPQGHNMLDNLIGARYDSLRNPLTSLGITSTPNSSLVALPNQVL

SEQ ID NO: 88219 - protein, 337 aa, unidentified
MKYFAGLDVSMEETHICVVDRDGGMVLETKATTSPEAIAAGLAKAPGCQRIVFETGRMAPTLYHGLDALGLAVTCIESRQAYQALKSLGTHKTDRNDARGLAHLARTGFFKPVHVKSLPAHAVRALIIARKKLVGQRVTLENQIRGLAVVFGVRLPRGLSPAFAEQAISGSEGIAGLSGAMRGLLAARNAVLKAIAAINGDLKHLARSSEACQRLMTIPGVGQLTALAFVAAIDEPERFRRSRDVGAYLGLVPRRYQSGEIDYTGSISKCGDRRMRTLLYEAANVMLTRYKPPLKLKDWALAIAKRSTMRKARVALARRLAIIMHAMLRHGTEFRTA

SEQ ID NO: 88220 - protein, 494 aa, unidentified
MATRRATTDTQTQPRSAYRRRKARARARAARAHEAEERRVEGLPVTQAHAAGIDVGSRSHWVCVGAGAGDPAACVREFPAHTAGLHQLLDYLRQHHVTTVALESTGVYWIPLYELLESNGFEVLLVDPSYTKQVKGRPKTDRLDCQWIYRLHSVGLLAAAFRPDEKTCQLRSYLRQRANVIRYAGQHIQHMEKALEQMNLKLREIISDITGVTGQAILRAILKGTRDPQKLARLRNQKCKASEAEIAQALHGSYRDEHLFALRQAYEAWQFYQKQLDQVEEQIQQQLARMKQDRALPPLKPRPRTSGRKPNQPRFDVRTALYYVVGIDLTEIEGIAELTALTIISEIGPDVSKFATVKHFCSWLGLCPQLKKTGGRVKSSRTRPGVNRAAVAFRLAANSLYASKGALGAFLRRQKGRLGAPQAVTATAHKLARIVYLALKHGLAYVRQNQQEYAAKVREQQIKGVQRRARQLGLEVIEKQPSTSTAAQTAAVPC

SEQ ID NO: 88221 - protein, 341 aa, unidentified
MNKINTIAIDLAKNVFQICILSPDQKVLKNKQVSRAQLPLILAKQEKSIVAMEACYSSHYWARLFADMGHDVRIIPAQHVKPFVRGNKNDHNDALAIAEASSRPNINFVPLKTIEQQDIQALHRIRDKLISRRTSIVNQARGLLSEYGIIMPKGLSSFTKHIALVLDPADTRLTSRLKLQLAEVKEEYDTLSRRRLSIQRELDEYVLENKLCQRLMTIPGIGIINATALFAAIGNASQFENPRKLSVWLGLTPKQHASGGKSFVGRMSKRGNQYLRKQLIHGARTLIHRTKEKNDKFSVWVKQLVERRGVHIGVVAIANRLARLTWILLHRNEDYKTVSTS

SEQ ID NO: 88222 - protein, 362 aa, unidentified
MAKSTTIVAFDQHAATTVAAVLRPGHRTPALYQLTSDAPTILRFLTRLQCRGTMQCCYEAGPCGFELQRALTAHGVACDVIAPSLIPRRPGDRIKTDRRDAGQLAVLYRAGALTAIHIPTEQEEAARDLLRCREDIRADILRARHRLSHFLLRHGRRFTATKRAWTKRHAEWLQAQRWPLPALEQTHRAYVRAVDEAVARLHAVDLELRDLLSLEPLRARVERLRCFRGIDDLTALTIAAELGDPRRFPNAPSVMAFTGLIPSEHSSGTKQARGPITKTGNAHLRRVLVETAWQYRHHAFLGPALTKRQRGAPAVAIDIAWHAQRRLHRRYRALAARGKPKQHIVTAVARELTGFLWAALTQ

SEQ ID NO: 88223 - protein, 432 aa, unidentified
MKAWNEIKHYAGFDWAKDHHDVIVLDAGGKTVADFRFDHTAGGWDEFSKKLAAFPNVAIAVETNHGGVIERLLERECCVFPVHTRSAKGYRQRKVPSGNKTDKVDAWSLADALRLDGAHWKQLAPQDPLTKELRLLCRDEVALIRDRSALITQLRQTLYDYYPAALEAFDDWTMPAAWAFIIAFPTPEVLVKAGKRKWEKFLHVHKLGRPATYQRRLEIFARADQFAGSAPAVRAKSKLAVARAKQLQLLETQITEYRQEIRRLFVQHPDAKLFGSLPGAGDKIAPRLLAEIGDDRALFPDAQGLQCLAGTAPVSYQSGQIHRVYLRRQCNKSLRNVVHLWANLSREFSPWAATYYAALRAKGKSHACALRALGQRWLKIVWKMWQTRTLYDADLHARNQLKHGSWVLQLVNQPAVVKTEKSSGKESPARNP

SEQ ID NO: 88224 - protein, 368 aa, unidentified
MLRFRLMVETRSALSGLKHQKEKRSMDYFAGLDVSVKETSVCIVDDTGRIVREVKVASEPEALLQVLTNPAYRFKRIGLEAGPLSQWLFSVLTEASLPVTCVETRHMKAVLKAQINKTDRNDARGNWQMMRVGLYRPVHVKTLRSQKLRMLLTHRKLLQSKTIAIENDLRGTLRNFGLKVGMVGKVKFETRIKELIENVPDLAVLVEPLLIVRRVLREQIGILHRRLLAIVRDDDVCRRLMTTPGVGPVVALTYRATVDVPARFRNSKAVGAVFGLTPSQHQSGEIDRIGSISKCGDAMMRTMLFEAAQAMLMRSAKWSWLKAWAMKIARHRGMKKAIVALARRLAVIMHRIWVDGTEFRWTREVAAA

SEQ ID NO: 88225 - protein, 320 aa, unidentified
MDQDYKRLFGRRQPNDLNNVLKVLEPFKADLEGVIVESTYNWYWLVDGLQEHGYTVHLANPSAIKQYEGIKHTDDRWDSFWLAHMKHLNILPEGYIYPKEQRSVRDLLRRRLFFVKQRTANILSLQSTITRNLGIKISGNNIKKLNMDDANELFDSSNLVFMAQNNISAIKHLGKIIKGIEKEIKPQVQLRKEFVMLLTIPGIGIILGLTIMLEVGDIIRFSKVGNYSSYCRCVSSKRLSNGKKKGENNKKNGNKYLAWAYVEAAHFATRYIPKAQKFYQQKMAKANGAVATKALANKLARASYFIMRDQVPFDEDMLFK

SEQ ID NO: 88226 - protein, 319 aa, unidentified
MAQNDLVVAGIDVAKDKVDVCIRSLSLRRAFANTAEGRRELASWLRRQKVGKAVMEASGGYEREWAKALRDAKIEVRIVDPKRVRSFAQSAGRLAKNDTIDAEMIAWFAETFDEARAQTYDVTREQLQQMVNARQALKDMQVKLESQGEHAVPAAVQRMHARISKSIAVELVKIEAAISAIIQATPRFAELAEIIESVPGIGRTTSAALIAAMPELGQANNKIVAALLGVAPYDDDSGRRRGERHIKGGRRRTRNVFYMACLGAATQHNPVLKAFYDRLVAKGKLKKVALTACMRKLISILNIMIERRQKWDAKRYALS

SEQ ID NO: 88227 - protein, 438 aa, unidentified
MSNKVIFNLDELFISVGIDVGADFSWMSIALPNQQFVGKPYKILHNSIDSLTTAVSKIKEAEELYSLESRIFLESTGIYHYPLFCYLRDKGFNCSVINPIITKNSTNINIRKVHNDRFDSKKAALVGLKPDLKVSLMPSDLALNCRNLCREYYDLMDNRSAYVNKLQGELRMAFPQYLGIFSKVTINTSLTLLETYTSPSAFLKADKQEIIDIIKSTARFGLTYAQNKYNAIIHAATDANQFGYIIDSNIKRIRLYISFIRKYDEEINSILESLHELVDANEDSDFVKQIHLIETFKGAGFLSAVSIMGEIGDFSAFSKPKQLFAYFGLDPAVKQSGKFEGTKVQMSKRGSAIARRVIHTLTLQSISISRNREAKNPVLREYYLKKCDSKPKLVAMGAVSHKVCNMIFAILRDNKPFKIIAPQEHIKQYNSAKCDIAA

SEQ ID NO: 88228 - protein, 382 aa, unidentified
MQCHTSSRHTDAIVIHAALELSKNSWLLAIEASEHNRPGLHHLKGGDGSALLAKLRKTCEQFECRTGKPARIVLCYEAGYDGFWLARLLESHGIDCLVVDPASLQVDRRARRVKTDRIDVEAILRTVIAWRRGERHVCSLVHVPSRDEEDLRRSHRERDRLVKERTAHTNRIKGLLFTQGIREINLRRRRKPLAIALADLVTGDGHDIPPRLKCEVERELQRLALVDEQLTIAEAERDHVARPCDDSENKRHQLTLLRGIGETGAAILVREVFYRKFSNRRQVGSYLGLAPCPYDSGSSTRSQGISKAGNARARSTMIELAWFWLRYQPDSQLTLWFEGRVKGQSKRIRRIMIVALARKLAIAFWRYVETGLVPSGAIVGNA

SEQ ID NO: 88229 - protein, 349 aa, unidentified
MRFYKNQHQFYIGIDLHARTMYICVINNLGETVFHKNMECSTDNLELVTNTFGKDIVIGVECIFTWYWIADFCAERGIDFALGHALYMKAIHGGKTKSDKIDSEKIANMLRGGMFPIAYAYPKEKRAVRDLLRRRLYFVRQRAELSVHLQNTNHQYNINEPLASSRMRSEAYRNTIPQKFRDSAVLKMVDADLFMFQSYHDIITKLEFQIEDCMEIQDPYSFSLLRSIPGLGFILPLTILYEIDTINRFSDVGKFISYCRLVKCSHESAGKKEKGGHNKIGNVHLKWAFSEAAVLFLRNNERGQKWHERLVSRYGKAKAMSLIAQKLGRTVYYMLKRKEPFDPDKFYQD

SEQ ID NO: 88230 - protein, 339 aa, unidentified
MELKRVGLDLAKNVFQVHGVDGQEVVRCRRQLRRSEVLKFFAGRPPCLIGMEACAGAHYWARELAKLGHTVKLMAPQLVKPYIKSQKNDANDAEGICEAVGRPNMRFVPVKTVAQQEVQTAHRIRSELIGQRTAKANQIRGLLAEFGVVVERRIEVLRRALPQLLEEEAGNGLGAAARRLLEGLRGDLVQLDERVGALDREIKQVAKEDAACVRLQTIPGIGPLTASALVSAVGDGRQFKNGRQLAAWVGLVPKQDSSGGKTRLLGISKHGDSYLRTLLIHGARAVQQACATKTDVRSHWLRELGTRRHRNIAAVALANRNARIAWVLLTRGQTYRTPA

SEQ ID NO: 88231 - protein, 412 aa, unidentified
MPNPLFVGIDVSSKDNVVCCLTNEDEKRPLSRFTVLNNRPGILELKERISLLVKKHNFDEIRFGLEHTGCYSTHAAMYLQRHLDFGCPNVNVYMFNPSLIKEFKKAHFLDAPKNDRVDAWYIAARLKSGHLPYPFTWSEPMMALQRLTRARYHLMQALVRESNFLMTNLYLKWSDYTLVFENKLSATSLAVMEEFESAEALAEISLDKLVDFLVQHGKNRFDDPQAVAKELQKAARSSYRLPKAVNDSVNLAMASSIRVIRTIQEQLKSLKKAIEDHLDAIPQTLDSVPGIGPVYASGILAEIGDIKQFESHKQLAKFAGLAWSEHQSGKFTASQTRLIHSGNRFLKYYLIEAANSVRVHDPVFAEYYAKKKAEPKQHAHKRALALTARKLVRLVFFLLKTNQLYQPKGGNH

SEQ ID NO: 88232 - protein, 388 aa, unidentified
MNVGADRSEPLTAIHTDLGAIFVSLELSRSNWLITSLSPGGGERMSKHSVPGGDFAGLMQRFAQLQEKARRRTGQSFRIIVVQEAGLDGFWIHRALQNEGIESHVVDAASIATSRRRRRAKTDKIDGETLVRALLAYKRGEPRVCAMVKVPTPGEEDRRHLCRERKALTAERVRHVNRIKGFLFSQGVSGYQPLRRDRRRRLEGLQTGDGRALPQHLKALINRELDRLELLLKQIKTVEAARDALLAAEQTAKPAPAAMLLDIRGIGPEFAAILWSEGLFRHFENRRQIAAYAGLAPTPWQSGAVDREQGVSKAGNPRLRTTLIQLAWLWLRNQPRSALSLWFHERVSRNGGRLRKTTIVALARKLLVALWKYVTAGVVIEGVTMKVA

SEQ ID NO: 88233 - protein, 419 aa, unidentified
MSFKILKFNCCGLDVHKTWIYACIGITDSNNRTEYKQARFSSFTRGLNELCDWLAKYNCKDVCMESTGKYWIPVFNILEQRSLWVTLSHPKYTKPMKGNKTDRKDAKWICDLYMCGMVKPSFIPPADIRELRDLVRYRFKLTCMITGEKNRAQNCLTVSNLKLDDVFSDVFGKSSRSITEQILQHPGKNFDVAPFVDGRCKTPVEEIQAAVDGAISKEQAVKLRQCLDHIDELNQHISEVEQEILRLSDKYEATLNLIRTVPGFDKNPLTAIQVLSEIGGDMSVFPTAKHLVSWAGCCPRNDKSDRKIKSTRISRAGSYFKPVLVQIANALIRSKKHPEFTTRYQRIKARRGHKKAIIAICRMILTAIWHILTDLKSYTPDGFLELRPVTKEKVLTTSQALNLMRQRGYIIKDDLPATS

SEQ ID NO: 88234 - protein, 337 aa, unidentified
MSLYCAIDLHSTNNVPVVIDENDKILFQKRLPNDLKTVLSALAPFRQNLYGVAVESTFNWYWLVDGLAEHGYNMMLVNTCAVKQYEGIKHTNDFSDALWLAHLMRLNILPTGYIYPPKERAVRDLLRKRLQMVRHRVTHILSAQNQLWRTTGLNIPAKQIKKSAPALLDLISDTNVKMAIQSNLTIIQALSVEIQLLECSVKQQTTLKPEFQSLLTINGIGDILGLTIMLECGDIRRFPSVGHFSSYARCVDSSRISNGKKKGTNNKKNGNAYLSWAFIEAAHSIIRYNKVAHRFYQRKRAKVNGALATKALAHKLARAAYYVMRDQVPFQIERLFC

SEQ ID NO: 88235 - protein, 375 aa, unidentified
MKRLATTSTVVAGKPHNSNAVRAAGEWRPAMDHIGIDVHKRESQVCILTPDGEVLEVRIATTRERFREVLGNRPRARVLIETSTESEWIARFLEELGHELIVADPGFAPMYGMRTRRVKTDLRDARALAEACRSGTYRLAHRRSEKQRRVTTKLVVREALVRSRTSFISVVRALLRKDGLRVPTGSAEHFPERVAKMGLPGWLQSEVAPLLAAIVKVNEQLAWCDAAVEHATKDDPAVALLRTAPRIGPITAAAFRATIDNVERFHGPHQVAAYLGLVPREKSSGEKQHRGRITRAGDSRTRSLLVQASQRIRYSRVAETLGLRMWAKRIETRRGKAVATVALARKVAGILFAMLRDGTPFDPTKQAGTPAVMAA

SEQ ID NO: 88236 - protein, 414 aa, unidentified
MKVVYPVCCGVDVHKSFFIATIINTTSGIQPNYSRKRFSTFNNDILRFADWLKENNCNDVCMESTGKYWIPVFNILESKNINVTIANPKWVKAVKGNKDDKKDSKWIGDLFRLGLVPGSFIPPKPIRILREFTRYRYKLVSMKSSEKNRFQNAFTVCNVGLDSVVSDMFGKSATLITDYLLSEETFNPEYCVSLLQRSLKKKADSVLVSIEGYQISKEQKLRMNTIRSHLTYIENSIKYLDDTIDSMVAPYESLIALMCTIPGIERKSAINVISEIGNDVSLFGSSKRLCSWAGLTPGNNESAGKKKSVRINRAGVYLKPALVEIAHSAVKSTTNPYYKNKYEKLVKRRGKKRAIIAIARMILTAIYSMLSTGEVWNPCDLFKIDMPDELKAKQEAKAIKQAVKFLEQRGYAVS

SEQ ID NO: 88237 - protein, 362 aa, unidentified
MRKLSKQAQRKQWAQDKPAMTMGIDVGDRFSHVCLLDDEGEVVERDRVRSTEAAFRRHFEGAPRLRIALECGTHSPWMSRLLKQLGHQAIVANARKVPTITQSESKNDGRDAEQLALMAAFNPKLLSPLEHRSLLRQQDLNLIQARAILVKARTMIVNALRGLVKSAGGRLPACSTESLPDRAAGAVPPALTDVAGPLVEQIARLNLQIAAMDQQIEKLAIKYPEIGTLRSAPGVGALVAAAYVLTLDRPNAVPSSRSAGAFLGLRPGQSQSGDSDPQRRITRTGNTYLRCLLVQSAQYILGRFGPDCALRRWGLKLAQSGGKRAKKRAIVAVARKLAVILLSMWRSGQRFQPFPLSAPAAA

SEQ ID NO: 88238 - protein, 482 aa, unidentified
MKPKPQEKTSKDSCRPKPGHWNEMNRKQRRETMRKIQSDDLSLEVVHPDSAGIDIGNESHYVAVPPTRDSQPVRRFGCTTAELKEMAQWLKQCAIRTVAMQSTGVYWIAVYDILEAAGFEVYLVNARETKNLPGRKSDVQESQWLMKLHTYGLLRNSFRPSQEIRTMRTYWRQRNDLVQAAGRHIQRMQKALTQMNIQLANVLSDVSGMTGQTIIQAILAGERDPHKLAEFRDPRVKASKHEIARSLEGNWQEDLLFVLKQEQDGYEFCQKQMLECDRQVEQYLQQREDRSKGTPLPEEKRKGRLKKKKGNAPVFDLRGELFRMTGADLTQIDSIDIMTATTILSEVGWDMGKWETEDHFVSWLRLCPDNRISGDKIVGKGRLPTKNRVSIALKMAASTLRRSNTYLGAQFRRFRTKLGSPIAIKAMAAKLARLVYRMLRYGMKYVDQGAKFYETQHRILQIKQLKRKAAKLGFQVVQAPAA

SEQ ID NO: 88239 - protein, 406 aa, unidentified
MFFIGIDWAEKHLDFCIENLTGDVIKRGRVDNDDNGFNSMLHSIEKENIQLSQIAVAIESPHQHVVDFLLARGVDVYPVNPAAIHDYRKSRKPSGSKSDEADAQLIASYLREHHQSLRVWRLPEPKLRQLKLLVDDRDKVVTEKVRLQNQLRSTLRDYFPQATDAFGDITCKTSLDFLSQFPTFEATEANTDEDWQLFLDEHHVFNPKARQRFLDTLKRKPIAVDEAVVKAKTLLTQTIVSQLQLITAALKEYSKRIEELLKEFSDGNLFRSLPGVDTILAAKLLAAIGTDRKRFSSANELQSFFGTAPYTKSSGQYRSVHFRFACHKGMRSALGQMALASIRGSTWAKSYYTRKRNEGKKAYHAFRCLANCWLKVIFAIWKNKTEYDETLHLASIAQHQLNQVSV

SEQ ID NO: 88240 - protein, 418 aa, unidentified
MDKIRTKKGRVVNEKTLLVTVDIGKVMNMGYCRCPDKTEVKPFTFQNNYEGFNNFFSVIVKTKTAKKLEYVVVGFESTGAYAEPLMHFLRANGVKLVQVNPLHTKKLKDLQGNSPNKTDRKDPKVIADIIELGHALTVIIPEGVPADLRRLTHARERTLQRKTALLNQLQDAVFVSFPEFLDIMKDVKTKTAHFLLKHYPMPSNILECGLKPLAIHLKKISRGKLGHKRAQSLYEAAKRSIGIPEGRISLALEIQSFLSAIEQCNGFIEQVEQEISRLLKEVSYSRFLLSMKGIGSVTVAGLIGEVGDFNAFSTISELLKCAGLNLYEISSGKRQGARHISKRGRALMRKLLFYAALCTVRKGGIMHEHYQRYLQNGMKKVKALVAISRKLLGVMFALVRDHKPYFKNHEEAKYLNAA

SEQ ID NO: 88241 - protein, 374 aa, unidentified
MIYVGIDVAKDKHDCFITNSDGEVLFKPFTISNNREGFENLFQRIESVSDDFTKVKVGLEATGHYSYNLLGFLLDKGLTTYVINPLHTNLYRKSLSLRKTKTDKVDSRTIATMMMSDMNLKSYSDTSYHNEELKSLTRYRFDKVKERAKLKSSVSRLVCILFPELEKLVPTLHMASVYALLFEFPSADAVANSHLTRLSNLLAESSKGRYGKDTAVMFREAARSSIGSHMPAKSLELKHTIKLIRELDTEIEEIENEIKSIMDEINSPILTIPGISYRMGAMIIAEIGDFSRFDSPDKILAYAGMSPSTYQSGQLDNCYSHMEKRGSRYLRYALFIMQPNTSVTGMNPLGLILKRNEPKANITMLLYPTPQRNW

SEQ ID NO: 88242 - protein, 342 aa, unidentified
MKHFAGLDVSVKETSICIVNDTGRIVREVKVVSEPDAQLKVLGNPAYRFERIGLEAGPLSQWLFSALAEAELPVVCVETRHMQAVLKAQINKTDRNDARGIAQMIRAGLYHPVHVKTLRSQKLRMLLTHRKLLQSKAIAIENDLRGTLRNFGLKVGMVGKLRFEARIQELVENFPDLAMLVEPLLIVRRALREQIVILHRRLLAIVRDDEVCRRLMTTPGVGPVVALTYRATVDVPARFRKSKSVGAVFGLTCSKYQSGEIDWSGRISRCGDEMMRVMLYEAAQSMLRSKKWSWLKAWAMQIARRRGMKKAIVALARRLAVILHRIWVDGTEFRWTRETAAA

SEQ ID NO: 88243 - protein, 341 aa, unidentified
MNIKRIGIDLAKQVFQIHGVDGQEKVVLRKQLRRAQLLDYFKNLPPCLIGMEACGSAHYWARELQKLGHTVKLMAPQFVKPYVKSNKNDANDAEAICEAVAPPTMRFVAIKSIAQQDIQAVHRIRSELVQQRTAKVNQIRGLLAEYGTVVGRRIDVLEHALPLILEDAENGLTADFRVLLEGLQQDLATLNGRVDDLDKTIKSLAASNTDAKRLQQIPGIGPIIATALTCAIGDGKQFKRGRDMAAWLGLTPRQHSSGGKDRLLGISKHGDAYLRTLLIHGARSVLKVASQKDDPRSRWLQNLCSRRNKNIAAVALANKNARIAWALLSKKTDFLPEGEPV

SEQ ID NO: 88244 - protein, 362 aa, unidentified
MKTQIYKKSGHELVNFTGKTIYIGIDTHKKNWNVSIFLDDMFVRRFHQEADSKALHSFLTKHYPEARYVACYEAGFKGFSIYRELSELGIECEIAHAADLPQTNKDKLNKNDKIDSRRLGEALSKKMINSIYILNKQAEADRTLVRYRRKIKGFLKSRKTAIKSFLFRFGIDIPPEFDKSNISKKYISWLRSLTFDEPSANYTLQSMVDDVECLRKKEYEHIKQIRALAASDRYRDVYNELNKIPGIGLIAIMTLLTEVVDINRFYSFKKLNSYVGMCPTEFSSGEKIKHGKITPRANKGVRTVLIEAAWTAVKYDPALSLKFSELRKRMESNEAIVSIARKLLSRIYAVWKNHIDYKIGVR

SEQ ID NO: 88245 - protein, 339 aa, unidentified
MNRTVVGVDIAKRVFQLHWVELGSGEIVSVQLKRAKFLEHFANRLPCLIGMEACGGSQHWARELHKLGHEVKLLSARMVKAFVSGNKNDAADARAIWTAVQQPGIKAVAVKSEGQQAVLALHRMRAQLVKFRTAQVNGLRGLLAEYGEVLPQGRAGIRRDVPGALERVAERLPAMVIETLREQYARVGELDEQVQRIERRLQQWHRQDEASRRLAEIPGVGVLGATAALATIGDAQVFRSGREFAAWLGLVPRQSGTGGRVRLLGISKRGDPYLRTVLIHGARAVMTHSKAPPEWARQVAERRPKNVAIVALANKMARTIWALLAHQREYEPLYARRPA

SEQ ID NO: 88246 - protein, 353 aa, unidentified
MVILSQLRRRATDMTSVAQFQAFVGIDYHDSVVQICVLDVAGDILGNEGVPNGVVAILEYVSRVAEGRIVAAAAIEACCGAANLAQRLREEGWEIDLAHAGICARMKQNPDKTDYSDAHLLADLVRIGYLPRVWLPPEAIRDLRRLVRYRQQLVDHRRNIKLRIRAMLREERIVAPQEAGNVWTKAWKAWLQTTVGLGQHSRWIMDEHLADLEHVAAKIREVESRMEEATQDDRVVAKLREERGVGLVTAVVMRAEIGSFGRFRNGKQLARYCAVTPKNASSGKRQADGGLIKAGNLYLRGMLIEAAHRLARYVPKWRSLKEQLKSRGKPAAVAAAAVANRWIRQLYWQMIAV

SEQ ID NO: 88247 - protein, 316 aa, unidentified
MAELSTPTNIGIDVSKDWLDISVLPTQQTWRIANTEEDIQTAIPTLKALQPERIVLEATGGYENRLALQLYAAGLPVVRVNPKRVRYFARSLGLQAKTDALDGKALALFAERVKPPLTRFPSEKEQSLSILLTRREQLSTMLVAERNRLETAPAKIRPSLEEHIHWLTDKIAELDREIDELIQSDPEFKEKCALLTQVPGVGQKTAAKLIADVPELGTCDRKQIAALIGVAPYNRDSGQKSGQRFISGGRADVRAVLYMATLAAIRFNPVIRKMYQRLLQAGKKKKVAIVACMRKLLTILNAILRHRTHWNPTSTS

SEQ ID NO: 88248 - protein, 343 aa, unidentified
MSEISMIGLDLAKNVFQVHGVDASGSVVLRRQLRRGAVEKFFAQLSPCTVGIEACGSAHHWARVIGRYGHQVRLMPPAYVKPYVKRNKNDGRDAEGICEAVGRPTMRFVPVKSVEQQATMAVHTTRALLVRQRTMIANSLRAALSEIGIVAAQGIEGLRQLMSRLEAPGEEVPEIMRGALLLLAKHWQALDTDERVLERQIAKAAHADREARRLMEVPCVGPIIASTVLAKVPDARVFRSGRDFAAWIGLTGRDRGTGGKHRPGRISKQGDRMLRALLINGASAYLRHQRARGVSDPWLRDLLARRPCKVVMVALAAKTARILWAMLVKGESYRDRASAPAAA

SEQ ID NO: 88249 - protein, 337 aa, unidentified
MVYGAIDLHMRYSQIRIIDETSAVQRDQRIVTARERFLKAFDGYGPMRILLETGTESEWVAQTLEAAGHTVIVADPNYAPMYGDLQRKVKTDRRDVAALAEANRRGWYRAAHRVSAAQRATRQVLRARRQFVQMRSGAVALVRSLVKQDGYRLPSCGAERVPARLAALALPATLVAAVAPLARMIETTTKEIAALDQQLRICAASDPIVQALQTVPGVGLIVALTFRSQLDDLDRFTHAGQVSAAIGLVPREDSSAERRHRGHITKAGPRELRSLLVQAAWACWRSKQSATLRAWADQLAARRGRRIAVVALARRLSRILYAIWRDGSTFEGKKLAA

SEQ ID NO: 88250 - protein, 359 aa, unidentified
MYFSGLDAHLRYVTVAVLDRLGGVALETTVPTREPDRLLAVLAPFRPLEVVVETCPFWPWLYDLLVPAGIGFHLAHAKALRAIATAPQKSDAVDARLLARMLLSGLIPEAYPRSADQRELLRLLRHRTALVRFRTRLAGRIHSQLHQQRLSLPRENLLRRATRAWLEATAWPRLTVEQRAIVTTHSELIDHLTPLIRALERRIAAAAAGDATAPLLATIPGIGPYRSLLLAAELVPISRFPRAEHLVSYSGLAPVTRSSGGHTHHGSIPPAANRWVRGVLVSAIPSHVRYAPTSPVTVAYEQLKARLGWRVARVAAARKLARVVYVMLTRRTPWHGVPAAGDVRDEVQNSHVAPTTSFC

SEQ ID NO: 88251 - protein, 397 aa, unidentified
MIAVGIDISKAKSTVAVIDSDGTVLASPFTMAHTQPEMEAFVTYLKGLGEPTTILMEYTGHYHYPVLKKLQDEGFPVCIVNPYQMKKYGDVEIHKAKTDKKDALRIAAYALEKSYKLVPYSSMEQKYEDLKFLSRQYSQRITYVAKLKVQLIALLDQTMPGITRILPLNSRNPEKCALLLFIKRFKSFDEIQRIGKARFLASYDVLAKKASERSASSKGLSIYELAVDSITTRGEDPYIWLSQNQCVDLLSTTQNAADEIISQMRNIAETIPEYKVLRAMRGVGDRLGPIILAEIGDIRRFHSGKALNSYAGNDAPPYQSGQFESRNRHISKRGSSALRKACYEVMQALKLTKPQDDPVYLFMLKKEQEGKPFNVAKMAGVNKFLRIYYARAMELYK

SEQ ID NO: 88252 - protein, 484 aa, unidentified
MKKLSSEPPAQPIVAFVGIDWADQKHDIVWSAATSAAATEHQVVANRPEALSQWVTEMRQRFGPHGRIAIFLEQSRGALIHHLMNYEGLVLYPINPLQMAHYRKAIKVSGDKHDRLDATLLCQFGRLHLDGLKPWQPDDALTRKLALLNEDRRQAIEKRSALANELKSALKIYYPLALELLDNDTSTLLAADLVLHWPALQVLQKQSQSKLRRFFYAHNCRREQKMLQRLELIQQAQPMIRDSAIIEAAALKVQLLSQQLKSLLPYIALYEKQIAQLFDSHPDGFLFSDLPGAGPALGPRLLTAFGSNRDRFGSSTEAATTFGIAPIRDSSGKRTPKQPGTVCYRHACPKFLRQSWHEFAACSIRSCPWADAYYDAQRAKGKSHHTAVRALAFKWIRIAYACWKKSHPLRSQPLRACPRPTRFTLRPYHRSITGQKIPHFLLTDQLRRLSLHAPFSPTHTRVFSSGTETIFTKGLYVPGLIAAT

SEQ ID NO: 88253 - protein, 440 aa, unidentified
MGSYAGVDWASEKHDVRVADAAGEKLLAVTFAHDEQGLRSLCRQLVRLEVELVAIERPDGLLVERLLDAGLRVLALHPNQVAAARDRFRVSGGKSDGFDAFVLCELARTDSHRFRVLEPDSDQTKALRALTRGREDLVGMRTALTNQLRAELERFWPGPLGLFTDLHGRISLAFLERYPSPADARGLGEARLAGFLARERYSGRQKPAELLAKLRRAAAARVGELELSTRRQLVLGLVAMIKSLNAQIKELERQLARTLGEHPDGEIFRSLFRDPRSVICAAELLAEIGDCRGRYPSRDSLAADAGQAAVAIESGKRKAACFRWGCNKRLRAAFATLADSTRHWHPWAQDVYAAALARGHDHPRALRTLGRAWCRVVWQCWQKRTPYDPARHRALQQHITVTIPTASGPVVDQLATESMAAGLFATNAPTSRQQQVTAAQ

SEQ ID NO: 88254 - protein, 411 aa, unidentified
MTKEDFIYVGIDLHKETHTAVMIDCYNNKLGEITFPNRPADFPKLVTKVKKCNTDAKEVVYGLENAYGYGRPLAVWLIDKGYFVKDVNTAISHRQAKHRGAMYRKSDSDDAGAIALATLNMLDKLPDACPNDAYWSLGQLVHRRDNIMKQRTRLVNQLHEQLCIAYTSYKQFFNDISRPTALYFWEHYPSRKYLKGKSVEDLRAELVPVSHNKCSTKTCEKILDAVASDKVKNNAYQDARDMVTLSIVSDLQHYDIQLAEVDKMLEQMYKMLGCTLTTIPGVNVITAVKILAEIGDIKRFSNANKLAQFAGIAPLHLSSSGKGKDLATKQGNRRLQATIYFLAIQMVQISSKGTPRNPVVRAYYEKRKAEGKTSQQALICISRRLISVIYGMLKNGTEYRMPVVENAGEKL

SEQ ID NO: 88255 - protein, 301 aa, unidentified
MVAGTHGSLNKAGSTKMTQISRTAGIDTSKAKLDVAIHGGGEHWQVDNTPVGWRRLAAALTSAGVMRIGIEASGGYECGVVGCLRTKGFTVLVLQPIQVKAYARLHLRRAKNDKLDAALIAACAATIDRPRIAPDERLAKLAHHLTFVEQIEEDIARFKTRLEHIGDARLRRMVVADIARLKARRSAELLRIVAALRAHDDLGRRLDLVLSIPGLGERTALALLIRMPELGQVSREEAAALAGLAPFDDDSGKHKGERHIAGGRRRLRRSLFAAALPARLPLEQSADRALHPSHHTRKSSQ

SEQ ID NO: 88256 - protein, 264 aa, unidentified
MLSSNVKYIGLDVHKEAIAIAVVNGAGKLVMESIVETKSSTVLDFLHGLRGELHVTLEEGTWAAWLYDVLKPHVREIVVCNPRRNALLKEGSKSDKIDARKLAELLRAGLLRAVYHGENGLQTLRELARCYLTISKDLKRVKNRLKALYHSWGICCAGKQVYAVRHREQWLSKIAQVGVHRRAELFYQQLDGLLVLRHAVYGELLAESRKHQAVKILRQVPSIGPLRSALLLALMQTPHRFRSKRQLWTYSGLAVVAHDSAQHR

SEQ ID NO: 88257 - protein, 323 aa, unidentified
MMERPAPQAACSWVVHDVVNGATYGEEPAVSSVSHRGFTHLGMDVSKDSISVAVLEPDRDQASVDKIFHDEVSVRRLVGRFDDRSKLWVCYEAGPTGYDLYRLLCSLGVRCDVVAPSLVPKRRGDRVKTDRRDARRLAGLHRAGELTPIGVPSPPQEAVRDLCRTRGDMVEDLTRARNRLTKFLLRHARVWRDGSNWTFKHQRWLAAQHFDDRALAATFAHYRATLALRETSLEAVEADLVGYQDRPPFGDQVPRLGAYRGVTRMGALCLAAEVFDWRRFPQARGFMSFTGLVPSANSTGLSEHRGKITRAGNRHLRAQLVEH

SEQ ID NO: 88258 - protein, 337 aa, unidentified
MKITTIGLDIAKNVFHIFAVNQAGKLIKKRALKRKEVISYFARTEPCCVVMESCGSANYWAREIGRLGHTVKLIAPQYVVPYRRKNKNDFNDAEAIAEASQRDNMAFVPIKTVEQQEIQMLLRVRTRYLQSYVKLGNQIRGLLAEYGITLNLGQAAIKRQLPEVLEDAENGLNPVSRQVFSELLEEYLSLIEKVKGYEHKIEQTIKDNIICQRAQSVVGIGPITAAAIYASIGRGENFHNGRHFSAWCGLVPKQNSTGGKTVLSGISKRGNSYLRQLLVHGARAVLQYTAKKEDKLSLWAENLKQKKGYNKACVALANKLARIVWAVITKEQTYRLA

SEQ ID NO: 88259 - protein, 313 aa, unidentified
MTQNTRFIGIDISKSKLDVCILPDRIYLTYENTVSGREDCLHMLETRSPIERIILEATGGYEKRILKRLQQADFPVCRVNALHVRHFAKASGLLAKTDKIDAFVLADYGMRMPCDVTAELSDTQQKLIDLVARYRQLKGMIVQEKNRLEKQVETTRSMIEETLAFFTKQEKQLRLEMEKCVEGDKALQAGLNVLKSLKGIGFITACILLAELPELGRLDKAKIVKLVGVAPINRDSGTLRGKRMIAGGRKSVRNSLYIAALPAIRFDPIMRAFYDRLKEKGKPGKVALVAVMRKMLIILNTRMKEHYAAALDN

SEQ ID NO: 88260 - protein, 319 aa, unidentified
MTVNLAQEYVGIDVSKTQLDVAIGQKGEYWQANNDAVGIIRTVEHLKDLQPALIVVESTGGLEVALITELFAAQLPFALVHPKRVRDFARSIGLLAKTDKLDARLLSRFGETIKPPVSRLPGVAEQNLNAFMLRRRQLLDILVMEKNHLFSTRLSMRLDVEKHIAWLEAEIADLDQQIDDQVHQIPIFKEKEAILRSAKGVGPVLCAKLLSGLPELGLMDRKKIAALVGVAPYNDDSGRHRGKRSIKGGREDVRRVLYMATLAASRSNPVIKPFYQSLRKQGKLHKVALVACMRKFLTILNAMVREMLPFNPAFVPHYS

SEQ ID NO: 88261 - protein, 430 aa, unidentified
MKSNTQNAKIEAITEKTLVLGIDVGSETHYARAFDYRGVEYSKKPFKFSNTEAGFVTFKAWVLDIKEKHGKDKVIPGMEPTGHYWFNLGKFLQDNEMKPVLVNPHHVKKSKELDDNHPTKNDRKDPKVIAGLVREGRYMIPYLPDGVYADLRTASNIRFQLQAELTRIQNRINRWFNIYFPEYKTVYGKPDAKSGILILKEAPLPEDILTLGIDGVNQIWRDAKLRAVGKARAKTLIEAAEHSVGSKEGAVSARMEIRMLLEDYESRNIRLQEVMGLIEGLVNQIPMAEKLLEIKGVGIKTVSGFLAEVGDIRRFNDPKELQKLAGLALVENSSGKHKGKTTISRRGRKRLRYLLFEGAMSLVAKNPEFRELHNYYTTRRLNPLKKMQSLMAIAAKLIRVFYAMLTKGVDYDPKKMASDIKRPAVYLQAA

SEQ ID NO: 88262 - protein, 341 aa, unidentified
MKNLFIGVDFSKEKVDVAILFADGLAETAARVFNEFKTTVSGYRQLVKWVEQNSCGIDSSLWLFCGENTGDYSKGLCNFLYGKGYDMWLENAKSIKDASGLRRLKSDRADASMIAEYAMRNYDKAVMYEPLSESLTQLRELFLYRQMIVRHRCSFQVRRGEKRLTMEKSPVKTMISQSGRHIVSELNKEIEKIDKRIADLIKSDEELTEVFTIVTSVPGIGTQNAVCLMVYTDNFRRFNYDSRKIACYYGLAPFGKDSGTSVHSDPHVHYMANRQIKAMLTQAALAAVNFNPIMARYYMRLVERGKKKQVALNNVKNKLVHLVTAMVRNRQTFTPEYKISA

SEQ ID NO: 88263 - protein, 403 aa, unidentified
MNAVGIDVSKGKSMVAIMRPFGEIVAAPFEVKHTASDIKSLVKLINSVEGESRIVMEHTGRYYEVLAHQLSEANLFVSAINPKLIKDFDNDSLRKVKSDKADAVKIARYALDKWQNLKQYSVMDELRNQLKTMNRQFGFYMKHKTAMKNNLIGILDQTYPGVNTYFDSPTRSDGSQKWVDFASTYWHVDCVRKMSLNAFIDHYQKWCKRKKYNFSQSKAEEIYGKAKELVPVLPKDEVTKFIIKQAVDQLNSASVTVEELRSLMNETASKLPEYPIVMQMKGVGPSLGPQLMAEIGDVTRFTHKGALTAFAGVDPGVNESGSYEQKSVPTSKRGSAYLRKTLFQVMDVLIKTMPQDDPVYQFLDKKRAQGKAYYVYMTAGANKFLRIYYGRVKEYLSSLPESE

SEQ ID NO: 88264 - protein, 338 aa, unidentified
MGKEHDMYYIGMDLHKQDLVMAVEDEHGPVGRPRRIACRDTGAIRAAVGRWRPFRAVVEASASYRWLYDLLEPQGEVVLAHPLRLRAITAARAKTDKLDAALLARLLRANLIPAAYVPPAPYQRLRDLTRTRARLSCNATLAKNQMHALLARANVHPPLRTLFGPRGRRWLAGLDLGLSGNLVRDELLRRLEHYGREIATLDAHLEAVASEFPQAEALEVLHGIGRYSALLVVAEIGEPERFRNARQVGAYAGLTARVHQSGKTEHRGNISKQGSRWLRWILVQAAIKLVRRDERLANFYQRVRRRAGRNVARVAVARKLAGICWVRLRRWQREQAAA

SEQ ID NO: 88265 - protein, 354 aa, unidentified
MNDIKYIGIDVHQSTSVFAVRDRQGEIIGESILKTNPSAIVDFLKGQRGTVRVAFEEGTYSNWLYDVIKPHVSRVIVCDPRKNKIDGNKTDKIDARKLAELLRLNALSAVYHGEQSHQTIKEYARSYLNLQQDSVRAMNRVKAIYRGRGIGCRGRTIYGPKNRKEWLDKLEDRGARCRAERLLKQLEFFGKLRIEAQKDLVRESRKQKDYKILKGIPGLGSIRKALILAFVITPHRFRNKRQFWTYTGFSVVRRGSSEYEILEGELQRKKRKPLPRGLNHNYHRVLKDVFKGAALTAAYRGPFKPLFDQRVANGMAENLALLTLARKIAAITLAIWKKGERFDIERHQLSEQKT

SEQ ID NO: 88266 - protein, 344 aa, unidentified
MDHFAGLDVSVKETSVCIVDDTGKIVREVKVASEPEALLAILKNPAYHFKRIGLEAGPLSQWLFNALAEAGLPVICVETRHMQAVLKAQINKTDRNDARGIAQMMRVGIYRPVHVKTLRSQKLRMLLTHRKLLQSKAIAIENDLRGTLRNFGLKVGIVGKVRFEARIKELVENLPDLAMLVEPLLVVRRVLREQTIVLHERLLAIVRDDEVCRRLMTIPGVGPVVALTYRATVDVPARFRKSKAVGAVFGLTCSKYQSGEIDRNGRISHCGDEMMRVMLYEAAQSMLHSKKWSWLKAWAMQIARRRGMKKAVVALARRLAVIMHRMWVDGTEFRWTREQGAAAA

SEQ ID NO: 88267 - protein, 365 aa, unidentified
MNYINVGIDAGKEKVVCAYRANRTGEVRLITMANRKDTLRPWIEKLQHGGVVQACYEASSVGYEIYRWLKALGAECEVVAPSLIPKKAGNHVKTDARDAQELLSLHEAGLLTPVRVPTESEEALRDLVRSRGDIQKTLTMNKHRLNQFMQRHGRIYPGKSHWTHGHKAWLSKQTFSEPAAQKTAELYRRWMDLAQAELERVELMIREIAPEHAGTYALARRMMSFHGIDVMSGISLASELLDVRRFGKASQLMAFTGLTGREYSSADVVRRGSITKTGNAQVRHVLIQAAWKYTRKPSESKRLREHWKTQPASVQKIAQKAKDRLYKRFQHLTNAGKLKQKAVVAVAREFAGFLWAAAQVDDIAA

SEQ ID NO: 88268 - protein, 338 aa, unidentified
MSIYAGLDVSDKTTHVCVVDAEGAVLRREVLASDPEIIGKWLGRYCPDLVRVVMETGPLSAFLYHGMAARDLPIECICARHAKGVLSARVNKSDVHDAEGIAQMARTGWFKRIHMKDTATHFDRAAIRIRAQLITARTSMINQLRGLLKLFGFRLGSARAAGKRAERLVALYAQRPDLEALFAPLIASMEAIEAQLRASTHTLELRAASDPVCMRLMTVPGVGPITALTYTMSIEDPRRFARGEDVGAYAGLVPRRNQSGERDTQGHISKAGDPMLRRALYEAANIILSRVKQPFALQHWGRKMAEAKGPKRARVAVARKLAILLHSLWLNETEFRWV

SEQ ID NO: 88269 - protein, 347 aa, unidentified
MRFYSGQHRFYCGVDLHARSMYVCIINRDGDTLVHRNLPTDRNMFLKVIEPYREDIVVAVECVFLWYWVADLCADNGIPFVLGHALYMKAIHGGKAKNDKIDSEKLVRMIRGGMFPVAYVYPRKMRAGRDLLRRRNYLVRRRAELLAHIQNTNSQYNLLPIGKRLDRKKNREGVAEHFPIPAVRKNVEVDLQLRDYFDVVIKDMELYIERTVKVHDAHSYYLLRSVDGIGKILSMVILYEIENIKRFPRVQDFSSYARLVKCAKSSAGKKHGTSGKKIGNVHLKWAFSEAAALFLRGNPRGQQYLRRLEKKHGKGKALSIIAARLGRAVYFMLRRGEPFDREKFHAS

SEQ ID NO: 88270 - protein, 344 aa, unidentified
MTSIELNATAHDACLSLFAGIDVGAEDLVLVIRKNGKPFDPQKYANTPADRRRLVKKLSKLTGIIVCLEATGIYHFDLSIALHDAGVLLMVVNPKSSHNFAKVLMKNSKTDAVDAHTLAEYAARMDFVAWTRPTTEKLALRSFARRINALTGQKAAAKNHLHALNATQETPKAVLRDANLAIAQLEKRIDRLTAEALLLIAAHPELKRTLSLLVGIKGIAETSAIALMGELLLLPPGLSHREWVKFAGLDPKAFDSGKSVHKKTRLSKAGNRQLRSALYMPALSAKQHDPHVRAYFQHLVDNGKKPLQAVCAVMRKLLHAIHGMLKHDQPFDNTRFYVIPRAVE

SEQ ID NO: 88271 - protein, 343 aa, unidentified
MKIYALGIDLGKTVFHLVGLDASGQVVVRKRCSRTQLLAFTANLQVQLIGMEACSGAHFLGRALRAQGHAVRLMPAQYVKPYVKTNKSDYIDAEAIAEAVQRPRMRFVPIKTEEQLDLQALHRVRERWVMRRTAVVNQIRSLLLERGLTLPKGRRHLDERLPGILEDAELNLSGSFRVLLAQLKLELEQLAGRIEQMDTVIQKTAKENEACQRLTEIPGVGPVTATALIGAIGNGSAFGKGRALSAWMGIVPGEYTTGGKQKLLGISKRGNKYLRRLFVQGARSVLQQRHKQAPGLSEWLAQLLSRTHQNVVVVALANKLVRMAWAVLCKNERYRAPVLAATT

SEQ ID NO: 88272 - protein, 341 aa, unidentified
MQKKPHMDTTKIKPITSAGNPACPSIPASPPPLYLGVDIAKAELVLDLQGTILRFENTPQGIIRLCAQISKLSAPHLILEATAGYERALLLYALERGIAISLIQPARVRHYARALNLLAKSDPIDARLLSRFGRDINPAPAQPREPVRDTLCELLTRRNQLLDLLTCENNRAAHHTAKLALRQHRTLVSLIEKQITALEKETAALIDTDPALHTADTLLRTVVGVGPQTSRTLLAALPELGRSSRNQVSAIAGLAPYDADSGQKQGKRFIRGGRSHVRKILYLAALSAARCNPILKPFYQRLRAAGKPAKLALVATARKLLTHLNTLLSNHYKNTQKTLVS

SEQ ID NO: 88273 - protein, 375 aa, unidentified
MATNTITWVGMDAHKNSIKVAAWLPEQAEPVEWAEDTTAEAIRRLARRLRRLAPGEVRACYEAGPTGYGLQRLLGVEGVICEVVAPSLTPVKPGSRIKTDRRDARKLGELLRAGLLTEVHPPSETDEALRDLCRCRDDVRVDLLRARHRLSKFLLRRHRIYRQTKHHWGSRHMQWLAELRFDDPMSQATFDSYQLIVHQLDERLGQLDARLAEFGTQEPYREKVAALRCFKGIDTVTAVCLVAELHDFQRFRSPRQLAAYVGLVPSEDSSGERERRGPITKSGNRHVRRLLVEASWHHRHRPALSRPLRARREGQPARVIAIADRAQERLAARFRRMSEAGKVHPKTIVAMAREMCGYLWAVLHPAALPTRSKSA

SEQ ID NO: 88274 - protein, 339 aa, unidentified
MQTVTTIGLDIAKSVFQVHGIDAAGQVVIRRQLKRRYVLAFFQKLPPCLIGIEACASSHHWSRELQALGHTVRLMPPAYVKRQKNDATDAEAICEAVTRANMRFVVTKTPEQQSGLVLHRARHLFIRQQTAVINAIRAHLAEFGIIAPVGRHGVEELLNVVADPNDKRVPEIARACLMAFGAQLRRLKEQILEFDRMIRAWHRSSETSRRLDDCPGVGPVLATALVATVADPKSFRSGRNFSAWIGLVPKQHSSGGKNRLGSISKQGDCYLRGLFVAGALAVIRYAKIHGTKHRPWLTALLARRPTKVAAIALANKIARMAWAMMAKGERYKEPIALAA

SEQ ID NO: 88275 - protein, 344 aa, unidentified
MRYFTGLDVGLKASALCVVDETGSVVREAKVDSSPEAVAKALEGHVVETLVLETGGLSDWLASGLRKLGLKALVICARRARAAGEAVAVKTDRGDARLLAELARTGFYREVHVKSSEAQEGRALLVARAGLVEAARDAENRVRGLLRRFGVRLACLTGERFAARVREALQGLPETLGQAVEPMLEVAATARAGARELKAEITRRARADTTCQRLMSVPGVGPLVSYAYRMTIDEARRFATAKPVGAYLGLTPGRFQSGAMDRALPLSKAGDSLLRTLLYEGATSLLARSGKECALRRWGLRLAKRLGVRKARVAIARKLAVILHAIWIDGTWFEAEPGNRRAAI

SEQ ID NO: 88276 - protein, 353 aa, unidentified
MKLYIGVDFHPFQHTSCWMDIETSELRVQTLRHEDLDEVREFYRSKPPSVVGIEASSRAVWFEDLIFECGHQLIVGDPVLIRKSATSRHKNDRRDAEHIYTLLVEDRFPKLWRRPPASSDILDIVSLRSSLVRQRTQVLNRLQWIAHECGFRRGHMSTLRFQAMIKDASLNDVQRMRRDHLFRQFDSLMSQIGELEKWLESKANENEDVQLLLTQRGVGYLTALTMVHTLGDVHRFDTTRRVTAYVGLDPVDDRSADRVRKRKISKAGSRHLRHLLGQSANIAVRYDQRLKSFYKRLAKKKPRAVAKTATARKLAVKLSIMLRDQITAKEFDTRGQRTVDDARKAPGPEMVVG

SEQ ID NO: 88277 - protein, 411 aa, unidentified
MKRVYDNCCGIDVHKKLIVACFKQGSEQEVREFGATTRELLELCRWLKDGDCEMVAMESTASFWKPLYNILEASELDAIIVNARHMKNVPGRKTDVNDAEWIADLLQHGLLQASYIPDKDQRELRELVRYRKSLVGERTRELNRLQKMLEGANIKLSGTVSNINGKSARAILEHVLTGESFDDAKYDEMYENNVISHRLKASKEEIIDDLNGVMSALQRRMMKELLIHLDELNIHIRNLDDEINNFMKPEAKTASVALQEMPGIGETSAQAILAVIGTDMSRFPTAGHLASWAGLCPGNNESAGKRKTGRTTKGNCLLRETLITCAHAAILKKDTYFYAQFQRISAHRGKKRAYVAVAHSMLTAIYHMLKDGVVFKDLGADYYNQFNRERKINACLRKLERLGYRAEIAAT

SEQ ID NO: 88278 - protein, 409 aa, unidentified
MRIIGMDLHRVFAEAAALEDGELKRLGRIGMTRDHLEQFARTLLPTDHVVVEATGNATAVAEILIPHVAKVAVANPLQVHLIAKAKIKTDAIDARVLAKLYAAGFLPEVWIPDAATLARRRQVTRRTQLVRQRVRLKSIVQAILHANLLPRCPHADLFGGKGRAWLQAQHLPEDEQEAVEQHVQEFDRLSAALKGVERDIARAALADPNVTRLMTIPGIDMVVAVGLMAAIGKIKRFDSPDKLVAYIGLNPSVHQSGDGPAYHGRITKRGRSNARFLLVEAAWQTVRSPGPLRAFYERVRSRRGNHIAAVAVARKLAVIIWHLLTKNEDYSWVRPALHAKKIRDLELRAGHPPRRGQKGASYDYNIPQRRHDECNRAQQAESAYRRLTIAWRKTGPRSEPTGATNEERQ

SEQ ID NO: 88279 - protein, 392 aa, unidentified
MIYAGVDIAKMDHVIGAVDETGAEVARPMPFKNNEAGFERCVAWLESVAESEDDVFVGMEATGHYWKACFAHLMAAGYSVCVVNPMQVHAMRGLKGMKGVKNDRVDSWLIAETLRQGDYEQTRLATDEVQALKQLTRYHQGLKQELATVKTQAICVMDAYFPEYEGLFSDMFGTASLKVLAECPTPAEMARKRASTIARLLSEGSRGRLGAEKAAQLKAAAKSSVGIRLGQEAASFQIKTMVSQVEFLNETISKVESEVAELLAAVEPNITTIPGISTTTGAQIVAEIGDVKRFKSAASIVKYAGLNSGVDESGRFSAKGVPITKHGSPYLRRSLWLAANRARQYDPKLRAFYEKKRAEGKPHRVAVTAVARKLCHVVYAVMRDGEPYNPNK

SEQ ID NO: 88280 - protein, 386 aa, unidentified
MQASTVATPTAKYCGTIFVAIELSQRSWLVTLHSPDKDKISHHKLEGGDHAGLLALIDRVRERAARALGGVPAVMSCYEAGYDGFWLHRLLLAVGITNYVFDPASIAVDQRARRVKTDRIDGERMLRTLMAYLRGEPRVVRIVRVPDAGQEDARRVSRERGRLVKEQTAHTTRIKALLRLLGMAVGNPHRRNWLSWLAAQRDWQGQAVPPQMLSEIRHEHARLMLVRERLNALAKTPAQADPTPAVAQMTERSELLLRLKCLGPAFATTLTNEVFYKDFRNRREVGSYFGLTPSPWRSGGIDRDQGISKAGNPRARCAAIELAWLWLRHQPDSKLTLEYRERTLDAGKRIKRVAIVALARKLVVALWRYLTTGLVPEGAVLKAVRV

SEQ ID NO: 88281 - protein, 382 aa, unidentified
MLNKTSIRTIGVDVHKDSYSICTYCPESDSFVGEIMMTSSSKLVTNYVKRLEKDLGPDNSIIIGYEAGPTGFGLQRDLLKAGIDCKVMAPTTIYEKKGGNRVKTDRGDARKIAKALHWGAYKEVIPLSPEDEATRDYIRMRDDRKNALKKAKQQIKSFLLRKDKHYPEKGSSWTLKYRAWLKSLEFELATDQLTYNEYYAEVCRLEEMVERFDNQIEEYSQDDRYKENVSNLRSFGGIDTHIAMATVCEVGDFSRFPTAKDFSSFIGVCPGQQSSGGKTQMTGITKAGNSHLRRLFMESANSMARTTIFNKSKRLKARQSGNSAAVIAYADKGTARIRYKYNKMVREGKNGNLAKAACAREIACFVWGMMTGNINGEVITEM

SEQ ID NO: 88282 - protein, 406 aa, unidentified
MSDIFALDVSMGKSYCVWYRGKHCLKEFSLVHTKAGFNALRDMIKKAQKPIIYFEATGIYSRVIEHFCETNGLRFCRLNPLELHLKSESLRRVKTDQKDAHRIALTVQENAFRLTVPWKKDYLQLHELSRFYNQLNADWNYRLNHLHTALEQVFPELKQLFVNRTSKLALNIVELFPHPALVRPYSRVKLKNIPMASTDKRISKMKAYKYADRLIDLAQKSYPAVSGDTIQVDEVRYYARQLIALTRKKEEVIKRMESIAQRLPEYILYCSFPGIGKQTAAQLMGELGDISRFDNANQLNAFVGIDIRRYQSGTYLGQDHINKRGNPIARKLLYFTVGNMIRQQHANSNHIVDYYYRLKEKRPHPKMNKVAMVACMNKTLKCLLSMIKHHEKYHYRYTDSMVPVKA

SEQ ID NO: 88283 - protein, 321 aa, unidentified
MIANTTTTSTRPVIAGDVGKIEVIVCDSRTGRTETLANSFDVLIEAARQWPEDCLVVCEATGGYETALLAAAVAAGRAAHRADARKVKHFIRSLGRLGKSDRIDAAALARYGEERGDRLPLWQPNEADQDALASLVRLRDSLVEQCSGLKRQLKAPNAAATKPHLALLLADLKRHVAAVMADIEAILARNAALAERVAIIDAIPGCGRVIAATLVALMPELGSLDRKQAAALAGVAPHPRQSGGRDGYRSVRGGRPEIKRCLFMAALVARRCNPELRAFDERLRASGKKPLVALTAVMRKLITIVNARLRDAARAASLRPA

SEQ ID NO: 88284 - protein, 357 aa, unidentified
MSYIGVDLHSDKFTAAFRDKTNKDILKSYYIDENEIDNFKKGLKKNDYIFIEASTPTFAFTDLLKDRVKKTIVIDPFKFRAIADSRKKTDKIDAKQLARMGKYHIEGDKKFLPEVYVVEKRIRKLRSLFTTYRLLNKEITMIKNRIHSLFKQNLKPYSKKHIFDEIMTGLKPIDLDEEYKIQVEVLFDVLSKLEEKKSEIKKKILLTGEPFIADIDILVSISGISVFVALGLISDYATIERFKNAKQFSKYLRSTPKSEESNKKVKTGKTQKNGRKLSIELMLQSINHFRRESLFIDKFYRRLKKGKGGCKARIAVVRKMFVSIYFMLREREYYRYMNKKLHDKKMREYKRFLAKNK

SEQ ID NO: 88285 - protein, 353 aa, unidentified
MIIIGVDFHPEFQQIASVDTETGEFQEKRLAHREEAETFYRAVGGQKVRVGMEASGHARWFERLLAELQFELWIGDAAEIQSKRVRKQKTDRQDAQLILRLMLKDDFPRIWVPSWENRDVRQLLWHRHRMVEMRTRIMNQLQALALNEGLRCRKRLWREHGRQQLESFRLAPWASRRRRDLLELLDRLNPTIAELSQAIEQEAEKYPQAQRLMTHPGVGPLTALAFVLIIGKAERFQCGKQIASYLGLVPLEKSSGNRRRLGHITKQGSSMVRFLLVEAAQVTVRSLPEWRKKYAHLMMRRGRKIAKVAMAGRLAVALYWMWRKGWNYEPSKSSVRTRASSEQAMVCSKTPSN

SEQ ID NO: 88286 - protein, 357 aa, unidentified
MLEGHRAWRGAWDSSGVFLNPNSCMGLEPEPSKEGSWMMAQDDLVVAGIDIAKDKVDVCLRSPSLRRTFASTAEGRRELASWFRRQKVGKAVMEASGGYEREWANALRDGGIEVRIVDPKRVRSFAQSAGRLAKNDTIDAEMIAWFAETFDEAPGQAYDAKREELHQMVNARQALKDMQAKLTSQGEHAVPAVVQRIHARISKTIAVELVKIEAAISTSVQATPRFAELAEIIESVPGLARTTSAALIAGMPELGHANNKIVAALLGVAPYDDDSGKRRGERQIKGGRRRTRNAFYMACLGAATRHNPVLKAFYDRLVAKGKEKKVALVACMRKLINILNIMIERRQKWDPSRYAVN

SEQ ID NO: 88287 - protein, 387 aa, unidentified
MSQTVAAPIPAAVDHERTLVLAIEVSNKSWVLAAQVPGLPHTKAKCTIDPEAEALLAAIAAYRARAAATGRSIERVIAVYEAGWSGFWLARWLMRHGVEVYVVQPSSVPVDRRIRRAKSDGIDSELLLRTLLAWLRGEPRVCSMVPVPDEADEDARRCVRERSELISERIGLTNRIGAILATLGVSDYNPLLRNRARRLAELRTALGEPLPANAHAKLKRLLARLELVLTQIAELERERDAVVETEASDGASKMIQQLTALRGIGVQSATVLVREAFVRRFANGKALGSYAGLASSPYSSGGIDREQGIGKAGNRRVRTVMVELAWLWTRYQPGAAQVCWFRERVASTGRRVRKIMVVALARKLLIALWRFVIDGVLPEGAVLKPAA

SEQ ID NO: 88288 - protein, 334 aa, unidentified
MENIALIGIDLGKNSFHIHCQDRRGKAVYRKKFTRPKLIEFLATCPATTIAMEACGGSHFMARKMEELGHSPKLISPQFVRPFVKSNKNDFVDAEAICEAASRPSMRFVQPRTESQQAMRALHRVRESLVQDKVKTTNQMHAFLLEFGISVPRGAAVISRLSTILEDNSLPLYLSQLLLKLQQHYHYLVEQIKDLESQLKRKLDEDEVGQRLLSIPCVGTLTASTISTEIGDGKQYASSRDFAAATGLVPRQYSTGGRTTLLGISKRGNKKIRTLLVQCARVFIQKLEHQSGKLADWVRDLLCRKSNFVVTCALANKLARIAWALTARQQTYVA

SEQ ID NO: 88289 - protein, 328 aa, unidentified
MDATSVGADVSQDWLDVHVLPTGQRFRVGNDDAGIAELRERLSRLSPERIALEATGGLERLAVAAMAAAGLPVVVVNSAQVRAFADALGTRAKTDPIGAALIAAYVNAVQPQLPPLPAATTRALADLVARRRHIVQMIMAEQNRLRTASSRQALKSIRRLLAALKRELEAIDADMDDHIRKSPLWQVSEKLLISMPGMGPTVTRILLAELPELGSLDRRQIVALAGLAPFTRHWGKWRGKSFIAAGRSSVRAALFMIALAAIRNNPHPQGTPRPPRPRRQGQDRRRHRYAQTARKPQRHDPGPKTLANRLTAKKVALASGQPMISGPG

SEQ ID NO: 88290 - protein, 375 aa, unidentified
MRGPTFRPLDYEIFAGLDVDKRSIAVTFTTHQGFLKSLCMPYSVEHLLNHVRKHFPGQKVAFAYEAGPTGYGLYDGLVAQAYPCLIASPAMIPKAPGQRVKTNRLDSRGLSENLRGGQLTSIHVPSAVYRELRHLTQLRDTFVSEMVAMKQRIKSLLVVEGIEFPPAPAGSQWSVLVKNQLRTLPCSPTVRLKLEQLLDSLAFNEQQVVKTTKEIRRFCQHEPELVQTIKYLLTLPGIGWVVASQLVARIGDWRALSNSRQLAGFLGLVPTEHSTGDRTQRGSITHTGDPRLRSKLIQASWSAIRQDGELREFFRSVCKTHPRPLAARVAIVAVARKLSVRIAVVLRHHRAYEIRKPLPSAPLTQEETGSQGTPR

SEQ ID NO: 88291 - protein, 320 aa, unidentified
MNTIGLDISQKTIDATLHKTDGSTYHTKVGNNREGFQILKDWIKANKVRKCVIGMEATGIYYEAAAENLSETHTVYVINPLKIKDYGKSQFNRTKTDKADSNLIAEYTKRHADKIIPYSKPKNRYLQKLINLKQQLKDHQKQIKNRLHSSDDEMIQAIHQDLIQAYKEKIDQTQTAIEAQIKEQAETDGHYRNLQTIAGIGKDTAAILYAQLTDKNFQTANQFVSYAGLSPHTEQSGTSVNKKGRLSRYGHRRVKRSLYMPALVAYRTGAFPQLVRNLTNAGKPKMVIIVAIMRKLAKLAYYIVKTGKPYDSTRHKAVQA

SEQ ID NO: 88292 - protein, 409 aa, unidentified
MRRLIERCCGLDVHKKTIVGCVRVPDARGEVAELIRTFGTTTPDLLELSDWLTGLGVTHVAMEATGVYWKAPYYILEGDFEVMVVNPAHIKHVPGRKTDAIDAAWIAELLSYGLLRPSFVPPKPIRQLRDLTRYRMQVIREHTRTVNRIHKVLEDAGIKLASVATNVMGVSGRDMMRSLISGTADPEALAELARGRLRTKLPELRKALTGRFEDHHAFLLERMLAPVDDLEADIEALSGRIEDHLAPFAEAVELLDSIPGVGQRAAEAIVGEIGTDMSRFPSAGHLASWAGLCPGQRESAGKRKSARTRRGSELLRTVLIECAHAAAHTKDTYFAEFFRQVTRRHGKKQAAVAVAHEILVACWHILSTGQPYLERGPAALRQLTEDQIRRRAVRQLEKLGLTVTLEPAA

SEQ ID NO: 88293 - protein, 387 aa, unidentified
MYFVGIDISKFKHDCAIVDELGDVITPSWSFQNDREGFSLLKELLDALDGEKKIGLEATGHYGQNLKLFLENNDFSFMEFNPLLINRFVHSKSLRKTKTDSIDALMIAQYLMTVEYKPYPPSFYTLEKLKSLTRFRDSLIRQRSKQLVELTNILDKVFPEFKSFFKGRFSATALYILSHYASPEKISNMNSKSYEPLRRLSRGRFSMVDFVELKTLARNTVGSTCDYLLQEMEITIDIYNQLQSKVEEIELQINDCVLGLAPPMLTIPGIGVASAAVILSEFGDLSKFNSPSKLLSFAGMEPGYFQSGTSESTGKMVKHGSSHLRYAMMNCAQTVINNEPTFTAYYAKKRAEGKEHRVALTHVAKKLLRVIYTLQTKELSYNPDLVR

SEQ ID NO: 88294 - protein, 351 aa, unidentified
MKRKNKEIQGEALFVGIDLHKRRWHVTIRTADVEIFSNSIVGRWEDLRRVINRYKGCRIHAVYEAGFFGFSLYDHLTKYGVDCIVTPPSLIPQEHGNRVKTDRLDSRKLARLLAKGLLKSVWVPSAKERFHRQVIRRRRQLVGDRVRTQNRIKSELYFYGIDLPAPRGKWSQVYFVNLQRIKFKNHWMQQSFNQLLEQYEFLSAQIDKQTQLLKQLAQLPLYRDRVAILRSIPGIGILTAMEILLELQDVSRFRRAEQLAAYAGLTPSQYSSADKVRMGRITGAGKNTVRSALVEACWHLIRKDKAMRKKYEQIKARAGGKRAIVAVSRKLILCIRRLLLDNRPYVYEPVN

SEQ ID NO: 88295 - protein, 350 aa, unidentified
MDHKCKVIIGIDTHKATHVAVALDTQGTRLAALSIPTNPKGYLELERWSQSLGEVHAFGIEGTGSFGAGLSRSLLAQGHNVVEVTRPNRQLRYSQGKTDTLDAEGAARSVLSGQATARPKTQTGLSEMIRHLKVARDTAVKSRSQAMVTLKTLIINAPADLRDVLDKIRGKVALIRHIAAFRPGEIDNTMASAKAAMRALARRWLWLHEEIITHDKELERLVIERAPDLMTSHGIATLTVAEMLILVGDDPTRIRSEAAFAKLCGVCPIPASSGKTHRFRLNRGGNRQANAALYRVAIVRMRGHEPTLAYVRKRTKDGKSKSEIIRCLKRYIVREIYSQLCLPKSAQIAA

SEQ ID NO: 88296 - protein, 309 aa, unidentified
MKEQLVYLGVDIAKSYLDAAVGNEKRRFSNDAIGHRELIKWVKQLKAPVQVICESSGGYERALVQGLARARVKISLVQANRVRQFARAAGILAKTDRIDAELLCEFGKLMRPQTVTAARLEQERLRELESQRRHLTHLLVMELNRGARVSDASVQRLNRSLINQIKKQIEQLDLLIKGHIDQSHQLSAKAAKLTSISGVGARTAALLLAQLPELGELNRREIAALVGVAPFNRDSGRMRGKRAIYGGRKPVRHGLYMAALVAAHHNPILRNFYLRLRAAGKPAKLALTATMRKLLIVLNSALKTDLRYA

SEQ ID NO: 88297 - protein, 423 aa, unidentified
MEVQHERCAGLDLAKDSLVACARIQSGRKVTRHIETFGMSTRELLRLSEWLQQHGCTHAVMEATGVYWEAVWQILHDALEIVVANAAHVKAVPGRKTDVCDSQWLADLLAHGLVRASFVPPPPIQQLRDLTRTRAQLVREKRRHVQRIHKTLERTNIKLAAVLTDIMGESGRAIIAAMIAGESDPRVLVGLVNYRVHADRQKIVDALQGRLTDHHRFLLRMHLAHVKQLDADIEMLDLKTDQQLEPLRTQLQLLKTIPGVDTVAAHVLLAEIGADMSRFPSAGHLVSWAGLCPRNEKSAGKSFNTRIRNGNPWLKSTLVQSARAGARTRSSYLRAQYHRLSARRGKNKATIAVAASMLVATWFMLRDGTPWNDLGVDFFDRRDPAKSARRLTRRLEALGYQVAITNAPPPRERPAPTLGSVSQ

SEQ ID NO: 88298 - protein, 317 aa, unidentified
MDHFAGLDVSVKETSICIVDDTGRIVREVKVASEPEALLKVLGNPAYRFKRIGLEAGPLSQWLFSGLAEAGLPVVCVETRHMQAVLKAQINKTDRNDARGIAQMMRVGLYRPVHVKTLRSQKLRMLLTHRKLLQSKAIAIENDLRGTLRNFGLKVGMVGKVRFEARIKELVESLPDLAELIEPLLIVRRVLREQLVTLHRRLLAIVRDDEVCRRLMTTPGVGPVVALTYRATVDVPARFRKSKSVGAVFGLTCSRYQSGEIDWSGRISRCGDEMMRVMLYEAAQSMMRSKKWSWLKAWATKADVPCSWGVQARPMRR

SEQ ID NO: 88299 - protein, 305 aa, unidentified
MKIYIGIDVSKDRLDIQLPSKTLQISNAEKSITAWLKKLPDEAFLVCESSGGYESLLITLAHSLGRPIARVNARQVRDFAKATGVLAKTDTIDARVLAEFGKVLAPEALVIPDPLQQELCALVKFRSQLLTQITFNNNMRETLRDKQLLNLNSKTAAFLKKQADQVLLLIDEKINHSAELRSKRDRLTAIQGMGKTSASCLLALMPELGSLSSPKAAALAGLAPFNHDSGQFRGQRHIAGGRSHVRAVLYMPALVASRHNPVLKNLYQRLVSAGKPKKLALTVLMRKLVVLANHLLKNPSFSLAT

SEQ ID NO: 88300 - protein, 368 aa, unidentified
MSEDIMWVGLDAHKAFLQVAVLAEEASRPLSWRVEHTTPKVKKLGRKLEKLAKGREIRVCYEAGPCGWALKRSLEDATPLVCEVVAPALIPVKPGDRVKTDRRDAQKLAEYLRAGLLTEVAPPTESQEATRALVRQRSACVQDLGRARHRLSKFLLGRHLTHGGKNWTAKHLDWLNTLKLEDAMDQVVLRDLLGEVEHQMQRKGQLTKALEEVAMQERYATAVGYLRCFRGIETVTAMTILAELFSFERFETAKKLMGYLGLTPSEHTSGVVRRGGITRAGNRRVRTVLTEAAQHSSKAVHIGPALRARRANQPPDVVAMADRAMRRQHDLYWRLIQRGKHRNVAVTACARELTGFIWALLHGQVVTG

SEQ ID NO: 88301 - protein, 260 aa, unidentified
MLYTGIDYHKSFSYLTTMDEKGEIINQRKLPSNGEIVDFLKSFGESMEIAIEATPSWYWLYDHLEDEGFEVKLSHPLKTKAIAYAKVKTDKVDSATLAHLLRSNLLPLSYVPEKETRLNRELLRYRASLVKIQTGVKNRIHTILAKNNVSHSYTDLFGKQGMAFLHSLTLAENYKIALEGYLTVLDMVRQEIHTASKKVRQLAEEDADTLLLMTIPGIGYYSALLTKSEIGDVRRFRSAKQLCNYAGLVPSTHASGNTCF

SEQ ID NO: 88302 - protein, 426 aa, unidentified
MKELTKVCGIDVHKMFLQVCILTRSGETSQHRFHNTPTGILALKNLVVAEGCEIVAMESTGVYWYRLYLELELDIRTIVANARQIKSIPGRKTDMNDARWIAELALHGLIRPSRIFPRRDREFRDLTRNRETLVRTRTTIKNRIHKILDNAGIRLNLALKDLFGKSGRHLLLGLAEQKDLETTLATIPSPRILRRADQLREILQGSPLSPIQLHLLTTQLHLLEEVEEKIAQLDELILASLRDSQMAVAICTSVPGISITAATTILAELGDVQDFPTASHLVSWAGLAPSVYQSADSLVCGKITKQGSKSLRWILVQVAQAASRTTGTVFSNFFRRIAYRRGRNKAIVALARKILSILWHLLVNREHYIEPGLKRVRKLPARMTLPKISIDDAVATLLNAGYLVYSPENQKSTGKGVRAERATHPI

SEQ ID NO: 88303 - protein, 326 aa, unidentified
MNSVRMHIGVDVGKNCLDICFPDGKKEHLKNNKPGRARIIHAAKKLDAIVCFEATGIYEEDLASECLAAGVRAARLDAWKTRQYAKSRGRIEKTDRLDCEMIRDFASSLEDGKMPFVKPRSAAHSLIKEYAKIRGNLMKARVVVSSQLEFVRDKSARKSIVAIVEKIEQEIARLEDECGKAVGEDERMSSLSRRFLEVKGVGPCLVRAIFAECPDIGSFSKKGIAKFCGKAPIASKSCTIEKQSRMRRGRQGLRQAFHMAALSASKHNHVLRETYRRLMSNGKPKMTALGAVGRHLAILLNNIAKYPDFKISHESEDGKRKLHATC

SEQ ID NO: 88304 - protein, 439 aa, unidentified
MKALPILDEMATGIDVGSERLHASVGGQTPRVFGTMTRDVQEVVAWLQEQKVRSVAMEATGVYWMSLYTALQVAQIEVLVVNGRHVRNLPGRKTDMADCQWLATLHAHGLLRSGFVPPPDIRRLQDYLRLREDHISLAASHVQHMQKALERMNVKFHDVISDLSGVSGMKVVRAIVAGERRAQALLALCDVQIRKNKAERVLESLRGSWSAEQLFALRHALAAWDFYQTQITECDRAIEEVLQDLSGPSSEGAQPPQGRNKPGGTNTPHIPGLHRMLVQLCDGRDPTSVPGMADYSLLRVIGEVGVDLSKWPSAKHFAAWTGLAPGTAQSGKRRRNQARQTNRTGQMFCAMARSVGNSVDTAFGGAYRRLKARRGGLVANKALARKLAVMFWQMMVHGVEYVEHGLRKYEVRSALSEQRVLHKLARKHGLQLVASPAAA

SEQ ID NO: 88305 - protein, 411 aa, unidentified
MDLEVVVTHGAGLDVHKKVIVATVLTPTVNETRSFGTLTPDLLALADWLQSCGVTHVAMEATGVYWKPVVNLLEAYPFEAVMVVNPQHIKGMPGRKTDVQDSQWIAGLLRIGALKASYIPPRPQRELREIVRYRTSLQQARATEANRIQKVLEGANVKLGSVISDVLGVTGQRILAALADGETDPTALADLADPRIRASRDTLIQALTGLVTAHQRLMLRVQLQHVAFLDRQIAALSEEIATRLENFDDALARLQTIPGVERRTAEIIIAEIGTDLQRFPSAGHLVSWAGFSPGQHESAGKARPTRTRKGSKALRAALTQSGHAAGKTRTYLGAVYHRLAGRRGKQRAAVATGRHILIAVYAILRTPGAVYEDLGATYFDQRDRQALVRREIRRLEALGYRVRVEPTSQAG

SEQ ID NO: 88306 - protein, 433 aa, unidentified
MSNYYHLPVVGIDIAANFSIVTALKPDGDIYQKNLRIEHNLCGFNKLLTFLQKIEEELGDSPKVFCESTGIYHLTLLHFLVNNQVDIRVINPLITNSNKNSNIRKVKNDKLDSLSIAKICKFDNVKTSSFTCEEFLHLKFLVREYYKVVDLKANLKKTFSNNIYIHYPGLQDAFADLTGKTPLMFITKYPTPQHLLNACENEVINLLVTSSKRGVKWATKKFKQLMDIAKSADVIGINSLLFQSKVNRFYESFTFYSHQLQSITKEIFEYLDGCSFANIFKYNLELLKTFKGIGDISAITLLVEIGNIDKFCKPQQLVAFFGIDPGINQSGNFSSDCNKMSKRGTKVGRRALYAIALASIRTNKNKVPINQVIYEYYHISLDKKKKKVKLVAVMNKLLRYIFSVLKNQKPYEIRNPKIHKRMFLESKPSLQSA

SEQ ID NO: 88307 - protein, 336 aa, unidentified
MKKEIIKQNVGVDVSEANIEAALSYLTTDYRVVVCSTRKFANTVKGFKQFEDWANSKKHSLEEVHFTMEATGVYYEQLAYFLYEQNYCLHVVLPNQVKKYGQSLGIKSKTDGIDARTLAQMGLERELRLWQPISPALLELKQLTRERDALVRNRTTVANHLHAYRHQGKPNKDSIARSIKHITFLDKQVKQIEKEIKDFVNRNKKLKTGIEYLLSIPGVGLLTAATIVAETNGFAAFESIKQLTSYAGLDVRIAESGKWKGKSKISKRGNSYIRKALFMPSLSKIRHNQQTKQFYERLKEKKGIGMIATVAVERKLLGLMFSLWKKEEMYRPAPNK

SEQ ID NO: 88308 - protein, 262 aa, unidentified
MFQVHGVDASGRVIVVKALRRKDALAFFAQMPECLVGMEACGSAHHWARELIKLGHDARMMPPAYVKPYVRRQKNDAAAAAQICEAVTKPSMRFVGVRTLENQAALMHHKLREMLVAQRTQLINALRGHLAEIGVITAQGLKNARDLAGVIKAEGDNTIPACVRAALAPLVRQLHALDQKIARSDQTIAAMARDDEMARRLMTIPGLGPVTASAMAASVQDVSVFSGAREFAAYLGLTPRQNSSGGKERLGPVSKMGNRYRG

SEQ ID NO: 88309 - protein, 340 aa, unidentified
MRQLYAGSDLHGNNNLVGIVDGQGKRIFRERLPNESQVILEVLEPYKEEIVGIAVESTYNWYWLVDALMGEGYKVHLANPSAIQQYVGLKHSDDKHDAFWLAEMLRLGILPEGYIYPKEERPMRDLLRKRGHLVRLRTSLITSLQNILSRNLGINVIANELKALREDRITPLLEGSEDLALAGRVSKEAIDFLTRQILKIEGVVEKRIEVKESYRYLLTLCGVGKILALTIMLETGPIDRFATVGDYASYCRQVPSQWTSNGKRKGSGNKKNGNKYLAWAYAEASELARRFYPEPRAYYNRKIHKTNAPVAHSALAHKLARAAYYVMRDQVPFQPKKLFG

SEQ ID NO: 88310 - protein, 428 aa, unidentified
MSRYARRGPGPSSTLITPDLAGNVVGVDPHKRTLTATIVDPRGGIVASEHFRVSGDGHRALEAWARQFGPIVRFGVEGASAWGRHTAIFLIGRGYDVRDVCPNRTAQHDRARQRGKSDTLDSERIARETLAHALLPKAFKRAGQDAGPDQQTELLAVWWTARCSVIKRRQHLLTESEALLRELPLELVERLPSAKRVRPRLAALPHLTAPQQLAPPAAARVHVLAGYRTQIADLDEQERQITRQLAELVAQSGSTLGQLCGLATVSVAELLVEVGDPRRFTEGGFGRFNGTAPLAASTAEGPGEPVRHRYNPGGNRRVNAILHRMAVTQLRCEPRAKKIYADARANGKHTKKEARRILKRHLSDVVYRRMIRDLASLPAQPPPHCPTPRGRRAVKGGPTGPSTASRVAASPGRRSAPARHDLTRRGST

SEQ ID NO: 88311 - protein, 418 aa, unidentified
MNPPSPAMPVTRFIAIDLHKRYVVIGGVNAQQRVVLPPRRVEIDGLAVWTPKHLLSTDEVVLEATTNSWSTYDLIAPMVQRCVVASPSHVRWIAEARVKTDAADVLRLARLLAANLVPEVWVPPVYVRELRSLIAYRRRVVAMQTMTKNRLQSILHANHLIPPPGRVFAEKNRDWWLGLNLSLTERLRIRQDLATLEHLEGQLAELEAEIRRLSTSQPWVEQVPYLVQLPGFGMLTAMTVLAAIGVITRFPTAKHLVGYAGLGAGVHDSGETHRDKGITKQGRRELRKVLVEAAWSAVNSHPYWKVQFDRLIRRKPRNKAIVAIARKLLIAVWHVLSERAADKNAVPAMVAFKLMIWSWKLNDQERGGLTSRQFVRYHLMRLKLGEDLPYLITGKGTKRPIASPQEVLALRPELAVAG

SEQ ID NO: 88312 - protein, 342 aa, unidentified
MKDTMIGVDLAKRVFHLHVASMTGEVRDRKKLTPSQFRRYMSDFPECVVVFEACGSAHYWSREMRTLGHEARIIPAQYVKPFVKRHKNDRNDAEAIVVAAQRPEMRFVAVKTEEQQARGVVFRARERLVHQRTELVNALRSTLYEYGHAFPVGIAHLKKIEALLETPHCDLPSLVVSECQDLLAQVAEKTERIKAKDKRIKDLAKESDVARRLQTMPGVGPMTALAVEAFAPDMAQFSCGRDFAAWLGLVPLQRSTGGKSRLGKMSKMGQVDIRRLLIIGAMSRIVGRARHTIPDDSWLGRKVAAKPKMLVGITLANKMARQIWAMLTKDEDYRDPALVGAA

SEQ ID NO: 88313 - protein, 349 aa, unidentified
MRFYTQHHQFYCGIDLHARSMYVCIMNHEGEILKHRNMATTADELVKVIEPYRSDVVLAVECIFTWYWIADLCHQIDVKFVLGHALYMKAIHGGKVKNDKIDSQKIAALLRGGMLPMAYVYPQGMRSTRDLLRRRLYMARQRAELQTHIQNTNTQYNLPSFEKRIDRRSNRVGIGGRFTDPAVRTSVEVDAALMDALHEQILTIERQITAQVPEHDPVAVHLLRSVPGIGKTLALVILYEIHDISRFPKVGNFISYSRLVKCAHESAGKRMKAKNTKIGNVHLKWAFSEAACLFLRGNERAQHYHEKLVSRYGKAKALSIIAQKLGRTVYTMLKRRTPYDARRFFETVG

SEQ ID NO: 88314 - protein, 432 aa, unidentified
MRVIVGVDTHADTHHVAVVTEHGRPLADREYVATGYGYRKITEFARSYGEVAAVGVECTGNYGAGLTKVLRSEGLTVVEVNRPNRQERRLQGKSDPLDAYQAAQAVLAERCTAVPKDKDGPVECMRLLRASRSSAMKARTAAINQIKDLMVSASEVIRAKYRGMVTSAMITTMARAKPAGHLADPVHVTAWTLKKLARRYQSLTEEIAEADSALKEILDAYAPLLCDLPGVGVEVASQLLVTMGDNRERVGSEAQFAALAGVAPIPASSGKTSRHRLSRGGDRNANKALHHVVLVRMGSDARTKEYVAKRTLEGKGKREIMRCLKRYVARELYRQIMHPVPAPVISDLRPLRRQLGLTLQNAAEHLNQWPLYLSRLERGQTRNDSLIAKYRQWLDEQAPGAGWQSSAPIPTGPFRRGLQSSENLLGDLQWRS

SEQ ID NO: 88315 - protein, 321 aa, unidentified
MTNPTTCAAGIDVSKHSLDFAIHGQPIRLTVENRLPGWRRLAAELSRAGVNRVGLEATGGYERGVVAFLRVAGFTVLVLQPLQVKAYARLHLRRAKNDPLDAALIAACTAAIDATPEPPDPRLVPLADALTFVEQIEEELVRLQTRLEHIELPRFRHMVMADIRRLEGRRRAELRRIVEALAGHDDLRRRLHLVQSIRGIGERTAIALVVRLPELGRLTREQIAALVGLAPFDDDSGLHRGQRHIGGGRKRVRRSLYMAALPAATLWNPACIALYKRLMTKGKCHKAALVACARKLLIFANAVVQRGSPWTERTAGAGVAG

SEQ ID NO: 88316 - protein, 391 aa, unidentified
MIFVGIDVAKDKHDCFILNSEGTVLADVFTIANNHIGFETLLSRIQSCSQGESKIRVGLEATGHYSYNLLGFLLDSGLATYVINPLHTNLYRKSLSLRRTKTDRIDARTIAMMLMSDVDLKSYSNTAYHNEELKSLTRYRFDKVKERAKLKSSVARLVNILFPELEKLVSSLHIAVVYALLSNYPGASYIANANTEELAETLCTASKGRYTKSKTAEIQVAAGVSIGSKMPAKSMELKHTIALIRELDKEISEVESAIDKITSQMDSPIFTIPGIGRHMGAMILAEVGDFSNFASADKLLAYAGLSPSTYQSGKLQNCYAHMEKRGSRYLRYALFNAAKYVCLWCPTFSAYLEKKRSEGKHYNVAISHAAKKLVRLIFAMQRSGKAFLADY

SEQ ID NO: 88317 - protein, 320 aa, unidentified
MRNAVGLDISQNTFDAAAIVNGQRKQALFDNSINGFENFKAWLDGFDCELHICMEATGNYFEDVADYIGQFYTVSVINPYKISEYGKSRFHRTKTDKQDARLIAEYCHTAMPKDLPARKKISIGHYRLKRLLALYEQLKTQKTAQKNRLKVAKDEFVRKIHQAQIQELDQHIQQAEAEIQAITNGNQDLKTVSEGLQTIPAIGKLTAAILTNYLLSGDFKTANQFTAFAGLNPQQKESGTSVKGRSSMTRYGNRRLKAALFMPAMVALNRDYFHDFVKRLKAKNKPKMLILGALMRKLLVVAYHVYKIQKPYNPERYKPA

SEQ ID NO: 88318 - protein, 430 aa, unidentified
MKSNTQNAKIEAITEKTLVLGIDVGSETHYARAFDYRGIEYSKKPFKFSNTEAGFVTFKEWILDLKERHEKDKVVPGMEPTGHYWFNLGKFLQDNEMKPVLVNPHHVKKSKELDDNNPTKNDRKDPKVIAGLVREGRYMIPYLPDGVYADLRTASNIRFQLQAELTRIQNRISRWFNIYFPEYKTVYGKPDAKSGMLILKAAPLPEDILTLGIDGVNQIWRDAKLRAVGKARAKTLIEAAEHSVGSKEGAVSARMEIRMLLEDYESRNIRLQEVMALIEELVAQIPMAEKLLEIKGVGIRTVSGFLAEVGDISRFNNPKELQKLAGLALVENSSGKHKGETTISRRGRKRLRYLLFEVAMSLVSKNQEFRELHNYYITRRLNPLKKMQSLMAIAAKLIRVFYAMLTKGVDYDPKKMVSDIKRPAAYLQAE

SEQ ID NO: 88319 - protein, 402 aa, unidentified
MARNGHYGQASARQLLEVKPPRHPMTAEAVDDVVDGARSSASKCHRVVAPKRTTLRGAVQMEISTIGLDIAKNVFQVHGIDAAEKVVVRKQVRRGQVLAFFEALPSCLIGMEACATAHYWARELTRLGHRVRLMPAKDVKAYVKRNKNDAADAEAICEAVRRPTMRFVQIKSVEQQGRLMLHRARDLLMRQRTQVINALRAHLAELGIVAAQGREGIKELLKIIANEEDARLPVDAQASLIVLAAELQAMQTMIGSIDKRIMAQHRSSEASRRLESIPGIGVTGAAAITATVPDPKVFRSGRDFAAWIGLVPRQDSTGGKQKLGPISKRGDRYLRRILVVGACAVLRYARQQPQKYPWLTQLLARKPFKVVAVALANKMARIAWALLAKGGTYRAPALAAAV

SEQ ID NO: 88320 - protein, 386 aa, unidentified
MHLATTLPIPEQTGIPGDRATLFVSLELSRSTWVATSLAPGSKKMSKHTLVGGNGRELLELLARLKTRAEQRIAAPVKVMTIHEVGLDGFWIHRLLDANGVDSHVVDPASVAVPRRHRRAKTDAIDGETLLRTLMAWQRGEPRVCAMTVPPSPSEEDCRRISRERAALLRERIRHTNRIRGLLFGQGIANYNPLNKNRRERLKELRTGDGRSVPVRLEAEILREIDRLELVLRQISEVEAERDEMLRPAEASSPAALLMRLKGIGAEFATVLYLEGLFRRFENRRQLAAYAGLAPSPWKSGSIDHEQGISKAGNPRLRTTMIELAWMWGRYQPDSALSCWFRQRVGSERGRTRRISIVALARKLLIALSRYVTHGEIPAGAVMKAV

SEQ ID NO: 88321 - protein, 369 aa, unidentified
MTESSDYESIQVFIGVDVGKDTHHAVAVNRSGKRLFDRALPNDENKLRALISDLKQHGQILLVVDQPATIGALPVAIARSEGVLVGYLPGLAVRRIADLHAGEAKNDARDAAAIAEAARTLAHALRTLKVADEQIAELSMLCGFDDDLAAQTMQASNRIRGLLNQIHPALERVLGPCLDHPAVLELLQRYPSPEKLASLSEKKLAAQLSKLAPRLGKSLAADITRALTEQSVVVSGTNAAIVVLPRLALQLITLRKQRDEVALEVEQRVLVHPLYPVLTSMPGVGVRTAARLLTEVACRAFASAAHLAAYAGLAPITRRSGSSIRGEHLSRRGNKTLKGALFLSAFAALRDPISKAYYTRKINQGKRHN

SEQ ID NO: 88322 - protein, 432 aa, unidentified
MLLDHPSNGLTAIRTQFGAIFVSLELSRSNWLVTSLSPGKGEKMSKHGVTAGDVAGLMKLFADLRRKAEARTGESYPIITIQEAGLDGFWLHRVLQQNGIESHVVDPASIATPRRRRRAKTDRLDGETLLRALLAYKRGEPRVCAMVVAPSPEEEDRRRICRERRSLIAERITHVNRIKGLLFAQGISGYEPLRRDRRVRLEALRTGDGRELPAHLKAQIGRELDRTELLLEQIAAVETERDALLAAARKPASEEAAPDPVTMLLALKGMGSNFAAVLWSEAFYRQFANRRQVAAYAGLAATPWQSGGIRHEQGVSKAGNPRLRTTMIQFAWLWIRHQPQSALTRWFKERSPQGRKRAIVALARKLLVALWKYVTQGVVIEGAEARSASEDPGGRTDGLHGFKRRNEEWPRPLEPVRRKRNLGAVASRDDRM

SEQ ID NO: 88323 - protein, 343 aa, unidentified
MKLMRVGIDLAKSVFQVHGVDRHERVVWRRKLTRANWLRVFVETVEPGCEVGMEACGGAHHWARLLQARGYSVRLIAPQFVKPYVKSNKNDANDAEAICEAMSRPNMRFVAVKSVAQQDVQAVHRVRAEISKQRKAKGNQIRGLVSEYGLVAPKELVHLRAAIPTWLEDAENGLTGRFRRLLNALWHDLHALDQRMIELDREIAQIAAADPAVKRLQQLRGVGPLIATALVATVGDVKQFANGRQLAASLGLTPRQNSSGGKERLLGISKRGDAYLRTLLVHGARSALRTAKNKEDRLSRWVSRIAATRHHNVAAVALANKTTRIAWAMMKNETDYEPDRAAA

SEQ ID NO: 88324 - protein, 360 aa, unidentified
MKRVQSNTLDFSGQNIYVGIDVHLKSWSVAILSEYSVLKRFSQSPVPEALHHYLVSNYPGVNYYSVYEAGFCGFWIYERLTDLGINNIVVNPADVPTMSKEKLRKTDVKNCNKLVHELRSGSLERIYVPRADILEMRSLIRMRNLIVKDSTRAKNRIKSLLRFHEVEIAEEFTRCSIGCWSKRFLNWLHKLELSTEYGKKALKLHLEEFIRLRRMLLQETRVIREIFRKAPFDKSIRLLTSVLGIGVTTAATLMVEIDDIVRFSNADHLSSFIGLVPMCHSSGDNVGDITSRRHFTLRCLLVEAAWITIRKDPAMTMAYTEYRKGMNPQKAIVKIARRLVNRIYFVFKHEKEYVSCIVTN

SEQ ID NO: 88325 - protein, 348 aa, unidentified
MTLVGCDLHSRKQQVAVLDTTTGEVREQELAHDGDAVEQFYRGLSRPVTIGIETTGYTQWFHTLMHRLGHTVLVGEAAQIRAMVVRKTKTDRRDARHLLDLLQHDRFPAVWIPDPGTRDLRALVAHRVRLVRMRTMVKNGLQAIALNQRLALRSALWTQRGLAQLQALPLPEHTTRRRDDNLELLAWLTARIKQLDDQITTVARDHPRVQLLLTHPGVGPLTALTTVLVLGPLARFPDSKHVVSYVGLAPAVNASADKQRLGKITKQGNALLRWVLGQAAPLAARQDDDLRRRYFSVMHRRGRPKAKVALARKLLVRLYIMLRDQIDYDEFRRRGQVAHPPRASAAGM

SEQ ID NO: 88326 - protein, 349 aa, unidentified
MNATIVAVDLAKNIFELATADSDWHITQRQRLSRTKFLGFFVQLAPCQVVMEACGSAHYWARRIARLGHTVRLLPAHYVKAYVRRNKTDQADAAALIEAARCAEIREVPVKTVEAQQIQSLHRLRSQWMSTRQRYVNTLRGILREFGFAIPLGINAAKEQIGAAIAEPQSEVPQALRPTLCEMLREIRLLEDKIADVERQLNALTRTDVRVQQLRQIPGIGALTSTALRAIVGDIQRFPTARHFASWLGLTPNERSSAETRRLGKISKQGDVYLRTLLVHGARSVLLAAHRAERAGHSLDRLRRWALDRERQRGHNKATVALANRLARIVWATWKHERAFDGNWSTQAN

SEQ ID NO: 88327 - protein, 316 aa, unidentified
MNKENNKIFIGIDVSKATLDISISGKHFKIKNSPKDISAFIKAEISVHKSALYLICLESTGGYEVLVMQTLQKAELPVHRAHPNKVHSFAKAAGHFAKTDKLDAKLLEKYAEFVFTVHKERGDAVLTDSILELQALRGVERDLMEQLHANQCRLQHLKGKAAKHLETCIKFIQKKLIEVQNDIDKIIGSDDDLKSKSHILKSYRGIGDRTSSTLIAELPELGKLSSKEIASLVGVAPQIYESGTKKLGGHIARGRFYVRKALYMAALVATRYNDKMKEVYQKLIASGKPKKVALVAIMRKIIIHLNTMIKNNTNYA

SEQ ID NO: 88328 - protein, 324 aa, unidentified
MSSFHLGLDVAKAKLDCALRLPTGKLRHKVLSNNAAGFGALCKFLAEHKTQEVHVCMEATGTYWEAVAEFLADRGYQVSVVNPAQIKAFGQSLHTRTKTDKVDAGLIARFCAQRTPPAWQAPSPAQRALRALVLRLDHLQSMHTQESNRLDVAREAVPEDIVKHLQWLQQEMDGLKQRIDQQLGGGGDDAGLKAKRDLLDSIPGLGERTIAELLAFYGDLRRFGNARQAVAFAGLDPRQHESGSSVHAPARLSKMGDAFLRKSLYMPGMVTLSRTDWGKAMRARLAGAGKPPKVIIGAMMRKLVQVAFGVLKSGKPFDSSLHMA

SEQ ID NO: 88329 - protein, 344 aa, unidentified
MEHYAGLDVSVKETSVCIIDAAGKVTHEVKVATEPEALRAVLLDNTFTIERIGLEAGPLSQWLYSGLAEAGLPIICVETRHMKAALSAQLNKSDRNDARGIAHMMRVGLYRPVHVKTLTSQKRRMLLTSRQLLQAKAIDIENDLRGTLRNFGLKVGPVGTSKFEARICELVADNPDLAAIAEPLLIARRVLREQLAVLHRRLLAVVREDEVCRRLMTVPGIGPMVALAFRATVDVPARFKNSKAVGAVFGLTPRRHQSGEVDRTGGISKCGDAMMRRLLFDSAHVMLTRTIRWSWLKAWGMKIARHRGMKRAVVAVARRMAVIMHRMWADGTEFRWTNATAAAA

SEQ ID NO: 88330 - protein, 337 aa, unidentified
MTIVTVGIDLAKNLFSVHGIDGNGKVVLQRTVRRDRLMELLATLHPCVIAMEACSGAHHWARQLAALGHTPKLIAPKFVTPYRMSGKRGKNDAADAAAICEAATRPNMRFVPIKTIDQQSTLCLHRVRQGFIEERTATINRARGLLSEFGIVLPQTANVVRRQAAAALEDLPGWANRAIGDLLSHLHALDLRIAEYDAHVKVAAQTDERARRLMTTPGIGPTTASALVASIGNAHDFKNGRQLAAWLGLVPSQYSTGGKSRLGSITKAGDAYLRTLLILGARSVPANAEGKNDRISRWALAVQERAGYGKALVAIAAKNARMAWAMLSKGEAFRAMA

SEQ ID NO: 88331 - protein, 339 aa, unidentified
MSSVTVYVGLDYHQNGVQLCVMDAKGRALVNEKVRNDARIISAKVLKAGEPAGVALEACCGAADLADELHQLNGWAISLAHTAFTSRMRQNPDKTDFADAKLLADLLRVGYLPKVWLAPAEIRQLRRLVRYRQQKVDQRRCVKLRIRAVLRENRIRCPLSVTAWTKKWLRWLENDAELSEDDRWLMQRHIDDLNRYTEQIIEVESLLRERAEGDAVVRKLMTFRGVGLITAVTMRAEIGRFDRFNSGKQLSHFCGLTPRNASSGDRQADAGMIKTGNPQLRSVLIQLGHRLARQLDGRWADLTYRLLSKGKPKNTVIVAVANRFVRWLYHQMQPEQLAA

SEQ ID NO: 88332 - protein, 366 aa, unidentified
MEVTTIGIDLAKSVFAVSGADSRGRVVIRRQLRRAQVLGFMRGLPRCVVGMEATGGAQYWARQFNALGHEVRLMSPALVTPYRKGNKTDRNDADAILEAVSRPSMRFVMVKSVAQQDLLALHRVRAQLVKSRTALCNQLRGLLRERGLVVRTGAAALKRSLPAALADESSELSGEMRELLSEMSQWLRTLEQRIASCEARITRKFKHDERCVRLAEVPGVGPLTATALVAAVGNAQRFKNGRELSAYLGLVPRQHSSGGKTVLLGITKRGDRYLRTLLIHGARSALRQCKLEGDARSRWVARISAARGPNVAAVAMANKNARILWALLSRGDRYRSSRVLTRAVLRPGSPPPVERARGAKLRVAKD

SEQ ID NO: 88333 - protein, 344 aa, unidentified
MKVVSLDVHSESSQLCVVTEDGEVILEMKVATKAEELRRVVGGIPGPLRVVFEEGPLSGLIHDALSDLAEEIISCDPSHNALIARSEDKNDERDARRLADLARLGVLHDVYVPPEPYRTLRSLLIHDYHLMQKATSAKCRIKSLCRSNGISYRGAGVYRNTNRDAVLDSSSTPGLRWQMGSLYRELDMLSDERGRARKVLHSTCKDIPEVQLLKSIPGVGSVVSQTLVGWIVRPGRFKSRSALVSYAGLGLGQGFTNWRAISKARASRRGVRKLKRVLFIAARASIRGKNGLARRYDARRKNGWEDDKAIRDVAKTILFTSVGMLKKGCEYDDSRVNVPVSTGS

SEQ ID NO: 88334 - protein, 430 aa, unidentified
MEIIYPRACGVDVHKSFIVAVICISESVKPKYIKKRFSTFNNQLIQFRDWLIENNCHNVCMESTGKYYIPVYNALEAHISNVVVANPKWVKAIKGEKDDNRDAKWIADLFKFGIVRSSYIPEKNIRILREFTRYQYKLVNIRSSEKNRFQNALTVGNCKIDLVFTDVFGKSASSIVDTILSDDPYTSEDILSKVHCRCKSSSEDILSAVDGTDLNPFQKERIRIVQKHMEYVDSLLNEIQHHIDLMVSAYENHIQLLCTIPGVNRKSAIIIISELGIDVSQWTNARKLAAWAGLAPGCNESAGKKKSVKISKAGIYLKPCLVQVAHAAVKDKECSYYAEKFGRISKRRGKKRAIIAIARKILVAIYHILKTGEVFNPSDMADVETTKEQRIAYIKNNLRNAFNQLSRTGLSEEEILQTIIKKSNNSPQTE

SEQ ID NO: 88335 - protein, 344 aa, unidentified
MKSITTIGIDLAKNSFQLHGVDNQGRTVLRKTLRRDQVVLFFANLPECLVGMEACASSAYWARAIEECGHTVRRIHPRFIKPYLMADKNDANDAAAICEAVSRPRMRFVPRKSQEQADIQALHRVRQGLIQARTAAINQARGLLAENGITIRQGTSQLRLRLPGIVDDLDNGLSGLMRRLLASLYEHIVSLEARIVIHDKELKTIAKEHEACQRLMKVPGVGVLTATILLTLAGAAVDFKNGRQFAAYLGLVPRQYSTGGKQRLLGITKRGDSYARTLLVQGARAVLGAMKFGHTPLGEGARSAWLAQLVDRRGPNRACVALANKTARTVWSMLASGNEYRMAA

SEQ ID NO: 88336 - protein, 338 aa, unidentified
MFYIGIDIAKHNHEVSIIDDNGKALGKSFSISNSQKGVDKFNTYLDSFNITSENCVIGMESTGHYWINLFSFLVNLKFNVFVINPIQSDAFRKMYIRKTKNDSKDSYIIAQIMRFGEYSSSNISDENIFALRQLSRYRTSLVDECSSWKRKIISILDQVFPEYSNLFSDTFGVTSKELLSKYPLPENMLELSTEELTNLLTKASKGRLGNEKAQEIKEFAKNSFGVSFAKQTFSFQIKQIINQISFIESQLKELDNEISNMLKELNSEITTITGIGDVLGACILSEIGDISRFEKASQLVAFAGLDVAVKQSGEFIGTEMKKKLNYFILMNYAHRFIV

SEQ ID NO: 88337 - protein, 372 aa, unidentified
MQQNSKVFVGLDTSKLKIAVAVAEDGRQGEVRFLGEIDNTPEAVRRLVSKLSGKHRELLFCYEAGPTGYGLQRQISALGHECAVIAPSLIPKRPGERVKTNRRDALTLARLHRAGELSAIWVPDPGHEAVRELVRAREAAMEDLREKRQHLQSFLLRHGRIFSGHKPWTRAHARWLSELIFEHPAQYLVLREYRQAIEDAEARLERLNQQVAEVVKTWSMAPVVEAYQALRGVALLTAVTFVAEIGDVRRFESPRQLMAYLGLVPCESSTGERVRRGSITKAGNPRVRRVLIEGAWTYRFPARMSRVLQERQEGLPAIVRAIAWKAQVRLCARYRRLMAAGKRQTVVTTAIAREMAAFLWAIGREIEPRSAA

SEQ ID NO: 88338 - protein, 405 aa, unidentified
MFEIEDVGVFLGLDVGKSAHHGHGLTPAGKKVFDKPLPNSEPKLRAVFDKLTAKFGTVLVIVDQPASIGALPLTVARDAGCRVAYLPSLAMRRIADLYPGEAKTDAKDAAVIADAARTMPHTLRSLELTDEITAELTVLTGFDQDLAAEATRTSNRIRGLLTQFHPSLERVLGPRLDHQAVTWLLERYGSPAALRKAGRRRLVELIRPKAPRMAARLIDDVFDALDEQTVIVPGTGTLDIVVPSLAASLTAVHTQRRAMEVQINTLLEAHPLSQVLTSMPGVGVRTAAVLLTTVGDGASFPTAGHLASYAGLAPTTKSSGTSIHGEHAPRGGNRQLKRAMFLSAFACMNADPASRAYYDKQRARGKTHTQALLRLARQRITVLFAMLRDGTFYESRTPKDVELAA

SEQ ID NO: 88339 - protein, 411 aa, unidentified
MMKPILESCCGLDVHKERVTACIAYGSLAKAEEHFEVREFSTMTADLKELSAWMKEYGVETVAMESTGVYWKPIYNILEDGFEVILANAAHVKNVPGLKTDKRDARWIAKLLRYGLVPASFIPPRSIRDLRDLTRTRRKLVQEMTTQKNRVEKVLQDANIKLSSVVSKVFGVSGEAMIRTLLEVDELSREDIESMAKGRLRNKIDLLIKALDGNIYDHHRFLLRMHLEHIEFLTNQIALFDSRIYEKLEPYKFEFELIQTEPGVGEASAASIIAEIGVDMSRFPDEDHLSSWAAICPGNNESAGKRKSGKTRRGNNYLKGTLTEAAWAASRTKGTAISEMYHNIARRRGKKRSIVAIGHQILVDVYRMMATGTPYREVGAEAAQGRKTKTSVMSTVKCRKVYKLCSLYPSW

SEQ ID NO: 88340 - protein, 344 aa, unidentified
MEYFAGLDVSVNETSICIVDDTGRIVREAKVASEPDALLAVLNNPVYHFKCIGLEAGPLSQWLFSALGEANLPAICVEARHMRAALKAQINKTDRNDARGIAQMMRVGLYRPVHVKTLRSQKLRMLLTHRKLLQSKAIAIDNDLRGTLRNFGLKVGVVTAAKFEARIKELIEDLPDLTALVEPLLVVRRTLREQIDVLHRRLLAIVRDDEVCRRLMTIPGVGPVVALTFRATIDVPARFRNSKAVGAVLGLTPCKHQSGERDHTGAISKCGDEMMRVMLYEAAQVLLVRSTRWSWLKAWAMQIARRRGLKKAIVALARRLAVIMHRIWVDGSEFRWTRQEVTAA

SEQ ID NO: 88341 - protein, 354 aa, unidentified
MIIVGCDYHPSFQQIAFVDTESGELREERLAHREGAEKFYRSMAAAGQQVRVGMEASGHARWFERLLAELQFELWMGDASEIRRKRGRKQKTDRQDAQHILGLLLKDDFPKIWVPSWENRDLRQLLWHRHRMVQARTRIMNQLQAVALNEGLLCRKKLWREHGRQQLEAFRLAPWADRRRHDLLELLDRLNPTIAELSQAIEQEAEQCPSAQRLMTHPGVGALTALAFVLIIGDADRFQCGKQIASYLGLVPLEDSSGNRRRLGHITKQGSSILRFLLVEAAQVTVRSLPQWRRKYVHLMMRRGRKTAKVAMARRLAVRLYWMMRQGWDYQQWSKFGAHAGQPGTGDGVQSNIE

SEQ ID NO: 88342 - protein, 414 aa, unidentified
MAATPGIWRFGLGQRKTLCHRCRPTGKVIEDFEIEHSALGWKKFREKLHPYGSIPFAIETSQGVAVEQLLEAGMLVYPLNPKSAQAYRERKAPSGVKDDRLDAWSFADALRVDGQDWKALRPEEPLIKELRLLCRDEVTLIEQRTAFINQLRHALAEYYPAALEAFEDWTSVSAWMFLQRFPTPELLAQAGKRQWQKFLHSRRLWGSDQGPRRMEIFAHATELTGTAPTVQAKSLLAQSLVQMLFAVEKQLAVYRQRIEELFARHPDHDLFGSLPGAGPKIAPRLLSEIGDDRQRFGGDPQNLQCLAGSAPVTKRSGKQRKYWPVHQRWACDKHLRHAIHLFSEQSLSRCAWAEIYYQHHRQKNQSHANALRRLSHRWLKIIYKMWIDRTPYNAELHHRNQLQHGSWIFQLQKS

SEQ ID NO: 88343 - protein, 338 aa, unidentified
MKLYGAIDLHSNNAVCGLLDEQDQVKMRRKTRCELDLVLGAFAPFNKEIVGIAVESTFNWYWLVDGLMEAGYRVHLVNTSAVKHYEGLKHTDDDTDTFWLAHLLRLGILPTGHIYAKETRSLRDLLRKRSQLVRLRTTNILSIQNLYSRNTGASLACNAVKRLTRERLEQRFGDENLVLAIDSNRVIVRALDEQIQVLEKAVLAQGKLDPRYRYLLSIEGVGKILALTIMLETGDISRFEKVGNFTSYCRCVDSTRWSNGKKKGQGNAKNGNKYLSWAFVEAAHFAIRYHEGAKRYYQRKMAATKRVVAIKALAHKLARASYYVMRDQVPFDPHKIYC

SEQ ID NO: 88344 - protein, 409 aa, unidentified
MERIIERGAGLDVHKKSVTACVRVPGPEGGRRQEVQTFGTTAAALLALRDWLSAHGVTHVAMESTGVYWKPVYYVLEELFTCLLVNPAHVSKVPGRKTDVRDGEWLAQLLEHGLLRGSFVPPVPIRELRDLTRYRHVLVQDRTREANRLHKVLTDAGIQLASVASNVLGTSGRAMLAALIEGTSDPETLADLAQGKLRRKLPALRDALAGHFRGHHAFLVSQLLAHLDYLDEALAVLTAQIQEALGPFQSEAARLDAIPGVGPRTVEVVIAEIGVDMRQFPTARHLASWAGLCPGTHESAGKRRPVRTRKGNRWLRAALIEAALAAINVRDSALAARYRRLVRHCGHKKAIVAVAHKMLTTAYVLLADGRTYQEPGAGYYDAQRKDRVIRRALQTLERHGFRVSLEPAA

SEQ ID NO: 88345 - protein, 310 aa, unidentified
MTVPTFVGIDVSKDQLDIAVEPQGLSFSLAYTDSDLSSLVVRLTELCPKIILFEATGGYEKRLYAALLQAGLSAHRINPRQVRDFARATGILAKTDRIDARVLVEYARKINPEVRPLPSIELDELTSLMTRRRQIVEMIVMEQNRLHTAAKRIKPNIEATIAWLKKQLASIDKDLDEFIEQNPILKRREEIIRSLPGVGPVVTRSLIAYLPELGTLPQKKIAALVGVAPLNRDSGKLRGKRIIWGGRGHLRSLLYMAALVGVRHNPILRSFYDKLLQAGKAKKVALTACMRKILVTLNAMIRKDTLWCTH

SEQ ID NO: 88346 - protein, 339 aa, unidentified
MELYSGMDLHSSNTVIGIVDEKRKHVIDQKLPNDPELIRNFLKPYKPELKGIVVESTYNWYWLADLLQEEGYRVHLSHPVANEQYKGLKHSNDKHEAFWLAELLSLGILKEGYIYPRQVRSLRDVLRKRAHLVRLRSALLVSLQHMISRNCAVKVKTGDIKRLREDLVSPLLSRDEALLLAGQSSKEVIDCLTRQIDKIERWALKRLCREGVFIRLVTLPGVGDILGMTILLETGSISRFREVGNYASYCRKVSSQWTSNDKIKGRGNIRNGNRYLAWAFSEAAEHARRTNEACRKFYDRKLRQTNTKVAHNALAHKLARAAYYIIKDHVSYQEEKMFS

SEQ ID NO: 88347 - protein, 405 aa, unidentified
MRRYVLFGWLVPRHATTRVGRRIGQSLMHGERAIKQSTTTYVAMDTHKKTISVAIADGGRRGEARFIGEIPSRPEAVTKMVDRLAQKHGKLAFCYEAGPCGYGLYRQLTALGHDCVVIAPSLVPTRPGDRVKTDRRDAATQACLFRSGELTPVWVPDDAHEAMRDLCRARQASVEALRRARQQVSGFLLRHGRIYAEGKHWTRKHRSWLAAQRFEHPARQIAFEELVQAMDEAAARRDRLAKQMEELLPSWSLAKIVAAIQALRGIAAISAITLVAEIGDFKRFANPRQLMAYLGLTPSECSSGAKTARGAITKAGNTRARRMLVESAWTYRLPARMGAEILKRNEVLPQAIKQIAWKAQARLCSRYRRLAKAGKPANVVCVAIARELAAFVWAIATNDAVAVTA

SEQ ID NO: 88348 - protein, 394 aa, unidentified
MKLVGIDVGKNSHHFCVMDKETGEFNVAPSSFSNNKEGFDFLINSLKTYSKKSILIGMEDTGHYHVALLKFLLSNGYTVALSNPKTTDLTRKMEGGITKNDKLDTITICDVLDTPERKKQYRITKVDRFDLYEQRQLTRHHHNLKEELNVYCNRLQKSIDLVFPEFNTLFSSKYSIVYMNLLKTFGSAEAIASTDIRTIRKCFEIKGRGNRISLTPEKLKECAKNSIGISSEVETIQIKHLVSQITLIKEQIAEIDKKIEEFSITNNSPILSIPGISHFSGTSILAELGDIGNYSKPSQIIKFAGVAPYHYESSQYNAQHTGITKKGSKYLRKTLYQIILTVINNNPVFKKYYLLKISQGKGHRCAQSHCIRKLLRIIYHLLETGQSFDPALLR

SEQ ID NO: 88349 - protein, 412 aa, unidentified
MQVQYPRCCGLDVHKATVVACLLQMDADGRRSTAIRTFGTTTDDLLALGDWLRANSATHVAMEATGSYWKPVFNLLEGQFTVWVVNAAHIKAVPGHKTDVHDAEWIADLLQHGLLKPSFIPDRFQRELRDLTRSRTIVVDERSAVVNRVQQVLEDANLKLAGVATDIMGVSGRAMLAAIVAGTTDSATLANLAKGKRRTKREQLDRALSGRVGAHHRLLLSMHLTHIDFLDELVAQLTAEIAERLKPFEDELQRLDAIPGVGRSTAEVLLAEIGPDMTRFPTAGHLASWAGMCPGNYESAGKRKKGKTRKGSKFLRRALTEAARAAARKRGCYPAAQYRRLVVRRGPGKAAVAVGHTLLVTAYYLLLRHDTYRDLDPSLLDERLRKRTRQRALAQLQALGYDVALTEHQPAA

SEQ ID NO: 88350 - protein, 486 aa, unidentified
MAKRKMSNFERLQRGELSRKRRKQLEQQIANQDTSLQIVHADAAGIDVGNDSHFVSVGPTRDQQWVREFGSWTQDLQRLVEWLKSCGIKIVVMQSTGYYWIALQEVLEKAGLKVWVVNARGTKNLPGRKSDVQECEWLRRLHSYGLLRNSYQPPEQIRSLRTVWRRRETVVQEAGRAVQGMQKALTTMKVRLSNVISDLSGITGMRIVREILKGERDPKKLASMRDRRVLASEQEVVLSLEGNWQEDVLFELEQAVDGYDFWQRQLEQCDQKLKQYMEALPERPRAVAEEKEGNEPTVVNARDRRRRKIKAHKKQKNQPSFDLDAEQKRTMGVDLGQIDGIGRMTVQTILSEIGPDLSAWPSEKHFTAWLGLAPRRDISGGKLIRHVIVPGRQRVANALRMAAQSLKDSDSYLGARYRSLKFRLEGAKATKAMARYLACLVYRMMTKGQSWIDRGKEHFEAKCREREIKALHRKAAALGATVVFQE

SEQ ID NO: 88351 - protein, 289 aa, unidentified
MKHARKRYVGLDVHKDVVEYCILDASGKKIDGGRIICEQSVLQRFATKTLSSKDHVALEATTNTWSVVDIIEPHVAKIVVGNPLKTKAIAEAKVKTDKIDAMILAQLLRCDFLPTVWIPDAKTRILRRLSSFRKSLVHDATAAKNRIKGVLNHLLIKHAVAWTKDGLNALKQIDIPLHERTIMDCEIAVLEHLEKQIEKVESEIKKLAYEEENVRLLMTLPGVDYNTATAVMAAFGDISRFKDADRAASYLGLVPSTKKSANSCHHTGIPIWDLQMKRHLSQTTRLYRL

SEQ ID NO: 88352 - protein, 336 aa, unidentified
MTMIRVGVDTSKHVFQIHGVDENEQPVLRRQIRRSEVVKFFAKLAPTRIGIEACGASHYWARLLRGLGHEVVLIPPQYIKPYVKRGKNDKIDAEAICEAMSRPGMRFVPIKTAEQQAGLTMLGAHDLLVKQRTMLINAIRGHAAEFGVTVAKGPKQVGQLLQHLASDEGVPALAREMIGVLASQLDGLEIKLKTIEKRLMAWHRQDQISQCLATIPGIGPISGVSFALKVADPKAFRSGRHFASWIGITPRENSTAGRQKLGRISRAGDEDLRRLLVIGATAVIHAAKPGRTAPWLLALLARKSKKLAAVALANKTARIVWAMMVSGETYRQPAQA

SEQ ID NO: 88353 - protein, 317 aa, unidentified
MNTKNNQNEINVGVDTGKTQLDIYIRPLDIYFTVENNQSGIKHAIQILKKHPVTRVTIEATGRLEQPFIIACAEANIPFVVANPVNIKRFAGAIGQKAKTDKLDAQLIAYFGEVIKPPLSSLKPEQMRLMSDLLSRRRQLMDMQTMEKNRSQIMPNTLSSLIKPILTALKNQIEKVDLKLQKLIKECDEYAAKNNIIQSVPGVGNVVAFNLLSDMPELGYVNNKEAASLVGVAPFNRESGAYQGKRMIRGGRPKIRTAMYMAMMSAIQCNPKFKGIYQRMIAAGKPKKVAIIACIRKLVVIINSMVRDGVMWDPKMV

SEQ ID NO: 88354 - protein, 476 aa, unidentified
MTKQQAPAVRAGTRKERKLLARQIWSDKPGLEVVHKDAAGIDVGSKEHYAAVPPNRDPQPVRCFGCFTSDLHRLADWLIQCGIKTVVLQSTGVYWIPVYDVLEQRGLEVWLVNARETKNLPGRKSDVQESQWLLKLHTYGLLRRSFRPTPEIRAIRTAWRERAEYVQQAGVCIQRMQKALTEMNIQLSTVLSDLNGVTGMKILRAIVAGERDGNKLAEFRDKAVKASKETIAKSLEGTWLPEQLAILKRQLADFDHVHAQMAQCDRDLEAMLKQMPSADRVPQAAPPATALPGKTKKRKGTRKQPSANHPKFDLEKELARMTGVNLTRIDGVYTMTIQTVISEAGLDMSKWETEHHFVSWIGLAPRNEISGGKVLKKKTRKVKSRLATALRMAASTLLKSDSYLGAQYRRLRGRLGPPKAITAMAAKLARLIYRMLKYGEDFVDKGVEHYEQAHCQRKLKALAKQAAQQGFQLVPA

SEQ ID NO: 88355 - protein, 344 aa, unidentified
MDHFAGLDVSVKETSICIVDDTGRIVREVKAASEPQALLKVLGNPTYRFKRIGLEAGPLSQWLFSGLAEAGLPVVCVETRHMQAVLKAQINKTDRNDARGIAQMMRAGLYRPVHVKTLRSQKLRMLLTHRKLLQSKAIAIENDLRGTLRNFGLKVGMVGKMRFEARIKELVESLPDLAELVEPLLIVRRTLRGQIVILHRRLLAIVRDDEVCQRLMTTPGVGPVVALTYRATVDVPARFRKSKAVGAVFGLTCARYQSGEIDWSGRISRCGDEMMRVMLYEAAQSMMRSKKWSWLKAWAMQIARRRGMKKAIVALARRLAVIMHRIWVDGTEFRWTREQAAAAA

SEQ ID NO: 88356 - protein, 378 aa, unidentified
MRTIDTINSTMLVAIELSASSWLVAARVPGSDKPHLHRIDGGDTMGLLAAISSLRDRVARRLNVAIGVVCCFEAGRDGFWLHRLLTAHGLTNYVLDPTSILVHRRARRAKTDRLDAIGMLRVLAAYLRGDRQSCSMVRVPTPDEEDAKRIHRERESLVQERLRIENRIEALLFTQGIRKRPSLRSWKRDLSVLRTGDGREMPRHLRAELDRLNRRLVIILELIREVEAERDQVAEIKPQDQNCRKIAALRCIRGLGENFSAVLTREVFYRSFDNRRQIASYVGITPTPYQSGGMDRDRRISRAGNPRARTTMIQLAWLWLRYQPGSELAVWFRKRVGELTGRTRRIAIVAMARKLLIALWRYVETGVIPAGAEIRVEA

SEQ ID NO: 88357 - protein, 420 aa, unidentified
MSKRRYGSVEFKRVDWSGLAEGFGGGRAVLAVDVAKEDFVAAVLGPDAGVRVTFKWRHPGQTLEVLECLEGLAGAVALEVVLEPSGTYGDALVGQLRRRGVAVYRVSPKRVHDAAEVYDGVPSLHDAKACELIGRLHLQGVSRVWEALGQERRELNAWLRRLEVSKGRLHAGLNRLEAHLSRHWPEVLGLLELSSVTLSELVAAYGGPAAVAADPVGAEALMRRVGRAGLSEEAIAAVLASAHENLGLPCVAAESDLLQWLAADNNATRRELHAIEQEIQRRVAASAVPARLGNVVGKVSAAVLVAAVGDPQDYPDAASYTKAIGLNLKERSSGKHKGQLKITKRGPAVARFYLYFAALRLIARDPEVRRWYDRQNARPGALKGKTIVTLMRKLAQALWHVGRGATFAVPRLFAPEPRPA

SEQ ID NO: 88358 - protein, 324 aa, unidentified
MQLKTISMDPEPEQLVRYLHKNYPNARYESVYEAGFSGYWMDRKLREAGIKNIIVNPADVPTKQKEKRKKTDKIDSRKLARELSAGNLEGIYIPSEEHEAIRALSRLRKQITKDQTRQKCRIKSLLNFVGITLPENSELKHWSGRFIKYLSEIEFKHKAMKITLERLLESLINGRLILLGIVKNLREIVKENAEMKKITGYLQSVPGIGIITAITLYTEIMEIKRFGKFDELSSYVGFSPSTDSSGEKDKVIGLSKQQNRYLRNMLIESSWLAIRKDPALLQAYGNLVRRMSKQKAILRIAKKLLSRITYVWRNEKHYVCAVVS

SEQ ID NO: 88359 - protein, 375 aa, unidentified
MLNKVRFLGLDVHAETIAVAVAEADGTVRSFGTIANRADSIRKLIRKLGPAEPLRACYEAGPTGYVLYWQLTGLGVECAVVAPTLVPVKAGDRVKTDRRDAEKLARCHRAGDLTAVWVPDAASEALRDLVRAREAAKQDQLRARHRLGKFLLRMGRRPGAGLGAWTEPYMAWVRQVHFEQPAQEATMLDYLHEVDHMAGRVRRLEEAISEAVRLAPPAVQAVVRGLQALRGVALISAVTIVAELGQIGRFASARQLMGYSGAVPSEESSGKRTCRGSITKTGNAHLRRIAVEAAWSYRHRPAIGPRLRKRLEGVPEPIREIAWKAQVRLFKRYARLAAAGKDQRKIITAVGRELLGFIWAIGVKAETAASQAATA

SEQ ID NO: 88360 - protein, 347 aa, unidentified
MKIIGCDFHPSYQQIAMLDRDTGEVLEFRLEHEKGEARRFYEQLQGPVRVGMEAVGNSQWFEQMLAALGHELWIGDAGEIRRLEVRRQKTDRRDAQHILDLLRDGRFPRLWVPSVEMRDVRQLLRHRQKLVEWRTQVKNQLQHLALNQGVRRKGKLWSKEGRAVLEQLPLQGWTARRRAELLGMLDRLEEQVKELDTAVRAEAEQRPEVRLLMTHPGVGPVVGLAYALTIGPPGRFPRGKQVASYLGLIPREDSSGGRQRLGAISKQGNTMMRTLLVEAAQNAARFDEQLRRDYRRLAARKHKALAKVMVARKLAVRLYWMLREQRPYVPSSVARMQGGSSHSVVEG

SEQ ID NO: 88361 - protein, 337 aa, unidentified
MARIANSVGLDYHQDAVQVCVENADGRVLGNRKCPNQWEVIRTVAEQFGEVGSVAIEACTGAADLAEELIQEAGWSVALGHPGFVNRMKQNPDKTDFSDARMLADLVRVGYLPRVWLAPREVRELRCVTRYRQQLVNERRNAKLRITALLREHRVGSAPARRWTRAWRAWLSGLTALGVPTRRVMERHLIRLEGLKKEIEEVEDWLAEMTESDAVVERLRSLKGIGLVTACVIRAEIGRFDRFQSGKQLARFCGLSPRNVSSGTRQADAGLIRAGNPQLRATLIEAAQRLVRFDPRWKALRVRLQRAGKPYNVIVAAVANRWMRWLFHQVQPEVAAA

SEQ ID NO: 88362 - protein, 351 aa, unidentified
MDATTVGVDLAKNVFVACVADCAGRIVARREFNRAGFLTWLGTLPAGTVIGMEACGSAHHWGRTAQRLGLAPRLMAAEFVRPYRKRQSVKHDRADAEAILIALRSPGMRFIPVKTEAQQQRLAWHSLRIGWVEERTALLNRIRGLLAEFGLIVDPGPRHLRAQLAEREFDTALSPALRGLIQSVRDQLDALDARIGECDRQITAQQADDPLAKRARDLPGVGLITADAVTASVGDASMFKNGRQFAAWLGLTPSQSGSGGKTKLGRITRRGDDYLRTLLVQGARSVLAATMRKQRRESPDTLTRLQQWIVALNGRIGYHKTLIAIANKHARQLWAVLAKGEAYNPQAWQRA

SEQ ID NO: 88363 - protein, 355 aa, unidentified
MEKPEITIGLDLGDRFSHYCMLNGDGEAIETGRIQSTEEALRRHFEGEPTMRFALECGTHSPWISRLLEQLGHQVIVANTRKIRAITSSESKNDKNDAEKLARFAFCDPRLLSPIRHRSPERQQDLNLIQARSTLVRARTMIVNALRGLVKSAGGRLPACSPQGFEARVEASIPPALAEAARPLLNQIVALNARIQQMDRGIEQLANRYPEIPVLRTVPGIGPLIAAAYVLTLDRPDAVQHSRQAGAFLGLRPRQSQSGDSDPQHRISKTGNVYLRSLLVQAAHYVLGRFGPDSELRRWGLKLAGSGGKRGKKRAIVAVARKLAVILHPIWQTGKPWQAFPQSANNAASKDVCMV

SEQ ID NO: 88364 - protein, 337 aa, unidentified
MKFSGIDLHSNNSVVVVSDEEDRIVYRKRLPNDLEQIGAALAPYRDELAGVVVESTYNWYFLVDGLMDAGYRVHLANTTAIKKYEGLKYSGDFADAAYLAQLLRLGLLPEGYIYPREERAGRDLGRKRMQLVRCQPMQILAIENILARQTGGRMSGERVKRLTAEQIEELGFAPDVALALEANRAVSETLQRQIAVLEKRLQQRVKLRPEYRLLKTVPGIGETLATTIMLETGTITRFASVGNFSSYCRCVDSRRESNGKKKGEGNAKNGNKYLAWAFVEAANFALRYCPEAKRFYERKKRKTNRIVAIKAIAHKLARACYHMLREQKPFDVQRCFV

SEQ ID NO: 88365 - protein, 410 aa, unidentified
MTKIIVAQDAPVLVAIDIAKARHEVLIAIPDKKRRRRLTVLNELADFNRLATALKEYGRPVRVAFEATGNYHRALAYYLATAGFEIKLVSSVALARTREALNNSWDKNDPKDAQVILHMMEIGNEQYYHDPLVCGTNDIQELSKTHDIVSKSKTELWHRVLTHYLPLYFPEAGRFYRSSRSDWFFAFLERYPSPHLITAMGKAAFTTDAWDVIGRKVAKERLLADIYETAKSSVGLPVAPDSDAIRMFRLVLGEGRSLIAQRNQIEDRAVALLKDLPDYQLLTSIPGIGPINALTILAEAGDLRRFGHHRQFLKFCGMDLATIQSGTFRGQTKLSKYGNARLRRTLWMAGQVAILQRTNSFRDKFERYIAKDRHNSHLRRKAYTAIAAKMARTVHGIIKHGEPYRPFFEG

SEQ ID NO: 88366 - protein, 334 aa, unidentified
MWHLGIDLHRRTVVVAAVHDSGETLEARTFDCRDVDRLVDYVHCLQPFRGVIEATSTYRWLYELLSREGTILLAHPAKLRLMIQRRAKTDRLDCQLLANLLRIDQIPLSYVPPKSYQQLRDVTRYRSRLVGGQTQAKIGLRSLLARHNRQAPYRVPFGPRGLAWFRQQQFGAMDDYIRDELVARLSHFRREVAAIDQRLTELATGFPEVESLMHIHGVGLYTALVIIGELGEIERFRFAHQVGAYAGLTSRVRQSGDHCYYGKITRQGSPWLRCVLVEAAIHVVRRDDGLRNFYQRVRKRAGSNKARVAAARKLAEICWKRLRRWHREHSPQAA

SEQ ID NO: 88367 - protein, 331 aa, unidentified
MEILETVGIDMSKLTFDVRIHSTQSYAQFENSNKGFKQLLNWAYKNSPFSSENIFFAFEHTGLYSHEMSVYLTKKKVVFALIPGLEIKRSLGLARGKDDKVDAANIAKYAYRLRDEIKPYELPSEKVQALKRLLSLRDRMVKQRAGFKASLKEQKRVLVKKENHVLFTAQEKMIDYLTKQIEIMKKEMIDIVKCDERLNEQFRAIISIKGVGEQTALFMIAYTHSFTKFKTWRKFASYCGIAPFPNMSGTSVRGKTKVSNLANKRIKSLLDLCAKSAIQYNLEMKNYYDKRVDQGKNKMSTINVIRNKLLARIFAVVNRNSPYVDLMKYAA

SEQ ID NO: 88368 - protein, 348 aa, unidentified
MAVYIGVDFHARQQTISYLTTEDGEIQHLVLGHEKAAQVRVFYEQFAGQRVVVGFESSGYAAWFEELLEELGCEIWIGHATYIRQYAKRRQKNDRRDADLILELLLSGDFPRIHRYSRSTRQMLQQLRYRQRLVKMRTMIVNMLLFMAGSRGHSLRTQLQSKRGQARLAELPLPEPLAQQRDELLSLLGQLDQKVKTIEGWLAEATAADVGVQRLRTHPGIGLLTSICVRYTLEEVTRFATTRKVSAFAGFDPMEDRSDERRRMGAISKQGSRWLRFYLVEAGQVAMRKDADLARVYQRVSRRGGHAKAKVAVGRRLLVRAFIMLRDEIDYAEFQRRGVAARSSRGSA

SEQ ID NO: 88369 - protein, 361 aa, unidentified
MYQTILLTVDYHDQNCVIRRRALKTQQESVSSIPTTPEDLVQVVAQARKAAGRQGRVVWIQESTTGWARVKTLLADKVDEFTLANVLQMPLPPKARRRKTDKVDTARIQREYLNGELPRAHQPPAWWRQLRRLVSYRENLVSRQTGIRNWINRYLAHETWENRGALWSSKGEKRLRKLVVHWPPWDRMVVQSKLEELHQLKQNLSAVEAELQAVYKECPEAQRVDAVRGIGMLGAVSIVARVGPVERFRTAEQLIAYAGLAPGISQSDDTRRSGRIGGGGTDRHLRNYLIEASVWARNIPRYKTTYERVAKRRGKKIGRIVVARMLTRSIYKILKDDVVFEASRAAASDASKTAEVSTVVE

SEQ ID NO: 88370 - protein, 309 aa, unidentified
MNPPSPIYVGIDVAKSTLAVCGQGMKKLYANTSTGHARLLKELPQNAHLIMEATGGYERALSLLLHAQKLPVSVVNPRHVRDFAKAMGQLAKSDKIDAQIIVAFAQSKQPVPEAPPSQSLIELEELMSRREQLVALRTIEKNRQEHHRQKILQVRAQKLLITIEVQIEELEEKVRELIANDAILKSKRERMLQVEGIGEITAASVLAFMPELGSISRAQAAALLGVAPFVCESGMMRGKRHIWGGRANVRTCFYMAAMTAMRDNRILREIYQRLRATGKPGKVAIVAVMRKLICLLNHMLKNPQFSLAR

SEQ ID NO: 88371 - protein, 335 aa, unidentified
MDRYAGLDAHAETCTLGVIGPSGRRLTSKVIETNGRALVEAVRGIGGRVHLCLEEGTQSAWLYELLEPHVAEIVVTTPPEAKGAKDDLRDALARAEELRIGAIRTRVYKAPQHLAGLRSAARTYRIATQDVVRVKNRLKAVLRSRGIRAGSGVYDKETRAEWLEQLPAFGHRSAAEWLARELDELQPLREDAEDWLLKEAKAHPIIRTLSTVPGMGPLRTAQVVGIVGTPHRFRTRRQFWSYSGLAIVTRSSSDWVQDKRGHWVRAEVRQTRGLTRKRQPVLKAIFKGAATTVIMQLSTHPLHADYERMLRSGIKPNLAKLTLARRIAAIVLSMW

SEQ ID NO: 88372 - protein, 354 aa, unidentified
MKYFAGMDVSLEETAICVVDEAGRMIKEVRAASEPEALHTALAGFDLPIERVGLEACSLTAWLHGELAAAGWPTICIESRHAKAAMGAMPNKTDRNDARAIAQIMRTGWFRAVHVKTPMCRSWRSLLVARRTVLNEMRTIENVVRAILRETGLKLGTPPRKDFIVRVREMTSGEKGLTMMIEPLLQILGTMLHEFTGLTKQALVIVRAEPICRRLMSAPGVGPLTALAFRATIDQPERFKKSRDVGAHLGLTPRRHQSGETDIQGRISRCGDELTRTALYEAAHSLLIRSRKWSALRAWGMKIAKHRGMARARVAVARKLATILHRMWIDDVDFRFSREQTTNPDVKAIVFTRA

SEQ ID NO: 88373 - protein, 365 aa, unidentified
MQKISTTRTNGRKIFKGQLTIGLDLGDRSSSYCVLDEAGKILLEQRLPTTQETMKQIFGRMARCRIAMETGTHSPWVSRLLTALGHEVIVAHAQNVRLIVKSRRKDDRIDARTLARLARIDPELLSPVRHRSAQAQLHLTEIRARAGLVSARTALINAARGLVKSYGERLRKCGSFQVSREIGSGLSTELREALQPLLREVESLNERIQEYDRRIEKMAKERYPEVALLKQVKGVGDVIATTYVLTIEAPHRFRKSRDAGCFVGLQPGRRNSGDSEPQLHISKQGDEYLRTLLVQGAHYILGPFGEDSDLRRWGQKLAERGGKNAKKRAVVAVARKLAVLLHRLWVSGEVYEPLRNSHKAMSAAA

SEQ ID NO: 88374 - protein, 340 aa, unidentified
MSKITTIGLDLAKNVFQVHATDETGGLAMRRPLRRGRVLRFFAGLPPCLVGMEACATAHYWARELQALGHEVRLMPPQYVKAYVKRNKNDAADAEAICEAVKRPSMHFVPVKSAEQQSALLMHRGRELLVRQRTMLANALRGHMAEFGLITAQGLHKLAELIAIVRDERDARVPTMARQVLRVMAEQLGDLETRIAAIEAQIMAWHRSNPVSRRLATIPGIGPIIATAIAATVADPSVFRSGREFAAWLGLVPRQNSTGGKARLGGISKRGDSYLRRLLVNGAHAVLLRSKTVKADPWLLALRGRRPRLVVAVALANKTARIAWAIMSKQDTYRRATAAA

SEQ ID NO: 88375 - protein, 414 aa, unidentified
MTKRKTGDHPDLKLVNPNAAAIDIGSTIHMAAVNPDVYANPVRAFGTFTQDLHDLAKWFQSCGVTTVAMESTGVYWIPAFEILEAHGLEVILVNARYAKNVPGRKTDVSDASWLRQLHSYGLLRGSFRPEAEIATLRAYMRQRERLTEYAAAHIQHMQKALMEMNLQLHHVVSDITGATGMQIIRAIVGGERNPDVRAAFRDVCCKASIETIKAALVGNDRAEHVFALTQSLELYDFYKAQIEACDRKLEMAVAALTVRAGADLAPLPRARIKGKQHNAPSFDVRAALYGVLGTDLTQIHGLGPSLALKLVAECGTDLRAWKSAKHFTSWLCLAPGNKISGGKLLSSKTRRSSSRAAALLRLAAVTIGRNDTALSAFYRRLSSRIGKQKAVTATARELCPKVGDGLIRRLVEVA

SEQ ID NO: 88376 - protein, 412 aa, unidentified
MHQRVAGIDVHRMKHVVTILIGQEDGAVSSETREFGGFKRDMRALVAWLQTHRIQQVVMESTGIYWKSVFAHLEAAGIAALVVNAFHVKNVPGRKTDVGDSEWLAQLARFGLLRGSFIPPKDLRELRIVSRYRRKLTGMLAGEKNRLHKLLDDAGIKLGGVVADIDGVCASKMVEGLIAGGKPDELAALGRGKVRATTDILEAAMDGELSARHRLVLDMAYDHLRYLEGKLAALDRYLLAAMQPYAWAWRLLQTIPGIDAISAAMILIEIGDDPHRFGSPARLASWSALCPGNNESAGKRKSGKTRHGNPIVRYLLCEAANAARRTKTVFRAKYESLVIRRGHKKTIIALAHKLVRTIFCVLVRRKPYRDSTVDYEAASVAKNAPRWIRALKKYGYWPQVAAPSAPIVATAS

SEQ ID NO: 88377 - protein, 400 aa, unidentified
MNRIEQGWVGIDAGKGHHHVVLIDRDGRQLLSRRVDNDELALTGLIETVRDRVMEPSWAIDLADGAAALVIGLLLHRDQPVFYLPGIAVNRASAGYRGEGKTDAKDAAIIADQARMRRDLRRLQVLDEDIAELRLMTAYRADLAADRTRCINRLRNLLLGVFPALERVLDFTCHGPLVLISGFQTPTAIRRLGATRLLRWLERRGVRHPGRLATAAAEAAGQQTIQLPGEAAAASLVARLAQTILELDRQLADVDRKVAARFHTQQDAAIITSLTGIGEVLGAQFLAAVGGSLSGFASADHLAGYAGLAPTPRDSGYRTGNLHRPQRYNRQLQRVFYTSAMISIQRSPASRAFYDGKRAQGKRHTQAVLALARRRVNVLWAMLRDHQPYQERRQPLILAA

SEQ ID NO: 88378 - protein, 468 aa, unidentified
MVAARKQKQGRMSAQLVEDEDYQLRYERVAGIDVAKEPAVVCVRLPPAEGRRHRTSQLQAVPATVPAIGKLAAELMAAGVQMVSMEATSDYWRIWFAVLEEAGLAVQLVSSSQARNLPGRPKTDKEDARWIARLTEMGMLRPSFVPPHEIRALRVYTRRIWDLTADRTRYWQRLEKLLEDALCKLTSVVSRLAGHQTARMVIEKMIEGERDPRVLAALGQGRMRNDKLPALAEALSGMRFGAQHAHAAASLLRTIDLLDAELRDLQERVTAHLAAIPGSWGVDAGGVTGPEAGRAADAAALPAADRLDEIPGLGREAAMALIAEIGLDMSRFPTPQALVSWAGLTPTARQSGPRKGRGKKGHGNTYAKRIAVLAAYAAANTDTFLGERFRRLSARPGGGGRKKAGCAVGRSILVIVWHLLNDPAARYRDLGPDWHARHTDRSRKARNARRQLEALGYDVIITLREDTA

SEQ ID NO: 88379 - protein, 355 aa, unidentified
MKYYTSTTEYNCGIDLHARQMYVCVMDRQGKKLVHTNILNNDFQYFLKLVEPYKHDLTVCCECMFGWYWLADACQAAKLTFVLAHALYVKAIHGGKNKNDRIDSEKLTHLLRSSLIPPAYVYPADKRPLRALLRQRLFYVWRRSELLARIYSHQLAHNRTPAKQTRRVRDAWEEALLKAEEHPLRQLALKNDLAMIRHFDHQIFQLEEELQRQTKQVASREYALLQTAPGIGETLGLTILHEIGDIERFPTVKDFLSYCRLVKGTVASAGRIKGLRGAKLGNPYLRWAFGEAAVIAKRDHFRIRPLAQRLEARMGGNKIKANTVVAIKLARAVYFMLRNKTVFDPERLVAVLARN

SEQ ID NO: 88380 - protein, 429 aa, unidentified
MKQKSNSLTKGDRVGKTTKARGPVQRDAKEVMAELVVKLSQKLEPQSTRKSEEDPRKAGMPGPNRDRLTVGVDLGDKWSNFCILGLDGEKLTEGELRTTPQDFAEFFQAMAGARVVMEVGTHSAWARDVVARSGHEVLVANPRQMEGPKQRKRKNDRVDAHKLARVGRMDPQSLFAIEHRSVEVRQDLVTLRARHAVVAVRKDLINTVRGLVKSMGTRLPKCSTESFAKKVEGGLPTEVRDALLPLVRLVEALSSSIKGYDERIEKLATEKYPHTKLLRQVKGVGPLTSLAYVLTLQDPQRFVKSRDVGPYLGLVPKQEDSGDSQPQLRITKMGDMMVRQLLVGSAHYILGPFGPDTDLRRYGLRLSERGGKNAKKRAVVAVARKLAVLLHCLWVSGEVYEPLRHALPKATRKKAERPTAAEASGRAAA

SEQ ID NO: 88381 - protein, 319 aa, unidentified
MSKLTLDISSYELELHVKIDNCSAGFKVFQKWCKTHQIDLKETLVVMEHTGGYEYRFIQFCEAFSIAYCRVPGLEIKSSMGMTRGKSDQADSFRISKYGEQNIKEIEPSKPLNKNILTLKQLLSFRKRLIRESAGLKSTLSERKHMYEIKTADTITNVSKAKIKSNTKYIEQVEKEITAIIKANEAMLLNYRIITSIKGIGKVNAWMTIAYTENFTSFPDGRTYAVYVGVLPFGHTSGTSIKRRTKVSKLANKELKQELNQAGKTAMRHDPEIRAYAERKLKNKCFSLVLNNVKFKLILRMFSLVKRQELYVENYKRVA

SEQ ID NO: 88382 - protein, 355 aa, unidentified
MERYIGMDVHAASCTLAVISEKGRKLRDFPVETNGQALVEAIRMIPGHKHLVLEEGLQSAWLYETLSPHVDELVVAGVTQSQGHKSDKRDAYGLAEKLRVGNLDKPVFKAPRQFTRLREFSRTHMTLVGDVVRGQSRIKSLYRSRGILVSGVNVYGVRHREEWQQQLCSSAQTRATRLYAHLDFLLDQKKQAEVDLLREAKKHPIVRVLETAPGFGPIRAARLVPIVVTPHRFRTKRQFWSYCGLGIVTRSSSDWIQAADGGWIRARVPQTRGLSRQHNHFLKSLFKGAATTVITQVNKDPIHARYERLLDGGTKPTLAKLSLARMIAAMVLRMWKDEKEYDPERASPSTVTRES

SEQ ID NO: 88383 - protein, 348 aa, unidentified
MVTLGVDAHKRSHTIVAVDANGRQLASKTITTTTKDHLGLLNWAEQFAEDGEGLCWAVEDCRHLSRRLERDLLAAGQSIVRVPPKLMAHVRDSARTYGKSDPIDALAVARAAQREPGLPVARLDGPDRDVRLLSDHRETLVAERTRAICRLRWHLHELDPGWEPKSRSLDRISTLDAVAARIQNLDGTVARLARGLVDRSRELTLQITDLTTEITVLVSSMAPALIAIPGCGAITAAKILGETAGVDRFRSKDAFARHNGTAPMPVWSSNKARHRLSRTGNRQLNAALHRIALTQAHWHEPAKLMMQRRKAGGDSGMEALRVLKRRLSDVVYAALRADLQPMAQHVAA

SEQ ID NO: 88384 - protein, 417 aa, unidentified
MDPQISFNQVVSRGCGSDVHQKVVVATIGGEGLKKATREFGTFTRSLTELKDWLLENGVTHVAMESTGIYWKPVYHVLEPTSLKVWIVNARHIKYVPGHKTDKQDSAWICKLLLAGLLKPSYIPAKEQRELRDLTRFRTKMIQHVASEKNRIVRILEDCNIKLSSVLSTTQGVVATKLIDKLCEVGTITMSDIEEVYHKRLEASKEDLYEACQGLIDKHHIYLLGLIRQDIASTEAVIKNLNARIKEVLSGYDNVLEHLKAIPGLSTKTVEDLVAEIGLDMSVFPTEKHLASWAGMCPGNNESAGKKKSGRTTHGNKQVKAVITEAAWAATRTKNTFYSARYHRVAARRGKKRALIAVGHSILKSVYHVINGMEGYKELGADYVTQRVEKRRKLYLKKELEKLGYAVQLTPPVPQAG

SEQ ID NO: 88385 - protein, 482 aa, unidentified
MKKRSIFQQQSQDLMRIFEEATSNKKVLVVAMDYAKKEHTVMFCNGNGDILRKPFDVKNTPEGVNYLIEQVHKSCTYHKIKAKHVFFGGEDCGSYTDNFAQSLRNHKWLVAGINANDAKAQRENMQASTDRLDLLGIARMLISRRGNCCPAQSGAYRNLRILVRDRRKRVVLSTEERNRMHCLVDRLFPGFLSEHNSGLMPFHEPSLRIMEARFSAAQIKRRKRETLIDVLTRAGAQEPDKKATQLQEYAGKVLEPPPEYVTTWQTSLKHHVALYRCLAQSIASLEHEIAVWLAQTQGAFLMTVKGIGLVLAAGVSAEIGNPATQKPVNNLVSYSGIIPRVSQSGGSDGATHIGSVAKRCNRILKDYLVQSASHLGLHGVDDLQADHRRRDANGQHANYGIARRYLRIALHLMRNSGVYLPEELRRPGAFKARRGYYQKMWPTLLDKWRKYQAHEVAFEPENPLGQWRDMVQKVYQITLRIK

SEQ ID NO: 88386 - protein, 399 aa, unidentified
MIENYDSVDVFIGVDVGKSEHHAVASDRTGKRLYDKALPNDEAKLRAVIRKLKLRGQVLLVVDQPETVGALPVAVAYAEGILVGYLPGLAMRRIADLHPGEAKTDARDAAIIAEAARTLPHALRPLRLEDEQMAELSMLCGFDDDIVGQMTATSNRIRGLLMQIHPALERVLGPHLDHPAVLDLLQKYPTPTAMKAAGLARLGTRLLKLAPRIGRRLAEEIFQALAEQTVVVGGTNATRAVQPRLAEQLAALRRQRADIAVEVAVLVADHPLEPIITSMPGVGVRTAARLITEVSGKDFATAGHLASYAGLAPVTRRSGSSIRGEHPSRRGNKVLKRALFLSAFAALSDPVSRTYYDRKVAQGKRHNQALIALARRRCDVLYAMLRDGTIYQAQLPVAA

SEQ ID NO: 88387 - protein, 352 aa, unidentified
MEEYRRSGEEGKAVFVGVDLHRFKWHVTARTEDQELFSGTLPGRWEALRRLLDRYRGCSIQVVYEAGYFGFWLHDRVVAYGAHCIVTPPSLLPQEYGNRVKTDRRDSRKLAHLLAKGMLRRVWVPALEERYHRQVVRRRRQLIGDRVRTQNRIKAELRFYGVELVEPRGPWPRRYVQRLWCIRFGNRWMQESFERLLEEYEFLSGQISKQTRLLRELSETSLYRERVEILRSVPGIGLIAAMELLVELQGVGRFRRAEQLAAYVGLTPSQYSSAEKIRMGRITRAGKNGLRAILVEASWKLITKDGVMRDKYERIKARAGAKRAIVAIARTLLLRSRRMLLDGRPYALGLIR

SEQ ID NO: 88388 - protein, 316 aa, unidentified
MICGVDVSSKSLDARIGRDGAAACFTNNPKGIAELAEFCRCHKVHLVAMEATGGYEKKPFALLWAAGIQVAVVNPRAVRNFAQGMGFFEKTDRIDAGVIAWYAQTKPCVAVRPASAQQQQLKAMVTRLRQLTELRAAQRNQRLLVTDKVVLKSFRKLLDLVQKQIRELEVAIAGLIDADAVWHKLDQSFRSIKGVADRTVARLMAEMPEIGTLSNKRISKLAGLAPLACDSGQWKGKRSVRGGRRTIREILFVVAAGVSRHNADFRAFRERLAAAGKAKKVIRIALAHKLLVRLNAKARDVLQQLREAPPAAVLLS

SEQ ID NO: 88389 - protein, 328 aa, unidentified
MCTLGIDVSKNKIDLCLLTAGPGGKKKHKVLTNEPAVARKVVDWLNAQKCVPESVTVVLGATGIYHENLAYGLHEAGVSVCMANPCRVREFAHGMDILNKNDAVDAFVLACYGELKSPAVWVPPSPEVRKLRALLRQRDAPREDVQRTVNRLEKANSTSTPQEVIRSLERTKSWLNEELARIEKLITDHTDNDPGLKADLDLLKSIKGVKEQVGREMLALLKDGTFKSASQVAAYLGLTPVEKTSGSSVRGRPHMSKTGPSGVRVKLYVAALTASRWNKQAKAIYERLVAKGKAKKAALGAVMSKLVHLCFGVLKTRLPWDENYVATA

SEQ ID NO: 88390 - protein, 320 aa, unidentified
MNSSTEKCAGIDVSKDWLEVEGPEQHWRFDNAERGWEALVAALRQAQVDLVVLEATGGFERGCVAALASGGLAVAVVNPRQARDFAKALGTLAKTDRVDARTLRQFAAVIAAHPERARYVRPLAEQAQLRLAALVTRRRQLVDMLTAEHNRVPLAHPSMQKSLRTIIRALEKQLLAMDQDIDQHLREHHKQSLEWLDSVKGVGKVTTASLLGLLRELGTLTRKQIAALVGVAPLARDSGKWRGHRMVWGGRAEVRSVLYMATLSAVRFNPVIKVFHERLIAAGKPPKVALVACMRKLLTILNAMMRDGKPFDLTLHQKNA

SEQ ID NO: 88391 - protein, 338 aa, unidentified
MGEITTVGLDLAKNVFQVHAIDGEGKVVIRRRLRRVEVMPFFDQLPRCLVGLEACASAHHWARAIAALGHTVKLMPPAYVKAYVKRGKTDAADAEAICEAVTRPTMRFVAIKTQEQQATLMLHKTRDLLVRQRTMLINALRGHLTEYGIVSAQGAGGVRLAIEALHEAQESLPVLARFALHGLVSQLRSIEAEIEKIEAEILKWHRSNEASRRLATIPGIGPITASAIAASVPDASLFRSGRQFAAWLGLTPKSHSSGGTERQLGISKQGDGYLRRLLVIGATAVLRFARQSNASRAWAARLLERKRPKVVAVALANKTARIAWALLARGTTYTAPTA

SEQ ID NO: 88392 - protein, 346 aa, unidentified
MNYCGIDLGGVSSYVYVTTDRGRKLWSGPVETSKEALKARLRRFRREGLSVAIEAGNQTAWVYEVLVATGAKVTVVNPNKVKLIAASRRKTDKVDARILCELLRIDALPHPVHMPGRQTRALRGLLVARRQLVAARTKLSNVVRGMLRQEGIRLSAGALSSLAGWERVFVNSFSCEHVMTVVRAYYQSFKALRQSIHVLERKLAERERTSPEAKRLQTMPRVGRIASLTFLAAVDDVNRFPSSRKLVGYSGLAPIVRQSSERTQYGPISREGRRELRAVWVQIAHLVAIDRHRETQPLRSWFNRVAKRRGKKTAVVALARRLLVIAYHLLREESDFDAARLKRRAA

SEQ ID NO: 88393 - protein, 369 aa, unidentified
MKKNSKNSKENARRKALQARSGQTRLTVGIDLGDEWSQCCFLDDKGEIVEECRVKTTREAVKARFGELKPALIAIEVGAHSRWVSQLLSELGHEVIVANARELRAITGSDRKSDRVDAEKLARYARVDRKILRPLRHRGEEAQVDLLVLRGRAVLVKTRTQIVNSVRGMVKSFGYRMPTCSTEKFAQLKVLVPLLIKERLAPMMEALEQVQKKIEEYDERVKKLATEKYPETKVLRQVWGVGEITTVSFVLTIEDKNRFGKSRDVGPYLGLRPRRSQSSESDPELRITKAGDCFLRSLLVECAQKILTEKAPDTALKQFGKRIEARGKKKAKKRAIVAVARKLAVLLHKLWVTGEVYEPFPGAREPKAA

SEQ ID NO: 88394 - protein, 449 aa, unidentified
MRKPQVIEDQQHERVFERVAAVDVAKASGMVCTRTPNPARPGARHSTVWEVPAAMNAVLALADRLVADGIEMVTLESTADYWRIWYYVLEGAGLAVQLVTASQARNLPGRPKTDRLDAMWLARLTEMGMLRPSFVPPAPVRVLRDYARARTHLVQDRTRCWQRLEKLLEGALIKVSAVASKLTTVSAQDMIKAMIGGQRDPHILAGLARGRMKAKHDALVEALTGMFDDHHGELAQMLLDQIAFCDTRIAALATRIEQHLAQVRAAWGVDADGSTGPAAGAGPGAAVLPAAQRLAEIPGVSAELARSIIAETGLDMSRFPTAAHLVSWAGLCPSARQSGARNRTGKKGQGDGYLRGYLGQAATGAAGTATFLGERHQRIARRRGRAKAQVAIGRSILVIIWHLLASPGTRFADLGPDYYASRTDKDKKIRNHIRQLQALGLTVTIAPAA

SEQ ID NO: 88395 - protein, 320 aa, unidentified
MQTQNAVVYAGVDVAKATLQLHLQGRQSELANTPEGRRQLFNQLQNVPGVHVICEATGGYEQAMVKVLHEAKIPVSVTNPAQVRAAAQARGQRAKTDPIDAEQLTDYGQRYQPKATPPTSATQDQLVALTQWLKQLIHGQAMAKTQAEHHQQPFVRRQHAKLMAHLQSQIKSVEKQIEALLNQDAPLQQRVNCLDAIQGVGPRTAWMVLAHMPELGQLNRQQVAALAGLAPWTRYSGTMKGMRCIGGGRPEVRLALYMAALSAARSNPVLRTLYKRLRAKGKLGKVALTAVMRRLLTYMNHQLKDLLSKTATEKTEDAKA

SEQ ID NO: 88396 - protein, 463 aa, unidentified
MGAQSTVAALTETRGDPAPAAQRLYVGIDVGRRHHVVASIDQTRMANGSWERAPVRRIGTNGAGFRDLTDWLAASGYDRDQIRVGVEPTGSWYALTIAAWLNRHGYHVAWLQNWTLHERRQLAIGKQTKTDALDARLIARILYEHEHHGLARALMPRPPRSADGLRLLVRNRHRLVEQQTRYRLQLTHIEDAIFPELKDFFLKSITAPAARRLLETYPTPAAVAAAPPGELYELVVRRARASVLAAKLPGLQRAAADSAGLTADTAPILEAQRWLLVQLRNVEDEIVSVEKSIAIALETLPSRELEIMDSLPAMSTMLKAVLVATIGDISGFRSDRQLRKMCGWYSELRESGSSFAKARLGNSGNRLARREIWFWAMHILAPRHQPTPFRAYYRRLHERGMPGPVAIGHLAGKLISVLFFCLRHDRTYDPQRHAKALGLTTSSAVSAVTSDFGSDFIVESIKP

SEQ ID NO: 88397 - protein, 397 aa, unidentified
MFYLGIDIAKHKHYASIIDSTGKPITKPFPFHNHKEGGQALLTWLYRYISSPTELSIGMEATGHYWIAVYSFLLDHGFSVIVLNPLQTNAWRKGTEIRKRKTDAIDATMIADVIRFGRFLETPLVDEKMFALKQLSRFRNSLVRNISDLKRKALVVLDQTFPEYQSIFSNVFGKTSSQLLIEYTSPSDYERLSIDDLTLIIEQASRCRLGKKTANQLMELASNSFGVTFCKDAFSFQLKMLMEQIRFIETQLRECENQMSQLLSDLDTPITTIPGIGPILGATILREIGDIDRFDKPSKLVAYAGIDATISQSGQYESTGMSMSKRGSSHLRRALFQAAITAYKHDPVLKAFYEKKRNQGKHYYVCIGAVARKLCYIVYAILKSNKPYKIPPFPCQR

SEQ ID NO: 88398 - protein, 323 aa, unidentified
MPNAITTPASAGIDVSKRTLDVAVTGSAERFTAPNDAAGHALIAERLQALGVQRVGLEASGHYEAAVTQHLRRHGFVVLVLDPGQVHGWRRFQKRRAKTDPIDAALIAEVTAAIDVPRPAPDPRLAPLAEHLTLIEQLAEDIARLKTRLERYSEAAPLRFLKAEIQRLTRCRAKQLARLIGLLRAAPDLARRLDVLLSIPGVGDITAVTFVVRMPELGRLTRAEAAALVGVAPFNADSGEQAGQRHIAGGRSRLRRAVFLAAFTAAQHWNPMLQATYKRLRAAGKHHTVATVACARKLVAIANALIARDALWQSEPPAHRANG

SEQ ID NO: 88399 - protein, 335 aa, unidentified
MQVYGIDLAKEKFDVNFVNEKGEHKRRTVKNSMAQISVFLEGLPSTAVLCAEHTGTYGDLLVWLCNQYDFPIALVSGYSVKHSLGLVKGKTDPMDASRLREYGERFFDKLSFRQYHSESMSELRQLSTLRSQMVKARKELRTGSHAREMMPMQSLGAKRSLSTVLKCMDDQIFEIEVQIAQIIAGDREMAENYVLATSVKGVGPVIATDMIIKTGNFRTIDTARKAASYAGVCPFPNSSGKMVAKSRTVPFADKELKSLLYMGATSAVKHNKEYNLYYQRKVLEGKQHYLIMNNIANKMLKTIYSILKSRKPYSQDHMCLDPRENKIDRSKKNVA

SEQ ID NO: 88400 - protein, 340 aa, unidentified
MSYGIAGIDVHKKVLAIAVADVEVDGDFQFDRQKVGTTPIDLRRLADWLVEQEVDEVVMESTAQYWRPVWEALEQHWRPQRRARDGAPPLAGTLHLAQAQSNRAPGGRKRDFPDAERLVKRLVAQELTLSFVPDAEQRLWRTVMRRKYQVTRNRVQLQNRLEALLEEAHIKVSSGVSDLLGVSARRMLQALADGETDPAALATLAAPRLRATPKHLCDAFQASATLHPVYRRLLALTLEELRMIEDHLGQLDQQMADLLTAHHDAVQRLAEVPGLGVDSAQQIIAEVGATAATFPSSKHLASWMGACPGNEESAGVNYSHRCPKGNRQMRRILNQAANAG

SEQ ID NO: 88401 - protein, 343 aa, unidentified
MYYIGLDVHKRTISYCVKDAAGHVHREGKIGSTRRELDGWIKTLPGPRMMAMEATIFSGWIYDHLLPHAEKVKVAHPLMLRAIAAAKKKNDRIDAAKIADCLRCDFLPECHMASTEIRDRRRTLRYRNLVIKQMVQMKNRVSGLLMETGVDYNKRRLHKVGYFADLMSSNEEVNQSIRPLLRLSRATIVRSQRLDYALVSSLERDPLLAERLKRLRTVPGVGPITALTWALEIGDFSRFESIKEAVSYCGLCGDERSSADKVLRMPLSKQRNKYIQRTPIEAAKLATRYCHELAVIYEKERQRGNANRATLAVARKLVAYLLAVERRKQDFVPAEEFRSTAVA

SEQ ID NO: 88402 - protein, 409 aa, unidentified
MEPNTRPADPQYFAGIDWGNSHHQLCILDANGKVCDQLKVTHDVAGLNTLTSRLRAYQPGLAGIAIERSEGLLVEKLQAEGCRLFCISPKLSARARERYRIAPTKSDAFDAFVLADSLRFEHHHWRSLAPASPRLAELRALTRDRERLIWNQRDVENQLRSIVLAYHPGALHLFSSLDRDIALAFLRDYPTPDAAERIGLSRMAAFCSRHGYSGRTRPEVLVERLRPHLLHAASGTTEGKAFSAGLFVDQLDLLNRQIRLITKRIQERLADHPDAAIFLSFPGMGQITAATLLAEMGEDRQRFPNPGVLLAESGTAPVTQSSGRSRTVRFRYAANKRMRHAIDWWTFVAVREDDWSNTIYQQARDRGQLHNRALRGLGARWTRILWRCWTNHTTYEPTLHHKIIKAAMT

SEQ ID NO: 88403 - protein, 341 aa, unidentified
MTQYIGLDVSLKDTSISVRQDGKRIWRGKCPSDPKLLAEVIRKRAPEAKRVVFETGPLSVWFYHALTAEGVPAICIDARHAKAALDMAPNKTDANDADGLSHIAEVGFYREVRVKSFDSMLVRTLVAARRQTLKMTTQLTNQIRGLMKTFGLVVPKGAGRVFEGHVRSLLASHAGLEQIILPVLEAWRGLRAQVAELSKQLVTTARASKQCQLLTSIPGVGAVTASSFVAAIEDPANFAKSRSVGAWIGLTTKRYQSGEVDYDGHISRRGDNHLRGLLYEAATVILTRTMADSTLRSWGLKLKATIGFKRAAVAVARKLAVIMHTMLKTGELFNPQVAVAA

SEQ ID NO: 88404 - protein, 400 aa, unidentified
MNPVIGVDVSKGESHAQAFLDRGVPHGKIFRFNHDLEGLASFLSYIKGVESAAGIRPTIVMEATGHYQSPVVQFLDEHQYLNIVINPLISHNAKKTNLRRLKTDAADAHLLGTLFYKEEFEPYKKRGQHLMNLRFLTRQYETLTGMYVQAKLQFQAILDQVFPEYHGVFGDLYSKVSLRFLALHPTSKEVLEMSELEITTAIQSLTGRGKSVSWCLERAQILGAAAKRNPFKETAFSSHLISMQLLIKLLLQYQDHLSTLNKSVDGLAEELLEYDLIQSIPGIGTKIAATILAEIGEIDRFDHAKKLVAFAGVDPSVFSSGKFVATQNKITKHGSRRLRTALYQAVRCGIRSNRNKKLRAYYDKKRAEGKLFKVAIIACVNKLIHWIFAILTTKEAFRLE

SEQ ID NO: 88405 - protein, 346 aa, unidentified
MEYIALDVHKKYTWARVENAQGERLYESRLQHARGTINNFVKRWSPGSAVAVETVGNWYWVVDEIEAGGGTPQLVNARLAKLMMGSVNKSDKLDTKGMNRLQRTGTLPTVWIPSSAVRDARELPRTRMVLSRQRTQLKNRVHATLGKYGFVVEGATDAFGKRGRQIVAELLTKLPPHTEQALRRVLDQLDHVCDNVGLIEAEMREVFAACPETDLLKSMPGVADILAVVIWTETATIERFSCAEAFASYCGLVPRENSSGGKIRFGAVHRDVNVYLKGAFVEAANSAVLNAKRCDYGHISRLYQRLKARRGHGKAKVAVARHLSEACFWMLKKGEPYREPMSSTQR

SEQ ID NO: 88406 - protein, 470 aa, unidentified
MAAVMIGVDPHKASHTAVAISVAEEPLGELRVRACAAQAERLLAWAAAWPQRIWAVEGAGGLGHLLARQLLAAGERVLDVPPKLGARVRLLAAGDTNKNDPDDARSVAVAALRSAGVREVRPDDHAAVLKIWSKRYRDLGRTRTQVVCRLHAVLCDLVPGGVSRPIYAARAARILEQITPPDAVAAARCELAAAFLEDLRRIDAQIRETRKKLAAVVAATGTSLTGLFGVGPVIAAAVIGDVRDVSRFPGRNHFAAYDGTAPIEVSSGPRKIYRLSRRGNRRLNHAIHMAAVTQVSHRHSDGRAYYDKKLAEGKTRKEALRSLKRQVSNAIFACLQAGARRAAAHAKGPGGQQGNDSAACAAGSHPRHRLFGQATPGPGAHPTTPAASPAPGPASARGRAGHSSIAATLPSATPQVQVERPQRSEDERPGGAARQRPYSAARKALGQKFPLKAQRPKGTSHAAKRTDGTP

SEQ ID NO: 88407 - protein, 408 aa, unidentified
MEVVHPRCCGIDVHQASLAVCVAIKEEGNSEKHKLCCGTTTAELLRLADWLHGHQVTHVAMEATGVYWKPVWHILEGQFELLLANPTQVQALRGRKTDLKDGERIADFFQHGLLQGSFVPPKPIQQLRDLTRSRTTLKQEQVRIGNRIRKVLEDANIKLSSVMSDVMGASGRAMLRAMVRGESDPETLAQLARKRLRGKIPVLQQAAAGSLNEHHRFLLEQWLAHWDELTERIAKFDQRIEEQMRPFAAAVETWNSLPGIDRITAWTMVAEMGADMNQFPTAAHAASWAGLCPGQEESAGKRKTGRTRPGNVWLRRALTQAAWGASMTKGSYFKAFYHRLAARKGKKRAIVAVAHALLSTGYLLLWTGRRFSDLGEDYFDRLDRERLTKRLVKRLEKLGHQVSIQPAA

SEQ ID NO: 88408 - protein, 321 aa, unidentified
MTKEAVYVGVDVAKDTLDVAVSSSRETRQFPNDYEGITQAIRHIASLQPAGIILEATGNLEMPLAAALQAECLPVVIINPRQVRDFARATGALAKTDAIDARILALFGLRIKPDMRPLPDKQAREMGSLLTRRRQLMEMLIAERNRLSRADEDVQPKIKDHIKWLKEALSDINNDLERRIQSSPSWHEKDNLLRSVPGIGKVVSTTLLIELPELGQLNRRKIAALVGVAPLNRDSGTMRGKRTVWGGRPALRAVLYMAALVATKCNPVIAAFYRRLLDAGKAKKVALVACMRKLLTMVNAMMRARTVWNPEPVRKSVVTEA

SEQ ID NO: 88409 - protein, 344 aa, unidentified
MSEVIIIGLDIAKYVFHVHGADERGRAIFSKRISRGKLLDFFAAHPRCRVALEACGGAHHWARQLAQLGHEVRLIPPAYVKPFVKRQKNDAIDAEAICEAAQRPSMRFVAVKSEQQQAAGLVFRTRDLLVRQRTQIINAIRGHLTEYGWIAPKGPSHVTMLADLLEEEEMANSLPEAARAMFRLMLDLLAGLNGKIAALDKEIARRAREDEVSRRLMTVPGIGPISATAIAALAPPAETFAKGRDFAAWLGLTPLQRSTGGKQKLGATSKMGERTLRRLLIIGSSAVVLQASKRGAPKGSWLEQMLARKPRMLVTVALANKMARIIWALLVKQENYRAPVAAEA

SEQ ID NO: 88410 - protein, 521 aa, unidentified
MKQKSIYQNQCPQLRELFSSAPSPAQILVVSLDFARDKHLALFCNGLGDGLLKPFSVHNNQAGVDLLNQRIHKTIQRCRIDPTHVLLGGEDDPCYAKNFLWALHQDWLVLRVNAFKAKKHRENIQASSDELDLLGIAKMLLNREATVVFNNGMADRAEHYHALKALGRTRDGLVRDQTRLSNRIHFQVKILFPGFLSDRKDNPIRPFSEACLDLMEKSDFAVTQYAGKKNAPLARTLNKLRLRKPEQQASQLITNARTALPPAPHTVQAHQDALGCLVSVYRTIKQNTAQLEYRQAFHLAQVPAALLTSLPGMGIINSSALAGELGPPDQLGCRGQMASYAGIIPRIKQTGGPDSASRTFSVGHHCNHRLKNHVVRAATAIGQQHGPPEIKEHWQHLLDKDQHAGFIHARRLLATSKALMINGTIWLPESLRCGAGAGDDAMLLYRRQMFEYLQEMWPRLRAKWIGRKALELAFAPENPLGKWRQVIQELYRIQLPLEELDPSMDVTRTNLPPANMETPDE

SEQ ID NO: 88411 - protein, 386 aa, unidentified
MIYVGIDISKYKHDCFICKDTGEVIVENLSFDNNKKGFQQFLDLLKPYDNSNVRIGLEATGHYGLNLKLFLEKNNYSFMEFNPLLVKEFYKSLSLRKTKTDKVDAIVICQKLMSVPYKPNSQLFYHKYSIKSLTRLRETLVKQRSKYKVQLTNILDIIFPEFKPFFNNSFGSTSIYILNKYKIPERIAKMRDFETLNKLSRGNFTYAKFVKLKDLAKNTIGESNDIFEIELSSILNLYKNIDDHIIELDKQISTIIKELNPPTFSIPGIGVISCASIISEFGDISRFSNAAKMLSFAGLEPGIIESGTMSSKGKMVKRGSGYLRYSLMNVALTVIRYNNTFYDYYYKKISEGKCHRVALSHVCKKLIRVIYILETKNIQFDPSLLK

SEQ ID NO: 88412 - protein, 341 aa, unidentified
MQATTIGMDVAKRVFQVHGEDAAGNVVLQKRLSRGQLLEFFAGLPPALVGMEACGSSHHWARELLALGHQVRLMPAAYVKPFVKRNKNDARDAAGICVALGRPDMRLVAVKSADQQAWRGVERSRELLVKQRTQLMNSVRGLLAEHGLVAAQGLRGFHELAARVREGDASIPTPLALALAHVLQQIDSLSASIQALEKQIVAVAKTDPAMRRLTGIPGIGPLTAHAIVAAAGDGRHFSSARDFAAWCGLTPREHSSAGKHRKKGISRQGDKSLRKLFALGASAHLRIARVKPARLTQWQRGILARRPVKVAVLAQAAKNARIAWAVLTSGEPYRRPALTTA

SEQ ID NO: 88413 - protein, 389 aa, unidentified
MSQPFDASRSLTALEQDSTIIAAIEMAQSKWLVAAVVPGIKRQPLKKLDADEGSLLKLLHRWRKEADQAGHPIRRVVVAFEAGRDGFWLARWLRTRGVEAYVIHPNSIAVSREHRRAKTDRLDTELLLRALLGWLRGEKRHCSMVAIPTIEEEDAKRPNRERDSLVTEQTRIGNQIKAILTRFGIRRFRLKLRKAEQQLKELHTAEGSLLPENTRAELFRHLARLHMVREQIRAIEKARLQKLEANCDRKKSPYAMVHLIARVVGIGVETADMLVTEVFSRQFRDRKAVARYAGLTGSPDESGKRRREKGLARAGNARVRTGMIRLAWRVLRFQDGSALAQWFQTRTADGRGSTRKTMIVALARKLLIALWRLVTTGEMSDGIVLRPAS

SEQ ID NO: 88414 - protein, 345 aa, unidentified
MTHFVGLDVSVEETAVCVVDEVGKVICERKVPTEPDDLVELLTTVGGGYVRVGIEAGPLSQWLVNGLAEANLPVICVETRHMKALLKAQQINKSDRNDARGIAQMMRVGLFKPVHVKTLAAQEQRMLLTSRKLLQRKLLDIECDMRGTLRNFGLKVGVVSTRNYEARIRELVESFPRLAAIVDPLLTVRRVMRQQLAILHKMLLNMVRDDPICRRFMTMPGVGPVVALTYRASVDQPHRFVHSRDVGAHAGLTPKRYQSGEIDYDGGISKCGDAMLRTMLYEAAQSMLTHSKKWSWLKAWAMRVAQRRGMRRATVALARRIAVILHRMWIDGTDFRFTNSAAKAA

SEQ ID NO: 88415 - protein, 369 aa, unidentified
MGNRSMFVGLDVHKETIDVSVAEGGRDGEVRHYGVIASDVEPLDKVTRALRAPGRTLHFVYEAGPCGFGIYRHLTRRGEDCVVVSPSMIPKRSGDRVKTDRRDSQMLARLHRAGELRAIYVPDDTDEAMRDLVRAREDAVVVGIQAKYRLKAFLLRQGRRYPGREGWTLAYRRWLADLSFPRVPQHIALQEYRDTIDETERRLERLTEQLRQLAPAWRWAPVVAALQALRGVSFLTAVGLVAELGDLRRFRHPRELMAYLGLVPSEHSSGPSVRRGGITKAGNPHVRRLLAEAAWAYQGIPRIGRQHVYRQEALPKVVCDIAWTAQLRLTARFRRLVARGKAKPKVATAIARELTGFIWAIAREVTPAP

SEQ ID NO: 88416 - protein, 403 aa, unidentified
MNNVAGIDVSKGKSMVSVLRPFGEVVAKPFSIGHTGSELKELADYLKSLDGETRVVMEHTGRYYEPVARFLHDEGVFVSAVNPKLIKDYGNNTLRKVKTDKADSRKIARYCIDNWAELRQHTPMDTIRMQLKTLNRQQSLYTKTKTMMKNNLISLLDQTYPGVNALFDSPVREDGSQKWVDFATTFWHVDCVRNMSLTAFAERYRKWCKRHGYNFSQSKAVEVHAGAQDLIAMLPRDALTKTMVRQAIDALNAISASMERLKAEMQALAAQLPEYPVVMAMHGVGDSLGPQLMAELGDVTRFTHRNAITAFAGVDPGADQSGTHEAKSTRVSKSGAPELRRALFLVMDCLLKTQPQDDPVYRFMDKKRAEGKPYLVYMTAGANKFLRIYYGRVKEYLASLEGN

SEQ ID NO: 88417 - protein, 362 aa, unidentified
MVVTVGIDVHKDTHCAVAVDAAGRQLGRDRTFRAIDAGHRQLLRWVLTEFGREVEFAVEDCRHVSNRLERSLLAAAQTVIRVPPKLMALTRQNTRTRGKSDPLDAVNIARAAVREPGVPRAEHPHASRDVKLLVDHREDLVGSGTAIQNRLRWLLHELDPRIDPEPRQLDSMRELDRVRDRVAALPVTTETATVIRIALEQFGDIRQLTVRARELEKELVLLVQQQAPQLLDLPGCGVLTAAKLIGETANPCRFRSEACFAMHAGVAPIPASSGRTQRHRLARGGNRHLNAALHRIAVTQARLDCPGRDYYQRRKTKHQDSTMEVLRVMKRKIARIVYQLLNTPTTTAAACQPVAARHRSNT

SEQ ID NO: 88418 - protein, 345 aa, unidentified
MTQCNVIAIDLAKDIFQVCIMTIHGKITFNKAMTRAKLKEWLVKQKPSLIAMESCGGAHYWARFAMSLGHNVMPIPPKQVKPFRTGQKTDANDAIAIAVASRAPNIKPARVLTNEEQGLQSVSKMRDLLDKQKLQLSNQVRGLLLEFGIIISKSIKSFKARIPEILEDGENQLPMPMRHSISKMWALYSRLEDDFKTLNNELMHLTEQDDDCKKLMKLEGVGPITSMRLKIQLGCGEHFKSSRQVSACIGLTPKQHSSGGKIQLGSVGKSSCDKPLRSCLFLGARAVVAKLKNRPAKTEKERWLKALIERRGANCASMALANKNARTAYALLKNNTEYSPVLLAA

SEQ ID NO: 88419 - protein, 476 aa, unidentified
MVVPNEEPKKPAKPRKPTKPSKSRERSRPVPVPASPAALNVINPDAAGIDVHSNMHMVCVPADRDANPVRQFGANTADLHEIVAWLKKCRIKTVALESTGVYWIPLFELLESEGFEVHLVEPGQLSRCGARPKTDVLDAQWIQRLHSYGLLRSSFRPPDSVLALRAYWRQRQMQVRYAAHHVQHMQKAMEQMNVKLTEVVSDITGLTGMLIIGAILEGERDPNELAQLRHPQCHHSEEQIALALQGTWRPEHLFELRQAHELYQFHHRQITECDQQIEAELAKFPNRAGEKTHTVKPRKSGRKSNDVRFEAEGPLFKAFGVDLTLIEGIDVATALVILGEIGVDVSRFPTEKHFASWLRLCPPQEESNKTNRRRSHRKATSRVTIALRMAARSVGRTMTPLGLFYRRIRSRIGGLGAVKATAHKLACLIYRMLKYGQEHVTQSMEEYEAKVKGNLLKALKRKAAALGFQLSPLPGP

SEQ ID NO: 88420 - protein, 334 aa, unidentified
MQNITLIGIDLGKHSFHIHCQDKSGKALLRKKFTRTKLMQFLATCPPSVVVMEACAGAHFMARRISDFGHETKLISPQFVRPFVKSNKNDFVDAEAICEAASRPSMRFVQPRTEPLQAMRALHRVRESLIRDKVKTTNQIHGFLLEFGISLPTGDAVIKRLSLVLAEHEIPEYLSRLLVRLHTHYLYLVEQIAELESELSQSINADDTAQRIMTIPGVGPITASLLSSQPGDGKQFSCSRDFAASTGLVPRQYSTGGKSTLLGISKRGDKNLRRLLVQCARSFMMRLERQHGKLAEWVREQLNKKHSNVVACALANKLARIAWVITTQQKEYQD

SEQ ID NO: 88421 - protein, 349 aa, unidentified
MMVVGVDPHKQSHTAVAVDELGRKQAHKTVRARKDGHLQLLAWARGLAREGLVWAVEDVRHVAGNLIRDLLGAGETVVFVPPKLMAGERRGGRERGKSDPIDALAIARAALREGQQLPVACLDERTRPIRLLTDHRDALVAERTRMINRLRWHLHDLAPHLAPRARALSQHTARARLATALAAAPPGTARRVAAAQLTHIQALSAEIDALKAELTPLVRELAPALLAIRGVGVITAAKLLGETGDITRFRSPAAYARHNGTAPIPASSGTGTTGPHRLNQAGNRQLNAALHRIAITQARCHPPAQALLQRRKQTTRDTAKASLRVLKRHLSDVIYHAMTTDRTRLHQAP

SEQ ID NO: 88422 - protein, 510 aa, unidentified
MERKKKYQTCQEIPVVIENEGGLDVVRSDEGKEIRYTRDYGLGADVHSRFIEVNVLVKNNLSVFEYRRSFGTDWVSVNKAKDWIIATLTEHSNPPVDLSSGLHYTIESTSSYHQILITALGGSPSIVNPTLARAGRKKTDIIDAQTLALADLTGVWPTSYVPSVEAVELRMLVDERRYCIHSAIRISNRINNLLLRLGINTSNEGSVSKNSELREKIEDMLEGMNPKFEDATIPAPPTIPDDVRCIFKADYEEYDKFRKTADEYFNRILEKIYSMKWETGNGEISGEEMMKLLTSAPGIGNQTAALWLSRVITPRRFPNAKALSAYCGCDPSVKVSAGKVTSTVKRGGRKDLHSALCMAASNLMRRHSEPFGMFGYNIAMQSGIWKKGVSALARKLTVAMYHMVLNNQPFSYESYTMITEPDVLNISIECLVKLNPAFKRYMRHLISNNITDTKQLVHKYYICELSGMKGLGKNFFALTKDFISNQKKYQKLLEGIKNDENDENNENNDT

SEQ ID NO: 88423 - protein, 515 aa, unidentified
MVLDMDFVKSLVRMVMRELQTPPTSTSDATEVQQALQAALSQPELQRALLAEVIQAAQSDKKLRKALAEEAVQLDILQRLNPNAAGLDIGAAEIWVCVPQGRAPQPVRMFPTFTSDLNALADWLTACSITTVAMESTGVYWIPVYELLESRGFQVFWVNARHLKNVPGKKTDVLDCQWIQQLHTFGLLRASFRPAQDMCALRAYVRHRDNLMRYRSSHIQHMQKALAQMNVQLTLVLSDITGETGMQIIRAIVAGERDPHKLAQFRDVRCAKSEAEIAKALTGNYREEHVFELKQSLALYDFYTEQIKACDAELEAKYTAVKPIVDIVAQPLPETPKSKRRKPKNSPDYDLRTYLYQMTGVDLTAVDGLDSVLVQDILSEIGLDMSRWPTDKHFTSWLRLAPRNDISGGKVLRSRAGKTTNRATRALRLAAQSVSRTDTALGAFFRRMRAKHGAPKAIVATACKIARIIYHMLKDKREYVDQGADHYEQKYQEQALKKLKRQAAKLGMKLIPATA

SEQ ID NO: 88424 - protein, 424 aa, unidentified
MKNSTAKKRKQVPAGYLVVGVDPHKKKHAAVFMTQDFMTHSKLKFDNSREGFETVLERARTEMLKTECRGVIFAIETGAHHWRNLAYFLDEKGIPLRLINQFTLKRRREGKDLNHRKNDYRDSEVAAQLLCTGEFNAARLSQGVYAELRAAYGSYRRLVKEKTRIVNLVKSLLDGLFPEFTQVFKNPCGQTAASVLCTCAVPQAIAGMTESEFVDAIKAACQGRRIMKGKLRVLHHVAMTSIGIGAGAQSVSSEIAFLIEKLRLIEQQLRQINEALTRLVHETMEGKYLLSIIGLSYVSVAGIIAELGSFSSYQNAKQLIKMAGSNPTESESGGKRHSHTPISKQGRPVLRHCAWTAVIPMLRFNPDFRDWAKKLRERPAGANPLSGREVMVAAVNKLLRLAFALVKNQALYQIPESQPVEITI

SEQ ID NO: 88425 - protein, 427 aa, unidentified
MTETKSIELRVSVDVGYRRHSVAIGLPNGEVLEEFEIAHRPEGFQEFFTRIEKHRKAQDCGVGVAMEGYNGYARPLDSLVRSRGYRLYNINNLKLARFKEIFPGAAKKDRIDARKGLELFQLSDHLPLAKEVLQEVRGTPKENEVLKRLTRRRRRLVNERVRVVNNLQADLQAVCPGLLEITSEASNQWFLNFLLSAESLSQLARLRKATLLKIPAVGRKYASLIQDWQKRAHFSEEAAWVSDMIQEDAKRCLELDEKVKTLETKIREVAQDSKIAKILLSIPGFGPVCTTELAGEIGTVERFSKEGSLALYLGMSTLDNSSGQYQGTKAPKHVNTRAKAAMMTALDRHRKYVPESQRYYEKKRAQGKKHNQALRALGRHLCRIIYKMLKEEREYQLRSEKGDTQARIRPRSCVKTKIRRSKISGKG

SEQ ID NO: 88426 - protein, 425 aa, unidentified
MSETRSEVRRWYAGVDWGSESHCVFLSDDQGRKVGQKFFKHSGEGLAEMASWLLKASGANEPGQVLVAIEVPHGPVVENLIERGFAVHAINPKQMDRFRDRFSMAGAKDDSRDAEVMSSCLRTDAKCFRRLVCAEPIFVELREWSRIAEELGVERNRLANRLREQLWRYFPALLQLEDDCSAEWLLDLLALASTPAKAVRLREAKLTQLLKQRRIRRLDAATILKAVQAPPPKLAAGTVEAASAHVLSILPRLQLVNRQIKEADRKIGALIDSLTANEDNQESEPGQKKQHDAAILASLPGVGRTVLATLLAEAWEPLQRRDYAALRSLAGVAPVTKQSGKSRFVVRRQACHDRLANALYHWARVAVQHDPRSRAKYAELRKRGCTHGRALRTVADRNLSVACAMLKTGTLFDPALQAEKNKKTV

SEQ ID NO: 88427 - protein, 346 aa, unidentified
MKTFIGIDVSLASSAVCVLDEHGQVVKRAQIDSEPEAFTAFLRDLPWTIEAIGLEAGPLSQWLHRSLGDAGFALILMETRQVKAVLKAMPVKTDRRDAEGIAQLLRMGWFRPVHCKSVSAQEMRALLSARKSVQKAALDIEQSLRGVLRNFGMKLGPVGKGKGRYEARVRELVAGNAALETAASAILDARAMLRDKLSALDRRVLELARQDEACRLMMTMPGIGAVIALTVRSAIDDPARFRSSRDVGPWVGLTPRREQSGERDVTGRITKAGDAALRTALFNAATVMMHNARPCWLKAWGMQVARRRGSKRATVAVARRIGVVLHRMWLDGTEFRLQRDTVTLAS

SEQ ID NO: 88428 - protein, 375 aa, unidentified
MPTNLRYLGLDVHAETIAAAIAEPDGEVRALGILPNRPEAITKLIRKLEPRHGLHACYEAGPCGYVLYWQVTKLGIHCDVVAPTLVPTKPGDRIKTDRRDAARLARCYRAGDLTPVWVPDAAHEALRDLVRAREAAKQDQLRARHRLGKLLLRRGIRPPPAAKPWTQRHRRWLDTLQLDPPALQATLDDYLHEVDHAAARVERLEGALDNAIAAAPAPLRAVITALQTLRGVRQVTAATIVSEVGTLSRFTHPRQLMGYSGTVPSEHSSGASVHRGAITKTGNAHLRRVLVEAAWAYRFPPRYGKALRTRQRGQPDTITAIAWKAQHRLNTRYRRLLGRGKPTAQVVTAVARELVGFIWAIGVATERASTAAAAA

SEQ ID NO: 88429 - protein, 389 aa, unidentified
MVSVQFSRGGRAAFMEGAPMLDTTTFVGLDVHARSIKAVSLDVMTGEVRCATFGYDAGAVAEWVRSVDPRARCVYESGVTGFDLQKRLSGLGVGCAVGAVSKMIKPSADRRRKNDRNDAEFLARMLSVGNVVEVWVPDDECEAARDLARALEDARDDLSRAKQRLSKFLLGHGLVFDERTPTGRRKGNWTRAHWSWIESIGFAEGADNDVLAHYVDAVRRAAEEKARLEGLVEAEARKPRWRKRVDSLRRLKGVDTATAADLVFEAGEFSRFGNARPFASWVGLTPSEHSSGESDRRGAITKAGNKHLRKALVEAAWHYLTCSARPKDLARGQDPDPGARRHAAKGVRRLVERRGALLARGVHNNKANVATARELACWVWAVGLMAEEA

SEQ ID NO: 88430 - protein, 350 aa, unidentified
MNHKCKIIIGIDTHKATHVAVALDTQGTRLAALSIPTNPKGYLELERWSQSLGEVHAFGIEGTGSFGAGLSRSLLAQGHNVVEVTRPNRQLRYTQGKTDTLDAEGAARSVLSGQATARPKTQTGLSEMIRHLKVARDTAVKSRSQAMVTLKTLIINAPADLRDVLDKIRGKVALIRHIAAFRPGEIDNTMASAKAAMRALARRWLWLHEEIITHDKELERLVIERAPDLMTSHGIATLTVAEMLIVVGDDPTRVRSEAAFAKLCGVCPIPASSGKTHRFRLNRGGNRQANAALYRVAIVRMRGHEPTLAYVRKRTKDGKSKSEIIRCLKRYIVREIYSQLCVPKSAQIAA

SEQ ID NO: 88431 - protein, 367 aa, unidentified
MKNVTTYVGVDAHKKDLFIAMLVGDGQTPVTWTVPNEPNAVKRLVRKLERDAPGPVRMCYEAGPCGYALQRQVTTPRVSCQVIAPALIPRKPGDRIKTNRRDARKLAELFRAGLLTEVRPPTPEDEAVRDLCRARDDAREDLQRSRHRLGKLLLRRGLHYGGGRNWTQGHRRWIDSLAWAQPAERVVVDDYLLAIDQLEARLLELDARLREVADTEPYRQHVGWLRCFRGIDTLTAILILAELHDFRRFPSAPALMAYVGLVPGENSTGEKQRRGRITRTGNALVRRLLVETAWHYQHRPGIGVALTRRRQGQPSRVIAIADKAQQRLCRRFRRLAEHHKPAPKIAVAIARELAGFLWAALQPVPAK

SEQ ID NO: 88432 - protein, 520 aa, unidentified
MATKLNSNRSSRKNSPKRRYVGKPTGIIQDRVQKVSPARFGVVSIDCAKRRSKWMLCDYFGRVIIEPKKVEHHRGSLEAMVEQVNAACEAEGIVDSIVAVEMTGVYHRPIQRAFRKSGYDTRTVHPFASSHYRQALHPNEKTDDHDLEAIFHAAINGYGLSILPVSETYRSLQRLVRHRRSLVKQRSRLNVQIRVLMHQTMPGYADLWDCEKLFNSIAFPIAKHFSSADAIKKAKQVGMAKMLRANKTRFQERTLDRIYAWSLQADEPDSLTELLTKQWKQLAKLRQLLCDQINETERESAHFLAKTPYVLLLSVTGINVVSAAEYAAEAGPIEHYASATAINGRAGLYPSRYQSDEVDRSSVVARSCNRRLRAACILVAKNLIKCHPYYRGLAALWSKRNICTVDRQCRMANRANRMVFQIVSGRQVWRGKHVDREYLLWKLREFHRSHGTSLEQTVVDMNEAFKWLPPSTYAEEAKTLSQLAQKKRRGTNSIGDLLIPLLVRLGVRSADEVELKPSEA

SEQ ID NO: 88433 - protein, 339 aa, unidentified
MTVKTVGLDLAKDVFQVHGISENGRVIFNKAIKRAKLLAFFQALPPCRVGMEACGSSHHWGRQLRKFGHEVKLMPAGYVKPYVKRGKSDAVDAEAICEAVRRPTMRFVEIKTEDQQAMLSIHRTRDLAVRQRTQLANMIRSLLREFGHILPIGVEAVTAFAKRHLSGDHPDMPDIANGMLGIQCYQFIGLNERISGYSKMIEQHAMLNADARRLMRMPGIGPVTASAIVATIGDAHQFRTGRDLAAWLGLTPLNKSSGGKERLGKITKQGDRYIRKLLVVGMTSRAVMAKRSPEKVDLWTAKIVADKPFRLATVAMANKAARAVWAMLTKKQEYRQPAF

SEQ ID NO: 88434 - protein, 373 aa, unidentified
MKKAKYYGSIDVDDSNFNVVLIKTVGEELLHFKCSSNVSAMIKKIKQKNIHLKDIQLCYEATYLGYTLYRELKSKGIMCEVIAPSLIPKTPGKKVKTDRLDCIKLAKYYLKGMLTPVHIPDEEDETVRDLIRSRKLLVDQVKKIKTHIISLCKRMGFDYRKQRGISNAAYWTQIHYKWLEKEINQLPENSPLRLNLSGLLSTCNNIETFIFSYDEQISVIAERPKYKDKVKALNCFRGLKTLSSLTLTTELGDIRRFPHPSKVTAYSGLSIREYTSGGKELRFGITKQGNRILRTVIVEACQFSFKPPKVSTNLKERRIGADPEYINIADRCMHRLSKKSIRMFMNKKHRNKIKVACAREMLCFVWEALHKAA

SEQ ID NO: 88435 - protein, 414 aa, unidentified
MSYKIAGIDVHKKVLMVVVIDASTPEEKPDRRRFATMPSDLQRLSTWLRAQGVEEAVMESTAQYWRSVWLELEPYMRLQLAQAYSNRAPRGRKHDFKDAERLVRRLIANELILSFVPDGEQRTWRSITRMKVQLTRDRVRLQSQMECLLEEMRIKLSIVVSDLLGASGLRILHALAEGETDPKQLALLGDDRLKCSEEQLVDALTGRAQPMHRQMLALQLERLQLMDGQIAKLNGLIARAMKPHQDAVIRLAEVPGLGVDSAQQVIAEVGVKASTFPSAGDFASWVGTCPGKDESAEENHSSRSAKGNKYLRRVLNQAAHAAVKKNGSHFQAVFRRLLPRLGYQSAIWAIAHRLCRVVWKILHEGVRFIEQGSQADPKVRKQRARILARALRKLGYDVAITPINPATTEPAVQM

SEQ ID NO: 88436 - protein, 344 aa, unidentified
MKALKSHVAGIDVHKEMLAITVLIGELDGEPKEYQFESSTFTDDLMALGLKLKEMGVTDVAMESSGIYWKPVFNVFNPLGLKVVVANAAHIKNVPGRKTDMNDSRWIAELHRFGLIRASFIPDGEFQRMRLLSRHRTNLTEDLARVKNRIQKVLEDGNIKLSIVVSDIFGVSGLKVLKQIAGGYTHPNILITEVTTKIKRMEEMKKALTNCLTTEHCFVINVLMKQYEELKNRIEEVENELCKKVEPYAHLVEELDKIPGIDAILAMGIIAEASANMSSFKDERAFAAWSGVASGNNESAGKKKRAKCRKGNPALRKMLIQAAQKATTARNPFIVLNTTNSAFA

SEQ ID NO: 88437 - protein, 421 aa, unidentified
MEDDLTVFVGVDWADEEHDVVAVDQTGRELEAFQVAHSGLGLRRLAQRLTELGGGNPGTVAVSIETSHGTIVDTLLERGFSVFSVNPKQLDRFRDRFSIAGAKDDRLDALVMASCLRTDRKLFRQLQPDPPEIVKMRELSRTTKELVNERQRLTNQLREQLHRFYPQMLELGVEMHLDWFLDLLALLPTPAKAQKVRKAKVARLLTKHHVRRFDAEGLLKVLRQPELPLAPGAVEAAEAHTMLLLERLALVCRQHKRAEKTLTQMLSDYAKEQEIEEQYDVEILRSLPGTGLIVLTTLLAEAQGPLSRRDYHALRGLSGVAPVTRRTGKKGKQKKWTVVMRRACNSRLRDAMHHWCRTAIQKDPWARAFYDELRGRGHKHGRALRGLGDRLLKVACAMLRDGTMYDPDRKLCAMAVTERAA

SEQ ID NO: 88438 - protein, 366 aa, unidentified
MREQDEGNRITIGLDLGDRRHRFCALDGRGQVIEEGTLSNKRESLSELSRRYRSALVVMEAGCHSPWISRHLEGAGCEVVVSNPRKTRAIYQHERKSDRRDALMLARIARMEPALLYPVQHGSAQAQQDLLRIKLRDSLVRARVGVINSLRFTLKSLGYAIANPSTERFHKVIQEQVPESVGSVIAPSVQALKELSLRIKLLDREIITLARSKYPETTWLEQIPGVGPITALYFVLKIQDPGRFERVRDVGAFIGLCPRRDQSGENDPQLRISKRGDAYLRRLLVSAAQYILGPFGPPSALRQYGLALASGGTPRAKKRAIVAVARKLAVLLLTLWKNKSLYQAFPLSRDGEKMRTSDLERLRCIA

SEQ ID NO: 88439 - protein, 343 aa, unidentified
MKLSRVGIDLAKNVYQLHGVDRSGRTILKRRLKRHQWLKVLLDKTEPGCVIGMEACASAHHWGRELQSRGYTVKLIPPQFVKPYVKSNKNDARDAEAICEAMSRPNMRFVTVKTVDQQDIQATHRIREDLKVRRTAKGNQIRGLVAEYGLVAPKHMSSLRAAIPCWLEDAENGLTHYFRSLLHGLWDDLLMLDDRMCEMDKTIKRLAKDNEDCVRLQKLRGVGPMTSTAMVATVGDARQYRKSRQMAAGIGLTPRQHSSGDKHRLLGISKRGDVYLRTLMIHGARSVVTGAKNKDDPLSRWVTEIATRRHPNVAAVALANKNARMAWAILRHKTDYDPAFAMS

SEQ ID NO: 88440 - protein, 476 aa, unidentified
MAQQRKARSALVPIPMLSQETLYIGVDIGKFRHVAGFLSRTLLARHGRFEGCPTFAFEQSREGFRSLVERIRELVPLEQVMVLFEHTGHYHRLLEQYLLELDITVYRVHVQERPKGMLKTDKRDALRLANLLYTQLELGAQVEDKMQLVRRAVAPTGAAAQLRGLIRHRYELSHHGTQLKNKLTAICDEIFPEFTQVFHDPNRPTALSFREQFPTPTALATASLSALQALRVRNFPSDAQLLKLQQLARETIGTKEVDRQKGLLLEQTLLLKELRLVQEHLALLQTEICAIVTNCREGQILLSIPPIGHVQAATIMATIGTIANFEKASELKSYFGWAPRRHQTGVTFDRTKLTRTGVRPVKQMLFLMAACATTMDCEWARLYHRLLPRLASYDERIKDYRGKLKVIGRIAGQMAAMIFALLKTDQELLSQVPAGQEAPPPMLYDPAIHRRHQEGHYRSLKPGTQPRKIIQLPKHT

SEQ ID NO: 88441 - protein, 453 aa, unidentified
MSRKRKNNKKKVSVPELHCLNPNAAGVDVGATEIYIAVPVDRDPQAVRCFSTFTEDLHAAAKWLKTCKIETVAMESTGVYWIPFFQILEAQGFTVFLVNARHVKNVPGRKSDVSDCQWLQYLHSVGLLRGSFRPEQAVCTVRSILRHRDSLVQMASSHVQHMQKALDQMNLQLHHVISDITGLTGITILEAILAGERNPHTLAALRDGRVKATADTIAKSLVGDYRREHLFTLRQSLAAFRHYQELISACDREIAQHLEAFESKLDPREGSAPKSQDEQKPSDRELRFDLGSHLHGIFGVDLTRVPGINVLTTQTLLAEIGPDLSCFACAPAFTSWLGLCPDNRVSGGKVLSVKTRKVKNRAATALRMAAQSLHRSQSYLGHFYRRMRAKLGAPKAITATAHKLARIIYHMVTTGQDYDETICVKNEIKNRQRLEARLRKHARELGFQLVAAS

SEQ ID NO: 88442 - protein, 483 aa, unidentified
MKKKNIYLNQSQELLRLFEEAGNGANVMCVPIDYAKKDHVAMFCDGYGHILRKPFPVKNSPEGIEYLTEQVTRSCLHRHIDPKHVFFGGEDVGSYAENFIHTLRSGGWIVAGVNAQDAKKQRANLQASTDRLDLMGIASMLLNRRANCSPAQTGIYRNLRTIVRHRRKLVVMSTEMKNRVHTFVDRLFPGFLDDKKSGIPPFSKCSLYLMENRFSPRQIRRRRRPKLIEVLHRYGTEEPENAAAKLQEYAARVLLPPDEYISTLQVSLAHHVKLFRCLQDSIHQLEHELAVWLAQTQGAFLTTMRGIGIVLAAGVCAEIGDPDAQKPLNNLVSYSGIIPRVKQTGGPEGKTHTGKVAKRCNRILKDYAVQSANHLGLHGPEDLMADYKRREAAGQHADFGIGRRYLRTGMRLMRTSQIYLPPRLRNNREATPEERAGYYLMIWPALRDKWNKADALDAAFHKNRPLGRWRNMVQELYGIKLKL

SEQ ID NO: 88443 - protein, 369 aa, unidentified
MAKPTTSETGRNIGRPNVNRRSYTIGLDLGDKFSHYCVLNPEAEVIEAGRVKTTREALSARFATMPPMRVAMETGTHSAWISQLLESFGHDVIVAHARDLPNLGKRQKKTDPADAEKLARYARFDPTLLHPIQHRSREAQVDLIVIRARAQLVNARTLLINTARGLVKSLGQRLPECSADGFTERCQQQLPAELFTALVPLVQQIGAMTEQIKTYDQKIRHLADQHYPETQGLRTVPGVGALTALTFVLTLGDKARFAKSRDVGCYVGMRPRQSQSGERDPQLGITKAGDTYLRKLLVQSAHYMLGPFGPDSAVRRWGLGLAARGGQNAKKRALVAVARKLAVLLHTLWVRGATYTPFPHGPAPAGASH

SEQ ID NO: 88444 - protein, 428 aa, unidentified
MSENSNTHPEPEFVGFVGIDWADQKHAWCWQRAGATQREHGEVEHTPEMVEAWVSQLAQRFGPGPIAVAVEQVKGALVFMLSKYECIHLFPVPSTMSASMRKSLYPSGSKDDPRDAELLLDLLLQHRTKLRRLTPDDEVTRRIQNLVEERRTLVDEKTTQLNRLTGYLKVYFPQMLEWFEKLDTKLVCDLLERWPSLEELQKVPPAELRKFFRQRRGRHQELTEWRLEGIGQAMPAIRDRAVLEAKRAMVQVSAQLLRILLEGIANLDGKIEEAASAHPDFFIFESLPGAGSALAPRLLAAFGSQRDRYGSAEEVQTHSGIAPVMEKSGKKKWVHFRWACPKFLRQSFHEWAGHSISQSTWARAYYQQQRGRGKDHHAAVRALAFKWIRILFRCWQDRVAYDENKYLAALARRGSPLSSVLTATAATL

SEQ ID NO: 88445 - protein, 440 aa, unidentified
MAMRKREDLVFPNAAAVDVGASSHWVAVPPHSADAPVREVGAMTDDLNSLADWLLACGVEVVALESTGVYWIPVYEVLEQRGLKVWLVDARQVKYVPGRKSDVQDCQWLQKLMSYGLLRPAFRPGADVCVIRAVARQREVLLTEQASWVQRMQKALVQMNIQLTEVISDVMGQTGQAIIRDIVAGEREPKVLARHRHRRVKASEQDIVRALTGNWREEHLFVLGQALAMYDDIAAHLRECDAKLGTLLAERSAARVDIGNTPRAGSKARVQHDVRQQLANWAGADLTRINGLGLDSVMKILSEIGTDLSRFANVKHFCSWLGLCPATKISGGKVLSARTKRSANRVRQALKMAAMSLSHSDSALGAFYRRLCSRMDKPRANTATAHKLARMVYFMLTRGEAFVDEGQQRYEEQQRERSVAALKRRAAALGFQLNPVRAAA

SEQ ID NO: 88446 - protein, 351 aa, unidentified
MSHKTAATVAHTIGIDTGKNTLHLIGLDDQGAIVLREKIARGRIAARLANVPRCLIGIEAGMATHYVARELGALGHDVKQVPPAYSKPFRQGHKNDFRDAHAIAEAVQRPSTRCVPVKTDDQLDLQALHRVRSRLVGQRTAVINQIRGFLLEHGIAVRQGLRFLRQQLPDILAQRSDVLSPRMIRIMEDLSGDWRRLDERIEHITKEIEVLADTDVNCGQLMTVPGIGPIVASAMVAAIGNGAAFARGRDFAAWLGLVPKQMSTGDRTILGRITKRGNRYLRMLFVQGARAILLRPKSWVKHSFGPWLTTAARRLHRNILTIALANKLARIALSVLIQGRSYETRIVPAAA

SEQ ID NO: 88447 - protein, 371 aa, unidentified
MKVSKNAAGRFVGIDLGKRTYELAILGIEGKVAFSNGQTFPAGRQSLYKKLRAEDTVALEAGNMAFIMAKEIGEAVGCRVYVLNAHRLALIYASMKKTDREDALKLARIVQYFPEDRLPIVPLPSDQEMRRRKILACYRRSMAKRSRAVNQLHGLFVSQGITTKARKDLATAGNRAEAVSELTGIEREEAEFLLDCLAMYESRIGELKKQIEKESEGDEAIEQLQSIPGVGPMTAFAFIAHVAVERFENASQVSNYLGLTPRVYMSGEMERRGRITKRGNGYVRGLLVQAAWALTFTKSGGKLKERFEYMTVEKSISKKKAIVAIARRIAEVMYALLRDGVNYEERPFKGSSKEKAELAAQLVAEALAYSV

SEQ ID NO: 88448 - protein, 440 aa, unidentified
MGDYVVADGEFAAFVGIDWAEQKHVLALQDRQADRIEVGEIEHTPEAVDAWAMELSQRYQERPIAVALEQVRGSLVFMLTKYKHLVIFPIHPATLANYRKSFRPSGAKGDPHDAGLLLDLLTRHREKLRRINPDTAETRTLRFLVEERRKLVNERIRFSQRLNSHLKLYFPQVLNWFCDIGSQIAEHFLERWPTLEALQKAKTKTLERFFTDHNSRSSDKIKIRLEEIRRAVAATHDSAVITASSSAALALIKILRELRNAISSHDSQIEKLAHAHPDFVIFDSFPGAGAAMAPRLIAAFGTCRDRYRTAHEIQCYSGIAPVVESSGKQHWVHYRWSCPKFLRQTFHEWALHSMASSAWAKDYYKEQRAKGKSHHSAVRALAFKWIRILFRCWQDRNPYNPALYENARQSRSHEPKACTSPVNIAWKTRSGFSKLSRADS

SEQ ID NO: 88449 - protein, 422 aa, unidentified
MQNTVASKLKQVPEGFLILGVDPHKKRHAAVAITQDFTTQTKFKFDNTREGFEFMLRRTKMEMMNSGCRGVIFAIETGSHYWRNLAYFLDEKGLPYRFINQFTLKRRREGKDLNRRKNDYRDSEVAAQLLCTGEFVESRLPQGVYADLRAAHNAYRRLVKERTRITNLIKGLLDAVFPEFTHVFKDPCALTALSVLSTCTIPRVIARMTEEDFIAIVKAHHQGRRLMRKKLGALHSIAKTSIGIEAGARSVSMEISFLVEKLQLIRQHIRTVEGSLITLVDETEEGKYLLSIRGLNYIAVAGLLAELGCFKYYRSAKQMIKMAGTNPTESESGGKRRSRSPMSKQGRPVLRYCAWTSVIPMLRLNSDFRAWAKNMRERPAYANPLNGREIVGAAINRLLRLSYALVKRQTFYQSPQLVKLAY

SEQ ID NO: 88450 - protein, 317 aa, unidentified
MDAQDVFAGIDISKENLEVCIRPQEERMCFAQSEDGWALMIQFLQSFSPRLVVLEATGGLERGAVAALAAKGLPVVVVNPRQVRHFAISKGILAKTDKIDARVIAQFAESIRPEIRPLKGLEAQELDSLATRRRQVVQMLAAEKNRLQSAFGRRREDIRMHIEWLEKRLEKIEKDMDRMIQKSPVWRVKGEILCSMKGVGPGLCRAVVSDLPELGTLKRQKISALVGVAPLNRDSGKFRGRRTTWGGRADIRSVLYMATVAAIRWNPVIRTFHERLLKAGKPPKVAIVACMRKLLTILNAMMKNQTPWQPPVASKNA

SEQ ID NO: 88451 - protein, 355 aa, unidentified
MTSLAPGSEKISRHIVTGGDTAGLFACFADLRKKAQARSGQLYPLVVIQEAGLDGFWIDRLLNREDWIESHVVDAASIAVPRRHRRVKTDRIDGETLIRTLMAYKRGEPRGCSMVRVPTPEEEDCRRLCRERKALVAERVLHVNRIRGLLFSQGIRDYKPLPRDRRKRLEELRTGDDRALSVHIKAQICRELDRLELLLEQIKAVDAERDVLVVEKTAATPAPAAMLLDIKGIGPEFAAVLHSEGLFRHFANRRQLAAYAGLAPSPWKSGSIDREQGVSKAGNPRLRTTMIQLAWLWLRHQPNSLLTRWFHDRVMQNGGRFRKVAVVALARKLLIALWKYATAGVVIEGAIMKHV

SEQ ID NO: 88452 - protein, 366 aa, unidentified
MDTIYIGVDFHARQQTICYLKIETGELVISELKHQEKQKVRAFYAQFQGPVIIGLEASGYSPWFETMLEQLGFEVWLGDATEIRRRARWRQKNDRRDAELIWDLMVHNEFPLLHRPTLQSREILRMLRYRQKLIKFRTMSKNSLQAIALQAGLAKGSRLFTTAGQQELRTTEMSPVLQWQRDHWFALMQPLNQQLLETMVWFKAASKGDAAITRLRTHPGIGLLTSLCILHTLQPVSRFRNQRKVVAYAGFDPMVRSSAERAIYLGISKAGSRMLRYLLVEAVHTAIRYDEDLKRFYKRVAERRGRPKAKVAAARKLLIRAYIMLRDEIDYAEFRRRAVAVGLPDEVKGHTKVPEVLIGQSASPGA

SEQ ID NO: 88453 - protein, 425 aa, unidentified
MKVMHDRVAAIDVHKDMVKVAVRVPGAKRGTRKTDVLEFRAFYGVLQEMGRELRRRGVTHVVMEASGVYTDPVYYALTELDFTEVMVINPSHARALKGHKTDAKDAIRLLDLYECGLLSGSYIPAPDLREVRDLARYRMKTVQARTSEIQRLQKTLETAGIKLSSVVSDVTGVSATAMIEALIDGERRGAVLAGLAQGRLRSRQKKADLSMALAGRFTDHHAMMCRLHLDRVRALGEEVAGLDARIAPLVARHAREAELLKTLPGFGDVVVAGWLGAIGPAPHEFFATAERLASWATVCPGNYMSAKKSKGGRTGDGGAYIKPLLVQAAWAAIRVPGRLQAKFHRLVRKFGGPRNKGAQKRAIIAIAHALLKIAYSVLKTGTPYQDLGADFYTSRESAEARQDYLIRQLQKLHPGCVITITPEAA

SEQ ID NO: 88454 - protein, 344 aa, unidentified
MDKISTVGLDIAKHLFQVHGEDAAGQIVVRRQLRRAAVLAFFGKLPPCVVGMEACSSAYYWARAIGALGHEVRLMPPVRVKAYVKWGCKNDAADAAAICEAVRRPSMRFVPVKTVEQQAVMMLHQARQLLVEQRTRLGNAIRGHLSELGIAAAKGVAGLAALRRMIADADDTRLPAVARAALTALASQWHSVDQQIDGLNEQILAWHQSDADSQRLATMPQIGPIIASALVARTGDATRFRNGRQFAAWVGLVPRQNSSGGKERLGHITKTGDRYLRQLLVIAATGMIRRVRAKPALSPWLAALLARMPAKKAAIAFANKLARIAWAILAHGGVYQARDVPAAG

SEQ ID NO: 88455 - protein, 347 aa, unidentified
MDKVIRIGIDTSKHVFQLHGVNAAEEPVLRKKLRRHDMVKFFGSLPPTLIAIEACGASHHWARLLGSLGHTVRLIPPQYVKPYVKRGKNDAADAEALCEAMSRPTMRFVPVKSADQQAALMMMGVRDRLIRNRTQLANAIRGYAAEFGLTAATGMSKIEPLLERIVKDESLPASARDLFASNAREYARMQAEIESIDAKLLAWHRSDECSRRLAQIPGVGPIGASLLMMKTPAPQLFRSGRHFAAWLGLTPKDHSTGGKVRLGIITRAGDQALRTTLVVGATSLLQQVRNGRGRHGSAWLLELLKRKPPKLVAVALANKIARIAWKLMISGDAYHANAAPCGRSYAV

SEQ ID NO: 88456 - protein, 457 aa, unidentified
MNPKRSKPKNDRTMPMIHPNAAAIDIGATMHTAAVRADRTPEPVRSFGTFTTDLHRLVDWFAECGVETVVMESTSVYWIPIFELLDARGFAVFVVNARDAKHVPGRKTDVSDAQWLQRLHSYGLLRASFRPKGQIAELRAYVRQRERLLEYAASHIQHMQKALTEMNLQLHHIVADVTGATGLRIIRAILAGERDSKVLARLRDYRCHSSAEAIEKALTGNYRAEHLFALEQALALYNVYQDKASACDARIEAVLKELSISRGRDAGPLPSPRRRLHGKANGPDFDVRAALFKLLGKDLTQIDGLGSYLSLRLIAECGDDLSAWPSAKHFTSWLCLAPSNKISGGKVLSSRTRRSGSRASALLRLAAVTVGRTDTALGAFYRRLSARIGKAKAITATARKIAVLFYNAVRHGMEYVDPGSSYYETRYRTRVVENLHRRAKAFGFVLLPLESKAGAVS

SEQ ID NO: 88457 - protein, 409 aa, unidentified
MRVIGLDVHRSFAVVAFLENGRPSNGGRVELKRDAVVAFGRQLRPDDEVVIEATGNTAMIVRLLRPFVQRVVIANSLQVRAIAHAKVKTDKIDAAVLAKLHASGFLPEVWMPDEATEALRRLVAQRLQVVQQMTRIKNRIHGVLHTNLIPPYEGELFSTAGRSWLTGLPLEEDEMLAVRRYLADLNQRAGDLEILDRVLAERALRDDRVRRLMTLSGVHVTVAVGLLAAIGDITRFTTSEKLVSYFGLNPSVRQSGNGPAHHGRISKQGRSHARAMLVEAAWAAARVPGPLRAFFLRIQTRRGKAVAAVATARKLAVLVWHLLTKTEDYAWSRPALLQAKIRKMELAAGHPAAKGRRQGRAHAYNSKTVRDSERAWVAQAENAYARFVANWQERPPSGRTDAASGKRTS

SEQ ID NO: 88458 - protein, 346 aa, unidentified
MIIVGCDFHPAWQQIAVFDSETGEITEHKLIHGNGEAEQFYRRLPIASRIGIEACGNSQWFVDLLQRLGHEVWIGDAAQIRASYVRKQKTDRRDAAHILRLLIEGRFPRLWTPSAEERDLRQLLVHRHKLVAIRTRVKGGLQHLALNRGLQKKSKLWTAAGQKALRELPLDTWAACRREDLLGLLASLDKQISKLDAAVERAAEEHPQARLLMTQPGVGPITSLAFVLTLGDVSRFQRGKQVASYLGLIPRERSSGGKQRLGAINKQGNSLMRTLLVESAQSVTRPDPGFRKQYLHRCHRMAKGVAKVAAARRLAVRLFWMLRTNTEYPEIVRIESSPTLAVVSES

SEQ ID NO: 88459 - protein, 341 aa, unidentified
MDITIVGLDLAKNVFQVHGINSAGDIIVRRRLRRARVCGFFAGLAPCLVGMEACGTAHFWARELVALGHEVKIIPPSYVKAYVRRGKNDAADAAAICEAVARPNMRFVPIKTEDQQAALMLHKARQLLIRQQTMLVNALRAHMAELGMTAPQGRGKVENIIAVIEDDEDESIPALARAALKPLVTQLRANEDATAALDAEIKAWHKGNAASQRLATIPGIGFLTASAIAATVPDPSFFRSGREFSAWLGLVPRQNSSGGKDRLGRISKQGNPYIRRLLVIGATSMLRYARAKTAPGADWVNGLLERRPARLVTVAMANKTARIAWALLSKGETYRAPIAAV

SEQ ID NO: 88460 - protein, 351 aa, unidentified
MAAKKRSVIGGVDTHRDTHHAAVIDSTGGLLGDAEFPATAAGYADLLAWMRSFGRLKAVGVEGTGSYGAGLARHLNSQKITVVEVDRPDRRTRRTKGKSDPIDAIAAARATLAGTAMGTPKTRTGPVEAIRALRVARQGAVKARTAAINQMRGLVAAAPEVLRAKLTKLSGAVLVTRCTALTIDPTRLNDPEHATAAALAGLARRVVALTEEITTLDRQLAPLVRQAAPHTSALFGVGTDVAAQLLTTAGDNPDRLHSEAALAHLCGAAPIPASSGRVRRHRLHRGGDRGANHALHTIALCRLRYDPRTRAYQQRRITEGLSKQEILRCLKRYIVRDVYTALRADFAALTP

SEQ ID NO: 88461 - protein, 426 aa, unidentified
MNTQNSDAIPTAEFAAYVGLDWGDQKHALAWTADTAKTAPQTGTLVNSPEVLHAWLQELGQRLAGRPVALAVETSRGPLIHLFGAYPWLTVYPIHPATSARYRTAFKPSGAKDDLPDALLLLELVRELRHKLRPLQLPEPATRQLAALVELRRDLVDRRTQALLQLLALLKSYFPQAVELVGQDLTTDLALAFLRRWPDPLALKAARPGTLKRFYYQHSVRSETLVTQRLALLQQLRPLTTEEAVLMPARLHLAALLEQLRTFAKHIDWVEQKSHTLFQEHSEAYLFRELPGAGKALQPRLLVAFGEDRSLYPDPGSLQKYGGLAPVVQRSGRQTWVHWRWHAPRFLRQTFVEWAGQTVVYSAWARQYYQHMKAKGKSHHVILRALAFKWVRILWKCWQTRTPYDEARYLKQLLARRSPHALKLNP

SEQ ID NO: 88462 - protein, 337 aa, unidentified
MNTINFKYVAGIDVSKSTIDVTLIDKNISLKVHKQFKNDDKGFKAMCSWIKKNKVKLDDVLFCAEKTGLYDMKMSKYLSQNNYKFWLEDGIRISKSEGLKRGKSDKVDSERIARYAIRFQDNIRLFELHDEIYEKLDLLSSSRERLLKAATSLETALNETSGIIDSKFQKELETLLRSPIKHLKTSINKVEKKTSSLIKSDDSINKKYKIASSVRGVGEQTAIYLLSVTKGFTKINTSRKCSCFGGMAPFEYSSGTSVRGRTRISKMGDKKLKKLLHMGAVSILAQKKGEEYDYYCRKVAEGKHKMKVINALRNKILARVFACIRDNREYNVDYKRA

SEQ ID NO: 88463 - protein, 341 aa, unidentified
MMIIGCDFHPRFQQIAFLDQDTGEYGERRLNHPQEAVEFYRRLSGLPVRIGMEATGNYFWFHRLAEELGHELLLGDAARIRAAAPRKQKTDKRDARHILDLLLTDKFPRVWQPNAANQDLRVLLVHRVKQVRMRTRLKNQLDGLAKGEGYLSPRVWSDGRRAELEALPLRGWLNRRRQDLLELHDDLDERIAPLDEALREAANQDAAARLLMTHPGVGPVVSLAFVLTIGDVSRFQRGKQVGSYLGLIPSEESSGEHRRLGGVSKQGNSLVRWLLVQAAALAQRYDPSWHRQYVRLSMNKHHGVAKVAIAHKLAVRLYWMLRTGQNYQQLAVRGSHAGQSV

SEQ ID NO: 88464 - protein, 322 aa, unidentified
MTAVMIGVDPAKRSYTIEVIDSNETVLVTARFENTNQDYRKMRTLVKRWPERVWAVEGATGVGLRLAQRLISDGERVLDVPSKLSTRVRAIDSGHGRKNDPADAYAVAVVELGTKGLREVVADDQSVALRLLSERRRDLVRSRTQAVNRLHQVLMELIPAGAQRHLTAAKAKDLVATVRPRDVAGKARRQLAVVLIDDVAVFDRKIKAVDARVEGAVTASGTHLTDIVGVGSVTAATILGEVGDVARFATADNFAICTGTAPIETSSGELEASGEAVGLRRRFARPRPGPPATGRLRPADASRCAARHGPSPGRCRARRVGP

SEQ ID NO: 88465 - protein, 339 aa, unidentified
MKLYSGMDLHSNNTYCGITNESGKRLMGHRLPNDPKVILGFLEPYRPDLEGIVIESTYNWYWLVDVLQENGYRVHLSHPSGNEQYRGLKHTDDRHDAFWLADLLRLGCLREGYIYPKQLRPLRDLLRKRAHLVRLRTSLLLSAQNSVQRNRSLHVRNEDLKKLTIDLLSVHLESDEALWLAAKASKELIDAFTHRILRIEAWILKQLRPQAGFGYLLSLPGVGEILGMTILFETGPIQRFPDVGNYVSYSRLVASQRISNDKLKGKGNQNNGNKYLAWAFSEAAEHARRHYPRCRAFYNRKLQQKNATVAHCALAHKLARATYYILRDQVVFDETKLFS

SEQ ID NO: 88466 - protein, 334 aa, unidentified
MPYIGIDLHKHYTHFAVLNQNGDVVKRARIPSEREAVIKFFSELEGPKVAALEATRNWYWFYDLVEGMVDSLKLVAPHKMRVIAESTVKTDKIDARVIAELLRVNYLPTCYVPSPAVRQLRELLRHRASLVDMRTKVKNRIHSLVDKLGVRHPFDNLFTGRGLKFLQSLQLGGMYQLELQECLELLEFLNEREKRSSKLIRQIAGGSPDCQLLMTIPGIGYHNALLIMAEMGEVSRFANADKYASYCGLVPTVRISEKSRRYGHLRPQGNPWLRWAYVEAAHIARKKSVRLAGLYARVARKKGAQKAIGAVARELAVISYTMLKTRTKFKDRWW

SEQ ID NO: 88467 - protein, 406 aa, unidentified
MVRYVGMDVHREFAQLAVVEDGIVRDEGRIAVSPEALRQWAGGLRADDEVALEATGNSDAIATLLTPLVGRVVVSNPSKTRAIAEAKVKTDKVDARILAQLLAADFLPSVWLPDDRTRRLRRQVTRRAHIVRTRTRIKNQVHAVLARNLCPTPPVSDLFGKKGRHWLSCQDLPADEAASVAALLRQLDFHAGELALVDRELAIEALSDPVVARLMTIPGIDAIAGISIVAAVGDFTRFSDPDKLVSYLGLNPRVRQSGNSAPVHGRIAKTGRAHTRGVLVEAAWSAVRAPGPLRAFYRRVQARRGFPKAIVATARKLTILAWHLAVKDEDYAFARPALVTHKRRKLELAAGAPSRRGNHRQPGAAYNDKTRRQAETTAAEQAERAYEILVGHWQPRRPPPPPQPSP

SEQ ID NO: 88468 - protein, 426 aa, unidentified
MKLKETEQEKPIRAWIGIDWADEKHDVSLYDVATGKQEALIIRQSPEALQEWLGQVRSRYEGGYVAVVLEQGRGGLLNALMGCEFLVLYIINPKSLSSFREAFYGSGATSDPVDAKLMRDMVRQNPSRFRAWRPDDVMTRSLRLLTEGRRNLVNQSTALTNQLTAFLKGYYPQALVWIGSLDTAWACNFLEQWPTLQSLQASSRRQILRFYEKHPRASLDLNEQLKQMQDARALTQDEAVLESSALMVRALVSQLRSLLASIAEFDRKIAMIFHKHPDRPIFESFPGAGAALAPRLTAAFGTDRDRFQAAKEMQELAGIAPVTEKSGKKSFVHWRYACPKFMRQTFQEFADHSRRWCKWAKAHYDLLRRRGKSHNAAVRALAYKWIRILFRCWKDRQPYQDEVYTKALLKHGSPLSSLLAESVENP

SEQ ID NO: 88469 - protein, 343 aa, unidentified
MTQYVGLDVSMKETKLHVLDEAGKRVWRGRCASEPAAIAAAIRRYAPAAVRVGLETGPLTTWLWTELTAEGLPMVCLDARHAKKALDMKVNKTDANDAEGLAHLVRAGWYREVRVKGRGAMLTKALLGARSHLLSISLSLENQIRGLLKTFGRIVPKGAGGLFEKNVRALITDDAEIAAVIMPLVQARQMTRSKCAALDRRLIAAVRGNATYRMLMTMPGIGPITAVAYVAALERPDTFKRSRAVGAWLGLTPRRFQSGEIDYDGHISRRGDGQLRALLYEAAAVLLTRVRMESGLRRWGLMLRKRLGFKRAATALARKMAVILHAMWKSDTPFNPTLGAATS

SEQ ID NO: 88470 - protein, 343 aa, unidentified
MYYIGLDVHKKTISFCVKDAAGHVHQEGKVGSTRRELDAWIQTLPQPRMIAMEATIFTGWIYDHLLPHAEKVKVAHPLMLRAIAAAKKKNDKIDARKIADCLRCDFLPECHIASTQIRDRRRTLRYRNLVIRQTVQMKNRVSGLLMETGVDYNKRRLHKVGYFEDLMSTNKEVDQSIRPLLKLSREMIERGQKLDYALVSSLERDPLLAERLQRLRTVPGVGPITALTWALEIGDYTRFQSIKEAISYCGLCGDEKSSADKVLRMPLSKQRNKHIQRTLIEAAKFATRFNHELAEIYEKERDRGNANRATLAVARKLVAYLLAVDRRKQNFVSAEEFRATPAA

SEQ ID NO: 88471 - protein, 340 aa, unidentified
MTIVAGFDVHRAQITFDALNRETGEVHRGRIAATPEAVGRWVGRFPGQRVEVAVEACTGWRFVCEALREAGAVAHLAETTETRALRGKKRRAKTDRTDARWLRTLLAEGRLPEAWIPPAHVREWRTRTRLRRTLVDERTAWLVRVQATLFHHGIGGVPDQLLRARGRAFLAELELPDAARERIEVALEIIDALDRQLAPLERDIRALARRQAGCRELMNHYGIGPVTATSIVAELGDVSRLSASRKAVRCAGLDVGVHRSDQHAQQGKLTRQGSPQLRWALYEAAQSACKPRSPDYADYHQLKARGLSHTRATLTIARKLARRCYHSLRDLGPAALEPVA

SEQ ID NO: 88472 - protein, 338 aa, unidentified
MKLYGGIDLHANNMVTALIDEQDQVVYQRRLPNDLGMLLGELEPFGDSLKGLVVESTFNWYWLVDGLQAAGYRVHLANTAAIKQYKGLKHTDDHSDARWLAHLLRLGILPEGYIYPREARAVRDLLRKRSQLVRQRTANLLSVQNLFARQSGGKLAANRIKQLSAEEFGELFPEPNIALAGTSNLAVIRWLDEQIEALEQRVFELTRGQPLYQSLLTVCGIGRVLALTITLETGDIARFARVGQFASDCRCVDSQKLSNGKKKGEGNVKSGNRFLAWAFIEAANFAVRFEPRVKSFYQRKRARTNGIVAMKATAHKLARACYYVMRDGVPFEVKRAFA

SEQ ID NO: 88473 - protein, 407 aa, unidentified
MEVVYRCCCGIDVHKKLIVACLNKGGRQELREFGTATSEIKAMANWLIESECEMIAMESTGVYWKPLYNLFELMDLNAIVVNASHMKALPGRKTDVKDAEWIADLLRHGLLKASFIPSREQRELRELARYRKSLIEEHSRELNRLQKILEGANIKLASVVKDINGVSARKLLDRIIADDLPDADETSRLIHGRLRSKLPEIMSSIEGIVTPLQRKLLSQVLDHIDDLDKRVSTLDAMVKDYMTEYEAAISAIDEIPGIGRRSAEVILAEIGTDMNRFPSAAHLSSWAGICPGNHQSAGKRKHGKTTKGNKTLKSILVECAKSARNVKGSYFSAQYQRIAARRGKNRAAVAVAHSMLIAIYHVLKYGVPFRDLGEDYYNSFNREHKIRGYLKRLQSLGWTPDSSLASA

SEQ ID NO: 88474 - protein, 360 aa, unidentified
MVSERTSVGLDVHARSVVAAAIDERTGELVQRRMGSSTEEIVAWVTGLPGPVAATYEAGPTGFGLARALTAAGVRCVVAAPSKLQRPVGDRVKTDARDAVHLARLLRLGEIVEVVVPSVESEAARDLVRAREDARGDLMSARHRVSKLLLRQGIQYSGGKAWTVAHDTWLRSQRFELVALQAAFDAAYEAMIQAVDRRDRLDAAITRMAADSEFTDVVNRLCCLRGVSTLTGFGLAVEIGDWTRLDGHRIGAYVGLTPSESSSGASRALGGITKTGNGHARRLLIEAAWHHRPSYRPTSPIMRARWDRASAAARARGHAGNQRLHDRWVGFQARRKRSVVANAAIARELAGWCWSLAVMT

SEQ ID NO: 88475 - protein, 344 aa, unidentified
MEHFAGFDVSVKDTSVCIVDDTGRIVREVTVASEPEALLAVLKNPAYHFKRIGLEAGPLSQWLFSALAEAGFPVICVETRHMRAVLKAQINKTDRNDARGMAQMMRVGLYRPVHVKKLRSQKLRMLLTHRKLLQSKAIAIDNDLRGTLRNFGLKVGMVGTVRFEARIRELVENLPDLAALVEPLLVVRRTLREQFCILHRRLLVIVRDDEVCRRLMTTPGVGPVVSLTYRATVDVPARFHKSKSVGAVFGLTCAKYQSGEVDWSGRISRCGDEMMRVMLYEAAQAMMRSKKWSWLKAWAMQIARRRGMKKAIVALARRLAVIMHRMWVDGTEFCWTREQAAAAA

SEQ ID NO: 88476 - protein, 352 aa, unidentified
MFIIGCDLHTRYQQIAMLDTTTGEVVTRRLEHQNGDARAFYTGLQGRVRVGIEATGYTQWLERMLKELGHELWFGDAARIRARAVRRQKTDSRDAELILNLLRTDLFPRLWVPSPEERDLRQLLKHRQKLVGMRTSVKNQLHYLAMSQGVCRKGKLWTVRGRQELERLELGQWASRRRKELLEWLDRLEPEIEELDRVVEKEGQSRPAVVELRKQHKGVGPVVGLAYVLTIGPVERFQHSGQVVSYLGLNPREDSSGDRQRLGHISKQGNEMMRWLLVEAGQSAVQYDPELRRKYQRLKFRRGAKVAKVAIARHLAVRMYWTLRQMKAATSPVRMSGSPARTLVEEAIPSLS

SEQ ID NO: 88477 - protein, 379 aa, unidentified
METIYIGVDFHARQQTICYLTTNGGEILLHVLKHQDKEAVRSFYAQFTGRVIVGLEASGYSPWFERLLEELGCEVWLGNAMQIRRRARGRHKNDRRDAELILDLLLHDEFPRLYLPPQQSREVLRMLRYRQKLIKIRTMAKNSLQALALQAGLAKGSHLFTKAGQQELLTAPMSPAMQWQRTQWLELLEPLNERLLETMLWLKEQSLNDQRIGRLRTHPGIGLLTSLCLVHSLEPVSRFRNTRKVVAYAGFDPLDRSSAEKTRFLGISKAGSRVLRYLLVEAVHTTVKHDADLKQFYQRLAERRGRPKAKAAAGRKLLIRAFIMLRDEIDYAEFQRRAVAARLARHSPGPTMPGTLIGQSASAEHREELTDHELSESRK

SEQ ID NO: 88478 - protein, 457 aa, unidentified
MSRKKSKSKLQSVTEVPQVRIDAGGIDISPEEIYVGVDPRLAEPAVRRFGTVTRELHRIKDWLVGCGVRTVAMESTGVYWIPLFQILERHGVEVFLVNARHYQNVPGRKTDVCDAAWLQFLHAVGLVRGSFRPPGEICALRTILRHRSGLVESASEHIQRMQKALDQMNVQIHRVLSDITGVSGMAMVDAILAGERDGHHLAALCNKRVRASEEEIVRALEGDYRPEHLFTLKQSLASYRHYQRLVDECDQELRRLLTELEIDSDRSGPAPPPQKKMRTSEDEHLRQKYFRILGVDLTTVPCLNVATVKTLLAEVGPDLQRFPNAGAFASWLILCPNNTITGGKVKSSHTRDGSTRLGQALRMAAESLCRDKSYLGQFYRRMRAHLGPESAITAAAHKLARIIYALVTKREAYDAGNFARIEQRNQAKHRQKIINQARLLGYQLVPINAAAANSGAV

SEQ ID NO: 88479 - protein, 364 aa, unidentified
MDHVTHLGLDVHKDTIAVAILRPDQDLPDERTIPNTPEALRKLVGRRRGTLVACYEAGPTGYETHRILSSLGVRCDVIAPTLIPRRAGRRVKTDRLDARNLARLHRAGELTAIRVPSAGEEALRDLIRVREDLKDDRRKTMHRVKSFLLRQGRRYPGRAKGWTDKFDLWVRGQRFAEPAAEAAFRHYLAALDTRRAQLRAIDAEIEAAASKPPLADQVARLRCFRGIDTLSAVTIAAEVCDFHRFASASAFMGFTGLVPSEYSSGRSERRGSITKAGNAHVRRVLVEAAWSYRHRPAMGVELRRRSEGQPPEVLAYAWAAQCRLSARFHQLAARREHNVVVVAVARELAGFIWGLMTDRIAVVA

SEQ ID NO: 88480 - protein, 353 aa, unidentified
MNNNKNLNFKDQDFFIGLDVHQKNWKVTINNNKLQLKTYSMDPRPEQLLSYMNKNYPEGNYFSAYEAGFSGYWAHRKLIKSGFNNIIVNSADIPTTHKEKDQKSDPVDSRKLARELENGSLKGIYIPTEQQQARRSLCRLYYKAVKDRTRIKNTIKSFLQFQGIDIPRVDEISHWSGRFIHWLRSISFNEAEDAYYLNNQIDNLLYRRKETLDILRFMRKLSKDNNIIKCLKTISGIGFLTAFTLYAELIDINRFKNLDTLASYIGLIPSIKSSDEYKINRGLSCRQNKRLRSQLIESAWVAVRHDPALTQSYNQYLQRMSKQKAIVRIAKKLLNRIRYVWLNEKAYVTGVVS

SEQ ID NO: 88481 - protein, 334 aa, unidentified
MNVTTIGLDLAKSVFQVHGIGSHGKKLITKQLRRGRVLEFFANLPACLVGIEACPSAHHWAREISRLGHEVRLMPPGYVKPYVKRGKNDRADAEAICEAVQRPTMRFVSIKSEEQQALLVLHRVRETLVGQRIQLINTIRGHMAEFGVVAAQGAANVQQLIIRLADPDDTCIPARARAVLLLQVDQLRDTERRIAELDDQIKEQAQQDEAVKRLMTIPGVGPVVATALTATLGDGRAFASGRHLAAWLGLVPGQRSTGGKERLVGITKAGDGYLRRLLVNGARALTRWWRSRSPWLMALLARRPVNVATVALANKMARVIWVVLVRGQVYRTAA

SEQ ID NO: 88482 - protein, 395 aa, unidentified
MSYRLAAVDVHKKMLAVVIADVAVEGNYEFERRKFSATPAQFQALAEWFVERGVEEVVMESTAQYWRPVWATLERYWKPVVQKREGAGPKSGTLHLCQAKSNKGPKGRKNDYGDGERMVKRLVAQELTLSFVPDPEQRLLRTVTRRRYQLTRAKVGFKNQLESLLEQAHLKLSSFVSDLLGVSARRMLKAIAKGETDPAALAAMADRNLRATPEQLRDALGACAEMNGVFRRLIQMALDELDVVESHIEKLNQEAMELLKGQEEVVERVAQIPGFGVASALQVIAEVGIDATAFPSEKALASWVGVCPGNEESAGESQSTRSPKGNRHMRRLLNEAAQSAVKVQGGVFDVTFRRLLPRMGYKPAIWAIAHRLCRVLWIILHKRVRYEERGPAVSA

SEQ ID NO: 88483 - protein, 411 aa, unidentified
MEQIHDRVAGLDVHRDQVAACVRTPGPRGGVQAEKARFDTTAGGLAALAEWLAGHAVALAAMEATGVYWKPVYYALEGRFLVWLCNAHHVKNVPGRKTDMSDAGWLADVAAHGMVRPSFVPPPPIRELRELTRYRKTQIDVRAAEIARLEKVLQDAGIKLTSVASKVLTQSGRAMIEALIAGQRDPAALAGLAKGKLRPKIPQLTAALRGHFGAHHAIVAARILAHLDFLDETIGALDAQIAARVAERYQSAARLLADVPGLERRSVEVIIAETGADMSRFPSPAHLASWAGLCPGNHESAGKRRRVATTPGNQWLRRALIESARAAARTRDSYFGAQYRQIARRRGPNKAAVAVAHSLLDVIWHMLTTGEVFTDLGADYFTSRQDKEHQTRRLVSQLEKLGYTVQLTAAA

SEQ ID NO: 88484 - protein, 409 aa, unidentified
MQVMYEVCCGLDVHKKGVTACVLWASGRRRQIRNFGTFTRELLELTDWLRACGVTHVAMESTGVYWKPVWNLLQGQCEVLLVNAQHIKAVPGRKTDQKDSEWIAELLQHGLLRPSFVPPTPIRELRDLTRYRASLAQECNRIANRVQKVLEDANIKLSSVATDALGASGRAMLEAIVGGEESSKRLAEMAQGRLRNKIPELEGALEGRVTTRHRFLLRELLDHLYFVESKMRRIEQEIEVRLGRFPSEVARLCTIPGVDRVTAWGVLAEVGLNMSQFPDAQNLASWAGLCPGSHESAGKRKSGKTRKGSLWLRRCLCQAAWAVSTKKNNYLSALYRRLAARRGNKRATIAVAHNLLVIAYYILRDGTCYQDLGADYFDRLNPEGLRRRLTKRLEGLGFKVTLEPLPQVA

SEQ ID NO: 88485 - protein, 310 aa, unidentified
MDAIVIGIDVSKDKLDVHVLPAAQAFAVARNGAGIEELAARLAALAPAVVAIEATGGFETIVAAGLAGAGLPVVVVNPAQIRAYAKAIKQRAKTDPIDAAVIAKFARATRPEVRPLPDEVTRQLADLVARRRQIVEMMAAEGQRGRRVDHKRVARSIARVKKTLEAELAELDQEIGDQVRGSPLWREKEDLLVSVPGVGPVVARTLLAELPELGRLERREIAALAGLAPFTRQSGRWRGRSFIGGGRATVRTVLFLAAMTAARHNPTLKAFRDRLVAAGKPKMVAHIATARKLLTILNAIIRDNRPWQNA

SEQ ID NO: 88486 - protein, 349 aa, unidentified
MIARPDAACFVGIDLHKDTLTACVLRGRDREVSYVKLACKCRDQIRSFFASLPQPSAVAIETVGFYRWLWTELEPLAGQLVLCDARGARALAGRRIKTDREDALNVALLLADGRLPLAWAPPENVQLLRNWTRHRNGLTRQHAKVLHHVKSTLNRLNFPGPVRLDAAALQRYLLAGVERFSTDDLTILWQHQRRLIEIEQDRAQSERRLSELMRAPEFSRLRTILESVPGVGLVTSATVIAEIGDFSRFADSKAIGRYAGLAPMVYASGNSSRLGHISKTGAPDLRWVLQQAAWTAIRCDAGFKKTWLRIAKTAGKKAAAVAIARKILVLMWTLQRKDEPYKSRDPVAA

SEQ ID NO: 88487 - protein, 347 aa, unidentified
MKQLFIGLDVHKKSWAVTIQEGQLVLKRFSMEADAGLLIAYVSKHYPKHEVECCYEACCLGFGIYHELTKVGWQVVVVNPADIPRGNKQSTTKTDKVDSAYLAKQLAAGHLKAIYVPTHKQEQFRSLFRRRNDLVKNLRRIKCHIKSMLLYFGTSIPLQYDNINWSKDFIQWLHKQHWSYTPATETLKSRLSEYQFLRKEYLHICNELRAYARKQYRKEYYLLRSIPGVGPFIAIGLLAEVGDIRRFRGIDKLSSYIGLVPSVRSSGEKSYTCGITYRSKGLLRSYLIEAAWIAAKKDPVLMQYYQERKGADHKKLIIKLAAKTLSRIYHVIKTGEPYQLTPQPATV

SEQ ID NO: 88488 - protein, 345 aa, unidentified
MELQTIGIDLGKTVFHLVGLNRRGEVVVRKKFSRKQLLHFTANLQVELIGMEACGGAHFLGRALQEQGHAVRLMPAQYVKPYVKTNKSDYIDAEAIAEAVTRPRMRFVPIKSDDQLDLQSLHRVRERWVMRRTAVVNQIRGLLLERGITIRKGRCHVDAALPGILEDASTKLSGALRLLLAQLRLELDHLQTRIDEADAVIQQTAGENEACRRLVAIPGVGPVTATAIIAAIGNGAAFRKGREFSAWLGMVPGEYTTGGKQKLLGISKRGNTYLRRLFVQGARAVLQQSAKQSSGLSAWLTQLTARTHPNVAAVALANKLARMAWAVLAKNEPYRPPVLADAATD

SEQ ID NO: 88489 - protein, 428 aa, unidentified
METPTASSQIVAWVGLDWADQRHEVRLQAVGSEKIESCTVEQKPEALHAWVAQLQARFPQGRIALALEQSRGAVIYALMNYECLWLYPVPPKGLARYRQAFFTSGAKSDVSDADLLLEMVRSHRDRLRAWQPDDALTRQLRLLVEHRRETVADRTRLTNRLGALLKTYFPQALEGAGELRSLAACEFLSTWPSLEAWQAAGRSTQRKFYHRHRRLPAEELEKLLDSIAQAQPLTRDRALVEASVLMTQTLVEQLRTVIAALARLDETLEKLFDQHPDQELFRSLPGAGDALAPRLAAGFGTDRQRYQKAEDIQQFSGIAPVTEASGKQRWVHWRMACPRFLRQTFHEFADASRKKSLWARAYYEQRRQQGASHHGAIRALAYKWIRILYRCWQSHTPYDESVYLAALRRRHSALWLAAGSLSTREAQA

SEQ ID NO: 88490 - protein, 310 aa, unidentified
MPLIKYLGVDLCKLELVVDLAAEAKPRAFPNDVHGHAALIAVLPEGAHLVCESTGGYQRALVAALHAAQIPVSVVSPSRVRHFALAKGLRAKTDPIDARLLSVFGQAMSCVALPPPCAGALELQALVRARQVLHTQLNEESSHDEHCTVALLQEQALARRALFHEQIRAIERRLRALIAANPVWRARSQRVQEVSGIGEVSAWIVLAELPELGQLARGQPGALLGVAPDPDDSGPRHGPRHISGGRSHARKVLYMAALTASQHNPVLAPYYRHLTEHRHKPHRVALTAIMRKLVELLNRLLADPNFILAS

SEQ ID NO: 88491 - protein, 422 aa, unidentified
MDSDASQVEYAAFIGLDWGSEKHSVALQAVGSKEIEMYTLKQTPEDLHGWFSKLRDKVGGRPVAVAIEQTRGAVIHALLGYDFVHVFRINPLSLASYRKAFSPGGAKDDPTDAEYLLEWVKLHRNRIKPWVPDDVQTRALQKLVEFRREVVNQRVALTNQLIQVLREYFPQALDWAGDIDRVMACDFLSKWPTLEKIKKAKPDTIRTFYRQHGSRDAELIEERLKAIYTAQALTEDPAVIETSVLVVQTIVRTLRPTIESIAQLDKEIEDRFQAHPDMAIFDSFPGAGPALAPRLLAAMGSNRNRFESVSEIQQYSGIAPVTDRSGKHVWIHRRFACPKFLRQTFHEFAGQSRKWSGWARGYYDMQRSKGKGHHAAVRSLAYKWIRIIFRCWKDRIAYNEEIHLHSLRKKGSQVLDFIAKAA

SEQ ID NO: 88492 - protein, 355 aa, unidentified
MAHRTYQPRNYEAFIGLDVDKKSYSFTVTDHFQTSRSKKMPSNPEHLYNYIQKHFDHSKIICAYEAGPTGYHLFDYLNENGVKCFITSPASIPKASNDRVKNNRLDSIKITDYLMSAKFKPIRVPQGDYRELRDLVKIRENYARDRKAAKQRIKALLLFANLYPALKDPDIKWSCNYLKELRQLECSFSTRQRLDMLLDDLEYARKKMLTIHRTLKSFCKEHDEINQYINYLQSIPGIGFVVAVSILGKIGDPKQLQNPRELAGFIGLSPGEKSTGDIENRGSITHLGDKILRFMLVQASWAAIRKDTQLEQFFNRVRSKNNPRYASKIAITAVARKLTQIIYRVLKDERNYIQH

SEQ ID NO: 88493 - protein, 462 aa, unidentified
MRKKSKDQKKRDIYALEQINLNAAGADIGASEIYVAVPPDRDEESVRSFLTFTADLYQLADWLANCGIETIAMESTGVYWIPLYEILESRGFEVCLVNAQHLKNVRGRKSDVMDCQWIQQLHTYGLLSASFRPPEDICAIRSLVRHRDMLIRYRSAHIQHMQKALHLMNIQLTIVLSDITGVTGQKIIRAIVAGERNPKVLASFRHNKCSHSETDIEKSLEGNYKFEHVFALKQALELYDFYDQLLQTCDAELEKLYQAFEPVEDPGTQAPSPRRGKRRKNEPYFDLSQSLYRITGVDLVRIDGLDAVSVQKIISEVGLDMNKWPTVKHFTSWLRLSPNNLVTGGKTKRRGTQPTQNRANAAFRMGALSLARSNSALGGFYRRMNARKGAPKAITATAHKLARIFYCMLKYRREYCDPGFDYYERQYQERVIRNLRRKAAQLGYSLEPKSATQSLPTTPVPL

SEQ ID NO: 88494 - protein, 350 aa, unidentified
MNDSVTVVGLDIAKLVFVAVGMNDKGKVMWKKKLARGEVLAFFTTLAVLRIGIEACAGAHYWARKLLAMGHDVKLIAAQHVKPFVSGGKNDWNDAQAIAEIRSRGETKYVPINTEAQQDMQMMHRARRALMIERTGLICRIRAFAGEYGKVFATGVAKFRKAIVDWLGDERNGLSGRALGTLRQLLTQLDGIEEHLAKYDKEISVAAQSDERAKRLHEVPGIGPLTATALVATVADPQHYPSSRDFSANLGLVPRQHSSGGKDRLYGITKLGDAYLRTLLIHCARAALRTAASSEKPDRLLHWALQVQKRRGIKVAAVALANKLARVAWSLLANGGQYQPVPHKAAPTSS

SEQ ID NO: 88495 - protein, 383 aa, unidentified
MQSFEGPYDAYVGFDVGKLSHRACCVLAGGAVAFNVGVANDEAAIDRVLAEAAAHGRSLAVVDQRRNIGTTVVRRARAAGIEVAYLPGIAAKFPGDAKTDERDAEVIARTAMGVPQALRPVPEEGALEGARRLEAQRCDLLRDRTHCVNRLRALLLESNPAFERELDCEAAWALSLMSRVGGPWQMLDAGRRRYAALTRDAPRGAADRLWATLSLATRPTGPQVRAEATLVRMLAPRIAEDTALVAELAALVEAEVGGDETYRCLLTVPGVGPRTAAQLVLSVDISDFEDHDHLASYCGLVPRNRQSGTSPDSVSSSRQGNKQLKNLLIFSCSCLARGSGYYREYYERCRDRGMPYKAGMKAVARKRLKVIYAVMRDVRPYVA

SEQ ID NO: 88496 - protein, 387 aa, unidentified
MTKNTNSKKQQKKQTVKEQGEQRLWAYVASRNQTDDAKKSLTIGIDLGDRASCWCALDAEGEVLARGEVVTERQPLEVMFSRVPASLIAIEVGTHSPWVSRTLEKLGHEVIVANARQVKVISESNKKNDRRDAEFLARLARADRKLLAPIKHRGEAAQVDLIAVRMRAQYVELRTQAISCVRGLVKATGQRLAGCDADNVNRKLAEHLEPAVRVLAEQMLGLVEEITKQIAKSDEMLKQIGKQRYAKEVAQLEQVKGVGPVTALTFVLTLDDPTRFAKSRDVGCYLGLRPKSNQSGSSAPEMRISKEGDGYLRMLLVQCAQYILGKRGPETDLKIWGKQIAAKGKKSAKKRAVVAVARKLAVLLHRLWVSGERYEPLRHKRGPAKAA

SEQ ID NO: 88497 - protein, 285 aa, unidentified
MQATTTIGLDIAKSVFQVHGIDAEGNVTLRRRVKRRYVLAFFQKLPPCLVGIEACASSHHWSRELQALGHTVRLMPPAYVKPYVKRHKNDAVDAEAICEAVTRANMRFVATKTPEQQSCLTLHRTRHLFIRQQTSVINAIRAHLAEFGIVAPVGRHGVEQLLGVVADADDRRLPDVARACVAALGAQLRTLKAQILQFDRMIRAWHRSSEASRRLDDIPGVGPALATALVASVADPKVFRSGRDFSAWIGLVPKQNSSGGRTGSAISANEAIAICEACSRPVRWR

SEQ ID NO: 88498 - protein, 339 aa, unidentified
MRLYAGIDLHANSHYLGIIDEQGKVVFKHKMVNELRQTLSVLEPFRSELKGVVVESTFNWYWLVDGLMDHGYQVHLANPSAIQQYEGLKHLDDERDAIWLANLLRLGILPEGYIYPKQERSLRDLLRKRLQLVRHRTSHILSIQNIVSRSLGIRMRGNEVKGLDEEQVAELFKEEHLYLAVRSSVGVMRYLGDKIKEIEGVVKGWVKLRKEFEKLLTLPGVGPILGLTIMLEVGDIGRFPEVGNYASYCRCVRSTRISNGKLKGEGNRKNGNKYLAWAYVEAAHFAIRDYSEVNRYYHRKVAGANKVVAIKAVSHKLARASYYIMRDQVAYDPNKLFHY

SEQ ID NO: 88499 - protein, 338 aa, unidentified
MKKNVIGVDVSKEKLDFCYLQNEKLEKEWILSNTTTAIRSSLKSLLKELGLDASEVLLCAEYTGQYTYPLCCACEELGLDLWLENPAQIKHSSGVQRGKNDKLDAHKIASYANRFQDKVRLFSLPEKNISSLKQLISERDMYIVDKGKYQGQLTDQKRFMSPNDYRKKSNRLKALISGLTKQLDIIEQEIRELIDSDETLSNQHKLLCSIDGIGDRTAIKMIVSTNAFKDFDNARKFSCHAGVAPFRYTSGSSVHSRNKVSHRADKSIKSLLHMASLVVATRMKDGELRDYYLRKVAEGKNKMLVLNAVRAKLIARMFAVIKNNRQYEKKYEFYLQIS

SEQ ID NO: 88500 - protein, 405 aa, unidentified
MTVYIGIDWGEKKHDVVCLNSAGAVITQFPIVHSAEGLLHLDSKLRQLAPSPEHLRIGLETAHTLLIDWLWERGYSQVYVIPPLLTRSCQRRYRQSGARSDRRDAYLIADLLRTDGQRLYPWHPDSALTLQLRAQVRWGLCLGRQQRRLSNQLRAVLLRYYPAALQVFGALDSQITLHFIQTYPTPQAAARVTWEEFAAFAQAHRYPSQRLLACFARLHARQPAAAPAVVQAYQPQAVHLATSLLDTVRTLASVRREVTALFRQHPDHPIFASLPGAGDLLAPALLAKFGDDRARFPQASTLQALAGTCPVTEQSGQRRRVLFRQACDREFRQIAQQWAKCSIEHSDWAASYFHEAQQRGQSASHAYRCLANRWLAIAWTLWQRRQLYDEAYHLQQRAARGRPRS

SEQ ID NO: 88501 - protein, 367 aa, unidentified
MKFVGVDLHTNRFTCCYLSDDSKEKRTETFNLDSQGLISFYSTINKDTYVLIEATVNTFSFTALFKDMVKEVIVANTYQLKAIGVPGKKTDKLDAAKLAEKLKVQIVSGVQQIVPVLIPPKEIRDLRALFTSYRSFRKEIGRTKNRIHSLLKENLFPFTKEYIFGKKSRKLIREISSDRLLPFQINLLMDTLEHLEDAFDKLVNEIMKAGAQFIPQIEILTSMTGISVITAIAVIADVSDISRFRNSKHFASYLRSAPRVESSNDKTVIKSTNKAGRKLSITLLSQSLNHFRDNNKMLTQFYESASVYKKKGVVRMALCRRVITQVYQMLKKHEYHYFRNPVLHEKKMAEYKKFLKGENIIFSQIAA

SEQ ID NO: 88502 - protein, 341 aa, unidentified
MSAIGIDTHKANLAACAVDGLGTPIAERTFPNDRDGHQDLVAWAREVAPGALIGVEGSASYGAAAARFLLAEGETVREVPPQLSRRERVRSRRAGKSDPGDALAIARVTARESDLPPVRVADRTREIGLLVDARDDAIAEATRIRNRLHADLVVLLPGYGSTTRNLVAAHLRRAVGVRLRGVAGVHAELARERLTRLRTLDAEARSLETRIARLVGAHPLLALPGVGVLTAAKLIGETGDVGRFRSADAFAMLAGVAPIPASSGQLVRVRLNRGGNRQLNRAFHTIATVQAAHHPPAREYVARKVAEQKSGKEAIRALKRQLVRTVFRLLREGAAGLTIAA

SEQ ID NO: 88503 - protein, 356 aa, unidentified
MSRILAIDLGKFKSVTCLLDSDTNQTEFWTMATDRHYLLAVLKNYHPDLVVIESCGLAGWVHDICTEEGYEVLVCNPNQEAWKWKHIKRKTDRDDALKLAKLAALGQLVPVYIPCRRQREYRRLVKYRQVVVGRINRVQNNIRAIFAQRGMEMVRGQKAWALERLELIAAHRKPLAECSLDDLWRGELDLELIQLEHLRQHQHEVHKQLQALARADERVQLLETIPGVGRKTAEVVVAYLDNPHRFQNARQVSSYAGMVPRRYQSGEMDRHGRIHKRGPRQLRSALVEAAWLMLRYNPWAKSVYERLTSGQKTRKKKAIVAVARKLLVRCWVMLLRKEPWNKETMIRQSAGIAVAV

SEQ ID NO: 88504 - protein, 394 aa, unidentified
MDRALVGVDISKDSFSAAGLDGEGKECFSGFYSMDFDGFCKFLEILTTRCQDLQKVLVGMESTGCYHINLFSFLTSRGIQAVVINPLLIANFAKRSLRKTKTDKKDAKTIAKFLMENREEISQLSISQDLQDLRDLARERESISHLITATKVDIKRVLRTTFPELESVGDLFTRSMLRFVKEYPSARRVKMARLKDLAKVLNQPQVGNKLSFSVEDILRAAHRSIATVSPAKEVILQGKIATLVHLQERLAELTKLLTDFCKATRVEDWKILRSIKGVGPKTAVPFLAEMGSIENFSSHKKLIAFAGMDPSVCQSGKYIGKSKLSKRGNRHLRRAIYLMASAVVSQNAFFKAYFIRRKREGLTPQRALLATAHKLIRVIFAMLSHRTYFQVKMA

SEQ ID NO: 88505 - protein, 331 aa, unidentified
MTSKTSPPAAKILAPGVPIRFIGCDVGKANIVVFDSQSRQTHTIANHLDPLTRFLGGLGENCLVICEATGGYEDLLLQAAILTNQAAHRADARKVKAFIRSFGILGKTDAIDAKALASYGQERYPRLARWQACDTDRDELQTLVLTRRDLVAQRVACDNRLAAPGAAPAVPFLTPLRACLDTQIRAIDTQIERVIKANETFETAVDTLRTIKGVGAKTAAALLALMPELGRLGRQQAAALAGLAPHPNQSGAKDGSRRVKGGRPEIKRLLFMPALSAAKHDQTLAPFYKKLVTNGKKKMVALTAIMRKIIVIANAKLRDALAQAEIKIIAN

SEQ ID NO: 88506 - protein, 422 aa, unidentified
MLEETHDREELIERVAALDIGKAELTCCVRVPSPDTPGRRLQEIQTYTTMTRSLLGMADRLRQLGVTRVVMEATSDYWKSPFYLLEAQGFEVWLVNARDVKHLPGRPKTDRLDAVWLCKVAERQMLRPSFVPPPPIRRLRDLTRYRVDLVVARTAEKQRVEKLLEDAQIKLSVVASDIFGVSGRDMLAALLAGERDPKALAQLARGRMRAKLGVLQEAFTGHFSDHHGFLLATMLGRIDQATADIAAVEAHIETEIAPFQAAVDRLDEITGVGRAAAHVIIAEIGVDMGRFPTAAHLASWARFAPGVNQSAGKTKGKNATGHGNPYLARVLGEAAVTAGRTDTFLGERYRRIARRRGKKKAIVAVGRSILVIVWQLLADPDARFHDLGSGFYDTRVNADRAKRNHIRQLEALGYKVTLQPAA

SEQ ID NO: 88507 - protein, 378 aa, unidentified
MSEITRGTMSAIVRVGADLAKQVIQVHGVDRGGRRVVGRTLKRDQFAAWAAQLPPGCVVAMEACSSGHHWARRLGAMGVDARLIAAHFVSPYRMEGKSGKNDATDAAAICEAASRPSMRYVPIKSCEQQGVMSLHRIREGFKEERTACINRIRGVLAEFGLVFGKSPKVLRARLADVIEDAGNELSTTARLVVQRAFEHWRELDEHMRWCDSQVGQHVRGSAQAKRAAKVTGIGELGASALVAGVGEFKQFSSGAQFGAWLGIVPSQNSSGGKASLGRITKRGDDYLRTLLIQGAKSAVMSAGKRDDPTSRWLVQLTARVGWQKACVAMANKNARILWAVMTREQGFDPRHVSVKPQAKVPLKERAAAPAQTAVRCLA

SEQ ID NO: 88508 - protein, 371 aa, unidentified
MEHTRFVGLDIHKERISIAVAESGRSGAVEYLGEISNDPDAIGKLCDRLRRPGKTLAFCYEAGPCGYGVYRQLTDIGHRCDVVAPSLIPTKPGDRVKTNRRDATMLARLHRAGELTPVWVPDADHEAMRDLIRLRSVVRQIVTRARQHLQGFLLRHGRKHGRGTAWRMAYRRWLSTLAFEHPAQQVAFQDYVDAVMDAERRLQRVEEQISGLLPEWNLRPVVDALQVMRGIALINAVVLVAEVGDFTRFSNPRQLMAYFGLVPGERSSAETIRRGGITKTGNAHARRALVEGAWAYRMKARIGRHKVDRIEALPKVVRDIGWKAQVRLCTRYRRLSARGKTANVVNVAIAREMVGFIWSIACMVQSAPKTA

SEQ ID NO: 88509 - protein, 318 aa, unidentified
MQISGCFIGVDVGKFELQVAGHEGAIVSGIVPNNRSGIVGWLKRLPASSVIAMEATGGYQELLARLAHERGFVVYVLNPTHVHHYAISLGNRGKTDRLDAQVIAQYIAQRHTKLHRYEPISPELQQVRALQALRSTVVRVGTSLRLSAQRHGCASKHQKQALASLSAWAEQLERELIAKIKAQSEWAKTYGLLTGICGIGPINGAALTALFNRIHFASSDAAVAFCGLDPRPNESGRKVGRRRLSKQGDKAARTLLYNAASSAARTAHFKDYYAMLRARGLASTAALVVIARKLLRIAYGVWRTGQAFDPGRLNLKAA

SEQ ID NO: 88510 - protein, 412 aa, unidentified
MDEVVQYCAGLDVHRDTVVATVRFPRGSQRGSETRTFGTDTGELIALGDWLIVHGVSRVGLESTGVYWKPVFYLLEDRIEQVWLLNAQHLKNVPGRKTDVVDSAWIAQLVEHGLVRPSFVPPPVIRELRDFTRHRRVLSEERTRMVQRLEKVLQDAGIKLTSVASTVLSKSGRAMLEAMLAGESDPVVLADLAKGRMRSKIPRLTDALRGSFRVSHHGVLVRQILAHVDFLDAQLAEIDEQITTRVVTFEPIIERLQTIPGVARRCAIGMIAEIGVDMSVFATAAHLASWAGICPGNNASGGKARSGRTRHGPVALKTVLTEAAQAAGRTKNTYLGARYHAIRGRRGTFKAVGAIRHDILIAYWHIVAAEVQYEDLGADWVARRQSREYQIARLAKQIEKLGAAVEITMPAA

SEQ ID NO: 88511 - protein, 317 aa, unidentified
MEVTSIFVGIDVSKARLDVAIRPTGERESVANDKAGIKDLVKRLAKIQPALIVLEATGGLERPVTHALAGAELPVVVVNPRQVRDFAKATGQLAKTDSIDADVLARFAEAVRPALRPLPDAVTLELRALTARRRQIIEMIGAERNRLATASKAVRKRIDAHTGWLEQELERADKDLDRSIQHSPIWKENEDLLLSVPGIGPVTSPTLLAELPELGELDRKQISALAGLAPFNRDSGSLKGRRSIWGGRAPVRSALYMATLVATRRNSVIRDFYKRLRAKGKVFKVALVACMRKLLTILNSMIKHKTRWSETFSFHTT

SEQ ID NO: 88512 - protein, 358 aa, unidentified
MSQRNEISFKGKNIYVGIDVHLKSWTATILSESTHLKTYRLDPSPDVLYAYLSRTYPGANFHSVYEAGFSGYSAHWRLKELGVDNMVINPADVPTTGKEKLRKTDAVDSAKLARSLRNGELKPIYIPSRTAQELRSLTRLQASVTKDQTRIKNRIKGYMHFLGIDIPPRFSGAACWSHAFTSWLSSVATVTPHGKYVLDSHIGQLKTLREERLSLLRQMRSIAKVDPLASQVALLRSIPGIGDITALRLIAEIIDINRFKDSNHLAGFVGIVPMCDKSGDDSAEDNGGITIRANRTLRGAIIEASWVAIRKDPALTYAYENYCKRMKGTDAIIKIARKLVNRIYFVMKHQAVYVPSIL

SEQ ID NO: 88513 - protein, 332 aa, unidentified
MQTMQTPSVVLNVGADVAKDAIVVACSEGSFPVRKIANQRTALLAFLKGLPAGSRIGVESTGSYHELFAEAAYQLGFLVFVLNPKDTRHYAKAVGLRGKTDRVDAELIARMIAHEHAKLHAWIPPTPQQRELDRLIKRRATLISLREAVAMSLHDLGGFTDELKALRTRFNQLIARIDLRVKALVEASPERKQNFTRLCTISGVGPVVGSALVNTLERVPLKSADAFVAFTGLDPRPDDSGQHRGKRRLSKRGPAELRRLLYLGAMSARKTKTWRPLYEHYRAKGLSSTATLVILARRIARTAWSMYAHKTTFDVERLTKQSSRCSPAGVSQ

SEQ ID NO: 88514 - protein, 345 aa, unidentified
MKITTIGLDIAKNVFHMVEISRSGRVLNRKMLRRAQLLAFFANHDDCVVVMETCSGANHWARQFTSMGHQVKLISPKYVKPFLRGNKNDFNDAEAIAEASQRDNMRFAPVKTVEQEDIQALHRQRERMKKSRLALSNQIRGLLAEYGIVMNRGIATARRLLPEILEDAQNGLSAMSRDMFAELRDELLDLDQRMTRCERVIKAVNKSNPHCQRLDAIVGIGELTATATYAAIGDGREFKNGRHFSAWLGVVPAQHSSGGKTQLLGISKRGNTYLRTCFIHGARSVLLASAGKTDALSVWAQSVKARRGHNKACVALANKLARIAWVVASGKEYRAAVGVETKAAA

SEQ ID NO: 88515 - protein, 400 aa, unidentified
MFVGWDWASTTHDITVIDATGAVVDRWAPPHTEHGLTQTITRLARHGHPADLPVAIERPSGLVVDRLLAAGHPVVPIHAAAFHAARPRWGAASAKSDPGDSYKLADYLRTDGHRLRRLQPLDDATRHLQALIRLREDHIKAKTAASNQLNALLDAAWPGAAAIFSRLASDIALAFLQAYPTPQAAARLSQARLAAFCRRHSYRGGRSPAELLQRLWAAPTPPVGLDPETLTELINAQVRLLHTLLATIADLDRAIGAALLGHTKAKLLAPMPYIGEINLGQIVAEVGPILDRASSAEHAIAECGAAPVTRASGKTRTVGFRWAANRHARTALHAFADNSRHGSPWAARLYADARRRGKRHPHAIRILARAWLRVMGACWHTNTAYNPTKHRAEQRLAAGT

SEQ ID NO: 88516 - protein, 349 aa, unidentified
MEHSPAAVTAVAAVADVDDVDDAVVADVDVAAPTAPAAPAGELLCAGVDVSSRFLDVHVLGVPPLRTRLANGPGGAAELAGVLRSAGVGLVAVEATGGYERDAVDALLDAGVPVALVNPRQVRDFARALNLLEKTDAIDAAVIARFALALRPRTLSAGGADMAELRELVGRRRQLVEQCVANTNQLRRCRVEAVKASVRRTLDHLAGEVAAVEALIQAAVDADAYLTARFTAMCGVVGVGARTARVLVAELPELGAIDRRGLAKLVGVAPVANDSGDRAGGRTIRGGRATVRRALYMAAVTAARCNPVIAPYYQGLRARNKAKKQALVACMRKLVIHLNSLLAKIPKPA

SEQ ID NO: 88517 - protein, 311 aa, unidentified
MPTTPVHVGVDIAKATFAVRLLNKDLSYPNTAAGHAEFGAALEKLPAPAHVVCEATGGYERALVLALHAAKLAVSVINPRQVRDYARARGQLSKTDRVDAAILADYGATLRPEADTAPTAQQLELAALAGARQDLIELTGIENGRAEHLTLPLLKKQHAARLRLLEKQLAELDRRIDALIAADAALAAKSARMQSVPGVGPVMALTVLALMPELGRITAGQAAALAGVAPFARDSGEFRGQRHICGGRAAVRRVLYMAALSASQHNRILREHYQSLIARGKPAKLALTAIMRTLIVLLNRLLADPHFVLAQ

SEQ ID NO: 88518 - protein, 429 aa, unidentified
MNCNTQNAKIASITEKTLIVGIDVGSETHFARAFDWRNYEYTKKPLEFSNTEAGFMMFKAWVEDIAEKQGKTAVIPGMEPTGHYWFALGKFLQDSGMKPVHVNPHHVKKSKELDDNNPNKNDRKDPKTIAALVNEGRFSYPYIPTGIYAEIRSLSNLRFQTQEELTRIKNRIARWFAIYFPEYKDVYGDLMAVSGRMILKEAPLPEDIRILGVNGVNQIWRNAKLRGTGMKRAKILVSAAEHSVGSKEAPEAARIELKNLLNDMDVYVSRMEELLQTIEEKLKTIPYVDKLMEIKGIGLITVSGFIAEVGDIGRFDNPKQVQKLAGYAIVADSSGKHNGESRISHRGRKRLRYTLYEAAISVIGKNKEFKEIHSYYRTREKNPLKKMQSVIAVACKLIRIFYMILTKGADYDGRKMLNDIVRPEIQPAA

SEQ ID NO: 88519 - protein, 402 aa, unidentified
MFVGIDVSKKSLMAHAIDQDGKDIFHSFKVKNNKPGCNKLIDFIYKHAQQSDFEVIEVAMEATNVYWEHSYRLIDESKKLNSNFKLTSYTLNPKVVKNFKRAYNSLPKTDSVDAWVIADKLRFGRVLNSSVPEEVYRPLRELTRFRYKLVKNVRSEKNRALSLVFLKFSNFENEAPFKTFSEASMSILESFTLEEIANKELKELASFLYEHSNNRLAGSTSFEDIVNALKKAARDSYRLKPKMNQAITQTLSMTFDNIRFMQRQLKRIKKVLKREIKAIPQTLDTVPGIGVILASGILSEIGDKDRFNNQAALASYAGLTWTKHQSGSFVAEETSMTKTGNKYLRYYLVEAANSLRVHNEEYKKYHESQKHKHKRALVLTARKFVRLVFALLSKGEIYQPRR

SEQ ID NO: 88520 - protein, 400 aa, unidentified
MRAVFGIDVSKASSEVAILVNGEKVHNYTMSNDAIGFSRLLGDLKTVHKPEIIFEATGVYSRRLQSFLDEHGYAYTRLNPLEAKKQLDSLRVRKTDQIDAEKLAQSQFVLNRKTTYVQEEIYQNLRDLSRFYQNLTEDIVRAKNRLHKALQVTFPELENILSTPSGEQYWNLVIAFPCKDFVLDLSKDELSESIRQSTSKRISDKRVAYLAEKLIALANQSYCAVKKTSPMLEEVRYYAKELFRLSEQRQTILDEMVELAQPLPEYDILLSIPGIAETTATSIIGELGDIRRFQSANQINAFIGIDLRHYESGNFLAKEHITKRGNPYARKILFKCIHNIASASHTNPCHIADFYEKRKRQSQTTSTKPHTIASIHRLIRTMYYLIMHNKLYDYASTQNR

SEQ ID NO: 88521 - protein, 380 aa, unidentified
MGVRKKEIRQFGTMTDDILQLTKWLNEVDCEMAAMESTGNYWKPVYNIFEDEEIPIMIVNAQHIKGVPGRKTDVKDAEWIADLVRHGLVKASFIPNREQRELREITRYRQELIEERARELNRIQGVLEGCNLKLGSVLTDISGKSGIAILRAIVSGETDPVILSKFAKGKAKNKLAELQRALKGSIHPHQQLMLKHQLEHIETLSRIIEDLDSDIDEKTESMKKQIQLLDEIPGIGRKSAERLLAEIGTEMEQFKNQSHFSSWAGLVPECKESAGKKMSTRIRKGNKHVKSVLVECARSAIRNKKSYFYSRYQRIAARRGGNRALIAVAHSMLTAIYHVLKDLQPYKELGCDYYSTYNREKSIQRNIRSLERMGVTVVIK

SEQ ID NO: 88522 - protein, 375 aa, unidentified
MEKLIRIGMDTSKSVFQLHGVDVLEQPALIKKLHRGQVIAFFKKLPRLTIGLEACGGSHHWGRELEALGHEVFLIPPQHAKAYLRRGKHDAADAEAICEAMSRPRTRFVPLKTSEQQAVQMLAGVRDQLIRRRTQLSNTIRGHAAEFGLIAPTGLAKIEPLLARIAAEETIPALAKELFAVLAEDYRALGSRLGKVDAKLMAFHRQDEVSRRLAQVPAIGPIGATLLSIKVPDAKAFRSGRDFAAWIGLTPKNHSTAGKTRLGAITRAGDAMLRRVLVVGAMAVIQQLKRRKEPPPSWLSELLKRKPAMVVAVALANKTARIAWKLMVSGERYDPRPNQTIVARCSAPSRPLRAADHGGLRPALTAPALRAPACP

SEQ ID NO: 88523 - protein, 343 aa, unidentified
MQIRTIGVDLAKNVFQVHGVDSAGKVVITRQLRRKQVIEFFSKIPPCLVGMEACGTAHHWAREVSKLGHTVRLMPPSYVKGYVKRSKNDAADAAAICEAVTRPSMRFVAVKSTDQQASLMLHRTRDLLSRQRTQLINALRAHLAEFGLVAETGREGVAQLAALITDESDREALPFAMKQALQAIVDQLAALELQVGTLDRAIHAHHRANDMSSRLETVPGIGVIGATAIASTVTDPSNFKSGRDFAAWIGLVPRQHSTGGKERLGGISKQGDRYLRRLLVVGATAVVRHARQHPQKHPWVMRLLAKKPAKLVAVAVANKMARIAWAIMAKGGYYRAPELAAAA

SEQ ID NO: 88524 - protein, 438 aa, unidentified
MRKKKNKASKRAHFQSLPLIHPNAAGIDVGAKEHVVAVPCDRDPQPVRTFQAFTPDLHELAAWLKRCGIETVALESTGIYWLSLYEVLEQHGFEVRVVNARHVKNVPGRTKTDVLDCQWIQKLHSFGLLNGSFRPDHQIRELRTYMRLRDNLVVEGTQAIHHMQKALFEMNVQLSNVISDITGESGLRIIEAILAGERNPEQLAALCSTRIKASRQTVAKSLHGNWDEALLFCLKTALETYRFSENKIQACDHCIERQLATFEIRIPLPNARQSLRTQLHQVCGVDLTKIPGIKEQAAQIIISEVGLDMSRWNTEKQFSSFLGLCPNNLITGGKILRRATRKVYNRAADTLRLCAQSLTHSKSALGAKYRRLRARLGAPKAIVAMAHHLARLVYRMLRYGENYVEKGIEHYEQKFRLQRIKWLKKEAKSLNLQLVAAQ

SEQ ID NO: 88525 - protein, 316 aa, unidentified
MSDGPWAGVDVAKATLDLAVADHRRTYPNDAQGWAAIVRAVQPAGATVILEATGAYELGLAAYLEAHGVPFAIVNPRRVRDFARASGLEAKTDRLDAPLLQRFGATFAPPRTVLPDADHEALREWLARRTQLVEMRTMERQRVARTRLVDLRAHIQGHITWLTAEIAGLDADVHSRLRAHPRWQAALALLVSVPGIGWLTAGRLLARLPELGTVPTPQLAALVGLAPFACDSGPHRGRRHIRGGRADVRAALYMAALSATRRRGPTNVLRTYHHALRARGKAPKVALVATMRKLLTIVNAILHQQTAWRALSANTT

SEQ ID NO: 88526 - protein, 355 aa, unidentified
MDHIGIDVHKRESQICILAEGGELIEQRIRTEPERFAAVLGKRPRARILIEASTDSEWVARCLEGLGHEVIVADPNFAPMYATRTRKVKTDRRDARTLADANVLGAYRPAHRLSDAQRHVRGRLGVREALVRTRTRYISLIRALLRQQGYRVPSGSAEGFVQRVGAMALPGQVRSMIAPLLAVMLPVNRQLAYSDEVIEHLAAQDPRVQRLRTVPSIGPVTAAAFVATLDDAQRFRHAHQVEAYLGLVPREFSSGDSQRRGPITKAGPGRARWLLIQAAVSILRRRPPEAEALWTWALRIAARRGKHVAVVALARRLAGILYALLRDGSVFQLRRAVGVPEAAVGAMNRHAARAR

SEQ ID NO: 88527 - protein, 349 aa, unidentified
MVVLGIDAHKRTHTAVAVDEHGKRLGSKTVAATSAGNLELVRWAGQFGEHTFAVEDCRHLSRRLERDLLAAGETLVRVHPKLMARVRRSAREQGKSDPIDATSIARAAQREENLPTATLDGPERDVRLLVDHREDLVNERTRSQNRLHWHLHELDPSLELTPGSLDRYKVLDQLTEVCAHHEGTVAEIAAELVERIRALTVRINELERRIGVLVKQLAPTLLDLQGCGALSAAKIIGETARASRFSDRSRFARFNGTAPIPVWSSNNVRVRLNRGGNRQVNSALHRIAVTQLRSGAGKEYVERRMAKGNTKTEAIRALRRRISDEVYRRLISDETARSASHTTCELVAA

SEQ ID NO: 88528 - protein, 432 aa, unidentified
MNPFSVSPEPSPMAAWVGLDWADQQHVICLYEVDTGQSTVSRLEQKPEALQDWLSQLRQRFGGAPVAIVLEQARGAVIYALLSADFVRLYPVNPQSLASYRKAYAPSGAKSDPADAVLLMEMVRNSPERFRVWKPDDAGTRSLQLLTENRRQLVNQKTALTNQLTSLLKTYYPQALELAGALDNLQACDFLKQWPTLEALQQARAGQIRQLYREHGRPSSEQLDQRLEQIRQARPLTTDPAALLSGSMMVQVLVEQLRPLLAAIERFDRQIAVIFGKHPDRPLFDSVPGAGAVLAPRLVAAFGTDRDRFQSAQQAQQLFGIAPVTEQSGKQRWVHWRWACPKFLRQTFHEFAGHSRHWCGWAKALYQRLRRLGKGHHAALRVLAFKWIRILFHCWKTRTGYDEQIYLKSLQKRNPTLWAEIQLLPPRKNKVA

SEQ ID NO: 88529 - protein, 482 aa, unidentified
MKKRNIYQNQSQELLSLFEAAGSSAKVMCVPMDYAKRDHLVMFCNGHGDILRKPFSVKNSPEGIEYLIDQVTRSCRQRGIKKEHVFLGGEDANSFAENFVSTLRVKGWLVAGVNAHDAKKQRVNLQASTDRIDLMGIATMLLNCRANCCPAQSGIYRNLRTLVRHRRKLVVMLTEVKNRAHGIVDRLFPGFLNENKSGILPFTQSSLYLMENRFSPKQIRRRRRQKLIEILKRFGTSKAEEAACKLQQYAATVLHTPDEYIDTLQISLAQHVKHIRCLKESIVLLEKEIAVNLAQTQGAFLTSVRGIGIVLAAGVTAEVGDPNEQKPLNNLVSYSGIIPRVKQTGGLEGKTYTGSVAKRCNRILKDYVVKSGFHLGLHGPEELKIDYKRRDASGQHADFGMGRRYLRMAMSLMRTSQVYMPPRLRKADSTLEERAGYYLMIWPYLREKWKKHGALEAAFTKDRPLGMWRQIVQELYDITLKL

SEQ ID NO: 88530 - protein, 389 aa, unidentified
MDSDGKILGRAKIDTGVVGFSQLLSLLAEHADDPTAVPVAIETDKNLIVVALQAAGMTVFAINPRAVARYRERHGQAGKESDPGDAALLADVLRTDRHQHRPLPVITDSGRAVKSLARQHQEAIWSLHQTTSRLRSVLLEFYPQALQAFPNLKHKAALTILAAASTPEIGAKMTARTVVVLLHRCGRRNDPSLVEQIVTDLKTPALRQPAAVEGALGTTVIGLIAIIVAMQSAVEQLETALGLEFDQHPLAPILQSAPGLGPVLAARVLAEVGDDDTRFTTANGLRAFAGTAPVTRASGRSRTVKARRVRNKRLTDACHWWAFAALTKSPGARAHYDRRRAAGDHHNAALRNLANKLIGRMWWCLHNKQAWEEASAWNLAVVQVDQLAA

SEQ ID NO: 88531 - protein, 394 aa, unidentified
MKLVGIDVGKNSHHFCVMDKETGELNVTPSSFSNNKEGFEFLINSLKPYSKKSILLGMEDTGHYHVALLKFLLSNGYTVALINPKTTDLTRKMEGGITKNDRLDTITICDVLDTSERKKQYRITKVDRFDLYEQRQLTRHHHNLKEELNIYCNRLQKSIDLVFPEFNTLFSSKYGIVYMNLLKTFGSAEAIASTDIRTIRKCFEIKGRGGRISLTPEKLKECAKNSIGISSEVEIIQIKHLVSQITLIKEQIAETDKKIEEFSITNNSPILSIPGISHFSGTSILAELGDIGNYSKPSQIIKFAGVAPYHYESSQYNAQHTGITKKGSKYLRKTLYQIILTVINNNPVFKKYYLLKISQGKGHRCAQGHCIRKLLRVIYHLLETGQSFDPALLR

SEQ ID NO: 88532 - protein, 579 aa, unidentified
MHHTPNFAPQSLAIGVGIDTARFGHHVTFLDGGLQNLGTPTEFAESHAGYQRLFQLFLAVQQRFPAAHFHIRLDVAGQYATNLQAFLHNLPFPKSISLGEPVRNQNYRKAIFPKHKADPTESHCTARFALLEHPAPTQPLPPDIIHLREIVARLESQTRLSTRLTNQLHNLLARVFPELAVRVPNLQAAWVLRLLRAFPTPARIARAKRSSLTRIPHLTDSKADLIQADAAVSIASLTGAMAADLVRQLVTQLRHSLRAETRLKELMTQAYQALAVPNHLVSIPGIGDATAAVLTAKMVGCDRFRTPSHLVSYFGVFPETNSSGVDKDGRPKPGRPTHMSRKGNDLVRKYLWNAAKSASLHNPAVSSLYGRLRARGKRGDVALGHCMRKLLHLVFAIWTTGRPFDPQHFPWANAELAPADKKTAGHNKQGTGPERKVVTAVPSTITPDVPPHNSSVPTAHADALPATAEGIDFAALRAQVSMEQVLTHLGCVHQLHGPGPQKRGPCPLHSDKTVRQRSFSVNLAKNVFQCFHPPCAAKGNVLDLWAALHRLPLYQAAVHLANTFNLKLPARNGTEKRNP

SEQ ID NO: 88533 - protein, 344 aa, unidentified
MIIIGCDFHTRFQKIAMVDTEIGEITKRRLEHGNGEARTFYVALPGPARVGMEATMNAQWFERLLQEYHHELWVGDAAQIRAAAVRKQKTDDRDALHILDLLVREKFPRIWIPSPENRDLRQMLRHRDKLVRIRTSVQNQLHALAMSQGLCRKAKLWTKAGRKELEGLPLDPWASRRRWELLQLFDQLDPQIDELDKVVIQEADKRPAAVHLMTQQSVGPVTALAFVLTVGPVERFPTSKHLVSYLGLNPSEDSIGGRQRLGAISKQGNSMMRHLLSEAAQTAVKFDPELRRDYLRLKFRRGISGVAKVAIARTLAVRLYWKLREAAQPNTAARMQGSPTSLSR

SEQ ID NO: 88534 - protein, 458 aa, unidentified
MEEPQEVPADGEHERVWERVAAIDIAKASGVVCTRVPDEDRPGRRKTHLWTVQATSKAVIELGDYLRARQIQVVTLESTSDYWRIWFVILEAAGLKVQLVSARAVKNAPGRAKTGKKDAVWLAKLTGKGLLQPSFIPPYEIRRLRELTRLRAALVHDKSRYRARLEKLLERARIKISAVLSTLDTDTARAMIEALIAGQRNPRVLADLAIGKARARRAELTLALEGRREDHHSIQARILLDDIDALNRQAGQLTGTIGELISQIPAAWGVDADGSTGPHAGTGPDSPVLPAVAQLDAITGCGIIAAQAVIAEIGLDMTVFGTPGRLVSWAKRCPQTRQSGKKTSGGKAGKGNPWLNGILGEITASAARTGTFPGERYRRLARRRGKRKAMVAVARSILVIIFALLSDRSVRFRDLGPDFYDTQVNRDRKIRNHIRQLQALGVDPEDLAALLTKNPPAA

SEQ ID NO: 88535 - protein, 341 aa, unidentified
MKQEISVLGIDIAKRVFHAVGMENRGPVVYRKRLSRHDLMPFRAKLPPVRIGIEACGGAHYWARRFWAYGHEVQLMAPQCVKPYVKSNKNDSRDAEAIAEAVTRPTRRFVPAKDVDQQDIQALHRVRERLIGERTALVNAVHGLMHEYGMVMPNGVAKFRQAVVGKLEAEKDKLTPLRQEMLWKLVEEFAALEKQLAYDQEQLEALATTHPECQRLMTIPGIGPLTATALVAAVSDASAFKNGRQFAAWLGLVPRQYSTGGQARLLGIRKRGDSYLRKRLIHGARATLRWVGRTTDRRSQWMRQLVERRGKNRTAVAIANKNARIVWALLTSHQVYEPAKG

SEQ ID NO: 88536 - protein, 320 aa, unidentified
MSQHSLRNEVAVGIDVSKDFLDVDVAPAHQPLRLPNTPEGHAALVKHLRSFKVDIIVVEATGCYELAVTAELLAAGLPVRVMNPRQIRDFARATGRLAKTDRIDAAVLADFGLAVQPEPRPLPDAQTQQMREKLARRRQLVEMITAETNRHHRATAEGVRRSIEVVLNVLKDELRRLDEDLDQAIRESPAWREKVELLQSVPGIGPQNARTLAVELPELGQCSRQQIAALVGVAPMNRDSGQFRGRRTIRGGRGRVRHCLYMATLTATRWNPKIRHFYQRLLAAGKPKKLALVACMRKFLTILNAMLRERKPWTETAVTT

SEQ ID NO: 88537 - protein, 408 aa, unidentified
MQVLYPRCAGLDVHKDVIVACVRCVSTPVHQEVRSFPTTTSSLQSLDEWLSSHACTHVAMEATGVYWKPVWHILEADFELVLANAQHIRHVPGRKTDVNDATWIADLLAHGLIRSSFVPPAPIQELRDLTRTRKQLVREISQHSSRIQKILEDANLKLGSVLSNVLGKSGRAILQALIAGERNPEKLANLAEGTARKKRAELIEALHGRIRDHHRGLLKVHLELVAALEQALADIDATVGKTLAPIRDSARLLTTLPGVSDLTAQVMVAEIGVDMSRFPTAAHLISWTGLCPRSDESAGKRRSTRVRKGAPWLKTALVTAAWAAVRVKDSYLQAQFHRLRSRRGAKKAILAVAASMLTAAYHMLKNGIPYRDLGADHFSSRDRSKAILRLVRRLNDLGCDVQVTPQAA

SEQ ID NO: 88538 - protein, 418 aa, unidentified
MKVEYPICCGVDVHKTFLVATIITTQGFTPHYSKRRFSTFNNSILQLKQWLIDNNCFDLCMESTGKYYIPVLNLLEDSIHVTVANPKWVRAIKGNKDDVKDSKWIGDLFRLGLVPGSYIPDRPIRILREYTRYRSKLVSCKSSEKNRFQNAFTVCNVALDAVVSDMFGKSASSITDYLIKSDSFDPVHCTSLLKGKLKKEADTVIESIEGYQMTKEQKERMVMVSSHLDFLHQSLEEIDEKLDKMVVPYQNAITIYCTIPGVARASAITIISEVGMSMSQFANSKRLCCWAGLTPGNNESAGKKKSVRITRAGVYLKPALVQVAHAAVKSNISPYYKSKYESISKRRGKKRAIIAIARMILTAIYNMTVTGEAWNPSDLYKIDMPREMLEKQKEKAVKQAIKLLTAEGIIKPSNITVA

SEQ ID NO: 88539 - protein, 326 aa, unidentified
MEHELHYIGIDTAKEKLDVDVLRPDGRHRTKKFANTTKGHDELVSWLKGHKIDHAHICIEATVTYMEPVAECLYDAGYIVSVINPALGKAFAQSEGLRNKTDTVDARMLAEFCRQKRPAAWEAPHPLERALRALVVRHQALTDMHTQELNRTETAREVQRPSIDAHLLWLEAELKRLEKQIKDLTDDDPDMKHRRKLLESIPGIGEKTSAVLLAYIGLKDRFAHARQFAAFAGLTPRRYESGSSVRGASRMSKAGHVSLRRALYMPAMVATSKTEWGRAFRDRLAANGKKGKVILGAMMRKLAQVAYGVLKSGVPFDASRHNPVAA

SEQ ID NO: 88540 - protein, 322 aa, unidentified
MSIPKRRIRGVMVGIDIGKFRFECHIEGQSGTSSHANAATYFETFEQSLPDAVAWIVLEATGGYEKRLRRYLQGCGYRVHVAHPVRVRAFATAHGMLAKTDPIDAQVLSDYARAMAPFALQVETAERQQIQVLIRRRTQLVEQRKAETNRLDKTTEPSAIASLHRHMAWLDEELKLLEAELEAMLQTHPRLMAQVALYESVCGIGRQSSLTLLADLPELGQANEKALTALVGLAPYARDSSTLKKRRRIRGGRPTVRRVLYMAAISAIRYNPDLRPFYQRLRKRGKPGKVAVIAVMRKLLLVLNAVARRQTPWEPNRSAAMT

SEQ ID NO: 88541 - protein, 330 aa, unidentified
MDSLCLDVGKNELVALLIDADGQPLHAKPITVAQNTRGHRRLLELGRDPANTRVVFESTGVYSRRLVKALLPHVASMHQLNPKIIRQFALSMNQTKTDHADVRAIAEVVHTLSLKRPEKLEQSRLYPDDQRANLALWLQESDRLRRAIARLRNQIDNLTHETAPDAGLVLTRRRAELNRLLADRRSVHRHIEQLFKQWNNEEARLATSITGIATLTASSILVAIGRIDRFRSADAFKAYFGLYPRRSQSGAREGKSRMAKHGNALVRHNLWNAAKSAAKHNPVCKALFDRLLATGHAPPAAYGAVARKLLQILYGVLKNKKPFQIQPLAT

SEQ ID NO: 88542 - protein, 332 aa, unidentified
MKKYVTGIDISKEKPDLCFVQNEKVLREEETADTTAAVRQALKTFLKEACAETSDVPVCAEYTGQYIRPLCCACKELGVDLWQENPAQIKYGSGMQRGRNDRLDARRIAACGFRFQDKARLYNLPQENITSLQQLAGERDMYVSDKSRYQGQLTDRERFMRKKDYRQKSARLKELIKGLKKSICQAEKEIKEVIESDETLYEQHKRLCTAEGIGDKTAVKMIVVTKGFTDARKFCCHADPAPFSYSSGSSIRSRNRVSPRADKSVKALLHMAAPVVATGCKGELHDYYERKVAEGKNKMSVLNAVRAKLIHRMFAVIRNNQDYQKDYLNALA

SEQ ID NO: 88543 - protein, 388 aa, unidentified
MTIRQRSTSSTSTGPPARGEVVLGVDTHGEIHVAAVVCSLGQTLGIKSFPATAAGYRRLLAWARKSGTVCRAGVEGTGTFGAGLSRYLLAQQIVVFEVNRPDRSARRLLGKSDPLDAQAAARAVLSGRARAHAKTGDGPVQSARMFKIAKDSAVKARTQAINQLKAVLVVADPALRERLSGLGNRELFRTCARLSPSEGEAGGSDEDPVAEATLMTLSMLAQRIEQLTGQIDELNQRLTELVERHAPQLLAPVGIGPDSAATLLITMGDNPERLSTEASFAALCGVSPIEYSSGGRSSRRLNHGGDRQANAALHRIVFTRLRHDPRTQTYYERRTPGGARPGVRSSDASSDMPPARSSTWSGRSLPTPRHRGVRDRRCKADPFCLRRQ

SEQ ID NO: 88544 - protein, 455 aa, unidentified
MPIGTVPRTCQQALLKTCRVENAVTGEQALAFADGLQGVGKVRTRTEGTMEVYIGIDWSEKKHDAIYRNEKGEVIYQITFEHSVEGYRELERVREKLGLRVEDCVIGVETAHHILVDYLWECGYSRIYIVPPGMVDDSRGRWRQSGAKDDLVDGWVIADLILHDRHRLTLWKPDTLLTRQIRVRVKLIRYLTRETIRHGNRLRSVLLRYYPAALVVFRGGVTVPITLAFVQAYPTPGAAQQLSRTEFEDFCRKNLYRQKRNIASCYMRLQQPQPKASQEVVEAYQAEAILLASLLHQEHQAKRKALKDLQGLFQKHADYALYHSLPGAGCLLEPALLAKFGDDRQRFPTASSVQALAGTCPITRRSGKQKHVHYRLACDREFRSIAVNWAKASLHVSVWANLYYQKVRPGCSSENHALRCLANRWLAILWRLWQDHTSYDEPLHLQRHALRAEPK

SEQ ID NO: 88545 - protein, 395 aa, unidentified
MFYCGIDIAKYKHEATVIDQAGAAVLESISFANSKEGCGKLLALFQRLNIAKEDLLIGMEATGHYWLSVYGYLLDQGFEVKVINPIQSEAFRKMYIRQTKNDRKDSFIIAQIMRFGQFSATNLAEETIVALRQLSRYRLALVDACGDCKRRVIALLDQVFPEYDTLFSDTFGVTSKEVLSQYPTPEDLLSVSTRKLSNLLEKASHGRFGKEKAEQLKAAAASSFGVSFAKDAFAFQIRQLIEQLEFLEGQIAEPEEQISSLLKQTGSYITTIPGIGDTLGAIILSEIGDIHRFDAPNKLVAFAGLDVRVTQSGEFTGTRQIISNRGSPYLRRAIWLAASRAAFCDPILSEYYQGLKARGKHHLTAIGAVSRKLCNTIYTILKENRPWQPIPPKGK

SEQ ID NO: 88546 - protein, 381 aa, unidentified
MPSMQLRRDDVIVGVDTHKDNHVAVAIDGLGGRLGDIVVPTTIAGFEELLAFCLAFVGSAGRLIGFGVEGTGSYGVGLARYLRNHGHDVHEIARPARAAERRLAGKNDTIDAEHAARQLLAGHGLSTPKTADGAVETIRLVKIAYDGAVQARTTAMITLKATLATGSEALRAELETLTDHKLILACAALEGPTPLPPVRRGAPAVVVPGDPDVAMRHVLSSMAKRWLALHEEAKAHAASLKALTAAAAPQLVEAVGVGYDTAAQMLITAGDNANRIKSEAAFAKMCGACPIPAGSGKTNSRHRLYRGGNRQANAALYRVVIVRMRWHQPTIDYVARRTAEGMSKREIIRCLKRYLARELFRLLPAPDAIAKPVNGELEIAA

SEQ ID NO: 88547 - protein, 353 aa, unidentified
MSEKLNSKLAVIGIDIGKNSFHIVGQDRRGALVLRQKWSRGQVEARLANLPPCLIGMEACTGAHHLSRKLQALGHNARLMPAKYVRPYCKGDKNDYRDAEAIAEAVQRPTMRFVATKTADQLDLQALHRVRERLVSQRTGIINQIRAFLLERGIAVRQGLRFLRAELPGILAKRTDVLSPRMLRIIEDLSGDWRRLDERIENLSGEIAALACQDKGCERLMTIPGIGPLISTAIVAAIGTGDPFSKGRDFGAWLGLVPKQMSTGDRTILGHISRRGNRYLRTLFVQAAWVVLVKVGPKQWERYGLKSWIEAAKQRLHHNVLAIALANKLARIAWAVLHNGRAFEYVKTNATAS

SEQ ID NO: 88548 - protein, 373 aa, unidentified
MKKRSSSRQNPKSAVKAKRAKQSVTIGMDLGDKTSCYCLLSEQGEILREGQVATTKAGMTGTFGRMGRARIAIEVGTHSPWVSRLLRSFGHELIVANPRQVKLITESSRKDDRLDAQTLARLARIDPQLLRPIQHRTEKAQMALTVIRVRAALIAVRTSLVNTARGLAKTLGERLPKCDADQMGVPQAASLPAKLQQVLEPLLKEVESITEKIKDSDREIEQIARKDYPETALLQQVGGVGSLIALTFVLTVDDKDRFQKSRDIGCYVGLRPRRSDSGQRQPQLRITKEGDPYLRTMLVQGAHYIISRRGPDTDLKRWGLHLAERGGKRGKKKAVVAVARKLGILLHRLWVTAEVYEPLRNHHLRQAEKEAAA

SEQ ID NO: 88549 - protein, 364 aa, unidentified
MVVIGVDAHKRTHTLAVVDEVGRELANRTFPATPDGHRVALGWARTWPERMFALEDCRHLTRRLEADLIRAGERVVRVPARLMATSRRTGRELGKSDPIDALAVARAALREPGLPVARLDGEARKLRLLVDHREDMVGERTRMQSRLRWHVHEIFPGLEIAPKSLGRLHVIATVDRRLRQVEGTVAAIARELLGRIGDLTMRINELEREITQLVRPLAPNLLAMPGCGPLCAAKILGEVAGAARFRSRAAFARWNGTAPIPVWSGNDTRHRLNRRGTARSTRRCTTSRSPRHRLNRGGTARSTRRCTTSRSPSGAGWEPVEPTSSIALVLAAPRPRPCVSFVAGSPTRCSVASSQTRHSPGAHR

SEQ ID NO: 88550 - protein, 403 aa, unidentified
MNNVAGIDVSKGKSMVSVLRPFGEVVAKPFSIGHTGSELKELADYLKSLDGETRVVMEHTGRYYEPVARFLHDEGVFVSAVNPKLIKDYGNNTLRKVKTDKADSRKIARYGIDNWAELRQHTPMDTIRMQLKTLNRQQSLYTKTKTMMKNNLIALLDQTYPGVNALFDSPVREDGSQKWVDFATTFWHVDCVRNMSLTAFAERYRKWCKRHGYNFSQSKAVEVHAGAQDLIAMLPRDALTKTMVRQAIDALNAISASLERLKAEMQALAAQLPEYPVVMAMHGVGDSLGPQLMAELGDVTRFTHRNAITAFAGVDPGADQSGTHEAKSTRVSKSGAPELRRALFLVMDCLLKTQPQDDPVYRFMDKKRAEGKPYLVYMTAGANKFLRIYYGRVKEYLAQLENS

SEQ ID NO: 88551 - protein, 355 aa, unidentified
MTVTIVEETRPVTCRTAITGGVDTHADTHVAAALDPVGGLLGVREFPATAAGYARLLGWLGGFGTVALVGIEGTGSYGAGLARYVTASGVRVVEVDRSDRQDRRRQGKSDHLDAVSAARAAQSGRARGAPKGRDGAVEAIRTLMVARRSAAGERTRTINQARALVLTGPDDLRARFARHKPAALITGLAALRPRPGDVAGHATRIALRELGRRAQFLDGQLERLDELIVPLVTARAPGLLAVYGAGPRTAALLLIAAGDHPERLRSEAAWAHLCGAAPIPASSGKVTRHRLNPGGDRQANHALWRIVFTRLGSDPATRAYAERRTAEGKSKAEIIRCLKRYVAREVYRHLRPAAG

SEQ ID NO: 88552 - protein, 377 aa, unidentified
MHSENIAVYIGLDVHKETLAVAIAAPERLGEVRYYGTINNEAQAVRRLFQKLQGLYGNILSCYEAGPCGFGLYHQLTAMNIKCQVIAPSRIPKSPTDRIKNDHRDAISLARLLRAGELTPVWIPDLTHEAMRDLIRARAAAKRDSRVARQRILSMLLRTDKRYAGKHWTGKHRTWLANQSFSQPSQQIAFQHYCQSLEQIEDRILQLDQEISRLLPEWSLCNLVCQLQALKGVGQLIAITLVAELGDFSRFSNPKQLMAFLGLVPGEYSSGNSIRPRGITKVGNSELRRLLYEAAWSYRTPAKVGAWLIYYRPDSVTQYSKDIAWKAQQRLCSRYRTLTAKGKKSQVAITAVARELTGFMWDIALAAQSSFSQQKQN

SEQ ID NO: 88553 - protein, 338 aa, unidentified
MGTISTIGLDLAKNVFQVHGIDSLGNILVRRRLRRGEVLRFFETLPPCLVGMEACGTSHYWARAIAAFGHTVKMMPPIYVKPYVKRGKTDAADAEAICEAVTRPTMRFVPVKSPDQQAALLQHKTRDLLVRQRTMQVNALRGHLAEFGIISASGVAGLNQMIALLHAEQEVLPEPARSLFQDIVAHLRTLEQRIDVIEKQIVAAHRANSVSRGLTGIPGIGPITASAIVAAVPDASNFRSGRQFAAWLGLTPKNQSSGGKERQVGISKQGDSYLRRLLVLGATAVIRLARKESASRQWAAKLLEKKAARVVSVALANKTARIVWALLTTGNEYSARSA

SEQ ID NO: 88554 - protein, 369 aa, unidentified
MAEAREAFIGIDAAKLRNAVAIADAGREGEVRFLGEVDASPEGMRRLAARLAAKYDRLHFCYEAGPTGYGLHRLLTDLGHHCTVVAPSLIPRKPGDRVKTNRRDALTLARLLRAGELTAVWVPDPAHEAIRGLVRARAAAAKEVGIKKRQVGAFLLRHSRLFPRKKAWGARYRRWLQEQGFEHPADQIVPQELVDGVRVAEERLARLGRAIEEFLPTWSLAPIVEALQALRGVDLVTAATFVVEVGDVRRFESPRRLMAYLGLVPGERSTGETVRRGSITKMGDARVRHLLVESAWTYRHPPRIGARKLPKLERVSPRIREIAWKAQSRLTARYRAFVARGKKTTVTCTAIARELAAFMWAVAREVRPA

SEQ ID NO: 88555 - protein, 373 aa, unidentified
MPKYSTAFGMDVHLRSTTVCALDADTGEAVTRRFPGNPWGEIAGWMDGFPGPSLAAYESGYLGFAPQRELAGLGVECVVAAVSKIPRSAADSASKNDRNDAARMAKAILAHDISPVWVPSPEVEGIRDLAGAYDGATARLATAKQRLLAFLAKRGFVYGGTTPAGNPRKYWTYDFLRWLDKVRPEDDGGVRTLAALRNEVEAAAEARADLLSEYGAAVDASPIAAEVAALQSIKGCAFALAAAFSAEVGDFTRFRSGRQVTAYFGLAPSQRSSGDSVRLGGISGAGNALVRKLAVEGSWCYAAARHQPKLMPRDTGVPLEIRMHGRKGSERLLRRREEMLGRGVPAAKANAATAAELVRWLWALGMMCREGAE

SEQ ID NO: 88556 - protein, 375 aa, unidentified
MSKVRFLGLDVHADTISVAVAEPNGEVRSYGVIPNRLEAIRRMVKKLGPRGELRACYEAGPTGYVLYWQLSSLGVRCEVIAPTLIPVKAGDRVKTDRRDAERLARSYRAGDLTAVWVPDADHEALRDLMRAREDARQDQLRARHRLGKFLLRHGQRPPESVKKNWTQKYMQWIHSQVHFDQPALEATLLDYVHEVDHAVERIQRLEKAIDEAVQAAPPAMQAVIEALQALRGVAQITAVSIVSELGSLSRFSNPRQLMGYSGLVSSERSSGNRIQRGSITKTGNAHLRRVIVEAAWAYQFRPWIGGYLLKRQQGLDQVIKDIAWKAQGRLHTRYKKLAARGKNKPQIVTAIGRELLGFIWAIAVQTEFKHQSKAA

SEQ ID NO: 88557 - protein, 419 aa, unidentified
MSFKILKNNCCGLDVHKTWIFACIGITDSNKRTVYKQARFSSFTKGLQELCHWLAKYDCTDVCMESTGKYWIPVFNILEKNNIWVTLSHPKYTKPQKDNKTDRKDAKWICDLYMCGMVKPSFIPPVDIRELRDLVRYRFKLTCMITGEKNRAHNCLTVSNLKLDDVFSDIFGRSSRSITEQILQHPGETFDVAPFVHGRCKTPIEEIQAAVDGAVSKEQAVKLRQCLNHIDELEMHKSEIEREIFRLSDKYEDILTLIRTVPGFDKNPMTAIQVLSEIGGDMSVFPTAKNLVSWAGCCPHNDQSNHKIKSTRISRAGSYFKPVLVQVANALIKSKKHPEFSTRYRRIKARRGHKKAIIAICRMILTAIWHILTDLKPYTAKGFLEPRPVSKEKVLTASQALNLLKQRGYVIKDEPIFIS

SEQ ID NO: 88558 - protein, 355 aa, unidentified
MTASYDYHIGVDYHKSYSHLVVQDSSGKTLRSGRVKNDRQSLGGFLERYRENSHAVVEATRNWMVMYDWLDDICDDVVLAHPLKVKAIADAKIKTDKIDATVLTHLLRADLVPEAWAPGERARELRVALRERMFYLRLRTMTKNRIVTVFDRYPEQTAQLKKLGDLFGKAGRAQLAQVKVSEIDRIQIDRGLAFIGDIDGRIKQSEATIRAMTKANTNVKLLKTIPGIGEFFARLIDAEIDDIKRFRNAKKLAAYAGLVPSTYSSGGKTFHGKIIRQGNKWLRWAFVEAVAPALASDPQLRAQYEHLKSRGVNKARVAIARKLLTIAFQILRDQRPYERRGGRSEDCASTISRLS

SEQ ID NO: 88559 - protein, 345 aa, unidentified
MSYYAGLDVSLEETAICIVDETGAIVRELRAPSDPGSLISAFDAVGLPMERIGLEACSQSAWLHQGLTRAGLPALCIETRHAKGAMSAMPNKTDRNDARGLAQIIRTGWYRQVHVKSAPSRMARSLLVARRTVLCKLRDMENAVRAVLRESGLKVGSPGRKRFSARVRELAEADPTLTDITEPLLAIIATMYRELERLTRRVLESVRVEPICRQLMTIPGVGPLTALAFRATVDQPERFRRSRDVGAHLGLTPRRYQSGETDIQGRVSRCGDELARTLLYEAAHTLLTRCKKWSALKAWGMNIAKRRGMAKARVAVARKLAVIMHRMWSDQSEFRWGKAPASLAA

SEQ ID NO: 88560 - protein, 354 aa, unidentified
MSPEKYIGMDVHQATISVAVMDAGGKLIMECLLETKAATIVEFIRGLHGTLSLTFEEGTSAAWLHDLLKPHVSRLVVCDPRKNALLKDGNKSDRIDARKLAELLRGNQLHPVYHGEHGVRTLKELGRSYLTITQYVTRVMNRIKALYRSWAIPCAGTTVYAPRHRAEWLAKIAEPGVRVRAERLYQQLDLLQVRLEARRELLAESHKHPAVKLLRQIPSIGPIRSALLVALLQTPHRFRTKRQLWAYSGFAVETHDSGEYRSVRGKLQRNRERMTVRGLNDNHNRDLKNLFKSAAISASIRPGPLRDFYVARVEKGMRPTMARLTLARKMAAISLTIWKKGVEFDPQQLQRQTA

SEQ ID NO: 88561 - protein, 351 aa, unidentified
MFIIGVDYHPSFQQIAFLNQETGECGEQRLDHSDGQVEKFYRGLQSQGVHARVGIEATGYARWFERLLAELGIELWIGDAAEIRTLRVRKQKTDRHDAQLLLKLLLEDRFPRVWIPNPENRDLRQLLWHRHRLVQMRTRILNQLQAVAMNEGQRWKKRLWNKQGRALLQNLPLTPWASRRRQDLSELLDRFNPVIAELTTAVEREANKRPEVVRLMTHPGVGPLTALAFVLIIGDPFRFARGKQIGSYVGLVPCENSSAGRQRLGHISKQGNKLLRFLLVEAAQVAVRFDPDWRRRYLHLAMRRDRRIAKVAMGRKLAVRLFWMWRKGWDYSQLVEFGSHAGQLEANPGGQ

SEQ ID NO: 88562 - protein, 353 aa, unidentified
MLGLRDESKPRRCPMELYSAIDLHSNNSHVAIIDEQHNRIFYRKLGNDAKLIGNTFAPYRKELKGIVIESTYNWYWLADFLKEEGYSVHLANPCGIQKYSGLKHADDKHDAFWLAQMLALKILPEGYIYPKADRPLRDLLRKRAHFVQVRTSLLLSLQNIVMRNCGVKVRANHLKMLTQDPVAGLLKDQEELALAGKASKETIDFLTRQIQRIEKAVQSKAILKEPFSKLLTLPGVGDILGMTILLETGPIERFKDVGHYASYCRKVSSRWSSNEKTKGKGNTKNGNRYLSWAFSEASDHARLTHEPSRNFYNRKLNQTNACVAHSALAHKLARAAYFIMRDQVVFKEDKMFR

SEQ ID NO: 88563 - protein, 383 aa, unidentified
MRRNATVTHMGLDIHRNFTQASACDQQGQLLWRARLQHADRQALRQELAQWPKVPVVLESSFGWGWLSDELLLAGQEPHLASSRKMAGWRKAQGIAKCNRTDADLLADLWTEKKKWWEVWRAPAEVRDRREWLRYRMGLVRIQTETKNRIHATLHRHGIVNPHSDLFGVAGRRWLSLLISEPASESLLRETGRQTLKGHLVLLDQLRKHIAQATRQLRRQIKDSPVARRLMSLPGISWILAYTIIAEVGRIDRFCGGRKLCAYSLLVPLADESGDEIDAPPLGRRIGHAGRLTLKWAWIEAAHGAVRRPGRFKAIFDRRSDNGKRDRGRSYIAVAHDLCRIAWSLWKNDVDYSDCPPPRPGSRSDTSRPGTDQPQNPMVPALA

SEQ ID NO: 88564 - protein, 391 aa, unidentified
MIFVGIDVAKDKHDCFILNSEGTVLADVFTIANNRIGFETLLSRIQSCSQGESKIKVGLEATGHYSYNLLGFLLDSGLATYVINPLHTNLYRKSLSLRRTKTDRIDARTIAMMLMSDVDLKSYSNTAYHNEELKSLTRYRFDKVKERAKLKSSVARLVNILFPELEKLVSSLHIAVVYALLSNYPGASYIANANTEELAETLCTASKGRYTKSKTAEIQVAAGVSIGSKMPAKSIELKHTIALIRELDKEISEVESAIDKITSQMDSPIFTIPGIGRHMGAMILAEVGDFSNFASADKLLAYAGLSPSTYQSGQLQNCYAHMEKRGSRYLRYALFNAAKYVCLWCPTFSAYLEKKRSEGKHYNVAISHAAKKLVRLIFAMQRSGKAFLADY

SEQ ID NO: 88565 - protein, 415 aa, unidentified
MKDWNQIPFFAALDWARQHHDIVVVDSAGRITESFRFAHSAEGWQQLRARLERFGPELPIAVETSLGSAVDQLLAASLQVFPVNPKQAERFRERKAPSGVKDDFLDAWSLADALRTDGQHWRQLLPQDPLCAELRLLCRDEVCLIEERTALVNQLIQCLHDYYPAALEAFDDFTQPYTWAFVTRFPTPKLLKQAGKRGWERFLHMHKLWRPETAEKRLEIFARADVFCASAVTIAAKSLMACSLAKLLLALENQIEQFRKRIRELFNQHPDHDLFGSLPGSGPKIGPRLLSEIGSNREIFTTPESLQSFAGTAPRCLQSGKFREVKIRQACNKSLRSALHYFADQSRTRCIWASVYYQQHRLKGHGHADTLRRLAQRWLKIIWKMWQTHTDYNEALHIQNQVSHGSWFVSFKPET

SEQ ID NO: 88566 - protein, 328 aa, unidentified
MSKSSFYIGIDVGASELVAALVGRKPRCFKHSRTGIKAMVKWAKKIALETPLHFCLEATGVYGYSVACCLHQEHHISVSVINPAQIASYGKAQLRRTKTDNVDAQIILSFAQSQNPPLWKPESSTIRQLYYLVVESSRIRKALGQWGNRKHGQNYLKDIPKVIKQAQKALDRTMHRQLEKIEQAIVELCCQNEELKQDVELLCSIPGISNHSAVRVLAYGKNTLRDYNRNALTAHAGLAPAQRQSGTSIHGKARIAKQGDRRLRTTLFMPALVAAYNNPILKTFYQKLLKKGKPKMLALVAVMKKLLLMIQAILKNKIPFNPKYQLDR

SEQ ID NO: 88567 - protein, 452 aa, unidentified
MEILHSQCAGLDVHKKTVRVCLLIRRENGQESKEFRTYGTTTRELLSLLDWLKEQGCTHVAMEGTGVYWKPVFNLLEGSFELLVVNAHHIKVVPGRKTDTKDAEWIATLLQHGLLKASFIPSAPQRELRDLTRYRVRLTEERSREVNRVQKTLEDTNLKLGDVVSDVMGKASRIILGAIAEGETDAVRLASFAVGRVRADQHQLEAALTGHVDEHHRFLLKEHLTQIEHLEHAIERVTAEIARRFTPPPSPEEAEPTQKEGEVREAALEDSPQNGEASPSRDPADLSWAEAVVLLCSIPGISERAASGILAEIGIRMQQFPTAGHLASWAGVCPGNNESAGKRLSGKTRKGNPWLRRLLIQAAHAATHQKSGYLVALYRRIAARRGAKRAVMAVAHSILVIIYHLLSEGTTYEERGEVFFEERDREVSERRLVNQLTRLGYHVELQPIAQAG

SEQ ID NO: 88568 - protein, 343 aa, unidentified
MEYGAIDLHTKESEIRIVEAEGRVVLERRIATSRERLTAVFGGRAPMRVLLESGTGSEWVAQHLEALGHAVVVADPNYAPMYGHRQRRIKTDRRDVAALAEANRLGVYRAAHRVSVPQRDVRRRLRVREQLVHVRRQAINLLRAQLRSEGVRVPTGAAATFRARFTASAASAAVRDAMAPLLELLAAIAPLIAQAERWARDAALADPVARRLMTAPGVGPVVALAFQATVDDVGRFATPGAVTAYLGLVPREHSSGERQRKGAITKAGPSRMRVLLVQSAWHLWRSPTGSATLHAWARRLGERRGRRIAVVALARRLARILWAMWRDGRDFEPARVGRLAVAA

SEQ ID NO: 88569 - protein, 438 aa, unidentified
MERGWEIAVYRKSAAHRISMSNGKRKVCGIDVHKGFLVATILDRDGTCETRRIPQNIESLLAFRDWIRSENCDSVAFESTADYWRSLYLVLEGHVPVTVANAYHIKHVPGRKTDVTDSRWIAQLELNSLIEPSRIFSGEKYDLRSLTRSRELLVQNRTELKNKIHHLLDSASIRLSSVLSDLFGKSGMIILNGLVQNEPLEEIIKSLPKKMRGSVDIISSTVPASIPQVTLVLLQSYLKLVEDLDQEIKLLEGRIRESLASKSREIQILTSIPGIGFIGASTLIAEIGNVRDFKDADKLTKWAGLTPSVYQSANVTRTGSITKQGSRHIRWILVELAHVAIRSPGRLKSFFERLMPKKGYKKSIIAVARKMLRIVWHLLVYDEVFIDVVPRSKQVKMPKLPKKIQVVGLNRIIELLSKASEVIIKDRNQEIFRIGLSE

SEQ ID NO: 88570 - protein, 370 aa, unidentified
MRDGSTLYVGLDVHKDSIAVAYASTEGPTDPMHVGAIGTRQCDIDALVRKMHSKSAQLVFIYEAGPCGYWLYRYLTRKGLTCFVVAPSLIPRKPGDRVKTDQRDAVTLARLARSGDLTAIYVPDVPDEAIRDLARAREDALHDLNAARFRLKALLLRNDIRYVGRANWAADHIRWLARLVLPTPAQQIVFQEYVRTITERTELLQRLEAELLAQAKPWRLYPVVEALQALRGVQFTVAITAIAELGDLTRFDNPRQLMSYLGLTPSEYTSGDRRRLGGITKAGNSHARRVLIEAAKAYRHRAKVSEQIQARQQHLPTSIRDIAWRAQVRLCGRYRKLRARGKHPNTIAAAVARELAAFMWAIARTQPASA

SEQ ID NO: 88571 - protein, 318 aa, unidentified
MMQAQAGVIGIDVSKGHLDIAHSEDPAAAARYPNSSAGIDELVRALCLNPPLLVVAEATGGYEIALVRALQGAQVPIAIVNPRQVRDLARARGKLAKTDAIDAQAIALFGAVMQPRPLPPPVPGRAALGALVARRRQLIDMMIAEKNRLEHAEGVIKTWIEESLTAFKGQLAGVDAAIAVALEADAELAKRRDILVSVPGIANLTAAVILAELPELGHIGSKQVAALVGVAPINRDSGLHRGERHIGGGRPSVRCALYMATLSAVRHEPTIKAFHHRLRQAGKKPKVALVAAMRKLVSLLNILLQRNQLWQHPQLHGC

SEQ ID NO: 88572 - protein, 344 aa, unidentified
MTYYAALDVSLRSVAVCIIDDQGKYHFERKIPSEVEDIVQCLKAFDGEIDRIGFEAGMLTQYLHYGLTAAGFEVVCLETHHVKESLKAMRNKTDKNDARGIAQLLRTGWYQAVHVKSLQSHEIRALLSSRRVILRKCVDLENELRGLLRIFGTKLPSRLAHGIFEDEVRAPIEADPALRRALLPMLELRGMLYQAFLKLDTQVRAMAREDAVCQRLMSAPGVGPVTALTFKAAVDDPTRFKNSRNVAAHFGLTPKREQSGEVDYDGRISRKGDTQVRCALFLAAHAVLTREKQWSSLKAWGVKLAKTKGHRKATIAVARKLAVILHRMWIDDTDFRWRSEDRAA

SEQ ID NO: 88573 - protein, 394 aa, unidentified
MIFVGIDVAKDKHDCFIVNSEGEVLYDVFTIQNNITGFEDLLFKIKTAEQNPDKVRVGLEATGHYSCNILGFLKNVGMQTIVINPLYTSLSRKSMTLRKTKTDKVDARTIANMIMSDVSLKPYTDKLYHNEDLKSLTRYRFDKVSQRAKLKQSVSRLVNILFPELEKLVSTLHGKAVYALLSEFPSAQHIASANLKHLTHLLDKASKGRFKRASADKIRETARHSIGSYLPAKSLELKHTIKLIHELDDEIAEIEVEIKKIMDAIDSPILSIPGIGLNLGAIIIAEIGDFSRFDSPDKILAFAGCSPSTYQSGQIYSSHAKMEKRGSRYLRWALLNAAAYVCNWEPTFRAYLSKKRAEGKHYYVALSHAAKKLVRLLYHLETTGETYQAEKLSS

SEQ ID NO: 88574 - protein, 339 aa, unidentified
MFYSGIDQHKRDSFITTYGSHGEVVNQKRVPNSPMLIQRYFSQLPGPHKAVVESTGSWYWLADLLEAQGVELTLAHATKLKAISEAKVKTNKIDSAVLAMLLYADIIPEAHMIRPEMRGPRDLMRTRLRLVEKSVSCKNSIERLLEKFNVHNVTELDELYRLQAACHEAQIELLQDQIKTLEAALHPFLIPNADIQRLLSIPGIGKVNAFTLYTEIDGIERFPSDQQFFSYCRLVPGAANTGTRTRHRSGSKQGNRYLKLAFGHAAVRAIQYYPEIRAFYRTKRRKKPERIARTLVALEIARIVYHVLSKQEEFNGLFKGQRLSRTKQSRWPRLASPSA

SEQ ID NO: 88575 - protein, 352 aa, unidentified
MESTGKSVITLTGIDLAKEVVEVRCEDAESNKIKGQSLKRENLIPFLQKLPKGSTVVMEACGSANHYARECQNLGLIARLIAPQHVKRFRIGQKNDKNDATAICLTARQKGVPSVSIKSAEQLEMQRQHRMREKITRDRTATINQIHGFVYDQGLILKKGGSNFKARVEEIVTKLGEDSDFGVTLKLLLEQFEQFTKWLGVLTKKIYQAVKTSEPVKKIMELSGIGPIVGSALVAHIGDPSSFKNGRCFAASLGLVARQHSTGGKPMLGGITKSGDSYIRKQLIHGARSAVRAAMLKTTSKDPHILWIQQLQARAGTNRTAVAVANKTARCAWAILAGKQPFVQPLPKPVAQ

SEQ ID NO: 88576 - protein, 370 aa, unidentified
MDKPITYIGLDVHKDTIAVALGEAGKRGEVREHGKIANTPAALKVLAAKLAHHGERELQFCYEAGPCGYGIQRQLTAAGHGCVVVAPSLIPRKPGERIKTDRRDAVNLAKLHRAGELTPVWVPDQGHEAIRDLVRARLAAVRTLRQARQQLSGFLLRHGRHYARPAWTLMHRRWLAGLSFEQPVHHIVLEDCIAAVEAATARRDRLEAHIEAALADWSLAPVVHAMQALRGMALVAAATLVAELGDISRFANPRQLMAYVGLVPSEHSSGASRRQGGITKAGNGAARRMLIEAAWSYRFPARISREQLLRQESLPKPIRDTAWKAQERLCRRYRKLARAGKLPGVVTAAIARELAGFVWAIAKQAQPIGT

SEQ ID NO: 88577 - protein, 352 aa, unidentified
MPMLADLIDAVVGADTHRDTHQLEIAHPTGAPIDVRSISNDTCGFTEAVGWIAEHAPGPRVVVAIEGTRSYGAALTRALTEAGLTVIECEQPTRRARRGQGKSDAIDAHLAVLAALRLDAAKLPTPRADGDREALRVLLCARDELTTTGTGQTNRLKALLRDGDDTDRALARGKLTDITLNRLARRRPPREATRAQAVRQTEIRRLAVALRDQRRELKHNRAQLQAIVNDLAPGLTDHDGIGPVCAAQVIVSFSHPGRCRSEAAFAALGGTSPIEASSGRTTRHRLNRGGDRALNKAIHTIARTRMRDCPATQAYVTRRFAEGKNEAEIRRCLKRYIARQLHRFLTTAMAPA

SEQ ID NO: 88578 - protein, 331 aa, unidentified
MQSADVTPSAYLGMDVAKEKVDCVLLVDAHSSYQVFANTPAGFEHLGDWLRREQVSSVHACLEATGSYAETLARTLLAQGHTVSVLNPAVLVTYRQSRNTRSKTDKLDAMLLAYYARERQPRAWHPLPDEVTALRSLLAYRNDVQQTLLQVRNRQRSGGLEPWVAGRLQTQIEQLVKEFKLVEQRIWKHLETSATLSVTWSHLQTICGIGQLAAAHVIAQIGEIERFDHPAALVSLAGLAVKQRESGSSLRGRGPMDRHGRSSLRRLLYMCALVAMRWDPHMRAWAQRLKARGKPNKVVLVAVMRKLLHIIYGVWKHAKDYDAQLAFPVMA

SEQ ID NO: 88579 - protein, 315 aa, unidentified
MTSVRIYVGVDVAKDWLDVAQRPEEATWRVSNDDGGVAALVERLVQLRPALIVLEATGGIEMPLVGALVGAHLPTVVVNPRQARQFARATGRLAKTDVLDAQVLAQFGEAVKPEIRSLPDAATQQLSALLLRRRQLVDMLTAEKNRLRTAAPSVRPDIQGHIRWLERRLSELDGQLAQTIRSSPSWRERDNLLKSTPGVGPVLSVTLLAELPELGTLDRKEIAALVGVAPLNWDSGHFRGKRSVWGGRSKVRAALYMAALVAARHNPVIQAFYQRLVAAGKPKKVALTACMRKLLTILNAMIRHQTPWSLDHHAS

SEQ ID NO: 88580 - protein, 359 aa, unidentified
MRGQRNEISFRGQKIYIGIDVHLKSWSVTVLSETSVLKKFSQHPSPEALHGFLARSYPGAEYHSVYEAGFCGFWIHERLTALGIDNIVVNPGDVPTKSSEKLRKSDAVDSSKLARSLRANELKGIYTPDSASLEMRSLIRLKNSITKDTTRQKNRIKSQLRYLGIGIPQEFLEPFSNWSKRFIAWLKEVETLTPSGRQALDIQIRHLEELRRQKLEMTRALRTLAKTDRFREPLRLIMTVPGFGQATGMAFLSEICDIARFRNAEQLAAYIGMIPMCHSSGEKDGTGDITVRRNAVMRCNLIEAAWVAVRQDPAMNLFFTEQCKRMPKSKAIVKVARKLVNRLYFVLKHQTEYVNSIAS

SEQ ID NO: 88581 - protein, 425 aa, unidentified
MQFKWNEKINQVTENTLVVGMDIAKRVHYACFVDERGRVIEKAFAVHQSKEGFEHLYEKIRQIMKEAKKTEVIVGIEPTGHYWMNLANFLDNYGIPLVMVNPMHVKRSKELDDNLPTKNDKKDALVIARLLKDGRFSYPRLLKEVEAELRIGSTLRSKLTEDLASIKNRIIRWLDRYFPEFTQAFPAFGKMALATLEMTPLPQDIDGKSAEELVFLYRKVKGMRAPQLPKAKLLIEAATNSIGLTEGTQMARHEIATLLRQYRLLENEIESVNSQLSEMAQTTMEYELLASVPGLGDATIVDLLSEVGSFSLYENPRQLIKLAGLTLRENSSGQHKGQKHISKRGRKRLRYILFKVIVPLIRHNEGFKQLHEYYTTRQQNPLRGKQSMVVLCGKLLKVLHGICKKKVHFNEQNMMKDLYCLSEAA

SEQ ID NO: 88582 - protein, 419 aa, unidentified
MKQKSINKKISRITQDTLIVGIDVAKRTHWIRMMDFRGIDLIKPFKINNTMDGIKMLEEKIKSVKEENKLNKVVLGMEPSGHYWKVLAWQMKISKEIDYLVGVNPYHVKKSKEFDDNSPGKSDRKDAGVIARLIRDGRYFDIYLPEDIYGELRVITTTREQLVNKRKNAKNMVISVMDEYFPEYEKIYKNIFSEGSIKLLKTHPFPKEIIEVGIEEIEKVLKKSTNGKDWKSRAQKIYESAKKSIGVREGQKSAKIKLRMLLEEIEFLTSQIEELEKEMEKLVEETEEGEYIKSVPGIGAIMTAIILGEIGDINRFKSWKEIRKLAGLNLYEVSSGEHKGKTRITKRGRPLLRKIIYLMAQTTLKHNHEIRKKYEQLRRREKNPLKAVQALIAIGLKMIRIVFKLAKSKIKYEPEKVYV

SEQ ID NO: 88583 - protein, 309 aa, unidentified
MEHFIGIDVAKDRLDLHTRPGGEVFAVARDSNGLAMLVERLQRLAPALVALEATGGYETVVASALGAAQLPLAVVNPRQIRDFARATGKLAKTDRIDAAAIAHFAEAVRPPARPLADAEARALGELVARRRQVIEMIIAERHRRRMASQRRVIRAIERHLALLQAELSELEGDIDDAIRKSPAWQADADLLVSVPGVGKVTLRTLIAELPELGHLNRRKIAALVGVAPINRDSGTLRGRRTIAGGRPAVRTALYMAALVASRANPVIAAYYAKLRAAGKTGKQALVACMRRLVVILNAILRDRKPWQPA

SEQ ID NO: 88584 - protein, 336 aa, unidentified
MEHVAIDLGGRESQICVRREDGAIVEERRWATVNLGQFLSRRPKSRVVLETCAEGFAVADVALELGHEVRVVPGTLVRSLGVGARGVKTDRRDAQVLSEVSCRIDLPSVHIPSALSRRRKSFCGMREALVGARTQIINTVHGWMRTQGRGTVRSGTAETLPARVRKHWGEELPGYVARQLKVVEELNVHIAEADAELEKLAEKDEECRRLMTVPGVGPLTAIRFVAAVDEVGRFDGAHKVEAYLGLVPGEHSSSDRQHRTSITKAGPGALRRALVQGAWAARRTRGDHPMVAWSMEVEKRRGRRVAVLALARKMAGIMYALLRDGGSYEAKRGAMT

SEQ ID NO: 88585 - protein, 341 aa, unidentified
MEIDILGIDLAKQVFQLHGADRHGQPVHRAKVSRGSLLETVRALQPGMVVMEACSTAHHWARRFQSLGIEVRLISPQYVTPFVKTNKNDRNDAEAIVEAASRPAMRFVTVKSIEQQDIQAAHRMRAILLRHRTAMINQMRGLLGERGLTISRSPEAFKRAIPELLSKSADELTSFCQTLLTELLQHLHAIEERIHLIETSIQSFMKQSTLCKKIAQVPGIGPITATAVVAAVGDAKQFRNGRHLAAWLGLVPRQYSSGGKSRLHGISRRGDTYLRTLLIHGARAVLRYAVAKTDPQSRWLQQLIARRGHNCAAVALANKNARVIQVLLSSDTIYTARNAAA

SEQ ID NO: 88586 - protein, 360 aa, unidentified
MNNHKYVGLDTDQATIIARVEDAKGNFIMEAAIETSASSIRQFFKGLDGTIHVAFEEGTQAAWFYDVIRPLVADVTVCDGRRNKLIQSGNKGDRIDAAKLTRLLRLGELHAVYHGERSTRGLKELVHGYESLVTDTTRAKNRLKAVFRSQAIRCRGDLVYSRQERKQWLGKLEAAALNARASILYEQYDCLTKLRDKAHKAMTTEARTHPAYKRIKKVSGLGEVRTAQLIAVVGSPHRFRTKRQFWPYCGLAVVTRTSSEYEIVDGQRRRKRNKQAQTRGLNQNYNRTLKAVFKGAAATAIERPPFKQYRQRLIDKGIRPELALLTVARKIAAITLTIWKKGEEFDPERVNQAVPGTGNK

SEQ ID NO: 88587 - protein, 374 aa, unidentified
MSNLSEAFVAFDTSKLRNAVAIADAGRAGEIRFLGEIDNTAAATAKLVKKLAAKYERLTFCYEAGPTGYGLYRQISSLGHECTVAAPSLIPRKPGNRVKTNRRDALSLVKLLRAGELTAVWVPDRHHEAMRDLTRAREAAVMDLRSKRQQVSAFLLRQGLHYPCKNTWSKAHMSWLASQTLEYLEQRLAFEEMMLAVRQAQERLARLEQSIHAAVPDWSLSKAVTALRAMRGIDLISATTFLAEIGDLSRFQTPRELMAYLGLVPSEDSTGDKTKRGPITKAGNRRARRMLVECSWSYQHPPRVGRDKQEKVAAAPSAVREIAWKAQCRLHRRYRALTRRGKLKTVAITAVARELAGFIWAVSREITTVCAVGR

SEQ ID NO: 88588 - protein, 410 aa, unidentified
MRRVIGIDVHRTFGEVVFWEDGRLRPAGRIDMTRTALEGFGKSLLASDEVVIEATANSMAVSRVLSPFVARVIIANPLQVKAIAQAHVKTDKIDAGTLASLQAAGYLPQIWTPDATTERKRRLAARRYQVVRHRTRIKNEVHSILHAHLIPKCPHADLFNGRGRAWLAAQPLPDDERAAIDRHVRELDRLAEDLALLDREIAQDAIDDPAANRLMTITGVNLTVAAGIVAAIGDIGRFKNPQKLVSYFGLNPRVRQSGLGAAHHGRISKIGRSHARAMLVEAAWAAAKAPGPLHSFFVRIRAKRGHQIAAVAVARKLTVLCWHLLTKGEDYLWARPALVAAKTRAMQLQAGHPQQKGSRRGPAYAYNIKALRDREMTIAAQAEQSYERFVAQWKPRRPKTGARTPQLGKT

SEQ ID NO: 88589 - protein, 330 aa, unidentified
MTQEYIGVDLHKAFFCACAMGPTGDRRWEGRFARTAEGVARFVARGIGPAQAVAVEASGPTWAFVDALQPTGARVCVVDPRKTKLKAGFAAKTDRLDARRLADALRRESVVSIYIPPPAIRDVREVCRGRHQLVRLRTRVAQMIRALLLRWDAGEPPGTRLYAPPARAWLAAAQLPPDADRTLRRLERLYHAIHEDAQVADAEVRRRSADDAIAVALTELVGIGPVLALTIRAEIGDIARFTRGAALACYAGLVPRVESSADRVYRGRITREGSPWLRWALIDMARHAIKRPDAVGRWARRLAVRKGLYKARVALARVLCDQVVRTWPTV

SEQ ID NO: 88590 - protein, 414 aa, unidentified
MTKIIRIGMDTSKSVFVLHGVDAAEQPVLRRKLRRRQVLEFFAKLAPTKVGLEACGAAHYWARELRALGHEVVLVPPQYVKPYVKRNKNDAADAEAICEAMSRPTMRFVPVKTAEQQAALMLAGTRDALIRRRTQLSNTIRGYAAEFGLTAAKGLDKIEPLLARIAEAALPELAKEMFVTYAREYARLKVEIVKIEAKLMAWHKDNELSRRLEEVPGIGPIGASLAAMKVPDPHAFRCGRDFSAWLGLTPKDHSTAGKTRLGVITRAGDEALRRVLVVGATAVIQKVKQGKGQPSPWLVELLRRKPPKLAAIALANKNARIIWKLMVSGERYNPARAIAARGEGMEVPSCPSVTPCSPPSRTLRAAAGGGPTGPSLTAAALGATGPRQVGTEKRPPGRTKKLKPVQVSATIASH

SEQ ID NO: 88591 - protein, 435 aa, unidentified
MEEVEDEPLFCDRVAGIDIGKATVMVTIRVPSDARKGGRQQETREFGTTRRELLALADWLRCWQVEKAGMESTSDYWKPVYFLLEREGFDCTLYQASQVKALPGRPKTDKLDSAWLAKVTERGSLAGSFVPPEEIRRLRTHTRYRRKLVQMRTAQKERCEKLLEDAHLKLSSVISDIHGVSGRDMLRAVAAGERSPRVLAEMARGAMRRKTARLEEALDCSFFTEEHAFILTMMLDSIDQLTAQAEVLDEKIAAMCEPYERQVAQLDAIPGFGVTTAQDLIAEIGVDMSVFPTAGHLASWARQAPRVAESAGKRKGRNATGRGNPYIGGTLGEASVSVGRTQTFLGAKYRRLNTHMPKKKAQVAIMRTQLVIAHALLSDPAAEYQDLGPDYYERRADTRRRARGHARALELLGYKVTIEAPDPETGEYLPIATAS

SEQ ID NO: 88592 - protein, 345 aa, unidentified
MERYIGIDVHRDSSTICVLSAAGKRVRRDIVETNGLTLVSYIRKLSGTLHVCVEEGTWSEWLYEILSPHASELVVYQNVWTPGAKSDAIDAHGLAEKLRIGQAGPGVFKAPKRYRNLREWVRVYQALTQDTTRAKNRLKSLLQRRGVQCLGTSIYDPQQRDQWLEQLPAAMRLPAKLLGIELDCVAELKAEAEAALVKASHRVRISKILETAPGIGPIRAAVLIATVITPHRFRSKRQFWSYCGFAVVTRSSADWVPTKGGWIRVQAIRTRGLNRNHNPTLKAIFKGAALTAIHQTKTDHPLRVAYARLLDSGTRPPLARLTIARKIAATVLAMWKNEEVYKAVS

SEQ ID NO: 88593 - protein, 470 aa, unidentified
MAAVMIGVDPHKASHTAVAISVAEEPLGELRVRACAAQAERLLAWAAAWPQRIWAVEGAGGLGHLLARQLLAAGERVLDVPPKLGARVRLLAAGDTNKNDPDDARSVAVAALRSAGVREVRPDDHAAVLKIWSKRYRDLGRTRTQVVCRLHAVLCDLVPGGVSRPICAARAARILEQITPPDAVAAARCELAAAFLEDLRRIDAQIRETRKKLAAVVAATGTSLTGLFGVGPVIAAAVIGDVRDVSRFPGRNHFAAYDGTAPIEVSSGPRKIYRLSRRGNRRLNHAIHMAAVTQVSHRHSDGRAYYDKKLAEGKTRKEALRSLKRQVSNAIFACLQAGARRAAAHAKGPGGQQGNDSAACAAGSHPRHRLFGQATPGPGAHPTTPAASPAPGPASARGRAGHSSIAATLPSATPQVQVERPQRSEDERPGGAARRRPHSAARKAGGDGTLVKPQRPNGTSPAARKADHTP

SEQ ID NO: 88594 - protein, 344 aa, unidentified
MGEVSTIGLDIAKSVFQVHGVDAAGAVVIRKRISRAKMLEYFGEQPPCLVGIEACPSAHHWGRELQALGHTVRLIPPSYVKAYLKRGKNDANDAAAICEAVTRPSMRFVPIKTKDQQTALMLHRTRQLLVRQRTMLSNALRGHLAELGIVSAKGRNGTAELLRIIADGADSRVSPTVRGILDVLARQYGAIGTEIASIDKGIMVLHRGCEASRRLAEIPGIGPIGATALVAEIGDWNTFSSGRSLAAWIGLVPKQHTTGGKDRLGSITKQGNRYLRWLLVVGAMAVIRHARKHGTEKRPWLGRLMERRPTKVAAVALANKIARVAWAIMVRGERYKEPKLSLAA

SEQ ID NO: 88595 - protein, 318 aa, unidentified
MTDHRFATFIGFDVSGNTIAVFNGSNGQTGEIANTAAAIEAYAATLDAGCYCICENTGGHEAVLLSVLYARNIPVHRADAAKVKAFVQSFGTRGKTDALDARALAAYGRERHAGLTLWRLEDRNVMTLRQLVLRREELVTMRTAEKNRLKAPCTKQTPWLQETITVVLEALQTQISSLEARIAALLKDSEHLKQAQRILLSVPGIGKTLAPVILASLPELGTLSRRQVASLAGVAPHPKDSGKSKGYRRMNGGRPLIKRALFIAALTAARNKKSSLGAYYNRLIQNGKKPIKAIGALMRKIIVVLNAKMRDHYAQQLS

SEQ ID NO: 88596 - protein, 338 aa, unidentified
MLHSGIDLHKRTIAFSTVTADGQSVRDAQLPTTRAAVCSYFAALPGPHRAVVESTSNWYWLRDLLVGAGVDLRLGHSKYIKAISYAKVKTDAVDAATLAQLLRSDLIPEAHMVSAEWREARDLLRARLQLVGQQVRCKNTLAGLLAQYNVTAVEALPPLVQLRTTMLAEQQALLGTQAKQLAAALNPLLIPTPDVQRLLWIPGIGRLVAFTILLEVDGIARFPSARDFVSYCRLVPGAGNSGGKTRHKRTKDGNKYLKIAFSHAAIRAIQYFPEIRTFYRALARRKPPIVARAVVAKELARIVYYVLTKQEAFNGTFKGKPLSRTKSPKWPRLASPDV

SEQ ID NO: 88597 - protein, 354 aa, unidentified
MDEGENRQLVIGVDTHKDLHVAVALDALGVRLGQLLIPATTAGYAQLEQWGRGYGTPTAFGVEGTGSYGAGLTRFLRQRDYRVVEVNRPDRAARHRQGKTDPLDAEAAARAVLAGVATAVPKAGDGTVELIRVLKVARDTAVRARSQALITLKTLLVTAPADLREELAGLADTALLHRCAGLRPGAVTTPQAAAKHALRALAHRWLDLHREVHLHDGELDRLTQEQAPELRAAFGVGPDTAAELLIVVGDNPRRVHSEAAFAALCGVAPLPASSGQTTRHRLNRGGHRHANAALYRVVIVRMRWHPATLAYTKRRLAEGKTKPEIIRCLKRYVAREAFRHLLHRSGVDASPPAA

SEQ ID NO: 88598 - protein, 416 aa, unidentified
METKQRNGGDNIYNKRRMAFIGIDMHKDTHTAVVMDCWTNKLGEITFANRPSAYDKFMADVKSLYGELQPIFGLEDTRGFGRNFASYLLGHKYPVKHVNPAYTDAMRSSAPMSRKDDSYDAFCVARILRDMLDTLPDEQHDDLFWTIRQLVKRRDSLIKGIIIAKNQLNAQLTYVYSSYKQYFCDVDTKTAMYFWERYPHPKHLKDVQPEELLEELRQVHRGMTVKKVQEMIALSERNSPQDKDYQNERDLVIRSLVRELKFRKQENEDIDRELEKLIQLTGYKLHTMPGINLITAAGIISEIGNIERFPNSDKLARFSGVAPVNFSSAGKGKDQRSRQGNRALNAIFHFLAIQLVQVNPNGKARQPVFREYFESKLKEGKTKPQALVCITRRAVRIIYGMMRTKTEYKPFEKLAD

SEQ ID NO: 88599 - protein, 355 aa, unidentified
MTSTKYIGMDVHKESISIAVRNSAGKVVMESVIETKASMILQFIDGLRGDLQVTFEEGTSAAWLYDLLKPHVTKLVVCDPRKNKSMREGNQNDKIDARRLAELLRLDHLNPVYHGEHGLRTLKELVRSYLTITKDLARVKSRVKAIYRSWAIPCTGKQVYARRHRAEWIAKINELGVRRRAECYYQQLDALRVLRQGVRRDLLVESKKQKAWKRLCQIPSLGPIRAAVLLGILQTPHRFRTKRQLWAYGGLAIEMHSSADHRRVDGQLQRSRKNVLVRGLNRNSNHDLKNLFKGAAAVASSKPGPFEQFYTALVAKGMRPEMARLTLARKIATIVLIVWKRGVCFDAQHLKPQTA

SEQ ID NO: 88600 - protein, 316 aa, unidentified
MSTATSPVFIGIDVSAKQLDVAFAADSQATYVNDDAGIATLCARLKTLTCELIVLEATGGYEALVVASLAGVGLPVRVINPRQVRDFARATGLLAKTDRLDAQVLRQFAERIRPVVLPQKSEQERELGAVVTRRRELVQMLGAEKNRLKLATMRVRKDITVHIRFLEKRIDDTDAELERQIREHESFRLTDELLQSVPSVGNVSSSTLIALLPELGSLSHRKITALVGLAPFNDDSGSRHGRRRIWGGRQEVRNVLYMATVSALRFNPQIRTTYQRLVAAGKPKKVALVACMRNLLITLNAIVRDQSPWQPQYGCS

SEQ ID NO: 88601 - protein, 400 aa, unidentified
MIYLGIDIGKRHHEAGLINDKGDSIGKTIRFANSKKGSEKLLNFLNQHQVTPEDCACGMEATGHYWLSIFSFLHQLGFKVTAFNPMQSDALRNFYIRKTKTDIKDAYLIAQVIRIDSPEATPFIEEDLLQLRHLERLRYALVDQSSDVKRKIIALLDQVFPEYEQVFSDVFGLSSKEILLNYTLPEDLLEIETDKLADVLYRFSKGRYGITRARWKAEHLKESAQNSFGISIGTDAFKMQIHLLLEQISLFEKQLNQIEKELIELSKRQHHYLTTITGVSDVTAAVILGEIGSVERFEHPKQLVAFAGLDASVHQSGDFNSSNTKLSKRGSPYLRRAIWQAAFVASFHDPALSLYYQKLRDRGKAHGTAVGAVARKLTHIIFAILRDQKPYEPRPQVNDE

SEQ ID NO: 88602 - protein, 345 aa, unidentified
MKIVGCDLHTRYQQIAMLDEESGELVERRLEHAGGEVTEFYRQLQGPVRVGIEGTGHTRWFERLLAELGYELWVGDAARIRAAAVRKQKTDARDAALILELLLSGRFPRLWRPTMAERDLRHLLWHRQKLVWMRNAVGNQLHALAMGEGLCRKKQLFTKKGRRELEGLRLDPWASRRRQELLNMLDQVDISLQQFDQAVHEQAAQNPAAVRLMTHPGVGPVTSLAFVLLVGPVTRFARSKQLVSYLGLNPREHSSGGRQKLGAISKQGNPMMRGLLVEAGHTAARMDTELRQDYQRLKLRRGGSVAKVAIARKLAVRMYWMLRRQVDYAQLVRMQGSSRATLVQQ

SEQ ID NO: 88603 - protein, 345 aa, unidentified
MKKVIAGMDLHSNNVMIGIMDMDGQRLASRKLPCELKEVVKFLAPFKRRLERVAVESTYNWYWLVDGLQALRYPVVLANPAGMEQYSGIKHADDTNDAFFLAELLRLKILPTGHIYDAELRPVRDLLRRRLMLVHHRTALMLSFKSLYTRTTGQELTLSQLKELAIKEAQELYEHPANQLIAGMQIKHIEHLTESIEKIEKAVLGSARELPYYEQLATLPGVGRILGMTITMAVGDIKRFADPGHFASYCRTVEAKRMSNGKRKGENNSKCGNKYLAWAFVEAANFARRYDEQCRKWFERKVVRTSNVIAIKALACKLAKAAWYLMAEGTDYDSQRMFGQPAKTK

SEQ ID NO: 88604 - protein, 343 aa, unidentified
MLNYTGCDAHKRMCHFQQMDEDGALGFSIRVPTDKESIIELLDQLEEKTIMTLEAGRNWWWLCQLFKSHHNISAINIADPRRSRNIAEELSIQSGYGRASNDRIDSEMLAEQTRRGLVPLIHIPTEEQFKKRSINRHRFILVSIRTQFKNSIHAISAMHGVDINISKLITDPQTADLIYTSLPEYATFMIKQFIAQIQLLDQQISLSDKKLDKLLPPTNPIMKLLLSHPGIGPVCSRTVITETLDIHYFKEPKYYISYSGLAPVKEESSGRNKALVKLNNFSNHFLKYAFIEAAHSCRTHDKFRRKYDLDVKKRGKKIAKINLARKIAKTVYWMLTRQEPFKC

SEQ ID NO: 88605 - protein, 345 aa, unidentified
MDQVTRIGMDTSKHIFQLHGVNAAEAPVLRKKLRRKEMVAFFAKLEPTEIAIEACGASHHWARLLQSFGHRVKLIPPQLVKPYVKRGKNDAADAEALCEAMSRPTMRFVPVKTAEQQAALMLVGVRERLIRNRTQLANAIRGYAAEFGVTAARGLAHLAPLLARLQADESLPALARELFATQAEEYAQLEARIEALEAKLTAWHRADERSRRLAKIPGVGPVGAVLLAMKTPAPELFRSGRQFAAWIGLTPKDHSTAGKVRLGVITRAGDEALRSVLVVGATSVIKQVLRGGRASPWLAQLLKRKSPKLAAVALANKMARIAWKLMLTGGTYFANSVPAVSAGTV

SEQ ID NO: 88606 - protein, 417 aa, unidentified
MKSARNTLSEEPLNAVTAGLDWARDDHAVSIVNARGQEIDRCTVEHSAAGLRDLITVLGRNGVGEVAIERPDGPVVDALLAAGVTVVVISPNQVKNLRGRYGSAGNKDDRFDAFVLADTLRTDRVRLAPLTPDSPETVVLRRACRARKDLVSHRVAIANQLRAHLRNAFPGVVGLFAEIDSPISLQFLTRFDTQDRADWLSPKRLGTWLASVGYSGKKDPAALHTHLLAAPRGATGHDATLNAQITHALVAMLTTVVEQIKTLTGQISDQLTAHTDQHIFTSLPRAGRVRAARLLAEIGDCRARFPTPEALACLAGAAPSTRQSGKARSVGFRWACDKQLRDAITDFAGDSRRGNPWAADLYHQARTRGHDHPHAVRILARAWLFVIWHCWQNNTAYDPTQHRALQRILNPTEQKAG

SEQ ID NO: 88607 - protein, 371 aa, unidentified
MKSIIYIGMDVHKKTYSLCALLKETGEIIGETKIPADVSLIIKFIENAKKSVDSDDVQIKTGYEAGCLGYSLYWQLAEKGIECDILAPSTMHRSAKNKVVKNDRRDAKNIAANLANGTYKSVYVPTDEDVEIKEYIRMMHDFKIELKKVKQHINAFLLRFGHHYPGKSKWVPAHIKWLKELELSDMYREILDEYLSQLEILTEKIERFKYRLEELSQKETYNEKIGQLRCIKGIDTIAAMTMHAETSDFDRFPTANAFASYCGLTPGEDSSGESYHRLSITKQGNSMIRTTLIEAAQVLVRGTIGKKGKKVKSKQKDQDVKVIDYADKAVIRLQKKYHRMIFRGVKRNIAITAVARELACFVWGIETGHIS

SEQ ID NO: 88608 - protein, 370 aa, unidentified
MLDTTTFIGLDVHARSIKAVSLDVMTGEVRAATFGYDAGAVAEWVRSVDPRARCVYESGVTGFDLQKRLSGLGVDCVVGAVSKMIKPSADRRRKNDRNDAEFLARMLSVGNVVEVWVPDDECEAARDLTRALEDARDDLSRSKQRLSKFLLRHGLAFDERTPTGRRKGNWTRAHWSWIESIRFAERADNDVLAYYVDAVRRAAEEKARLEGLVEAEARKPRWRRRVDSLRCLKGVDTASAADLVFEAGEFSRFRNARSFAAWVGLTPSEHSSGESDRRGAITKAGNKHLRKTLVEAAWHYLTCSGRPKDLAKDQASDRGARRHAAKGVRRLAERREALLARGVHGNKANVATARELACWVWAVGLMAEEA

SEQ ID NO: 88609 - protein, 350 aa, unidentified
MNVTHYIGFDVHKKWIFYCTKTRGGTVVEEGKIQSVRPALKAWAQQRSEVWMGGLEATLFTGWIYDELKPYAAELKVANPAMLKVIAASKKKNDRIDARKIADMLRCDLLPECYMAPSWIRELRRMLRYRNLVVAQAVRLKNRIAGLLMEEGVSYDQRRLHGKRYFAGLLHSLETPASVLQLLRLSRASLEMFQTVERRVIRELASNPQLQARVELLETIRGVGVILALTWALEIAEVERLGSIRQAVSYCGLTSAERESGGKQYRGPISKQRNRHLQTILIEAAKLAPRWNPELAALHERELARGNRNRATLAVARKLVAYLMAVDRSGEPFQARGSAVESAGVAQAAD

SEQ ID NO: 88610 - protein, 334 aa, unidentified
MKQVTQVGVDVDSEELVCAMQRAEQRQPLATFANSAAGHKKFIRWATKGARPARVCLEATGIYSLEFALALHHAKNVEVMVVNPRAIKDFVRACMQRAKTDAVDAGGILEYLQRMPFTAWQPPAPEILELQAINRRIVQLNTELAREKNRRHASEFAGASADAIAHDIEVNIHHLERRIERMHNSGLQLVRGVPALATKVAHLVSTKGIGEASAMRLLAELLVLPDDLAAPQWVAHAGLDPRPYESGISIHRPRRISKVGNRHLRAALYMPALVAIQHEPNVKAFYNKLVAAGKKPMQAVVAVMRKLLHAIWGMLKHDQDFDGEKFFKIATKTA

SEQ ID NO: 88611 - protein, 402 aa, unidentified
MDCTQNVKINQVTETTLVIGMDIAKRTHYASLIDVRGRVLQKAFPVLQSKEGFEAFYQIILHAMKEYQKTDVIVGIEPTGHYWLNLAYFLTERGIPLVMVNPMHVKRSKELDDNLQTKHDAKDALVIARLVKDGRFSYPRILAGVEAELRVGATLRNQLVEEQSAIKNKLIRWLDRYFPEFMQVFPSFGKTALAALWCTPFPGDVISKTTEELLHDYRQVEGVKAPQKHKIIQLAHMALDSIGVTEGLEMARIEIATLVRRYHQLEHEIQDLMSHLTNLAKTSVEYEWLSTVPGIGDTTIIELLSEIGSFSYYQHPRQLIKLAGLTLREHSSGQHRGQKRISKRGRRHLRALLFRVMMPMVRCNEAFRQLHVYYTTRAKKSVTQKAIHGCIVWKITEDFICT

SEQ ID NO: 88612 - protein, 346 aa, unidentified
MKYFAGLDVSLEETAICVIGEDGAMVKEARVPSEPEALVAFFQGLGLVLERIGLEACSLSAWLHESLVAAGLPAVCIETRRAKAAMGAMPNKTDRNDARGLAQIIRTGWYRAVHVKSPTCRSWRALLTARRLVLNKMRDVENGLRALLREAGLKLGTPARKEFAARVRELTAGDPGLSALALPLLTIIAAMARELAQLTKRVLDIVRDEPVCRRLMGVPGVGPLTALAFRATIDRPERFRHSRDVGAHLGLTPKRYQSGETDVQGAISRCGDELARTALYEAAHSLLVRSRKWSTLRAWGMQVARRRGMARARIAVARKLATILHRMWADGTEFRWGKEGPLPAAA

SEQ ID NO: 88613 - protein, 409 aa, unidentified
MRYYVGVDWADQTHAVWVVDASGTKITARTVPHTAAGFSEWGRELDEWRAQGIERWAAIERPDGRVVDFLLDHGVVVYPVNPKALDRARDRFRQSGAKSDPFDARVLADFLRTDYLHLQVLQPSSDVAQELKLLTEDCQRHIRQQTRLVNQLTTTLKAYYPRALEVAELTTALAREFLQAYPTPDAVTALTTRQWQRWARGRRLSEARIGALWAVLQQPQLPVPAHVVRAKARLMLSLVEQVTPVVAAVAQYRKAIDDFFASMPAAQWARTLPIGKHGITAPTLWARLGDAPGRWESFRHLQAQAGTVPVTKRSGKQRSVHFRFACDKSLRHVVDQVAFLSLLSSAWARAYYDQQRARGHAHHQALRALGAKWLKIIFVMWHRQVPYDEQYHLATMARQQLRQRQQQIA

SEQ ID NO: 88614 - protein, 444 aa, unidentified
MRAIGLDIHRDFCEVAIAEGGRVRGAGRVGTAPAEIEAFARGLGSDDTVTLEATGNALAIARILEPHARVVLANPKATKAATRLRAKTDRIDARTLAQLLASGFLPEVWTGDEATHALRRRVGRRVHLVRQRTKAKNQVHAVLLRNLAGRPPVSDVFGTRGRAWLERLVLPADERETLDACLRTVDFLDAEVAALDRALAPLVLGSSDMRRLLTLPGVSATTAATLAGVIGDIARFPTPARLVAYLGLDPRVSQSGNDAAHHGRISKQGASEARHVLVEAAWVATRTAGPLRVFAHRLAARRGWNVAIVAVARKLTVIAWHMLTRGEDYAFARPVLVRAKLREIELRSGAPRTKGHSIGVAPTAAERQLERELAAAAEAAYERLVKDWVPSRKQVREPQAGRASHDAERQPARQGSAPALRFGSASLPHQRDYAPDLGPRQDAT

SEQ ID NO: 88615 - protein, 347 aa, unidentified
MSVVGWDWASQAHDITVLDDAGAVLDRWAFPHTEAGWVMALARLRRRGEPGDLPVIIEKTSGLIVDRLLAAGHPVVPVHPNSFHAARPRWGASGAKSDPGDSYKLADYLRTDGHRLRRLEPADPGLRELQALVRLREDQVRARTAATNQLWAMLGNHWPGPRDLFCSLASGIALAFLTAYPTPQSAARLGEARMAAFLRRNSYRGGKSPALLLARLPGAGTINLAQLLAEVGPILDRATSAEQAASECGTAPVTRASGKTTGVYFRWAASTRARKAITAFAHNARMQSPWAAKLYADARARGKRNPHATRIVARAWIRVIWACWHTGIPYDPAVHAARQRVTAEELT

SEQ ID NO: 88616 - protein, 345 aa, unidentified
MEIHTIGIDLGKTVFHLVGLDARGEVVVRKKCSRNQILGFTANLHVSLIGMEACGGAHFLARALREQGHDARLMPAKYVKPYVKTNKNDYIDAEAIAEAVGRPRMRFVSIKTDDQLDLQSLHRVRERWVSGRTAVINQIRGLLLERGITIRKGRHHIEESLPGILEDADNKLSGALRVLLKQLRLEMQYLQGQIDESDKLIQRIAGELEDCRRMVSVPGIGPLTATATIAAIGNGSAFKKGRGFAAWLGVVPGEHSTGGKQTLTDTSRRGNRYLRKLFVQGAHAVLQQRMKQSNGLNTWLAQLTSRKRIQVAAVALANKMARMVWAVLSKGEAYRPPLWIETAAV

SEQ ID NO: 88617 - protein, 343 aa, unidentified
MKYIGLDLHKKSIFATVLGEDGKILSRTKIGPNTRDICYYLKNQGRKEELSVAMEASYNWPYCYRAVEEAADNITLAHPLKTRIIGEAKIKTDKIDSKVLAYMLRADMLPAAYVPKRETLQNKMLLRARISLVRLRTQIKNKIHAIVDRNRDSYEGLKNLSDIFGSSGKTILRDTKITPIDYKILLGYLDLIEEINIKIKDLESQINMIAKIDNDIEILKTIPGIGTLTAFLIKSEIDDISRFPSKEKLCSYAGLIPSTRGSGEKLYHGRIVKQGNKFIRWALTESTLVAIRYSEYFRYHYNKVRSRKNANSAAIAVARRMLEIIYVMLKEKRSYIEKPINIK

SEQ ID NO: 88618 - protein, 441 aa, unidentified
MSDRLPIAEPELEWAAFAAIDWADQKHAWRLVPADSAVHEQGTLENTPEAVDLWATALCVRFGGRRIAVCLEQSRGPLVYMLSKYAHLVLFPEHPSTAAHYRQVFSPSGAKDDPRDAASLLDLLLHHRSRLRQWQPDTVETRQLQRLVEQRRLMVNERTRQSNRLTACLKMYFPQILRWFDDVAAPLVGALLERWPSLQELQRAHPGTLKKFFVQHNGRSQKRIEERIQSIYQAVPATGDQAVLQGEAAAAHGFVALLKTLRENIAVLDQQIAQLVAAHPDHALFASLPGAGPVMVPRLIVAFGTRRERYDTAFQMQCYSGIAPVQEASGNSQWVHFRRSCPKFLRQTFHEFAFLSTRSSLWAKAYYDRQRQEERSHPAAVRALAYKWIRIIFRCWKEGKLYDEQIYLQSLQKRRSPLGAPITALGWKSVAGFQKLSENPS

SEQ ID NO: 88619 - protein, 370 aa, unidentified
MPTNLRYLGLDVHAETIAVAERDGEVRPLGILPHRPDAVTKLIRKLGPREHLRACYEAGPCGYVLYWQLTKLGVHCDVVAPTLVPTKPGDRVKTDRRDAAKLARCYRAGDLTPVWVPDAAHEALRDLVRAREAAKGDQLRARHRLGKFLLRHGIRPPAGAKPWTQGHRRWLDTLHLELPALAATLADYLHEVDHAAARLDRLEQALDAAIQAAPAPLRAVIAALQTLRGVRQVTAATIVSEVGPLSRFTHPRQLMGYSGTVPSEHSSGTSVHRGAITKTGNAHLRRVLVEAAWAYRFPPKCTKALRTRQRGQPDAITAIAWKAQHRLSTRYRRLLGRGKPTPHVITAVARELTGFIWAIGVAVERTAPAA

SEQ ID NO: 88620 - protein, 401 aa, unidentified
MKTVLSVDVAKNKSMIMLMNSDGEILIDTRKIKHNLEDFEKVKEEIKEINPQNLTVFMESTGTYHLPVERYFKENGFNTLVINSLTTKNNYDTIRKTKTDKKDCYRLAKLFFVNEVEYHELSKKDLYANLKAMTRQYFYLLQQNVSCKNRYKRLINICFPELEKIFKSTRIYDDTALNFIKEFPHAEIVKEKRIDALYNNLYKTNGRNLNFYKRLAETIKIASANSYPGVDKEHKDVKNLSDMAKIVQNNNNVINELRDKMIETAKKSPYYEIINSFYGIGEILTAEILGELGDITRFDSPKQLIAFCGLDPTIKQSGKSINVKGAISKRGNKYARYILFNCSQMVVKLGASNYPEHPVYIYYQNKKAEGKHYYESLTACSTKILRMLYSMCKNNKQFLEN

SEQ ID NO: 88621 - protein, 416 aa, unidentified
MRDDARWFVGIDWASETHQVCLVDADGKIVGERGFPHGGSGLAEMCIWLLVTTRAEPTVIAVAIEVPHGPIVETLLERGFLVYAINPKQLDRFRDRFTVAGAKDDRRDAHVLGDSLRTDRHCFRHLAAEDAVIVALREWSRMAEDLQQERNRLANRVREQLWRYYPQALKISDDLGADWFLELWAAVPTPAKAARVRESSIDRVLKTHRIRRIAAAEAAQILRQQPLTVAAGTVEAASAHIRAVAARLKLVNRQIKQAHRCLDTLCGKLAVDEEKTASGQEPEQRDVTILRSLPGVGRIVLATLLAEAAEPLRRRDYHALRTLCGVAPVTKRSGKRCIVIMRQACHMRLRSAVYHWARVAIQHDPLSRCRYAELRKRGHSHGRVLRSVADRLLAVACAMLDRQTMFDPSRAEKQAT

SEQ ID NO: 88622 - protein, 409 aa, unidentified
MRLFVGLDVSSFDMKVCFLNGDGEKLDSFSVSNDLPGATTLKEKLLQCIAGKEVDILKIGLESTSVYSFHPSMFLHHDIDLQRFGAKVFLLNPKQVTNFKKSYSDMNKTDEIDAFVIADYLRFGRNQMSIVKESQYVALQQLTRSRYQLVKMLTKEKQHFLQHLSFKCNTFSQEVDTSVFGSAMTELFLEKFSLEELANMPLEELAEFLQEKSRNRFGDPKCVAASIQKAVKASYRLDKVVEDSIDVILGTSIAVIRTFQQQIKELEKSIKKIMAGLTQTLESIPGVGPVFAAGIIAEIGQIERFDDETKIAKYAGLYWRKHQSGRFTAEDTSLSRTGNHYLRYYLVEAANSVRKHVSDYQEYYVKKYNEVPKHQHKRALVLTARKFVRLVDALLRSHQLFTPGRCVKE

SEQ ID NO: 88623 - protein, 487 aa, unidentified
MMDNTLPPLGIDVSKLTLDARLLSQHRPAPARRFANSPDGQSLLAPWLESQGINRVHACLEATGTYSDAIATFLFEHGHQVSVVNPARVTAFRLSEGIRTKTDRHDALVLARFCEQKRPALWRPTPAEIQRLQGLLGRLDDLQLTVQQERNRFENLRLDAQIRQEIAAHVSWLQQQRERTLQCAITHVQQSPHLQHACDRLDSIPGIACLTAMRLYSVYFDQQRFRGAPQLVAYAGLCPAQRLSGTSVHGKASISMAGNAQVRQWLYMSALSVLRYDPDFAQWAGELKARGKCGRVIVVAIMRKLLHVVHGVLTSDENYDPRKAFPTHEHSTAVEAPMPTEQEHVASARKELVHHHTTQKTRLTTCLPIPAARPLHECRAASDGRISFLCPSANRLRRIDTIFNKISNIAQKPLTKKTVSTRTTTVTWPGMVSRKKPSPDAQPNTQAKDFVLCTPKVSTLLFSLLTAPHISHRMNQANFNFFFSARL

SEQ ID NO: 88624 - protein, 320 aa, unidentified
MQTPSAVLNIGADVAKDEIVVACSEGSFPVREVANQHTALLAFLKGLPAGSRIGVESTGSYHELFAEAAHKLGFLVFLLNPKDTRHYSKAVGLRGKTDRVDAELIARMIAHEHTKLHAWIPPTPQQRELDRLIKRRATLISLREAVEMSLHELGGFADELKALRTRFNQLIARIDLRVKALVEASPDRKQNFTRLCTISGVGAVVGTALVNTLERVPVKSADAFVAFTGLDPRPDDSGQHRGKRRLSKRGPAELRRLLYLAAMSAAKTKTWRPLYEHYRAKGLSSTATLVILARRIARTAWSIYTYKTEFDPARLTNPLT

SEQ ID NO: 88625 - protein, 376 aa, unidentified
MSRIIYVGMDVHKDTYSLCSFNYKDNYMFAETTIKSETAQVCKYIKSIENHFVNEEILIVCGYEAGPTGFTLCRDLQKKNISCVVMAPSSLPKSPDEKKRKTDKIDARNLSLHLAHHTYKAVNVLTPEMETIKELTRTRASALKAKKRAKQNFLSFLLRKGMVYPYGGRAKYWTQKFYSWLKTLEFTNALDRYSFEEYLTEVNHQMSRVSRLDEKIAEIAEDPLIKNDVKKLCCFSGISTLTAVSFVSEIGDFNRFKKASYFSSYLGLCPGVHSSGLSNQTLGITKAGNKNLRRLLIEAAQAMSHSQKCGKKSLRILARQKGMNPLVVAYADRATERIKKRRNSMIFRGVNTNIATTAAAREMACFIWGMMTNNIS

SEQ ID NO: 88626 - protein, 347 aa, unidentified
MEYYVGIDVSLEKSSVCVMDQTGRILRETKVASDPDALAVFLAGLGHRVTLVGLEAGPLSQWLFAELRKAGVEAVLMETRHVKGALKAMPVKTDRRDAEGIAHLLRMGWFRPVHCKSASAQEVRALLTARKLLLGKMLDIELGLRGVLRGFGLKMGKVSRGRFAARVRELVAGNPMLEHVAQAMLTAREALQAEMTALDRRARAHAREDATCRLLMTAPGVGVLTALTFKSAVDDPGRFRSSKMVGALFGLTPSKHQSGEKDVTGAITRAGDGMARSTLYEAATALLTRTKAFSSLKSWGLAVARRRGRKRATVAVARKLAVILHRMWVDGSTFRFGGAAALDAAAG

SEQ ID NO: 88627 - protein, 415 aa, unidentified
MEELGMRPLHRRVAGIDVHRMLHVVTVLIEQPDGSVQHETRQFGGFRRDCRALAAWLVESQVELAIMESTGIYWKSVYAHLENAGVAAWVVNAHRVKNVPGRKTDLADSQWLAVLARFGMVKPSFIPPQDLRELRLVSRYRRKLAAMPASELNRLHKTLDDAGIKLGGVVSDINGVSARAIVAALIDAKPIAHLLGLARGRLKQKLDELDASLQGELSARHRFVLSHQQAHIGTLQRQIAEIDQYLLQAMQPYAWAHQLLQTIPGIDQIAAAMILIEIGPDMQRFEKAARLAQWAALSPGNDESAGKRRSTRIGHGNSIIRHILCECANAARMTKSTLAAKYRSLMVRKSHKKTIVALAHKMLRLIFVILSRREPYIDRNIDYEALSAKKNAPRWIKQLKKIGRWPTPQTAHAAV

SEQ ID NO: 88628 - protein, 418 aa, unidentified
MLNIGLDWGSEKHAICSMSENRRSLAQFEITNDLEGIHKMVSQVEALGFQPEECAVALEGRSEFLILTLSSLGFTIYPLNPKALNRYRDRHKASGATTDREAAYLLADILVIDRHLHNPWQPSSPLGQEIAWITRDQYKLTQQQTRLSNQLTACLKQYYPVALDLFTKVAQPITLAFLEAYPTPRAAQAASYEELQEFFRSQSYPRLDLLPQIYAKLQGAALIAPAHVARTRPRYMLVLARQLKAVVSAIKAYHREIQRLPCAQKGLQGLLDEHPDGHILRSLPGAGDLTAARLLGLFGDQRSRFCNPDQIRPLAGTCPVTLSSGKKRVVVLRRACSKMFRDVMQQLARNGLSQSGWAAAYYGDQIRRHPGEKSRCLRALANRWVGIIYKLCNDRLLYDEQTHLRNCLHQGHISCDSP

SEQ ID NO: 88629 - protein, 254 aa, unidentified
MNIVFLGIDLAKNVFQLCGLNQAGKPVYSKRTGRKELLQTVANIPACLIGVEASTGAFYWQREFEKLGHKVKVISPQYVKPFVRGQKNDGNDAQAIAVALMQPTMQFVPLKSPEQQDIQALHRARQRIAKVKGIGPKTATAVVAAIGKGTEFKNGRHFAAWLGLVPRQHSSGDRQVLMNMTKKGDKHLRTLFIHGARAVVRVATNNNDSYLNQWVNQLKERRGFNKTTVAVANKNARIIWSMLRNDTEYQAVGS

SEQ ID NO: 88630 - protein, 318 aa, unidentified
MNVIGLDVSKDTIDATLITTKGSKDYIKISNNTEGFENLINWIKTKRIRKIAISMEATGIYYEQAAEYLSALYTIFVINPLKIKEYAKSQFSHTKTDKADSKLIAEFANRHLDKLTPFRPSENPILYKLVNLLQQLKEQQKETQNRLHTAKDIYIKSTHEAIIELLEEKIDQTSKRIEGMIKQKESLNIEYQNLQTIPAIGKETAVILLRHLTDKNFETANKFVAFAGLSPKIEQSGTSVNKKGRLSRYGHRQLKRALFMPALVAYRMNAFPQLVRNLEAAKKPKMIIIVALMRKLAKIAFYIHKTKKPFDKARHQTV

SEQ ID NO: 88631 - protein, 391 aa, unidentified
MSMYFIGIDISKYKHDCCIISAADQKVVSKVTIKNNKAGFNELLTIIHSLANPADIRIGFESTAHYALNLELFLENSLLTFMEVNPVLISEYKKSKTLRRTKTDSVDCESIARWLMTVEYKPHSKGFYHAYSLKSLTRLRDKLIRQRSFYLIKITNVLDHTFPEFKPFFNERLSKTALYLLENYGSAEKMARMNSASYEKLRSLSRGKFSPQQFLRLKELAANAVGVNNSIFDVELNSLLSLYKSLVKEINTIEKEINKLIEEVHPHYMSVPGIGPLSAAVIYSEYGDISNFTNPGQMLAFAGIEPGINESGTESHGGKMVKRGSSQLRYTLINCCLPLIRFDMTFATYYAKKRGEGKPHRVAITHVAKKLIRVIYALERHDIDFNAQKLR

SEQ ID NO: 88632 - protein, 418 aa, unidentified
MTDMPYVALIGLDWADQKHDVCLYDCAAQTQEHCVIGARPEAIEAWAMQLRVRYGGQPIAVCLEQKRGPLIYALCKYEFLVLYPVNPQTVSKYRQVFTPSRAKDDPTDAALQVELLRKHRDKLTVWQPASPMLRKLQALVEWRRTLIEDIGRTTNRLVDVLKGYFPQAIDCFEHRDTMVFCDFLTQWSTLSAVQQVSDEQLQQFFCEHHSRYKDCNARRIECLRNGIPLTQDSAIVESSQLMVQALVSQLRSLLTSVRQFEAQIDREFNQLPDAAIFAALPHAGTNLAPRLLLAFGEDRTRYQTAQDLLQYAGIAPVTERSGKKCWIHWRWGAPRFLRQTFIEWANESRKASLWAKAFYQAQKQAGKTHQAAIRALAFKWIRILFRCWQDRVPYDEAKYLLALHQKGSPLAQQILSQA

SEQ ID NO: 88633 - protein, 368 aa, unidentified
MTKSTYVGLDVHADTIAVATADEGRDGEVRFHGVIPNTADAVLRLTKRLKAAGSNPAFCYEAGPCGYGLHRLLTKLGFDCAVVAPALIPRRAGDRVKTDRRDAEMLARLWRAGELTPIWTPDEEQEAMRDLIRARKQTMEALKIAKQQLLSFLLRHGLRYPACYWTRPHWRWLNELRRFPHAHQQLVFEELKRAIHDIGERVARLDRAIEEAVGTWRFRPVVEALRALRGVNTTIAATVVAEIGDIGRFTSARQLMAWLGLVPSEHSSGATTRRGRITKAGNALARTMLVEASWSYRHPAREAHRHLKRAAQLPSHIRDIAWKAQTRLCQRYRALSRTGKPLPRVLTAIARELAGFIWAIARRTPLAA

SEQ ID NO: 88634 - protein, 360 aa, unidentified
MFGERTSVGLDVHARSVVAAAIDGQTGEVFKARLTPSHADVLQWIARLPGPCAVVYESGPTGFGLARALTAAGWRCEVAASSKLQRPAGDRVKTDARDALHLARLLRLDEIVSVRIPTPAEEAARDLVRARESARQDLMRARHRLSKLLLRHGIVYCGGKAWTDLHDRWLHRQRFDSTPTQAAFDDAYETVVLATARRARLDEKITALAGDSEFTPLTRRLACLRGISTLTGFALAVELGDWERFTGASIGAYLGLVPSEHSSGQSRVQGAITKTGNTHVRRLLVEAAWHHRTTYRPGVVLQRRWEQAPAAARARGHAGNQRLHARWVNLNVRKKRPVIANVAVARELAGWCWSLAVLPD

SEQ ID NO: 88635 - protein, 320 aa, unidentified
MLSFCGIDVSKDRLDVMVLPDEYSSSVPNDPAGWAILVEQLRGFSITAIGIEASGGYERGAVRSLQAAGMPVRQVNPFKLRQFAKASGVLAKNDPLDARMIASFVGIMPTRPAQRTTPPAEQLVEMLAVRRQLSAEKTAAENASRLLEDLMLQRLSRRRIARLAADIELLDKRLVESVATDATLAHRYRLLTSMPGVGPVLACTLIALLPELGGMSRKQVAALVGVAPYAFESGTLKGRRCIWGGRANVRQVLYMAAMSASNWNPVLKLFHDRLKGAGKLPKVVIVAVMRKMITTLNAMVRDDIAWADRLSGRHSVTTAR

SEQ ID NO: 88636 - protein, 376 aa, unidentified
MTWGCQAGVETANLTTVMKHYKITNTETYESIKLGIDAHAKWYYVARQLDGATPQPVQKMDFEGLLHFVARQKRLAREVHTCYEAGAFGYHLHHQLAALGVTNYVVQPQDWDERGKGVKNDRIDAQALCQRLDRYVRGNHKAFSVVRVPTAEEERERAISRQRQQLVRERQRLQAMGRSLLAMHGIHVSGKWWQGKTWSEIRSEAPEWVIERLEVFSRLIAPLEAESAKLTSQIEAAAADQKIPKGVGPLTFEVLRREVGDWSRFTNRRQVSSYTGLCPREHSSGGKRRSGSVSKSGNPRVRAMLVEMVWRMTRWQSGYHGLQKWLPVLADPARAGAARKKAVVAIARQLAVDLWRVFTGQTTAENVGLVYLPDAA

SEQ ID NO: 88637 - protein, 533 aa, unidentified
MATKRNSRKSRKISRAVLGKPKGVIQPRVQKVGPEHFGIVAVDCAKARSKWMLCDFYGKVLIPPTTVEHQRTALQVATTQLREAIEKHGLQDHLVAVEMTGTYHRPVQRAFRAAGSETRLVHPFASRHYRLPAHGDNKTDDHDLEGIFRAAVNGFGLLESPWDETYQQMQLLARHRRDLVKKRAKLQTQIRQALQRCLPGYADLFPEDDLWTRPVAMAVARRAADPEVIRAAGVCGIQHRLAEDKLRAQRRTIERLVAWAGNAAAADPLCQHLTRVWQALYEDWQIKTRQIGRLEQDLAAILVKTPYLLLLSHPGINVVSASELAGEMGPIEHYAHAKAISGRAALFPSRYQSDEVDRADGPLARFRNARLRAAWMRVADCLIKSNAHYRGKSELWKQRGVDPRDIRSRVANRATRTIFQMVGGRRLYQHPSRLDRSYVLAKLLEFHQEHGTAPAEILRDMREAAAQIPKAEQAAEATPLQETCRKACRSRQKGPQAIGEILLVVLARLGVGKVQSQVEAPSPDANVSDMGTA

SEQ ID NO: 88638 - protein, 435 aa, unidentified
MEKIRTNVAGIDIGAKKVFVAVEGQLVVSYFTFTEDFMLLRDSLLKHKVETVAMEATGVYWVILYEILEEAGIDVWLVDGRQTKQVPGRKTDVKDCQWIQELHSYGLLGRCLVVDSDIKELRSYIRLREDHINSSSMHINHMQKALTLMNIRLKEVLSQVHGASGMAIIEAILKGERDKHILVSLCHRSVLKTKRELILKALEGKYTEAGLFALKQAYEGYQFYQGQIGECDKRISIVINRIGQSGKGQDTKSKRKAIRHHSPSVEKLAPNLMNIFGGKDATVISGITDYTWMQLLAETGPDLTRWPSEKHFTSWNGLAPGQNNSGKRNRNAKKKGRPRAGQIFRTMAQGLINSKNIAIGSFGRRLRGRKGPAIAIKAMARKIAILYWRVMVKGLDYAEKGIIHYEEQLLLNKMKSLNRLAKELNIEIIGNKQVT

SEQ ID NO: 88639 - protein, 410 aa, unidentified
MRRIHDRVAGLDVHRDTVVACVELFDGSTVEIDKQSFSTTATGVRQLGEWLADREVELVVMEATGVYWRPIFYGLEDRFGEMWLVNAHHVKNVPGRKTDMSDAEWLADVAAHGMVRASFVPPPDIRGLRELTRYRKTQIRARGQEIQRLERLFQDAGIKLTSVASKVWSKSSRVMTEMLIAGEADPGVLAELAKGRMRPKIPALIEALESRWVTYHSALARQIIAHIDFLDATIDTLTVEIVERLAPFRAAVELLKTIPGVSDLTAQTIIAEIGVDMSRFPTAGHLAAWAGVAPASHESAGKRRPAGTRHGSRHLRTALTEAAQSAARTKGTFLSARYSRIARRRGPNRAAVAIAHSMLVAVHHMLLTGEVYNDLGAEFFDKRIDPARRVQRHVAELEAAGYTVTLTPAA

SEQ ID NO: 88640 - protein, 313 aa, unidentified
MSEVSIIGLDIAKHVFHAYGADERGRGVFSKRISRGKLLDFFAAQPSCTVALEACGGAHHWARQLTQLGHKVRLIPPAYVKPFVKRQKNDAIDAEAICEAAQRPSMRFVAVKSEQQQAAGLVFRTRDLLVRQRTQLINAIRGHLTEYGWIAPKGPSHVAMLADLIEEEEMTSSLPEAALAMFRLMLELLAGLNGKIAELDKEIARRAREDEVSRRLMTIPGIGPISATAISALAPPAETFAKGRDFAAWLGLTPLQRSTGGKRKLGANPRWANARSGASLSSVAAPSCNRRANAAHQRVRGSNRCWLANRACW

SEQ ID NO: 88641 - protein, 345 aa, unidentified
MSTLYCGLDAGSTLCHLAAVNREGQKVANIGFPTGEYSLRQAFTEVEGDELKVHVEASDLTGWLRRVMLEEVPAVDDVIASHPKSLSWIGNDPLKGDPLDAWKLAELLRMGRTHEVYYSDDQNRVAFRKLVRHYEKINEQQARLKQKIGARFRKEGVLTSGSTLYTPRNRPDYLGRLDSPVVRRTVEHLYRCLDAALETREETLEMMQREARRYDEIGRFQEVPGIGFILACRFCAYIQNPHRFSNKRKLWRYCGLGLTDRSSDGKPLGRKRIDPNGHSGLKDLSNKGYMGAMRCKSDNAFKRAKRRYLQKGGHETGARLKIQRKVVTTLWTLWKKGVRYDDSKG

SEQ ID NO: 88642 - protein, 342 aa, unidentified
MNEYDGRQFVGIDLHRRRSVIVRQSESGEQLSAVRIINDPVALGLEIERDGPNPEVVLEATYGWYWAVDTLQAAGARVHLAHPLGVKGFRYRRVKNDVRDAADLADLLRMNRLPEAWIAPPATRELRELVRYRAKIVAVRSGLKAQVHAVLAKAGVLIPVSDLFGVGGRQRLAKVPLGAAYVQRVISLLELIDALDAHETRFSIMVADKLGGHAGYQAIQQLPGVGPILGAVFVAEIGDVHRFADPAHLCSWAGLTPRHHESDTVVRRGHITKQGSKLVRWAAVEAIQRHPATSKIALDRTRIESRRGKNIAKIAAARKLLTLVYYGLRDGHIRALAPRRAA

SEQ ID NO: 88643 - protein, 310 aa, unidentified
MERYVVGIDVAKAQLDVHVRPTDERYHVPHDDGGLAELVARLHPLAPALVVLEATGGYELTVAAALGSAGLPVAVVNPRQIRDFARATGQLAKTDALDAHVIARFAEAVQPPARPLPTAQAQALADLVARRRQLLEMLGAERNRHQQGRDPRLQRQIATHIRWLTKALAELQATLDDTIRTSPLWRAQDNLLQSVPGVGNVTACTLIAELPELGRLERRKIAALVGVAPFNRDSGRWRGRRMIVGGRPTVRSVLYMAALTAIRFNPVIAQFYQRLTTNGRPKKVALTAAMRKLLTILNAMLRDQRSWQPT

SEQ ID NO: 88644 - protein, 311 aa, unidentified
MTDDTIGIDISKATLDIHRLSDGKTMSFSNCPAGFKALSRFCAKTAVARVVYEATGAYHSGLERALGAHLPLVKVNPLQARRFAQAQGLRAKTDAVDAKMLADMGNAFALEPDEPAAEIQHDLKELRSFRSGLIKDRTGIMSRMKTQTLSITRRQSKARLAQVDKQIAEINAEIERLINSSDTLAHSMKILRSIPGVGAICAATILIEMPEIGSMDRKQVASLTGLAPMTRQSGQWRGKSFIQGGRKIVRDALYMPALIAMRHNPDFKAKYQALIKAGKPPKVAITALMRKLIELANALIKADRNWVTKGA

SEQ ID NO: 88645 - protein, 349 aa, unidentified
MGEVSTIGIDIAKSVFQVHGVDTDGAVVIRKRIGRTKILKFFTDLPPCLVGMEACATSHHWARELRRLGHDVWLMPPTYVKAYVKRSKNDAADAAAICEAVTRPSMRFVPIKSAEQQSALMLHRTRDLLIRQRTQLINALRAHLAELGLVAAKGREGLHQLVTIVMESCDEKLLSDARFACQAIVMQLHAAQTQINGLDKRIIQAHRVNADSKRLNAIPGFGVILSTAVVATMTDPKAFKTGREFAAWIGLVPRQNSTGGKERLGSISKQGDRYLRRLFVVGAIAIVRTARMRPEKYPWVIKLLTRRPAKVVAVALANKMARVAWAVLAKGESYRKPTRSGNAAIAAAA

SEQ ID NO: 88646 - protein, 362 aa, unidentified
MAEVRSWAGLDVHAAKVIAVTVDSHSGELRAHRLPGDTRRVVAFCAGLPEPAMVAYEAGPTGFGLARALAAAGTECIVAAPGKIERPAQDRVKTDRRDAERLVRLLMIGGLHPVRVPTGQEEALRDLVRAREDVRGDLMRARHRMGKLLLRHGVRYDGAGDNWTQRHRGWLGHVELPDRGAQVTLLDYLGAIDALVVRRDALEQAITELVPGSPWAITVARLRCLRGIDTLSAVGLCAEIGDWERFHRPAQLMSFLGLVPSENSTGEQRRQGSITKSGSRHGRRLLVEAAWHYRRPPARSTALRRRQQGQPAHIIALAWKTQQRLHRTWRRLDTERGKRRTLVAVATARELAGFCWALATAD

SEQ ID NO: 88647 - protein, 400 aa, unidentified
MLSIGIDVSKGKSTVCGMKPGGEIVYTPFEIQHTREGMSELVSLLRSSGEEVRAVLESTGSYHCPVVAALLENGIFVSVVNSLRMKRFCSQSIRKVKTDRIDAMQIALYGLAYWQELQPTKLPEDTYRELQLLARQYYQMTSILIKAKVDFNALCDQVLPGMQELMSDHAGRHKLSDFVLRYRHTTHILEMGETRFRKDYCKWAEKKGYRNHERMAALIFATAQNGIPVLPNAPSTQIVITEAIRVLHTVEASRDAILTQMQALAKTLPEYSLVREMPCIGDTLAPRLIAEIGDVRRFHSKRALIAYAGIDAPPYQSGKFCANNRHISKRGNRYLRKTGYEVMQSYVMHKPANDPIFTFIEKKRGEGKSGKLAMVAGLNKFLRVYYGKVTELYRSLPAIE

SEQ ID NO: 88648 - protein, 419 aa, unidentified
MEEEFRFYVGVDWGTERHQACLMDRRGQVVCQRSIEHSGEEILEFLQFIEETASREPSQIAVAIEVPRGPLVEAFLEHRWAVFAINPKQLDRFRDRHTVAGAKDDSRDAFVLADSLRTDRRCFRRVSTDHPTILRIRELSRTEDEICADFRRSANQLYQLLLRYYPQLLQLSSVPDEPWLWALLELAPTPQKAAQLKVSRLKKLLAQHRIRRWSAEQIAEILGHPPLPLTAGSAEAIVEHVLLLIPRLRLLATQRKAVADRMEKLLEEMAACETQGPETQVFRDVSLMLSLPGVGRIVSGTILAEGANALRERDYQALRAHSGIAPVTRQSGKSWQVGMRYRCNTRLRNALYHWALISVQHDVRSRQQYARLRSVGHGHARALRGVADRLLAVLMAMLKTGRPYSPELRPQAVSPAPAV

SEQ ID NO: 88649 - protein, 335 aa, unidentified
MSTNGCTPAATSAAGSQSLYVGIDVAKDKLDLARSDCQQVQEFANDPRGIAQAVESLAAAKPHMIVVEATGGLERPLAEALLEADLPVALVHPGRVRHLAKALGILAKTDRIDAHGLVRFGQLASPRLSERRSKNQAELRDLVACRRQLCLARAQQHNRRGSTFSKAALRCIDAVLKALDKQVEALDKQIRDLIDSDDDFRHLDGLLRGVPGVGPTLSATLGAEVRELGQAGRRELGAIVGVAPFNCDSGKLKGRRAIRGGRTAVRCVLYMATLAAIRVNPVIRPFAQRLKAAGKLNKVVIVACMRKLVTLINAMVRDGLTWDQLDVVKKMSTTH

SEQ ID NO: 88650 - protein, 391 aa, unidentified
MPTIADRPDAPTAIQTNLAAIFISLELSRSIWLITSLSPGSGEKMSKHSLRAGDVAALLARFSELQEKALARTGKSFPIIAVQEAGLDGFWLHRVLERERIESHVVDPASIATSRRRRRAKTDRIDGETLLRALLAHKRGEPRVCAMVKAPTPEEEDRRRVCRERKVLIGERVEHINRIKGLLFSQGISSYEALRRDRRQRLEELRTGDGGALPTHLKTQISRELDRLELLLEQIGMVEAERDAMLAAQPAAAPASAGRMLRNFKGVGPEFAAILWLEALFRHFDNRRQIASYAGLAPTPWQSGSVDREQGVSKAGNPRLRATLIELAWLWLRHQPQSALALWFKERVTRNGGRMKKTLIVALARKLLVALWKYVTVGVVIEGAVMKADHA

SEQ ID NO: 88651 - protein, 347 aa, unidentified
MNHLNVAYTGLDLHATHSEFGVIDGHGQQQRHALATDPKLMKDWLASLSADHIFLAVEEGPLTQWISWQLNGLVDELVVCDPKENFWISRSAKKTDRIDAVKLARLLRMGELRTVWHPEQKNDRALFAATAAHYITMRREQVRLKHQIKSRFRRWGVMDVSGETVYSMQGRAGYLEQLTDGCIRTQIEALFTLLDHTIDAQSDAKEQMFRLGRGYEEIAEFQKIPGVGPILAHLFSGIVQTPHRFDRVQQLWRWGGLGITDRSSNGRALGYQKLDPNGRSEIKDISYRAWKAGATQAKTTNEVKRFYETSLTNSSSQTNARLNTQRKILKVLWTIWRKQVCYNPDLF

SEQ ID NO: 88652 - protein, 334 aa, unidentified
MQNVTLIGIDLGKHSFHVHCQDKSGKALLRKKFTRARLMEFLAGSPSATVVMEACAGAHFMARRIAAFGHEAKLISPQFVRPFVKSNKNDFVDAEAICEAASRPSMRFVQPRTEAQQAMRALHRVRESLVRDRVKTTNQMHAFLLEFGISMPIGTAVIKRLSTVLAENELPPYLAQLLMRLHAHYLYLVEQLTELETALEQELRRDETGQRLQTIPGVGPITASVLSSQLGDGKQYGCSRDFAASTGLVPRQYSTGGKNTLLGISKRGDKNLRRLLVQCARVFIQRIDYQSGRLAEWVKAQLERKHSNVVACALANKLARIAWAITTRQTVFER

SEQ ID NO: 88653 - protein, 403 aa, unidentified
MNNVAGIDVSKGKSMVSVLRPFGEVVAKPFSVGHTGSELKELADYLKSLDGETRVVMEHTGRYYEPVARFLHEEGVFVSAVNPKLIKDYGNNTLRKVKTDKADSRKIARYGIDNWAELRQHTPMDTIRMQLKTLNRQQSLYSKTKTMMKNNLIALLDQTYPGVNALFDSPVREDGSQKWVDFATTFWHVDCVRNMSLTAFAERYRKWCKRHGYNFSQSKAVEVHTGAQDLIAMLPKDALTKTMVRQAIDALNAVSASLERLKAEMQALAAQLPEYTVVMAMHGVGDSLGPQLMAELGDVTRFTHRNAITAFAGVDPGADQSGTHEAKSTRVSKSGPPELRRALFLVMDCLLKTQPQDDPVYRFMDKKRAEGKPYLVYMTAGANKFLRIYYGRVKEYLASLEGN

SEQ ID NO: 88654 - protein, 347 aa, unidentified
MNFYNNSHPYYCGIDLHARILYVCILDQAGQTCVHKQISDSPDQLKQLLEPYLGNIVVGVECMHCWYWVSDFCEDLGVDFILGHALYMKAIHGGKAKNDRIDSFKIANLIRGGNFPLAYVYPKEMRATRDLLRRRTKIVRHGAHLKAHVSNTTSQYNLPNHKVNLKNVSAREELKTAFPNRVVQRNIDLDIAVLDCYAKELSKIECFLEQQVKQHNPVHWHLLKSISGIGRILALTIIYEIGHIERFESVQKFASYARLVKCKAESAGKSYGTQGNKIGNAHLKWAFSEAAVLFLRGNEKAQKYLLKLQKRMSKAKALSVLAHKLGRCVYFMLKNGTVFDEIQFLKS

SEQ ID NO: 88655 - protein, 325 aa, unidentified
MSLPCLGIDVGKHKLYAALLFTADRKPKRKTLSNDASGHQALLQWLAYHRVDRVHVCVEATSTYAHPVARYLHEQGHVVTIANPKQVKAYGESLLVRTKTDRVDAAVIARFCLERKPRAWTPPTPEVEALQALARRLDALDKMISQERNRLETTSSELVEDIKAHLEFLKQQRKSLLEKINHHIERHDTLNHQRDLITSIPGLGDKTAAIILAEIGDIHFFKSARQLAAHAGLTPKEHESGSSIHKKPRLSKVGNARLRKALYMPALASINHNPVIAQFRERLLGAGKLKMQVVGAIMHKLIRWVFGVLHSGQPFDANKALAVHA

SEQ ID NO: 88656 - protein, 400 aa, unidentified
MISVGIDVSKGKSTVCLLKPYGEIVCKPFEVQHTEKDLEELANLLQKLDGEIKIVMEATGIYHLPILTFLLEKGFFVSVINPLMMKRFSKDNSLRGAKNDRLDSVMIASYGIEKWYKLKKYEVNDRIYTELRLLGRQYYRFMQTHVKLVQELTHLLDYTAPGLKAMFNSWNEHSNRDKLSDFVERFWHFDLITSLSREEFVEQYLLWAKEKKYHQSRSKAEKVYDLASNGIPTLSSHTPSTQLMIQGAINVLRIVNNSLYHILSRMKELAKSLPEYATVRSMGGVGDSLAPRLIAEIGNVKRLRNGHSLVALAGIDPPPYESGQFVGTHRRISKRGSPILRKIGFEVMRMLKSHKEPEDNAVYNYILKKEAEGKNKKLSKIAGLNKFLRIYYVRVMEVYQ

SEQ ID NO: 88657 - protein, 343 aa, unidentified
MDQYVALDVSLQKTAVCVLNASGSVVIEAELPSEPAALTAFIQTHAPRAARVGLESGPTSPWLWHSLKAAGLPVVCMDARHAHAALSVRPSKSDRNDARGLAEMVRMGWYREVQVKSLAAHERMALLGVRRRLVDMRVEIDGQIRGILKTFGLVVGSGNKGAFAQRARMLVQDHPVLSALVDKLIEVRAVAVAKVAALDKEIRRFVRDDPTLRRFMTVPGVGPVTALAFRSTIDEPDRFKRARDVGPYLGLTPRRYQSGETDRQGRISKCGDRFTRTCLYEAANVLLTKVQRWSPLKAWGTRLARRIGSKKARVAITRKIAVILQCIWTDGTEFWWTKEPATA

SEQ ID NO: 88658 - protein, 337 aa, unidentified
METQKQYVGIDLHRRRSVIVRRNEAGETLDTVRIDNDPETLAAELAKAGEHPEVILEATYGWYWAADVLKAGGATVHLAHPLGNNWGHRRVKNDERDATDLVDLLRMGRLAEAWVAPPALRELRELVRYRAKLVHLRSGLKAQVHAVLAKEGIAVPMTDLFGVGGQQLLDKIQLADAYRIRVESLRDLIELCDKEVAMLEHEVAPFFAGDLGYHAVQAIPGVGPVLGAIFVAEIGDISRFGSARHLCSWAGLTPTHHESDEKVRRGHITKQGSRLVRWAAVEAVAHQSADTPIWAHHHRVGDRRGKQIGRVAAARKVLILVYYGLRDGEIRCLAPTG

SEQ ID NO: 88659 - protein, 311 aa, unidentified
MTIPQEVIGVDVSKGWIDCHWQSTGEKQRLRTAPAMLRRFADKASSALVVFEASGGYERPLAGALDAAGVTYARVNPRQAREFARACGRLAKTDQVDAAVLAEMGRALAPRPTPPADPAGMRLAELVARRDALGAMRKAETQRLGQACDRFLRKQIAALLRVLRGQIERLEAEIAAQIEAHPALADRAARLESVPGIGPVIAANLVARLPELGRLDRRAIASLAGLAPHACDSGQMRGRRRIWGGRTEVRRTLYLAAFIASRYDPHIKAFRRRLQDAGKPFKLAIIACARKLLTILNAMLRDAAHYVKPAI

SEQ ID NO: 88660 - protein, 404 aa, unidentified
MSVHAAPVTSSTIVVAVDVGKTSAMLSVTDVARKRVLGPVEFAMTRSGLVAMVRGVSAVVAPSAQVKVGVEAAGHYHRPVLDYRWPTGWEVLELNPAHVAEQRRVAGRRRVKTDAIDLEAITELVLAGRGQVITDREVLIGELAAWAVHRSRRVAVRTATKNQLLGQLDRTFPGLTLALPNVLDTKIGRLVAAEFADPARLCALGVSRLIRFAAVRDIQLRRSVAERLVTAAAEALPTRDGVVARRVLATDLGLLTDLDSQIENAERELAALLPVSPYATLTSVPGWGVVRVSNYAAALGDPDRWPGPRQIYRASGLSPMQYESAGKRRDGRISREGSVALRRALIDLGIGLWLTDRAAKAYAAELKSRGKPGGIITCALAHRATRIAHALVRDHATYNASRWT

SEQ ID NO: 88661 - protein, 355 aa, unidentified
MNSEKYIGLDVHQATISVAVLDSTGKLVMESILETKAETILEFFAGLRGTLSVTFEEGTWAAWLYDVLHPHVANLIVCNPRKNALVKDGSKSDRIDAHKLAELLYLNKLSSVYHGENGVRMLRELARSYLTMVKDLTRVMSRLKAVYRSWAIPCTGRDVYYTRHRAEWLGKIKEAGVRRRAERLYQQLDMLQHLRQQARRELLAESRKHPITARLRQVPSLGPIRSALAVALIQTPHRFRTKRQLWAYSGLALETRTSAEYRYVKGQLHRAKKQISIRGLNKDHNHDLKGLFKGAATRASVLPGPFQDFYQRSLAKGIKPTMARLTLARKIAAITLTLWKKGENFDADKLKSQAA

SEQ ID NO: 88662 - protein, 392 aa, unidentified
MMVSVGIDVSKDKHDCFIVNSEGEVLADVFTIPNNMDGFHYLLQRIQDCANTQNKIKVGLEATGHYSYNLLGFLLDNGLPTYVLNPLRTNIYRKSLSLRKTKTDRVDARTIASMLLSDVGLKPYTDTAYHNEELKSLTRYRFDKVKERAKLKSSIARLVCILFPELEKLVPSLHIASVYALLEEFPGAKQIAAAHLTRLKTLLETASKGHYKRDMALEIRDAARNSIGSWMPAKSLELQHTIRLIRELDDEIAEIEKQIQAIMDELNSPITTIPGIGFRMAAMIFAEVGDFTRFDSPDKLLAYAGMSPSTYQSGQLKNCYPHMEKRGSRYLRYALYNATKYVCHWNPTFAAYLAKKRAEGKHYNVALSHAAKKLVRLIFAMEKSRQPYCSAA

SEQ ID NO: 88663 - protein, 441 aa, unidentified
MKVPNPLDLPIINPHAAGVDVGSEKFFVSVAGQEPRVFLTVTSQMQEVCEYLKAEGVQTVAMEATGVYWINLHGALEEAGLQVKVVNGAHCRNFPGRKTDMQDCQWIAVLHAHDLLSGGFVPPSAIRRLRDYMRLRGDLVSMAAQHVQHMQKALDRLNVKIHVVISDITGWSGMRIIKAILAGERDAEKLVTLCDPQILKTKKAPMIEALRGLWRQEHLFALRLAVESYESYQQQISQCDAQIAEVIKELSEGRATPPLSPPKELRHNAIILEGLQQQVAQIYSKDLTRLPCINESTAALLLSEIGNDMSQWPDWRHFGSWLALAPCSAQSGGKRRQVKRYLTRAGQILCRAVQCMAVGKHTWLASFYRRIRAKRGAKVAIKATAYKLAKLIFLVLTKGWEYVEQGIAKYEERIRQMRLKALQKLAKELDFVLLPKNMANS

SEQ ID NO: 88664 - protein, 400 aa, unidentified
MQEQAERVVVGMDPHKRSVTIEVMTANETVVGTGRFGTDQVGLAEMRRYVNAIQPSVEGRVWAIEGCNGIGHHVAVRLLAAGEQVVDVPPKLSARARVFATGQGRKTDATDAHSVALVGTRMAGLRRVVNDEQLAVLRVLVDRRRSLGEEHSRKVSQLHALLLELIPGGAKRDLSAAQAKKLLATVRPRDIAGKTRRRVAAELVVDLERIYARKKAANKELRALVAATGTNLLDLPGIGPSGAARLLVEVGDITRFPDRGHFASWNGTAPIDASSGDVVRHRLSRAGNRQINRTLHIMAVVQLRNPGPGRDYYDGKKAGGKSSNEAMRCLKRRLSDIVFRTMLDDAVARSVTAKVTGPGGQRGNDSDSSAAGSQPRTSSSEKPHPNPSRIKPRTPLPAAS

SEQ ID NO: 88665 - protein, 320 aa, unidentified
MIAAKVLVGIDVSRDWLDGFLLPAGQRFRLPNSAEGHAHLIEILQNGPSAPRVGFEATGGQEWALWKALVGAGINAVQLPPAQIKAFARSHGTRAKTDRIDAKLIASFMAFRPEAGRTLPTEKLQILRTLTTRRAQLIGMRKRLVLQISSRTRQAIPAQVDSMDDDLKALLDAQILELESRIEHVITQEKTLADKAMRLRSIPGIGPVSAAMLIAEMPELGKMTSGEAAAMTGLAPVPYDSGTMRGKRMIAGGRRTLRHVLYQAALAAAYHNPVLKSVAQRLKERGKPHKLVIIAVARRLVTIANAILKNGASWSHQSPT

SEQ ID NO: 88666 - protein, 337 aa, unidentified
MTIIRIGLDTAKHVFQVHGVDASEAPVLRRQLRRSEVEKFFAKLPPTRIGLEACGASHHWARVLRGLGHDVMLLPPQYIKPYVKRGKNDAIDAAAICEAMSRPGMHFVPVKNAEQQAVLTLLRTRDLLIKQRTMLSNAMRGHAAEFGVIAAKGPVKLAELLQRAHAEDAGVPALALEMLRLLSDQIDSIAAKLKTIEERLLAWHKQDPVSQCLVTQPGIGPIGAVSFSLKVPDPRAFRSGRHFSAWLGLTPRENSTGGRHRPGRISRQGDEILRRLLVLGATARIRVAAVGKASPWLVNLLARRPRKLAAVALANKMARTLWAMMVSGELYRRPAEV

SEQ ID NO: 88667 - protein, 350 aa, unidentified
MKYYAGLDVSVKETSVCIVDESGKLCREKKVVTHPDDLVAVLSDPAFNFERIGLEAGPLSQWLFEGLAKAGFAVVCIETRNTKAFLKAQQLNKSDRNDARGIAHMMRVGLFKDVHVKTLTSQKRRALLTARKLLQEKAIAMENDMRGLLRNFGLKVGTIRAFKFDERIRELVEAAPDLAEIIESLLAARQKLREEFVKLDRKIRGEARVDPVCRQLMTVPGVGPIVALAYTSTIDIPSRFRHLRAVGAVLGLTPVLNQSGESSRIGHVSLCGDGMLRGLLYEAAQVLLIRVKKWSWLKAWAMNVAKRHGIKKAIVALARRLAVVLHRMWVDGSEFRWTREATPTTTDATA

SEQ ID NO: 88668 - protein, 323 aa, unidentified
MSTSHFLPLGVDVSKKKIDCALMLGAKFKNKVFANTPEGFASLCAWIDQHAQDSVHACMEATGVYWEALAVHLANAGHRISVINPALAKAHAQSLGLRSKTDAIDARALADYCRQRQPELWVAPTPSEQRLRALVLRLQGLVAMRAEEKNRIESARDSVRDSLNKHLQWLDEEIKRIEQQISQTLDDDPSLRGKRELLASIPGLGERTLAILLAYGLGCERFDKARQFVAFAGLSVREHQSGSSVRARPRLSKVGHSRLRSALYMPAMVALYRTAWGRRYRDRLADNGKPAKVIIGAMMRKLVHVAFGVLKSGRKFDPELHIA

SEQ ID NO: 88669 - protein, 394 aa, unidentified
MSKLYVGIDISKDRSSANGIDERGRNRFELSFDMDGTGFAELLEAIEANSDSYENVVAAMESTACYHINLYSFLSAKGIEAVVINPLLIANFAKLSLRKTKTDKKDASTIAQFILAHKDSVTQLAVSQDMQDIRDMARERESLCHQISATKVEIRRLLHTTFPELESMCNPFTKVMLHFIQRFPSARLVSMAKANIIAKTLKEKPCSCRIRFTPSELVKISQRSIATVSPGKEIILSGKIDTLLHLQKRRDELTKALTKYCESSIVEDLKIVTSIAGIGNNTATTFLAETGRIDNYASHKNLIAFAGIDPTVYQSGKYEGASKISKRGNRHLRRVIWIMTVRVINHNPTFRKYFFKKRNEGQPFKKAVFATAHKLVRVIFAMLSHRTCFQEECI

SEQ ID NO: 88670 - protein, 430 aa, unidentified
MTTVPPTASNGEPAWFVGFDWGSEKHRVALFDRAGKLIERRDVAHSAAAYAELGDWLLRTTQASPAEIAVAIETTHGPVVDALIDRGFRVYAINPKQLDRFRDRYSVAGAKDDTRDADTLGRSLRTDPEAFRVLSPDNPLIVQLREASRTAAELTRDLGRLTNQLRDLLWRYYPQMLALDDNLAAPWLLELWQHVPTPAKGARLHKETVARILKTHRIRRLDADQVRTVLREPPLPSAPGVTEAATGHIRLLLPRIRLLNSQIKVVHAEIDALCQQLAGPQTIEPGESVPGQSIEQRDVAILHSVPGVGRIVGATLLAEASEPLRRRDYHAIRTLAGQAPVTKRSGKSCFVQRRLACNKRLANAMYHWARVAVVRDPRSKQRYAALRARGCSHGRTLRSVADRLLKLLCTLLQRQVSFDPNHNAKEAAAG

SEQ ID NO: 88671 - protein, 392 aa, unidentified
MVVSVGIDVSKDKHDCFIVSSEGEVLADAFTIPNTIDGFHCLLQRIQDCTHAQDKIKVGLEATGHYSYNLLGFLLDNGLATYVLNPLRTNLYRKSLSLRKTKTDRVDARTIASMLLSDVGLKPYTDTAYHNEELKSLTRYRFDKVKERAKLKSSIARLVCILFPELEKFVPSLHIASVYALLEEFPGAKQIAAAHLTRLKTLLETTSKGHYKRDMALEIRDASRNSIGSWMPAKSLELQHTIRLIRELDHEIAEIEEQIQSIMDELHSPITTIPGLGFRMAAMILAEVGDFTRFDSPDKLLAYAGMSPSTYQSGQLKNCYPHMEKRGSRYLRYALYNATKYVCHWDPAFAAYLAKKRAEGKHYNIAISHAAKKLVRLIFAMEKSRQPYCSAA

SEQ ID NO: 88672 - protein, 343 aa, unidentified
MATISMIGLDLAKNVFQVHGVDVDGAVVVRRQLRRSQVEKFFAELPPARVGMEACGSAHHWARVIGGHGHEVRLMPPSYVKPYVKRNKNDGRDAEGICEAVGRPTMRFVPVKSVEQQATLAVHGTRALLVRQRTMAANALRAALSELGIVAAQGYEGLRELMAKLEEPGEEIPEAMRGALLVLAKHWQALDADERLLERQIAKAARSDQDARRLMEVPSVGPIIASTVLAKVPDAKVFRSGRDFAAWIGLTGKDHGTGGKHRPGRISKQGDRMLRAMLICGASAYLRHQKARGVSDPWLRELLARRPYKVVMVALAAKTARIIWAMLAKGEAYRDRASASAAA

SEQ ID NO: 88673 - protein, 361 aa, unidentified
MRQSMSLVGLDVHASQTHAAILDVATGELRGVKLRMAPVEVVEFLATLSGPVRAVYEAGPTGFGLARAGIARGIDVRVVAAGKVPRASGDRVKTDRRDAERLARLLAAGELRFAFVPSIADEQFRDVIRAIEDCRGDLMRARHRLGKMLLRRDLRWTGPGSPWTQKHLVWLRSLRFDDVCSQATFVDYLSGVEMLVARRATLLGVLDEVIPDSRHAPTIASLRCFRGIDTLSAAGLCAEVGDWQRFHPKRLGGFLGIVPSEHTSDQRRRQGAITKAGSMHARRLLVEAALHYRHKPAIGAAVARRQHGQDPRAIEIAWRAQRRLHQRWSVLRDQRRKPHGVVAIACARELASFCWEAATLT

SEQ ID NO: 88674 - protein, 355 aa, unidentified
MNSVKYVGLDVHQSTISVAVLNVEGKLVMQSVLATQAAAILDFLHGLRGTLHVTLEEGTYSAWLYDLLRRHVAKLVVCNPRKNALLKSGNKSDQIDARKLAELLRGDLLSAVYHGEHGTRGLQELVRSYSTLTEDTTRVMGRLKALFRSQAIECAGRKPYGSRHRGEWLAQLHEAGLQRRAELLYQELDSLQGLRRQARQEVMQECRQHEAAKWLRTVPFLGPLRVAVLIGRVQTPHRFRSKRQFWTYCGLALETRSSADYRVQHGELLRRQKPVLIRGLNWNHNPQLKNLFKSAATAASARPGPFREFYEARLAQGIEPAMARLTLARKIAAIALSIWKKGESFHAEHLKPQAA

SEQ ID NO: 88675 - protein, 323 aa, unidentified
MGKYKETFGIDTSKSVFDVYGSKSGHRQFSNDESGFVSFLGYIPKDSLVLMEATGYYHYRFAQFLYNQGVSVAVVNPLSVKRFIQMKLAKVKTDKSDAKAICEYGQYTELTLYNALSEVQSECYQLFRLLDNYIKHRTALKNKLQGEEVLGIPSNFAYRSLKRSLSHLDKEISSLEARLLSLVKQDQQHQLSLLTSIPGIGTKTALFLIIVTDGFTKFETSSQLCSYVGITPTLRESGSSIRSRGRISKVGNKKLRNLLFLCSFNACKYNLACKKLYDRLVAKGKSKKLALIAVCNKLLKQAFSIAKSGLAYDANYVSVLATK

SEQ ID NO: 88676 - protein, 456 aa, unidentified
MPEKEKRLRARSSGRLSTINEHAAGLDVGSTFHVVAVRGDQDDQPVRTFRSFSGDLHQMADWLTSVGIKTVAMESTGVYWIPVFEILEARGFEVLLVNARDVKNVPGRKTDVNDAQWLQQLHQHGLLRGSFHPRADVARLRTYLRLRERMVEYAAAHVQHMQKALMQMNVQLHHVVTDITGATGLRIVRAIVAGTHSPEQLATYRDVRCDASEETIREALTGNYRAEHVFGLKQALELWDFHQAKVAECDVEIEAVLKSLNEAHVEPEEPIPAVRHAKARNEPKFDVRSALYTLLGADLSQIHGFGPYTVLRLVAECGDDMKKWPTAKHFTSWLTLAPGNKISGGRVLSSKTRRSSNRAAALLRIAAVNIGKTQTALGAFYRRLSARTGKAKAVTATARKLAVLFYRALRFGLAYADPGAGYYEERYKRRVIENLQRRARGLGFTLVEIPEAGGVS

SEQ ID NO: 88677 - protein, 341 aa, unidentified
MRKTFFCGVDLHSNNAMYVITDQQDKLLLKKRLPNQLPVVLESLEPFRKQLKVVAVESTYNWYWLVDGLMDHEYPVVLANPSAIDQYDGIKEANDLTDAAFLARLARLDILPTGYIYPREDRPVRDLLRRRTLIVKQRTAIIQSLQNMAMRQTGQSISWRVIRKLSDEERTEFLGDHDCLAFVTTEQADLIQLLKEKSKRFKEKVLEHAHLKPAYECLLTIPGVGVILALTIMLETGDIGRFEAVGNYTSYCRCVRATRTSNSKSKGKNNSKNGNAYLAWAFVEAVHHALRTCPQAKRFYDKKLAKRNGALATKALAAKWSKAAYYMMKRQEAFDLMRVFG

SEQ ID NO: 88678 - protein, 350 aa, unidentified
MMIIGCDFHPRYQQIAMMDTETGELTERRLEHENGEAQAFYASLAKPARVGMEATGYGQWFERMLAEQGHELWIGHASEIRAGVVRKQKTDARDAAHLLRLLVEKRFPRIWIPSPAERDARQLLRHRHKLVCFRVSVKNQLHGLAMSQGICRKKKLFTAKGREELEKLSLGPWASRRRQELFGMLDRFNPVIDELDRAVQQQAENHADAARLMTQPGVGPVTALAFVLTLGPVARFPRGKHVVSYLGLNPKERSSGDKQHTYSISKQGNTMMRWLLVEAAQTAVRYDPELLRLYQRLKFRRGASVAKVAVARKLAVKLYWMLRATASVAQRAPMQGSSGGTLIPHVGSKF

SEQ ID NO: 88679 - protein, 345 aa, unidentified
MEPMYYIGLDVHKRKISYCVKDGAGKVYSEGSLAATRLDLDVWMKTLPQPWSAAMEATMFTGWIYDHLKPHAAALKVAHPLMLRAIAAAKKKNDRIDANKICDCLRCDFLPECYMAPTAIRERRRTLRYRNLLVRQMVQMKIKISSLLMEAGVSYNKQRLHKAGYFRELLATNPDINEGLKPLLQLCRETVVRLQKTESAMVRSLERDSLLTDRVERLMTIPAVGPITALTWTLEVGDVQRFSSIKKAISYCGLCGAEKSSGSTVQRTPLSKQRNKHLQTTLIEAAKMAPRNSPELAMLYDKEKQKGNVNRATLAVARKLVAYLVAVDRRQKEFLTVERENRTAA

SEQ ID NO: 88680 - protein, 414 aa, unidentified
MLKIVYRVCCGMDVHKSFVVACIASTNEQGVTTYKSKRFSTFTGDLRRCAAWLAENDCKDVCMESTGKYWIPIYNILEPICNIVLAHPKYVKAIRGKKTDKRDAKWIADIFKHDLVAGSFIPPADIRQLRDLFRYRWKLTNFTTGEKNRAQNCLTVSNFKLDDVFSDVFGKAASAITSRILENPTEKITDVSGFRTKGMKATNEQVLAAVDGVMCEEQAEKLRIIRSHMDGLELCKLNLESLILSVAENYLPQLNLVMTAPGIQSFAAIGIISEIGVDMSVFPTSKHLCSWAGLTPQNNESAGKKKTTRISRAGAYIKPLLVQCALCAIRAKQFPEVRNRYLALKKRRGHKKAIIAIARMLLTAIYNMLKKNEPYNPELYRKGDRPPAHREVSVEEAIFILQRQGYLVTAPPTV

SEQ ID NO: 88681 - protein, 360 aa, unidentified
MPASPAPLTQAPQDTIGLDLHKRESQLCILGADGTVTERRIATTRERFTAVLGSRAPVRVLLEASTESEWVARHLESLGHTVIVADPTYAPMYATRSRRVKTDKRDARTLAEACLVGAYRPAHRLSDAQRHVRAELAVRDTLVRTRTRMVAVIKALVRRDGLRLGAGDPERTGRRFAVLDATGAVSATLRAEVAPLLAVLAPLNAQIADADRRLTAVAAHDPRVQRLMSAPGIGPVTATAFVATLDDVGRFRDAHQVMSYLGLVPSERSSGERQHRGRITKAGSPRVRWLLVEAAWRILRIRDADTAPLRAWAERIRLRRGTRVAVVALARRLAGILYVLWRDDVDYCAQRVHTKEVAVA

SEQ ID NO: 88682 - protein, 352 aa, unidentified
MTVTTLARSITGGVDTHLDVHVAAALDERGALLGVESFPTTESGYKLLLGWLSDFGSIVLVGVEGTGSYGAGLTRHLQAERVRVVEVDRPNRQRRRRKGKSDPQDAITAARAALSGDAAGEAKTRDGNVESMRVLRVARASARKGRTQALNQMRGLISTAPEPIRAELRGLNVFHLLERASTYRPGAKRDIVSLTKLSLRMLARRAITLEEEVSEIDAILKPLVKETAPRLVGALGVGTDAASALLVTAGDNPERLRDEAAFAHLCGASPIEASSGKQERHRLNRGGDRQANSALWHIVITRMVYDPRTTEYIDRRTKEGLTKKEAVRCLKRYVAREVFSLLPHEKLGLDSP

SEQ ID NO: 88683 - protein, 338 aa, unidentified
MSKVTTIGLDLAKNVFHLVGCDARGEMVRKRKLKRSQVLAYFANLERCRVAMEACGGAHYWGRELEALGFEVKLISARYVKAFVRGNKNDYNDALAIAEAAQRAEMRFVRVKTPQQQDVQALHRLRKGCVDTRTALCNQLRGLVGEYGLVAPKGVSALRRAIPHWLEDGENGLSELFRRLLAESYERLKELDTHIASYDQEIERQSRQDEACQRLQSIPGYGPIVASVFRSQIGDGQAYRRGRDVSAALGLVPRQHSSGDKTTLLGISKRGDRYLRSLLVHGARAVVSRAAHKDDRLSRWINKVRAERGYHKAVVALANKMARMGWAVLAHNTAYQPA

SEQ ID NO: 88684 - protein, 410 aa, unidentified
MEVILSCCAGLDVHKDSVEACVRRTSAGGKVEHEVRHWATTTRELVAMSDWLSSLGVTHVAMESTGVYWKPIFNILEEHFEILLANAQHLKNVPGRKTDIRDCQWIAQLLQHGLLKGSFIPPRPQRELRDLTRQRTQLVDETSRISNRIQKVLEDANVKLGSVASNVVGASGRLMLEAIVAGQDDPAQLADLAKRRLRAKLPQLEQALYGKLTGHHRWMLGLLLDQLRTTEQFIARLDERIAELTGPLEPVLEKLDAIPGVDRRVAEVLLAEIGPDMTPFPSDAHLASWAGIAPGNNESAGKKRSGKTTKGSRWLRQALVQAAWAASHKKDSYFQAHARNLMHRRGRKRGLVAVAHSLLIVIYHMLNDNTAYRDLGTQFLDQIRANHLTRFHVRRLQQLGLQVTITPQTV

SEQ ID NO: 88685 - protein, 366 aa, unidentified
MDTIYIGVDFHARQQTICYLKTETGELVTCELKHQDKEVVRAFYAQFSGQIIVGLEASGYSPWFERMLEELGCQVWLGHATEIRRRARWRQKNDRRDAELILDLMLHNEFPRLHRPAVQSREVLRMLRYRQKLIKMRTMSKNSLQAIALQAGLAKGSRLFTKAGQQELGTAEMSPVLHWQREHWLQLMEPLNQQLLETMVWFKSQSKDDDRITRLRTHPGIGLLTSLCIVHTLQPVSRFRNTRKVAAYAGFDPIERSSAERKCFLGISKAGSRLLRYLLVEAAQTAVRKDEDLKRFYQRLADRRGRPKAKVAAARKLLIRAYIMMRDEIDYAEFRHRAVAARLARRSQGPANVPEVLIGQPASPEQ

SEQ ID NO: 88686 - protein, 376 aa, unidentified
MGPKVSGQYHHRRPTLNLPHAMTRRSRIKPAAKPLIAPEPCLPGTAGAVGIDVSKATFHACYRADSKARPKAGVFTADPVGHAKFLTWLDRVGTHQSLHLCLEETGCYGRALASFLHQAGHHVSVVNAALIKNYGRSLNLRTKNDRVDAQLIAGYTLERIPARWQPLEPQHQALRDAARRRQQLMGLLLQEKNHLEASPSPAIRQSIQQTIDALQAQRADIEAHMKALIAADPQLEHNAALLVSIPGIGFLTAMLLLAELPPLDSFTTARQLSAYAGLTPREHQSGTSVNGRTRLCKQGRSGLRTLFFMPALSLMGRKTGPLYHFAERLLKAAKRPACVMGALMRKLSTLVFAILRSGKPFDPNYSRTMALSPAVP

SEQ ID NO: 88687 - protein, 368 aa, unidentified
MAKNTTKAAVGETRKRTMGLDLGDQYSYYYTLDAAGENVESGRVKTSREGLEKRFGGEEAARVVIEAGTHSPWVSRVLAGLGHEVVVANPRKVRLISDNEGKDDPVDAELLARLGRVDVKLLSPIQHRGAEAQADLAVIRARDALVAARTQLVNHVRGAVKSLGSRLKKSSTRSFAGKVGDQVPEALRAALEPMLEVIAELTSQIGGYDQQIRRSCQQKYPETALLTAVPGVGMLTALGYVLTLEDPHRFASSRAVGSFLGLRPGRDKSGQQDPELRITKAGSPLLRRLLVGSAQYILGPFGPDTDLRRWGLKLAGRGRKNAKKRAVVAVARKLGVLLHRLWGQGEVYQPLYQAERAVAVTAVAGARS

SEQ ID NO: 88688 - protein, 311 aa, unidentified
MNSEAYVGVDVSKDVLDVKVLPNNETQQISNDDVGINKLIKRLTKIDPTLIVFESTGGLEMLAVGSLIENHLPVVLVNPRQVRDFAKATGRLAKTDAMDADTIARFARDIRPEVRPVKDEHTQLLSALNARRRQIVDMLVAEKNRLSRAPKPNRKSIQKHIQWLEKSLTDINKDIDKTIKKSPTWRENDRILQSFKGVGPVVSATLLSDLPELGTLNRKKIANLVGVAPLNCDSGHFRGRRRIKGGRANVRRKLYMAAVASLRHNLLMKKFYDRLVEAGKPPKVALTACMRKILTILNAMMRERTYWNAIW

SEQ ID NO: 88689 - protein, 344 aa, unidentified
MSIVGGFEVHRNQITFDCLDTETGEVSRGEIRPANRVRLREWLKRFQGREVAIALEGTTGWRFVVEELTAAGVAAHLAEPADTAAARGRKRHAKTDKTDSRHLRTLLADGRLPECWIPPSHILECRALLETYHDLRAERTAWVQRIHAVFFHQGAPRLGEAALRTEHGVAALREAAAARLSPAGQLQVATALDIITALEARLQPLRRQLLDAARHLTGAKALADRLYGAGPVTALAMTCWLAGEGRFSSSRKAVRFAGLDITVRSSDGKGPPGRLSRQGPPVLRWAAYEAGKTHGRAAAPDHGYYAAVKDRKNGKRAALSEARKILRQASHILAELGDDALTAA

SEQ ID NO: 88690 - protein, 412 aa, unidentified
MDVIHPRCAGLDISKKDAKVCVRINGAGRRKTSETVTTFGATTRQIMALRDHLAAQQVTCVVMEATGDYWKPFYYLLEDLPGVEVMLVNARHVKNLPGRKTDVADATWLAQLGAHGLVRGSFVPPEPIRQLRDLTRTRTAVTRERTREIQRLEKLLEDAGIKLSSVAADLNGASSRAMLEALLAGETDPAAMAELAKKRMRVKIPQLTEALYGRFTSHHAFLTRMHLDLIDQHTAAIEQLTDRIEVVMEPFRSFRDLICTIPGIGGYTADVVVAETGADMTRFPTAQHLASWAGTTPGNNESAGKVKSRRTRPGNPYLQGALGTAAMSISHTRDTYLAAKYRRIATRRGPLRANVAVQRALLVAIWNIATTNTAYHDPGGDYFTRLNPQKARNNAVRQLEAMGYHVTLDQAS

SEQ ID NO: 88691 - protein, 331 aa, unidentified
MSQIYGIDLSKEKFDVNFVDSLGVMRELEVKNKYDSICKFLSGLPENTIVCIEHTGIYGDLIVFLSNSFNVTICAIPGYDIKHSLGLQKGKSDPLDAARIREYGERFTDKLVPVSYADDDMHELRELHTLRQALVKNRKILLTQQKEKSRLPFKSISAQHIATNAINQLSAQITAVEKEIQTIINSNAEYEKNSELVRSIIGIGPVTANELIIKTHNFKKINTARRAASFAGICPFPNSSGKMVKKSRISSMGDRSLKTLFYLCATSSIQYNKDMKQYYQRKKTEGKPSYLALNNVANKLLRTIYAIIESGEKYDVNYNCLDPRLQEKNVT

SEQ ID NO: 88692 - protein, 433 aa, unidentified
MLKINYMSTLFVGIDVSSKSNAVYAMDFDENKYIDAFFGNNQPGADELAGKIAGCMQKHPHLNTIIVALESTSVYSIHIANFLASCELLMPYKPYVYCLNPKMTANYRKSYVGMDKTDHLDAFLISDFARVGRTKKCEPWRGSQYLALKRLTRHRLHLVECITREKTYMVSNLYLKFSELQLLDDDSQPFSNIYGATSSAILTEFMSLQEIIDSPEEELLQFLAAKSRNRIADISKTYELLKKAAKDSYRLDKCMYEPLNVSLASSFNCIQTYQKEIKLIDRAIEKCINGMNPNAFLILKSIPGIGPVWAAGMLSEIGDITAFHSSDALAKYAGLTWLKNDSGDFVSEDNRVSKAGNTYLRYYLGEAANSVRKYIPEYAEFYSRKYAEVTKHQHKRALALTSRKFVRLVFGLLVKNQLYTGEKLDAELNTSFK

SEQ ID NO: 88693 - protein, 401 aa, unidentified
MNAVGIDVSKGKSTVSILRPFGEIVYSPFDVDHSSSDINALIQLINSVEGESRIVMEHTGRYYEVLAHQLSEANLFVSVVNPKLIKDFDNDSLRKIKSDNADSVKIARYALDKWHKLQQYGDMEELRNQLKTMNRQFGFYMKHKTAMKNNLISIIDQTYPGVNTYFDSPARSDGSQKWVDFASTYWHVDCVRKMSLNAFIEHYQKWCKRRKYNFSKTKAEEIYEKAKELVPVLPKDDITKMIIKQAVDQLNNTSATVEKLRSLMDETASKLPEYPVVMQMKGVGPSLGPQLIAEIGDITRFHKKSALTAFAGIDPGVNESGSYEQKSVPTTKRGSSDLRKTLFQIMDVLIKTAPIDDSVYQFLDKKRSQGKPYYVYMTAGANKFLRVYYGRVTEYLSTLSD

SEQ ID NO: 88694 - protein, 354 aa, unidentified
MKYYTTTTQFNCGIDLHARQMYVCVLDRDGKKLVHTNIKNNDFAYFLKLVAPWRHDLTVCAECMFGWYWLADACAEAGLHFVLAHALYLKAIHGGKNKNDRIDSEKIAHLLRTNLIPPSYVYPAEKRPLRALLRQRLLYVWNRSELLSRLQSHQLAYNRPTHRQTPYNRESWSAQLLTAEPDPVRQFALQNDLALIGHYDTQLAALEKELLQLTKQTASRDFTLLQTAPGIGDYLGLTILHEIGDIARFPTVKNFLSYCRLVKGTVASAGKIKGLRGAKLGNPYLRWAFGEAAVVAKRDPLVIGPLAQRLEARLNNRFKANTVLAIKLARAVYFMLKQKTVFDPERLVAALSKN

SEQ ID NO: 88695 - protein, 344 aa, unidentified
MKTVSLDVHSDASQLYAVNDQGEVILEMRVPTEAGVLRQIIGGIPGRKRVVFEEGPLSGLLRDALSEVAEEVVSCDPTHNALIARNENSNDRDDAIGLSTLARMGELRPVYVPPEPYRTLRGLLMHDWHLHQDIVRAKCRIKALCRQHGIRYGRENIYAPARRDGVLAQLDRPARVWQMRSLYRQLDLGIRERGAGRRTVSRLVREMPEVKRLQGAPGVGPQTARTLVAWIVDPGRFKSRNALAAYCGLGLGRGWTNWKPVGRTRASKRGQRQLKRLLFIAAKAASHGSSALARRYHARQASGWDHSKAIRDVARTLLRVVCVMWTKHTEYCDDRVSVPQRTGA

SEQ ID NO: 88696 - protein, 344 aa, unidentified
MKIKLLGIDLAKNVFQLCALNQANKVLYNRTVRRARLSSTIAKLEPINIAMEACSSAHYWGRTFEAMGHKVLLVPAQHVTPFVRGGKSDARDALAICEAAQRPGIHLVPIKSIEQQDIQLLHRLRQRQVQHSTALANQIRSLGREYGVIFPAGIKSLISHLPEALEDGSNELSPVARYALADQHRCLIEVRQAMKTFLQQIEQLANQHPAFVNLLPVLGIGPMIASAYIAAIGNGNQFKCGRQVSAWLGLVPRQYGTGGQIQLKGISKSGDRYLRTLMIHGARAAITRGLKNNPELAQWVQPIIDRQGFNKAVVALANKLTRICWVIVTTGKAFNMKQAFKPVA

SEQ ID NO: 88697 - protein, 342 aa, unidentified
MTEYVGLDVSKEETAFCVKDGEGKILARGKVATDPAALFDVLRDHCLCPGRIVLETGTLSGWLARELGKRGIAVDVIDARQAHAVMRLQHNKTDAKDAALLAEIARTGFCRPVAVKSETAQEGRVLLKARAHLMGQRRDTENTIRGLLGSLGLRFPKGSGKLAGRVREALEERPELAPMMEPLLSSLAALRGESARLDKTVTAWTRADPACRLLMTAPGVGPVTALGYTVTIGDAERFAKSRAVGAYVGLTSRRWQSGEMDYSGRISKHGDAMLRSLLFEAANSLLTVVRRAHPLKDWARRVRKRTSHKKACVALARKLAVILHRMLITGEAFRWPEKEATA

SEQ ID NO: 88698 - protein, 344 aa, unidentified
MEHFAGLDVSVKETSVCIVDDTGKIVREVKVASEPEALLAVLNNPAYHFKRVGLEAGPLSQWLFSALAEAGLPVICVETRHMRAVLKAQINKTDRNDARGMAQMMRVGLYRPVHVKTLRSQKLRMLLTHRKLLQSKAIAIDNDLRGTLRNFGLKVGMVGTVRFEARIRELVENLPDLAALVEPLLIVRRTLREQFCILHRRLLAIVRDDEVCRRLMTTPGVGPVVSLTYRATVDVPARFRKSKSVGAVFGLTCAKYQSGEVDWDGRISRCGDEMMRTMLYEAAQAMMRSKKWSWLKAWAMQIARRRGMKKAIVALARRLAVIMHRIWVDGTEFRWTREQAAAAV

SEQ ID NO: 88699 - protein, 420 aa, unidentified
MENVSDHEEIVERVAALDIGKAELVCCVRVPGSGGRGRAQEVTTYSTMTPSLQTMADRLGGLGVTRVVMEATSDYWKPPFYLLEAAGFDVWLVNARDVKHLPGRPKTDVLDAVWLCKVAERQMIRPSFVPPPPIRLLRDLTRYRVALVSDQTAEKNRVEKLLEDAQIKLSVVASDIFGVSGRAMLDALIAGERNPQVLAQLARASMRRKIPRLEEAFVGRFGDHHAFLLTRMLARIDALSADIAALDARIDEQIAPFADALDRLDEIPGIGRVGAQVIIAEVGLDMGRFPTPGHLASWARFAPGIKESAGRKKGAGSTGHGNPYLARALGEAAVGASRTNTFLGERYRRIARRRGKKRAVVAVGRSILIIVWHLLAEEDTRFTDLGPGFYDARAGSDRTKRNHVRQLEALGYKVTLEPAA

SEQ ID NO: 88700 - protein, 339 aa, unidentified
MNSMAVGVDIAKQVFQVHYVDQATGEIVNKPIKRARFLEHFANRARCLIGMEACGGAHHWARQLTRMGHEVRLMPAEFVKAFNIRNKSDAADARAIWLAVQQPGKPVAVKTEMQQAMLALHRMREQLVKFRTMQSNGLRGLLTEYGEVMSKGRAKLDKEIPAALGRIAERMPAALIDTLREQWNGLAKLDERIAEIERRMREWKKEDRAVKAISEIPGVGLLTATAAVAMMGDPKAFRSGREFAAWAGLVPKQTGSGGKVNLHGISKRGDTYLRTLLIHGARAVLTHVKEPGPWVEQMKKRRPVNVVIVALANKMARTIWAVLAHDRPYRKDYVSVKPA

SEQ ID NO: 88701 - protein, 374 aa, unidentified
MSSDGITWVGLDAHKKSIHVAMLVPGREEPVSWQEANEESAVRRLARRLNREGPGEVRACYEAGPLGYTLQRELEAQGVICEVVAPSLIPIKPGERIKTDGRDARKLAEMLRSGMLTAVQPPNEADESLRDLCRGRDSVRQDLARSRHRMSKFLLRRGSRYHDTQRHWGVRHMKWLRPLRFEHAAAQAIFDHYLRTIDHLDERQRQVDAQLGLFGSQEPYCQPVAWLRCFRGIDTVTAVSLVAELHDFRRFRSARSLMAYLGLVPSERSSGEQRRQGSITRAGNHHVRRLLVEAAWHHRHRPVLSQPLRKRREGQPAHVIAIADRAQERLHGRFIRMTRRGIHYNKTVVAMARELVGYLWATLYPRETEAPPSA

SEQ ID NO: 88702 - protein, 342 aa, unidentified
MDIKVIGIDLAKNVFQVCVCLMDNSVMSNKKVNRNKLLDKIRQFPEGSLIAMEACGTAHYWGRQFQALGYQVQLIPAQHVKPFVANQKNDANDALAICEAVFRPNIHMVPVKTVEQQDIKALRCVRSRLVQNRTAMVNQIRSLASESGVIFSVGRLQLQASLSRILANNEHELSHTLHYLLKFLYEDLCVLNERINQIERDIKALCQIQPRYNALLSIPGFGPLVTASFMSELGSGHQFKNGRQLSAWCGLVPSQSSSGGKVRLGSITKNGSSELRVLLIHGARAVGRFASKRDDRLGRWFNALALRQGRHKAVVALANKIARIGWRILTSNDNFDVNKAFA

SEQ ID NO: 88703 - protein, 412 aa, unidentified
MTATNQFAAHVGLDWADKKHDVCVQFKNGERVFHVIEHTAEALDVWLTELHQKVKGRIAIALELKKGPVVYALQKYPFITVFPVHALSLARYRQAFSPSGAKDDPQDAELALELMLRYPQKIKAIEPDNADIRLLQQLVEQRRQLVEDKRRFVNRLINTLKQYYPQPLEWFSHRGSLLLCELIMRWPSLQQLKRARHDTIRNFLNAKGGRAMALTEQRVVSIDNSIPLTTDPSVIEANALMATALATQIKVVSEIIKTYDERIETLFDSLPDAGLFKSLPGMGSCMGPRMLAALGDNRDRFNSAEEIQNYAGIAPVTERSGQKSWVHWRWQCAKFVRQTFVEWTAKTVNSSYWARLYYQGQREKGKSHQSAIRALAFKWIRIIYRCWKTRTRYDEAKYLLALEARKSPLLKP

SEQ ID NO: 88704 - protein, 371 aa, unidentified
MEQPTRFIGMDVHKETIVVAVTAAGDAGKATPYGTIPNTTAALEKLVKRLRKVGTGPVKFCYEAGPCGYGVYRTLTRIGEDCLVAAPSMIPRRSGERQKNDKRDAGSLAVLHRGGLLTSVWVPDAAHEAMRDLVRARLAAVRAVRTARQQLSAFLLRHERLYAAGRRSWTGAHRGWLADQRFERPAQQIVLEECIEAVRLAEQRRDRMDAHLHAELPSWSLFPLVQRLCALRGFDVIAAAGAVAAMGDPTRFINARDFMAYLGLVPSEHSSGQRRRLGAITKTGDVHARSVLIEAAWSYRFPARITRAKLPAIEAVPEAVRQIAWKAQTRLCHRYRRMVARGKPKPLAVTAVARELAGFVWAIAQLPDDAV

SEQ ID NO: 88705 - protein, 356 aa, unidentified
MNKVTANFENQTVYVGLDVHKRSWNAAIFLGEFYVRNIHQPPSPQALHHYLINNYPGAHYTCAYESGKFGFWIQRHFKQLGIECLVVNPADIPSTHKDEVYKTDTRDARGIGQALSGGQLKSIFVPNQDQEADRQLVRQRKKLWADLVRCKNRIKAFLDYLGIPVPSRFDNPNWSQNFLLWLRQLEFEQPSNRVTLNYMLDEMELLRKQMLSICNAIRKLMRSKKYNKLYYLLRTVPGIGPLTAASLITEIGDINRFSDFYHLNSFIGLLPMEHSSGEKELRSRITIRKHRQLRSDFIECAWTAKRSDPALALYYTEQLKKGKNGKAAIVKVARKLVSRIRYVWRTQQPYQCAVVK

SEQ ID NO: 88706 - protein, 280 aa, unidentified
MFYAALDVSLRSVAICIIDHDGKICLERSVRSDVPDVLLCLAGFDQPIHQVGFEAGALTQPITYGLTEAGYDVVCMEARQVAAALSAMRNKTDKHDARGIAQILRSGWYSRVHVKSVESHHMRALLTSRKVMQRKCIDLESEIRGLLRIFGVVLPLRLSRGAFDAAVRETIEADPALSHALLPMLEARAVLFETFTELDRRVKRAARENAICRRFMTVPGVGEITALSFKAAVDDPARFKSSRTVGAHFGLTPRRFQSGETPMPVTSTFVLRSTRPRTPC

SEQ ID NO: 88707 - protein, 352 aa, unidentified
MVTVGIDPHKHVHVAVAVDADGRRLTRPLTVKNDANLIGVLLKWIRTIADGTPVTWAIEDGRGFARRLADGLLLAGHEVVWVPTRLMAAHRKLHAATGSKSDPVDAAAVAHAAIATPGLDRHRIDDRVRELRLLVDSRADLVRRRTMVINQLKAYTHLWLDHTPGDLTRRPGMTSLTALLATTDMSTHVRRVLTEMITEIDELNKRVRGLETTIRELVTPLAPALLEITGISHVSAAVLLAEIGDITRFTSSAKLARYTGTAPIPVYSSDKERHRLHRGGNRRLNSVLYTTAIVQQRFHPGARALLARHEPTKGARGARRVLKRHLIDVIHRVMTQDRASWQHHITQHRLAA

SEQ ID NO: 88708 - protein, 274 aa, unidentified
MFIDELKNIIIDATLIEHNKNEFDNLFNSIKNYSNLIVVMESTSIYHLPVENYFRSKGIDTVVMNPKLVKQFKDTLNKSKTDKLDCFKIARCYLGTIDNFYYKNDEYFMYNPLARQYWSLFERQTRLKNRYKQLIEIVFPEFNLVFNDLYDDLALNFIHDFPHPILFVNTRFDDKYQFVSFLGIDSVTSQSGISAYHGAISKTGCKFGRTILFNVVTIILQISAHANTSNSIYLFFRKKQSEGKHHYKCIIACETKLYKIIYKLCSSNCLYENK

SEQ ID NO: 88709 - protein, 344 aa, unidentified
MTTAPTIVGIDLGKNWFHLVGLDGRGAAVLRKKLNRGQLAEYAATAPRCVVATESCPGSQYWGRVFAKAGHEVRILPAQFVKPYLKANKNDFNDAEAIAEAGNRARMRCVPLKTNEQLELQALHRVRQRIIVERTAVVNQMRALLLEQGIVIPLGRALFARRLPAIFEDAENGLSPRLVGLLHRLRQRWLAIDIEIEDATRDLTAWADQSDMCRRVVTVPGIGPMIATATVAAVGNGRMFTSGRDMAAWLGIVPRQYSTGGKPTLGRISKRGNMYLRQLFIQGAQSSFLHLKRDHSSLGEWLRQVEARRHRQVAVVALANKMVRICWKVLTTEEVYQPYPSRVA

SEQ ID NO: 88710 - protein, 412 aa, unidentified
MEDNLERCCGIDVHKSKVVACLLVGELNGEVKKTIKTFSTMTNDLLKLRDWLEAEGCTHVAVESTGVYWKPVFNILESSVKVILANARHIKNLPGRKTDVKDCEWIAKLLRCGLIEESFIPPKPIRELRDLTRYRKKLVSAATAERNRVQKILEDANIKFSSVASNVFGASGREILQALTQGEQSPEEMAQLAKGKLRGKIPELVESLNGCLSDHHRYLLEKSLRHLEFLEEPIEELEQRIDACLEPYGEECELLQTIPGVKEQTAASLIAEIGTDMSRFPTDAHLSSWAGMSPGNNESAGKRKSGRTTKGDSSLRCTLCEAAWGASRTKNTYLSARYHRIAARRGKKRAIMALGHKILVIVYHVLKQGRSYLDLGSDYFDKLHRKALETSLVKKLQSLGYCVSLEPILVAA

SEQ ID NO: 88711 - protein, 417 aa, unidentified
MEDNPSASPCRYVALDIHKYYSVVAGVDREGEEILPACRVEHLDLENWLVKHLQPTDRVVIESTTNAWHVYDLLEPLVGEVLVANPIKVGQIASARVKTDKKDTFILARLLAANLVPTVWVPPKHVRELRQLISHRRRMAGMHTQVVNRMHSVAHRHHLNHPKGKSFQPKNTLWQRDESLSRLEKMQLEVDMETREHLEKQIERMTRELGRMSHEEPWASDMLYLMQVPGCGVVTGMTILAAIGDISRFETPKALASYSGLVPGLEQSGVKLRGKGITKEGRKELRWVLVEVAWRAVKADPHWKKYFEELKRRMHPNQAIVAIARHLLTMVWFVLTHHAPYSHYSPERIAYKYLTWSWALDEEQRQGMTRPQFARYYLMRLGIGNELKRVALNPKFPYRLASVEEVLAIKPELRPPE

SEQ ID NO: 88712 - protein, 339 aa, unidentified
MAILFVGIDLAKNVFAIHGVDEHGKAVLVRPSVQRARLHQLVSALPPCTIGMEACSGAHHWARLFAQHGHAVRLMAPKFVAPYRMSGKRGKNDAADAQAICEAVQRPNMRFVPVKSLDEQARLCIHRVRQGFVEQRTATINRLRGLLSEFGIVLAQKAATVRREAAAHLEDLPGWANTAVGDCLSEVHRLDERLAEYDRHISQIAAEDERSSRLMRLQGVGCTTASALVSTIGDARDFKNGRQLAAWLGLVPGQYSSGGKTRLGGITKAGDGYLRTLLVLGAKSVLAAARNKQDRLSRWAMALEVRRGYWKAVIAIAAKNARMAWAVLAKGESFKPIEA

SEQ ID NO: 88713 - protein, 314 aa, unidentified
MVGIDVSKAELSVCRWDGQRGQVLATWQVPNSPQGVRQLLALTDPREPWALEPTGRYSELVVRVGRACGRRVLLAPPRAAKQFLASIQPRAKTDRLDARGLAQYAASVTLKPFVLKEEALERLSQLLGARRLLASSRAAFRQQAAALPYARRALQPAIRALAQQIRGLDQDLARRARQQPAIAQLQAVPGIGPISAATLAVRLKSSIFASYDQFVAYVGLDLRVSESGAHRGRRRVSHHGDAELRRLLYLCAQASVRTKGSPFAVQYQRELAKGLAPTQALCAIARKMAKVTWALVRTGAPYDPDRVYQPPTHA

SEQ ID NO: 88714 - protein, 373 aa, unidentified
MPRYSTAFGMDVHLRSTTVCALDAETGEAVTRRFRGNPWGEVAEWMSGFPGPSLAAYESGYLGFAPQRELSGLGVDCVVAAVSKVPRSAADLSSKNDRNDAARMAKAILSHDISPVWVPSPEIEGLRDLAGAHDAATARLAAAKQRLLAFLARRGYAYGGTTPAGNPRRYWTYDFLRWLDKVRPADDGGIRALAALRSEVEAADETREALLAEYRAAVAAGPLSAEVEALQSIKGCGFALAAAFASEVGDFSRFRSGRQVTSYFGLAPKQRSSADSVRLGGISGAGNALVRRLAVEGSWSYVQASHQPKLMPKGSGVPLEVRMHGRKGSERLLRRREEMLARGMPQAKANAATAAELVRWLWALGAMCREATE

SEQ ID NO: 88715 - protein, 397 aa, unidentified
MAPCMLTSVMVDNSLIDKTGAGEASVASRASTSRRREFDRAEVFKAVTKREPRRRYGTNPNSRLSRRKTASSHLQVREKTMSEKVYVGIDVAKNTFNVAASPSVLKTCLPNTSDGHRQLCRSLKNHNIALVVLEATGGYERPIVAELLDANLPVVVVNPRQVRDFANGMGQWAKTDPIDAQVLAKFAQIVQPAPKTHSTPQTTELTELVRRRRQLNDLHTQESNRLLMIHHPKVKKSIRKMIKTLDFQIDEIDHLIREHIDADDNFKNKDRILRSAPGVGPQTSAMLLAQMPELGSLNRQEITALAGVAPWDRSSGKWLGKGHIWGGRKDVRSVLYMAALSARNCNPAIRQFAQRLEDEGKAFKVVITACMRKLLIILNTMIRNQTLWTAKMSLKNP

SEQ ID NO: 88716 - protein, 422 aa, unidentified
MLAESHDEEQIIARVAALDIGKAELVCCVRVPAPSSTGRRLQEVSTHSTMTRSLTELANHLVELGIERVVMEATSDYWKPVFYLLEAHGLEPWLVNARDVKHLPGRPKTDVLDAVWLCKVAERQMLRPSFVPPVPIRRLRDLTRYRIDLIGARTAEKNRVEKLLEDACIKLSVVASDIFGVSGRQMMAALIAGERNPKTLAQMARSRMRTKIGQLEQAFDGHFGDHHRFLLARMLARIDGIDADIAALDAQIEAQLTPFAPAAARLDEIPGIGPVAAAIILAEVGVDMSRFPTAGHLCSWAKFSPGINSSAGKTKGNASTGHGNRYLARVLGEAAVVAGKTRTFLGERYRRIARRRGKKRAIVAVGRSILVIVWHLLHDENAIFTDLGPEHFHRRVNPNNKTRSHVRQLEALGYTVTLTPAA

SEQ ID NO: 88717 - protein, 396 aa, unidentified
MTTIGIDIGGRTHVVARCRDGQARADREILRVSQDRAGFATLDSWLGRQTEPVTLVTMESSGHYWMPLASHLGRREVPVAVVNPLAAKYFAKSRLARTKSDPADARSLAEMAMRDTPDARDPLAGVELRQAARFAMTLVTEQAKVCQRLIRLVELGFPELGELFEDPTCRTAREVLRIAPTARAATRRRTTTLANANAGPGHRRLGTARAERLQAAAADSIAVPELDAEVAFEVGLLLDQFDLLERQIEDADRRVAGLLDGETARRLQTIPGVGPSIAATLLAEIGDIERFDDFDQLLAYAGVHPAERSSGRKGANPETAWHMSKAGNAHLRAAAYRMAVVGVQHNPVIAAHYARKRAAGKSKMNALGHCMRKALSIVWGVWRNGQDFNPDWGVGT

SEQ ID NO: 88718 - protein, 321 aa, unidentified
MNKSTNFIGIDISKDVFDVYSSEQGHYQFTNNVKGFKSFFRILDNSHWCVMEATGCYHQQLALFLFDKAIRVTVMNPLVIKRFIQMKLNQVKTDKSDAKMIYQYGQEQKMDLWQPSPEYVEDCKQLQSATQLYFKQSTAIKNKLHTLQTRGFKRGNLIRSLKRQLKSLQKEIKLLETEMEQLIKTNQQDLYTRLNTIPGIGKKTAMLLIVTTNGFKNFESSKQISSYLGLAPNERSSGSTIRGKTRIGKTGNPLVRNHLFLCSFTASIHNPQCKALYDRIVAKGKSKKLALIAVCNKLIKQAYGISKSGLPYDKNYVSKLA

SEQ ID NO: 88719 - protein, 410 aa, unidentified
MEVLHPRCCGLDVHKETVVACVRRVIDGKTVKEVRTFSTTTANLIAPSEWLAEAKCTHVAMEATGVYWKPVWHILSDENFELVLANAAHIKNVPGRKTDVKDADWISDLLAHGLIRPSFVPDPQTQEMRTFLRTRKQFVREKSSHILRIQKTLEDANIKLDSVITDIMGASGRKMIETLIAGEKDPAKLARLADPRVKASQESLREALRGRVTNSHRFLLRLHLGHIDAIDAAIAEVDREVEAGIAPFRTAVQQVTTTPGIKSLAARTILSEIGTDMSRFPTSGHLISWACICPRNDESAGKRRSTRIRKGSPWLKTTLVQCAWAATRTKGTYLHAQFHRIRARRGPKKAILAIAASILTAIYHMLKDGTLYQDPGPNCLNARNKERQKNRLIKRLADLGYVVELVPQAS

SEQ ID NO: 88720 - protein, 338 aa, unidentified
MNEITTVGLDLAKNVFHVVCRDHRGEEIKKRMLRRGQVAAYFAQLPACLVGMEACAGAHHWARTLQALGHEVKLIAPQHVKPYVLGNKNDYNDARAIAEAVTRPGMRFVPVKTVAQQDVQALHRLRQARVADRTALINQVRGLLAENGVVIPQGLQSFRRQVPQILEDAENGLSDRIRRYINSCYEHLQQLDAHIDDYTREIKRESREHEAVRRLQSAPGFGPILASVFYSVIGEGGAFKRGRDVSASLGLVPRQHSSGGKQRLQGISKRGDGYLRSLLVHGARSVVRRAAGKEDRLSRWIQRLIAERGVNEATVALANKLARIGWAILHHQTVYRTA

SEQ ID NO: 88721 - protein, 402 aa, unidentified
MNCVGIDVSKGKSTIAVMRPFGEVVVSPFEVCHTASELSELARLLKSLDGETRVVMESTGNYHAPVAWLLHGAGLYVSVVNAMLVHDYGNNSLRRGKTDKKDAVKLANYGLDHWLTLPRYVPEEDTRLMLKTCYRQYQQYSKVQTMLKNNLISLLDTAFPDANRLFTSPPRADGSEKWVDFVATFWHCECVCGLSKKAFTAKYQKWCRKHGYNFSQDKALDIYASACGRFGVMPKTNTAKLLVEQAISQLQTTSAALAALKQEMQSLAASLPEYPVVMEMFGVGPTLGPQLIAEIGDVRRFHSKKALVAFAGIDAPPYQSGQIDVRSRSISKRGSASLRRTLFLVMGVLLQCAPMDEPVYQFMNKKRSEGKPYRVYMMASANKFLRIYYASVKTYLDSLEHN

SEQ ID NO: 88722 - protein, 354 aa, unidentified
MPRQCKDTVAVLGIDIGKNTFHFVGFNKRGAIVLRLKLSRRQLEARLANLPPCLVGMEACVGAHHLSRRLKALGHDPRLMPARYVRAYLKGNKNDFRDAEAIAEAVQRPTMRFVATKTAEQLDLQALHRVRSRLVSERTAIVNEIRAFLLDRGIAVAKGLRRLRAALPGILATRTDTLSPRLLHIIEDLTVDWRRLDERIDNVSLEIEALAKQDAGCGRLMTVPGIGPIISSATVAAIGTGDVFAKGRDFGAWLGLVPKQISTGDRTILGKISKRGNKYLRTLFVQAARVVLLWPGSWERYGLKPWIEAAARRLHHNVLAIALANKLARIAWSVLHHGRNFEVRRLSEPTSQSA

SEQ ID NO: 88723 - protein, 328 aa, unidentified
MIKRTTICAGIDTGKRKLDVGLDGSGKQLQVENTPEGHKVLLAWLSQHRVKRVGIEASGGYEQPVVAELRRKRFVVVVFQPAQVRAYAKFHLQRAKNDKIDAALIAACTAAVRKIHAAPDPRLLPFAEQLTMIDQINEDTARLKNRIESCRNAQIKKLWKEDIARLEKREKAELKALVASIRKHPDLAKRLGLINSVHGIGLPTAVAILVRLPEIGRITREQAVALAGLAPYDDDSGEQVGVRHIEGGRKRLRRALYTASLAASFRWNQQLIQLYQRLTAAGKEHKRALVACARKMLIFANTVVARGTPWCDEPPAVKASMARSLSVS

SEQ ID NO: 88724 - protein, 426 aa, unidentified
MLNSQINKIQAITSDTLIVGVDIAKNIQWAQFINFRGIEVSKHICFENNYSGFNSIMEKIEEIKSKNNFLSVIVGMEPTGHYWKTFATFLHNNGIKVVQVNPYHTKKAKELDDNSQTKSDKKDALVIAKLIKDGRYSAIYFPEGEYADLRNLSNTRLEVSRLLNICKNRIHTCVDEYFPEFETVFKSFIKGKVALHILKRIPFPTDILELTLEDIISVIREAAKKSVGKKKAEELIRAAKVSIGVKVGLEGTRIRLNNLLEEYELYHNQLEKIEKEMAQELEKTGYKDILTSIPGIGIISAASFIGEIGDPKRFSNPQQIIRLAGYNLVEDSSGKHKSKTMISKRGRKILRTILYKISLIVVCKNQEIKLLYKYLITRKENPLKKKQALIVISGKMVKIMYSLIKKEEVYDKEKVLGIYRKQQIVA

SEQ ID NO: 88725 - protein, 417 aa, unidentified
MEVISTMDVVYRCCAGLDVHKQTVECAVRRLTENGTVQVEIRQFGTMTDDLLEMVNWLKARGVTHVAMESTGVFWKPIYNILEGHCTVLLVNARHVKQVPGRKTDARDCQWLAQLLQYGLLRGSFIAPRWQRDLRDLTRERTQLTDEQTRVANRIHKVLEDANIKLGSVATDILGVSGRDILERLMAGEEDVDALAERARGRLRGKIPELRRALRGRLSEHHRFQLRLNWDHLQRLQELIERLDERIRESSQPYHPQIEQLDKVVGIDQTTAESIVAEVGVDMKVFPSDGHLSAWAGICSGNNESAGKRRSGRTPKGNRWLRRTLTLAAQAAGHAKDSFLAARFRRLAARRGKKRACVAVAHSILKIVYHLLKDGRSYQDLGGSYFDRLDPQRLTRYLVRRLERLGLKVTLEPATAP

SEQ ID NO: 88726 - protein, 344 aa, unidentified
MPHYVGLDVSQKTTAICVVDEQGRRLWRGACVTDPGAISARVLRHAGVVDVKVGVETGSMTPWLVHGLRSAGLDVECLDARRTKAVLQMRLNKTDENDAEGLAQVLRTGWYRPVHVKSFDAHRARALLGARAQLVGMTTRLSNMIRGVLKTFGLLPGAGRGLRFDRRVEALLEGAPEIGLIVRPLLATWRQLREQIAVFDKAVQQRVRADPICRLLMTVPGIGALSALVYVSTVEDPGRFSRSRAVGAHLGLTPRRYQSGETDRSGHISRCGDGLARTLMYEAAVVILHRIKRSLHLKDWAAAIEQRSGPGKARVALARKLSVILHSVWRSGEPFRWTPHTIAA

SEQ ID NO: 88727 - protein, 322 aa, unidentified
MCKVIGIDISKQTFDVSFLENNKWVHSVFENNKKGFQKLNTYLTCKHHVVMEASGAYYLQLALFLFEKGIKVSVLNPLIIRRYSQMKFIRAKTDKKDARTIAEYGMEHNPSAWKPQEKRVLEIRQIYTSLELLNKQIHQTQRQLEAFTSSGVLCKELKKELKMHITVLLKRQKRLENKLIEYAQEQYEKTLERLQSIPGVGKKTAIMMTVITNNFQNFENYKQLIAYIGFSPRIFQSGTSVKGKAHICKMGKSQVRKLLYLCSWSAKRYNKTCIEMYERLKQKGKPERVVKIAIANKLVKQIFAIGKNNTIYNENYVQNICK

SEQ ID NO: 88728 - protein, 306 aa, unidentified
MTITTIGIDLAKNVFAVHGVDQNGKTVLVKSRVIRAALPGLIAGLPPCVIGMEACSGAHYWARLFRQYGHEPRLMAAKFVSPYRMAGKSGKNDAADAQAICEAVRRPHMRFVPVKDESQQAMQCLHRTRQGFIEEKTATYNRLRGLISEFGVIAPQSTDALRHMVSVQKSSLPLQVQQCVDDLLEHVDRIEANITEYDKILSRMARTDHRNQRLMELKGIGPTTACALVACIGNAHDFKNGRQLAAWLGLTHSVVGSVHWSNAEDTGALLWPSPPKMQGCAGHHCITVMISDCIQPAKTRSNRMTI

SEQ ID NO: 88729 - protein, 453 aa, unidentified
MAKRRKKAKQIRLSGLPKELQHVNLNAAGIDIGSERHFVAVPEGRAEVSVREFGTFTTNLHELVNWLKHCGITTVAMESTGVYWIPVFELLEREGFDVRLVDARQVKNVPGRKSDVLDCQWLQQLHTYGLLAAAFRPPDEVCVLRGYLRQREMLVESSAMHIQHMQKALQQMNLLLHNVVSDITGVTGMKIIKAIISGQRDPHRLATHRDHRCRSSAETIANSLLGNYREEHLFALKQAVELYEIYQAKIADCDAAIAAHLLQQAKRNSDEPPPTPRKHSDKKLSGELSVRSQFFQMTGVDLFAVKGFGTDTLLMLAGEVGFDMSPWKTEKHFSSWLGLSSGTNKSGGKVLSSKTKRTNNRAAKAFRIAAASLSRSQSALGAFYRRIRARVGKPQALTATARKLAVIYYSMLKYGTEYLEMGQSEYEQRYQQRRLSAMQKQALSMGYHLVPIR

SEQ ID NO: 88730 - protein, 430 aa, unidentified
MKSNTQNAKIEAITEKTLVLGIDVGSETHYARAFDYRGIEYSKKPFKFSNTEAGFVTFKEWILDLKERHEKDKVVPGMEPTEHYWFNLGKFLQDNEMKPVLVNPHHVKKSKELDDNNPTKNDRKDPKVIAGLVREGRYMIPYLPDGVYADLRTASNIRFQLQAELTRIQNRISRWFNIYFPEYKTVYGNPDAKSGMLILKSAPLPEDILTLGIDGVNQIWREAKLRAVGKARAKTLIEAAEHSVGSKEGAVSARMEIRMLLEDYESRNIRLQEVMTLIEGLVKQIPMAEKLLKIKGVGIKTVSGFLAEVGDISRFNTPKELQKLAGLALVESSSGKHKGETTISRRGRKRLRYLLFEVAMSLVAKNPEFRELHNYYTTRRLSPLKKMQSLMAIAAKLIRVFYAMLTKGVDYDPKKMVSDIKRPAVYLQAA

SEQ ID NO: 88731 - protein, 352 aa, unidentified
MAVYIGVDLHVRTQTVCWVDTADGEEHEITLDHERDDVRAFYSQFPAPALVGVEASGYSLWFHRLLEELGHRLLVGDALAIRQFARRRQKNDRRDARLLLDLLTHDDFPAIHIPAPASREVLALLRYRHRLVRIRTMLRNGLQAVALSHRLRLGPKLFTARGQQQFAVLPLTGAFAVQRQHSLLLLASVADQIQAVEAQLDQRAQQDPRVLRLRTHPGVGLLTALAVVHALDPVTRFDRARRVAAYCGLDPREHSSGDTKHFGHISKQGNRLLRFLLIEAAHNAIRGDEDLRRFYYQLAARKNAAIAIVAVARKLVLRLYRMLRDAIDYDQFRRRGRDARRAREDASQVLPG

SEQ ID NO: 88732 - protein, 368 aa, unidentified
MNTVKFIGLDVHKKTITIAIADQGRENKPRNYGAIANDLGALDKFCRKMVSTASRLYFVYEAGPCGYGIHRHLTDKGFDCMVAAPSLIPKKSGDRVKTDRRDAAKLASLHRAGELSAVYVPDPADEAMRDLSRARQDAVNATKKAKQRLKAFLLRNRIVYSGRSAWSKAYFRWLANITMAYAAQQVALQEYIDAVHEGQQRVERITDQIRQLVPGWRMAPVVSALQAARGVSLVVAVTLIAEIGDLSRFEEPSQLMAHLGLVPSEHSSGQSTKRGGITKTGNRHARRALVEAAWAYRMPARVSRVLLNRQQDVPEQVCQIAWKAQLRLCTRFRRLVAKGKVKQKVVTAIARELSAFLWAMAKQVQPAG

SEQ ID NO: 88733 - protein, 342 aa, unidentified
MEYYTGIDLHKKFVQMTTLDRDGNVAKRRRVRNDPELIAHYFVELPGVHRAVFESCVGWYWVRDLLESLSISVVMAHPMAVKAIAYAKVKTDAVDSATLAMLLRADLIPEAHMISRQRRALRDVVRRRHRLVEQRTRQLNAAQGILQAVNCTSVEELEPVDRVNYECLTSTTRVLNEQICAIEKLVALTLRDDPDYLLVQTIPGIGPVHAAEILLETDSITRFASEDNYFSYARVVPGSNNSGDRVAHRTSRQGNGHLRRVFGDAAVHAVNQHPDFARLHARELRRKPEPIAWAIVAKQIARGVHHVLSNHEPYRGLKGAGLSKPKACQTMIMRKLKAGDAM

SEQ ID NO: 88734 - protein, 351 aa, unidentified
MMLIGVDYHPSFQTIAFFVEETGECGEQELNHSDGQAEKFYRDLKQRGISVRVGMEATGYSRWFERLLAELGFELWIGDPAEIKAKRVKKQKFDREDARLLLRLLRENNFPQIWVPGPENRDLRQLLWHRHRLVQMRTRIMNQLHALAMNEGYRWKKKLFSEPGRAQLEKLPLAPWASRRRQELLELLDRMNPKIEELTAAVEREARKRPEAMRLMTHPGVGPLTALAYVLIIGTPTRFQRGKQIGTYVGMIPCEESSAHKQRLGHISKQGNSLLRFLLVEAAQAAARKHPDWRRRYIHLAMRRGKSIAKVAMGRRLAVRLYWMWRNGCEYSPSLEFGSYAGQLEIGNGVK

SEQ ID NO: 88735 - protein, 425 aa, unidentified
MNLLILKGVPMSLKIVYKICCGIDVHKTFVVACIASTHDTGVTSYESHRFSTYTSGLKTLLQWLLNRNCKDVCMESTGKYWIPVYNILENDCSIVLAHPKYVKAIRGKKTDKKDAKWIADLFKHDLVAGSFMPPADIRQLRDLMRYRFKLTCFQSSEKNRLQNCLTVSNIQLGNVVSDTFGKSAQAILDKLLENPADTSFDLEPLVYKSLKKKLPELRDAIDGYITPEQVGKLKVIKAHYESLESRKAELEELILALAAPYQQELAILQTAPGIRSDFTAIGIISEIGTNMEAFPSAKHLCSWAGLTPTNNESAGKKKSVRVSKAGCYIKPLLVQCANAVVTSKKHPEIRNRYLRLKKRRGHKKAIIAIARMLLTALYHMLKNGENYNAELYRKYDLPPVDREITVEQAIIIARNQGYKIKSATA

SEQ ID NO: 88736 - protein, 388 aa, unidentified
MLLDHATDRPTAIRTQFGAIFVSLELSRSTWLVTSLSPGKGEKMSRHSVPAGDVAGLMKLFADLKRKAEVRTGESYPIITIQEAGLDGFWLHRVLQQEGVESHVVDPASIATPRRRRRAKTDRLDGETLLRALLAYKRGEPRVCAMVVAPSPEEEDRRRLCRERRTLIDERIRHVNRIKGLLFAQGISSYAPLRGDRRPRLEALRTGDGRTLPAHLKAQIGRELDRVELLLKQIKAVEAEQDALLAQASKPADQAAAPDPVTMLLALKGMGPNFAAALWSEAFYRQFANRRQLAAYAGLAPTPWRSGGIAREQGVSKAGNPRLRTTMIQLAWLWRRHQNQSALARWFEAHSKRGRKTAIVALARKLLVALWKYVTAGVVIEGAKMKGA

SEQ ID NO: 88737 - protein, 345 aa, unidentified
MEIRTIGIDLGKTVFHLVGVNARGEVVVRKKCSRLQLLRFTSNVPACLIGMEACGGSHFLGRALREQGHDVRLMPAQYVKPYVKTNKNDFIDAEACAEAVTRPTMRFVPIKTDDQLDLQSLHRVRERWMVRRTAVINQIRGMLLERGITVPKGRRHIEESLPGILEDPDNKLSGALRVLLRELRLEMQYLHGQIGECDKLIVRIAGELEDCNRLVAVPGIGPTIATATIAAIGNGAAFKKGRGFAAWLGVVPGEHSTGGKQKLTGTSRRGNKYLRKLFVQGAHAVLQFRTQQDPGLSAWLERLAARKRPQVTAVALANKMARMAWAVLYKGEAYRPPLAAQRVAA

SEQ ID NO: 88738 - protein, 356 aa, unidentified
MSSKLNTAIAVAGIDIGKNSFHVIGLDKRGAIVLRQKWSRGQVEARLANTPPCLIGMEACVGAHHLSRKLQALGHDARLMPAKYVRPYSKGQKNDFRDAEAIAEAVQRPTMRFVATKTGDQLDLQALHRVRERLVGQRTGIINQIRAFLLERGVAVRQGLRFLRIELPGILAKRTDVLSPRMLHLIEGLADDWHRLDERIEVLSSEIGALACGDPACDRLMTVPGIGPIISSATVAAIGNGAAFSKGRDFGAWLGLVPKQISTGDRTILGKISRRGNRYLRSLFVQAAWVVLVRVGPKHWDRYGLKSWIEAAKKRLHHNVLAIALANKLARIAWAVLNKERKFECIRTNKMSPRAA

SEQ ID NO: 88739 - protein, 411 aa, unidentified
MDVVVACCAGLDVHQASVVACVNSTGRDGRSHKEVRTFATMRDDLIALHDWLKDAGVTQVAMESTGVYWKPVYAALEDDFDTIVANAQHIKNVPGRKTDVKDCEWDSDLLRHGLIRRGFVPPRDIRDLREVNRYRRKLAQVQAGERNRLIKVLETAGIKLAGVASDVFGVSGRAMIRALIEGEATPEAMAGLARGKLRGKRTHLARALDAPLQPHQRLMLRTQLARIEQAETDLQRLDVALTEMIAPYHRQMRLLMSIPGVEWINAVTIIAEIGVDMSAFVSAAHLASWAGLCPGNNESAGKRRSGKSRKGNVFLKTALITAAITGSRRGGGSYLGEKYRRLSARRGKLRAAVAIAHKILVSIWHMLTEGTFYQDLGAAYLDRLDRTRTARNLVRRLAAMGFDVQLQEKAA

SEQ ID NO: 88740 - protein, 376 aa, unidentified
MTTLETEYSTNSTLYLALDLSEAKWKLGFSNGLGSKPWIRTIDAGEVLLLDREIQRAKERFGLAADSRVLSCYEAGRDGFWLHRCLVASGIENVVVDAASIEINRRAKRTKTDRLDAGKLVRMLVRYASGERKVWSVVHVPSLEAEDQRQIHREIATLKVDHTRHINRIHGLLAGQGIRMPIQADFLAHLDELRLWDGAPLPAGLRARLEQEYACLQFVNEQIATQEAKRRELLRTSTESYVEQVRQLMRLKGIGEQSAWRYVTEFFAWRAFRNRREVGALAGLAPTPYRSGDEQHELGISKAGNRWVRAMAIEIAWIWLQFQPESELSQWYWRRFGAGSKRIHKMGSVALARKLLIALWRYLESGQLPAGAQLKP

SEQ ID NO: 88741 - protein, 358 aa, unidentified
MADKVTEAAVVGGVDTHKDLHVAAVVDQNNKVLETRYFATTRQGYRQMLAWMTSFGALKRIGVECTGTYGSGLLRYLQNAGLEVLEVTAPDRMERRKRGKSDTIDAECAAHAAFSGIRTVTPKTRNGMIEALRVLKTCRKTAISARRVALQIIHSNIISAPDELREQLRNMTRMQLIRTLGSWRPDASEYRNITNVYRISLKSLARRYLELHDEIADLDVMIAAIVDELAPELIKRNAIGYESASQLLITAGDNPQRLRSESGFAALCGVSPVPVSSGKTNRYRLNRGGDRAANSALHIIAVGRLRTDDKTKEYVARRVAEGHTKMEAIRCLKRYISREVYTLLRNQNRQVNSIPIMA

SEQ ID NO: 88742 - protein, 323 aa, unidentified
MNKDIKYFGIDISYLVFDVTDSDGNYYQFKNKVSGFKKFIELLNSNSHCVMEATGYYHYQLAYYLFENGNTVSVENPLSVKRFIQMRLSKIKTDKSDSKLICAYAQQVELKLWKGSSKEVQESLQITRSLSVYTKQSTMLKNKLHGESVMGEPSKAVVRSLKRSLKQLNKEIKTLEDRLLILVKESHQDLFTRLQTIPGIGRKTAIMLIVLTGGFERFSSASELCSYAGLTPVIRQSGSSVKGRPRISKMGNQKLRNLLFMCSFTACKYNKACRDLYERIVAKGKSKKLALIAVCNKLLKQAFAIAKSGLIFDQEYKSTLVKN

SEQ ID NO: 88743 - protein, 346 aa, unidentified
MNNMNFIGLDIHKKSISCCVRQADGTIIQESTIAATRHALDEWMRQLPQPWMAGMEATLFTGWIYDHLVSGGALVKVAHPAMLQAIAAGKKKNDRVDARKIADLLRCDYFPECHMAPREIRDRRRVLRYRNLLVRQAVQMKNKVSGLLMEAGVPYNQQKVHQKKYFAELLQTQKKEMPPSMPELLRLSRSTVEALTGMQRQLMRALERDALLAARVERLASIPGVGRVVALTWALEMGDIRRFASVKKAVSYCGLCGAEKSSGGKTERTPISKQRNKHLQTILVEAAKLAPRWSTELALVYEREKQRGNRNRATLAVARKLVAYLMAVDREQRPFDTQLRVAGNAA

SEQ ID NO: 88744 - protein, 334 aa, unidentified
MDTNVFVGCDISKSTIDVSLHHEKRIARQKQFSNTVAGHRHLIKWITESEPLVRVVIEATGNYSLDLALTLDSCSAIELMVANPSATRQFARAQMRRSKTDRVDAEMLADFAKRMVFVPWTPPEDDILELRGMSRRIQALTTERTRELARLHQAGATVTTSAIVINDIEVNIRHLERRLHVMLEQAIRLIEMHSQMNTAFHLLTSIRGIAKKSAVMILPEILILPRGMSVRQWVAHAGLDPRKYSSGDSVEKRERISKMGNVKLRRALYMPALVAIKWEPNIRAFYEHLIAHGKKPLVAIVAVMRKLLHAIYGMLKNETPFEGQKFYQIPVPTA

SEQ ID NO: 88745 - protein, 320 aa, unidentified
MNPVLGIDVSKAKLDVALRLTNGKVRSKVILNNSKGFADLAAWLAKFETTGLHACMEATGTYWEEIAQFLADEGFKVSVVNPSRIKAFGLSRQVRTKTDAVDARLIADFCSSQNPDPWTAPTPVIRELRALVSRREALIGMRTQEQNRLLVARPNVIKSIQSHIQLLDAMIAGIDSNIRDLMEQDPDLKGKRDLLDSIPGLGKATIPILLGFLAGPNLFRTSRQAAAFAGLDPRQHLSGTSVQRKTRLSKVGHAFLRKALYMPAMVTLSKTKWGTAFRDRLATSGKVPMVILGAMMRKLIHVAFGVLKSGQVFNENLHCA

SEQ ID NO: 88746 - protein, 426 aa, unidentified
MAETVIDMYSRAAGIDIHQSLAVVSAIVPNEDGSQCEFVRGEFNTFTEQGLRELVEFLRPLSVEVVLMESTGVYWMSPYDALLEAGFSVVIVNAREIKGMKGRKTDRNDADWLARIAKQGSFHPSFVPGREARGLRSLARYATSLRFVLAGEKNRLGKLFVAAGYRLNTVFTDMYGAGGMICVRGILDGGKPEEIIGSLPRTGRYKHTKEEMLLALGGKFEEGDLFAARRILKHIDFLDSEFGDCVGELMRIVREKDAKKFDLLQTIPGVDALAACLILAELGGGGLEAFDSADALCSWAGLAPGQNESAGRRKPGGTRKGNKALRRVACECAGAAAKTRDTTLRSKFQSLLQRGKGYKKAVMAIARKVMVYAYYVLKNDLPYVDPKIDYQKEHATKNFRRFIGQLRHCMSEYDIKIVHKATGEVL

SEQ ID NO: 88747 - protein, 416 aa, unidentified
MNAVGIDVSSRKSTVAVLRPLGEVVCLPFDVTHDIAGLASLAEKLKAIDGETRVVMEHTGRYYEAVAKALHEAGFFVCAVNPLLIKEYGANSLRRVKTDKADAIKIARYALDNWADLRDFTPMDAIRYDLKTLNRQFQLASKQRTASANNLIALLEQSFPGIRKCFDSPVRSDGTQKWVDFAHSFWHVDCVRKQPFPAFCERYRKWCKRHAYFFKLRNAEKVYALAKSAVVLTPKSKVVKVLVQEAANQLSSISRSVEVYRAEMDRLAAMLPEYPVVMAMYGVGKSYGPQLMAEIGDVRRFERKQALVAFAGIDPMPNQSGDKNVRSNKSSKRGSPYLRKTLFNVIRTYLQCAPQDEPVFQFLNRKRAEGKPFYVYMLAAANKFLRRYYAKLRDYFASLDTLQPVAPIPTILKATL

SEQ ID NO: 88748 - protein, 309 aa, unidentified
MDAKYVGIDVSKDRLDVHVRPTGEAFAVARDGEGLADLVARLKPLAPRLVAVEATGGFEMTVSAAIAGAELPLVVVNPAQVRHYAQALGRRAKTDAVDAEIIARFAEATRPEPRPLPDEATQALADLVTRRRQIIAMMVAERQRAGRLPKRLKRSCERVVRLLEKELAALDQDIDDTVRGSPAWREKEDLLASVPSVGDITARTLIAELPELGTLDRRKIGSLVGIVPFTRQSGRWQGKAFIGGGRPKVRAALFVATMSAVRHNPVIRAFRERLLAKGKPKMVVMVACMRKLLTILNAILRDRKPWQPA

SEQ ID NO: 88749 - protein, 412 aa, unidentified
MDKENFIYVGIDLHKETHTAVMIDCYNQKLGEITFPNRPADFPKLVTKVKKCNTDGKEVVYGLENAYGYGRALAVWLIDKGYLVKDVNTAISHQQAKHRGAMYRKSDSDDAKAIALATLNMLDKLPDACPNDAYWSLGQLVHRRDNIMKQRTRLVNQLHEQLCIAYPSYKQFFNDISRPTALYFWEHYPSRKYLKGKSVEDLRAELVPVSHNKCSTKTCEKILDAVASDKVKNNAYQDARDMVTLSIVSDLQHYDSQLAEVDKMLEQMYKMLGCTLTTISGVNVITAVKILAEIGDIKRFSNANKLAQFAAGIAPLHLSSSGKGKDVATKQGNRRLQATIYFLAIQMVQVSSKGTPRNPVVRAYYEKRKAEGKTSQQALICISRRLISIIYGMLKYGTEYRMPVVENAGEKL

SEQ ID NO: 88750 - protein, 410 aa, unidentified
MEVLYQHCAGLDVHKKTVEACILHSAAGGRTHRELRSFGTMVEELEKLCDWLLEQGCECAGMEATGVYWKPVYNVLEGHLKLVVANAEHIKAVPGRKTDVKDAEWIADLVRHGLVRASFIPERPQRELRELTRLRAAFVQDRSRAVNRLQKSLEGANIKLASVLSDVTGVSGQRILDALLDGEDDPEVLAGLSHGKLRPKLDALKQALIGKLTGRLRFVVSQELAQIRSLDDQIAACDEEVAKEMRPFDSEIERLDGIPGIARRGAENIIAEIGVDLSRWPTAAHFASWSGTCPGNRASGGKRKRAGVRRGNPWLKRSATEAAWAASRTKQSYLGARYHQLLALKGHKRAIVALAHEILAIVYYLLTRSRDYQDLGVHYLEQRDKQAIQRRATRQLQHLGFEVQLTPAAA

SEQ ID NO: 88751 - protein, 332 aa, unidentified
MKKVQFFVGIDVSKATLDVFIHGLNLYFVVENNLQGFVCLLEKVMTGTKCKKEELFFCFENTGKYSRMLSVFLQSENILFTMESALQIKKSLGITRGKNDRIDAKRIAHYAYEKREILVPTILPGAKIDQIRSLISLREKLLKHRTAYKNGISDLHDCYEDGESELIKGVQLRLISNLNDEIKKVEQKIESIIESEERISTNYKLILSIRGVGKILGFYLIGYTANFTSFANARAFACFAGIAPFSYSSGTVKGTPRVHPFANKMLKALLNLAAMSAIKYPREYLQYFNKRVNELGKNKMSTLNIIRNKIVYRVFAVVQRQTPYVDLLKFAA

SEQ ID NO: 88752 - protein, 357 aa, unidentified
MNGNKERPQVTAGLDLGDKYSYLCLLDTDGGEMIEEGRVRTTPEALRRRFASERPMCVAIEAGTHSPWVSRLLEECGHEVLVANSRKLRLIYANKQKTDEVDAENLARLARLDPKLLYPLKHRGEDSQVHMASIRSREALVSSRTQLVNHVRGAVKSFGHRLPKCPARSFHKRASEHIPEALRPALEPILETIGSLTERIRQYDRKLEAISKEHYPETDLLRQVEGIGPLTALTFVLTVEDPYRFEKSRSVGAYLGLVPASDQSGDRDPQKRISKEGDEMLRKLMVGSAHYILGPFGSDSDLRRHGEKIASRGAKNSKKRAVVAVARKLAVLLHRLWVTAEVYDPLHNARRREGLAA

SEQ ID NO: 88753 - protein, 397 aa, unidentified
MYIVGIDIAKRKHEAAVIDGEGAVIIKPFSFTNNCSGYNRLLAMLTKAKLPLDEVSFAMEATGHYWLALFTRLQKEGFRVQVINPVQTNSIRSFYIRQAKTDPRDALLIAEVIRFGHFSESTLHPENIYELRELCRGRHAIVSMQADVKRKVVALLDQVFPEYETAFTNMFGDTSMAILQTCPTPKELSKMPLEELCHLIEVSSHKRFRMAKAQELQALARNSFGFAMAGDVFSTMIRLYAKHLDFLKQQVREMDRKIAEIMETLDTPITTITGIGPTLGAYILSEIGDISRFSSAAKLAAYAGIDPTMRQSGEYNGVRNRMSKRGSPYLRHAIWLAASSAVLHDPALKLYFQKKRDEGKPYMASVGHACRKMVSIIYAVMRDNKTYTPHIPNEISA

SEQ ID NO: 88754 - protein, 309 aa, unidentified
MNIAPGLIGIDIAKQHLDVFDAALGRAVQIPNTPAAISALIARWPNKPACVLFEATGAYDAALRHALDQDGIRFARVNPKRARDFARAAGFLAKTDAVDAKMLAAMAQCLSPPAEPPAQPERERLARLHKRRDQLVATRQQERTRRHDAPAEIACDITRHIAWLTAEIAALQTRIDQLIAASSALKQTCRLLRSAPGVGPVTATTLIALLPELGDRSPQTIAALAGLAPINVESGQFRGKSQIRGGRKRVRDALYMAALATTRSQSRFAKLYQSLRAAGKPTKLALIAVARKLLVTLNAIVRDNLAFQS

SEQ ID NO: 88755 - protein, 397 aa, unidentified
MIAVGIDVSKSKSTVAILNGDGSIRAKPFDVYHVADELQALVDYIKRTSEPPTILMEPTSHYHYPLLKAFQEAELPVCLINPYQMKKYGDTELRKAKTDKRDSLRIAQYALEKSYSLIPYTPQDQKYEDLRFLSRQYSQRISTLTVAKVQLLSLLDETMPGITTILPLKSRDPDNCVLLRFIKRFKSFDVIRKMGKTRFLDSYQVLVKKTKDRFAGAKGLAIYELVLNSITTRGENPLTAMTQDQCADLVSTSQKAADEINLQMRIIAETIPEYKVLRSMAGVGDRLGPIILGEIGDVRRFHSGKALNAYAGNDAPPYQSGQFESRNRHISKRGNPALRKACFEVMQALKLTKPQDDPVYLFLLKKEQEGKPYNVAKMAAVNKFLRIYYARAMELYK

SEQ ID NO: 88756 - protein, 337 aa, unidentified
MNTATIGLDIAKNVFQVYGVDQHGKQMLQRKLRRGEVLRFFAKLPPCLVGIEACHSSHFWGRELLRVGHNVRLIPTQYVKPFLVGGKNDANDAAAICAAVRRADLRFVPVKTAEQQSLQSLHRMRERLIHERTAKSNQIRSMFAEEGLIFATSVGQLRRGIAMHISDAASPITPILRRLGQMYLDQIEAVERWLDQLNAQLQEVFTHSEDCQLLATVPGIGPIVATALLATAPDPRQFKNGRQFAAWIGLTPRQHSSGGKSMLAGITKHGDTYLRMMLVQGSRAVLRFLAKRDDRQSRWLQRLMLRRHKNVVAIALANKIARISWAVLARREAYKPT

SEQ ID NO: 88757 - protein, 319 aa, unidentified
MIIVGIDIASEKHDYFMIHKDTGVIFSSSSVTIPNNECGYKKLHSDILSFSGAIGDSDIRIGLESTGIYHTNIIAFLISHDFQVMMINPILTNMARKAEKVHSPKNDNLDSQTICKYMIDHSDEFSPYTFTLYHKQTLKSLSRKRFFIVDEYRKAKLVLNNLVQITFPELKSLFSSIYGESAIAILKEYGTPKKLAKAHISKVDSLLHGRCKCSAADIIEAAKHSVGISDDCYAFEIMDAIENLEFIQHRIEKYDVQIKRLVDELCPNLLTVPGIGYTTAGLIAGEIGDAKRFHSAESLISYSGVDVTVYDPASTRLNI

SEQ ID NO: 88758 - protein, 413 aa, unidentified
MHTRFFGFDVHQEFTQIAMLEGDQLTQLGRIPTTPAALREFAETLSTQDQVVLEATTNTYAIVQLLQQHAGRVVVSNPLQTRAIADAKIKTDKVDAETLVRLLAGGWLPEVWVPDADTQALRQQVAYRIGLVRQRTRVKCRVHSILSRNLIASCPRSDLFGKGGRQWLLEQALPQLPIHEQAVVTASLREFDTVSAELATIERALAGGALPRPEVRRLMTIPGIDVIAALAIMAAVGNVQRFRTPSKLVAYLGLDPRVRQSGSGPVKYGRISKRGPGHARAALVEAAWAAVKSPGPLRVFYHRVRNRRGGQIAVVATARKLVVLAWHLLAREQDYAFVRPSLVAKKWRALELQAGHPPRRGERGAAYAYYLKPLRDQEREIGVQAERAYTLLTQHWQPRRATQDAGAANGKRL

SEQ ID NO: 88759 - protein, 479 aa, unidentified
MCKPPEHTLIGRSEGERQATLKIARTMLQNGIDRNTVMKMTGLTEDDWHKSATNPPFLALSAGPSVKTGGPAGRHQTQAQPASHSDLTVSLSQLRSLSDVLSADLSVGHCRQKRHQGLSVRDKHRLPGARLRMYKANRRDGLCERSLTMFPVGIDVSKNTLDLCILYDGIKGRIKTRNIQNNRHSVENILRWLRLQHCGPEDVHVVMEATGVYHERLATELHDAGFRVSLANPHRSREFARGMGIMTKTDKVDAYMLACYAFLKKPHRWEPPAPEIRYLGALLRRRDVLLGDALREENRLEKYLSTDTPADIISSCRRMAQLLREEVSNIERQIKAHIKASPALRRDYTLLNSIKSVGPQLGMHMLVVLRSHNFASAEQAAAFLGVVPIEKRSGTSVRSRPRMSKIGPPQLRAKLYMSALCGKIYNKRMRNIYDEMCLRGKPKMVAIGALMRKLVHWCYGVLKTGTVFNDEDLKPVLST

SEQ ID NO: 88760 - protein, 375 aa, unidentified
MTKHSEVFVAFDTSKLRNAVAIAEAGRAGEVRFLGEIENTAEATTKLVRKLEAKYERITFCYEAGPTGYELQRHIHGLGHECMVAAPSLIPKKPGDRVKTNRRDAVSLVKLLRAGELTAVWVPDRRHEAMRDLTRAREAAVIDLRAKRQRVSALLLRQGRCYPANKKTWTKVHMNWLASQRFEQPERGIVFAEMMFAIRQAQERVERLEQAIGAAVPEWSLAGVVTAFMAFRGIDLVSATCLLAELGDLTRFPTAPEVMGYVGLGCSEGSTGDRIKRGGITKSGNRRARRTLVECAWSYQHPPRVGIAKQAKVAAAPAKVREIAWKAQCRLNRRYRGLLRRGKLKTVAITAVARELAGFLWAAARELSSPQRVAK

SEQ ID NO: 88761 - protein, 348 aa, unidentified
MALTIVETRAITGGVDTHADVHVAAALDPIGGLLGVAELATTPAGYARLLGWLGGFGTVCLVGIEGTGSYGAGLSRHVTAAGARVVEAGRSDRQDRRRQGKSDPLDAVSAARAAQSGRARGAPKGRDGTVEAIRALMVAKRSARSERTQTINQARALVLTGPDDLRTRFARHTAAALVAGIASLRPRPGDVAGYATRIALRELGRRAEFPGGQLRRLDELIVPLVTAHAHGLLALHGVGPDTAALLLVAAGDHPERLRSEAARAHLCAAAPIPASSGKVTRHRLNPGGDRQASHALWRIVITRMSSHPPTRLYVGRRTREGRSKNEIIRCLKRYVAREACPRLRAAAG

SEQ ID NO: 88762 - protein, 459 aa, unidentified
MQDSGNATGSRREVQGLPVVRREVAGIDLGSERHWACAPTLEGDAREVADFGATTPELMRMAQWLRERNVKSVAMESTGVYWIAPHEVLEGAGLEVLLVDTRQLAQVPGRNKKTDPVDCEWIQRLHSCGLLRGSFRPKEEVCMLRTLVRDKGNLVAEAGDWLRRMQKSLDQMNVRVHRAVADIDGATGMAILRAIVEGERDARRLAKLRNPRCRRSEEEIAEQLSGHWREDHLFSLRQALKMYDAIQERIADYEKEILGKLKEMEQDQCRGQSAPQVNNSEKARMIRKRGQEPMREALYRMSGVDLTEIDAIGVETIQVVLTEYGPDLSCFPTEKQFISHATLAPRRPMSGGKPVKKKKRNSPSTRVAAALRMAALSQRHSNTALGAYYRNIARRLGGAVAVFATARKLATFIYRLLRWGHPYVDEGAAAFENRFRDSRIRILAAKAKALGYQLAPATT

SEQ ID NO: 88763 - protein, 301 aa, unidentified
MTAIGIDTHKATLAACAVDGLGLALDERTFRNDPAGHRALAVWATEVAAGARIGIEGSSTYGAALARFLVTAGFAVREVPPQLTRRSRIESRRPGKSDPGDALTIARVTAREPALPPVRLADRTRDLGLLLDTREALVHEATQRRNRLHAHLQVLVPGYGDRVHRLVSGAALDRARRLLRGLTGLEPELARGLVGDLRRLDRQIDGLTGRIATDLGDDPLLRLPGIGVVTAARLIAETGDVSRFRSPDAFAALAGVAPIPASSGQVQRVRLSRGGNRQLNRALYVIALTQVWHHQPPQPTL

SEQ ID NO: 88764 - protein, 327 aa, unidentified
MREASSGQAVAIGLDIAKLKVDVCVRLPDGKSRSKVISNSKAGFEELMIWLGKHGAAGAHACMEATGPYWQELAEFLADAGHPVSVVNPARIKAYGIASGARSKTDAADAKVIADFCATQCPELWQAPPPAVRVLRALVARRQALVDLRTEEGNRLQVAHVSVKASIETVLLTLNEQIDAIEQQIRQHIDDDPTLKSQRELLDSVPGLGDATIPTLLGHLGGPMRFASSKQAVAYAGVDVRHYESGSSVRGRPRLSKRGNASLRRALYMPAVVSMRLTGWGKAFTARLTRAGKPKMVIIGALMRKLVEMSYAILKSGKPFDPGRHSA

SEQ ID NO: 88765 - protein, 387 aa, unidentified
MEQSKQRVVGLDVHPDSFAGAILAGSDPWSARVVRTSTRVALAELEAWAARQTNAEDVLVLEASGNAFAVAERLRAIKREVRILDSHRAGKIGKTYCATDRVGAIKIARIYLSALSPIVWQPDPKTRERREVFSAYQAVVKEATRLQQQLKSMLNEHCVRLQTGFRLCHPSALKRLLARREWSGAQAMLLTQLHAGLIAARARRQQLRHYMAGEILAAPEFLKLTRLCGISLVTLYGLISSIGDITRFAQSKKLVAYFGLNPSVCQSGNYEGATALKRHGRGAMRALLVQSAKKLLQVENPLRKWGLAPAARRGRNKAAVAVARKLCVAVWHLLQGHPIGALERLDTLQTKLFKLATELGVPTIKAQGYESKEAFVQQKLYLLRSYP

SEQ ID NO: 88766 - protein, 410 aa, unidentified
MDMIYPHCAGLDVHKDSVWACVRHMSPDGKVRQEVRVFGTATRSLLELSDWLAQEGVTHVAMESTGVYWKPVYNVLEDRLDTMVVNARHIKNVPGRKTDCKDCQWIAQLLQYGLLTASFVPRRGQRDLRDLTRQRAQLIQERSRVANRVQKTLEDANIKLASVASDALGASGRAIIRALIDGDKTPEQMADLAKRRLREKIPQLKEALRGTVTDHHRFMLRQLMDQIDRLERQVEDFDRRIEQVMSPLEQKATENLDQIPGIDVRAAQNIVAEIGADMSRFPSSGHLCSWAGMCPGNHRSAGKRKKGTMNQGNRWLKRTLMQCAWAASRTKSSYFQGQYRRLAARRGKKRAAAAVAHSQLVVAYHLLRDGTEYQDLGANHFDTLAESQRTAPLVKRLEKLGYRVTLDKAA

SEQ ID NO: 88767 - protein, 386 aa, unidentified
MNTITKTASTTTIVAIDLGKYKSVACVHDQGSGEYRFTTFDTSRAELGKLLAKEQPAVVIIEACLLAGWVHDLCGQVGVPCRVANTASEAWKFKHLKRKTDKDDALRLAQLHLLGQLPTVTLPPPAVRQWRSLIAVRQALVGRRVAVQNRIRAVFVAQGLPVPRGARAWSATGLAGIATQAKALTECGPDELWRGVLDLALTEHRQVCELVAQAETRLDTLGKQSADVILLQTTPGLGPRTAETVAAYLHDAPRFQKAKQVSAYSGLVPRQHQSGQLDRRGRISKRGPALLRKLLVECAWCMIRYNAWARRIYQRLTGGGQRRKKQAIVALARKILVRCWAMLRDRKPWHDPETGPKQPLPPSKQRRQAEAQRRRQAQQQAALATS

SEQ ID NO: 88768 - protein, 320 aa, unidentified
MKVNIDPVYVGVDVAKATLQVHLHGAQIELTNAPSGRTQLCKKLQAIPGAHVICEATGGYEQALVQSLQKAKLTVSVVNPAQVRASAQAKGQRAKTDVIDALMLTDYGQRYRPEPTPPVSKVQRQLAALTQWLKQLIDIQAIAKTQAEHHSDSFVCKQHQALIKHYQSQIETTELKLKLLMEQDQVLKQRVECLDAIEGVGLRTALVVLTHMPELGQLNRQEVAALAGLAPWTRDSGTMKGKRCIGGGRPKVRVALYMSSLSVVRCNPTLREFYQRLVAKGKLKKVALTAVMRKLLIYMNHRLKSLASQHAPGTEQKITA

SEQ ID NO: 88769 - protein, 286 aa, unidentified
MKQFIRIGVDLAKNYFQVHALAHEGGPAVTRKLKRSKMHEFFAQIESCLIGMEACGSAHYWARELKTIGHEVLLMPPAYTKPYVKRGKNDAVDAEAICEAVSRPGMRFVPVKSAEQQATLMLHKTRELLVKQQTMSVNALRGHLSEFGIVVAKGIGRVDELLELAESDTMLPEAAKAAVKVLAQHLEGLNRSIDDLEKQIGRAHAQSEMSQLLSEVPGVGKIIASVITASVPDPSVFKSGRDFAAWLGLTPRQNSSGGKQTLGGITKQGNRYIRKQLVLGATSLLN

SEQ ID NO: 88770 - protein, 433 aa, unidentified
MEILYPRCAGLDVHRDSIVACVRLAERGIERHVETFGTTTTELERLSAWLASHQVTHVAMEATGVYWKPVWAVLVEDFELLLANARHVKTVPGRKTDVNDAVWLADLLAHGLIRPSFVPPPAVQALRDLTRTRKQLTRERAAHVQRIDKVLQGANLKLGSVLSNIMGQSGRAILDALAAGESTPETLAGLLRANVRASRAQVIEALHGRLAEHQRLLLRVHLGQIDAIEAAIVALDRELSERLEPFREAVTRLSATPGLAALSVASILAEIGLDMSPFPSEAHLISWAGLCPRNDESAGKRRSTRLRPGAPWLKTLLVQAAWCAVRTKGSYFRVLFLRLKVRVPVERDRDFQSKVIVISGRTLKARRGPKKAIVAVARAILTAVYVMLKRGVAYHDLGPDHFQRTERIRLATRLARRLDELGFDVTLTERAAA

SEQ ID NO: 88771 - protein, 341 aa, unidentified
MTRAITGGVDTHAGVHVAAALDSIGGLLGVREFPATAAGYACLLDWLSGFGTVCLMGIEGTGSYGAGLARYVTAAGVRVVEVDRSDRQDRRRQGKSDPLDAVSAAGAAQSGRARGAPKGRDGQVEAIRALMVARRSAAGERTRTINQARALILTGPDDLRARFARHTAAALVSRIAALRPRPGDVPGYAARIALRELGRRAVFPGGQLGRPGELIAPLVSEHAPGLVALYGIGPHTAALLLIAAGDHPGRLRSEAAWAHLCAAAPIPASSGKVTRHRLNPGGDRQANHALWRIVFTRMGSNPATRAYVERRTSEGKSKAEITRRLKRYIAREVYPHLRPAS

SEQ ID NO: 88772 - protein, 372 aa, unidentified
MFIVGCDFHPSWQQIAVFDNESGEVNEYKLSNGDGAAEQFYRKLPAPARIGREACGNSQWFVQLLQELGHEVWIGDAAQIRASYIRKQKTDKRDALHILKLLLEDGFPRLWTPTAEIGNQRQLLVHRHKLVRLRAQVKNELQHLALNQGVQKKARRWSQAGQKLLRELPLAGWAASRRANLLELMKLMDRQIAELDRALEQAAEENPQARLLRTQPGVGPVTALAFVLTLGDVSRFPRGKQVSSYLGLIPREHSSGGRQRLGAISKQGNRFLRQTLVEAAHSVVRLDEGFRKQYQRRCHRKPKGVAKVAAARKLAVRLYGMLRTNIGYPEIVHIESRPLVPLVDHGQTETLNGRSRIQQTGAKDGPAGLGKR

SEQ ID NO: 88773 - protein, 402 aa, unidentified
MNAVGIDVSKGKSMVAIMRPFGEVVASPFEVTHTGSELSELANTLKSLHGETKVIMECTGSYFYPIAYDLHEAGLFVSAVHAKLIHDYGNNTIRRVKTDKADSIKIANYGLSNWMELPRYWPEEDIRRMLKAYSRQYTKYNKLKTMLKNNFIALTDQTFPGVNELFKSPPRKSDGHEKWMDFAFKFWHCECVCGLREKEFIERYRKWCKRAGYNFNQEKAEDIYVSALGHVCVVPMNDCTKQLVMLSINQINTVSESLAVVAREMKRLAELLPEYPVVSQFYGVGDILGPQIMAEVGEVARFRSKGSLVCFAGLEPPEYQSGKFESENRHISKTGSPHLRKALFQVMDCILKRSPQGDPIYQFLDRKRAEGKHYYSYMTAGCAKFLRMYYARVTQFIDKMED

SEQ ID NO: 88774 - protein, 293 aa, unidentified
MLADQLDYVVGVDPHRDAHALAILDVRTGGVVFEATAVADAEGYARVLRLADRHASGRRAFAVEGTGSFGAGLTRFLVAQQERVLEVGRLRRERQSGKSDALDAIRAARSVLGQTRPARPRAGGEREALRALTAAREGAVTARRAGLCQLRGLLVSAPEPLRAELRSLSRAQLLRRLAAVRPERRQDPELRGTLLALRALARPVKTLTVEERELEREIETLTRKLAPQLLDQPGVGPLAAAQILISWSHRGRIRSEAAFARLAGCAPIPPHPDKRSATASTAAATGDSTEHCT

SEQ ID NO: 88775 - protein, 317 aa, unidentified
MAPPDRFVGIDVAEEWLDVAIRPDGDAWRTPNDADGIAALVARLTPLAPTLVVLEATGGFETVAALALGTAQLPVAVVNPRQVRDFARATGQLAKTDRLDAAVLAHFAQAIRPEPRPLPDAASRKLQALVARRRQLQGMLVAERHRRQVAEEAIRPSLDEHIAWLRARVADLDGELARALRASPLWRAEADLLRSVKGVGPVLAATLIADVPELGTLDRHRIAALVGVAPLARDSGKHRGKRHVWGGRGDVRAVLYMATLSAVRFNPAIRTFYDRLLARGKPFKVAMTACMRKILVTLNAMKRDGTLWDPHHATATS

SEQ ID NO: 88776 - protein, 414 aa, unidentified
MKEQQLAACIGLDWADKEHSIHLQVLNGKLEHCTLEQKPDVLHEWIAQLRQRFHGQKVAIAIEQRKGAVIHALRMHDFLVLYPVNPKALARYREAFRTSGAKDDPADSELLLDLVSKHRDKLRAWVPDTLEARKLQLLCEQRRKMVNHRVALTNRITSFLKQYFPQALDWVGDVASIQCCDFLTNWPDLDAAQRVRKDTLRKFYQRHNCRKASVIDDRIAQISNAVALTDDLAIIEPLSLSVQTYAIQLLSLIRAIQKFDSRIAHVFAQHADHDLFDSFPGAGDVCAPRLAAAFGTDRSRWDSAAEMQSHSGIAPVTERSGKSLWIHHRLACPKFIKQTFHEFADQSIRFSKWARAYYDQMRARGKDHHAALRALAYKWIRILFRCWKDCTLYNEEKYLQALRRRGSSLVEKIA

SEQ ID NO: 88777 - protein, 322 aa, unidentified
MSLPNPLCVGIDVSKATLDIAATSEFGQFTTGNDADGFDAIIAELRKHSVTLILMEATGGLESAVVCSLQAEGFEVAVVNPRQARDFARAMGYLAKMDRIDARVLAQMAEVIHRHPERERFIRALPDAERQALAAMVVRRRQLITMLVAERNRLHPAHPQSRKSINIIIQALENELARIDEDMNRHIQSHFKELAKRLISIKGVGTMTAAALLAEVPELGSLSRREISALIGVAPVNWDSGSMRGRRTIFGGRAGARTALYMAALVATRFNPVIKAFYMRLLAAGKAKKVALVACMRKLLTILNVMLRKNEEWNESYHHVAP

SEQ ID NO: 88778 - protein, 350 aa, unidentified
MCSLPVFVGLDYHDASVRVCVLDTDGSELANADRRNDWKAIAEFADRFGRPVQAAIESCCGAADLAEELISCAGWSVDLAHPGYVQRMKQNPDKTDCQDAQLVADLERVGYLPRVWLAPHYIRELRHVVRYRLQLTDQRRATKLRVRALLREQRRHAPKGLNAWTKAWEHWLRHEAELSEQGHWLVKQHLAELGRLGMQIRQVEKRLERLTANDVEVQRLQEQRGIGPVTAWTIRAEIGHFDRFRTGKQLARFCGLSPRKASSGQRQADAGLIRAANPALRAVLIEAAHRLVNYDRYWQKFAQRLRAAGKPGSVVAAAVANRWIRRLYHEMKTPSGELVVAVGPARSEDS

SEQ ID NO: 88779 - protein, 402 aa, unidentified
MDQHSTVVPVFVGIDVAKDRLDVQLLPAGEAFAVTRDHAGLEGLVARLGQAAPALVVLEATGGFEITVAAALSGAKLPLAIVNPRQIRDFARALGRLAKTDALDAQTIALFAERIRPEPRPLADAQAQRLAELVARRRQIVEMIGAESNRRRQARVSELQRDLDSHLLWLHQALARIERDLDDTIRGSPVWRATEDLLASVPGVGAVTARTLIAELPELGRLDRRRIAALVGVAPINRDSGTFRGRRMVAGGRSSVRKVLFMATLTAIRFNPPVRALYQRLTQAGRPSQARAHRLHAQAPGDPERHGARWPPLGGQPSVDVIPGPKPLAEGWGQAGSWRSRWPARATLAALLGPRLLLPITSTLDLQHSRSERRPGRAEKCGRQSCRCAGQTLSLAGNPPGP

SEQ ID NO: 88780 - protein, 413 aa, unidentified
MLPNGTLTGKPFKIVHSDPQSRELAVAKIKEAQEAYSLESRCFLESTGIYHIPLLCFLRDKGFDCSVINPIITKNSTNMNVRKLHNDKFDSKKAAKVGLDASLKTSIIPDDAVIDLRNLVRDYYYFKDLQSAVVLKLTAELKVSFPAYRNVFCKATTQTSLKLLDAYPLAQDLLAAPKGTVVEMIRSTARFGEKYALAKYDALYAAAEDAAIFGRALPSNALRIRLYIKLYREYQEHLDGILEELHKAVDRLKGTPVHNRISLLQTLPGIGFLSAVVLLAEMGSFDLFSSPKKLYAYFGLDPGVNDSGKFHGDRVHMSKRGSSLARRILHMIAINNLKVDKRTKSPVNPVIYDYYIRKCASKKKIVAVGAVMHKICNIIFAMLRDNKPFELITPEEHCEQYLATHPDKAPSAA

SEQ ID NO: 88781 - protein, 464 aa, unidentified
MTEKKLWRNRKERKEWGRRLQSEDPGLEVVHSHAAGIDVGNGMHYVAVRPDRDPQPVRRFECFTADLHGLAEWLQRCGVKTVAMQSTGVYWIPIYEILEERGIQVYLVNARHTKNLPGRKSDVQESQWLLKLHTYGLLNNSFQPPSEIRVLRTYWRQRAEHVHGAATCVQRMQKALTQMNVQLANVISDVSGLTGQAIIRSIIAGEHDPRKLAELSDPRIHASREEVAKSLEGHWRPELLFVLQQEVVMYDTYQQRIAECDQQLQKHLASFADTIPLLPTAEEPKRKKSKPAKNAPRFELRSELQRIAGVDLTRIDGIDVMVAQTLISEVGLEMSRWKTEAHFSSWLGLCPDNRTSGDKVLARGTRRVVNRAATALRMAAVTLMRSRTYLGAQYRRLRTKLGAPKAITAMAHRLARLVYRMLKYGQHYVDKGAEYYEHRYRRQQIEFLRKKATKLGLQITLAQT

SEQ ID NO: 88782 - protein, 331 aa, unidentified
MNTHVGIDIGARTSAMGWRQNGKTSGQWDIQHTPKGRKAAVTKMLGLKPLSVVMEATGIYYLDLAIELHAAGLPVSVINPKSFHNFAKLMLQNSKTDQIDAQLLAEYGERMAPRLWVPPTADQLMLRAIGRHINRLIGHRTRAKNELHALQATQTSVELLIEDEKDAIAALDTRIDRLKKAAREAIAKCPDLSLQFRCMMAAPGVGEASAIAALAELTTLPVTLKSAQVSRYAGLDVRLTQSGTSVNRPGRMSKCGNAYLRAAMFMPAMTAIRCDENVKAFYEALVARGKKKMQAIGAVMRKYLTGLWACMRSGEEFNTAKLFSEKHLAKA

SEQ ID NO: 88783 - protein, 353 aa, unidentified
MARLTISSISRFVEGFQGQRFSVGLDVHKRSFSVALLRPDGMVESWTTPADVKAITNRLTSLPIYISAVCYEAGPTGFGLARSLRSAGIKVIVAAPSRIPRPVAATNKTDSLDCIKLAELAASGLVRSIAVPSEKEEAFRALSRRRHQLTDSIRRAKQRIRSLFLALGVVEPAGIDSWSKSAILALEHQPLPAGAAETRDSLLAELRYFIIAQKEVDTKLERLAQGQDEVRRIAAMRSVPGVGKVVATTFAAEIFNPKRFSHSKEVTAYLGLAPVIRQSGGSKGKATLRPVGQRRLRSLLVEAAWIWKQKDKWAQEFYNRILGKHGVPQKAIAALARKLAALLWRLSLPPATA

SEQ ID NO: 88784 - protein, 351 aa, unidentified
MENSSKVVTQGVVGLDLGDRSSQVCRLDRETGAIVEERRISTTTVSMQRYLGALPPQLVALESGSQSAWVVRLLQQLGHEVIVANTRKVRAIAASLSKSDERDARCLAQLARVDPKLLAPVQPRSEESQRALAVVRAREGLVKARTMLINQVRGCVKSFGFRLPACSSASFARKAQEALPAELKAALEPLLRVLAELNQEITRFDRDIEAWAERWPVTQRLRQIRGVGALTALVFVLILGDPHRFARSRAVGPYLGLAPGRRDSGNSRPQLPISKQGDRLLRRLLVQAAHYILGPFGQDSNLRRFGLRLAERGGKNGKKRAVVAVARKLAVLLHRLWVSGADYVPLYQAAV

SEQ ID NO: 88785 - protein, 421 aa, unidentified
MSWITFEVELTRFDDALVCGRNARIKRRCLMFFLGIDVASKKHDVAVLDDAGELIVEPFSIVNDSGGFSILLQTCHACSRNPQDMKIGMEDTGIYHEALRDWLIAKGYSVFVFNPLLTAMYRKSNSLRKTKTDAVDAIAIAKYLWANVRDLHPYSPRLYHALLLKSLSRQYQDVASRLSKRKVELKRLLHIAFPEFLSHFLPDAAWALQLLSKHPSAKSIASMRMKTLIDILRVHGDRLQAAQTLHRIAANSIGCDSAHSALLIQCAVEDILLIQSQIHRIKDAIRAVLPDTSPILTIPGVGLLCAASILGEIGDVRRFDNKFQLLAFCGIDPVIHQSGNFTAKQVHLSKRGSSPLRRSLFLAASAACVSPFVQDNKFRAKYLLKRAQGKHAYVAIFAAAKNLVYTIFAILKNNTPYSSLA

SEQ ID NO: 88786 - protein, 343 aa, unidentified
MKITTVGLDLAKSVFQVHGADERGHAVVRKQLRREQLIGYFAALPPCLVGMEACSGAHHWARRLREFGHTVRLIPPQFVKPYVKSNKNDAADAEAICEAVGRPNMRFVAIKTVEQQSVLSIHRVRQGFVKARTAQANQIRGLLAEFGLIVPQGIGNIAQRVPSLIDDSGPLPVPMQQLLNGLLENMKALSGKIKELDVQIKSWHQSSDLSRKLEAIPGIGPLTASALVASIADARSFKNGRQVAAWLGLVPRQDSSGGKTKLLGMSKRGDTYLRTLLIHGARSAITAAQRCNKPNAWLAGLLARRNPNVAAVALANKNARTVWALLAHDREFQLNYVSLPVIG

SEQ ID NO: 88787 - protein, 338 aa, unidentified
MQTYAAIDLHSNNGVLTIIDETDRVLKQRRIANKLEEFIKELEPFRATLQGVAVESTFNWYWLVDGLQAKKFPVTLVNTSAIQQYEGLKRSDDDYDAWWLAHMMRLGILPKGYIYPRENRAVRDLLRKRAALVRQRTANILSVQNLEARNRGTKISSNEAKRLTGTRVAELYGKGELALALTTTIAVIDSLTEQTRLIESAVLKKARLRPEWEPITSVWGVGKILGLTIMYEAGDMSRFSSPGDFASYCRCVNAQRFSNGKKKGENNAKNGNRYLAWAFVEAAHFAVRFYPEAKRFHDRKAAKTNGVVAIKALAHKLARAAFHVLRDQQPFDPKRVFV

SEQ ID NO: 88788 - protein, 349 aa, unidentified
MKIIGCDFHPSYQQIAMLDPVTGEIVEKALSHERKEEVRAFYAGLVGPTRVGIEASGQSQWFERMLAELGHEVWIGDAAKIRASCERKQKTDRRDAELLLRLLAEDRFPRIWVPTAAERDNRQLLLHRHKLVRMRTQVKNQLQAQALNQGVQRKRKLWSEAGRKQLESLPLLPWASRRRAELLQLLDHLEASISELDRAVAEQASALPAARRLMTHPGVGPVTALAFTLTMGPAERFQRGKQVASYLGLIPSEHSSGGHQQRLGHISKQGNPFLRGLLVEAAHSAVRYEPEMRRAYQRLAQRKCRAMAKVAMARKLAVRLYWMLRLQVNYAQLIQGSHAGQPGTFCGRG

SEQ ID NO: 88789 - protein, 324 aa, unidentified
MQLLAIDLGKFKSVACLYRGDDDTEFRTIETRPQVIHDLLTECEPERLVVEVGTVTGWVHDLAAALGIEVQVANPNTEGWRWRRVKRKTDRDDALKLARLSAAGQLPTVWMPKPRVRQWRSLIHYRHALVSRRTAIRNNIRSVLDAQGLGLAMGKKAWTEEGMLRVAEIAKPIVSCSADELWRGQLDVEATLLVQLQSQLQAVEDRLDALAATDARTARLRTIPGVGPRLSEAVVAWVDDPERFRNARAVGSYVGLVPRRRQSGTYDRSGRVTKQGPSLLRKLLVEVAWIMRQHNPHAEALFRKLSKGSGAGTSRRWWPWLGGC

SEQ ID NO: 88790 - protein, 422 aa, unidentified
MRGLRTKGVKAVKEETLIVTVDVGMASNTGYCTTVDGRDIKPFKFDNTREGLDRFWSMIVASQNRFRCSDVMVGYESTGPYAEPLIHYLMNKPVRIVQVNPMHTKRMKELNDNSPLKTDDKDPRVIADVLRLGHTLSVVVPEGDAAYLRRLNHARERHVGERTALLNQLQQLVFLLFPEFKTVFNDIKVKTAQRILTGYTTPERIGSLNQGELGKEMRKQSMGKFGVQQADLLISLARDTIGIKEGIAGIVLDIRHILMQLEAVHGFVAEIEAEMEKALERIPWSTKILSMKGLGVITVAGLVGEVGDFSKFKTQSEIMKLAGLDLYEISSGKRKGQRRISKRGRSLLRKILYNAAISTIRKNGIMYTEYTNLIGRRMKRTSALIVIAKKLLRIIHAMMRDGRDYIRNYASPKRVGVIEKAA

SEQ ID NO: 88791 - protein, 397 aa, unidentified
MSMLFVGIDVSKDYSSGQGLDPEGKKLFYLEFGMNGEGFSRLLNTLKTHCKDLSEVTVGMESTGCYHTNLFAFLCSEGIACVVINPLLISNFARLSLRKTKTDKKDALTIAQFLLAHRSKLSQVSYCQNSQDLKDLARERESLAVMIAGLKNDVRRLLQMSFPELEHRCKLFTETMLRFLMKFPSARVIRTAKATEISKALIHAEGKRKRVFISAEEIINLAKVSVASDSVAKELILSEKIETLLYLEGKQKRITEALVEACRSMRVDELDIITSVDGISAITGSTFLAEVGDIELFSSSKHLIAFAGLDPSIHQSGQYEGISRISKRGNRHLRRVVFLMTLCAVRSQNAFREYFLRRKEEGLPPKKAILATAHKLLRVLFAMLSSKSCFRKEVVEV

SEQ ID NO: 88792 - protein, 320 aa, unidentified
MDFLGLDIAKTRFTACLLTAIGQHHASFPNTEAGFEQLAAWLGTHRPAAAGPPHACMEATGNWGLDLAAFLYAASITVSIVNPRQIKAFGDSELSRNKTDALDAALIARFCRAHIPPAWTPPAAEMRELRELVRRCAALKGNRVQEINRRKAGLASAAVAASIERMLTWIDEEIRAITAAIRALIARHADLQTNFDLLRSIPSIGEVTAAVILAELPNIAEFTPKGLAAFAGLSPQEHSSGTRRHTGGISRIGNPNLRSALYLCALSARRHNPRLKDFGQRLTAAGKPHKVVLIAVARKLLVLAHAVIRTQKPFEADATT

SEQ ID NO: 88793 - protein, 356 aa, unidentified
MRYIGVDLHKNRFTAYHTVNGQYRNYGTNDIGIASFIEECKRTDGTGAIVVGVESTGNTRYFKRQLEEAGIQVKVINTMRFKVVTESVKKTDKHDAQTIAEFLEKDMLPEAWICSDYSEMLRRLLHVRRQLVKAIVTTKNQVHSILTAYGYADARATLQSKRGRHAVLDTLASTEIGLVVHLLMEMIDSLHEKVKQIEGKIEELVKGDKAIELLQTMPGCGRIIAWMIRAYTDDIRRFMSAKHYAAFVGVVPYVHNSNATIRHGNITKHGPEPLRTAFVQLVMGMRRIKQVQDYRLMKRYKALQETKGSGKAIIATARKLTHIVWHMLTYNEPFDASLQMVIGYENNRSMQEKQLA

SEQ ID NO: 88794 - protein, 344 aa, unidentified
MNLKRIGVDLAKQVFQVHGVDSHEHVMCRKQLKRAQVLDFFRQCEPCLVAMEACGSAHYWARELRTLGHEVRLIAPQFVKPYVKSGKNDANDAEAICEAASRPTMRYVEVKSAEQQASQAVHRIRSRLIRARTALANEIRGLLGEFGLIAAQRGIAATRSLIQASLEDAENGLPGQMRELLSGLQAELNEHDGHLLRLDGMIQRQARADERVKRLLAVEGIGPISATAIVSAVGDARQFSNGRQFAAWLGLVPRQHSSGGKERLGSITKQGDTYLRTLMIHGARAVLRHCQNKEDRRSEWLQQLLCRRNMNIATVALANKNARIVWAILSRGEDYQPDRAPQPA

SEQ ID NO: 88795 - protein, 344 aa, unidentified
MDHFAGLDVSVKETSVCIVDDSGKIVREVKVASEPEALLAVLKSPAYRFKRIGLEAGPLSQWLFSALAEAELPVVCVETRHMQALLKAQINKTDRNDARGIAQMMRVGLYRPVHVKTLRSQKLRMLLTHRKLLQSKAIAVDNDLRGTLRNFGLKVGMVGTVKFEARIKELVENLPDMAVLVEPLLIVRRVLREQIVILHRRLLAIVRDDEVCRRLMTTPGVGPVVALTYRATVDVPARFRKSKAVGAVFGLTCSKYQSGEIDWSGRISRCGDEMMRVMLYEAAQSMLRSKKWSWLKAWAMQIARRRGMKKAIVALARRLAVIMHRIWVDGTEFRWTREQATAAA

SEQ ID NO: 88796 - protein, 396 aa, unidentified
MGTKRYIGLDVHKRQVVAAGVDQQQNELLKPVQVKIKNFPSWAKANLHQTDSVALEATTNSWKIHDDLQGIVAEVLVANSYKIKLISSSSAKTDKHDALVLAKLLAANLLPTVWVPPVPVRELRDLTRYRSKLVWDRNKMKTQLHNTLHKHNLALPLGGPFTQKNEAWWCDLPLNEIEKMQISHRWQSIHHLNQQIAETETRIAQQSISDYWSEGMTLIMQLPGVGIYTGMTILAAIGDIDRFPTPPQLVGYAGLGARVRSSGDWYQTGKISKQGRRELRTALVNSAWVAVRYSKHWREQFEKLSTRIGKNKAITAIARKLLVVIWHVLTKKEADTKADVQAIARSFLRWATEHRLARSQRIHRHEFVRERLKTLGLLEELKPFRANGRLHDLAIG

SEQ ID NO: 88797 - protein, 331 aa, unidentified
METDQYIGVDLHKVFFQACAMTRHGERQWEGRFPRTPEGIGALVARCTATSAIAVEATTPTWHFVDQIASRVATVCVVDTRKTKLKAGYAAKTDRLDARRLADALRRDSVVSIYVPPPAIRELRELSRHRLMLTQLRTRVLQRMRALLLRQGLGDPPASRLRSAAGQAWLDQVSLPPQAQAALTTMRRVEHDLTAQLAVVEADVAREALADPIVERLQRLHGVGPVLGLMLRAEIGEIARFPSPRHLASYAGLVPYVDSSASHTRYGRITKAGSPWLRWALGEVGLHTLRRKDPLGRWGRKLAVRKGKLTAQVALAREMCQEIMTMWQHVA

SEQ ID NO: 88798 - protein, 343 aa, unidentified
MQKVIGLDVHKKHINAVVLEPEGKELYREKIHNDRPKLDRFLSLIPKDSKIALESCSCWQYVYDYLIEVGYTDVHLANPGKVRLIATSKKKTDFRDAKDLVDLLRANLLPTSYAPPKDIREQRQITRHRESIGRLAAEVKNKINAILIRHGIIHEFSDVFGVAGTEYLRSLNLPMCDRFELDNYLSIIRHLKVQSDATEQRIEEYVKYNSYARNVMTTPGISHYSSLMIVSEIGEVQRFDLIRKLTSFAGLNPSVSQSGDKCYTGHIAKQGDKHLRWILIQCANVAILHDSLLAKIYHRIARRKGHNVAIVAVARKMLGYIYIMMTHNIPYQALQIHKDHKAS

SEQ ID NO: 88799 - protein, 400 aa, unidentified
MNIIGIDVSQGESHATLITKEAEEIAFKFKHNKSGFQILNSYIKPGTIIIFETTGVYSAQLTAYLKSKKVKFYELNPLEAKLRMASLRRNKTDKNDSFKLALLGKTQLAEIKNHCNKQSNSLYESLRILSLRYKQLIKCRTRILNFLHSSLELTFPELNQIFKNAYAVLALQVFRMYCHPDFLVGLTLKEMTTRVYQSVSRRIHKDVIQSYCAQVWLAAKDSYPAVPANSLEIEIISEYCDEIESYNKEIAYIQNKLIKTAVGLDDFKVISSIPGAGQLNSALLLGFTGDIARFDNYKQLNAFLGLDLNRYQSGKYGKGDTINRRGSSQGRAVETDMIRSMLRNQGKIQNHLIDYYYKLKKPPFNKHDKVALIACANHLNRTIINLVHTHQLYNYSKAIH

SEQ ID NO: 88800 - protein, 373 aa, unidentified
MPKYSTAFGMDVHLRSTTVCALDADTGEAVTRRFPGNPWGEIAGWMDGFPGPSLAAYESGYPGFAPQRELAGLGVECVVAAVSKIPRSAADSASKNDRNDAARMAKAILAHDISPVWIPSPEVEGIRDLAGAYDGATARLATAKQRLLAFLAKRGFVYGGTTPAGNPRKYWTYDFLRWLDKVRPEDDGGVRTLAALRNEVEAAAEARADLLSEYRAAVDASPIAAEVAALQSIKGCAFALAAAFSAEVGDFTRFRSGRQVTAYFGLAPSQRSSGDSVRLGGISGAGNALVRKLAVEGSWCYAAARHQPKLMPRDTGVPLEIRMHGRKGSERLLRRRKEMLARGVPAAKANAATAAELVRWLWALGMMCREGAE

SEQ ID NO: 88801 - protein, 320 aa, unidentified
MSKKKSKAFIGIDVSKKLLEVAAHESDYQFRCANKAKAFGELIVELLALRPALIVLEATGGLEIPVVAALHAAGLPVVVVNPRQVRDFAKALGQLAKTDRLDARVLAHFAAAIKPPLRPIKSADELELDALVGRRSQLVEMLTAEKNRRGSAATDTVREEIKEHIDWLEERIAELDQQLKGQLKNSTVWQGKDDILQSVPGIGPVVSFSLIADLPELGRLNRQQISKLVGVAPLNNDSGQQRGTRHIYGGRTRVRSMLYMAALTATRFNPVIKEFYQRLLANKKLFKVAITACMRKLISIINVMVRDSTLWKTKLDPVSA

SEQ ID NO: 88802 - protein, 346 aa, unidentified
MKATTIGIDLAKNVFQIHGVDERGKVAVRKQLKRAEMAKYFANLEPCLIGMEACGSAHYWARKLEGYGHAVKLMAPQFVKPYVKTNKNDMADAEAICEAVGRPNMRFVARKTVGQQAILSVHRARQGFVKARTAQGNQIRGLLSEFGIVIPQGIRSIMKQIPEILEDGENGLPGTMRDLIGRLTENLKEMDRQAKELEAQIQLWHRENEASRKLAEIPGLGPITASAIVATVGDAREFKNGRQLAAWMGLVPRQNSSGGKQTLLGISKRGDTYLRTLMIHGARAVIRFAEKKAGPESWMRKLVARRNKNVAAVALANKNARIVWALLAKDRMFRPDYTPAAKAAGA

SEQ ID NO: 88803 - protein, 337 aa, unidentified
MEYFAGLDVSMEETHICVVDRDAAIVFETQAISSAAAIAEALGAAPTCRRVVFETGRMAPMLFHGLAELKVPVICIESRQAYQALKTLTTHKTDRNDARGLAQLARTGFYKAVHVKSLPAHAVRALIVARKKLVGQRVTLENQIRGLAVAFGVRLPRGLSPTFVDQVVQMSASIPGLSGAMRGLVAARAAVLEAVSAIDADVKRLVRVSDACQRLMTIPGVGQLTALAFAAAVDDPSRFRRSRDLGAYLGLVPRRYQSGEIDYVGSISKVGDKRVRTLLYEAANVMLTRYKGELKLKDWALAIARRSTMRKARIALARRLAIIMHAMLRHGTEFRPA

SEQ ID NO: 88804 - protein, 391 aa, unidentified
MIYVGIDVAKNKHDCFIANSEGEVLFKPFTIPNNREGFESLFQRVQSVSDDLTKVRVGLEATGHYSYNLLGFLLDKGLPTYAINPLHTNLYRKSLSLRKTKTDRVDARTIASMIMSDVNLKSYSDTSYRNEELKSLTRYRFDKVKERAKLKQSVSRLVCILFPELENLVPTLHIASVYALLSEFPSANAIASAHLARLTNLLSKSSKGRYDKDTALMLREAAKSSIGSPMPAKSLELKHTIKLISELNAEIEEIESEIQSIMDQINSPILTIPGISYRMGAMILAEIGSFSRFDSPDKILAYAGMSPSTYQSGQLNNCYSHMEKRGSRYLRYALYNAAKYVCYWTETFRAYLAKKRAEGKHYNVALSHAVKKLVRTIYAMEKSGQPYTNAS

SEQ ID NO: 88805 - protein, 338 aa, unidentified
MKTHVGVDLHQRFCYLTAMNASGRICRQGQVVNEGGALQAWLRELPRPRQVVVEASGFWPAFARAAAVESERLVMVHPQRVKAIASAKLKNDRVDSETLAHLSRCDLLPEAWMADPATQQLRLRVRLRIALGRQRARAKNQLQAVLHQEGFRKPVTDVFGRRGRAWLKGLELSEAGRLVVDTWLREVDRLDAELTTQTRELERLAKADARAGWLQSVPGIGAYAAMVILAEIGDVERFASKRALASYAGLTPVVRESAGRRKRGGITHQGSNTLRWIMLQVAQVAARWSPGARSYYAGLRARKPAQVARIALARKLLTVVWALLRHRVDFDEELFIRG

SEQ ID NO: 88806 - protein, 406 aa, unidentified
MKQEEAGRSPARRLVGIDLGIASRHSVRVLEADGRMVCRSSCVPTVESLTALERAALAGAPEGTTLAVVFEPTGPAWLPIAVFFARRGHAVYRVSSAKAADLRRFLRRHAKSNGIDAETLARMPLADPGGLQQLELPAGAAAALDRRVRACGRLTEAASKHKVRIKDLVRQLMPMTPLTGDLGKADLAVLERYADPRVLLAAGDGELTRLITTASGHQQGSQRAGRWRAAAAAAVELYRDHPAVRYDELAAEVATEIRLLRAIQTELASHAAAREQHYRQVDPGQLARSLPGFAEISAPVLVAAMGRPGRFRDGTRFKSYVGLAPRASETGETDRKGQPMSKAGPSQLRSAFVRAADTARRQDPQLARIYYLQMTERGATHPRPAASSPGTSPNGPGPYSAAAPLM

SEQ ID NO: 88807 - protein, 307 aa, unidentified
MSQSPVYIGVDVSKRILAVAGPGLRPEYPNTPAGHAAILKALPAGAHVVMEATGDYQREFVLALHRVRINVSVVNPRHVRDFAKSMGELAKTDRIDAAMIARYAVSKAPEPDPVPSPAQLRLAELVARRAQLVEARVMEANRLEHHSMPAVRKQAQKTIKFFERQIAELEKLIQKEIGCDEKLKKNFERLCEADGVGFIVAATLLAYMPELGKISRNEASALLGVAPFACDSGPRKGTRQIYGGRTAPRAVIYMAALTAARKNPILKALYKKLRTTKPFKVAIVAVMRKLIMLLNHLLKNPDFSLAS

SEQ ID NO: 88808 - protein, 360 aa, unidentified
MAKAKTLVGLDVHATKIVAAVLDAETGQLQTFSMTGETAKAVKFCAALPRPVRVAYEAGPTGYGLARELARRRVECVVAAPSKIPRASGDRVKTDRRDAEHLVRLLLAGKLHAVRVPGPEEEALRDLVRARESVRMDLMRTRHRLSKLLLRHGIRFDDGHAWTERHRQWLAGVLLDWPAAQTTLLDVRGAIDALVIRRDSLEREILAILPACPWTVQVGRLRCLRGVDTLTAVGLCAEIGDFERFGKAEQLMSYIGVVPSEATTGQQRRLGAITKTGSGHARRLLVEAAWHYRPRPNLGKALVERQDGQPQAAVAVSWKAQLRLHRTWTRLEARAKRRTLIAVAAARELSGFCWAITQIE

SEQ ID NO: 88809 - protein, 361 aa, unidentified
MRIIGCDLHARQQTLAMLETTTGEVVNLTLMHEGNEVREFYSQLPRPVLVGIEATGSMQWFLNLMEELGIECRVGHPATIRAAEPRKQKHDRRDAELILKLLVENRFPAIWLPTKELLDLRALVLHRHQWVRIRTRIQNALQAIALANGLRRGPGLWSYDGQAKIAFLPLPPHASCRRSALQAMYRKMEEEIENLTKQVAEQAEQRTRARRLMTHPGVGPVTALATDIFLGDPGRFVDGKALASYVGIIPREYSSGGNQRLGRITKQGSPLLRFLWCEAGTHAVRKDPELQRFYRRKLVHKGLGRARVAVARKLGIRLWIMLRDEIDYEEFCRRGQKHQSGAACAGMLDVANGANSHRPVD

SEQ ID NO: 88810 - protein, 346 aa, unidentified
MKTTTIGIDLAKIVFQIHGVDERGKVSVRRQLKRAEMSSYFVNLEPCLIGMEACGSAHYWARKLEGYGHTVKLMAPQFVKPYVKANKNDMADAEAICEAVARPNMRFVAIKTVEQQAILSVHRARQGFVKARTAQGNQIRGLLAEFGIIIPQGIRSITKQMPEVLEDGENGLPGTMRNLFERLTDNLKEMDRQVKELEEKIQLWHRENAASRKLAEIPGLGPITASAIVATVGDAREFKNGRQLAAWMGLVPKQHSSGGKQNLLGISKRGDTYLRTLMIHGARAVIRFAESKAEPESWLRKLMARRNKNIAAVALANKNARIVWALLANDRMFRPDYIPAAVVAGM

SEQ ID NO: 88811 - protein, 361 aa, unidentified
MVYIGVDLHRKTTQVAAVDGEGELLVNRKVPTSGPDILRVFGEVVAEATPTAVAFEATFGWGWFADLLRDAGIEVHMAHPLATKAIANARVKNDAVDAKTLAHLLRAGMLPEAWAAPLEVREARRLVRMRTSLVRMRSRIRAQVHAVLAEHGVATPMSDLFGKEGRRLLEELRLPELSQGRLEACLRLIDDLGKEIEIADTEILARFETDPRTRRLLPIPGIGPTIAAILLAEVWDVSRFPSAEHLCAWAGLTPTERSSADHTRRGHISKQGSRWLRWVMVEAAVRALGNPQLGVFYTSIEKRRGSKIARVALARRLLTLAYYALRDEGGCRAFPVPTEIPRGRARSLIDMASRGTAAIAD

SEQ ID NO: 88812 - protein, 403 aa, unidentified
MIFVGDDWAEQHHDVYLMDESGKRLGSRRLPEGLTGIGQLHELIAQHAEEPDQVVVGIETDRGLWVGALTAAGYQVYAVNPLAVARYRDRHHLSGAKSDASDAKLLADLVRTDRHNHRPVAGDSADAEAIKVLARAHQSLVWTRTRHTNALRNALREYYPAALAAFEDLAHGDALGVLDRAPSPIQGARLPLTAIQSALKRGGRQRNIAARAREIAAALRTQQLAAPAPVAAAFAATTRATVGIIAELNRQIGELETTLAEHFETHPDADIYRSLPGLGVVLGARVLGEFGDDPNRYTDAKSRKNYAGTSPLTIASGKKRAVLARHVRNRRLYDALDRWAFCALSTSPGARLFYDQRRAAENTHHQALRALGNRLVGILHGCLRHHTDYDENTAWAHRTPVAA

SEQ ID NO: 88813 - protein, 421 aa, unidentified
MKVHRNCCGLDVHKETIAACLIREDAGGNTRKEKRLFGTMTQHLRELAQWLREAEVTAVAMEATGVYWVPVWNVLEREGLELVLINPEHYRAVRGKKTDLKDGERIAELLQDGRLEGSYVPRTELRVLRDLTRYRVKLVEHQGSVACRIQKLLEQCNIKLASVATNVLGVSGMAMLHALAQGETNPERLADMAKMQLRKKLAALQLALDGHLLPHHRFLLSEMLEELSHVQSSIARLEAEIELQMKPFQKVLQAWMSMPGIKHRVAWTLVAEIGPDLEAFPSPDDLASWVGVCPGNNESAGKRKSGKTRKGNRWARRALCEAAWVAAKAKNSYLSAQFRRLAAARGTKRAVVAVAHTILIIGYHLLQRGTTYQDLGSNYFDQRHTLRTTKRLVKRLEALGHQVILESPLSAALNQALHGTS

SEQ ID NO: 88814 - protein, 343 aa, unidentified
MQVVTTIGLDIAKSVFQVHGIDAEGKVTIRRQLKRRYVLAFFQKLQPCLVGIEACATSHHWSRQLKALGHTVRLMPPAYVKPYVKRQKNDAADAEAICEAVTRANMRFVETKTPEQQSCLMLHRTRQFFIRQQTSVINAIRAQLAELGIVAPVGRKGVEQLLAVAADASDHHVPEMARACVVALGAQLRMLKAQILEFDRRILAWHRSNEICQRLDELPGVGPALATALVASVADPKAFRSGRNFSAWIGLVPKQHSSGGKNKLGGISKQGDRYLRSLFTAGALAVIRYAKIYGTQHRPWLTALLARRPTKVAAIALANKIARMAWAIMAKGEPYKEPVAFAA

SEQ ID NO: 88815 - protein, 391 aa, unidentified
MIYVGIDVAKDKHDCFISNSDGEVLFKAFTIPNSLDGFNELCSKICSVSDDFTKVKVGLEATGHYSYNLLGHLLDKGLPTFVINPLHTNLYRKSLSLRQTKTDKVDAMTIASMLMSDVNLKSYSDTSYHNEELKSLTRYRFDKVKERAKLKTSVSRLVTILFPELEKLVPTLHMKSVYSLLYEMPSAKAVSNSHLTHLTKLLESASKGRYSKETAILFRNAARNSIGQDMPAKSLELKHTIKLINELTDEIDEIESEIKIIMDSLNSPILSIPGINYRMGAMIIAEIGDFNRFDSPDKILAYAGLSPSTYQSGQLDSSYSHMEKRGSRYLRYALFNATKFVCLWDSTFNTYLAKKRAEGKHYNVAISHATKKLVRLIYHLEKTGQTFIKAS

SEQ ID NO: 88816 - protein, 348 aa, unidentified
MNYIGIDCHITTLDFAVINETGKLTKAERVDTSASNLINFVKGIRKPRIIYIEEGTLADWIQETCIAYGEKLVITDAKENRWISSSGQKNDKVDALKLAQLARGGYIKEIHHATGTRRRFKELMMAYHDTVRSGTRIKNKIKAKFRGNGIQSPGETVYSRRNREEWRNKLPDEPSLLMILDNLWLQLDQIAAIEKTILAAARVQARQFPEIKTFQAIPGVGFITAATVSAIIETPWRFADKRKLWMYAGLGIEKKSSGEKVYSEKLTRNYNRLLKYCIKQAGERVIQAKDNPFRRKYLAMTLIRGTAPHRAKLTVSRDMLATMLAMWKKGERYNQEIRESRLPIQSRT

SEQ ID NO: 88817 - protein, 435 aa, unidentified
MTDSHSTAANRILVAIDVAKAKHDILVELPDGGRKKMIVRNQRDEFQRLAIYLKSLTGTCEIALEPTADYHRCLAYFLGANGFAVRIVSSIAVARTREALHNSWDKNDPKDAQVILHLLRNHNTQRFYDPVIEQTNDLQELSKTHHQVSLRKTRLQHSLMNHYLPLYFPEAERFLCTTRAGWFARLLIAFPTPASVTALPEAEFISAASGLLRTKHSKEAVLRSFYAKAKESVGIPVTLESQAVSTFRLLLSDHLELCRKRAELERTAHELLKQRLDYQILRSVPGIGPIIALTVLAEAGDLRRFGHERQFLKFCGLDLSTAQSGAFRGRSQLSKRGNARLRAALWMAATIASRMSENSLRKKFDRYIQSDPQNADLRRKAYTACTAKMARTIYGLIKHQQLYRAYHEDAVPVPDGRTRSHGPLRHAAEQAAVTS

SEQ ID NO: 88818 - protein, 312 aa, unidentified
MAQQTIIGIDLAKNVFQVCMVTPQGTIKTNTTVARGKLFALIARPPPALIFMEACGGAHDWARRFGVLGHEVRLLAPQYVTPFRRGQKNDPNDALALTEAGQRPNIPTVPIKTVEQQDLQALHRVRERLVKHRTAVVNQVRGLLLEYGIVIPQGIARLRKRLPRVIEEADNGLSFLMRDLLQSLQSELSALDTRITEVTSQLTRLSHELEACQRLQEMEGIGPLSATALVAALGNGHDFQTGRQVAAWLGLVPRQHSSGGTTRLGGITKGGNSSVRRLLIHRIFPDDFGERRTISEGYLHSCSTCSHYKISL

SEQ ID NO: 88819 - protein, 352 aa, unidentified
MNATTVAIDLAKNVFELAVADMAWRVLEHHRLTRTQFERWFANREVKLIVMEACGSAHHWARTFRERGIEVRLLPAQYVRAYVRRNKTDAADAVALLEAARATDIKPVAVKSVEQQALQALHRTRSAWMSTRTRRINTLRGFCREFGLAVPEGAVRGIAQIARYLADEHSGLPVILRGSMRLMLEEIRLMEARIGQLEHDLSQLARHSPACQVLTSVPGIGLLTSTAMVAAVGDPRSFESGRRYASFLGLTPREFSSGDQRYLGRISKRGDRYIRMLLTHGARSILHSATVARRAGRQVDRLKTWALAVQARTNHNKATCALANKLARIAWAVWVKHEKYRGEAASVAEASA

SEQ ID NO: 88820 - protein, 430 aa, unidentified
MIVGITKPIDHKFLTKEGDIMNPLYVGIDVSSRSNVAYLMKPDGSKHSNFSVPNSLDGSRQLVKRILSAITSESLSDVIIGLEATSVYGDNLVCFLREDGSLSSYNKRIHVLNPKQVNKFKQAYNDLPKNDYVDSFVIADCLRFGRINKEVYLDDYRYKALQNLTRARFFAVQNLVKEKQRFLNYLFKKYSTMAQEKVFSNTFSTSALAVYEEFDSAETLADMDLQQLTEFLIQKGKNRFPDPESVAKAIQKAARSSYRLPKTINDSVNQVLSISISSMKALESQIKAFDKAIAAQMELIPNTLTSVNGIGPVYSAGIIAEIGDINRFPNQAALAKYAGLVWSQHQSGDFEAQNTRLIKSGNRYLKYYLCEAAMSLVRCDAEYSRFYHLKYKEVNKYQHKRALALTARKFVRLVFRLLKDNCLYRAPEAH

SEQ ID NO: 88821 - protein, 343 aa, unidentified
MPRASTVHAVIAIGIDMGKSTLHMIGLDSCGAIVLREKVSRGRIASRLANLPPCLIGIEAGMATHYVARELTALGHDVKQVPATYAKPFRQGHKNDFRDAHAVAEAVQRPTTRFVPAKTDEQLDLQALHRVRSRLVSERTAVINQIRGFLLERGIIVRQGLRFLRQLLPDILAKRADVLSPRMIRIVTELAGDWRRLDERIETVTDEIEALAKSDDSCRRVMTVPGIGPIISSAMVAAIGNGVAFERGRDFSAWLGLVPKQMSTGDRTILGRISKRGNGYLRMLFMQAARVILLRPANWPKHGFGAWLTRAAQRLHPNKLARIAWTVLAQERAYESRIRKAAA

SEQ ID NO: 88822 - protein, 423 aa, unidentified
MTSMTLDPPLTCPLSPAAEFVAGVDTHKNTHHVAILDLVGRPVADREFRADGRGYAQVIVFLREYGDVVRVGVEGTGSYGAGLSRALNAAGLTVVEVARQDRQARRRRGKSDPLDAHQAAVAVLAGTDTAIPKSGDGAVESMRILLAERRSAAKARAQVMNQIHALLITAPELVRQAFRALSGQRLVNTLAKTRPGTIASADPEVVARQTLRRFAVRHLTMQAEIDLIEQQLERLVRQVNPTLLSLSGVGPVTAATLLVAAGDNPERLGTRASFAALAGVAPIPASSGQRTRHRLSRGGNRHANAALHRIVLLRMRHREPRTMAYFERRRAEQLTDRDIMRCLKRHVANEVYAALLNPATDNPAGRELRARRQAISIPISVLAATLGVPYQRLRRLEIGTRADPDLEARATAVLERISPPLAA

SEQ ID NO: 88823 - protein, 384 aa, unidentified
MKKNSTAKKGPKALSNGKRNQVREVAAKQRLTIGLDLGDRTSRYCILDEAGEKVSEGQLPTTQAGLSSLFAKMPSSRIALEVGTHSPWVSRHLAGMGHEVIVANSHQVKLITQSVHKNDRIDAEQLARLARVDPKLLSPIRHRGREGQADLAVIRARAELMEARTGLINCARGLVKPMGERLKKCDADQVKESLGEGLSEAAQTVIGPLLKSVEAISQQIGEYDQKIEAIAKRYPEVELLTPIYGVGRLIALTYILTLKDAERFAHSRDVGPYLGLTPKERDSGDSQPQLGITKTGDGLLRSLLVQGAHCMLRKGAPDSDLRAWGLGKMKSGGKNAKKRAIVAVARKLAVLMHALWSRGEVYDPLYNQQAALAAAAKGNRKAAA

SEQ ID NO: 88824 - protein, 355 aa, unidentified
MSSEKYIGLDVHQATISAAVMDSQGKVIMESILETKASTILEFFAGLHGSLFVTFEEGTSAAWLYDLLKPHVSEVLVCNPRKIPLHKQGNKSDKIDARKLAERLRLHDLKSVYHGENGIRMLRELSRSYLTVVKDLSRVMNRLKALYRSWAIPCAGRDVYYRRHRSEWLDKIPEAGTRRRAEQLYQQLDLLQRLRQQARRELLAESRKHAITAKLRKIPSLGPIRCALAVALIQTPHRFRSKRQLWTYSGLGLETRDSGEYHFVQGQVRRRKKQATIRGLNKDYNHDLKGLFKGAATRASVKPGPFQEFYQRSLAKGIKPTMVRLTLARKIAAITLTIWKKGEDFDINKLNSQAA

SEQ ID NO: 88825 - protein, 372 aa, unidentified
MNYNTVYVGMDVHKESFTFCAYTIDAEKGSHFQRTEADYKNVLRYLEFLRTVYGNDANFICGYEAGCLGYTLYHQLTEHHVNCVILAPTTMLEQRSKKRIKTDKRDAEIIAKCLAQHNYSPVHIPTAADEETKEFLRMRDDHKLALKKVKQQILAFCLRHNYRYDGNSHWTAAHIKWLKSLKPEALYKEILDEYLLTYTALSDKLERLDKRIEELASKDEYKESVKKLCCFIGIKTHTALSVLVEVGDFHRFASAQNFASYLGLVPGEDSSGDGQTRLGITKAGNRHVRMLLTEASQCYARGQIGFKSKELKSRQAGNSPQVIAYADKANERLRRRYYKMVLGKSKKPNVAKTAIARELACFMWGMMTDHVA

SEQ ID NO: 88826 - protein, 334 aa, unidentified
MENIALIGIDLGKNSFHIHCQDRRGKAVYRKKFTRPKLIEFLATCPATTIVMEACGGSHFMARKLEELGHFPKLISPQFVRPFVKSNKNDFVDAEAICEAASRPSMRFVQPRTESQQAMRALHRVRESLVQDKVKTTNQMHAFLLEFGISVPRGAAVISRLSTILEDNSLPLYLSQLLLKLQQHYHYLVEQIKDLESQLKRKLDEDEIGQRLLSIPCVGTLTASTISTEIGDGKQYASSRDFAAATGLVPRQYSTGGRTTLLGISKRGNKKIRTLLVQCARVFIQKLEHQSGKLADWVRDLLCRKSNFVVTCALANKLARIAWALTARQQTYVA

SEQ ID NO: 88827 - protein, 363 aa, unidentified
MTRKRLSGNHLLDFIGVDEKTPVWIGLDVHKKSYHVALRRADGVCQSWVSPADPIVLAQQLSAISQRISLIVYEAGPTGYCLERVLKVNGYKVAVIAPSRIPRPVTNQAKTDKLDCLKLAEYAAKGMIEAITTPTEQEGAERNVLRRRNQLVDSTRKTKQRIKSFLLFHGIEEVYGLRYWNQSAKTKLSKLPLQSDLKFVLKSLLRQLSYEEEELARITNRLARIAKRSQHWEVVKNLKTVPGVGDIVACAFRTELFRPERFRRAEEVCSFLGLAPAIRQSGEKRQGGWLMRSGQKRLKSLLIEAAWMWRAKDPWARKKYQTHLSRCGITQKAITALARRLAVILWRLSVENRAYVMRQVDSV

SEQ ID NO: 88828 - protein, 378 aa, unidentified
MNRIIKIGMDVHTTNYTLCIFEPSFEHDGTVHCITQVKPEIKNIIHVIEAFKKKHENEELNIVCGYEAGCLGYSLYHELKEKGVECVILAPTTMKTEKGGRKLKNDYRDAKMIAECLAYGGYSAVHVPTELDNSVKEFIRMRDDIKENLKSIKQQIIAFLTRNGKQFDGKNYWTKKHIDWINAISFSEPLLLDTLKEYMIEYNHLCDRVETLDKQIEEVSLKEEYVEKVQQLQCLIGIKTHTALSLIVETSDFNRFKKGNMYSAYLGLIPGDDSSGGHEKKIGITKAGNSHLRKLLVEAAQGYTRGKVGFKSKDLKARQEKCSSEVVAYADKANERLRRKYYRMILRGKKYNVAKTAIARELACFVWGIMTDHMDLCS

SEQ ID NO: 88829 - protein, 363 aa, unidentified
MKNYIFVGCDSHEEILVNKFAHNDGPMEMKKCSAKRAGRQKMIEYFTEQSRRAGGAQVVVVYEASAHGFILCDQLRAAGFICHVLAPTKIERSSKQKRNKNDERDAERLLDIVRGHYLAGTKLPAVWVPDAQTRDDREPVRARQDLSEKLTIVKTQMQMLLKRHGLEKPEEVGNNWTKRHRQWVEALSQEGPSIQLGMRQALKTLLRQLQFLEQEIEQIDEAMRELANTARRKPIVDALMSEKGVGLTTALKYATDIGDFPRFRRGRQIGAFFGLAPSSNESGENNDRKGHITREGSPSARQILCQATWSRVQHDPQEREVYQRLVAKNPKKKKIALVACMRRLAVRLWHIGLEAQLRMEAAG

SEQ ID NO: 88830 - protein, 321 aa, unidentified
MSVTIGIDISKHHLHVALREHRQSGAEQCFANTQRGHTQLVAWIQSHAVTVECICMEATGRYGEQIAHHLHENGYGVSIVTPSRTSHFARSLKNRHKTDFADARMLAQFAAERQPSPWKPPRTLLSNLRDLKRLLDNLIEDRTRIRNRLEGMPQTSPARPYLEKQLQYLEKQITDVENDLEQHIDNDETLTQNCQLLTSINGIGAITARQLLAEIADWTAFDSAKELVAFAGLCPQHIQSGTMNYSRLSKRGNARIRKTLYLPALTAMRYNPHLKRFADRLLAHGKAKMQVVVAVMRKLLVLAYAIIKSGIPYDPDYQVSA

SEQ ID NO: 88831 - protein, 408 aa, unidentified
MLFIGVDLSDKFFDSCITNSYGDVLSRNRFDFRHDGFCAFLKLIQEHQTNDQKCIIGLENPRSKLVDFMTQRGYSVVLTNPSAISSYRKSRKPSKAKSDQADAQLIADYVREHHKSLSAIQIPDETMRELSLLLEDRDRLVQQKVRFSNQLTNTLKEYFPQAIDAFGSIDNKSTIKFLKKVDTFAQVKALSEENLKQLLKDCDINRKESKERFHKTLKRPVYHISQAVVKTKVRLKNILVTHLELLINQIDEYEKQIKRIMDDSPHGDIFRSLPGADYILGAKLLVLYSTREFNDANEAQQLFGTAPYTCTSGQSRHVGFRKGANRFGRNTFQQLARCSIRSSNWAKKQYVRRREQGKGSNHAFRCLANTWVRITFAMWRNKKNYDESIILTAVANHIINQPAFVYRD

SEQ ID NO: 88832 - protein, 449 aa, unidentified
MKKISYRAVSIETLTSALPAVMLAGATKLVVAIDVAKTKMMAGFGREDGSTTRLVRFESPTWTRAFVDLVIATGKELGVPVEALMEPTGTYGDGLRALLVANGVKVFMLSPKRVHDAKEVFDGVPSLHDAKSCVVMAQLHRQGVSRAYTPMHVDRVRMRALVSRREVFEKPLQMHLGALEGLLGRRWPELLGDMDVWRRQTPLELLAVYPCPADVLAHEAGARAVMRRASRNSMKPEDVQRVFDSASRSIGLPASEEEREVIRAVVLEALHVRASISSIDKVIEKVATEHETTRGLAPVVGRVTAVVLVAYLGPFSEYGSAAALEKACGLNLKIKSSGNVIGRPSITRRGPPEVRMYLCAASREERSTDRRMVPIARRLPREPQAHRGRWRDAQARACLVARCARRDLRRNQARRCACSQRCVGPGRSCAPAHFARRLVSLRGDRRALI

SEQ ID NO: 88833 - protein, 415 aa, unidentified
MKEHIDYLSTLFVGIDIASRIHVISALDFNQDFFIKMKPFENTKEGAGIVEKMIADVLADNHQFKYVVIGMESTGFYGVHLANYLSTSELLAPFSVRVYCLNPKEVKNYKKSFNDIGKNDGIDSFVIADFARVGRIAIKPWRGSQYLALQRLTRHRMHITECITREKTYMLNNIYLKFSEYALLRNGEHPFSNKYGATAEAILTEFTTNEDIVNSSIEELVEFINSKSKGRIADPEETAKIVQAAARNSYRLDKCLYEPLTISIASSFNCISSFEKELKAIDKAILQTVQGLNPEEYTVLNSIPGIGKVYSAGILAEIGSIKAFQNANQLAKYCGIVWNDNDSGDFESEDSRMSKAGNRYLRYYIIEATGSVISHCPEYKAFYQKKYAEIYPVSFLSCLIYDYFAEIKFQRRTNE

SEQ ID NO: 88834 - protein, 609 aa, unidentified
MSTTSALDRIGVGIDTARYGHRVSFLRPDRSPAAPPLTVTEKREGYQALEERLRKLHAQHPSAHFHVRIDAAGQYAANLEQFLRGLDLPMTLSIGEPQRNKDYQKAHFPKRTTDDTESQAMARFAVVEGPAATPSPSAELVLLREVCSRLQAQVKQTTREVNRLHNLLARAFPELATLTDDIAASWVLRLLEKYPTAERIAGAHLASLATIPYLSHDKAEALHGAARGSVATLKGDVAEALVRGLVAQVRNSQQAEKDLKQLLTTAFAKLPASAHQRVVTIQGIGEATAAVLVAKIADIKRFATADHLVSDFGVFPEENSSGVDKQGRPLPVGTMHMCQKGNDLARCYRWNAARAALRCNPAIRALYHRLKSRGKRGDVAMGHCMRKLLHLVFAVWKTDRPFDGDHSPWANPAAEEPPTPASAPAPAIASEDEGKTAVGHKRDLPAGKVVTTASPTVEPESAPVKPALPPPSAERPRVDFAFLREHISMEQVLQHLGLLGRLHGRGQQRRGPCPVHGRATEEGKTFSVHLGKGVYRCFKAECGAKGNVLDLWAAIHGLPVYEAALHLAETFGLPRKREEGPVTGTRADGSGQSPSSGGQAVAIHGMLNR

SEQ ID NO: 88835 - protein, 413 aa, unidentified
MEVLYARCCGLDVHQRVVVACLSLVEAGLRRKEIRTFGTTTRELISMRNWLIEAGCTHVAMESTGVYWRPIYQRLFGFFELVVANAQHLKAVPGRKTDVKDAEWIADLLQHGLLSPSLVPPQDQQELRQLTRLRLSLTQERSQLVNRIHKLLQEGGIKLTSVLSDVMGVSGRAILEAQATGESDPERLASRAHKSVQHKHEALVEALVGDLREHHRFLLRELLTLTQAVDRSIQHVEEEIEQRLRPFEALLERLCQITGVSRHILHVLLAEVGIDMKRFPDAAHLSSWAGVCPGNNESAGKRRTGRTRPGNHYVKVALVQAAHAAAHTQTYLGEQYRRLQHRRGAKRAALAVAHSILVIFYHMMVTGQPYQEKGVEFFQQMDRHQVPDRLIQRLQRLGYQVLAPEMSQGPPAA

SEQ ID NO: 88836 - protein, 350 aa, unidentified
MRFYTGQHGFHCGIDLHAHTMYVCILDAAGEIAFECNLPTTPEAFLEAIAPYREGLVVACECIFTWYWLADLCAKEQIPFVLGHALYMKAIHGGKAKNDRVDAHKIAVLLRGGMLPQAYVYPPGMRETRDLLRRRLHLVRKRGQLLAHLQNLRHTYNRGAFEKRIAYPSNRAGVVAHFAGEPMVQANAALDLSLLAHYDKLLVDLELRLVRQAKREAPKGFHLLLSIPGIGRVLAMTIVYELHDVHRFERVQQFASYARLVKCAKESAGKRKGTSGAKMGNVHLKWAFSEAAVLFVRHSAEAKALLARLTKRHGKGKALSILAHKIGRAAYYVLVREKPFDAAKLFAHAS

SEQ ID NO: 88837 - protein, 340 aa, unidentified
MGEITTIGLDLAKQVFQVHGIDADGTTVLRKQLRRSQVLSFFSRLAPCLVGMEACATAHYWARELAALGHEVRLMPAQYVKAYIKRNKNDAADAEAICEAVVRPTMRFVPAKTAEQQAALLLHRGRERLVRQRTGLVNALRGHLAEFGVIAPQGLRNVGKLIAVVRDAGDARLPDLARQVLEVLAAQIEQLEGAVAAVEKQLMAWHKSNPVSQRLATIPGIGPIIASAIAASVAEPSGFRSSREFAAWLGLVPRQNSTGGKHRLGGISKRGNQYLRRLLINGASANLLRSKATKADPWVIGLRRRRPSLVVAVALANKTARIAWAVMQRNENYQRMAAAA

SEQ ID NO: 88838 - protein, 409 aa, unidentified
MDAIVERCCGLDVHQATVVACFLVGRADAKPRKEVRTFGTMTRDLLALRDWLHAAGCTHVGMESTAVYWKPIYALLEDTFTVIVGNAHHIKNVPGRKTDVKDSEWIADLVRHGLIRPSYVPPKPLRELRDLLRYRRKLVESRSAERNRLLKLLETANIKLSSVASNVFGVSGMRMLTALVAGTATPDEMAALARGVLRKKIPDLERALEGRMEEHHRFLLQLQLCRLEQVDDALTPLDHRIDQQLAAYRDVHTRLTQIPGVDRIGAAVLVAEIGTDMRVFHSPAHLAAWAGVAPGNHETGGKRQHAKVRRGNVHLQSTLFEAAKGAAKTKGSYLKDKYHRLKARRGAQRATMAIAHKILIAAYHMLATGTDYADLGAAYLDQLDNTRVTANLVRRLERLGYQVDLRKAA

SEQ ID NO: 88839 - protein, 429 aa, unidentified
MSYRIAGIDVHKKMLAVVVSDVEVDAEFHFEQCMFGSSPGHLRLLSEWLIEQQAEEVVMESTAQYWKPVWEVLERYWKPLCEKREGAKRRSGKLHLAQAQSNRGRRGRKRDFADAERLVKRLVARELTLSFVPDAEQRLWRTVTRKKFQLRRARIRLQNQLESLLEEAHIKLSSFVSDLLGFSARRMLKALAEGETNPAALAALADERLRATPEQLSDALGACTEVNDVYRRLLQMALEECRLIDEQIGKLDQEMASLLSQHQDAVERLAEVPGLGVDSAQQIIAEVGPSAATFPSEKCLSSWVGACPGDEESAGVNYNHRSPTGNRHMRRLLNQAANAAARTKGSIFEIVYRRSVPRLGHNQAVGVIAHRLCRLIWLILHQRIRYEERGPAVSKRSKQLRTWKMIRDLRRLGYRIELPNPQPSQAQAQ

SEQ ID NO: 88840 - protein, 366 aa, unidentified
MSLVERISIMYIVGIDIGKNHHEASIVSPEGKQIGRSLRFATTHKGADSLMSFIFKNIGNFPCVFGMEATGHYWYPIYSFLKAKGYTIYVINPIQSDSLRKMYIRQTKNDSIDSFLIAEVIRFGQFGTTSMADENILAMRQLCRYRDSVISSRTEIKLRIGTIMEQIFPEYEKQFSSLWLSTSMGILEKYLTPENIENAPIDELFEIIKDKSHNKLTMKKAISIREAAADTFGIKIAQDAFSFQLKQLIDRMNFLDKQIEALDIEIMKYYEQFDCYLHTIPGIGIIGAATILAEIGDISRFKNSSALVAFAGIDPTVRQSGEFNSTHNHMSKRGSPYLRHAIFLVATTCSFHNSPLNAYYKKKREQ

SEQ ID NO: 88841 - protein, 344 aa, unidentified
MGEVSTIGLDIAKSVFQVHGVDADGAVVIRKRISRAKVLEFFAAVSPCLVGIEACPSAHHWSRKLQALGHTVRLMPPSYVKAYLKRSKNDANDAAAICEAVTRPSMRFVPTKSEQQQSGLMLHRGRQLLVRQRTMLSNAIRGHMAELGIISAKGRNGTVELLEIITNADDDRVPTVARLSLDALARQYANTTAEIRVFEKHIHAWHRSCEESRRLEEIPGVGPIVATALVAEVGDWKAFSSGRNLAAWIGLVPKQHSTGGKERLGGISKQGNRYLRWLLIAGAMAVIRYARQHGTKRLWLARIMERRPIKVAAVALANKIARMAWAMMVHGERFKEPRLLSQAA

SEQ ID NO: 88842 - protein, 341 aa, unidentified
MSVIAPVFSFGLNGYAGSGLALQDKAEKRLMQITIGIDISKETLDAYRFPDNHHIQVANGRAGHKSLVRWIGKQNGSLVVFEATGAYHRNLEAALAANGTAFAKVNPRQARRFAEATGRLAKTDRVDAIMLAKMGAILGLKAHEPRTEALHILRELITARRALMKDKVAAKTRLQTTRQTLLKNQINARLKQIKIQIQQVDAAITEKVAQDEALSNKLDILTSIPGIAETTAFSMLIEMPELGTLEGKQAASLAGLAPMSRQSGKWQGKERIKGGRAFLRRAIYMPALVATRYNPGLKAKYDQLIRAGKSGKVALTAIMRKLVVMANALLRDGRTWSELRP

SEQ ID NO: 88843 - protein, 377 aa, unidentified
MSKISFVGLDVHAETIAVAVAEMGGEVRSLGTIPNRLESIRKLVHKLGPVEHLRTCYEAGPTGYVLYWQLTQLGVACVVIAPSLVPTKAGDRVKTDRRDAEKLARCHRAGELTAVWVPDADHEALRDLVRAREAAKKDQLKARHRLGKFLLRHGRRPEGLKAWTKQYLEWIKSHVHFDQPALEATLADYLEEVDHVAGRILKLEKAIDQAVQQAPAEIRAVIEALQALRGVAQTTAATIVSELGSLSRFQSPRQLMGYSGLVAREHSSGNRVQRGGITKTGNGHLRRVLVEAAWAYQHRPNVTGFLLRRQKNLALSDEVKKMAWKAQQRLHKRYTAFTVRGKNKNQIVTAVGRELLGFIWAIAVHTETQQQQLRKAA

SEQ ID NO: 88844 - protein, 444 aa, unidentified
MGKPQVFDDQEQGRVFERVAAVDVAKASGVVCLRLPHPAQPAGRRSQVWEVPATMHAVTELARRLTAEGVQKVTLESTSDYWRIWFYVLEQAGLAVQLVNASQARNLPGRPKTDKLDAMWLARLTEMGLLRPSFVPPAEIRVLRGYARARTRLTHDRTRCFQRLEKLLEDALIKVSAVASKLTTRSVQDMIRAMIAGQRDPQVLAGLARTRMKAKHDALAEALAGLFTDHHAELAQLLLDQIAFLDTQIARLAMLIGEQLASLRAAGGTGADGATGPGPGAIALPVIARLDEVPGVGAELAASIISETGLDMTRFPSPGHLASWAGLCGRTIQSGARTRTGKGQGNAWLRGYLGRAAIAAARTSTFLGERYRRLARRRGAARAQVAVARSILIIIWHLLNDPAARYHDLGPGHYQARTDKNRKARNHIRQLQALGYTVTITQAA

SEQ ID NO: 88845 - protein, 423 aa, unidentified
MEVVYPCVAGLDIHKETVVGCVRLTTGGKALRECRTFATTTEGLLDLLAWLQASGCSQVAMEATGVYWMPIWKVLCDGDFTLLVANAAHIKAVPGRKTDLNDAMWLADLAACGLIKASFVPPEAIQDLRTLMRTRKQMVREQTRHVQRIQKTLTEANIKLDSVISDIMGVSGRRMIEAMISGVRSPARLAELAHKQVKASPKQIYDALHGRLTAHHRFLLKLHLDQWDTLAAAIETIDEEVEARLARMDEEAAPGEATFSRLTALLSSIPGVSLLAARSILSEIGTDMGRFATAGHLVAWAGMCPSQNESAGKRKSSRLRKGAPWLKTMLVQCAWAAKRKNDSYYKAQFLRLRSRCGPQKAICAVAASILTAIYHMVKNRTRHQDLGGGYFDKRSTSDKAKRLVGQLTKLGYEVTLQPIAKAA

SEQ ID NO: 88846 - protein, 418 aa, unidentified
MDVVHACCCGLDVHKQSVVASLRRAVTGGVRATTTRTFATTTEALTELATWLAAQGCTYAVMGSIGVSWKPVDNIVREQAPQVDVAVVNAAQVKALRGRKTDVQDAAWLAMLPQHDPLRPSFIPSREQRELRDLTRTRTTLTDERSAVVNRVQKVREDADIKLAGVATDVMGVSGRAILAALLAGTADPAALAALAVGKLRTKRAERERALDGRMRAHHRVLVAMHLGHIDVLDEQIAELDRRIAEATRPVAEVIARLDTIPGVDVRTAQVLVAEVGVAVAQFPTATHLSAWAGMAPGNNLSAGKRRDGKTRKGSTWLRRALVQSARAAARTKKEGQTAFAEQDRRLVVRLGPKKAAVAVGRAILTTAYYLLAHETTYTESARVRLADDRRRRLERRALAQLAALGDHVTLAPKEPAA

SEQ ID NO: 88847 - protein, 337 aa, unidentified
MKYCGIDLHSNNSVVIVSDEEDRIVFNKRLPNDLGQIRAALEPHREELAGVVIESTYNWYWLVDGLMDAGYRVHLAHPAAIKKYEGLKHSGDFADAAYLAQLLRLGLLAEGYIYPREERGARDLARKRMQLVRYRTAQILSIEGILMRQTGARMKGEAVKRLTAEQVDEFGFAPDVALAVEANRAVSQALGQQIEALERRLKERVSLRPEYGLLKTVPGIGETLATTIMLETGSISRFAQVGNFSSYCRCVDSLRESNGKKKGEGNTRNGNKYLAWAFVEAANFAMRYCPQAKSFYDRKKNKTNRVLAIKALAHKLARACYHMLRDQKPFDVRRCFG

SEQ ID NO: 88848 - protein, 357 aa, unidentified
MTTTTTAARTILALDLGKYKSVAYLYTGDPATATFLTFVTDCDRLHKLVAKHRPDAVVIEACLLAGWVHDLCHEVGLPCHVANTASEAWKFKHQKRKTDRDDALRLAQLFALGQLPTVTVPPPATRQWRALIAGRQRLVGRRVAVQNRVRAILVGQGLAAPRGAKAWTELGLEGIGQFAKPLADCGPDELWRGLLDLALTELRQVRQLADQAEARLDELAQASGAVQLLETVPGVGPRTAEAIVAHLHEPGRFDSGKQVSAYVGLVPRQYQSGESDRRGRITRRGPALLRKLLVECAWVMLRYNPWARAVYQRLSRGKARKKQAIVALARKLLVRCGAMLRDQTPWRDSPAAEAAPA

SEQ ID NO: 88849 - protein, 313 aa, unidentified
MATSSYVGIDVSKSRLDVAVLGERQETQVENSREGIARLVEQMEDLQPELIVVEATGGYQRAVVEALFWAGLAVAVVNPARVRQFARACGLLAKTDKLDAQVLAVFGERVQPRRYESKSEAGKQLSALLVRRRQLDEMLKAEQNRLRTTSASLKSSVKRMIACLKQEKKLLDEQVQQCVAKQEAWQEQREILQSAPGVGKVTTATLLAELPELGKMDRKKIAALVGVAPMNYDSGKKRGYRKTKGGRGEVRSVLYMATLVATRRNPLIQAQYQQLLKRGKLKKVALIACMRKFLTVLNAMLRDRQPFRCASTA

SEQ ID NO: 88850 - protein, 336 aa, unidentified
MIEEFSIPNSVEGANQLGKVLEGYDEAKIVLESTGNLWIRIYDTLNQEAKFKVVLANPNKTRIIAEAKIKNDRIDARVLADLVRADLVAESYVPNKEVREQRALLRQRRSLVEDTVAIKNRIHNLLDKYDLKPEYSDLFGKQGREWLRNLQLPAIERTILDVNLKQLESLEESIATLTVKIAQEVINRPDVKLLMGFTGIDYYSAMLLINEIGPIKRFPSAKKLVSYAGLAPGIRQSAEHTVHGRITRDGNKYIRWILIEAAQHASRYDPKLQGFYLRIKARRGYQKAITAVARKMLVSIYHVLNRQEEYHGQRDELLERKIKRLQRTVDSSLQAT

SEQ ID NO: 88851 - protein, 428 aa, unidentified
MDEVNRNRLEEFRQLRQEVRHSEKYLIVGIDIAKDQHHAFFGTATGRTLLRRLVFSNDHEGFRKLVDHAEALRVQHGLKKVVYGMEPTANYHKPLGEYLINLGRMVVLVSGVTVARNRESLDGRWDKHDGKDSANVADLISQGKCLYYEYPSAELRGLRGLLSLKRRLKKQEHGYRVRIRNQLIAQYFPEMDRDYERLGAEGVAIVRWCLPASQIAQLDIGPFIERVTSRRITMEKRRRLEEVWEKAAESIGCEGVPGVDHEAKVMVEGLKQIREMIKETEGKIQELCEHFLEYKYLLTIPGFGPDVSAKVLGAIGEPDRFQNGKQVLKMGGLDLSADRSGKDSDKAIPQISERGKADLRYALYQAALIASTRNREFMRYYTERLRGRDREKGIQMKMRVKLSAKMLLIAWTLMKKKEAFDPAYLKVD

SEQ ID NO: 88852 - protein, 418 aa, unidentified
MINKDANQCDRVIGLDSHPDSFTAAVLRGQTPAQALTEKVFNKVSMSQLQSWAQKHTTDQDLIVLEASGNSFQVARSLAAIERRVLVLESCQMGKLKEAHANNDKISAVRIGKAYLAGTAKTVWVPDTRTQERRDWFHAYRKATKRLTQMRSRLLSYLSDNGVRFKKGTPLTQPDDAEAQLRKAKEWSVRQWAVLESMLGELRHAEQQRKYWRSLIAQEVLADPLLLSLVRLCGVKEVIAFALGALIGDINRFARPGSLVKYIGLNPAFDDSGQGKWSGGIGGHGRKDLRGLLIQGAQAILRSKDPLAQWGKRLMARKSSLKLAVAAIARRLTVAIWYLLKGQWTRLEEVDPKLTAKLGTILAGMGKEAINKTGKTREALRQDCCQLLKAGRTYLLDSNKKFTPQAQPHSLAAEYGLR

SEQ ID NO: 88853 - protein, 418 aa, unidentified
MEIVYERVAAIDVGKKIIAVAVRTPGERPGKRRQQLRKYNTFHQTLTTMVAWLVAEGVTHVTMEATGIYWKPIFHALCAAERPLELLLVNARHVKNVPGRKSDALDAVWLAELTECGLLRGSFIPPPQIAAIRELARYRKKLIEQRTSELQRLAKVLEDSGIKIDSVASALTTLSARDMIEALIAGERDPAVLANLARGKMRSKIPELTLACAGRFADQHALMCVLHLEHIDHLADMIARLDTRIDEASLPFARQTDLLATIPGISERAAQIVISEIGVDMTRFPTAAHLASWAGLCPGNNESAGKHRSGRTRKGNTELCTVLTECAWAAGRTSTYIGAQFRRFHRRFGTKGGKKAATATAHTLIVIIWHVLAETAAYRDLGSDYFTRRVDNPEARKRRLIHELEALGHKVTIEPAAA

SEQ ID NO: 88854 - protein, 323 aa, unidentified
MKRLDIGIDVSKLKLDICLLDEKKELEYLQIFNKENSIKDFIEYLKENYKDYKFYFGFEATNSYMRILQKILTEFDYKYLMINPHTLHHYFKYIGLKEKTDKSDAYGIALFISEKSDEDFNDEINYELRNKYQDYVSTIELLTKIRTQLKNLKNSKKDLFNENLQKEIDEVERKINEIKEKIKKIAINEIRKDIPQFDEIKKEVKGIGDYTLLVILPYIASSKNKTAKEIQSYFGLNPIKYESGISVIKKPRISKKGNSVARRVLYLAAMSAKKSNEIIKKKYERLIKNGKQKRVALTACMAHLLRAIYFKYHQLTFSGGWAG

SEQ ID NO: 88855 - protein, 410 aa, unidentified
MEAIVECCAGLDVHQATVVACLNTGAPGRRAGKEVRTFGTTGQELREMRDWLKEADCALVAMESTGVYWKPVYAELEGHFEIIVGNAHHIKNVPGRKTDVKDCEWISDLARHGLIANSFVPPRAIRDLRDLTRYRRKLVQTQAAERNRLIKLLESASIKLAGVISDVFGVSGRAMLHALIEGDQSPADMAQLAQRRMKRKQPEIARALDGHIDEHHRFILRLQLRRITAAEADLEELDQRLSEKLAPYDAEVGLLMQIPGVDWVTAAGIIAEIGADMSVFLGATHLAAWAGVCPGSYESAGRQRGSKVRKGNVWLKTTLVTAAIAAAKKRGSYFADKYRRLTAKRGKMRAVVAIAHKILVVAYHMLANRSDYRELGAVYLDQLNRHRTTNSLTSRLRAMGYDVQITPKAA

SEQ ID NO: 88856 - protein, 381 aa, unidentified
MKMKTNVAGGGMDVHYKFSKVTFRDGEGHLVGRERLDHPDRAKLREQLSRWPKGIPIVLEASFGWGWLSDLMEEAGLEPHLKLYKVEQMRKARGTVKTNDKDADLTSLLPFESTNWWEVWRAPKDVRNRREQMRYRADLVALQTTVKNRIHALFHRHGIFYEFSDLFGGLGRKFLIELCQNGSADLSGEALNALRGQVRLLDHLRGQLADMAQTLRSQLEKTLLIRLLKSVDGFGLILSHVLAAEIGQIERFRHQRTLASYCLLAPRSNDTGEPGDRTPLGRHLGHRGNRTLKWAFIEAAHGAVRSCGRWRIMFDRVTDNGKRDCNRGYIKVARELVKVVYVVWKKQIPYTDTPPVRPGQKPENRPTRSGTGQLYHPMVQA

SEQ ID NO: 88857 - protein, 345 aa, unidentified
MQSMYYIGLDVHKKSISYCVKDGSGRIHAEGAIPATRSDLDRWMRTLPQPWTAAMEATLFTGWIYDHLKPHATALKVAHPLMLRAIAAAKKKNDRIDANKITDCLRCDFLPECYMASTEIRERRRTLRYRNLLVRQAVQLKNKIAVLLMEAGVSYNKQKLHKVGYFRELLATNQDIDDGLRSLLRMCRETVVRLGRTESALVRSLGRDPLLVERVERLMTIPAVGPVTALTWVLEVGDVRRFSSIKKAISYCGLCGAEKSSAEAIKRTPLSKQRNKPLQSVLIEAAKLAPRRSPELALVYDQEKQKGNANRATLAVARKLVAYLLAVDRRQKEFLTVETENRTAA

SEQ ID NO: 88858 - protein, 433 aa, unidentified
MHPKAAGIDIGNEEHWVAVPADLDPEPVQSFGCFTQDLEEMANWLVRIGIQTVAMQSTGVYWIALCDILAERGIRVFVVNASDTKNLPGRKTDIQECQWLLKLHAYGLLRNSFRPEEEILVMRTYWRQRQQHIGDASRCIQRMQKALTQMNVQLANAISDLSGSTGQAILKAVLAGERDPAVLAKLRDPRIKATEATVAKSLEGNWRPELLFVLQQEQESYESFQTKIAECDGQLKRHYATLEPKADATKLPPVPRDRRAKGNVPAGFDLREEMYRATGVDLTAIDGVNVLTVQTLISEVGWDMSRFATEAHLVSFLGLSPRDKISGGKVVGREKKKNKNRAGVALKLAAGTLLNSDTYLGAQYRRLRTKLGAPKARKAMANRLARIAYRMLKYGEQYVDRGKEFYEQKYRALQIRLLTKKATELGLQLVQSA

SEQ ID NO: 88859 - protein, 403 aa, unidentified
MNVNCVGIDVSKGKSMIAVMRPLGEMVIPPFEVRHTDAELCELSRRLGDLDGETRIVMEATGNYHLPVASFLYDSGFYVSVVNSMLVHGYGNNSLRRAKTDKKNAIKLANYGLDHWLALPRYIPEDEVRPMLKTTYRQYQQCAKVQTMLKNNLISLLDTAFPDANRLFTSPIRADGSEKWVDFVSSFWHCECVCGLSEKAFTARYQKWCKKHGYNFSQDKALDIYASACGHFSVMPKTTTAKLLVDQAVAQLRAASAALAVLRNEMQSLAASLPECPVVMGMFGVGPALGPQLMAEIGDVRHFHSKKALVAFAGIDAPPYQSGQMEVRSRSISKRGSSALRRSLFLVMSAILRCSPAHEPVYQFMDRKRAEGKPYRVYIMASANKFLRIYYATVKQYLDSLEA

SEQ ID NO: 88860 - protein, 373 aa, unidentified
MPKYSTAFGMDVHLRSTTVCALDADTGEAVTRRFPGNPWGEIAGWMDGFPGPSLAAYESGYLGFAPQRELAGLGVECVVAAVSKIPRSAADSASKNDRNDAARMAKAILAHDISPVWIPSPEVEGIRDLAGAYDGATARLATAKQRLLAFLAKRGFAYGGTTPAGNPRKYWTYDFLRWLDKVRPEDDGGVRTLAALRNEVEAAAEARADLLSEYRAAVDASPIAAEVAALQSIKGCAFALAAAFSAEVGDFTRFRSGRQVTAYFGLAPSQRSSGDSVRLGGISGAGNALVRKLAVEGSWCYAAARHQPKLMPRDTGVPLEIRMHGRKGSERLLRRREEMLARGMPAAKANAATAAELVRWLWALGAMCREGAE

SEQ ID NO: 88861 - protein, 408 aa, unidentified
MRIIGLDIHRAFAEAVAWKDGKLSRMGRVIMRRDSLEAFAKQLSEDDVVVIEATGNAASVAAVIGPHVSRVVIANPKQVRLIAHAKIKTDTIDASVLAQLYASGFLPEVWIADEATQALRRQVTRRNQIVRQRSRLKNIIQSILHAHLIPSCPHQDLCGPAGRAWLSEQILPGDERLAVERHLREFDRLGDDLKVIERDLARSALADESVRRLMTIPGIDMVVALALKAAIGDVERFAGPEKLVGYLGLNPSVRQSGPGPAYHGRITKQGRGHARGMLVEAGWAAARSPGPLRSFFLRVQTRRGQHVAAVATARKLAILIWHLLTKGESYLWARPALHARKLRNLELKAGHQGARGQKGTAHAYNIKSQRDQERRWVEQAEAAYARFVAGWNPRGPKARTSAAKEERR

SEQ ID NO: 88862 - protein, 403 aa, unidentified
MNMNAVGIDVSKGKSMVAILRPYGEIVSSPFEIKHTSSNIQSLIEQIRSIEGESRIVMEHTGRYYEPLARELSLAGLFVTAVNPKLIKDFGAHSLRKVKSDKADAVKIARYTLDSWTELKQYSLMDELRNQLKTMNRQFGFYMKHKTAMKNNLIGILDQTYPGVNTYFDSPAREDGSQKWVDFATTYWHVDYVRKFSLNAFVDHYQKWCKRRKYNFSKDKAEEIYGAAKELVPILPKDDLTKLIVKQSIEQLNTASKTVEELRTLMNDTAAKLPEYPVVMGMKGVGPSLGPQLMAEIGDVTRFTHKGAITAFAGVDPGVNESGTYEQKSVPTSKRGSSSLRKTLFQVMDCLIKTKPQDDPVYAFIDKKRAQGKPYYVYMTAGANKFLRIYYGRVKEYLMSLPE

SEQ ID NO: 88863 - protein, 320 aa, unidentified
MNTIGLDISQKTIDATLHKTDGSTYHTKVGNNREGFQSLKDWIKANKVRKCVIGMEATGIYYEDAAENLSETHTVYVINPLKIKDYGKSQFNRTKTDKADSNLIAEYTKRHADKIIPYSKPKNRYLQKLINLKQQLKDHQKQIKNRLHSSDDEMIQAIHQDLIQTYQEKIDQTQAAIEAQIKEQAEIDGHYRNLQTIAGIGKDTAAILYAQLTDKTFQTANQFVSYAGLSPQTEQSGTSVNKKGRLSRYGHRRLKRSLYMPALVAYRINAFPQLVRNLTNAGKPKMVIIVAIMRKLAKLAYYIVKTGKPYDSTRHKATQA

SEQ ID NO: 88864 - protein, 403 aa, unidentified
MNSVGIDISKGRSTIAVMRPFGEVVISPFEVRHTGSELSKLAKQLKSLDGETRVVMEATGNYHASVAKLLHNAGLYVSVINAKLVHGYGNNELRRVKTDRKDAVKLANYGLDRWLTLPRYIPEEDTRLLLKNCYRQYRQYSKVQTVLKNNLISLLDTVFPNANRLFSSPIRGDGSEKWVDFVAEFWHCRCASEKSERAFTSKYLRWCRKHGYNFREAKAHTIYAEASGHIGVMPKSETTKLLVKQAVSQLRATSTALAALKQEMQSLASVLPEYPVVMDLFDVGPTLGPQLIAEIGDVRRFYSKKALVAYAGLDAPPNDSGDVTGRHKSMSKIGASSLRRTLFLVMSVYLLTAPLDEPVCQFMDRKRAEGKPYRVYMMAFANKFLRIYYATVKAYLESLEHTV

SEQ ID NO: 88865 - protein, 337 aa, unidentified
MIIVGCDFHPSFQQIAFVDTESGEVEERSLTHASGGAEQFYGQLARPALVGMEAVGNSQWFVGLLERLGHEVWIGDAAQIRASYVRQQKTDRRDAAHLLKLLVEGRFPRIWIPSAAMRDHRQLLIHRHRLVQLRTRVKNELQHLALNQGVQRKRKLWTAEGRVQLEALPLERWTAQRRQDLLRLLAMLEGQLELLNQAVAEVAEAYPSVRLLMTQPGVGPITALAFVLTIGEVGRFSRSKQISSYLGLIPREHSSGGKQRMGSISKQGNRLLRTLLVEAAQSVVRFDPDFRREYQHRCHQKHRAVAKVAAARKLAVRLFGMLRTQRPYPDVFASRVA

SEQ ID NO: 88866 - protein, 377 aa, unidentified
MKRIKFVGLDVHAETIAVAVAELDGEVRSIGVIPNRCESVRKLVKKLGPVEELRFCYEAGPTGYVLYWQLTALDAKCEVVAPTLVPVRAGDRVKTDRRDALKLARSYRAGELTAVWVPDAAHEALRDLVRAREAAKRDQLRARNRLTKFLLRHGKRPPEGVNPWTLNYMNWVRKDVHFEPLAQQATLLDYLHEVEHMAARVTRLEQAIEEAVQLAPQQMREVIEALQALRGIAKVSAVTIVAELGELSRFGEARQLMAYSGTVSREHSSGESRKRGGITKTGNVHLRRIVVEAAWAYRHAPAVTACLRKRQERVSEEVKEIAWKAQHRLHGRYRKLTARGKNTGKVITAVGRELLGFIWAIGVKVEAEQRKALGQAA

SEQ ID NO: 88867 - protein, 396 aa, unidentified
MNAVGIDVSKGKSMVTILRPFGEIVSSPFEIKHTSSDIHSIEGESRVVMEHTGRYYEALAHQLSAADLFVSAVNPKLVKDFNNDSLRKIKSDKADSVKIARYALDKWQSLEPYSITDELRAQLKVMNRQFHFYVKQKTAMKNNLIGLIDQTYPNANTYFNSPTRSDGSQKWVDFVSTYWHVDCIRKMSLNAFVEHYQNWCKRKKYAFNKSKAEEIYTKTKELVPVFPKNEITKHIIRQAIDQLNSTSVTVETIRTLMNETASKLPEYSIVMQFKGIGPSLGPQLMAEIGDVTRFTHKEALTAFAGVDPGVNESGSYAQKSVPTSKRGSSNLRKTLFQVMDVLIKTMPQDDPVYQFMDRKRTQGKPYYVYMTAGANKFLRIYYGRVKEYLSVLPDPS

SEQ ID NO: 88868 - protein, 322 aa, unidentified
MQDAKTGSNVFVGIDVAKQSFDVAMLPGEQSVSFSYDETGFKQLLEWLRPQGTCFVVLEATGGLERRIAGELIDAGHQVAIVNPRQVRDFARGVGKLAKTDRIDALVLARFAQQVQPRITEKASEKQVELAAMVTRRRQLQSAAVAESNRRETTRTSEARKSVDKHLQWLRKEVARIDAAIARLIASDETWRGQAERLKSVPGVGPTTSATLVAELPELGRLNRREISALVGLAPYNHDSGKLRGKRSIWGGRLSVRSALYMAALTARRCNPIIRAFADRLAQAGKPFKVILTACMRKLLTILNVLVKTNQSWSPKNPPLTP

SEQ ID NO: 88869 - protein, 400 aa, unidentified
MISVGIDVSKGKSTVCILKPYGEIVSKPFNITHTQKDLSELSSMLFRLNDEVKIVMEATGIYHLPVLTYLQEKGFFVSVINPYLMKSYRNESLRKAKTDKIDSRIIANYGIDHWFKMKEFQTSGEIYEELKLLGQQYRHYMKLHLLSLAELTHLLDLTMPGIKNLLASWNETNRKDKRSDFVERFWHYDVITSMSEQKFTEEYILWAKEKKYVPSQEKAKVIYTLAQESIPTLPSETSSIKMLVTEAVRVLKEVDATLGLILSRMQEIAKTLPEYSVVREMGGVGNTLAPKLIAEIGDVRRFRNGKALVAFAGIDPPPYESGQFVGCNRKISKRGSASLRKVGYETMRSLKMRSRPEDPVYRYVVKKESEGKSKKSAKIAGLNKFLRIYYARVTELYKNI

SEQ ID NO: 88870 - protein, 377 aa, unidentified
MKKELYLGLDVHKEWILVAVAESGRNGAVQDLGAISNDLHALEKLLARLRKPYGSEVIIRACYEAGPCGFGIARRLHQLGVECAVVAPSLTPTRAGDRLKTDKRDARKLARLLRAGELTAIYVPEPTDEAMRDLCRARSDAVDDRRRSRHRLKAFLLRHGYRYQGKSAWSAAHERYLRELVLPHPAMKVILEEYLISVQLASERIARCEAAMSDLLGSWRLESAVRALMAMKGFQTVAAMMVVSELGALDRFRHPRQVMAYLGLVPSEKSSSDRRRQGSITKCGNAHARWLLVECAQHYAAPPKVSKELSRRQQNQSRAVRALSWKAQNRLHQRYRRLMARRLQRNKVMVAVARELCGFIWELLRIQECYHAPVPSV

SEQ ID NO: 88871 - protein, 377 aa, unidentified
MKKGRFVGLDVHADTIAVAVAEAGGEVRSLGVIPNRAEPIRKLIRRLGAPEQLRACYEAGPTGYVLYWQLTELGVKCEVVAPTLVPVKAGDRVKTDRRDATKLARSYRAGDLMAVWVPDAAHEALRDLVRAREAGKKDQLRARHRLSKFLLRHGRRPPAGVRPWTLKHLAWVKTDVVFEQPAQTATLLDYLNEVEHVTARIERLERAIDEAAASAPSTMRAVIESLQALRGIAKVSAVTIACEVGEFSRFQKAAQLMAYAGAVAREHSSGEQIWRGPITKTGNAHLRRIVVEAAWAYRHRPAVGSTLLKRQQTIGEDVKEIAWKAQYRLNSRYRKLVGRGKSKQLAITAMARELLGFIWAIGVKVEHQTREHGRLAA

SEQ ID NO: 88872 - protein, 347 aa, unidentified
MNQIIRIGMDTSKHFFQLHGVDAAEQPVLRRKLRRKEVVAFFAKLPPTVIGMEACGASHYWARVLCEFGHEVKLIAPQHVKPYIKRNKNDGRDAEGLCEAMSRPTMQFVPAKTAEQQAALMLVGMRERLVVRRTQLSNAIRGYAAEFGLIAAKGLDKIEPLLADIASDQALPVLARELFAMHGREYAQLQAELKDIEARLMAWHRANADSRRLAQIPGIGPIGATALVMKAPDPRLFPSGRHFAAWIGLTPKDHSTAGKTRLGKITRAGDEMLRSVLVAGATAVIQQARRGRGRASPWLLALLARKSSSKLAAVALANKIARIAWKLMTTGESYDGARMPGVSALAA

SEQ ID NO: 88873 - protein, 417 aa, unidentified
MRNAGIHANSLLEVRRMYNAVGIDVSKGKSTVAVLQPGGTVIRKPFDVSHTSQNLNELADYLSSLDGTTKIVMECTGRYHEPMVKALSEAGLFISIVNPHLIKNFGNNSLRKVKSDPADARKIARYTLDNWTELRQYSGMDNTRTQLKTLNSQFSFFMKQKVAAKANLIALLDNTYPGVNKLFDSPTREDGSEKWVDYAYSFWHTDCVRKIGLKAFTERYMSFCKKHHYIFQQDKPEKLFNASKELVAVFPKEKTYKLLIQQSIQQLNLASEHVERLRREMNELASTLPEYSTVMGIYGVGKTYGPQLIAEIGDVSRFTHREALTAFAGVDPGVDESGQHKSKSNRASKVGSARLRKTLFQIMTTLLQNAPEADPVYRFLDKKRSQGKPYYVYMTAGANKFLRIYYGKVKECLRNLE

SEQ ID NO: 88874 - protein, 347 aa, unidentified
MKFYTNYHKYYCGIDLHARILYVCILDDRGSKVVHQKIKADKTALLKLISPYLEDIVIGVECMHCWYWVSDLCAEQGIDFVLGHALYMKAIHGGKAKNDKIDSYKIASLLRGGNFPLAYNYPAHMRSTRDLLRRRTKLVQHGAQLKAHIVNTNSQYNYPALELHMKNKCVRQEFQTRFEDQAVQRNINFDLAILDSYAEELKKLEYYLEGKAKQHQPNYYTQLRTIPGIGLILAMTILYEIGDINRFESVQKFASYCRLVKCKAESAGKTYGTSGNKIGNGHLKWAFSEAAVLYLRGNDKARRYLNKLQKRMSKAKALSVLAHKLGRCVYFMLKNKTVFDDERFLKS

SEQ ID NO: 88875 - protein, 433 aa, unidentified
MEEVTDEPLYRDRVCGIDLGKAEMVATIRVPSEADPARRAAETRTFATTKAGVLALADWLRCWQVPAAVMEATGDYWKGPLYRLEAEGFECVLADAKQVRHLPGRPKRDPSDSRWLAACFERGAVTGCFVATPEFRLIRLHTRYRRDLTAERTREKQRAEKLLESAAIKLSSVVSDLHGVSGRDIMDHLIAGERNPKVLAQLARGRARRKIAELEAAVDGAEFFTAEHAALLSTMLARIDGLTGEIDGLTEVIERLLAPYEEQLQQAESMPGWGRVSAQDAVAETGVDMSRFPTGAHLASWAGRTPLDHQSGKRVGRAKSKKGNRYLAGITGETAVAAGKTQTREGARYRRLARRRGKAKAQVALGNTQMKVFHKLLSNPGMRYQDLGPDYYERQASTRRQIAHHVGKLGDLGFEVTLCLRPDPDGTGQTPAA

SEQ ID NO: 88876 - protein, 383 aa, unidentified
MNVALTLHSRRSALAQGSTLFIGLAVHKESIAVAYVAEEREAEVVFLGTIGTRQGDIDKLIRKLQAKGKRLHLVYEAGPCGYWLYRYLTKKNLKCWVVAPSQIPKQAGDRVKTDRRDAVQLARLLRSGDLTPGYVPGVEDEAIRDVVRAREEALQDGQAATARRKAFLLRQDSRSAGRANWGPAHLRWLAEVVCPTPAQQIVFPEYGRAVSEPTERLPRLEADLQTQGQSWRWAPGVAALQALRGVQFTVAVTLSAELGALSRFDNPRQLMSYLGLTPSEHTSGERRRPGALPTTGNSHARRALLEGAWAYRYPAKVSRHLQLRLEKVPTVIQDISWQAQVRLCKRYRRLVARGKNVNQVVVAIARAMAAFVWASARKVEVTP

SEQ ID NO: 88877 - protein, 339 aa, unidentified
MNKVNTIGVDLAKNVFHQCTQDHRGHILNKTKLGRSQFKQFLGSIPASRIVFESCATAHYWSRVATRHGHDVKLIHPAYVKAYLKTNKNDFNDAEAICEADSRPTMRYVSSKTIAQQDIQLLHRVRQRQVQKRTALVNQIRGQLLEYGIPIPQGIHHVRGRLAGILEDGENELTPTSRALFNELRQEFCELDGRIKQADKKVKQLASEHPICLRLMAMPGIGPMIATAMISAMGDANSFKNGRELSAWLGLVPKQYSTGGKQRLLGISKRGDGYVRTLLVQGAMSAITRCKNRSDSQLVWARQLREKKGLQKAAVALANKMARIIWSMMAKDHDYVAIV

SEQ ID NO: 88878 - protein, 432 aa, unidentified
MAAVMIGVDPHKSSHTAVAISGAEEVLGELRVSASAARAERLLAWAAAWPERTWAVEGADGAGHLLAQELLAGGERVLDVQPKLSARVRLLASGAVNKNDPNDARSVAIAALRSASCREARPDDHAAVLRMWSRRHRDLGRTRTQVACRLHAVLCELIPGGVGKEITAGQTAQLLGSITPSGAVEAARCELATEFVEDLRRIDERMRETRTKLAIAVRAAGTSLTRLFGVGPVIAAAVIGDVRTVARFPGRDHFAACNGTAPVEVSSGPRKIYRLSRCGNRRLNHAIHMAAVTQIRYRHSEGRACYDRKLAEGKTGKEGLRALKRQISDAIFARLQADARRAAAAANSPGGQPGNDSGSSAAGSHPGYRLFGQATPGPATHPTTPASEDPAAAPFPASPPSRASGRAGQEPGAARPRSGARRASLTRPPASR

SEQ ID NO: 88879 - protein, 370 aa, unidentified
MSERTTFFVGLDVHKDSIAVAHAEGHRAEPPHYVGSIGTRQADIDKLVRRLHAKASNLVFAYEAGPCGYVLHRYLTAKGLDCQVVAPSLIPKRPGDKVKTDRRDAVEIARLLRSGDLTRVYVPSVEDEALRDLCRARDAALVMLKAAKLRLKSFLLRLGLHYTGRADWNDAHRRYLAKVACPTAPQQIVFQESVHAVDEQVQRLQRVEKEILDVIPKWRLYPIVEAFQALRGVQWTVATIVASELGDITRFDNPRQLAAFVGLIPSEYSSGENRRQGGITKTGNGRARRALIEAAWAYRHNPKISVQIQKRLESLPKPIQDIGWKAQLRLCKRFRRLSARGKHANIAVTAVARELIAFMWAIAKEVPINS

SEQ ID NO: 88880 - protein, 379 aa, unidentified
MISIRVHYLGRDRPIILRSLETVAQRGSSRPSLAEPEQLLGPPSPYWQGRVAGGLSFSPRSIYVYLGKFLGIDISKTQLDLAVHGTGAPWRVAYDSAGLKQVVTQLRTLAPTLIVLEATGGLETRVASALAAAQMPVVVVNPRQVRAFAQATGTLAKTDRLDAQVLAHFAAVMQPTPRPLPDAATQQLSAVLTRRQQLVDMVTAESNRLASQLNSALRKRVRVHITWLTQELGRTEKELTQLIQQSPVWRVQDDLLQSAKGVGPILSQTLLAEVPELGQLNRKQMAALIGVAPFNRDSGSQRGKRRIWGGRARVRAVLYMGALVATRHNPVIKTFYERLLAAGKEKKVALTACMRKLLTILNAMIKQQTKWQDIRISAH

SEQ ID NO: 88881 - protein, 345 aa, unidentified
MIYVGIDVAKNKHDCCILGSSGTVLREAFTLNNDRKGFQELYSAIQEALHQEGADQIKAGLESTGHYSENLVAFLRSSGIQPIVFNPLQVNLFRKSQSLRRTKTDKVDAKCIAQLLMSAESTPVPASYQIQELKTLTRHRSRLVSQRTKLKQCISRLVDILFPELPSVCCSAAQASMRTLLLELPSARQIAACRIDRLTNLLYAASKGRYSREKALEIKQLAQQSIGANSPASELELRLTLQQLDFLLDQLKQLEKAIQTIVAAIHSPILSIPGIGPTLTAIILAEIGDIHRFSSPDKLLAFAGLDPSTYQSGKFNRRPYADGQAWLDVSSLGIDAGCSSGLRLL

SEQ ID NO: 88882 - protein, 336 aa, unidentified
MNKYIGIDVAKATLQIYIPKVNVDLEIENNPKAIKQLYMKLKKHYKKEYKELIFVYEPTGSYSTFLDRFSMEHSIRCYKVKPSQSSAFAKTLDHRNKSDKIDARLLHQMGAIAKDDQIEIPHIDEDAHKLQSLYKYFRRIIKERTALSNYLEAVELHQEDPFVIKRLKSRLKAFKKEEEELIQKMLDFINHNPKYQKEFDNITSIKGIGPIAGLALFALFIRYPNASRKKITALCGLDPITKSSGTSVKTRGRISKQGNKAIRETLFMPVLISINYNTEFKTMFDRLKSNGKHTTVAQIAIMRKLILLAYSLYKNDTKYDPERYLKYQQVKVSDIQ

SEQ ID NO: 88883 - protein, 315 aa, unidentified
MSPQVLSAVIYVGADVAKLSVALQLPDQSWSHANTPEGHAALVTRLQTLAAPAHVVCEATGGYERAMVGALHRAGVAVTVLNPRQARDFARACGHLAKTDGIDAQVLADYGAKLHPQADPAPAPGEEAFAELVQARRDIVGLLTAEAGRREHTTLPALRKLADARQRQLEKQLAQLDALLDAHVAANPKLAAKAERLSAVAGVGRVTVLTVLALMPELGTIEDPKAAALAGVAPINHDSGQYRGQRHIAGGRSAVRRVLYMAALSASQHNPILGAIYQRHRQNGKPHKVALTALMRKLIVLLNRLLRNPDFVLVG

SEQ ID NO: 88884 - protein, 406 aa, unidentified
MNYLGIDISKSTTRCVILNNDGEKSVKPFTLKNNKYEFNELIDCFKKHNLSSDNLLVGIEATGVLWENIYCFLTEQKFKVIILNPHQTNKFREALRKKAKTDDIDAYVIAGLIRSNEYAQSFVPEETVQILRDFTKLRYRLIKDRKDYQRQALSLLALTFPEYEQTNLRKPFGIAACEILKKFPTAKHLANAKPKHIEKIVRSIKGNNFNIKNIIHLIQTAKDSIYSGRAADARALNLNIMIKQVQSLNRSIDELEREIEDILSSKDNNEPFDFPGGNLLSIPGVGQKTIASIISAIGTNAETFKDSKKIIGYIGFYPKIYQSGESLTANKIAKRGPAYLRSALYIAAVACIKHNAEFKALYQKKRSQGKASKQALVYVAKKLAHLCLSMLKSGELYRPERVFMPV

SEQ ID NO: 88885 - protein, 386 aa, unidentified
MSRPSNILLPAINYDHTLVLSVELSNKSWVLAAQVPGLPRTKAQRTIEPNKNALLAAIDGYRARAAAVGYTVDRVITTYEAGWSGFWLARWLVAQGVEVHVVQPSSVPVDRRLRRAKSDGIDAELLLRTLLAWLRGEPRVCSMVPIPGEADEDARRCVRERTELLSDRVGLTNRIGAVLATLGVNDYNPLLQSRRRRLAELRTGLDEPIPPNALAKIERLLARLELVLAQIAELERERDEVAAADAPDRAGKMIQQLASLRGIGVQSATVLVREAFVRHFPNGKALGSYAGLTSTPYSSGGIDREQGIGKAGNRRLRTVMVELAWLWQRYQPGAAQVAWFRDRVGSIGRRIRKVMVVALARKLLIALWRFVIDGVMPEGAVMKPSI

SEQ ID NO: 88886 - protein, 347 aa, unidentified
MSIYVGIDLHRKRSQIAALDERGTELLSRRVANEPEALRAILAELGGELQVALEATYGWEWLADLLEGEGHELHLSHPLRTKAIAAARVKTDTVDARTLAHLLRTDLLPEAYVAPRELRDLRDLLRHRVVLTRMRSALKNRVHALLARQGIQREHADLFGKSGRAFLAELPLREPARRRLASLLSLIGDFDREIELAKREIDALARRDPRVDVLCQLRGIGPYTAMLVIAEVGEIERFRSARHLCAWAGLTPTVRSSDGRARLGHISQPGSPHVRWALVEAAQKAATGGGPVRAAFERIAKRRGRNIAKVAVARRMLTLCYYGLRDGEIRCLQAPGPASAPPVTAAP

SEQ ID NO: 88887 - protein, 412 aa, unidentified
MEYKVAGIDVHKKMLAVVITDVAAEDEYCFQRRKFGTTASDLIALATWLAEEGVKEGVMESTAQYWKPVWQALEPKCQLFLAQAHSNRAPGGRKRDFADAERLVKRHVAGELIVSFVPDPEQRLWRTMTRTKYQLTRDRVRLHSQLEAFLEETRIKLSSWVSDLLGVSAKRMLRAVAEGEKDVARIARLADPGLKATQAQLRDALSAAATLSDVHRQLLKLFLERLDVIESQMATLECLISEALRKHGDAVQRLAVIPGYGVDSAQQVIAEVGPQAATFPSAGQLSSWVGCCPGREESAGVSKSNRSPKGNRQMRRILNQVANAAIKAKGSLFQLLYRRLMPRIGHFKAIWAVANRICRLTWKILHEGATYEERGPRLHAQAAKRSANRAIRRLRALGYEVTLKRSQPEATA

SEQ ID NO: 88888 - protein, 355 aa, unidentified
MSQEKYIGMDVHQATISVAVMDSQGKLIMECILETEAATILEFMQGMRGTLAVTFEEGTCAAWLHDLLRPHVSRLVVCDPRKNALLKEGSKSDRIDARKLAELLRGNQLSPVYHGDHGVRTLKELGRSYLTLTQDLTRVMSRIKALYRSWAIPCSGTTVYAARHRSEWLAKISEPGVRLRAERFYQQLDVLRPLHQAARHDFVVESHKHPAVKLLRQIPSIGPIRAGLLVALLQTPHRFRTKRQLWAYSGFAVETHDSGEYRYVRGKLLRNRERISVRGLNGNYNRDLKNLFKSTAVSASTRPGPLRDFYLALLAKGMRPTMARLTLARKIAAITLTIWKKGVDFDAKQLDQQAA

SEQ ID NO: 88889 - protein, 356 aa, unidentified
MNHVSKLDFTGQQVYVGMDVHKKSWSISILTDQFEHKTFSQPPEVGALVNYLKRTFPGAAYKSVYEAGYSGFWIHDQLQEQGIRCLVVNPADVPTKDKERAGKTDRVDCRKLARSLRNGEIEGIYVPTRPKAEDRSLLRTRHSMVRKQTRCKNQIKSILCFYGIHIPDEVANSKWSKRFIAWIETVRMERASGDMALKVHLSELSHIRQTIAELNRAIRALSITDGYRNNVRVLKTVPGISILTAMTLLTELHDIGRFKTLDKLCSYVGLIPNTNSSGETDRKTCMTGRRNVQLRVVLIESAWTAVRKDPALMISFNELSKHMTKTKAIIRIARKLLNRIRYVLKHQQEYVPAVIQ

SEQ ID NO: 88890 - protein, 349 aa, unidentified
MNKFSVIGIDLAKNVFQVHGVDGKGKPVLRKKLKRAQMKRFFAQLPPCLIGMEACASAHYWARTLKGYGHEVRLMAPAFVKPYVKSNKNDRNDAEAICEAVTRPHMRFVAIKTPEQQAVFHLHHGRRQLVKQRVAMSNHIRGVLLEFGIALPQGDRVLREQLWMILEDAENGLPVWVRQLLAQLWEAFKQLEEHIEHLTRALAQWHRENEVSQRLAEIPGIGLQTATMLAAVLGARGADFRNGRQLAAYLGLVPRQASSGGKERLLGISERGDPYLRSLLVHGARAVIRHVRRRQAAGEAGGNPWVEQLLECCHPNEAAVALANKLARTAWAIVAHQRSWQADWKGAAA

SEQ ID NO: 88891 - protein, 462 aa, unidentified
MRKTQHGNASRKDSPKVDWKALDIVHPDAAGIDIGGSQHWVALPPDRDAQPVRCFDCFTADLQQMAEWLVARGVRSVALQSTGVYWIPVFEVLQQHGLEVYLVNARHTKNLPGRKSDIAECQWLLKLHTFGLLNNSFQPTDEIRTARTLWRHRAGLVAQASSAIQRMQKALTEMNIQLANVLSDLSGVSGMAIVQAILGGERDPKVLAALADPQVKAPREVIAKSLQGNWRDELLFVLKQEVEMYRMYQERMRACDLRLQGHLKSMQAKVDLTAQPLGPRPKGKRARGNAPQFDLRTELYRISGVDWTQVDGIDVQVAQSVIAEVGVDLRAFPSEKHFANWLGLCPTNESSGGRVLQRRTPKVVNRAKVAFRQAASTLIRSQSYLGAQYRRLRTRLGAPKAITAMARKLACLFYRLLKHGKAYVDKGAEFYQQRYKEQQIRSVIKHARQLGLEVIQPTGESA

SEQ ID NO: 88892 - protein, 383 aa, unidentified
MMKQNIIFGIDVSSKSSTVCVVIDRIKQGETFKITNDSFGYQDLLDRLNQYLITPLAVFEATGVYSLSLQAFLEDYHIKYLKLNPLKAKKLMDNNLRHNKTDKVDAYRLALIQFNAPQKLRAPQPKEYHELQNASRYYEELTQALIINKNQLHRNLQSAFPQIESILSTSSGRVYWTIVSLFPHAQYVLNHNENQVFQSLLAISGIGRQRAHYLTTRLYALARQAYPYDNESSITIRAIQRNIANLLSLSAERDNVINYMEKLAMQANARSLNIYESIPGIAKTTAVRLVAELGDLRRFDTSAQIDAFVGIDPGRYQSGEKDSHLGITKHGNHLARKILYRTITQMETVKATQPCHITDYYDKKKRSSNSRGYKKSPLHQFIN

SEQ ID NO: 88893 - protein, 339 aa, unidentified
MEYYSGLDVSLETTFISIIDEKGKIVSEANVKTGVESIYKYLAEQNLAYERIGLESGQLSISLCKGLVKKGLNVICVEARHMAAALSAKINKNDKNDARGIAQMMRVDLYKTVKIKSDESCQIKMLLGSRRQLVNTKQQVNGSIRGLLKIYGLKIGARTATKSFAEKVKESISKLDSYSKASIEALLVNSEQLEKSILKLDKLLIKLGKEDKACKLLMTVPGVGIITALSYKSSLDDPTRFEDSEVVGAYMGLTPKQYSSGEVDRHGHISKMGPKECRSMLYEAAQSILIVCKKSSKLKTWGLKIMKKKGMKKAAVAVARKLAVIMHRMLIDEKEFCYN

SEQ ID NO: 88894 - protein, 314 aa, unidentified
MDDTATVPTRFIGCDVGKAEIIVFDSASGKTTSLPNRADALAAFAASLDPAALVVCEATGGYEAALLDAMVAAGRAAHRADARKVKAFIRSLGILGKSDAIDAKALAQYGRERHDRLTRWQPREQHRDQLQLLVSMRRDLVRQRVAHRNRLQAPGAAPVAARLQRIIATLDAEIAGIDADIRALIDACDTLAQTVHTLTDIAGIGQTTAAQLTALMPELGSLNRKQAAALAGLAPHPKQSGSNNAYRRTRGGRPEVKHTLFMAALAAARHNPTLNTFYKRLISNGKKPIVALVAVMRKLITIANARLRDNLASI

SEQ ID NO: 88895 - protein, 356 aa, unidentified
MKGSNQHQKIAVRGQEVFVGIDVHKESWQVTARVEGEELFHGRMASEYRILRRVLDRFEGGKIRVAYEAGPCGFGLHDQLREDGVEVMVVPPSLIPVESGNKVKTDKRDSRKLARLLEGNLLRRVYVLSEEDRADRELLRTRRQIVEHRNDVARQIKSKLLFYGIRSPFSEKGGWSKGFIRWIKGLNLKWGSVKVSFQSLIELYECLTDQIVGLNRKVAELSRSDKYRGRVKLLRSVPGIGVLIAMEILVELQDMERFQRADELASYIGLTPSEFSTGQYIRQGRITRCGNKRVRTCLVESSWHLITKDPWMRKKYDRLKQWKGGKRAIIAIARTLIIRIRRILLNQEPYVLGAAA

SEQ ID NO: 88896 - protein, 430 aa, unidentified
MKSNTQNAKIEAITEKTLVLGIDVGSEMHYARAFDYRGIEYSKKPFKFSNTEAGFVTFKEWILDLKERHEKDKVVPGMEPTGHYWFNLGKFLQDNEMKPVLVNPHHVKKSKELDDNNPTKNDRKDPKVIAGLVREGRYMIPYLPDGVYADLRTASNIRFQLQAELTRIQNRISRWFNIYFPEYKTVYGKPDAKSGMLILKAAPLPEDILTLGIDGVNQIWRDAKLRAVGKARAKTLIEAAEHSVGSKEGAVSARMEIRMLLEDYESRNTRLQEVMVLIEELVRKIPMAEKLLEIKGVGIRTVSGFLAEVGDISRFNNPKELQKLAGLALVENSSGKHKGETTISRRGRKRLRYLLFEVAMSLVSKNQEFRELHNYYTTRRLNPLKKMQSLMAIAAKLIRVFYAMLTKGVDYDPKKMVSDIKRPAVYLQAA

SEQ ID NO: 88897 - protein, 385 aa, unidentified
MKGQTFKPTDYEVFAGLDVDKRSISVTFTNHQGFIRSLRMPYSVEHLVNHVRKHFADQKVAFAYEAGPTGYGLYDGLVAQSYPCLIASPSMIPKAPGQRVKTNRLDSRGLSENLRGGQLKSIHVPSALYRELRHLTQLRDTFVSEMVGMKQRIKSLLLFEGIEFPPAPAGRQWSFRVKDKLRKLECSKTVRFKLDQLLDSLEFSEKQVLKATREIRRFCRNDAELSQCIEYLMTIPGIGWIVASQLVAHIGDWRELKNIRQLGGFLGLVPTENSTGERTDRGSITHTGDGRLRSKLIQASWSAIRQDGELREFFRSVCRTHARHLASRVAIVAVARKLSVRISVVLMKQRPYEVRQKVRSTPLTQGETSPQGTTRRQAEPGEKNS

SEQ ID NO: 88898 - protein, 457 aa, unidentified
MKSFYLGSDVSKGYADFVILDSTKQQVMKNFQLDDTFEGYCRLHDILSQFLMVHPDATLFAAVESTGGYENNWYNALVKFQSTLNIQTARLNPLGVMHNSKADLKRNITDKISAQNIAEYLITHSEKVTYQQQDQMATLRKQWGFIKMLTKQSTQLLNQLESLLYTANTELLGYCKNGTPDWVLKVLLKYPTAAKLARARVPALARIPYVTSERAQELVISAKRSVASASDRITEKLVAATVKQILNLKKTIDEQAELMVKECSIPEADILKTFTGISDSSAIGLIIEIQAIERFKTVKRLSSFFGIHPVYKISGDGSGSFRMSKKGRKEPRKILFMVTLTAIRSNPLIRNIYLERTDKGMEKMAAIGLCMHKILRILYGMLKHGKPFDPQIDLDNRQRSVKKKPAGQRDKSRRFQDYDSNAPISRRQNKKRLERKQSHSVSDTKFGINAPVPELVS

SEQ ID NO: 88899 - protein, 429 aa, unidentified
MTRISVGVDVSKNRSTVCIMDQDGKFIMRPFLVWHSTEELDFLADTLKRLNGEVRVIMESTSVYQYPIALQLKERGLFISIVNAYEMKQFANIDFRGGKTDKKDSRTIASYGISYWDKLVEWQIPKDTYFNLDLLNRTYMNAKKHRQIILQELQHYIDCAMPGMDKELHSLNLSTKKDFMLDFVEKFWHRDEIVNMTEAEFTEVFTAWAKKKGYRPVEGKAAKIYAIAKSCIPYYPANPTVKTILQCIVDKLSGVNRTLVTIVTQMIEEAKKLPEYQIVREMPGVGDPLAARFFGSVGDIRRFKNSKALVAYAGIDSPPDESGDFSSTHRHITKKGSKVFRDTGYEIMMALRAQKRTWEKVRKNPEVYDYMLKKEAEEKPRKVAKIAALNKSLRIVYARIKELYDNMALAERAKAKTRSKTKAKTKATA

SEQ ID NO: 88900 - protein, 340 aa, unidentified
MSLYGGIDLHANNSVVALMNEQDEVIYQKRLPNDLPTILEQLAPYHADIEGLVVESTYNWYWLVDGLMEADYRVHLANPAAIQQYNGLKYSDDHSDARWLGHLLRLGVLPEGDIYPKADRAVRDVLRKRAHFVRQHTANVLSVQNIMVRNTGSRFSVKRIRELTAKELKHLLPEAYQVLAITSSLAILDCLSQQIKTLEKAVSKRLKHTPSYEQLLTVDGIGTILAQTIALETGQIGRFPTVGDYASYCRCVNSTKLSNGKRKGQGNVKNGNLYLGWAYMEAAQFAIRFNPQAQRFYQRKLAKSTNNTVLARKSVAHKLSRACYYSMRDLVPFEATKAFG

SEQ ID NO: 88901 - protein, 344 aa, unidentified
MSEVIIIGLDIAKYVFHVHGADERGRVIFSKRISRGKLLDFFAAQPNCTVALEACGGAHHWARQLTQLGHEVRLIPPAYVKPFVKRQKNDAIDAEAICEAAQRPSMRFVAVKSERQQAAGLVFRTRDLLVRQRTQLINAIRGHLTEYGWIAPKGPSHVAMLADLLEEEEMASSLPEAARAMFRLMLDLLAGLNGKIADLDKEIARRAREDEVSRRLMTIPGIGPISATAIAALAPPAETFAKGRDFAAWLGLTPLQRSTGGKRKLGATSKMGERTLRRLLIIGSSTVVLQASKRGAPKGSWLDQMLARKPRMLVTVALANKMARIIWALLVKQENYRAPVAAKA

SEQ ID NO: 88902 - protein, 392 aa, unidentified
MILAGIDVAKDKHDCFIMNSDGEILVKAFTFSNNLEGFNFLYEKIRSVTKPKDKIKVGLEATGHYSYNLLGFLLNKGLPTFVINPLHTNLFRKSLTLRKTKTDKVDSRTIAMMLMSDVALKPYTDTSYHNEELKSLSRYRFTKVQERSKLKTSVSPRLVQILFPELEKIVCTIHMSSIYHLLEEYPGASYIASVHLTKLTNLLMEASHGRYNRNTAIKFREAARNSIGSILPAKSLELKHTIKLIRELTVEIDEIDAEIKKMMDSIASPITTIPGIGYSMGAMIISEIGDFSRFSSPDKILAYAGLSPSTYQSGQLNNCYSHMEKRGSRYLRYALFTVAQKVCIWDNTFAEYLSKKRAEGKHYYVAISHAVKKLVRVIFHLERTGQAYLKAA

SEQ ID NO: 88903 - protein, 316 aa, unidentified
MSDTPIFVGIDVAQAELEIALRPSAEGWTVANDEPGIAALVARLQAVQPALIVLEATGGLEVAVTSALAAAGLPVVVVNPRQARDFAKATGQLAKTDALDARALAHFAEAVRPTPRPLPDAQTQALSAQLTRRRQLVEMLTAEKNRLARAPRPIRADIQAHITWLERRLADLNTDIGSAIRASPLWREHDDLLQSMPGVGPVLSRTLLADLPELGTLSRQEIAALVGVAPLNRDSGTLRGKRTVWGGRAMVRSVLYMGTLVAVRHNPVLKTFYQRLCTAGKAPKVALTACMRKLLTILNAMLKHRTPWRQNYAPSS

SEQ ID NO: 88904 - protein, 371 aa, unidentified
MADYREAFVGIDVAKLKNAIAVAESGRNGEVRYWGEVEASDAGIRRAIKQITAKFEHVYFCYEAGPTGYGLYRLIRSLGHECIVVAPSLIPRKPGDRVKTNRRDAISLARLLRAGELTAVWVPDEGHEAMRDLVRARTSAVETLRTHRQQVNAFMLKHGRIYPGKRSWTMRYLRWLQEQHFDHPAHQIALQEMVEAVRIAQERVQRLETVIAEFVPHWSLAAVVGALRALRCVDLIAAVTFATEVGDAGRFESPRQLMGYLGLVPGERSTGETTKRIGITKAGNSRVRTLLVECAWTYRYPPRIGTRKLYRLEEVSSSVREIAWKAQTRLTARYRMLSARGKKSTVVCTAVARELAGFMWAIAREARQTTS

SEQ ID NO: 88905 - protein, 357 aa, unidentified
MRYVGIDMCKEKADVSVRGAEGQIVERLTVMNGPEGFQELERHLEPGDRLGLEASTYAYPIHDYFVAKGYEVWMGDPGRMRAVWDTDHKNDVQDADELSDLLRVNRFPRAYVPTPQTLRLRDLLRADTDIGREAARTKNRVHALLDAAGIKPPFKGRMLFGKAGMAWLHQRHFGDERDAVLQSFVIQLRALAERRGILDIELAKVAVDWPGVRDLMSTTGIDYRIALTLAAEVGDIHRFPDLAHFRSYAGCAPHWGQSGPQRWSNGATRRCNKRLKWALGIATEAAVKSSNPVAEYYEKQMRRTRARGRALARARTKMCHTVYAILTKHQSCMWGNPRTIAMKERRMKSRAAQVAAA

SEQ ID NO: 88906 - protein, 337 aa, unidentified
MKYSGIDLHSNNSVVTVIDETGRVVAERRLVNELGRVLAFLQPWRDELAAVAVESTYNWYWLVDGLQAAGFTVQLANTGAIKQYDGLKHSGDETDARHLAELLRLGILPTGTILPPAQRAIRDLGRKRMQLVHSRTAHILAVENIVARQLGAGISSNQIKRLAEDGVDQRPLPADVALAIKSNVAVITTLNAQIERLERRLREAVGGWPGYALLHSVPGIGDVLATAIVLETGSIDRFPGVGQFASYARCVDSRRVSNGKKKGAGNPRNGNKYLAWAFVEAATFARRYCPEAKRFYERKKARTNAVVAVKALAHKLARACYHILKEGKPFEVQRCFA

SEQ ID NO: 88907 - protein, 384 aa, unidentified
MDQTTFTLSANTLHCALELSKNSWLLAIQFPDREQPSLYPIEGGNTEKLMAKLTAARDCWAKVSGALPVIRLCYEVGHDAFWLARFLKVRGIECLVIDPGSLQVNRRGRRVKTDRVDVKMLLRTLIAWCRGERHVWSLVRIPSVDEEDLRRSHRERSRLVRERTAHINRIKGLLFAQGIRGVNVKSQYKTLAVDQLVTGDGHRLPPRLACEIAREIQRLAMVQEQIAKIERERDTAPTPCEATERKRHLLLRLKSIGPAISALLSREVYYRQFANRRQVGSFLGLTPSPYNSGEEERCQGISRAGSGHVRAIMIEAAWLWIRHQPKSALTRWFLERTAGQSTRMRKTMIVAVARKLAIALWRYVEHGLVPQGAILNPPTTGNAR

SEQ ID NO: 88908 - protein, 353 aa, unidentified
MNNIIAFDSHKYYTFARVENENGENPQEFRIEHRRGSIAGFLSSQQPGSPVAIETIGNWYWIVDEIEQAGMEPRLVHARKAKMMFGCINKTDKLDAKGLNVLQRAGTLPTVWIPPGDVRDKRELPRTRMVFGGQRTRLKNRIHSVLDKYGLQDTFEDISDIFGRKGMKVMVSVLGQLPSHTRYTTELLLEQLDQIEQKVKAIEARMNKLFKETELHRLLKTMPGIGFILAVVILQEIGDIGRFGSAERFASYSGVTPRVHASGGKVRYGRLRPDTNHYLKWAFSEAGNSVALNRNRFPDRHVSGLYNRIRGRKGHAKAVGAVARHLAEATYWILTKNEVYRDRGVLKVSPTGA

SEQ ID NO: 88909 - protein, 429 aa, unidentified
MRAESTPGARGPVFCGVDTHADSHWLCVLDWRGRKVLSRQFPADAAGYEALAGAIAAAGEPACIAMEGTSSYGAGLTRHLASLGLPVREALSPAGMQRRRPGQGKCDEADAERAARAAMSGSKLGTPKSQDGWVDGVRCMLAARSGAVKARTSAINTARSLLTTAPEGLRSRFRGMGGPRLMEELPSVRAEGALGAALGALADLWAAARDAALDMERAIEASLEENCPALLAMYGCGPVSAAKLAVAAGDNPGRLRSEASFAAICGACPIPASSGKTVRHRLNRGGDRQANSALHEIARQRVMRDPETAEYAERARGRGKSDREVMRCLKRYVAREAYRALMHPHEIRRPEDASGLVAARRAAKVSQVRAASILGTSEKYISMLERGQRELKPIRRAYEAWVEAGLPLDWDRRAFEAERKTDSKKHLAK

SEQ ID NO: 88910 - protein, 340 aa, unidentified
MPLYGGIDLHANNSVVVLLNAQDQVIYQKRLPNDLPTILEALAPHPGEIEGLVVESTYNWYWLVDGLMEAGYQVHLANPAAIQQYSGLKYSDDHSDARWLAHLLRLGVLPTGYIYPKAERAVRDLLRKRAHLVRQHTSNVLSVQNILVRNTGVRLSIKRIRELTKQEIEGLLPESAQVLAVTSSLAVLDCLSHQIKTLEQTVHKHLKHTPSYEQLLTVDGIGTILAQTITLESGDMGRFPTVGNYASYCRCVNSTKISNGKRKGQGNVKNGNPYLGWAYMEAAQFALRFNARAQRFYQRKLAKSNNNMVLARKTVAHKLARACYYIMRDLVPFDAMKAFG

SEQ ID NO: 88911 - protein, 301 aa, unidentified
MDKVTIIGVDLAKRSFQVHGASADGSVLFRKKLSRAQVVPFFAQQPICIVAMEACATAHDWGREIGALGHEVKLIPPIYVKPFVKRHKNDAADAEAIAEAASRPTMRTVAVKTHDQQSQAVLFRTRDLLLRQRTQLINALRAHLAEFGKIAPKSATNIKRLKEILEDPKNGLPQIVTDIGSIYFDQIATLTEQISKLEKQVRTEATKDDAARRLQTMPGIGPITAMAVSAFAPPMEIFRRGRDFAAWVGLVPKQHSTGGKQKLGRTSNPLGTMLRMTLTGNGWGREISVGFWLLVPCPSLK

SEQ ID NO: 88912 - protein, 350 aa, unidentified
MSNLPLFVGVDYHQDQLQLCVVDSQGVVQQNRPFVNDAREVAKMLAGLGAVKAVALEACCGAAHFGEALLSFSPPGGFRVELAHPGYVARLKQSPDKTDFGDARLVADLLRVGYLPAVWLAPAPVRELRQLVNHRQRLVDQRRAMKLQIGAILREQRIKPEGSRWSKPWRSAVKDHAALSTQGRWIVDDLLAELEHVTKRIREVEKRLREATADNPLVKKLRSTIEGVGEVTSWMLAAWIGDFGRFKNGKQLSRYCGLSPRNASSGKVQADAGLINAANKSLRAVLIQAAHRLMRTNQRWKTLADRMLKKGKAKCVVTAAIANRWVRSMHHRMRADRPAGALPQENLLAD

SEQ ID NO: 88913 - protein, 346 aa, unidentified
MLYAGLDLSRKRLDFHLLDADGGTVEVGAAPPDADGLRGLTERIDRHGAPIRAAIESMNGARFVHDRLELAGWQVEIADAQKVKGLAPLACKTDRIDAWVLAELARRELVPAIWLPDPTVRGERERARWRLHLVRHRSSLKQRVHAVLLAHGKPCPVSDLFGVRGRQLLARLDLPEPWQGTLEASLRLIDELDREIGDCERELRRLGADHRYVPLLLTVPGIGWVLAYTIAAETGDIGRFASPRKLAGYTGLCPRVYQSGQRDLRGPLAKQGPRYLRWALVEAATHACTAPIYRDRYQQTKTRIGKQRGAKVAQIDLARRLTEAIWHMLTREQPFAPKGATDPLAA

SEQ ID NO: 88914 - protein, 316 aa, unidentified
MMLIGVDPHKSTSTATAVEPESNREVASIRIEATLREYRRLLTWAGRWPQRRWAIENAEGLGRHLASWLLARGEQVVDVPTTATARVRQLSRGGGRKNDRIDAAAAACVAALQGDARPLEAEGTTDVLGLLDERRANLSQARVRAVNQPHALRRALLAGGAPRGLSAAAAAALLRTVRPAGAAERVRKQIAGDLVVEIRSLDSRLKANEAAMAELVKSSGSTLTETVGIGPVTAARLIGRSGRPSRFPSSAAFAAYSGVAPVEVASAEHARHRLSRSGDRQLNSALHIVAVTQIRTAGSQGNIYYRTKMAEGKTER

SEQ ID NO: 88915 - protein, 430 aa, unidentified
MGLIVPTAIPPQRDDQPLPYDWFVGIDWGSKQHRVCVLDRDRRQVGEQAVDHNGASLARLAEWLWSVSVGQPQRVAVAIEVPRGAIVEGLVERGFHVYAINPKQLDRFRDRHSVAGAKDDRLDAFVLADSVRTDQPRFRRVQLDDPQLLRLRELSRAEEALLEDFRRSANRLRDQLHRFYPQMLQLCSAADASWLWDLIDLAPTPAHAALLSEEQVRRVLKAHRIRRIKAQEVLACLQAPALPVAPGAAEAAQAHCGFLLPCLRVLAEQLKACSQQVSALLHTLTEEPGEDEGPSDVAIVQSLPGVGRKITAWLFAEAAQPLAERDYEGLRTHSGGAPVTRQSGKRRLVMMRRGCNLRLRHALYHMARVAMQRDAHFSRVYEALRAKGQRHGQALRSISDRLLRILMAMLRDRTCYDVSRIRRELVVQMG

SEQ ID NO: 88916 - protein, 370 aa, unidentified
MKYVGIDLHTNRFTCCYLFDEQGKKQMETFDLDKEGLTRFYQTIDKDTYVLVEATINTFAFVSLFKDMAKAVIVANTYQLKSVGIPGKKTDKLDALKLAEKLKAQVVSGVQQIVPVIVPPKEIRDLRALFATYGTLRKEIGRTKNRIHSLLKENLYPFTKEYIFGKKTRKEIRVISKDAVLSFQINMLMDTLEHLEETFDKLVIEIKKTGAGFMPQIEVLTSMSGISVITALAVIADVFDVARFKNSKHFASYLRSVPRVASSNDKTIIKSTTKAGRKLSITLLSQSLNHFRDNNKTLCNWHEKAKVHKKKGVVRMALCRRVITQIYQMMKKGEYHYFRNHILHEKKLSEYRRFLEKEVMAFGKNLSNAA

SEQ ID NO: 88917 - protein, 411 aa, unidentified
MRIVGLDVSRSVAEIAYLEDGTLHAGGRTGLRRDELERFAAKLHATDHVVLEATGNTTAIVNVLRVHVARVAIANPLQVRLIAEARVKTDKIDAAVLAQLYASGFLPEVWMPDEHTLALRRQIARRSQLVRQRTRLKNEIHAVLIAHLIERCPATDLFGMKGRAWLGVQPLPLDERLGVEQRLRELDRLGDDLCEVEQALAQATIDDARLRVMLTITGVNTTVAIGLLSAIGDIARFPNPEKLVSYFGLNPSVYQSGPAPARHGHITKRGRSYARAMLVEAAWGATQAPGPLRAFFLRVRDRRGPQIAVVATARKLAVIVWYVLTRDEPFAWDRPALTAHKLRALELQAGMPAQHGSRKGTAAAYSLKSVRQQERAVAEQSERTYQRLFNRWKQSRPKSDSAPIRWPEART

SEQ ID NO: 88918 - protein, 374 aa, unidentified
MKEFTKYVGLDVHKSTIAVAIAQAGSSEVRYFGEIPNTPEDINKVMRKLSSSEATLSVCYEAGPCGYEVYRHLSGRGIDCMVVAPSMIPRKPGDRVKTDRRDSQMLARLHRAGELTSVWVPSAEQEALRDLVRARADFVLLQTQSRQRLNAFLLRHGQRFGGKSKWTQAYFRWLETIKYDFPSQQIVLQEYIDTVLHMQKRIKALDTQIELAGNESALWPLIQNYMALRGISRLIATALAAELGDVTRFTTAPQLMAYLGLVPSEYSSGPSKVRGGITKTGNGYIRRLLTEAAWTYRHMARKSACVQRRAEQTPEPIQEIAWKAQQRLCARYRGYIQRGKVLVQACTAVARELVGFIWAIGQATGPLHEMSANA

SEQ ID NO: 88919 - protein, 407 aa, unidentified
MGVPCTLRLDRRANNISLISKESGEPQASLRSTNLCGRFGPASPSSAVHAERYPGTRHAADPAYKVVRRRGALPYSSTIMVAKMSDAIVGIDVSKKTLDAYCAKDQMQQGRTFANSPDGWKLVRTWLKAMGSKQAHVCMEATGRHSLGVALALHEAGHVVSVVNPAQIRDFARTKLGRNKTDKVDAALIREYAELFKPEPWTPPSPAMRRLCELQTMRAGIIRSRAEWKNRIGSGLGDITATKLAAATIDHFTTQLEAIDRVISETVDQDAELHGRRDLLVSVIGVGDTLAALLMAKMPEPGVLRRSGEIVAYAGLNPSHHRSGTSIDRPTRISKIGNAELQSALYMPALSAMRFNPAVAALVARLKSAGRLKPKQIVVAAMRKLLVLCFGVLKTGKRFDPAIAMSA

SEQ ID NO: 88920 - protein, 388 aa, unidentified
MEAQTVDTLPPVAADHDPVRCLLAIELSKKSWIVAITTALSDKISRYTLDGCDWKGLLELMERVRTRVAREVGRPVEMISCYEAGYDGFWLHRLLERQGVRSHVIDPASVQVDRRARRAKTDHIDAKRLLRSLMAYLRGEPKVWSVLCVPSVAEEDDRRLHRERDRLIAERGQHVNRIKGLCAIHGIYDYEPMRRDRMLRLEQLHTGDGRELPPRLKAEIARELQRLELILGMLKEIEAERDAIALTENVSAHTNAKKIQNLVKLKAIGAEIATVLTGEVFYRPFNNRHQVASYVGLTPSPFQSGPKCRDQGISKAGNPKARSTMIELAWLWLRHQPDSPLSIWFQERVGTLKGRIRRITIVAVARKLLIALWRYLETGMVPTGAVLN

SEQ ID NO: 88921 - protein, 340 aa, unidentified
MKEYSNQTIFIGIDVHKKSYSISAIHNGTLIKKATIVADPDILLSFLYKNFNNAQLETAYEAGFSGFYLHRYLVGNGINNIVVHPASIEIASRERVKNDRRDSLKIATQLSAGRLKSVYIPNCAREDFRTISRLRNSFVKDRTKKGVQLKCVLHRLGKIPYSETTFTSKKWIEKVLKMDFSPDQKFVIEHLTNEWLHLTTKIKEIEIKLIEQSKIDNSLEKIYLSIPGFGPTISRVLANELEDMKQFSNERQVFSYTGLTPREYSSGEHIRLGHISRQGKPVLRKMLIQAAWIAIKIDKELEEIYLRISRKAGKKRAIVAVARILIGRTRTCLKENRPYR

SEQ ID NO: 88922 - protein, 464 aa, unidentified
MLKQKAMKDSPFASLAQRTHAAGIDVGDTTHWVCVNAEGGDAAIREFPAHTPGLQNLVTWLRECAITTVALEATGAYGHVLFLSLLEAGFHVITTSPTFTRQIKGRPKTDRRDCQWIQRLHRHGLLPSIFQPDEATQTLRDLVRQRANHVRLSAQHIQRLQKALGLMNLKLTSVLGDVTGVTGLKIIRAIVAGERDPRALAKLRDQRCQHSAEEIAIALTGRYRLEHVTELSLCLKMWDHYQEVIAELDEAIARQLRTMKKQTVLPPLPPKSRMRGRKAHDPRFDVRQALYLMVGIDLTAIEGIDEMHALTLISELGCEFTKWKTVKHFTSWLGLCPNWKKTGGQVQSSQTRKGKNRAALALRLAAWSLVRSKSYLGAYLRRQRSRLGAPKAITATAHKLARIIYHLMRHGFAYMKKEETAYAEQVRHRLEKQLHRRARELGYELKKVEPLGEVVTSEGEIITV

SEQ ID NO: 88923 - protein, 479 aa, unidentified
MCYVSLRLVRYESLQTCLFGLSAHRLLFNGHVLNVDPNMSKCSYVARLRLSFKTRASLISYFLESGDFMIDLLQYLFVGIDVSKENNQVYAMNFSQEKLASFSTPNHQSGASFLEEKLLDILDRHHLSKIIIAMESTGIYSAHIATYLSASKFLFPFDVKVYVLNPKISRNYRHSFSDMDKTDPKDAYILSDLARVGRCNQLTPFKGPQKIALQRLTRHRHHIAELLAKEKVYALNNVFLKFSEFKGILSNDFSKTAVELLLNYKSVDEIIDVPLEDLVDFVMTSSKNRFADSNQIALTLKAAARNSYRLDKMAYEPINLSLAASFNCISTYQTELKSIDAAILKQVKGLNQNHYLSLISIPGIGPVYASGILAEIGQIDQFDSDDALAKYAGITWRKSQSGNFDAEDTRMTKTGNVYLRYFITEAANMARIHNPVFNEYYQKKFDEVKTHQHKRALALTARKLIRLIFGLLSTDRLYK

SEQ ID NO: 88924 - protein, 343 aa, unidentified
MERVYYIGLDIHKKTISYCMKLHDGAVVGRGVIATERRALWQWLNKIPCPWKGAMEATMFTGWIYDFLKPHAIELKVAHPEMLKAITAAKKKNDRDDAEKIADLLRVNLLPECHMASEEIRELRRVLRYRNMIVRTSVKMKNKISGLLMEVGASYNKRRLHGKKYFNTLLERVEDVPPSVNELLKLSRSGLEMFQGVQRKLLDTLHDNALIRERVRRLMSIDGIGEVTALTWVLEIGDFGRFSSVRQVISYCGLCSAQNESAGKEQRGPISKKRNKHLQTVLIEAAKLAPRWNQHLAEIHARELKRGNHNRATLAVARKLVTYMFAVERRQREFRKEPVLEAA

SEQ ID NO: 88925 - protein, 408 aa, unidentified
MARFHVGIDVGRAQHLARVLDTNTTHVSRSFQIPVSYEGFECFRRYLEGYSQDPKDFFVAIEATGAYHVALAGYLWDCGYTLALVNPAKAKAFRKAEGHVAKTDRVDAGVLCRMVSGVGLRPTEPRPQEQERLRILTRWYFRLQQEHTRALNRVSSAIDMVFPEFWQVFSEITQVTPRLVWQAYGTPDELARTDTDALAALLRRVSRGRYLRKDAEYLQKLASRTVGVRNLYAPVALQIRQALAQVDLIDQQIRELQPLIEQEFSTMGFATEEFPIGGVTTIATIVAHLPSPRSTPSLKSLHAYVGWCPMDRQSGKYKSTRPRMAKGCPPLRWALHGLALASMTHVEDYKQYVARRKSQGKAGGHILVIIGRKLLDRIWAVAKTKESFLPDAPTPTVHPVREEVAAHF

SEQ ID NO: 88926 - protein, 362 aa, unidentified
MGRQITISQKEPLTKEATIRKVTVGIDIGDRWSHYCMLDEEGDMVEEGRFRTIATSVGKHFQDVPAARIAIEAGTHSIWISEQLARYGHEVIVANVTELHAIVRNIRKSDQVDAEKLARYARLDPRILRPITHRSVEAQQELTVVRARDVLVRLRTAAVNAVRGLVKPCGVRLPPSSTSCFGKRCQDVLSGALLQALTPLLEQIEQLSEQIKQYDRIILEMSRVNHPETQLLRTVHGVGPVTALTYVLTLDDPHRFERSRDVGCYLGLRPRRDQSGGRDPQLGITKAGNVYLRKLLVECANYILGPHGKDSSIRRWGLQLAGKGGKNARKRAIVAVARKLAILLHRLWITQSRYIPFYEAAA

SEQ ID NO: 88927 - protein, 407 aa, unidentified
MMIKLSGSKQLPNIFKGCGFMIYVGIDIAKQKHFAAAMTADGEVLIPPFGFSNDAEGFKLLLSKIKSFKKENTLIGLESTAHYAENLICHLFELGYNISVINPIQTSTLRKTNIRKTKTDKVDCLLIIKSMIVNKPRIYSKTDIDSLRLKSLCRFREKIKKAKAKLKIQLVTYVDIIFPELQYFFKSGIHTNTCYQLLKKHSSPDDIAALHLTYLANLLQKASHGRFGKEEAIALKGLAKSSVGTGNTAVSIQITQSIAQIELLEQQLADLDRAIESIMLEMDSIILSIPGIGFLNGAMILGEIGNISRFSNPSKLLAYAGLDPTVNQSGKFNAKSTKMSKRGSKLLRYALINAAWNVSLNNKTFNDYFNLKRSQGNNHYAALGHVAHKLVRIIFKMLKDNVAFNLD

SEQ ID NO: 88928 - protein, 355 aa, unidentified
MSQNNLTILYAGLDIAKATLQLHVGGLSSSLPNDPSGYARLRRRLSEAAAAQPGCQVQVILEATGGYEAQVVAALHAAGQPLSVIQPSRARSFARAQATHAKTDPIDAALLADFGRRLQPAPTPPPSAAQSRLVMLVGRRSQLVAARVVELNRAEHYSDSLLCKQSRAYLALLERQITECDRAIAAQLAADAAMKARASRLRAVPGIGPVIAAILQAHLPELGSLADGEVAALAGLAPYNRDSGPSQGLRFIRGGRVQVRCALYMAALSAIRHDQILREFYQRLRTAGKAKMVALTAVMRKLIVLLNRLLRNPHFQLRSSTAPSPVVAASGAPAEPEKEGALAEPEETLQPAPAG

SEQ ID NO: 88929 - protein, 346 aa, unidentified
MEISTIGLDLAKNVFQVHGISATGEVVVRKTLRRSQMLPFFEKLPPCLVGAEACGTSHHWARELAKLGHEVRLMPAMYVKAYVKRGKNDAADAEAICEAVTRQTMRFVPIKSREQQAALSLHRVRSLLIKQRTQLVNMMRSVLAEMGIAIPIGIVKALQMAREIIDGESGLDLPTEAVNVVAMLAAQLLQLHAQLRKLDLRLAALQRSDDRARRLATIPGIGPIGATALAASVTDPSQFSSGRQFAAWLGLTPRQSSGGGKERLGRITKMGDRYLRQLLVVGATALVRYAKEKPGTVDPRFVALLARKPARVASVAIANKMARIAWAVMARGGTFERGDAPMLAAA

SEQ ID NO: 88930 - protein, 343 aa, unidentified
MTYFVGLDVSVKETSVCIVDDAGKIVQEARVASEPEALLQLLTNTIYRFERVGLEAGPLSQWLYSVLAAAGLPVICVETRHMRAMLKAQINKTDRNDARGIAQMMRVGLYRPVHVKTLRSQKLRVLLTHRKLLHSKAIAIENDLRATLRNFGLKVGMVGTVKFEARIRELVENLPDVAVLVEPLLVVRRVLREQVGILHRRLLAIVRDDDVCRRLMTIPGVGPVVALTYRVTVDVPARFRNSKAVGAVFGLTPSKYQSGENDRTGAISRCGDEMMRMMLYEAAQSMLVRSAKWSWLKAWAMKIARHRGMKKAIVALARRLAVIMHRIWVDGTEFRWTREVAVA

SEQ ID NO: 88931 - protein, 352 aa, unidentified
MDATTVAVDLAKDVFEVALANRAHRIVDRKRLTRRQFESFIEGLAAGTEVVMEACGTAHYWGRRCQARGLAVRLLPVQYVRPYVRRNKTDRTDTEAMLEADRCAGVQPVPVKTVDQQALQALHRVRTQWQATRTGRINVMRGLLREHGYPVPVGARTVLTRVTAILDDPTRPLPLVLRQMVTHLVEEVRSLEARVIAVDRELARVAREHPVARRLQQVPGVGIVTATAMIGAVGHIHAFRRGRDFASWLGLTPRESTTGTRRYLGRISKRGDGYLRCLLTHGARAVLLAAQRTARTSPHRLTRLQQWAVTLAARRGHNKAAIALANKLARIIWALWCHERDFHSPSVQTTAA

SEQ ID NO: 88932 - protein, 355 aa, unidentified
MSSEKYIGLDVHQATISVAVMDSQGKVVMESILETKASTMLEFLAGLRGSLFVTFEEGTWAAWLYDLLKPHVTEVLVCNPRKIPLLKQGNKSDKIDARKLAERLRLHDLKPVYHGETGVRMLRELARSYLTVVKDLSRVMNRLKALYRSWAIPCAGRDVYYTRHRSQWLGKIPEPGTRRRAEQLYQQLDMLQHLRQQARRELLAEGRKHTITAKLRQIPALGPIRSVLAVALIQTPHRFRSKRQLWTYSGLGLETRDSGEYHYVRGQVRRRKKQATIRGLNKDYNHDLKGLFKGAATRASVQPGPFQEFYQRSLAKGIKPTMVRLTLARKIAAITLTLWKKGEDFDIDKLNSQAA

SEQ ID NO: 88933 - protein, 347 aa, unidentified
MQNKTKYFIGIDVSKPFFDAALMVVIDHQKQAIESAHFENTELGLKSFEKWLKTYKVSFDENTILVIENTGIYHRLLWAFCNKIKLQIHIGNAAHIKWSFGIARGKNDVIDAIRLCKYACKESEDLKMTKPLNSKLMQLKDLQTSRTRLLSQKNANETYLKELKDINDTTTQKALERVYKTAIEGLKKSIDAIEKLIKELIKTDDCLQNNYDLLLSVPGIGHITAVYLIVCTNNFAGNISGKQLASYAGVAPFGNTSGTSIKKREKVHKMANKELKKILHMGAMSVIHCNPEMKQYYERKMAEGKHALCVINAVKNKLVLRAAAVIKSQTPFVDNFAKTNESLKNAA

SEQ ID NO: 88934 - protein, 343 aa, unidentified
MTHYVGLDVSQKMTAICVVDDTGRRVWRGQCPSDPEQIERAVRRHAEEDVRIGIETGPMTPWLVHELRGRGLEVTCLDARHARAALKMQINKTDQNDAEGLAQIMRTGWYRSVHVKSFDSHRARALLGARVQLVGMTTRLSNHIRGVLKTFGLLPGRMRGVPFDRRIEALLVDRDDVSPIIRPMLVAWRQLRQQVATFDKAVRALVKSSPACRHLMGVPGIGVLSVLAYVSMVEDPARFGRSRSVGAHLGLTPKQYQSGEIDRSGRISRCGDTLARTLMYEAAVVLMTRVKRPSGLKEWAQAIAKRSGAGKARVALARKLSVIMHSIWRSGEPYRWSEQPAAA

SEQ ID NO: 88935 - protein, 419 aa, unidentified
MSFKILKNNCCGLDVHKTWIYACIGITDSLKRTEYKEARFSSFTKGLNELCDWLSKYNCTDVCMESTGKYWIPVFNVLEKNNIWVTLSHPKYTKPQKGNKTDRKDAKWICDLYMCGMVKPSFIPPADIRELRDLVRYRFKLTCMITGEKNRAHNCLTVSNLKLDDVFSDIFGKSSRSITEQILQHPGEIFDVSPFVDGRCKTPIEEIQAAVDGAISEEQAVKLRQCLDHIDELGMHKAEIEREIFRLSDKYESVLNLIRTIPGFDKTPMTAIQVLSEIGGDMSVFPTAKNLVSWAGCCPRNDQSNHKIKSTRISRAGSYFKPILVQVANALIKSKKHPEFTNRYRRIKARRGHKKAIIAICRMILTAIWHILTDLKPYTPEGFLESRPVNESKVLTASQALNLMKQRGYIIKDDVVPVT

SEQ ID NO: 88936 - protein, 395 aa, unidentified
MKRPCVALDVSKGSSHYQGWINEDKKLGNPKKIEHNQEGFREILAKAKELEGITNEKPIVVFEATGVYHRTLQHFLEENGMDYIIVSPLASAKVRKSNIRSTKTDKKDCRNIAKVYYSKNLKVHGKGDEIYERMLDLNRYYQYLTSQLKKVKVQFRLVLDIVFPNIDKLWAELYGEIPMAILRKYSHPNQLRSKNPETLARYLMKETCHHYGEAIKEANRAIEYCKACCPGCSEASVNCQVLKDLISQLSEKTQEQDNCLNQIIGLAKGLPNYELLLSVPGISDNLASRIIAELGDLGRFSRVRQITAYAGLDPNIYQSGQICGLHLKITKKGNKNLRCLLYLAIQNTLKSENKVSEFYHKKIAAGMNPKAAKIACMNKLLRIIYSMCKNGCFFQ

SEQ ID NO: 88937 - protein, 339 aa, unidentified
MERQYVAVDLHGRRSMIVRENAAGEELAVVRIDNSVEELSAALADAGPNPEVAIEATYGWYWAVDALQELGATVRLVNPSGLVWEDRRVKNDYLDCRELITRMRINKLPEAWIAPPEWRELRELVRYRFKLVCLRTGLKAQVKSVLAKHGLQPPVNDLWYATGAGPRWLDQLQLPDAYHHRVESLRDLVGAIDREISTLERMIHQQLKDHAGYRAIQHIDGIGRVLAPIFVAEIGDVHRFGSPAALSSWAGLTPKHRESDVKAHRGKVTKKGNRLVRWAAIEAISHMRGGPKLQADYHRIADRRGKNIGRTAVARKVLTLVYYGLRDGEIRSLAKAQAG

SEQ ID NO: 88938 - protein, 344 aa, unidentified
MITIGIDPHKRSVTAVALDAHSQPLGGLRVAMTNQAVVQLLAWAVPWSARRWAVEGATGLGHTVAQQLVGAGELVVDVPAKLAARARLLGAGSARKTDRTDAASVAAVALAHRRLRQVTAEDHTMALRLLTDRRDDLVAERTRTLSRLHVLLRDLHPGGAERNLTAQRAAALLGRLRPVAGVDRERKRIAHELLADVRRLDQRITAATKAIGEAVTSSGTTLIEVFGLGPVLAAKILGHAGDLTRFPDRDHFASYTGTAPIEASSGDVRRHRLNRGGNRQLNTALHLIAVCQIRDPSPGQAYYQRKLRQAKTPEEARRALKRKLSNVVYRHLVADHRHRHAPPS

SEQ ID NO: 88939 - protein, 345 aa, unidentified
MNSNKVTQRIKKINNDAICDFDHYIALDWSLNVMAIAHMNQKSRAPKIHERPSNIKELKEYLVSLKGLKILALEETTTSQWLYLELVDIVDRIIICDPFRNRLLSDGPKTDKIDAGKLCMLLRAGLLKEVFHSSNTLYELRILVSAYEDVLGSGVRIMNQQNALERGHFTTNDNAPFILEHMKKNIEIYRASKKEYKRKFEEIVKKHTMAKYQEEIPGIGVIGAVKVVATVVDAHRFPYIGKYWCYCGLAQNEKFSGGRSYGHRRPRFNRRLKSVYKTAASSCISGKNNPMKQYYNFLIEKGIAEHNARNAVARYIAKVSYGMLKSGQRYNPHYGRSETSEHHDA

SEQ ID NO: 88940 - protein, 389 aa, unidentified
MKETIYIGIDIAKYKHDFCIISSTGEVIVQNNSFENNKKGFQLFFSYLKPYNKADVQILFESTAHYSMNLELELIDQGYSFMKMNGLIIKQFFKAQTLRKTKTDKADAFALTQYLMANTYKPNSNRLYHIYSLKSLCRTRDRLVRERSKFKIYITNELDKSFPEIKKFFDNKISITLLYILEKYKNKNKIALMKDYDSIRKVSAANFSFTRFLQLKQLAKESIGHPTETSDFLIQSYVKSINCLSEQIDSIEKQIIESVRKLDTHILSIPGIAEISAGSIIAEFGDIKNFESPEKMLAFAGLEPSIRQSGTLSTEGHMVKHGSGYLRNTIMRVVNSLVMHDQVFYDYYNKKRDEGKHHLVAQSHVAKKLIRIIYTLEIKGIDYDINFVK

SEQ ID NO: 88941 - protein, 323 aa, unidentified
MDSIAVTCLGLDVSKAKIDCALLLNNKVKSKVVSNNPDGFRTLITWLTKQGVSRVHACCEATGTYSDAISSFLHEQGYTVSVVNPAQIAAYANSQLSRAKTDAVDARLIARFCEREQPAPWTPPPVEERLLLALLRDLQTLQTMHRAESNRLECAHPSVRERIERHLKFLTREIEKLKKKIEKHIDHHDHLRGRRDLLDSVPGLGESTIPWLIAYLGDGRRFNVSKRATAFFGLCPKPHQSGSSVRGRASIAKTGHADMRYVMYMPAVVAYSRCKVFAPFVKRLKDSGKPPKVIIVAIMRKLLAIAQAILKSGKPFDPALHNT

SEQ ID NO: 88942 - protein, 416 aa, unidentified
MNAAGIDVSSRKSTVAVLRPLGEVVCLPFDVTHNTQGLASLAEQLKALDGETRVVLEHTGRYYEPVAKALHEAGLYVSAVNPLLIKEYGANSLRRVKTDRADALKIARYALDNWTDLQDYTPMDTIRYDLKTLNRQFQLASKQRIACSNNLIALLEQSFPGIRKCFDSPVRSDGTQKWVDFAHTFWHVDCVRKQSLNAFSERYRKWCNRHGYFFKQSNAEEVYSLAKNAVVLVPKSDVTKVLVQEAANQLTSISHSVETYRAEMERLASMLPEYPVVMELYGVGRSFGPQLMAEIGDVRRFERKQALVAFAGIDPMPNQSGDKNVRSNRSSKRGSPYLRKTLFNVMGIYLKCTPQDEPVFQFLDRKRSEGKPFYVYMTAASNKFLRRYYAKVRDYLATLENLPPVDMDSTGLQRGN

SEQ ID NO: 88943 - protein, 358 aa, unidentified
MQRNKKTFKGQNIYIGIDVHKKNWQVAVITESGYTERLSTAADAKALFKFLKSHYPDGNYRAVYESGFSGFATHYALSDLGISCVVAHAADIPSSQYELTMKSDRIDAEKLARALRAGLVRGIYVRPKDNLDDRGVLRIRKTIQIQVGGYKTRIKHLLHSNGVELPERFSRSGTHWSRAFIAWLREDVRLLSDTRRSLELLLLQVETLRANLLEATRRVRALSMTDRYREDCALLMGIPGIGLTVAMTILTEVCDIGRFGNERQFASYLGLVPTSHSSGERVSHGEMTFRGNKHIGPLLVEASWVLIVRDRELGRMYTEYRWRMAGQKAIIKIARKLSNIIFAVLKTRKAYEPYRRDA

SEQ ID NO: 88944 - protein, 340 aa, unidentified
MKKTVKFYLGMDVSKLWVDIALMCVVNHNKQPLLTERFNNNAAGMKALDKWLKKHKVCFNENSLLVIENTGVYHRLVWEYCSTHNLPLHIGNATHIKYSFGIARGKNDKIDSERLCTYAFKNADELKATPVLNPVFLKLKDMMTSRSRLLAQLNSIKVYLREMKLSNSIETQAIIEEAHEAAVEGIKKSLKAVEKQIHQMIQQDAAIKNNYDLLLSVPGIGHLTAVYIICCTNNFICKITGKQLASYAGVAPFGNKSGTSIKGKDRVHKMANKDLKKLLYMGAISAITHYPEFKDYYECKVKEGKHEQSVINAVRSKIALRAVAVINNQKKYVNNYKKAA

SEQ ID NO: 88945 - protein, 365 aa, unidentified
MQKAELSCEADSENYLGGSSETMYYIGLDVHKRTISYCVKDAAGRVHMEGKIGSTRRELDGWIQTLPQPRTIAMEATIFTGWIYDHLLPHAEQVKVAHPLMLRAIATAKRKNDQIDASKIADCLRCDFLPECHMASTEIRDRRRTLRYRGLLVKQMVQMKNRVSGLLLEKGVTHTKRRLHKVGYFAELMSDSKEIDQSIRPLLKLSREHIVRAQKLDYALVSSLERDPLLRERLKRLRTVPGVGPITALTWALEIGDVARFRSIKQAISYCGLCGAEKSSADKMLRTPISKQRNKHIQHVLVEAAKLAPRQCHELALIYEKEMQRGNRNRATLAVARKIVAYLLAVERRQQDFVPTEEFGGTAAA

SEQ ID NO: 88946 - protein, 403 aa, unidentified
MDLTPLYKRVIGLDIHHEQVTACALVDEGGEALFQTFGTFHSDCQSLAQWAARFKPDVVVMESTGVYWKAVNRALQKQGLKTIVANARHLKQVPGRKTDLADSQWLAVLGRAGLVSGSFIINPEFEGLRLISRQRKKIAGALISEKNRLHKVLADAGIRLSVVVSDLNGISARRMIKCLAAGGTADETLAMVTTKLQAPKELLRKALDGELTSSHCFVIDEIIQHIEQLETTIARFDAELLNGLAKYDWAIKLLETIPGIDRVGAAMLLVEIGADMSVFGDASHLASWAGLCPGNNESAGKRKSGKTRKGNPWVRRLLCEMANAAKRTHSMLKAKYQSLVVRRGRGRSVMALAHKLIRIIFSMLTRKEPYRDTAVDYEELLVKRKAPRWIQALKKYGYLPSPV

SEQ ID NO: 88947 - protein, 343 aa, unidentified
MSIDTMIGVDLAKSVFQIHGASMNGEILFQRKLSRQAFSVFMAQHSAAVVVMEACGSAHYWARLLSGFGHEVRLIAPRYVRPFVKRQKNDAADAEAIVVAAQRPEMRFVEPKSVAQQSAAILYRSRQRLVRQRTETVNALRAALYEFGHIVPQGIRHVRRIGAILEAPNSDLPTLMREECLAMLDQVAALSSWIDTKTAKIKELAATTPISKRLQTMPGVGPLVATAVVTFAPEMATFNNGRDFAAWLGLVPRQFSSGGKERLGRITKAGQSDIRQMLIIGAMSRLNWMGRKSIPESSWLARMMARKPRMLVAIALANKMARQIWAMLTKNEDYRNPTPVMAA

SEQ ID NO: 88948 - protein, 402 aa, unidentified
MIDPQIRVGVDVGCKAHRVAISDSDGSILEEFDISHTDAGFCDFFRRIDHHRQELDLPVAVAMEGFNGYARPLDRLIQERGYTLYNVNNLKLARFKEVFPAAAKTDPIDTRKILELFHLKDHLPLAKDALQKVVSAPLVNDKLKRLSRRRRQLVNEKVRVANRIQSDLQAVCPELLAITKKLSNLWFLRFLTCRDDLTQLAHLRHTTLLKIPGIGQKYARIIQEWQRRASFSAEVEYVGPMIIQDARRILELLSQIHILDEAMDKLADRSELACRIGSIGGFGKTCVAELAGEIGTTERFAGERSLALYVGMSPLSKDSGQHHGSKRPRQVNHRAKAAMMTAVARHINCVPESRAYYEKKRAEGKSHNQAVRALGRHLVRVIWSMLKNERDYELREVIPSVT

SEQ ID NO: 88949 - protein, 358 aa, unidentified
MNILIESVDGVIGVDTHRDTLAAAAISTIGATLGSAAATADAGGYLQLLQFAQHHLPGARCWAVEGTSSYGAGLTEFLTGRGERVVEVCRPKRPPRRGARKSDALDAIRAAREVLASENLIEPRSRGHREALRVLITTRAGAVTARTAAVNHLKALIISAPEDLRAELRGRTSDTQIAYCAKLRDRPTRDVEHRTTVRALRCTAQRVQALKAEADDLEREISHLVTQMQPKLIELPGVGPISAAQVLISWSHPGRLRSEAAFATLAGAAPIPASSGLTNRHRLNRGGDRQLNRALHTIVLTRSRTDPATRAYITRRLAEGKTARETKRCLKRIIARQIFRLLQHQSAAESVPKPLDAT

SEQ ID NO: 88950 - protein, 336 aa, unidentified
MPEIPRTRTVDRVNQTRIVQGRDNGRKMSEVYTGIDVSKEFLDIAVLPSGERKRYGNDEAGIGKLTARLKKLSPVLVVMEPTGGLEMPLAAALTLEGVKIAVVNARQVRDYARATGKLAKADKIDALVMAEFASVIKPPVREFRDEETAEIKSIMSRRRQLLEMLTAEKNRLAIARKILKPKILSHIEWLKKEIADLDNELRQRIEDSPIWRVKDNLLQSIPGVGKVLSATLLAELPELGKLNRRQIAALVGVAPYNRDSGKMRGKRSVWGGRVSVRSVLYMATLVSTRFNPVITSFYQRLLEKGKAKKVAIVACMRRLLIIMNAILKTQKAWNYA

SEQ ID NO: 88951 - protein, 432 aa, unidentified
MKSKNIPFLSVGIDVGADFSLMAVALPSQEIASKNYKILHSSLDSIQGAVRQIRTLETRHGMRAKIFMESTGIYHYPLYYRLKDEGFDVFILNPIITHANTNIDVRGIHNDKFDAQKIALLGLKPKLKTSVVPNDDVAAVKVLMREYHAMKKGCSSYICRLKAQLRQTFPQYLSLFSKVNGNASLEILYRYTTPDTILAADREELTVLIMRFASKGRALSERKYEQLLQAAKDAEQFGHTNAGNVYLIRHFVDMIRIMTDQTDHLLAQIRESATCQPDSLLARQVGLLQTIPGVGFLSAVTLVCEIGDFSAFRRPKQLYAYFGLDPKVRQSGNFAGNELSMSKRGSPYARRSLYMLALQSISLRKNGEPKNPVLRAYYEEKCKTKARMTALGAVMHKVCNIVFAVLRDEQPFVLITPAEHRQRFVIAPAEAA

SEQ ID NO: 88952 - protein, 392 aa, unidentified
MGWLSDSVPPPADTHAVWLDRGMNVCDRYFKSGCPPHTSPLRVQTGMRVITIGIDPHKSSHTAVAVDGAGHKTGQRRFVVNAGTFTQLMRWCEPWPERRFAIEGAGGLGRALAQQLAAAGEDVVDVPSTLSARARLLATGGDRKTDPADALHVAQVALFRQDLRKVTPEDQSTILRLLTERHDDLVNERTRTTNRLHAVLRDLLPGGAPTGLSADKAATLMKGIRPITATDSCRRDIARDLLAHLRRLDQQAKANEAQIRDALAASQTTLTSLPGLGTVLAARILGHIGDIDRFPTEHHFASYVGAAPLDASSGKNIRHRLNTGGNRALNSALHIIAVCQIRNPGRGQDYYLRKIAEGKTPAEARRALKRRLSNVVYRIMKRDRRSHLATAA

SEQ ID NO: 88953 - protein, 385 aa, unidentified
MQASSKDTPTVGHYGTIFVAIELSQRSWLVTMHCPDRDKISRHKLEGGDHAGLLALIARLRERAAGAQGVAPAVVSCYEAGYDGFWLHRLLMAAGITNYVFDPASIAVDQRARRVKTDRIDGEKMLRTLMAYLRGEPRVVRIVRVPAPEQEDARRDTRERDRLTKEQTAHTTRIKALLRLLGMAVGNPRRRDWLTWLAAQRDWQGQAVAPRMLSEIEREHARLMLVREQLDALTRTPAADLTPAAAQMAQRSELLRRLKCLGPAFATTLTNEVFYKDFRNRREVASYSGLTPSPWQSGGIDREQGISKAGNPRARCSAIELAWLWLRHQPDSALTQWFRSRTLNASKRNKRIAIVALARKLMVALLRYLTTGLVPEGAALKAVKA

SEQ ID NO: 88954 - protein, 351 aa, unidentified
MTMVGGFDVHRKQITFDYVDDDGLVRVGEIRPATRTTLRHWLSEHCPAGDAEFALEGCTGWRYVVDELATAGVGAHLGDPAEIAALRGPKKRAKTDRADARLLRTLLLEGRFPESWIPPAHVVEVRTLGRLYCTLMDERRAWQQRIHAQLFHQGCPPIRALLSVAGRDALAQAELSAAGRQYVDTALRRIDELTVEIGPVRGQLVSFARRQVACQALQARQYGVGWLCAAIMWAEIGDARRFSSSDQLVRFAGLDVTVYSSADKRSPGHLSRQGSPELRWATFEAAKCAARHGSPDHAYYQRLATKHDGHNGKNPTLAVERKILRRSYHTLRELGDAALAMPVPEEQGVAA

SEQ ID NO: 88955 - protein, 317 aa, unidentified
MRYLIGIDVSKFKHTASVIDNDGVVYVEPFDFNNDIIGFQLFLSTVSSFTNDDYIIGMEDTGHYGDNLQRFLLSKELKVAMLNPLATNHIRLAFGKAKNDKLDSVTIGSALAMPRLYRIIKDDHFSYHEIRELTRYRLHLTKSSNIYKNRLKKLIDITFPEFDSLFSTAYSNTYLKVLHDFQSAENIASTDIRTLRKALIVDRGRCVSITAEELKSAAKQSIGHSNFAMEIEIRQTVEMIEKINSNLEAVEKKIEEFSRQLNSPILAIPGISHISAMSILAEIGDFSKYESAKQIIKLSGTNPFVYESGTIVWHEQG

SEQ ID NO: 88956 - protein, 344 aa, unidentified
MDNHTQYLGFAGVDLAKKVMQIHFVTEDGEITDKSVKRAEFLDFFRNRGKCLIGMEACGSSQDWARKLKAMGHEVHLMSPKAVKPFVSGQKNDHNDAIGIYKAMFNGVRRVPVKSTEIRDLQTLRRIRSQVTKDKVKEINHVRGLLAEYGIVMGKSLNAFNKDISSALEILTERGDVSPLVAEELRTTVEAIKAKIERQKKLDQEIEQLARGCKNYENFLKTPGVGPFTAAMLCVLLCDPSIFANGRQFAAYIGLAPRSRGSGGKNYVTGIPSKFNCDSESRAVLVECAQAIARCKNKSLWVEEILRRKPKKVALIAIANKLARQVWAMANKGESFKQMAVLTA

SEQ ID NO: 88957 - protein, 388 aa, unidentified
MRANITSPKHVVPDGQHEPVGLSASLELSRSTWLLTSLLPGSTKMSKHTTAGGDGAALLALLARLRSKAEQHAERPVSIEVIQEAGLDGFWVHRLLEANGIASHVVDPASIAAPRRRRRAKTDGIDGETLLRTLLAWERGEPRVCAMVIPPTPEQEDRRRLSRERATLLQERVQHVNRIKGLLAGQGITDYEPLHKERRARLDALATGDGRSLPTVLKAELLREIDRVELLLRQIATVERERDAAAEPVSGTEQSPVALLGRLKAVGPQIGAVLYHEGLYRKFTNRREVAAYAGLVPTPWRSGTIDREQGISKAGNRRLRHIMIELAWLWIRHQPDSALSRWFRSRVGDERGRVRRIAIVALARRLLIALWRYVTHGEVPEGAALKAA

SEQ ID NO: 88958 - protein, 409 aa, unidentified
MEVVHEVCCGLDVHKKSVTACVLWASGRRRQTRAFGTFTRELLELGDWLRACGVTHVAMESTGVYWKPVWNLLEGQFEVLLVNAQHIKAVPGRKTDQKDSEWIADLLQHGLLRASFVPPTPIRELRDLTRYRASLAQEINRIANRIQKVLEDANIKLASVATDTLGASGRAMLEAIIQGEQDSQHLAEMAHGKLRNKIPELQEALQGRVTAHHRFLLRELLDHLYFVESKMQRIEQEVAERLGPFQSEVARLCTIPGVDRVTAWGLLAEIGMSMKQFPDAQHLASWAGLCPGSHESAGKRKSGKIRKGSLWLRRCLCQGAWAVSTKKNNYLSALYRRLAVRRGSKRATIAVAHKLLVIAYYILRDGTCYSDLGADYFDRLNPEGLRRRLTKRLEGLGFKVTLEPLAQVA

SEQ ID NO: 88959 - protein, 346 aa, unidentified
MSTQPLLPYTLFVGVDIAAATATAVWQLGDASPSRPLTFDQTAAGMRAFQNRLAATAVLPAQTLIVMEATGSYWMTLATTLHAAGYAVAVINPSQAHAFAKVLLKRVKTDPIDAHTLTCLAAMLHPAPWEPPPAVYHELVQRLGQRDDLMTVRQQFRNQLHALVQHPVVVASVRQRLETLITTLSDEIVVREAEIAPVLTQDATWAAAAERLQSIPGVGLLTASWLIVLTLNFRLCPRADAAAAYAGLAPNDYRSGTSVQKRACIGHTGNHRLRTALYLATLSGTQHNPILKAMYDRWRAAGKPMKVARCAVARKLVRIAWAVVTKEHVFDPVYRTASVCPASIVA

SEQ ID NO: 88960 - protein, 324 aa, unidentified
MVFFLGCDVCKSKLDVSLVNEQGIEQWYDGVPNDVVEIAGFLLMLQGNYPDDEVQCVVESTACYHYPLLEATTALSIPCRVINPIITRQQIKATVRGKKTDRTDALMIARLGLRGEGRPYAPEPYIAAKALVRSVQKLGQLNGSFTRHETHLTGQAQAELSPVAAELLGGIRTAIAAARKQLYRELSVSVQGETFRLLQTIPGIGPYVAASIIGELQTMQRFTKANRLVAYAGLDLRIKQSGRTLNSAGHLTKRGSSYLRRSLFIAASVARQYDPYFKALYDKKRGEGKSYTVATIAVARKLLLVVRSIWLSGEGYDVKIAMKG

SEQ ID NO: 88961 - protein, 338 aa, unidentified
MFYGGIDLHSNNNRIGIIDELGKKLYRRTVPNDLIAVRKVLDPFRADLQGIVVESTYNWYWLVDGLKESGYCVHLANTTASQQYSGLKHTDDGSDAYWLADLLRLGLLKEGYIYPAKARAVRDLLRKRGQLVQQRTRNILSIENLTSRNCGVRLNGDRVKQLTAAEVKEAYQDENLALALTSTLCIVEALNRQIKAIEKQVKQQVKLSEPYQLLKTVNGIGEILAMTIMLEAGDMSRFPTVGDFSSYCRCVDSVRLSNGKKKGSGNRKNGNKYLSWAFIEAANFAIRHDPTVRRFYQRKKARTKSVVARKAVAHKLARSCFYVLRDQVPFEVAKCFGP

SEQ ID NO: 88962 - protein, 330 aa, unidentified
MNLGIDTHTRYAQVAVVDDDGNLQDELRVPNDQLEQLAEQYAGSDAAIEASGNYRPIYEVLDEHLTVTLANPSKNRLIADATVKTDRLDAKRLAHMLRSGMLAESYVPTDEIRELRDLVRTRKGLVDERTAEKNRVRAVLKRTDNAYDSELFGPNGREFLAELSLSTADRTIIEAHLSVIDEYDAQIASLEDEIERHVLESPAAQRLLTIPGVGQFTAAVVVAEVGEIDRFDSDNALVSYAGLDPVVHQSGEKEIHGSISKEGSAQLRWALVQAAHTAVRCDDYFGNFYTRLKRRKNHQVAIVATARKMLVSIYYMLTRKEVYDPPEVSA

SEQ ID NO: 88963 - protein, 379 aa, unidentified
MNSVCNNTELSSREGTRCQFNGSTGVIKLGIDVHQQFYVVVLQEGGTNPKPPQRFSKEGFLHWAARLKQHGGEVHAVYEACGFGFGLQRQLSALGISCHVVCPQKLDEHNKRVKTDRLDAKALCLKLDRFVQGNRDALALVRVPTEQEEQLRAIHRQREQLVKARKQLEAQGRSLMVNQGIEPVRSWWKGRTFVALPVPTWLKELLANSQPILLALEQRIRALTVQLQSGADPDQPRGLGLLSSVVIDREIGNWHRFHNRRQVGSYTGLCPGEHSSGNTRLQSCVTKHGNPRLRAALVELAWRLVRFQPNYRPIVKWNEVLRKGALATGAARKKAIVAVARQLAVDLWRIRTGRVSAETLGLIINEFEGNRKEPDRLTK

SEQ ID NO: 88964 - protein, 439 aa, unidentified
MVVSPVDLAQSLDRDILRGAFNMTDQTILQTYNSWIAIDIAKDSNVVAVETIAGKKSTFRVVNSHIGHDRLMAVIHDLPQPCRICFEPTGDYHRTLGFRLISEGFDVCLVSSVAAARYRDAMFNSWDKNDPKDAHVLLQLLKQGLVQKYVDPLVAGNLDLQEISKTYYHLTLARTRLHHSIHTHYLPLYFPEMGKWLCSTRADWWLAYMMRFPCPSAITKLSLAEFCIEASPIIGRKVNKEAKLVELYETAKTSIGLPISADSNACITFKMQLQRYQEFNAQRMQLETMASKVMATMPEYAILKSVPGIGPVIALTILAEAGDLRRFDHHRQFLKYCGLDLAKSQSGNMRGKERLSKRGNARLRLALWIATTIAIRMRENTFRDKYARYIKSDPMDADRRRKALTAVTAKMARVIYGLVKSNELYKSKFEALPSGSTSL

SEQ ID NO: 88965 - protein, 316 aa, unidentified
MMTQIYCGVDVSQSRLDSFVALDAKSGVFESFANTAEGIEELRLFAFRHGAQLIVMEASGSVEKLAYALLWQADMPCALVNPRAVRDFARAMGYLEKTDRLDAQAIAHFATARAIVATPPPSPAQQRLSALYARLRQVTSDLVVQKQRLHTAYEDFARQGLNEVIKLLKSQGQKLCGEIASMIDDDPLWQALAAEFCRYKGVAERTVAVLMADLPEIGTLSNKAISKLAGLAPLADDSGKRHGKRSIRGGRASVRTMLFLIAGHVRKYDPDFAAFNERLTLRGKSKMQIRIALAHKLIVRLNAKARDIREAHMIAA

SEQ ID NO: 88966 - protein, 429 aa, unidentified
MNVCETVNCVGIDVSKGKSTIAIMRPLGEIVQSPHEVKHTLSDLKELETTLRQLEGETRIVMEYTGKYYQPIARFLNNAGFFVCAVHAKLIHDFANNSIRQIKTDKADAVKIANYGLTNWNLLRRYTNEDETRLLLKTYNRQYNMFMKQYVASRNNFISLLDQTFPGINNLFSGHRRPDGHEKWVDVAARFWHAECVSGQSLNAFTKVYKDWCSRNGYRGRDDKAEAIYRLAKESIPSLPKNDFTKAIIQQAARELSNTCLTLAELQQQMNFIASTLPEYPVVLDMGGVGTTLGPQIMAEIGDVRRFPRREKLVAFAGVDVPPYQSGQFEAKDRHITKRGSSDLRKNLYQVIGCLMQHSMEKDPVYRFVARKKAEGKHFYSYMVAGCNKFLRIYYARVKAYLNLMEQQEPISFIDGSGGSEVVLQPLDC

SEQ ID NO: 88967 - protein, 318 aa, unidentified
MDKNFIGIDVAKDSMEVTAYNSKEHWAYANDESGLAKLTARMKRLSPSLIVLEATGGYEVSVAAELQSKGFPVAVVNPRHIREFARSVGILAKTDVLDAKVIARYAATVQPTPRALPTEETRRLGAIMMRRRQIVAMLTAEKNRLHQADPSVKPGIKEHISWLEKKLDDTNKELGQMVENSPEWKEKSDIIQSVPGVGPNLAVTILTDFPELGALNRKQTAALSGVAPFNRDSGTLRGRRMIWGGRNIVRTATYMSTFVAIRFNPLLKAFFEHLISAGKPFKVAVVACMRKLLCILNAMLKNRTYWNYIDHQLIGPCH

SEQ ID NO: 88968 - protein, 286 aa, unidentified
MSKAGPLETNSTHIGGSRATTAGYVGIDVAKKPLDVALHATGQPRQVANDAAGVKQVVTHLRTVAPTLIVLEATGGLEARGVRALAAAQLPVVVVNPRQVRAFAQATGTLAKTDRLGAQPNAARRQRVRVHLTWLTKELGRTEKELTQLIQQSPVWRVQDDLLQSAQGVGAVLSQTLLAEVPELGHLNHKQMAALIGVAPFNRDSGGHRGQRRIWGGRARVRAALSMGALVATRHNPVINAFYERLLAAGEEKKVALTACMRKLLRILNAMMKHQTKWQDLSVNTP

SEQ ID NO: 88969 - protein, 346 aa, unidentified
MDQYAKEQFAGLDVSLKAVSICVSDGAGRVLWRGEVANEPDLVAKTLSRRAPGLVRSVLESGSCGIHLYRGLAVAGVPIVCVCARHAKGVLKCKVNKSDANDAEGLAQLARTGWYREVYVKSSEAHVIRAHLLARKQVAKARRDFENQIRAMLRTFGLKVGAVARGRFEDRVRRLLAQVPALKLPIGQLLKVRRDLLDCQDALETEAKRLAKADKRCQTLQTMPGVGPLTALAFVSAMDGPARFAKSSSVGAYLGLTPRGHQSGDVAWTGRISKTGDGVARSLLYEAANSLMVRVKAAVPLKTWANKLAMRIGGKKARVALARKIAVILHRMLADGTDYRWAQKAA

SEQ ID NO: 88970 - protein, 340 aa, unidentified
MKLYTGFDLHSSNSYVGIIDEQGKRAFNRKLPNDPAVIVDTLRPFRKDITDIAVESTYNWYWLVDLLMAEGYRVHLANPSAIQKYTGLKYSDDRHDAFWLAEMMRLGILPEGYIYPKEDRPIRDLLRKRSHLVKLRTSLIISLQNIVSRNNGIKLKVGDVKALTTDRVAPLLADNDDLALAGKVSKETIDFLTHQVKAIEHVVERKVKLRDPYDRLLDVPGIGKILALTIMLETGPISRFEKVGNFVSYCRKVSSKWVSNDKAKGKGNKKSGNKYLAWAFSEAAEFARRLHDESRAYYNRKMQRTNFMTAHNALAHKLARASYYIMRDHVPFMTKKLFTS

SEQ ID NO: 88971 - protein, 397 aa, unidentified
MYIVGIDIAKRKHEAAVIDGDGAVIIKPFSFTNNCSGYNRLLAMLTKAKLPLDEVSFAMEATGHYWLALFTRLQKEGFRVQVINPVQTNSIRSFYIRQAKTDPRDALLIAEVIRFGHFSESTLHPENIYELRELCRGRHAIVSMQADVKRKVVALLDQVFPEYETAFTNLFGDTSMAILQTCPTPKELSEMPLEELCHLIEVSSHKRFRMAKAQELQELARNSFGFAMAGDVFSTMIRLYAKHLDFLKQQVREMDRKIAEIMDTLDTPITTITGIGPTLGAYILSEIGDISRFSSAAKLAAYAGIDPTMRQSGEYNGVRNRMSKRGSPYLRHAIWLAASSAVLHDPALKLYFQKKRDEGKPYMASVGHACRKMVSIIYAVMRDNKAYTPCIPNEISA

SEQ ID NO: 88972 - protein, 351 aa, unidentified
MWIIGVDYHPSVQQIAFVNTDTGECGERRLSHSDGEAEKFYRELKAESCSVRVGMEATGHARWFERLLAELGFELWIGDPAKIKAKRVRKQKTDRLDAELLLQLLLEDRFPRVWVPSPENRDLRQLLWHRHRLVQMRTRIMNQLQAVAMNEGVRRKQALWSKSGRAQLESLPLAPWAARRRHDLLELLDRLHPTIEELSAAVEQQVEHRPEALRLMTHPGVGPITALAFVLIIDSAERFACGKQIASYVGLIPCEDSSSDRRRLGHITKQGNTLLRFLLVEAAQAVVRRDPDWRRRYTHLAMRRDKRIAKVAMARKLAVRLYWMMRKEWNYEQLQKFGSYAGESEHGHGVQ

SEQ ID NO: 88973 - protein, 438 aa, unidentified
MAGPHAGGAMTEEKTMDMLHERVAGLDVHKNTVVGCVRLHVDGETRRECRTFATTTEGLLALGAWLEESRCTHVAMEATGVYWMPVWKILCGGDFELIVANAAHIKNVPGRKTDVNDAMWIADLLACGLIKASFVPTEEMQELRSLTRTRKQLVREQTRHAQRIQKTLAEANIRLDSVLSDIMGASGRRIIQAMIEGVRQPRKLAELASKRIKATPKELYDALHGRLTDHHRFLLELHLRQWDGIDAAIRKIDLEINQRITQMDAEVEPETPPFRDLIDLLNTAPGVSTVAAPSILSEIGRDMSRFPTAGHLVSWVGLCAGHNESAGKRKSSRLRKGAPWLKTMLIQCAWAAKRKKGSYYRAQFFRIQSKRGPQKAICAVAASLLTAIYHMLKYGVPHHDLGADYFDRRPPELKAKRLVAQLAKLGFIVQLQPATQVA

SEQ ID NO: 88974 - protein, 349 aa, unidentified
MGDRNAAFVGCDLSDKMAEICVLDGNGAVIEAKRVQTTRVGLVKALKGYRCARVAIEAGTHSRWVEEVLSAAGHQVVVANPRQVQLIWGRRKKTDRSDAMLLARLARVDVTLLAPVQHRSRGAQANLAVLRSRDLLVSLRTKLVNHVRGLLKQFGIRVENCSTPAFGKHAKAVIPADLRAALDPVLKTLVAVNEQIAVSDRGIEALVSRSSTAQKLGEVDGVGPITALAFTLTIEDPTKFEKSRIVPAFLGLVPAKDQSGESDPQKHISKAGNPFLRRLLVQCAHRLLGAFGTDCDLRRWGLALSARGGPAGKKRAVVAVARKLAVVMHRIWVTGLPYDPHFNLNAARA

SEQ ID NO: 88975 - protein, 392 aa, unidentified
MIKENFIYVGIDLHKETHTAVMIDCYNQKLGEITFPNRPADFPKLVAKVKKCNTDGKTIVFGLENAYGYGRALAVWLIDKGYLVKDVNTAISHRQAKHRGAMYRKSDSDDAEAIALATLNMLDKLPDAYPNDAYWSLGQLVHRRDNIMKQRTRLVNQLHEQLCIAYPSYKQFFNDISRPTALYFWEHYPSRKYLKGKSVEDLRAELVPVSHNKCSTKTCEKILDAVASDKVKNNAYQDARDMVTLSIVSDLQHYDKQLAEVDKMLEQMYKMLGCTLTTIPGVNVITAVKILAEIGDIKRFSNANKLAQFAGIAPLHLSSSGKGKDLATKQGNRRLQATIYFLAIQMVQLSSKGTPRNPVVRACYEKRKAEGKTSQQALICISRRLISIIYRM

SEQ ID NO: 88976 - protein, 340 aa, unidentified
MENMHFVGLDVHKKIIAFCVKQVDGKIISQGTIDANRRALGRWVKTLTFPWEGALEATIFTGWIYDFLRNYTSDIKVAHPQMLEAITVAKKKNDISDAEKLADLLRCNLLPECYIQPKEVRELRRVLRYRTLIMRQIIRMKNKISGLLMEEGIEYEGRKLHTKRYFFNLLEQIEISEELSQILKMSRECLEFLKSIEKELVAGLKVHPEIQQRLKRLRTIPGVGQITALTWILEIGDVHRFPNIKKAVSYCGLCSGQKESGGKQYRGPISKKRNKHLQTVLIEAAKFAPLWNKQLTEVYEREKKKGHRNRATLAVARKLVAYLLAVDKSGRAFELRDTGK

SEQ ID NO: 88977 - protein, 362 aa, unidentified
MGKDIKDGTEMTIGVDLGDKWSRLCVLDEHGEVCEEGRIATTTDAMRKRFSTEAPCRIVIEVGTHSPWVQRLLQELGHEVITAHAQSVRLIYGGTNKDDRLDAERLARLGRLDPKLLHPIRHREGSTQADRAVIRSRYVLVGCRTKLINHARGIVKSMGGRLPTCSADAFPKRVREALPKELKSALRPVLETIAALTTRIRRFDRLIEDLASKRYPETDVMRQVSGVGPITSLSFVLTIEDPARFRRSRALGAYLGLSPRRSQSGDEDPELRITKAGDDDLRRLLVGSAQYILGPFGPDTDLRRWGLALAARGRKNAKKRAVVAVARKLAVLLHRLWVTAEVYEPLRNPADRPDSIAQAVPA

SEQ ID NO: 88978 - protein, 454 aa, unidentified
MGKQAKQSEQLARVHANAAGLDIGAREIFGCIPADRDGPTVKRFGTFTPDLYNMADWLIKNGIDTVALESTGVYWIPTFEILEARGIKVYLVNARHIKHVPGRKSDVQDCQWLQKLHSLGLLTASFRPDAEMCQLRAYLRHRAELLRHRAPHVLHIQKALQQMNLQLPQVLKDVMGVTGMAILRAIVAGERNAVKLAQLRNPGCKSSEETLAKALTGDWKDEYLFVLKQSLALYDFYTQQVAACDAQIQQQYATMKPRWEILPSSSLPLTKPQRKKRKNEPALDVRSEIIHLTGVDLVAVGGLSDSLAQTIISEIGTDVSKWPTEKQFASWLGLAPHNDISGGKVLRSRTLPTMNRAGQAFRQAAVSVSRSHSAFGAYYRRKRAQRGPQFAQVTTAHKIARTVYYLLKHRAQYVDIGADAYEQKQREREVNALRKKAAKLGFALVTPEPTEAAA

SEQ ID NO: 88979 - protein, 337 aa, unidentified
MRPITVLGIDLAKKNFQIHGINDKCQKIAKKSLKRDEFFHEVISLKPKKVAFEACGSAHYWGRRFRDAGIDVMMIPAQFVKPFVRTNKSDAADAEAIANAAMHPSIRTVPLKSDWHLDLQMLHREREQMVAHRTLIVNQLRAFLYERGEIASLGKKNAIKLAREILSQDRFSGEFKACIERMLEQYRSCEEMIERNEERIQAMADSNPDIERLQKIPGIGIMTATAIAAAIPDKTEFKNGRHLAAWIGLVPKHTGTGGKTRILSTSKRGNSYLRRLFIQGAGALLIWVKNKSDKVSNWAAELKSKKGSNKAKVALANKTARIVFAVYCKGIDYKMSA

SEQ ID NO: 88980 - protein, 421 aa, unidentified
MSYHIAAIDIHKRVLMVVVASVAEEVSDATGAAMEFECRRFGTGASERSRLVSWLQQRQVREVVMESTAQYWKPVWLDLEPHFEKLHLAQAQSNKAPKGRKNDFRDAKRLARRLLAGELMLSFVPEPEQRTWRLMTRGRLQLVHERVRLQSQLEGLLEEARIKLSSVISDLLGVSGRRILEALSQGQTDAVKLAELGDDRLQCTKEQLADALRGAPEAGHLQLLKLHLERLKLLDEQIDRLSQMSATALKKHQDTVVRLAAVPGFGAESAQQMIAEVGVDAEAFASAGEFASWTGVCPGSDVSAEENHSSRCPKGNRYVRRILSEAAHAAVKKKGGHFQNVFRRFLPKLGYNGAIWVVAHRLARLVWKILHDQVSYVEQGQDSDPRARQQRARKLTRALRKLGYSVTLTEINSRLVAEANT

SEQ ID NO: 88981 - protein, 379 aa, unidentified
MNKRIIFIGLDVHKETVSVAIAEHNKEPRSLGKISNKPEAIHKLMRKLGPFKRLKVCYEAGPCGYVIYRQLSKLGIECVVVAPSMIPKKPGVRVKTDSKDATMLARLLRSNDLAPIWVPDENHEALRDLSRAVEAAQGDLVRARHRVRKLLLRQGVRKPEGMISCTYRHQRWLHSVKLPRANQQVVLREMMLTMEQAQERRQRLEAELEHSVEFSPLADLIRAWQCLRGIKVVSATRLAAELGDIRRFTNPRQLMGYVGLVPSESSSGPRERRGRVTKSGNAHVRHIMVQAAWHSRHPPSLSRVLRKRQDGQPERVKAIAWKAQDRLHRRFRRLVGRGKPRQKAVVAVAREMLGFVWAIAQEIPVQEYNQQPDSFSRAA

SEQ ID NO: 88982 - protein, 436 aa, unidentified
MQHAPESTTSTPCPTQLPATPPGGLTAGLDWAKDDHVVCVVDVRSGAVRDRFSVEHTAAGLTAVVRRLAKLGCAEVAIERPDGPVVAELLEAGLTVVVISPNQVKNLRSRYGSAGNKDDRFDAYVLADTLRTDRARLRVLTPDSPATLTLRATCRARKDLVNTRVAVANQLRAHLDSVFPAAAVLFDEVDSPINLSFLTRFTCQGLADWLSPKRLAHWLRAVGYCGRTDPAVMHARLLAAPRGLTGEDGLARAHITWAYLATLTTLREQITALERQISEQLAAHPDNQIFTSLPRSGTVRAARLLAEIGDCRARFPTPDSLACLAGVAPSTRASGKSRHVGFRWACDKQLRDAVCDFAGDSRHANPLGPRPLHPRPRPRTRPPARRPDPGPGLALRHLALLAGRRRLPARPARCPATPARRPGIGSSGLNDQSTPP

SEQ ID NO: 88983 - protein, 445 aa, unidentified
MSESCTTISSELSWAAFVAIDWANQKNFWRLKPADSRQHEQGELENTPEAVERWAASLEQRFGGRPVAVCLEQSRGALVYMLSKYPHLVLFPVHPTTAARYRKTFTPSGAKSDPNDTASLLDLLLRHRDRLRALQPDTVETRLLHFLVEERRQTVDEKTRQSNRLRDCLKLYFPQILQWFDDVTTPVVGDLLQRWGSLEELQRAHPGTLRKFFREHNCRSPERMEERITGIYQAVPATRDPAVLEAGTRTARGLVALLATLRGNIAAFDQRIAQLIESHPDGALFASLPGAGAFLAPRLLVAFGTLRDRYQSAYEMQCYSGIAPVKEASGNTEWVHFRFVCPKFLRQTFHEFASHSIGQSEWAKAYYKHLRQDEKKDHHAAVRSLAYKWIRIIFRCWKDGKPYDEQVYQNSLRRRRSLLADTLGGATGFTWKPVAGFQKLSKNNT

SEQ ID NO: 88984 - protein, 402 aa, unidentified
MNAVGIDVSKGKSMVAIMRPFGEIVSAPFEIKHTASDIHSLVELINSVEGESRIVMEHTGRYYEVLAHQLSKANLFVSAINPKLIKDFDNDSLRKVKSDKADAVKIARYALDKWQNLKQYNVMDELRNQLKTMNRQFGFYMKHKTAMKNNLIGILDQTYPGVNTYFDSPARSDGSQKWVDFASTYWHVDCVRKMSLNAFIDHYQNWCKRKKYNFSQSKAEEIYGKAKELVPVLPKDAITKLIIKQAIDQLISVSTTVESLRTLMNETASKLPEYPVVMAMKGVGTSLGSQLMAEIGDVSRFTHKSAITAFAGVDPGVNESGSYEQKSVPTSKRGSSDLRKTLFQVMDVLIKTHPQDDPVYQFLDKKRAQGKPYYVYMTAGANKFLRIYYGRVKEYLSSLPES

SEQ ID NO: 88985 - protein, 643 aa, unidentified
MASTTKPARGPTAPAPVPSSQGLPAIGVGIDTARYGHMVSFLRPDRQLAAKKLLVMENHDSYQALRERLEQLHRQHPQAHFHIRIDAAGQYANNLERFLRSLPLLMTLTIGEPKRNRDYQKAHFPKRETDETESIAMARFAVVEAPAATAAVPQEILVLAEVAGRLQAQTKQATQAINRLHNLLARVFPELATCVHNIAATWVLELLAKYPSAAKIAQARLASLEKIPYLSKAKAQALHQAAAQSVASLRGPVAETLVRELVTAVQHSQASESTLRQLLIKTYRALPTGKHTHLTSIPGIGDTTAAILVAKIIDIDRFATPEHLVGFFGIFPEEHSSGVDKEGKPLPLGRAVMSPRGNDLVRAYLWMAALSGLRSNPALRALYRRLKAKGKRGDVALGHCMRKLLHLVFAVWKTGRPFDAKHYPWIQENDTPATEIPATTTPDAARPITAVPLSEAPEPATPLAPKAGHDKAVGHKRDQVPVKQVVTTALCSVKPISAPVNPPRSSAVARPKVDFVYVRQQVTMEQVLGHLGILSLFKGTAQQRRGPCPVHAEAPATMPAKKHTCSVQLGKNIFQCFQAECAAHGNVLDLWAAVHRVPLYEAALHLAATFHLPRNREEEPVTAARNPAVKTSSKSTVITANEV

SEQ ID NO: 88986 - protein, 352 aa, unidentified
MQSKQKESFTDEKIFVGIDMHKRSWHITIRAMSIELFNGSIPGRWEALRKLLHRYKTQNIYAVYEAGYFGFWLHDHLIKYGVNCLVTPPSLVPQEYGNRVKTDRRDSSKLAHLLAKGLLKSVWVPSTEERFHRQVIRRRRQLVGDRVRVQNRIKSELCFYGVHLPAPRGSWSQVYFANLQRIKFQNRWMQASFNRLLEQYEFLCSQIDKQTKLLRKLAQLPLYRERVQILCTIPGIGLISAMEILLELQDVSRFRRAEQLAAYVGLTPSQYSSADKIRMGRITGIGKNSVRATLVESAWKLISKDKSMRIKYEQIKARAGAKRAIVAISRKLLLRTRRLLLDNQPYVYKPVR

SEQ ID NO: 88987 - protein, 444 aa, unidentified
MGTSKGKPARGKLEVLHPDAAGIDVGGTAHYVAVPNEAAQESVRQFGVYTRDLHALADWLKACGVKIVAMESTGVYWIPLYELLESRGFEVMLVDARQVKNVSGRKSDVLDCQWLQQLLSYGLLKAAFRPQDQFCQLREFNRLRTRLLVDQGRSVQHMQKAMTLMNIQLSQAISDVAGVTGQKIVRAILAGERDPMVLAAYRDSRIKASEEEIAASLQGTWKAEHLLALKQAMGRYDFFAEQLQECDQQIEAVMQQLQAHTKELAKGKKRSKAKNAPKFNLRERLLKMCGVDVTRIDGIDETTALNVVSEVGTDLSRFPSDKHFASWLGLCPGTRISGGKVLGSKTKHTVNRAAQAFRQAAAALRSSKSALGAYYRRMCARMDKAKAVTAAAHKLARLFYALLTKGQEYVDQGQQYYEERYRQRVISQLQRRAQSLGMALVPTA

SEQ ID NO: 88988 - protein, 430 aa, unidentified
MKSNTQNAKIEAITEKTLVLGIDVGSETHYARAFDYRGIEYSRKPFKFSNTEEGFVTFKEWILDLKDRYEKDKVVPGMEPTGHYWFNLGKFLQDNEMKPVLVNPHHVKKSKELDDNHPTKNDRKDPKVIAGLVREGRYMIPYLPDGVYADLRTASNIRFQLQAELTRIQNRISRWFNIYFPEYKTVYGKPDAKSGMLILKAAPLPEDILTLGIDGVNQIWRDAKLRAVGKARAKTLIEAAEHSVGSKEGAVSARMEIRMLLEDYESRNTRLQEVMVLIEELVKGIPMAEKLLEIKGVGIRTVSGFLAEVGDISRFNNPKELQKLAGLALVENSSGKHKGETTISRRGRKRLRYLLFEGAMSLVAKNPEFRELHNYYTTRRLNPLKKMQSLMAVAAKLIRVFYAMLTKGVDYDPKKMVSDIRRPAAYLQAA

SEQ ID NO: 88989 - protein, 347 aa, unidentified
MEHVARIGMDTSKHLFQLHGVDAEENVVLRRQVRRSQLMNFFQRLPSTVIGIEACGASHHWARMLKSLGHEVRLLPPQYVKPYVKRNKNDSADAAAVCEAMSRPTMRFVPVKTRDNQAVLMLLGMRERLLRARTQLSNAIRGYAAEFGLTVGRGISRLEHLFERIAADSSLPALAHELFNLHAQEYRDLQMRIAEVEDKLDDWRHENEKVRRLTKVPGIGPIGAALLVMKAPDPEYFRSGRDFAAWIGLTPRDHSSGGKRRHGGISHAGDEALRSVLVAGATNVIRYARLGRGQPSPWLTALVKRKPPMLAAVAWANKMARIAWKLLVSGEAYAGSSAPPRLSAQAG

SEQ ID NO: 88990 - protein, 319 aa, unidentified
MNESFFSEYVGVDVSKAKLDIASGKTGEYWQENNDGIGIQHIVERLRDLPSSMTIVESTGGLETALITELFTAGLPFALVHPARVRNFARSIGLLAKTDKLDALLLARYGEAVKPPTTQLPGEEEQKMNANMVRRRQLLDMLVAEKNHLCSTCLSLRPNVEEHITWLEVEVEKLDQEINDQIQQLPRFKEKEAILRSAKGVGPVLCAKLISALPELGQLDRKKIAALVGVAPFNRDSGPHRGKRRIRGGRIDIRGVLYMSIIAAVRFNPSIKSFYQHLLNMGKLKKVAMVACMRKLLTILNAMVRDMRPFNPFYLSATA

SEQ ID NO: 88991 - protein, 388 aa, unidentified
MLPVINALEVQKGKPAMKKNITELENPRRRVARKNKQRELTIGVDLGDKASRYCVLDREGNVLFERSTATTKRGLAQAFANMGASRIAMEVGTHSPWVKRLLESWNHEVIVANAHRVRLITESTRKDDRLDARKLARLARVDPELLSPIRHRSEGAQAHLVMIRARAALVEARTKLVNSARGVTKSFGERLESCDPDQMRVKCLVRLPSSLQSALQPLVTAVESLTRQIHEYDNKIAQIARSGYPETARLRQVTGVGELIALTYVLTLEDPQRFRRSRDVGGYLGLRPKRRDSGASRPQLRITKEGDVYLRMLLVQGAQYILGRHGVDTDLRRWGLKLAARGGKNAKKRAVIAVARKLAVLLHRLWVTGERYEPLRHSQIASSLQVAI

SEQ ID NO: 88992 - protein, 369 aa, unidentified
MGKDTTYVALDDSKRKIVAGILRPGDAQPELREIANEPRQIRRLFERLKCEGPVAACYEAGVSGYDLHRQLTALGVACSVIAPALTPRRPGQRIKTDRRDAVKLVRLFRAGELTAIHVLDESEEAVRDLVRCRDDLRRDVMRWRHRVLKLLARHGRAYLTGKNWSQAHWRWIREQRFDLPPLQRAFEATVFALEQALARQAELDKELEAVAATAPYREPVGWLRCFRGIDTLSAIILLAEVVDFQRFRRPRELMAYLGLVPSEYSSGETQRRGALTKAGNSHARRVLVEAAWHYRHGPTIGRALGSRSQGQPDAVVSQAWRAQQRLHRRYRHLIGHGKRTPVAVAAIARELVGFIWAAMIRHESRRAAA

SEQ ID NO: 88993 - protein, 483 aa, unidentified
MQKRRMSTFQRLNSDRMNRKQRRVLARRVAAADPGLSIVNPHAAGIDVGNASHFAAVPPDRDPNPVREFGFWTADLHKMAEWLVSCGIDTVAMQSTGVYWIPLYDILEKHGLRVVLVNARHTQNVPGRKTDVQECQWLMKLHTYGLLRDSFRLAQNMEGVRTVWRVRGRHVEEAARSVQHMQKALTKMNVQLANVISDISGLTGQAIVGAILQGERDPYKLAELSDPHIQASQEEIARSLEGTWREDVLFELQQAVDGYQFAHRQIRQCDDKLKAYLASLESRVLEKPEVPAGTKPLQPKTRKARKQGANAPLMGLTEELVRICGADLTSIDGINIIAAMTIIAEVGPDPSKFPDEDHFTSWLGLTGSQNISGGKRVKGAKRKVKNRVADVLRMGATSLLNSASYLGARYRQLRRNAKIPAVAVKAMARHLAVLVYRLLTKGQAWVDRGAELFEQQRRERDLMILQEKAKTHGLQFVPVAAAN

SEQ ID NO: 88994 - protein, 328 aa, unidentified
MRDQYIGIDLHKAFFQACAVSATGERLWEGRFPRTPAGLAALTARCTPHSALAVEASTPTWHFADGLQAAVGTLCIVDPLKTKLKAGYAAKTDQLDARRLADALRRDSVVSIYYPPMAIRELRELCRTRHALVQVRTALINRLRAVLLRQGISDARRLAKTADDAWLAAYALPPRAAASVATLRQLLGSVRTETVRAEAAVRQATDADPIAITLQQLPGIGPLLALTIRAEIGDIHRFATPAQVASYAGLVPRVAASAGRVRYGRITRRGSPWLRWALIEAAIHGVKRTDRIGRWGRGLAMRKGALKARVALARVLCEEIHRLWSRIA

SEQ ID NO: 88995 - protein, 385 aa, unidentified
MVYIGIDIAKFKHFASVVSSDGEVIVKPFPFENSRQGFMKLIEEIENFQDCLIGLESTGHYAENLIYFLYQRGYQIGVINPIQTDALRDSNIRKTKTDKIDTKLIVQCLMLKKYSLVNSQDINIIKLRRLSRFRLETIQQQTRIKTQLTACLDIVFPELSSFFNGNLHLKVSYALLEKYSSAKAIAHCRIDGLTNLLYDNSRGHYNQDKALQLKELAKQSIGLDNPAIELQIQCLIKQLRLYQKQIKDIDLAIMTLMELLNSPILTIPGVGYILGAMIISEICDIKRFSNPSKLLAFAGLDPVVKQSGDFQASSMKISKRGSTYLRYAIYRVAFLIIYNNETFHNYYISKRAQGKTHRVALGHVCNKLVRVIFKILTDETPFNLS

SEQ ID NO: 88996 - protein, 431 aa, unidentified
MVNSLKKADLLSTLFVGIDISSRSNVVALLDFESQKPLQTFAVDNNQPGAVELANRLADYLHSRPDLPRLLIGLESTSFYGVHIANYLSSCEILMPFHTHVYCLNPKTIKNYKKSFVDLGKNDFIDAFVIADFARANRITTQPWRGSQFLALQRLTRHRLHLAKALTREKAYMLSNIFLKFSEFSLLDPEEQPFSNTFGATASAVLTDFLSTEEIIEMPTEDLIRYICEKGRNHFPDPEKTASLLQQAARNSYRLDKCLYEPLTISIASSFTLISTYMAEIKAVNKAIEKTLRGLDPNAYQSLLSIPGIGPVMAAGILSEIGFIEAFKSQDSLAKYAGLVWRENQSGNFRGEDTTMSKAGNAYLRYYLLEATSHVKNHCSEYAAFYQKKYAEAKTHQHKRALALTARKLVRLIFGLLAKHQLYSSDRVGQA

SEQ ID NO: 88997 - protein, 350 aa, unidentified
MRIIGCDYHPGFQQIAFVDTETGELQERRLQHPQEAEKFYRELAAEGMKARVGMEASGHARWFERLLAELQFELWIGDAAEIRTKRVRKQKTDRQDAQLILKLMLKDDFRRIWVPDWENRDLRQLLWHRHRMVQARTRVMNQLQAVALNEGLRCKKRLWREAGREQLEAFPLAPWASRRRRDLLELLDRLSPTIAELTQTIEQEAEKCPAARRLRTHPGVGSLTALAFVLIIGRTERFQCGKQIASYLGLVPSEDSSGDRRRLGHISKQGNTLLRFLLVEAAQVTVRSLPEWRSKYFHLAMRRGRKIAKVAMARKLAIQLFWMMRKEWDYEQVNRFGPHAGQPEHRRGVQ

SEQ ID NO: 88998 - protein, 384 aa, unidentified
MATKLVNLNAAGIDISSREHVVAVPEDRSKESVRTFPGFTRDLHHLAKWLKDCRIETIAMESTGIYWYDLYTILLDYGFEVYLVNAYHVKNVPGRKSDVSDARWLQELHTFGLLRGSFQPDNMTRSLRNYVRQRKNIIRQMTRETQRMQKALEQMNIKLNNVIRDLNGKTATKIIIKIIERERDPKILAQYRDWRIKASEETLIKSLEGNWREEQIFNLRLAYTHYLFLQDQLHQCDIESEKVIKKMSSPSFTNKAAKTQKSKNNPNFNVSQYLYQALGVEVTKIYGIKEITALTIFSETGIDLKEKFPTDKQFLSWLNVVPNNKITGGKVISSRVKRKKNNAGQAFRDAASALWRAQNPIGDYLRRKKAKSGGKQAVVATARK

SEQ ID NO: 88999 - protein, 316 aa, unidentified
MTENESIQQQVFVGVDVCKKWLDVAVGELEGVTRIANTASAWTRWLKGQPSGVHVIVEATGGFEAVVATGCEAAQVTYSIVNPLRVRRYAQACGKWAKTDAIDANVLAAFGRAVPQRPTRPLSRERRELRGLVERRGDLIRIRTAEKNRLAPASPEMAKHVARHIAWLNTEVRKLDRAIAEALKGETLKSSSRRLQTVKGVGPVTAATLLALLPELGQLERRPIAALVGLAPFANDSGPRRGHRRIYGGRATVRTALYMAAMVAARCNPVFKRMYGRLKDELKKPSKAPLTAVARKLLTVLNAMIRSGTDWSPEVT

SEQ ID NO: 89000 - protein, 403 aa, unidentified
MSKKVIKTCGLDVHKDIIFCAIYNGKTYSEAKEYETTMPKIRQMGEYLLSEGVKKVAMESTSTYWVPIWDVLLEMGFELMLVNPYLIKQMPGRKSDVKDAQWISCLLHKGMLRGSMIPSPEIQQLRTYSRKYTKLQQQKTRSLQKMDRLMVMCGFRIGSCMSNLGTKSVMLVIRALIMGETNPEVLERLVYGNTENKKSGKLREALTGNLKEHYRQQLEWERQEYDLFEQQTEQCLTQMRRLCEEHYKAKMELIKTIPGVSEISAMIIIAETGGDMNVFENSGKITGWAGLRPRNDESAGKYKSTATTKGNKYLRSVLVQVSWAASRIKNGWFKEKFNRLSIRKSRKKALIAIARKLLTVTWNVLYYKTPYNQHLVHIYDPIKVEAKMNYHQMEMERMQKLLN

SEQ ID NO: 89001 - protein, 398 aa, unidentified
MEGVAVGIDVAKDVHWVQAVDRRDSEVLLCGSVENAPPALAALVERLEGLRDRGRLTVGIDVVGGIAGVLSAMLLEAGIEVVHVSGLAVNRAREGTSGGEHKSDPRDAAVIADRVRHRRDLRTIAPVGERDAELRLLVGRRRELVTDQTRRISRLRDLLASIHPGLERVVDPTTKAGQQLLSRYVTPEEIRRAGRRRLIEHTLRAGRIPRRHAEELANRALGAAQAQTIAVPGERVAATLVRELAVEAARTRSRLASLDRDLQAALERHPDAALIQSLPGMGVTLAAEFIAEAGSIERFPTPDKLAAAAGLAPVLKQSGKVRYLKRAHGGNKALKRVFFQSAFCSLQHPDSKAFYRRKRDERKTHHQAVLALARRRVDVLHAILRNRTPYEHRHANAA

SEQ ID NO: 89002 - protein, 348 aa, unidentified
MQVYAGLDISLKTAHICVVGEDAKIVWRGVCASDPVSIHAALERFLPDLVRCALETGATSPWLTNGLRQLGVPAVCVDARHAKPVLAQLRNKTDRNDARVLADLARTQLFREVYVKPRPMQELRAALAARQQLVEAAATLKNTIRGLLKPFGLVAGKGSGQVFVRLVREKLVGEAALAAVIEPLLAAMTAVRKELARTTRTLLAFARGDKTCRLLMTMPGVGALVAVTYLCTVCEPGRFGKSRNVGAHVGLTSRRNQSGEVDIRGRISHCGDNLLRSYLYEAARVMLFRWSGACALKDWAARMIPAKGVKKACVALARKIAVVLHEMWEHGVAFDPKGRPLQPAAKAA

SEQ ID NO: 89003 - protein, 317 aa, unidentified
MEQSKANTQCAGVDVGKHRLDAAVHGSGDRLEVANDAAGLAKLVRWLKELGVSRVGMEATGGYERSMRQALAAAGLEVVLHQPLEVRLFARLKRLRAKNDRLDAVLIAAATAQVDAVKAAGDPRLQDLAERLTAYEQVADQLAELKTFMEHVSLKDVARWLRGQIRALDRLKARLAADILARIKAHADLAERLKLLMSLPGVGPIVGASLIVRMPELGQMKRGQAAALLGVAPFDRDSGQFKGQRFIGGGRRRPRRMLYLAALAAKRWDPGLKAFAQSLAQRGKPLKLIVVAVMRKLIEAANLVLARGQPWTKHAPA

SEQ ID NO: 89004 - protein, 416 aa, unidentified
MDAIVERCAGLDVHLDTVVACVSYGKLDIKPKKEVKTFSTTTKGLLELLDFINQKECTHVAMESTGIYWKPVWNILESGAFDLIVENAKKIKNVPGRKTDVKDAEWIASLLRGGLIEKSFVPPERIRDLRDLTRLRKELLGEVNRNKNRIHKVLQDANIKISSVLSDVFGETGKSILNQIIGNQCITEEFIYSLYEGRGKSKLKSTLMEMYEALNGKIRGHHVILLGMHNSNIVFLEKQINELEKEIDILLQKERDSLELLETIPGISKISASSIIAEIGTSMDVFKTEKHISSWAGLCPKNNESAGKKKRSGIKSWNNWLRSMLCECAWSATKKKDSRFKNKYWSMVPRMGRKKALIAIANMMLRLIYHLLKTKSTYKELEIQYFIDKDKRREDRIIKELKSKGYLVEKDSLQMA

SEQ ID NO: 89005 - protein, 418 aa, unidentified
MTKFTRDFSVYVGIDWANDKHDLCIQQANSDTRKFKIIKHSANTINDWIISLHKQYKGQIAVAVELSKGPIVYALQKYKFVTIHPVNPSMLAQYRKAFSPSGAKDDPTDAELALDLMLNYPKKIKALKMESEPVRKLTYLVEQRRRLVEDRRRFSNRLINTLKQYYPHLLDWFSHRGSGMFCDFITRWPNLQKLKRARADTLRKFFHAYPGRTASCTEQRIVLINQAEPLTLDKAVIESHQLLAVALANQMLVVVEAIKVFDKEISTLFDTLPDAELYKSLPGTGPCLAPRLLVAMGENRSRFTSASEIQMSAGIAPVTERSGQKCWVHWRYQCSKFTRQSFIEWAAKSVHQSYWAGLYYQQQRSKGNTHQSSVRSLAFKWIRVLYRCWKAKEPYNESKYLKALRDRNSPLLFKEKAC

SEQ ID NO: 89006 - protein, 405 aa, unidentified
MNAVGIDVAKGKSMITIRQPLGVVIVKPYEILHTVSELEKLADFLKSLNGETRVIMENTGVYHLPIADYLQEAGIYVSVVNAKEIHGYDRNPLRKYKTDKADAKKIAEYGIAKWVKLHQYLPHEDNRRQLQVYNRQYCHYSKIKTMLKNNLDALLEQVFPQIKQSFTSQIRDNGHEKWVDFVGKFWHCECVSSLSEAKFHEKFSKWCHKNGYHYRKAQAINIYAVSQKYSAILPKDEFAEMLIKSAVAQINSIAETQVAILRKMKALAQSMPELEAVIDMSCVGETLAVQVIAEIGDINRFDRKKSLTGYFGVDSPADQSGTVNRQGKPVTKSGSPHLRRALFLILLNMLRVKPDDDVYHFMMKKKSEKKKFLVYMVAGFTKFLRVYYGRVKEYLSKSSPISYCQ

SEQ ID NO: 89007 - protein, 341 aa, unidentified
MSIVGAFDVHRRQLTFEYLDTSSGELKRGRVVPADRQHLRQWLARFAGQDDVHFALEGCTGWRYVAEELAAAGITPHLAEPAGTAALRGKKRHAKTDKTDTRHLRVHLMAGDLPECWIPPEHVLEARAVVRLYKDLLDERGAWHQRIAATLFHQGVPVIGSMATAEGRAAVEQVDLSPAGRQAVQTGLRQIDRLTGELDVLRRQLGMLSRRQPGCAALRATWFGIGPVTAVAIWAELGDVRRFGNSDDVVRHTGLDITVWSSDGKGPPGRLSRQGPPLLRWALYESAKCAARAAAPDHGYYAAVRDKRTAGLATLPVARKLARRCYHTLRELGEEALAPAA

SEQ ID NO: 89008 - protein, 400 aa, unidentified
MDRNRTVAGLDVHKDSIYLCIMGHDEAKIFEKTYGVLTPELRQMCKDMTDRGVTEAAMESTAVYWMPVWNELSGSMDLKLVNPYFIKQLPGRKSDVKDAQWIAECLLKNLIKGSFVPEPIVQDMRKLNRRIMDLNEDMTYNTNKLDASLQRCGFRLSNYVSQVKGRSYQSVLSAIISGTTDPNELVKLIHGRTVNKHGREIIRAAVTGLFSKTDLVVLRQTKEVIDMIERQIEECQKELTALCEQYFPQQYRRLQTIPGVKERAATAIIAETGVDMKMFATAACLVGWCGLRPRNDVSNGRYKSRKVTHGNRYLRQILIEISWVASRTRNCFFSNFSYIQTTVKKKSKMKIQVAIVRKILVAVWHMISKQEDFIDLYRKRLEKEREMEEKLKTFESKAVV

SEQ ID NO: 89009 - protein, 427 aa, unidentified
MTQDTQLLPSQRPVVGIDIAKHRHAAAGVDPGGRDFGQPMMFDNNRAGVDRLEEKILTPLRAMGSVLVAMEATAHYWMCLFFELERRGYEVVVLNPLETAKKQRRRLRKTKTDKIDARSIARFVREGAFGRSRIPDEPTFELRQIVRHRWRLQEVVAQLQIVALTHVDVLFPELPDVLRPWLKSFRALLRTEAGLRPSLLLAQADHTRATVTSASRRRIPDSRIDELLRCAHDTIGIRRGEAILDSLLRSSLDLIETIEKQIDALDRQLAVRIAGRSSPLESLGLSPHIIATIHAECEPVAGFRNSRQLVAYAGLDPATFQSGDPDPRGGHVSKRGPKRLRQALCLATMGLILKPGIFQDAYRRARGRGKHHLSALVKTASLLARVVFRMLHDNKPFNPDHAQARGNPNQAVGETPHRMPADASSRA

SEQ ID NO: 89010 - protein, 345 aa, unidentified
MMVIGIDAHKRSHTAVRIDDNGRLLATKTVGTTTQDHLRLVKWAGEVDGERLWAIEDCRHLTRRLERDLIGAGESVVRVPPKLMAHFRDSARTYGKSDPIDALAVARAALREPDLPVARLDSVERELRLLVDHREDLVAERTRIISRLRWHLHELHPGWTPPTKIDRTSAFDTVTAHLDARGDNALVHRLALRLVEHLRMLTTEIDALAAEITERVTIVAPSLLAIVGCGPLTAAKIVGETAQVHRFRSKDAFARHNGTAPLPVWSSNKQRHRLSRTGNRQLNAALHRIAMTQARMHPPARELMQRRQLNGDGGMEALRVLKRRLSDVVYRAMLTDHKQSLATAA

SEQ ID NO: 89011 - protein, 427 aa, unidentified
MSLPTDLSRSPVPFEQESTLVAAAGEETALLPRSNAKECPMSLPNDLSRSLVPFEQESTLVAVVELSQASWLIAGVVPGVERQPLKKMAPDEDALLRLLHRWRDEAIRNGHPITRITVALEAGRDGFWLARWLTKHGIEAHVIHSSSVAVSREHRRAKTDRLDTAMLNRVFLGWLRGERGHCTMVAVPSLEEEDAKRPSRERENLVGERTRIINRLKAVLARLGIRGFNPKLRKAPQRLDSLRTPEGFPIPPNTLDEMRRDFARLALLREQIKAIEQARLERLQQAPQTGPNAMIRMLASIPGVGLETADMLVQEVLSRNLRDRRAVGRFVGLTGAPDESGAKRREKGLSKAGNARVRRGMIQLAWRFVRFHKDSALAIWFRSRTEGPSAARKTKMIVALARKLIIALWRMVNTGEVPHGVVLRQPA

SEQ ID NO: 89012 - protein, 341 aa, unidentified
MTLYIGVDIHARQQTVSYLDTEDGTLGQQELHHERDDVRAFYSQFSGEVTIGIEACGYTNWFEELVEGLGHKLLVGDAAEIRRLARRRQKNDRRDADLLLDLLLHHEFPALYRYPPESRELLRQLRYRHKLVKLRTMVANTLHALAINCGLSLRAQLLTRNGRKQLADLRLSAIGQQQREELVSLADELTNRILKVEQWLKEQAKSDARVQRLQTHPGVGLLTSLCLVHTLGDLGRFPSTRKVAAYVGFDPVEHSSAERKVYGGISKAGSRLLRYLLVEAGQTACKHDEQLQQFYRRLVPRRGKARAKVAVARKLLIRCFIMGRAEIDYAEFLRRGKRAAE

SEQ ID NO: 89013 - protein, 317 aa, unidentified
MSFVGIDVSKTQLDIAERPGNKRWSAVNAEADIGEVVEMIGALSPQVIVIEATGGMEVPLVVALSQARLPVVVVNPRQVRDFAKAVGRLAKTDRIDAEILAHFGEAVKPKVRALKDEETRTLTALVMRRRQVIEMLTAEKNRLGISPKVVHKDIQQHIAWLQARMEDIDRHLESAIRKSPVWQEKDDLLRSVPGVGQVLSVSLITGLPEIGTLSRRQIAALVGVAPLNRDSGLFRGKRTVWGGRAHLRSVLYMATLSASRFNPAISRFYRRLIEAGKKPKVALTACMRKLLVILNAIMKNRIPWQAEYSTCPTPNIP

SEQ ID NO: 89014 - protein, 343 aa, unidentified
MQTVTTIGLDIAKSVFQAHGVDAAGQGVIRRQLKRRHVLAFFRKLPPCLVGIEACASSHHWSRELQALGHTVRLMPPAYVRPYVKRQKNDATDAEAICEAVARANMRFVPTKTPEQQSGLVLHRTRHLFMRQQTSVINAIRAHLAEFGIVAPVGRRGVEELLNVVADPTDQRVPAIAHACLSALGAQLRKIKEQILEFDRMITAWHRSSEMSRRLDDCPGVGPTLATALVATVADPKIFRSGRNFSAWIGLVPKQHSSGGKDRLGSISKQGDRYLRSLFVIGALAVIRYAKVHGIRHRPWLTALLARRPAKVAAIALANKIARMVWAMMAKGERYKEPVALAA

SEQ ID NO: 89015 - protein, 364 aa, unidentified
MRNVALDLGVREISYCEVANGKVIRRLTVTKLSTLEEFLGPEAAPAKVAIEACREAWHVHDILSAWGNQVLLVDTTRARRIGVGEHGRKTDRVDAEKLAFAVERGGIPAAHLLSPHRRKLRLELSVRRALVETRAQYVTTVRGLVRAHGQQIRRCATSSFVKVVRETALKEEVRELSEPLLRVIELVDGQISEVEERIERLAKQEPVVELLATTSGVGAIVASAYVSVIDEAGRFRNAHQVAAYLGLVPGETSTGGKQRLGGITKQGNSYVRWLLVQAAWSILRKRGTDDGLAEWGRRIAERRGKRIGAVAVARRLSGILWAMWRDGTEYDPHFAARATAGGFMAASRKLKASAERLEQSATQS

SEQ ID NO: 89016 - protein, 311 aa, unidentified
MTKSAVTDRIPTVRTAVASIELVFCGIDVSAVTVSVAVIKPDQHLAERKFSNTASGHRSLLAWLGQCGAAVRISLEANGVYSLDLALALALDAAAHCEVVVLNPKLVNRFAQTLVRNKTDAADAVVLAEYSRRMPFTSWSRPSVEQLRLRALGRYIESLAADLTGIKNRLHASERSSVTPRAVLHDLKPAQAGLVRRLSRMRQQARKLVEADKLLARRFDLLRTMPGIAETSALSILCELVMLPPEMTVRQWVAMSGLDPSHRESGTSVHRPARISRAGNRHLRRALYMPALSAARHDPHLRVLPGAARAA

SEQ ID NO: 89017 - protein, 312 aa, unidentified
MTKLICGVDVSSQTLDACLRPGDQTRRFARSAEGIAALAAFCTAQGVELVAMEATGGYEKLPFAMLWAQGVPAAIVNPRAVRRFAEGMGLLEKTDQIDAGVIAWFAETKRLAPQPPAGAEQERLKALVTRLRQLTELQTAQRNQRRLVSDAAVLASFAEMLALITRQMHALEAEIAELIASDPLWRKLDEAFRSIKGVADRSVARLMAEMPEIGTLSNKAAAKLAGLAPLARDSGKTFGKRPIRGGRDGIRSILFVVADLVRRYNPDFAAFHKRLSEAGKPKKVIRIALAHKLLVRLNAKARDTRNQIACPA

SEQ ID NO: 89018 - protein, 358 aa, unidentified
MPNTKEYFGKSISGNNIFVGIDVHKESWSVCVVDSHGEFIKKFSQGASPQQLLKTLEKPLQDGLNVFCTYEAGYFGFEPARILIEGGCKCTVTAPSLIPVLVGNRVKTDSKDCRKLATCLAAGMLTPVWIPSRELELHRELVRHRVQIQKDRRRLMVRVRARMSQFGIEAPEGTNWTEKFMVEVEGVTADNEGLHFIQRSDLEHLRYLNTKLKLISQKILSLASLPEFAGPAKRLRTIPGVGPLTVMNVLLETGDFFRFTKKGRIEAYCGLTPSQHSSGEKVRMGHITKCGRGSLRSTLIEAAWLLVKNDPGFHQLYLKLKAKRGAKRAIVAVARKMVGTMRRLILDDQDYKPRELIV

SEQ ID NO: 89019 - protein, 341 aa, unidentified
MESSVTVGIDTHKDVNVAIALGAQGNVLGTRAVPTSPAGHAELLAWARGFGPLDKIGIEGTGSYGVGLTRFLRSAGCVVLEVERPQRHRPGAAKTDALDAERAARAVLAGEARAFPKGSDGVVERLRVLWITRRSAVKARTQAANQLHGLVVTASDSLRDRLRRLSTGHLVAEALRWRVCQLDSVESAARFAIQSLARRHQQLDAEVSLLDQQVKRLVEQIAPELLAVRGVGYETATTLLVAAGDNPDRLRSEAAFAHLCGVAPIPASSGKTVRHRLNRAGDRQANRALFLIVLVRMYRDARTRMYVARRTAEGLSKPEIIRCLKRYVARELFQLLVKARS

SEQ ID NO: 89020 - protein, 423 aa, unidentified
MEVMYKRVAGLDVHKAAVVACVRIVARRKVTRECRTFDTATDGLIALREWLGECGCTHVAMEATGVYWMPVWKILSEGDFELIVANAAHLKNVPGRKTDMNDAMWIADLAACGLIKASFVPEEDFQELRSLMRTRKQLSREQTRHVQRIQKTLEEANIKLDSVLSDIMGASARRMIQAMIEGVRDPRKLAALAGKGLKATPKQLYDALHGRVTEHHRFLLKLHLDQWESLEAAIRETGRQADRHLSRMDAKLKDGQEPFRAAIARLCTIPGVSVLSATTILSEIGRDMSRFPTAGHLVAWAGLCPGQNESAGKRKSTRLRKGDVWLKTMLVQCAWAAKRKKDSYYQAQFYRLQSRRGPQKAICAVAASILTAIFHMLTSGEVHKDLGGNYFNKRPPEVQAKRLAAQLAKLGYEVSMQPIARAA

SEQ ID NO: 89021 - protein, 347 aa, unidentified
MVTVGSDSHKRTHTFVAVDENGKQLDYQTFTATTPGHLEALRWATQWPDRRWALENCRHLSRRLESDLLHAGEAVVLVQARLMATVRVTGRQLGKSDPIDALAVARAALREPNLPVARLEGKSREVKLLLDHREDLVAERTRICCRLHWNLHEIEPGLELSDSALIRWCVMDRVEKIVRHHTGLLAEIALEQLETIRRLTRRIKALGLQLRALMRQLTPSLLELQGCGPLCAAKIFAESADIRRFETRGAFALNNGTAPIPVWSGNNVRHRLNRGGNRQLNAALYRIAVIQARDEGLGRTYIAKRLALGNTRREALRSLKRRISDEVFRRLWNDLPLVLNERFSEAA

SEQ ID NO: 89022 - protein, 340 aa, unidentified
MNEAITIGLDLAKNVFQVHGVDAEGNVVIRRQLRRSRVLPFFKKLPPCLVGVEACATAHHWARQLIGLGHEVKLMPPNYVKAYVKRGKNDAADAAAICEAVTRPSMRFVAVKGVEQQSILMVHRTRELLVRQRTMVINAMRAHMAELGIVAPAGVPQVKRLLDIIADGDDDRLGPVARTCLESLVRQYLSLHEEINAAEKRIQAWHRSNETSRRLETIPGIGIITASALAASVSDPSVFKSGRELAAWIGLVPRQNATGGKQRLGRISKQGDQYLRWLLVAGALSVIRHAKRRGTSHLPWLTGIIARKPTKLAAVALANKNARIVWGILMGGESYRPAAL

SEQ ID NO: 89023 - protein, 385 aa, unidentified
MRTVCGLDVHKDSIFMCIMDEQGKKREKKFGVSTREVKSLSMTLKSHHVSEVCMESTGIYWKPVWYLLENDFRLYLVNPQFIKQLPGRKSDVKDAEWIATVLLKNLVRNSFVPDNMIQQLRLYGRRVNELNKDIVRCEQRVDMILQSCNIRISNHVSNINGKSYKKVVHAIIEGERSADELVKLIHGRTVNKHGRESVRDSLEGNIGQADVDLLRQYMEVLRMYQAQKETCLAEMIKLCEKHYHRAFSLLLSMPGIKEQTAAIIISEIGADMSLFVTAAALISWAGLRPRNDESAGKIKSRKITHGNKYLRKALMEAAWGASRTRGSIFYDKFWRLRQRGKNQNKCTVAIARHLLGIIWSLLSRDEYFDNGYRLDVNLRRAGEPA

SEQ ID NO: 89024 - protein, 430 aa, unidentified
MGGHLNRRYEEVVSVDVIVDRCAALDVHKNTVMACVRKPGPSGRSRVKEVREFRTWTSSLRDLRDWLAAQEVTQVAMEATGSYWKPVWHVLVELDGVELMLCNAHHVKNLPGRKTDVADALWLAQLLECGLLRGSFVPPPEIAQLRDLTRYRTKLVQDRARETQRIQKLLEDANIKLDSVVSDVLGKAARRMLDALMAGERDVEVMADMALTRMRPKIAELRLALEGRFDGHHALMLGMHLSHIDHLTGGIDEINEEVDRRLVPFVEQARRLRTIPGIGTRTAEVVIAEIGVDMSRFPTAAHLASWAGLCPGNHESAGKRRSGKARKGNAALRSALCEAAWCAARTKDTYLSAQFRRFCRRFGKRGEGKAIFALAHTMIVIVWHVLNDGVDYQELGGDYFERRTDNEAHARRLVRQLEKLGHRVTLEPAA

SEQ ID NO: 89025 - protein, 335 aa, unidentified
MNNIALIGIDLGKHSFHVHCQDNSGRALIRKKFTRTKLFEFLANTPSAKVVMEACAGSHFMARRISSLGHEARLISPQFVRPFVKTNKNDYVDAEAICEAASRPSMRFVQPKTENQQAMQAMHCIRDSLIRDKVKTTNQMHAFLLEFGIGLPKGTAVIKRLSAVLTENELPPYLVQMLTRLHAHYCYLESQIKELDQLLQQELKHDDTGQRLLTMPGIGPITASILSSQLSDGKQYASSKDFAASTGLVPRQYSTGGKNTLLGISKRGNKNLRRLLVQCARSIMIHLDKYSGSLANWIKNQLCRKHSCVVACALANKLARIAWAITTSKTDFKFS

SEQ ID NO: 89026 - protein, 332 aa, unidentified
MHYVGIDLHKRDLVMAVEDDRGPVGKPRRIACRDEAAIVKAFRKLRPFRAVIEASSSYRWLYDLLEPLGTVVLAHPLKLRAIVTARAKTDKLDAALLARLLRAGLVAASYVPPPPYQVLREVTRARARLVRCATLAKNQMHYLLASRNRHPPYRNVFSKAGRVWLARQDLGVGGNLIRDELVRRLDYFDRERLALDDHLATWWETFPEAGAVKDLYGFGLYSALLVVAEIAESERFGDARQVGAWAGLTARVHQSGGHAYHGRISKQGSRWLRWILVQAAVKVVRKDRALGNFYRRVRRRSGRNAARVAVARKLAGICWVRLKRWHAERAAV

SEQ ID NO: 89027 - protein, 399 aa, unidentified
MRKIIGIDVSKSTAKLSVAIDAKTVYEGDITLDMIGFTSLKAIIDSYGGAEVVFEATGVYSRRLERYLLDESITYHILNPLVAKKRLDDGSRTRKNDVRDARGLAITEFAKHPKPFKPSFYDPVYRELMDISRYYDQQTEDLKRTKNRIHRLIQLSFPGIEEELDLRKPSALHTLTLFSHPAELTGLSFENIKTQILDMHLKGVGAVRSSNLARALWRSRARSYPAVSGNSFVVQAVKHETQKALKLLSEREETVQAMVNLAERTPEYVILLSIPNIAENTAVRLVAELGDIRRFKTRAKLNSFIGLDLQEIQSGNYTAQRKITKHGNAHTRKLLYWTVINMIGSGAQPSHIRDFYAKRQATASRRKPLLVACMDRLLKTIHYLVNTNQLYSYELACSR

SEQ ID NO: 89028 - protein, 343 aa, unidentified
MESIYYIGLDVHKKSIAYCIKTATGKIVCQGMVKAERRALHQWLVDLPGPWVGAMEATMFTGWVYDFLKPYAVELKVAHPAMLKAITAAKKKNDRADAEKLADLLRVNLLPECTMMSEELRELRRILRYRNMIVRTASKMKNKISGLLMEVGAVYDKRKLHGKKYFGQLLERVEDVPESVKDLLKMSRSNMELFEAVQKKLLKTLREDSRISKRVELLRSISGVGEVMALTWVLEIGDPERFSNSRQAISYCGLCSAQHESAGKEHRGPISKKRNKYLQSMLIEAANLAPRWNPQLAMLHEKELTRGNRNRATLAIARKLVIYMLAVDRRGKPFITEKESLVA

SEQ ID NO: 89029 - protein, 364 aa, unidentified
MKIVGCDLHAGQQSIAMVDSETGELTEKVLKHEGNTVREFYGSLEGPVVVGIEATGAMQWFLELLEELGIECRVGHPAKIRAAETRQQKHDRRDAEVILELLLMKDRFPDICMPSTEQRDLRSLLRDRHQWVKMRARLQHTLQAIALNHALRKGKALWTATGRQALQDLALSDYTAQRRDELLRLYTQLEQRIQQLDKQVEKEARGRPQACRLLTHPGVGPVTALATEVFLGDPHRFDTANQVASYIGMIPCEHSSGKRRRLGKLTKEGNSLLRYLWTEATLHAAVKDPELKRFYRRKLVQKGMGKARVATARKLGIRLWIMLRDEIDYEEFCRRGRLPQKGKTHAGMPDFNSGPARAGTGSTE

SEQ ID NO: 89030 - protein, 311 aa, unidentified
MTSAGIFVGIDVAKAQLDIAIRPSGEYFTAPHDDPGVSGVVQRLCALQPTLVVLEATGGFELDVASALGAAGVPTAVVNPRQVRDFARSTGLLAKTDRLDAQVLAHFGEVLRPAARSLPDAQAQELSAVLLRRRQLVEMLVAEKNRLPMATRRIRPQLQRHIEWLQQQVADLDRDLGALIRSSPLWRAKDDLLRSVPGVGPVLATTLLASLPELGTLNRQQIAALVGVAPLNRDSGTWRGRRTVWGGRAHVRAVPYMSTLVAVRHNPRLRSFYVRLRDAGKVPKVALIACMRKLLTILNAILKHQTPWALP

SEQ ID NO: 89031 - protein, 353 aa, unidentified
MEFTMIARRDAACFVGIDLHKDTLTACVVSAKDREVSFEKIACKSRERIRKFFSSLPRPSAVAIETVGFYRWLWTELDPVVDQLVLCDARGARALAGRRIKTDREDALNVALLLADGRLPLAWAPPENVQLLRNWTRHRNGLSRQHAKVLHHVKSIMHRVNRPGPTRLDASGLQRYLLAGVERFSADDVTMLWQHQRRLVEIEQDRAQSERRISELMRAPEFARLRTVLESLPGVALVVSATAIAEIGDFSRFPDSKAIGRYAGLAPRVYASGNSSRLGRISKTGSPDLRWALQQAAWTAIRCDAGFKKTWLRIAKTAGKKAAAVAIARKILVLMWTLVRKDDLYKAREPVAA

SEQ ID NO: 89032 - protein, 306 aa, unidentified
MPNLIIGLDIAKNVFQVYGTDHRGVATIQRTLRRNSVLRFFATLEHALIGIEACHSAHYWGRELTKLGHTVHLLPTQYVKPFVVGGKNDAAAICMAVTRRDIHCVPIKSAEQQSLQSLHRMQEGAIQERTAKSNQIRSLFSEEGVIFPTGLSSLKKGLLEFIENGESAITPILRKLGMMYLEQLSCLQAWISELNAMIDRYFKESDACQRLATIPGIEPVIATAIVSRVSDPGLFKNGRHFAAWLGLTPRQYSSGGKNRLAGITKRGDGYIRKLLVQGARAVIYPINRRHDNYGEWVKKLMLRSSG

SEQ ID NO: 89033 - protein, 408 aa, unidentified
MNAVGIDVSKGKSMVAALRPMGEVALLPQEFLHTEVGLEQMAYAIIALGENTRVIMEATGRYHEPVAAALHEYGIYVCVLNPLFIKQSGGGSIRKVKTDKADAMKIAKYGLDNWVDLREYTPMDTVRQQLKLCSRQYNLYMKTVVSLQNNLISLTDKTFPGVNELFSSPERADGHQKWVDFVMTFYHCDCICRVSENAFAERYQKWCKRKGYHFSAEKALDVYAGSCGHITTLPKNDNTKLLIATAAQQLLSGKMTLAALRAEMMRLAKQLPEYDTVRAMYGVGETTATQLMAEIGDVRRFPRRSSIVGFAGVDPAVDQSGKHSAKSVPTTKRGSPHLRKTLYQIICTYLRKAPADEPVYQFLDKKRAEGKPYFVYMTAAQNKFLRIYYARVKECLEAFDAQQDTSQR

SEQ ID NO: 89034 - protein, 337 aa, unidentified
MKAIAKFVAGAMDVIYRCCAGLDVHKQTVEGAVRRMEPDGRVQVEIRQFGTMTDDLLEMVEWLKAQGVTHVAMESTGVFWKPIYNILEGHFTVLLVNAHHVKQVPGRKTDVRDCQWLAQLLQYGLLKGSFIPPRWQRDLRDLTRERTQLADEQTRAANRIHKVLEDAHIKLGSVATDILGVSGRDILERLIVGEQDTGKLAERARGKLRSKIPELRRALRGHLSEHHRFALRLPLDHLQRLEKLVERLNERIAELCQPYRQQIEELDQIPGIDQVGAESIVAEVGLDMQGFPTEGHRCSWAGICSGNNESAGKRRSGRIPKGDRWLRRTLVLAASGA

SEQ ID NO: 89035 - protein, 341 aa, unidentified
MMIIGVDYHPGFQQIAFCNQDTGECGEQRLNHSDGEAERFYRDLKRRGISVRVGMEATGYARWFERLLAELGIELWIGNAAEIKTKRVRKQKTDRNDARLLLQLMREGTFPRIWIPSPENRDLRQLLWHRHRLVQMRTRITNQLQALAMNEGKRCKKLWSTQGRAELEKLALGPWASRRRQELLELLDRLHPTIEELTTAVEQEARKRPEVSRLMTHPGVGALTALAYVLIIGTTERFHCGKQIGSYVGMIPSEDSSADKQRLGHISKQGNSLLRFLLVEAAQAAARINPAWRRRYIHLAMRRQKSIAKVALGRRLGIRLYWMWRNGCDYSLSFEFGSYAG

SEQ ID NO: 89036 - protein, 416 aa, unidentified
MSVALPEALFFTGIDWAAETHAVCVMDAGGKIVAGFTIEHSADGIALLVRRLAGYGEAGGIPVAIERPNGRLVDLLLEAGHPVVPVSPNAIKTWRDGEVLSGAKSDAGDAAVIAEYLRLRAHKLRAAAPYSDETLALRTVVRARGDLVEMRVAATNQLSALLDAHWPGAKAIFADVESPVSLEFLTRYPTPAAAAHLGEKRMAAFCVKHGYSGRRTAAALLARLRAAPAGTAGEALGEALRDTVLAAVGVLTALNASVKSLDRSVAAHLGEHPDGATFTSLPRSGQVSAAQVLAEWGDCRQAYAGPDSVAALAGVTPVTKESGKHRAVHFRWACNKRFRAAITTFADNSRHASPWAAKVYDDARASGKDHPHAIRVLSRAWIRVIWRCWLDGVPYDPATHGAAVALARQTSEQIAA

SEQ ID NO: 89037 - protein, 412 aa, unidentified
MDILYTCCAGLDVHKMTVVACVRRVDAGGKVHKEVRTFETTTRGLLALADWLRAEKVTHAAMESTGVYWKPVFNILEDQVQLILVNAQHIKQVPGRKTDVKDCEWIAQLLQVGLLRASFVPPAPIRELRELTRQRVQLLGEKSAAANRIHKVLEDANIKLASVATDVLGVSGRAILEALIAGQTDPVPLAELAQKSLRRKIPELRLALEGKVTANHRFLLRMLLDHVRHQEEWVERVTARIEELMIPFAPAMEKLQTIPGVGQKVAEVLLAEMGPDMSVFPSAEHLSSWAGMSPGNNESAGKRHSGRTTKGSHWLRSMLVQAAWAASHTKGTYLADQYRRLASRRGKKRALIAVGHTILVIAYHVLKKGIPYAELGADYLARLDPERVTRNLVRRLERLGHKVTLEPTSNAA

SEQ ID NO: 89038 - protein, 408 aa, unidentified
METVYSVCCGLDVHQASVSACLRRVATNGTISTESQQFATTVQGLTQLSQWLTEAGCPIVAMESTGVYWKPVFHILSATVEVWVVNARDVKQRRGKKTDRADAQWIAELLAYGLIEPSFIPPPQIAALRDLIRMRTALVETRTQVKNRVLAVLEDTNVKLASVVSDPFGVSGREIMDALVRGHRDPEALSQLARGVLRRKIAELSTALEGSFTDHHALLIRLNLELIDQTNAQIQQLDERIEQLTEPLQKEIQQVQSIPGVHRTAARIILSEIGIDMSRFGSAPRLCSWAGMCPGNNESAGKRKSGKTRKGNRYLRRVLAECAWAAGKTDSFLGRTFRRLQARIGGKKAAVAVGHKILQIVYHLFNEGTVYDDGRYNRLNKKQESRQLKRALSALKQLGYQVQLSPAA

SEQ ID NO: 89039 - protein, 343 aa, unidentified
MSEIITIGLDLAKNVFQLHGIDASGGVVLRRQLRRNALEKFFAQLPPCTVGMEACGSAHHWARVIGSYGHQVRLMPPAYVKPYVKRNKNDGRDAEGICEAVTRPTMRFVPVKTVEQQATLAVHGVRTMLVRQRTMAANALRAALSELGIVAAQGREGLRELMAGLEEPSEAIPEMMRHALLVLARQWQTLDAEERVIEQQISKAARCDRRARRLMEVPSVGPIIASTVLAKVPDAKLFRSGRDFAAWIGLTGKDHGTGGKHRPGHISKQGDRVLRALLISGASAHLRQQKARGVTDPWLRELLARRPYKVAMVAFAAKTARIIWAMLVKGEPYRERASAPAAA

SEQ ID NO: 89040 - protein, 424 aa, unidentified
MGKFTKTLCISERKEYHIMEGPIITVDVSKGSCHYQPFIENGHPMRKPKQLSATIDGFQKLGQTIKDLEAKTEREDIPVIFEATGVYHRPLQKYLEDHKIRYYIISPLLSATYRKTDLHSNKTDALDCAHIAKAYYCEKELRQYQAQPQEYKRLYQLSRIYESELVHLRKRKVSLRSMLDIIYPRIDKTFKGNQNLYDPIPMEILKRYPHPSLLLSHREDTIVKNVGHRTGHLKGYTERIVHKIYEKAKECYSGCEINDIEVLKLPSLIENVQEQKKKCDSLLKEMIEIARTCPYFASVVSIVGIGENLAARIIAELGDVSRFDNRAAIVAYAGLNPKIQQSGDIDGLHLKISKKGNKHLRCLLYLGAQCNYRLRKEDPLYEFTKKKRQQTQCPLSSKAAYTASAHKLLVIIYSLCKNGTLYHS

SEQ ID NO: 89041 - protein, 347 aa, unidentified
MNISIVGIDLAKNVFQVCALSVDGTIAWNRKGSRAKLSGVLEELPKSTLIAMEACSSSNFWGRYLLERGFRVAVIPAQHVKPFAKHQKNDSNDALAICEAAMRPGIHRVAVKTLDQQDIKTLRTVRRRLVQQRTATGNQIRAIAGEYGVIFPIGLRRLLVALPEALEDAQNGLSHVARTTLAQSLERLRETDRSIDDLTQEITQICKKTPRYADLQSIPGMGPLVSAALISEIGDGRQFSNGRQMAAWLGLVPRQHSSGGKQVLGSITKHGNNDLRVLLVHGARAVVRFAQRRLDPLGEWVRALIARRGRHRAIVALANKLARIAWSVLVKDQRFDAALAFAPARTA

SEQ ID NO: 89042 - protein, 341 aa, unidentified
MGEVGTVGLDIAKHVFQAHGADGRGAVVFRKRLRRGQVLTFFAGLSPCTVAMEACAGSHYWGREIGKLGHSVKLIAPAYVKPFVKRHKNDAADAEAICEAAQRPTMRFVAVKSEEAQAAAILFRARDVLVRQRTQLINAVRGHLAEFGMIVAKGPQHVPELIAQVEDIASELPAMARQTLVLLVDHLRALNERIIGLNREIGQRAKTDAVARRLMTIPGIGIMTATALTALAPSAETFRRGRDFAAWLGLTPLQRSSAGKERLGRTSRMGERTLRRLLIIGASAVARWAARKGAAPGSWLQRMLSRKPPMLVRVALANKMARTVWALLAHGGIYRAPVAAA

SEQ ID NO: 89043 - protein, 333 aa, unidentified
MNMHLQGGVANGAQRPNAGVDVCKQHLDVCLGTEDQRVANDAGGWDELIAKFKGAGVDLVVLEATGGYERGLVCALQGAQIAVARVNPRQARDFAKSMGVLAKTDKVDARALRDFADVLARHKDRAKYITPMVDERRLALADLMTRRRQLVDMRVAEGNHLEHAAHKHSVRSIKNVLKTLDKQLEVIDREIDDHLDRHFGDQRTLLDTVKGVGPVTILTLTAALPELGQFGRRQIAKLVGVAPLADDSGQRKGKRHIWGGRADVRAVVYMAALVAIRHNPVIRVFHSRLIAAGKPKKVAIVACMRKLLTILNAMLRDRAAWDASKHALGAVSA

SEQ ID NO: 89044 - protein, 310 aa, unidentified
MEHTTVVGIDVSKDRLDVHILPSEQAWAVSRDGDGLAELCRRLAGMSGVVALEATGGYESIVAATLTSAGLPLVVVNPAQIRAFAKALGQRAKTDPIDARVIARFAEATTPVVRPLPDQATRMLADLLARRRQIVEMMASEGQRLRRTEVPRVRKSIERLVVAMKRELGDVDHDIDDTMRGSPVWREKEDLLASVPGVGRIIARTMVADLPELGTLGRKQISALAGLAPFVRQSGKWKGQARIGGGRPTVRTALFIGAQVAKRHNPVLKAFYERLITAGKSKMAATIAVAHKLLTILNAILRDKKPWQIA

SEQ ID NO: 89045 - protein, 321 aa, unidentified
MTMLSFCGIDVSKDRLDVMVLPEQQCCPVRNDASGWAKLVKWLRGFAIAAIGIEASGGYERGVMRALLAAGLPACQVNPFKLRQFARASGVLAKNDPLDTRMIASFVAIMPTRPSQLRSPAIERLGEMLAVRRQLNAEKIAAENASRLLEDAMLQRLSRRRVARLAADIDMLDRHLAEIVKTDAVLAHRYRLLTSMPGVGPVLACTLIALLPELGTMSRKQVAALVGVAPYAFDSGKFKGRRCIWGGRAPVRQALYMAAMSAGNWNPVLKTFRTRLKGAGKLPKVVIVAVMRKMITMLNAMVRDDVVWADHLPGRHPVPTA

SEQ ID NO: 89046 - protein, 454 aa, unidentified
MRHGQKKQRPAQVDENMPAMNPNAAGIDVGSTEVWVSIPPDRDPEPIRRYETFTADVQALAQWLRHRGIESVAMESTGVYWIPVFEILESQGLHVVLVNAKYAKNVAGRKTDWLDCQWLRMLHTFGLLPSSFRPAAAIATLRCYLRHRQMLIDYAAAHIQHMQKALTQMNVQLTNVISDITGSTGIRIIQAILAGERDPQRLAQMRDYRAKNDEATIARALHGNFEPQHLFALKQAFELWDVYQQKRWACDQEIAQYLRGLESAIDVDLQPIPPPRAPKKRRNSPEFNCRLETYRILGVDLTQIDGISESSALTILSEIGTDLSAWKTEKHFASWLTLCPNNRISGGRVLQRRTRKSSNRVHDVLCISAQTLFNSQSALGAFARRMRSRLGPQKAIVATAHKLALLIYRLLRFGKPYLDIGQEAYQQQYQQRKVRALARQAKHFGLQLVAVTET

SEQ ID NO: 89047 - protein, 339 aa, unidentified
MENVPVFVGLDYHRQSVQVCVMDEAGRVLSNRSCGNSVLEIAAALRPEWTVRRAAIESCCGAADLAEALIASLRWPLSLAHPGYVARMKHNPDKTDYADAKMLAELSRAGLIPPVWLPPQSVRDLRLLVRLRADLVAGVRAVKTRLLSVLRQQRIAEPRGFGRWCRKWLAWLGSEECALSEQGRFAVGVYLDELDALRTRIAKVEARLRDATVGDDLVARLLGIKGVGEVTAWTMRALIGRFDRFVSGKQLARFCAVTPRNASSGPRVADSGMIKAGDPQLKSVVIEAAQRLRRYEPRWRELSESMAQRGKPTSVIIGAIANRWLRGLYHAMKEVPMAA

SEQ ID NO: 89048 - protein, 318 aa, unidentified
MSRDIKYIGMDVHKEAIVIAVLNSSGQLVMESIVETKASSLLQFLHGLRGELHVTWEEGTWAAWLHDLLQPQVHQMLVCDPRRNALLKEGNKSDKIDAQKLANLLRTGMLRPVYHGEHGLRTLRELGRSYQTISKDLNRVMNRLKALYRGWGIACSGTQVYAARYREEWLRKIPHAGVHRRAELLYQQLDGLQALRRTLRPELLAESRKHKAAKLLRQIPCIGPIRAARLIALMQTPHRFRSKRQLWTYSGLGIETHDSAQYCYVNGQLQRSKKPQQIRGLNRNHNHEMKDIFKEPRPGPVVGWGHCATSMWACWTKA

SEQ ID NO: 89049 - protein, 342 aa, unidentified
MTNFNTKYQSVCGIDIAKNVIQIYQVNQDGECKNFQVKRKEFLQLFENREPSLIGMEACGGSQYWARELQKLGHTVNLMAPSAVKPYVSGFKSGRKDAIGIFNAMLAGVRKVAVKTEAVTDLATLLGIRARRVRARTAKVNMVRGYLMEYGIVMAKGLRQFKNSIADSLLQLERAQASNMVKEEFKFLVDEVNKETEAILRLDREINSLAKQCKNFDHFLTAPGVGPITAATMCAKLADPQVFKNGRQFAAYIGLVPQHYGSGGKNVNTTIPIKCNKELRALLVQCAQSIRRTKNKSSWVTQIEDRKPNSVATIAVANRLARRLWAIASKGEDWKRMDINFG

SEQ ID NO: 89050 - protein, 315 aa, unidentified
MSKIVVIAGIDVSKDKLDVHVLPSNQTFMVARDHRGLASLVRRLRKAGVEQVALEASGDYERIVIEALEAAGFVVRLLNPARVRAFAEAIGILAKTDPIDARLIALYCQHFPDKGLTRRPEQARKLGEFLNMRTMLLKLAGEIRNSLEHVREAGLKALADTLADDIAAKLKDVDDRIAKVIADDVATTRKARIVRSFTGAGPVLTSSLLARVPELGSVTRHAAARLSGIAPTDRQSGRSKRRSSIEGGRDQLRPVLHMAALAAMRSNPIIKAFAQKLSAAGKPKQLVIAACARKMIVILNAMLRDNTEWKYAKAA

SEQ ID NO: 89051 - protein, 381 aa, unidentified
MQASTPGTPTTGHYGRIFVAIELSQRSWFVTLYSPDRDRISRHRLDAGDHADLLRLIAEVRGRAERKLGYAPEVVSCFEAGYDGVWLHHLLTAAGITSFVFDPASIAVEQRSRRAKSDRIDGDQLLRTLMAYLRGEPRVVRIVRVASVEQEDERRASRERHRLVKEQTSHINRIKALLRLKGLPAGNPKRRDYLKFVERQRDWKGDPLPPHALAEVAREHARLMQVRDQLEALEKARPVPASPAAAEMARRRELLLRAKGIGAVFAAQLVNEALYKDFRNQRQVGAYFGLAPSPWRSGSIEREQGISKAGNPLARESAIEMAWLWIQHQPDSALTRWFKERTANASKRIRRIAIVALARKLVVALWRYLTTGLVPEGAVIA

SEQ ID NO: 89052 - protein, 346 aa, unidentified
MSKTRRVGEVDRVLAVKVFCGVDVSAARLDVAVQQEGVEGFRRRQFANTAAGHRQLLVWLRKLGWGVRVALEASGVYSLDVALALDEAAGFEVAVLNPRKASDFARSLNRSKTDKADAEALSEHSRRMEFVRWRRPCRAALELRALGRHMATLTEEHSRLSNRLHAAEGSRTAPRCVREDLKRSMAGIRKRLLRLQREARVMIEREAEMKRKLLRLMAMPGIGEISAMQILAELAGLDEQMTVRQWVAHSGLDPAHQSSGTSVHKRSRISRQGNRHLRKALFMPALTAARFDPYLRAFYLELLDRHKTKLQALTAVARKLLHAIYGILKTDTDYDGAKLFPALKIA

SEQ ID NO: 89053 - protein, 363 aa, unidentified
MQPFASLNNRSELKMKYVGIDVGKQKCAVAIMNSEGRINEEFPIQNNNEGIKALISKLSMDDQVVMESTGSVWSNLYDNIEKAHIKVVLANPLKTKAIASAKIKSDKVDARILAHLLRADLIPPSYVPPYEIREMRYLLRHRASLVSVRTRVKIQVHSLLDRNGISTGEFSDLFGRSGMEWLKNVELSTLDRLMLNNHLEHLASLKNQMDAVDAEITSRASRDRYVELLLSLTGVDVFAALLIRSEIGDISRFSSYKKLISWAGLAPSLHQSGNVEYHGRITKQGSKMLRWMMVEAAMVSVNHDDRLGEFHERVKHRRGGQKATVAVACKMLKIIWTMLTKDEPYESRNERRYVKKLNLLRKH

SEQ ID NO: 89054 - protein, 332 aa, unidentified
MNYIGIDIAKKTFVAAFPKEKGFKVKSFPNNVDGIRDFLKGLDPGQDRCVMEATGNYCFLLLYLLDKKGISACMINPKQTKHFARMMMEVTKTDTKDACMIAMYGQKMEPPVYKIPTESIMRLKQKRTVIRQLRKQYTALNNLKESLSVMPNMDKSCEKSITKTMEFIGKQLNKLEDEMAELTNVEYQKQMELLTSIRGIGPVCAAALIIATSGFTCFDNAKQVSRYFGLCPTYQQSGTSIHVRGGISHMGDSQIRGALYMASMTAIRTNTCCKEFFYKLRKNGKPGKLALTAVSNKLIRQAFAVVKSGVPYIDGYVSPNPMTAQERMLNMC

SEQ ID NO: 89055 - protein, 370 aa, unidentified
MHSISFVGLDVHKTTITVAVADGRRSGEVRQLGAFANRADVLRKMVERLERQGGQLRFCYEAGPCGYGLHRFLTGLGHACAVVAPSLIPIKAGDRIKTDRRDAVILARLHRAGELTEVWVPDAGHEAMRDLVRARATAARTLSKARQHLGGFLLRHGKIYSGVRTWTQAYRRWLTTVHFDHPAQQIVLQDYIDAVTDAERRVDRLTRQITEHLPDWSMAPVATAIQAMRGVALINAVTIVAEVGDFSRFDNPRQLMAYLGLVPSEQSSGSTVRRGGITKAGNGQARRALIEGAWTYRMQARVSRKLYDRLEALPQSIRDIAWKAQVRLCSRWRRLAASGKPKVVVTTAIAREMAGFIWAIARQVQPQTAG

SEQ ID NO: 89056 - protein, 411 aa, unidentified
MDVLLDRVAGLDVHKRSVTACVRTPGSGRKRRREEKRTFATYSGDLGRLREWLVAEGVTDVAMESTGVFWKPVWHVLEGSFELLLVNARHVKMIPGRKTDVADAAWLAQLLECGLLRGSFIPPPEIRRLRDLTRYRKRLVQDRTRETQRVEKVLEDAGIKLASVASRTLGVSGRAMIERLIAGERDPEVLADLALKRLRHRIDDLEAALVGRFDQHHATMLEFHLAHVDQLTATIGELDRRIDEAIGAFAAQRDRLMTIPGIAKITAEVVIAEVGVDMSRFPTAGHLASWTGFCPGNNESAGKHRSGRTTRGSIWLRDVITQSAWAAARTKDSYLSAQSWRLAGRIGQRKAAVAVAHSIIVAIWHILHDDTDFQDLGPDYFVRRLDPQRTQRRLIRQLEALGLIVTVEPAA

SEQ ID NO: 89057 - protein, 397 aa, unidentified
MSKRSKKTKSQSFKAPSLPRHLQHINLNAAGIDIGSERHLVAVPEGRDEISVREFGTFTADLEVLAAWLKQCGVTTVAMESTGVYWIPLFELLERRGFEVKLVDARHVKNVSGRKSDVLDCQWIQQLHTYGLLAGAFRPPDEVCVLRSYLRQREMLIQTASRHIQHMQKALQQMNLLLHNVVSDITGLTGMKIIKAILAGERDPRVLAGNRHERCQNDAATIAKSLVGNYREEHLFALRQAVDLYETYQAKIADCNQAIIKQVEKQPDISDDEPPTPEKQVQARDRIRDGVDVRDLLFKKSGVDLFAIPGLAADTLLTLVSEVGFDMKPWKTEKHFASWLGLCPGTKKSGGKVLNNKTKRNPNRATQAFRMAAASLYRSQTALGAFYRRIKSRAGGQ

SEQ ID NO: 89058 - protein, 418 aa, unidentified
MKRRKSKKGNVVNEKTLIVAVDIGKSVHYGYMRAPHGKEVKPFPFYNNGHSFNEFWRIIGCFQREQGLEKIVIGFESSGPYAEPLCEFLRRKPVTLVQTNPMHTKRLKELTGNSPNKTDKKDPRVIADIISLGHALTVVVPEGAAAELRRLTHTRERELKNQTADKNRLQHLMFIIFPEFLNILDVSTKSALYLIKHHPAPEDILSLGLESLCAILKKVSCGQLGIERAQKLFEAARTSVGIIQGKRSILIEINHLVDRIECEQRFIESLEEMMKNHLRQIPYSQNILSIHGIGTITTAGIIGEVGDFSEFTTSNEMIKLAGFDLFEVSSGRHKGQRHISKRGRSVMRKLLYYAAVNTVKSHGIMHDTYQKMLNKGKPKTKALIAIARKLLKIIYAIARDKTMYGEHTNYALKRTVAA

SEQ ID NO: 89059 - protein, 377 aa, unidentified
MKRIKFVGLDVHAETIAVAVAEQAGEIRSLGVIPNREDSVRKLVKKLGPVEDLQFCYEAGPTGYALYWQLTRMGAQCDVVAPTLVPVKAGDRVKTDRRDALKLAKNHRAGELTAVWVPDAAHEALRDVVRAREAAKKDQLRARHRLSKFLLRHGRRPPMGVKAWTMKYLEWVKREVHFEQLAQETTLLDYLHEVEHVAARIARLDGAITEAVKCSPPQMRAVIEALQALRGIAQISAATVVAEVGELSRFARAKQLMAYAGIVASEDSSGERTRRGNITKTGNAHLRRVVVEAAWAYRYRPAVGGTLRKRQETVSEETKEIAWKAQQRLHERYRKLLARGKNKGVVITAVGRELLGFIWAIGIKVETVQKESLQRAA

SEQ ID NO: 89060 - protein, 425 aa, unidentified
MICAAIERCAGIDVGKKVLAVCILTGPLDQEPRVERRRFGTITVELESLRDWLKAEGITHAVMESTGSYWKPVFNILEGSLKVCLANPQEVKNRKGHKTDDKDGWWLAHLLRHAMIYPSFIPPRAIRELRDLTRRRKRLLSDSTAEKNRVQKVLEDANVKLGNVLTDLFGVSGQLMLEALLEGKAQPAQIAQLAKRGAKKKIPELIQAVEGHRMSDHHRQMIRYSLKHLLFLEEQIAELDRDITAKIEEANLGPAWQLVQTVPGIQDRSAANILAETGADMKQFPSAKHLSSWAGVCPGNNRSAGKNKSSHTTGGNPWLRSALTECAWAAAATKNCSLQDKFWRVTSRSGGQKAPALIAVAHAMLTLIYRVLENQQPFQDRKAPPLGELQKQRMIRHHIRRLGKLGIAIPRVAYVAAAQPTTSMD

SEQ ID NO: 89061 - protein, 377 aa, unidentified
MATTRTVLRGQLTAKPGDLYMSLELGDKHWHISIGGERRSVSHYIVEAGHTEEVADCIAKAAARLHTARVHSCYEAGRDGWWLHRWLTELGVDNIVVDPASIEVNRRARRAKTDRLDADKLLAMLVRHHRGERVWSVLREPSPGDEDARRAHRELQRLTHERIAHTNRISSLLVLHNLRPRIVIGGRDWPVWWNAHREQVPPTLRAELEREAVRLKVVKEQVRAIEAARARELAEGKQPLVAQLVRLRAVGAKGAWVLVKEVFGWRHFANRRELAGSLGLVPTPYASGDSEIEQGISKAGNRRVRALLVELAWSWSRLQPGSALTQWFNRRFAGAGKRMRRVGIVALARRLAIALWRYLQTGEIPIGARLKPAGSGI

SEQ ID NO: 89062 - protein, 389 aa, unidentified
MLEPFNPSKSLAALEQDSTVIAVIEMSQSRWLVAAVIPGIERQPLKKIDPDEELLLKLLHRWQNEAGRAGREIKRIVAAYEAGRDGFWLARWLRARGIEAYVIHPTSVAVSREHRRAKTDRLDTELLKRAFLGWLRGEKRHCSMAAIPTLEEEDTRRPNRERENLVTERTRLINQMKAILVRFGIRTFKPTLRKAEEKLEGLRTAEGTPLPQNTRAEMRRQLARLRVVREQISAIERERLRKLAAAPAEERGPHAMVRLLARVLGVGVETADMLVNEILLRHLHDRKAVARYAGLTGSPDESGRRRRERGLARAGSARVRCGMIQLAWRFLRFQKDSALAQWFRARTTDGRSATRKIMIVALARKLLIALWRLVTMGEVPRGIILRAAS

SEQ ID NO: 89063 - protein, 312 aa, unidentified
MNSIICGVDVSKDWLDVFIRPSGVSQRFSNDAAGIGALGALCLAEAVELVAMEASGGYERPAFLLLWEMGVACALANARNVRRFAEAMGFLEKTDQIDAAVIAHYAEARPLRASPPPKPAQMRLQALVARLSQVTGDLIIQKQRRSVARDAQAVESLNEVIALLVRQSRRLEGEIASMIDDDPLWAGLDKAFRSIKGVASRTVARLMAELPEIGHISNKAIVKLAGLAPIANDSGKKSGPRPVRGGRKGPRGILFLIAAIAARYDPHLGAFQQRLQAAGKAKMVIRIALARKLLVILNAKARDARKEFAHAT

SEQ ID NO: 89064 - protein, 423 aa, unidentified
MDVMHERVAGLDVHKAMIVACVRLMACDKISRECRTFETTTAGLLALLAWLTESACTHVAMEATGVYWKPVWNILSDGAFDLMVANAAHIKNVPGRKTDVNDAMWIADLVACGLIKASFVPEEEIQELRSLLRARKQLTREQSSHVQRIQKTLEEGNIKLDSVIADIMGMSGRRMIEAMIAGVRNPHKLAELADRRIKASPKVLYDALHGRLTDHHRFLLRLYLGQYDALGTAIAEIDQQVDTAIADMDEEVEAGQATFRSLIGLLSTIPGISSLAAPTILAEIGTDMSRFPTAGHLVAWAGLCPGQNESAGKRKSSRLRKGAPWLKTMLVQCAWAASRKKDSYYRAQFNRLRAKRGPKKAICAVAASMLTAIYHMLKDGTEHQDLGADHFDRRSSDVKANRLVAQLTKLGFKVELQPLAEAA

SEQ ID NO: 89065 - protein, 315 aa, unidentified
MRTSEHSLYVGIDVSKKRLDVDSYPEPHPMQFPNDEAGCLQLCAKLVEMKPNGVIVEATGGLETAVVGVLATAGLAVVVINPKQGRDFAKAIGVLAKTDTVDARVLARFGEAVKPPCRPIKDGELRQLEEVLTRRRQLVDMVTAEQNRKLQASVRLAKEIDEHLEWLKRRIQGVDTDLGNAIKASPIWQAKANLLNSIPGVGKVTICTLLAQLPELGTLDRRAISALVGVCPYSRDSGAYRGKRRIWGGRAAVRSVLYMATLVAIRFNPRLKQVYERLLAAGKLKKVAIIACMHKMLIIMNSILRNNTAWSATVI

SEQ ID NO: 89066 - protein, 340 aa, unidentified
MTITTIGIDLAKNVFAVHSVDQNGKTVLVKSRVTRAALPGLIAGLPPCVIGMEACSGAHYWARLFRQYGHKPRLMAAKFVSPYRMAGKSGKNDAADAQAICEAVRRPHMRFVPVKDESQQAMQCLHRTRQGFIEEKTATYNRLRGLISEFGVIAPQSTDALRHMVSAQKSSLPLQVQQCVDDLLEHVDRIEANITEYDRILSRMANTDHRSQRLMELKGVGPTTACALVACIGNAHDLKNGRQVAAWLGLTPSQYSSGGKSKLGRITKAGDSYLRTLLVQGARSVLIGAEKKTDSFSRWVCSLVERRGYWRAVVAIAAKNARPCWASLHYGDDFRLYSAS

SEQ ID NO: 89067 - protein, 353 aa, unidentified
MKPRMESNTSSPTVVGVDIGKDVFHLVGFGAGGKIAFRRRIRRLGLKDAFEKLPPCIVGMEACLSAHFVSRTLRALGHEPRIIPAIYVKPFVKGQKNDYNDAEAIAEAALRPNLRFVQEKSQDQLDLQACHRVRSRLVSRRTATINQIRAFLIEQGIAVRTGPRALRNSLFAILENRKDEISARTARLIRGLYEDWCYLDERIETVTGEIEALSRTEAKCRQLMSIPGVGPLISTAMVAAIGSGEAFERGRDFAAWLGLVPRQYSTGGRSILGRISKRGSKYLRTLLIQAAKVLLMRPHNWARYSFGPWLNSASARLHRNKLAVALANKLARIARSVLRNDKAFDTHLEVAAI

SEQ ID NO: 89068 - protein, 433 aa, unidentified
MPRALISATNSITWRYRRAATANRWRFGCTTAELKAMADWLKQCGIRTVAMQSTGVYWIAVFDILEQAGLEVYLVNARDTKNLPGRKSDVQESQWLMKLHTYGLLRNSFRPPQEIRTMRTYWRQRNDLVQSAGRHIQRMQKALTQMNIQLANVLSDVSGTTGQAIITAILRGERDPHKLAELRDPHVKASEEQIAQSLEGNWQPDLLFVLKQEQDGYEFCQKQMAECDRQLAQYLQQREDRSQGAPLPEEKRKERLKKKKGNKPQFDLREGLFHLTGTDLTRIDSIDVMTATTIVSEAGYDMSKWETEHHFVSWLRLCPDNRISGAKVIGKGRLPTNNPISIALKMAASSLRLSDTYLGAQFHRLRTKLGAPVAIKAMAAKLARLVYRMLRYGMKYVDKGADFYQLQHRQLKVKQLKWKAASLGYQVIPIPAA

SEQ ID NO: 89069 - protein, 408 aa, unidentified
MEVVHPRCAGLDAHKRIIVACRLTPGPRGHPVRQVESFRTTTRGLLELSDWLAAVGISVVAMESTGSFWKPVYNVLEGSFELLVVNAQHLKVVPGRKTDVRDAEWIADLLRHGLLRPSFIPERPERELRELTRYRTTLLQQRTAEVNRIQKVLEGANIKLASVASDVVGTSGRAMLEALVGGEADPEMMAAMARGRLRDKHDALLEALEGRVGPHQRFLLAALLRHLDAIDGLVAEVSAEVEARLRPFEAEIVRLQTIPGIGRRTAETILSEVGPDMSRFPSSRHLASWAGLCPGSHESAGKSRSGRARKGSPWLRSMLVEAAKAAGRSQTYLGAVHQRLAARRGAKRATFAVAHNLLVIAYYVLSRGTTFNDLGPAHFDERDRERTIHRLTRRLEALGYQVAMTSVG

SEQ ID NO: 89070 - protein, 338 aa, unidentified
MTVVTVGIDLAKNVFAVHGVNAAGKAVLVKPLVRRAKLLELIATLPACLIGIEACTGAHYWAREFQKMGHTVRIMAPQLVSPYRMGGRHGKNDAADAAAICEAVARPNMRFVPIKSVEQQGQLFVHRAHQGYVSERTALINRIRGLLSELGIVLPQAFKAFLSGVAQVLEDLPGYCNQVIGDLLNELYHIEEKIKNSEKLIQQLARDNSAAQLLMQFRGIGPMTATAIVASIGNGHDFKNGRQFSAWLGLTPRQQSSGGKARLGRITKAGDSYLRTLLVLGARSVLLGAAKNDDPVSRWALQLKERRGYGRALVAIAAKNARMCWAMLHLRDEFRFPA

SEQ ID NO: 89071 - protein, 402 aa, unidentified
MNFFVGLDWASQAHAVCVLDVAGQVCWQGSVEHSAEGLAELRRRLARFGPPASLPIAIERPSGLVVDTLMDAGHPVVPIHPNALKASRPRYSAAGSKSDPGDAFILGDLLRTDGHRFRPLQPLSDATRALRALVRSRDDLVAARVALANQLRALLDCFWPGAAAIFADVDSPIALAFLSRYPTPHSAERLGEKRLTRFLVQHAYCGRRPVPELLTRLRAAPIAQTGELEAEASGEVVRALIAVLLPLVTQIQQLSAAIAAALPQHPDGPLLQSLPRSGSVNAAQILAELGDDRTRFSTDEQLAAEGGVAPVTHESGKHRAVSFRWACNKRLRQALTTFADNSRHASPWAAAIYAAARRRGCHHPHAIRVLARAWVRVLWRCWQDHRPYDVMLHCAAQRAAAA

SEQ ID NO: 89072 - protein, 390 aa, unidentified
MVSVRFKRGGHATSMERGSLMLNTTTFVGLDVHARSIKAVALDVMTGETKSATFAYDAAAVAEWVRSLDPAAKCVYESGVTGFDLQKKLTALGVGCVIGAVSKMIKPSADRKRKNDRNDAEFLARMLSVGNVVEVWVPDDECEAARDLVRALDDARDDLKRCKQRLSKFLLRHGLVFSETTPSGQRKGNWTAAHWAWISAVSFEERADNEVLAYYIDAVRQKMEDKRRLEDLVKDEASKARWRKRVDSVRCLKGIDVMSAADLVFEAGEFSRFKNARSFGAWLGLTPSEHSSGESVRQGGITKAGNKHLRRVLVESAWHYLNASAHPKDLAKGQVPDPAARRHAAKGIRRLVRRREEMLGRGVHKNKANVATARELAAWVWAVGCMVESA

SEQ ID NO: 89073 - protein, 355 aa, unidentified
MVRKFLRHVAGIDVAQKELVVSMGRMHEDLTAEVYAYKTFPNTDKGFAALVLWAQKCAGEGALVRFVMEATGVYHEALAYCLEGSGHAVSIVLPNKISNYARSLDVKTVTDRTASEAIARFGLERKLEDWKRPKDIFKRMRQLCRERDQVVEERTVAKNQLHAEQSEAEPNKRSVKRIESRIALLDKQEKEIREEVSQLVGSDEGIKQVVVLICSIPGIGLLTAAVILAETNGFDLIRNKRQLASYAGLDVKDKQSGTSVKGKPRISKQGNRNLRKAMHMPSLMAIRDERFKAIYARLVSKHGIKIKALVAIQRKLLEMVYTIYKTNTKYDSAYLQKQEEKKAAAKKAAEDKRAA

SEQ ID NO: 89074 - protein, 343 aa, unidentified
MDHFAGLDVSVKETSICIVDDTGRIVREVKVASEPEALLQVLGNPIYRFKRIGLEAGPLSQWLFSALAEAGLPVICVETRHMRAVLQAQINKTDRNDARGMAQMMRAGLYRPVHVKTLRSQKLRMLLTHRKLLQSKAIAIDNDLRGTLRNFGLKVGVVGTVKFEARIKELVENLPDLAVLVEPLLMVRRVLREQFSILHRRLLAIVRDDEVCRRLMTVPGVGPVVALTYRATVDVPARFRNSKAVGAVFGLTPSKYQSGEINRTGAISKCGDEMMRVMLYEAAQIMLVRTAKWSWLKAWAMKIARHRGMKKAIVALARRLAVIMHRIWVDGTEFRWTREVTAA

SEQ ID NO: 89075 - protein, 343 aa, unidentified
MEIYVGMDVSLKETSICVVDGNGEIVTEATVLSEPEVIAEYIKNVAPNTVRIGLETGPTATWLWHELKSFGLPVICIDARHAKAALSMQINKSDRNDAVGLARIMQCGWYKEVQVKRLSCHQMRAILSSRAQLIKIKGDLENQIRGLLKNLGLIVGKARGNVFRNRVEELLSKNNRLSEAVVPLLQVREKVGSEVADLSKKLLDLARNNVDIRRSMTVPGIGPITALAFYTTIDDPERFQRSRNVGAYIGLTSRRHASGEVDWSGRISKCGDPMLRSYLFEAAGVLLTRVPQWCKLKAWGHRLWKRIGFKKAKIAVARKLAVILHRMWRDETDFIWSSKEVAA

SEQ ID NO: 89076 - protein, 344 aa, unidentified
MEYGAIDLHARRSQIRIVREDGAAVLERRVDTTRDDLDRIFAQRPAMRVLIESSTDSEWVAQHLETVGHEVIVADPNYAAMYGSRSRKVKTDRRDVAALAEACRTGVYRRAHRASAAARESRQRLRVRAHCVRQRTATINLLRAVLRADGLRLSRGSSERILARVDQLTLPPALAPIIAPLRDVIAQLHATIATADTAVETRVAHDPVAQHLMTAPGVGPIIALAFPAVLDTPARFGGDPARASAFLGLVPSEDSSAERRHRGSITKVGPGDLRALLVQASWGIWRGRSLAGAALRTWAHALAARRGRRIAIVALARRLSRILYAMWRDGTDFQIAIPMAPVVR

SEQ ID NO: 89077 - protein, 396 aa, unidentified
MISVGIDVSKGKSTVCIMKPCGEILESPFDIGHTADELDSLISLIKSFDEETRVVMEDTGHYHLPVATYLSSHNIFVCCVNALRMKKFCSQSIRRAKTDKIDSIKIASFGITYWNELVKAYPSNVIYDELKFLARQYYQVTGMLVKSKVNFSNLLDQVMPKINDVLSNQGENHKLTEFVNRYIHFQNILDMGEMKFTSDYCKWAKKKGYRLNERKAAEILALAQNGIPTLPNSQSVKIAVSEAVKLIHSIEESRNTILAQMQDLCNTLPEYSVVKEMDCIGDTLAPLIIAEIGDVRRFKNKHSLIAYAGIDAPPYQSGAFHASERHISKRGNSYLRKTGYEIMQSLIKHKPADNAVYNFIQKKRSEGKCGKEAMIAGLNKFLRVYYGKVMEFYSEH

SEQ ID NO: 89078 - protein, 388 aa, unidentified
MQTVADRPEAPTAIRTDLGAIFVSLELSRSTWLITSLSPGGGEKMSKQVVRGGDVAELLERFARLREKARARTGKVFPFVVIQEAGLEGFWIDRALQNEGIESHVVDPASIATSRRRRRAKTDGIDGEALVRALLAYKRGEPRVCAMVKAPTPEEEDRRRLCRERKVLIGERVQHVNRVKGLLFSQGISGYEPLRRDRRERLDTLQTGDGRLLPDHLKAQVCRELDRLELLLEQIKAVEAERDVLLAAQQVAAPAPAAMLLDIKGIGPEFAAILWSEGLFRHFDNRRQVASYAGLAPTPWQSGSVDREQGVSKTGNPRLRTTLIQLAWLWLRHQPQSALTLWFEERVRRNGGRLKKTTIVALARKLLVALWKYVTAGVVIEGAVMKRT

SEQ ID NO: 89079 - protein, 352 aa, unidentified
MGRFPLSLLGLSGSWTAFGFQTSDGCVGVRARRHKGEIMKQVQCTTGVAGVDIGKRWLDVGFCHDEAHRRFANTTVGIAELIACMRKLGVGRIGMEASGNYEREVREALEAEGFAVVVFQPLEVKTFARWRRIRLKSDKADAHLIALATQAYEGVSARRDPELIELAELLTVYEQASDLLATIKTQAEHDRLTDVIALRDEMKAALSQTKKRALVLLLHRVRLRPDWLKRFDLLRSLPGVGQVVALALLIRMPELGEMKPGQPAALLGVAPFDRDSGTLKGKRFITGGRARPRTLVYIAALAAKRMNNAFKAFAKRLIDAGKPPKVAIVAVMRKLIEAANLILKRQSPWINA

SEQ ID NO: 89080 - protein, 469 aa, unidentified
MKRKSRRAKGQKVFPLSGDLKLIEPDAAAVDVGSRSHWVAVNPERDPNPVREFGTFTADLMSLADWFAHCEVKSVVMEATGVYWVNLYDLLEERGFKVYVVDAHTVRHLPGRSKSDVKDCQWLRRLHSYGLLRSSFRPPAQIRQLRNYHRSRSNIVDAAAQQQLRMQKALTLMNIHLHHVNSDISGLTGLSIVRAIVGGERDPKQLARLRDPRIRASKETIQKSLEGNWQEELLFDLKIALESYDHFQGQISAYDEQIRQALKEVPSKVDLLQEALPPGRLRVCRKRPGMSHQDQINLREELYRISGVDLTRIDGISLQTAQKVFFEIGTDVGAWDEEKRFTSWLGLSPNHCISGGKVLKRSRRKVVNPLSVALRLAARTLNNSHSALGANFRRLTAKIAMPKAITAMARKLAVLVYRMLKYGTQYVDKGMQHYESKYQATKVHYLRAQAAKLGMILLPKQPAGAGAAA

SEQ ID NO: 89081 - protein, 422 aa, unidentified
MKEESIEFAAYIGLDWADRTHVIRLRCAGSQAVEQREVTHTPEALAAWVSELQQRFGGRPVAVALEQSRGALVHALMSYDFVVLYPVNPKSLAKYREAFRVGGAKDDPDDAQLLLELLTLHRDKLRAWLPDDELTRTLGLLVQYRRQLIDERTSLTNRLTSLLKLYYPQALRWAGGLATQQAGEFLQHWPTLADVQRAPATTLRKFYLAQGCRKAELIEQRLREIKLAQPLTRDLAVITASVSMVQAIVNQLRALITAVAQMEKQITELFGQHPDHDLFESFPGAGPVLAPRLLTAMGADRQRFSVAREVQQFSGIAPVTERSGQSCWVHWRRACPKFVRQSFHEYAAQSIRWSPWAKAFYEQQRQKGNGHHAAVRSLAYRWIRIVYRCWQQRGPYSEATYQQALIKRHSPLAKLLPAPAQS

SEQ ID NO: 89082 - protein, 423 aa, unidentified
MRAIGIDVHRDFCEVAISEGGELRSAGRVPSTPHDLELLATSLAADDEIALEATGNALAIARILEPHVARVVVASAKELHAISGAKAKTDRRDARTLAKLLSAGLLEGTWLPGEDLRALRRRLSHRAQLVRARSRLKSEVHAALLRNLVGAPSATDLFGAAGRRWLAHLELPADERETLASCLRTMAFLDGEIAGFEQAIARFALSSPEIRRLVTIPGVGLLCAATFVAVVGDVRRFPSARRLVGYLGLDPRVRQSGSTAARTGHISKEGPSSARAALCEAAHAALRSPGPLRAFGGRIAARRGRQVAVVAVARKLAVIAWHLLRSGEDYAYANPAQVRLKWRRIELAAGAPSQKGRRTGVSLESHREREVALAAERAYRRLVADRQATGSKTGTGAAVGRASSRVLEGPSSAADLSAPASAL

SEQ ID NO: 89083 - protein, 369 aa, unidentified
MKHSIIFVGLDVHKDSIDIALADDGRNGEIRFYGTIGGDLDSLDKAIRKFRRSGVELRFVYEAGPCGYELYRHLTAQGFHCDVIAPSMTPKKSGDRIKTDRRDAVSLARLYRADELTPVYVPREDDEAMRDLVRGRGDAVNATRKARQRLSAFVLRHGFRYSGRNAWSAAHLKWLADIKMPHPAQQITLQEYINSIEESSERIDRLTEQILKLISAWRMAPVVAALQALRGVAAIVATTMVVEIGDLRRFENPRQLMAYLGLVPSENSSGRTTKRGGITKTGNSHARRALIEAAQTYSFPAKVSRELRKRQESLPREIKAISWKAQVRLCGRFRKLMAKGKNRNRTVTAIARELSGFMWAIAKEVPMPA

SEQ ID NO: 89084 - protein, 332 aa, unidentified
MSVYVGIDVHRNRSQVAVIDEGGKVLVNRNVTNGVKSVLSVIGSLPAGTPAAYEAAFGWGWLLELLEGHGFEPHMVHPLQCKAIASARLKNDKVDAAILAQLLRADLLPEAWIAPVGVRQLRAVLRHRAQLVRLRTLLRNRIHAVLADHGHGRPSGCWSGPGRAWIAALELPAVSREVIDDALALTDALQQPIDRLDAEVRQRAKADPRVKVLTQLPGVGMFTALVLLAEIGDISRFGSARKLASWAGLTPTVRGSDRTVHHGHISKQGPAWARWVLCEAAQTAKRHPDFAPGYEALARRRGRKIATTAVARKLITRAYHLLTDAASDGGPS

SEQ ID NO: 89085 - protein, 629 aa, unidentified
MLDETATHKLLTSVFYSENDDLVKRLDGGVQFAHYTSAETAMRIIQSKPPERSIWLRHSTEMNDFAEIEYGCYWLNKCLEDPAFNMKILHLAQALKLRPVELLRSISASTNQLKVGTYLLSLAEHGESDNTGTLSMWRAYGGDANVCIVLKAEPLAGDQDAYSVDLVAVDYKGEEGFKRRLKRLLDNIEGNLEALRSCDRGQVHANWLLAIDELVLSTKDPRPYVRAVKLARPRSKQETGVTPDGPAPIPMLRRGRTMREYNELFIGLDTSKAKISVAVAEKERNGEVRFFGDISAEPTSVASMVAKLAKRGATLHFCYEAGPTGYDLYRQIMGLGHQCQVVAPSLIPKRPGDRVKTNRRDAVSLARLHRAGELTAVWVPDEAHEAVRDLVRARECAHDALKKARQQLQSFLLRHGRIYPGRSPWTRAHFRWLAAQSFTHPAHHIVLAEYIQAIEDAAIREDRLTKQVAEVVASWSMAPVVEAYQAMRGIAFIAAVTFVVEIGDVRRFETAPQLMAYLGLVPSESSTGERVKRGGITKAGNRRARRVLIEGAWTYRYPARVSQTIQARLDGLPRSVREIAWKAQIRLCARYRRLITTGKLKTVAVAAIAREMAAFLWAIGQEVSPTVRA

SEQ ID NO: 89086 - protein, 307 aa, unidentified
MGESAVYVGVDVSKHQLDYARSDRDEVFTVPNTEVGVQELVEGLHEVSPALVVMEATGGFEVPAAAALAAADVAVVVANPRQVRDFAKSTGQLAKTDQIDARILALFAERVRPAVRPLPDEEARALDAIMTRRRQIIDMIAAEKNRLGFAVPAVQKGIKKHIRWLERQLADVDSDLDERIRSSPVWKAKSDLLQEVPGVGPNLARTLIAELPELGRLSNKEIAALAGVAPFPRDSGLMRGRRVVWGGRAPVRTALFLSAWSACRWNPVISVFYTRLRAAGKRPKVAQVACMRKLLTILNAMVRDGRR

SEQ ID NO: 89087 - protein, 474 aa, unidentified
MPVCFIHETIGEKEMKNNKQSKQVKSKRISKHLEQVNLFAAGIDIGSQSHYISVPEDLSTESVREFSCFTGDLNRMADWLVEIGIQTVAMESTGIYWIPVYEILEERGLVVLLVNSRHIKNVPGRKTDVLDCQWIQQLHTYGLLEGAFRPEEETVALRTYMRQRETLTQQSSDQIRRMQKALRQMNLLLDNVVSDIDGVTGMKIIRAILEGEQDPVILAKYRDGRCKKDEKMIAASLEGHYREEHLFSLKQSVELYDIYQTKITDCDKAIQAQLDKMDNKGDKKDLPQPTKSKSKNTPKFDVRGDLYQMTGVDLTRIDGLNESSILKILSETGSDISSWPTEKHFCSWLGLSPGNKVTGGKILSGKTKPSANRAAAAFRLAAFGLLNSKSALGAYCRRQRIRLGAPKAITATAHKLARTFYSMLKNGTEYVDKGQDYYDKQYQERIVNNLKKRATEMGFDLVVKEVKISELSNA

SEQ ID NO: 89088 - protein, 374 aa, unidentified
MNSMTGTIARAITIGVDTHKHAHVAVALSGLGEWLGAITVPASDRGYRQLLEWARALGEPTGFGVEGSGSYGQGLVRYLRRHDQRVVEVSRPDRRDRRQRGKDDTLDAENAARAVLAGKATATPKAADGTSEMIREIKVARDTAVKARTQSIVALKTLIVTAPDELRHELQPLSKAALRDRCASLRPGPMRDPLSACKHALRSLGRRWQQLNEEIRTHDELLDDLTRQAAPELRQAFGIGIDTTAEMLILAGDNPERIRSDAAFAKLCGACPIPASSGATQRHRLNYGGHRQANSALYRAVIVRVRFHQPTIDYVTRRTAEGKTKREIIRCLKRYLAREIYRTLTRPAHGAPTEEKELARTTTSTSTSTSTTTT

SEQ ID NO: 89089 - protein, 385 aa, unidentified
MSSHRYVRPGPGPSNTLITPDRAGNVVGVDPHKRTLTATVLDPRGGIVASEHFRVSGDGHRALEAWAQQFGQIVCFGVEGASGWGRHTAIFLVGRGYDVRDVCPNRTAHQDRARQRGKSDVLDSERIARETLAHPLLPKAFKRAGQDAGPDEQRELLTVWWRARCSLLQRRQHLLSEAEALLRDLPLALIERLPDTQKVRPRLAALTRHTRRRFDPPTTLRLGVLGAYRVEIAKLDAQEKAITRELATLVQASSSTLGELCGLATVSVAELLVEVGDPRRFTEGGFARFNGTAPLAASTAEGPGEPVRHRYNPGGNRRVNAILYRMAITQLRSEPRAQRLYAAARANNHTKKEARRILKRHLSDVVYRRMTRDLAAQLAQPLLAA

SEQ ID NO: 89090 - protein, 343 aa, unidentified
MKILRQVIGIDVAQKELVVCLGRLDEELTINIHSRKTFANTSKGFQALMAWKIKLTDPNVPTRFVMEATGVYHESLAYFLADQSEEVSIVLPNKISNYFKTLEVKTITDPTSAEAITRFGLERKLVSWRRPKPLFKTVRQLCRERDQIVQERTMVKNHLHAEMAEGEPNKTSLTRLEKRIAFLNKQEKQIKDEISLLVKKDEQVSQAVKIITSIPGVGALSAAVILSETNGFELIRNKRQLSSYAGLDVRDKTSGTSVKAKPQISKRGNRYLRKAMHMPALVAIRYDGHFKDIFVRLVSKHGIKMKAIVAVQRKLLELTYTLFKTNTPFNKNLVSIPSVEAQA

SEQ ID NO: 89091 - protein, 560 aa, unidentified
MNTIGVGIDTARYGHRVTFLDEARQQAAPPLTIQETQQGYGCLADTLCRLQNKFPEATLRVRIDAAGHYAANLEAFLRKLPLQLQISLGQPKQNKDYQQVHFPKRKSDDTDSQAVARFAVVEAPQPTAGCSPEILALREVSSWLQSQGTDCTRAINQLHNLLARVFPELATIVKNLAGTGILHLLSKYSTPNDIARARIESLKRIPHVKPELAERLQQAARISVASLRGEVAVQLVRHHVQQLKLRLKAKRQLERLLETTFAKIPSSACRQVATITGIGTATAAALVAKIVDIDRFTTPHQLVGYFGCFPEEHSSGVDKAGRPLPSQSTRISAKGNDLVRHYLWMAAKCASLHNPAIRALYQRQRAAGKRGDVAVGHCMRKLLHIIYAVWKTDRPFNPCHHPWEAPSVESPPEKVTESLKAEPAAETEVTSATVTTVAAERRGGNSLRHKRPNQSIDYRYLRQQLSIAEVLKLLNYPQPLSSAGTQVRGPCPLHDDRRRRPTFSINLEKGIFQCFARECKAHGNALDLWAKAKGLSIHQAALDLAEKLHLKLQWNREENP

SEQ ID NO: 89092 - protein, 355 aa, unidentified
MLYSGIDLHKDNCVISTVNQSGKMIKQSKLPNHNISIIRYFSGMGKQHKAVVESTANWYWLSDLLKENGIEILLAHAKYLKAISYAKVKTDKVDSQTLADLLRMNMIPEAHQISSDKRPLRDLMRTRLRLVTKRTSCFNSIHRLLGKYNIAIPKDRNLHDLSTLELLVNLPLQQDALFQLEILKQQIRLLHKQINTLEKSLHPRLIPNEDIQRLLWIPGIGKVLAFSIYLEVDGIDRFSDVNKFYSYSRLVPGADNSNRKQRHKSANKDGNRYLKIAFIEAGIKGRQYYKEIRQFYQSKASKKHKNIARNLVSLELARITYYVLKNKTDFNNRFKGRILSRQKITQWPRLANPGC

SEQ ID NO: 89093 - protein, 344 aa, unidentified
MGEVNTIGMDIAKSVFQVHGVDAAGSITIRKRVGRAKVLEYFGELPPCLVGIEACPSAHHWGRELQSLGHTVRFIPPSYVKAYLKRSKNDANDAAAICEAVARPSMRFVPIKTTEQQSALMLHRTRQLLVRQRTMLSNALRGHLAELGIVSAKGRNGTAELLEIIADGADSRVSPAVRGILEVLARQYGVIGTEMASIDKSIMALHRTCEASRRLAEIPGIGPVGATALVAEIGDWNAFSSGRSLAAWIGLVPKQNSTGGKDRLGSITKQGNRYLRWLLVVGAMAVIRYARKHGTQRRPWLARLMERRPTKVAAVALANKIARMAWAIMVGGEKYREPQLPLAA

SEQ ID NO: 89094 - protein, 414 aa, unidentified
MADEETISWFAGVDWGSEKHQVCLLDAQGTTAGEHEFPHSGEGLTELGDWLLSMASVASTVAVAIEVPHGPVVDALIDRGFVVYAINPKQLDRLRDRFSVAGAKDDRRDAYVQADGLRTDRRLFRRLQVADPRLIELRAWSRLAEELRAERVRLSNRVRHQLWRYYPQMQKLTDDLAAPWFLELWTIASTPAKAVRLRKSTVERLLKQHRIRRIDAETALRILREPAIKVAEGVAEAASIHMRSLVARLRIVNRELRKAERKLDELCTVISEIEQTSGEGLQRRDVEILRSMPGIGRINLGTLLSEASGPLSRRDYEGLRTLSGAAPVTKRSGKSVIVVRRYAAHVRLRDTVYHWARVATQRDPKCRARYTAMRKRGHSHGRAVRGVADRLLALACVLLQRQTLFDPYFGRLTK

SEQ ID NO: 89095 - protein, 410 aa, unidentified
MRRCFGLDVHREFAEVAIWEQGVVRSAGRIETTPEALRLFAGSLCGQDEVALEATCNTHAIARLLECHVGRVVVSNPTKTRAIAEAKVKTDKVDAQVLAQLLAAGFLPSVWLADDETQALRRQVARRSHIVRQRTRLKNRVQAVLHRNLVPRCPAADLFGHKGRAWLAEQELPSDERQAVEALVRQLDFHGEELKLIDAELARVALDREEVKRLMTIPGVDATVALSIVAAVGDFARFATPQKLVSYLGLNPRVRQSGGHPAAHGRITKQGRAHARGMLVEAAWVAAKIPGPLRAFFERVRARRGMQIAVVATARKLAVLCWHLVSKGEDYAFQRPSLTAKKLRALELRAGLPSRRGQKGKAAAYSLKEVRRRENELAEQGEHAYRQLVANWRAKAPKKAGAGAATGERL

SEQ ID NO: 89096 - protein, 326 aa, unidentified
MLYLAIDQHKNYLTINVRNEQGDVMQKGQISTNHVDLDDFFSTFAKKARKHRGYMAIVEVCGFNDWLLDKFKKTRCSEIVVIQPDNSAVNKTDKRDANALGALLWNNRKRLQGGQRPNGIRRIFPADPADAQVRQLANLRRHLIKQRTKTINKIKGVLNKHNMAQDAPTEIYSTKKFRRWITTAQLPVVDRIEVDVNIQSWELYDKQILEVEAELVKRSEVRSTDVFRLTAISGISAMGAITLLSRIGDIKRFKNPDSLANYFGLTPGCHNTGGKHRIGGITKRGNAIARQVLNFAVNHVVRKDPAMKAWHKRSKVDVERRPRGSL

SEQ ID NO: 89097 - protein, 370 aa, unidentified
MEQITRAGGVGEARGGAIVRVGADLAKRVIQVHAVDADGRVVCRRALPRDKFIAWCARLPAGCVVAMEISSGAHHWARRLRELGLVPRLMSAQLVEPYRSQGATGKNDANDAAAICEAASRPSMRFVPVKSVEQQSMLCVHRLREGIKADRTACINRIRGLLAEFGLAFAQSPEALRRVLADVLEDARNEMNTLARQAIQRAAEQWLQLDAHLQWCDERIARHARDNPAVKAAAQLMGIGPVGASAAVATVDDFKQFKSGAQFGAWCGIVPRQHSSGGKPQLGRITRRGDSYLRTLLIQGAKSAVLTAHKRQDPISRWAHALRERSGWQVAAVALGNKNARILWAVMTRGERFDAHHVSVKPGAPVPTMT

SEQ ID NO: 89098 - protein, 341 aa, unidentified
MNNNIIIGIDLAKNVFQVHGACRDGTVLFRKKLTRPQLKKFMSAQEPCLVAMEACGTSHYWARELSKIGHDVKLIPPIYVKPFVKRHKNDAADAEAITEAALRPNMSFVEPKSADTQAITMMMRTRDQLISQRTATVNALRSHLAEFGLIAPVGLKNVEQLRTRIEEAEDIPALVTEMVDMHFAQISNLSESIEALNAKIKAHCTLSASARLLQTMPGIGPIGAMVIEAFAPDMQSFAKGRDFAAWLGLIPMQNSSGGKTRLGRTTKMGQKDIRHALITGAMSCIASASRHGKRCHPWLQDKLDRKPKMVAAIALANKMARAIWAMLTKSEAYKAPIAMSA

SEQ ID NO: 89099 - protein, 310 aa, unidentified
MEITVGIDVSKAQLDVHVHPAGEALVLGNDERGVAALIERLGQLEGLVSIGIEASGRFERLAVAELAAAGLPVVVLNPAQVRHYGQAMGFRAKTDPIDARLIALFVAAVRPVPRPLPDAQTVELEALMTRRRQLVSMLMAERMRRQQAAPGLVRTSIARSVTDLEDHLRELDAHIDKTVRGTPVWRDKEDLLASVPGIGTTIARTLLAELPELGSLNPKQIAALAGLAPYTRQSGKWRGRSLIGGGRPAVRAALFMGALVAARHNPTLKAFRDRLVAAGKPKLVALIATARKLLTILNAIIRDQKPWRPA

SEQ ID NO: 89100 - protein, 436 aa, unidentified
MDIVHPLVAGIDVHKRQVTVAVRLPGDMPGERRQVVRNFRTFWRALQKMAAWLAELGVADAAMESTGVYWWPVYHALAGAGIEVCVCNAAHMHSVPGRKTDSKDAQWIAELHEYGLLRPSFIPAGEVAALRARTRYRKKLIEQRTGEGQRLAKVLEDAGTKIDSVASELLGKSGRLMIEALIAGQRDPVVLAGLAKGVLRRKLEELAMACDGRFTASHAQMCRLHLDAYDNLTAKIAELDALVAEAAAPFAALIARLQTIPGIGQRTAEVIVAETGGDMSRFPAPAQLAAWCGLAPGNRESAGKRMRADTRKGNKHLKAALTESAWATARTRTRPGARFRRLARRFGRGNEKKAAVAVARTLLCIAWMVMSTGDTYAEQGEDFYDRRDHRNRERTAARYQQALARLGYQVTLTPPADDPPPGSGPPPATAAQGQAA

SEQ ID NO: 89101 - protein, 341 aa, unidentified
MNTTTFGLDIAKRTFQLYWVEVETGEIANRRFTKQQLIEFLSQRAAGCVALEACGSAHWWARKIAGLGHKVVLLHARFIRPFVQNNKTDATDARAIWTAAQQPGMRSVAPKTADQQAILAVHRMRSLLVKSRTMQVNQLRGLLYEFGVTLKAGRVVGLAEVRERLHEIEQVVPGTLFGALRDQLHHIDLIDGEIRKLERQIVAWQRQEAACQRVAAIPGIGPLTATALVATIGDPAAFKSGRELAAYLGLVPRQSGTGGKLRLGGISKRGDSYVRMLLIHGARAVMFKSRSKGAWCEQLSLRRPTNVVAVALANKMARTAWSLLAHDSAYQKDYSSNDGLK

SEQ ID NO: 89102 - protein, 355 aa, unidentified
MSEDKYIGLDVHQATVSVAVLDREGKLTMECVLETKASTIVEFIQGVRGSLAVSFEEGTCAAWLHDLLQSHVSRLVVCDPRKNALLRDGSKSDRIDARKLAELLRGNQLSPVYHGDHGIRTLKELARSYLSLTQDLPRVMTRIKALYRSWAIPCSGTRVYATRHRSEWLAKISPTGVRRRAERLYQQLDLLRPLHHQARCDLIEESHRHPALKWLRQIPSIGPIRAALLVALLQTPHRFRTKRQLWAYSGFAVETHDSGEYRYVGGKLLRNRERIRVRGLSDNYNRDLKNLFKSTAISASTRPGPLRDFYLALLAKGMRPSMARLTLARKIAAVSLTIWKKGANFDAKQLSRQAA

SEQ ID NO: 89103 - protein, 431 aa, unidentified
MIEAATSIQPSDLPQECDIAHNWFVGIDWGNQAHQVYVLDRQRHCVGERVVPHDGVSLAQLASWLHNVADGKTHQVGVAIETPHGAIVETLLEQGFAVFAINPKQLARFRDRHTMAGAKDDRRDAFVLADALRTDLHSFRPVRLSAPELLMLRELSRAEETLLQEFGRTANRLRDQLHRFYPQMLQLCSGADEAWLWALLDLAPTPEHARLLSEEQVHRVLKAHRIRRLKPHDVLVCLQTPALHVAPGAAEAAQAHCGLLLPCLRVLAEQLRACAQQVNTLLSTLADALSEVGPSDVAIVQSLPGGGRKITAWFFAEAAQPLAERNYPVLRTHSGVAPVTRQSGKRRQVVMRRACNHRLRHALYHMARVAMQQDTHFANVYAALRAKGQRHGHALRNIADRLLRILMAMLRDRTLYDASLRYREQEIPMMG

SEQ ID NO: 89104 - protein, 312 aa, unidentified
MEARYVGVDVSKDRLDVHVLPEGAAFAVARDGKGLAELVERLSALQPERIAVEATGGFETIVAAALAGASLPLVIVNPAQVRHFAQALGRRAKTDPIDASMIARFVEATKPDLRPLADEATQLLADLVARRRQIIEMIVAERNREKRVAVRRIRNSIARLIAALEKELSEIDAEIDASVRGSPAWREKEDLLASVPGVGPITARTLIAELPELGTLDGKRIASLAGLAPFTRQSGQWKGKAMIAGGRKSVRSALFLASLAACRHNPVLKAFRQRLIDAGKPKMLVAIAAARKLLTILNAILRDKQPWRPENA

SEQ ID NO: 89105 - protein, 408 aa, unidentified
MEIVGIDWGRKKHYCYLLHQGKKLVLKNKEEDFAKLLKIKEAVYVIEDGNNRIVDYLLRNNRQVYILPSRRSSEARSFFVIEGKSDFIDSKVIAMTYEHNPEWCLQVKREGIAFELDVLVEENAVINVSMMQDIGRLDAYLERYWPEVKEVFSGTSARKLAFISICPTAKDFLSMSDKEILQKLKEMGFLINSNLKSKLKELRKIALERYVPASIRTLIVAFSRYAMEKKVMKEEIGKQMKEIIEESEFSVLFTLPGVGVIIASQLIVAYLTHKFSSYRDLQRYAGTTPTYYGSGNKNTTKMRSNCNHYLRGTLHIASLAATNSSKWMKRFYDNKKSEGKSSAHALRALANTILKIAFAMLRDLTPYSEEKFFKRNPLSDYTPSKKEGEQKPEYSLKVSSVATCRSTA

SEQ ID NO: 89106 - protein, 359 aa, unidentified
MDKYIGFDIDSKKTVACVVQKGKKEVYATMGSDVQSMRNFLKAQKADGSRVHLTFEVSGQAGFLYDSLIDCADTITVSNPSKMTWIYRTAIKNDRIDARKQAVLLSIGEIPRVHMPSVEVRQWRGVILHRRNLVNKVTEVKNRIRAVLKSQGFSRPLQKGSWWKRSNRLWMRELSGQRIISMELWRMNLGNFIEQLDLLEGQVKRVSEYLDEYLGRQAGGRLLMSIPGVGPRTAEAVLAYTDDVDRFGNTRGYCSYFGLTPRLDESGTSRRLGHISKTGPSVVRWLLCESSWKVIRKSGALRGFYERVKCGQENRKKIAIVAVCRKLLAIMRAMLTTGELYNEKLVGRECWNNETVKAS

SEQ ID NO: 89107 - protein, 415 aa, unidentified
MEVMHPRCAGIDVSKRDAKVCIRIQGSSGRRTSSTVTTWGAMTNQILALRDHLAAQQVTVVIMEATGDYWRPFYYVLETDFEVLLVNARSVKNVPGRKSDVSDAAWLADLGAHGLVRASFVPPEPIRQLRDLTRTRTHITAERTREVQRLEKLLESAGIKLSSVATDITGVSGRLMLQALIDSNGTADPAVMADLAKRRMRSKIPVLTEALNGRFTAHHAFLARLFLDRIDAHTRDIAALSERIDGLMTPLLPARELLESIPGFSQIIAEIFIAETGGDMTQFPTPEQLASWAGLSPGSHESAGRVKSTKTRPGNRYLKGALGVAALNQAKSKNTYFSARYRRLASTRGPMKALVAVEHAMIIAAWHMLSNAEFYRDPGADYYTRQDPAKTRARAVRQLEALGYQVTIQPAQQAS

SEQ ID NO: 89108 - protein, 396 aa, unidentified
MLYVGIDVAKRSHTAAAVGEHGCVVVAPFRFDSTAAGFTKLLKRLSENGVVPFSAAVGMEATGHYWISLFDFLVRQGFEVSVINPLQTDAFRRVETVRKTKTDSTDALQIAELMRFKTFEPSALGDETIQAMQQLSRYRSYLVEERTSLKNKLAALIDLVFPEYSSLFSDMFCATSLEVLKGFGTPKELLATSVATIEKTLCSFSRGRIGKDRAKALRAAAASSVGVSFRSDAMAFEIKLVVENIQFLGSQIKDLEDELERLLGKSAGRWLTTIPGIGVVLASAIASEIGDAKRFETPRKLIAYAGMDATKRQSGESDPKGHMSKRGCPHLRCSLMRAADTVRRFDPYFKDHYEMKIAEGKHHYVALSGVARKLAEVILALMKEQRAYEPVPPTAP

SEQ ID NO: 89109 - protein, 338 aa, unidentified
MSVVIGIDPHKGSHAAAAVDGEVAVAEFKVKASKRQTQELLAWAERFTDRRWAVESANGHGYLLAQQLVAAGEHVVDVPSTLASRARVLDSTRSQKNDANDARLVAIVALHQTDLRQVAAEDHVAVLRMLAGRHRQLSRLKTQAVSRLHAVLAALLPGGMSGELSSQKASRLLRRIRPKTMVETERKRIAHQHLAEVRRLEKELKESRGRLDVAVAVSGTGLTDVYGVGPFVAGLLIGYTGDITRFPTRHHYAAYNGTAPIEASSGGRKRHRLNPRDNRMLNHALHVIAICQLRQPHTPGRVFYERKIAEGKTKKEAIRALKRRLSDVVYRQLVADNK

SEQ ID NO: 89110 - protein, 353 aa, unidentified
MMNVIAIDVASEVSSVCVLNSRGQVKVKELVATKISEFKRIIKSVPRPRQLVFEEGTQAAWLWSELQALCDDTLVCDPRQNRELSGQFKTDENDTRNLGLRAQGNLLKRVWHGGQDLQALKESVRAYQSLTQESVRLKNQLKAVFRSRGIAVGQKAYSPKTRKQAAQSLAFAAQRERVMMLGVVLDAVAEQRAKALKGMTKLARKNKMYKPLRKVDGIGPIFGAMFISEVGDAKRFRTSRQLLSYAGLAIMTHESSEYELNAGRAVRKARALRTRGLVRRYNRTLKYVFKQAAMTLSRTKWSAQYQQLCENSKNSNNAQLTLARKLAGVMLRIAKTGEKYDIAKVFVAKKSSS

SEQ ID NO: 89111 - protein, 352 aa, unidentified
MVVLAELVDHVIGVDPDRDRVTAAVVSVGTQGELASKTFPATRRGYGQALRWAKTFTVDERRAWAIESTGSYGAGLAATLAEKGEFVIEFDHPATRASKDGAKSDSLDAVRAARETLGRKTWATPRSRGLREGLRTLIVARDSAKLARVAAINVLKALVVTAPVDLREELRGRTLGQLVDRCMHLRPDTAVDPEHAATKLSLRSTASRVKQLTIECRELEDAMLPIVREICPALLAEPGVGTLVAAQVILSWSHAGRCRDEAAFARLAGVAPLEATSGQNQTRHRLSRGGDRQLNRALHTAILARVKIHPETQSYLARRIADGKTKREAMRCLKRYYARHLFRLLESTPVPS

SEQ ID NO: 89112 - protein, 349 aa, unidentified
MNITTIGFDLAKNVFQVHGVSEQGKAVLRKTLKRTEVMDFFAKLRPCLIGMEACGSAHFWARKLSELGHTVKLMAPQFVKPYVKTNKNDARDAEAICEAVGRQNMRFVPVKTVEQQGLLSLHRARQGFVVARTAQANQIRGLLAEFGIVIPKGIRNLESRMPEILEDAENGLPATSRELFSRLFSHFRELNRQVGELELQIKVCHRESTQSLRLEAIPGIGPITASALVASIGDAKTFKNGRQLAAWLGLVPRQDSSGGKERLLGISKRGDTYLRTLLIHGARAVLLRLKCRADQTEGWLARLVQRRNPNIAAVALANKNARIVWALLAHDRDYQTGYVSARSAEAAAC

SEQ ID NO: 89113 - protein, 352 aa, unidentified
MFYVGLDIHDKRIAICVLNETGQIVRRAQVRTIDEMMRILEALPDRFGVCYEASCGYGHYHDLLKPIAARVTVAHPGRLRLIFRSKDKNDRKDAERLAKLLYLGEAPAVHVPSAEVRTWRELITCRGRVIAKRTRAKNSLRTLLRGAGVVPPRRPALWTKKGLEWLRRLELPTTSQQLRRDLLLEEIESLTNQVRRIEHELNHQAGRSPGVARLRSIPGVGARTAEAVVAFIDDPDRFANAKAVGRYFGVVPSQDQSGDRNRLGHITREGPAVVRQLLAEATWQALRRSPRVRAYFERVRRDDPQRKKIALVATAHYLVRVMLAMLKRGTDWEEGFAPADEPKGVAPAIAAI

SEQ ID NO: 89114 - protein, 343 aa, unidentified
MKITRVGVDLAKNVFQVHGVNRAGCCVWKRQLKRSNWLQVLTEKLEPGCEIGMEACGGSHHWARELQARGFRVKLISPQFVKPYLKSLKNDVNDAEAICEAMSRHHMRFVAIKTVEQQDIQALHRVREGLMQSRTAKGNQIRGLVSEYGLVAPKQLGPLRKAIPCWLEDAENSLQPAFRALLHGLWQDLQYLDERLEELDKEVLLLSERHPDAKRLKQLRGIGPLTATAMVAQFGDGRHFRRGRQAAASVGITPRHTGTGGKNWVSGITKRGNPYLRSILIHGARSVVSKAKHKDDRLSRWVTELAKRSHPNVAAVALANKTVRIAWAMLRNGADYDPEFTMA

SEQ ID NO: 89115 - protein, 409 aa, unidentified
MDQLIERCCGLDVHRDTIAACVRVPGPNGKRQHEVRTFGTTAVELLALRDWLEAHAVTHIAMESTGVYWKPVFYVLEEAFTCLLVNAAHIKQVPGRKTDVKDCMWIAQCLEHGLLRGSFVPPAAIREIRDLTRHRKVLIQERTRAANRVHKLLEDAGIKLASVATNILGVSGRAMLEALVHGTTDAEVLADLARGKLRKKLPALRQALAGRFRPHHAFLVSQLLAHVDYLDEAIATVSEEVEGRLAPFAAQLTQLDTIPGINKRTAEVIIAELGVDMSSFPSDRPLASWAGICPGNNESAGKHKSGKTRKGNRWLRMTLIEAAAAATRTKDSALQARYRRVMRHRGHKKAVVAVAHAMLRAVYHLLAEGTTYREPGAAYYDRRHTHRVTRRAIQLLERQGYRVVLEPAA

SEQ ID NO: 89116 - protein, 348 aa, unidentified
MIWIGVDAHKRLHEAIALAEAGAVGSRRIANDPKDWSALLDWARQWPERVWAVEGAWYLGRGLAEFLAEQGEEVHEVSGRWTAQRRRGMRRPGKSDRLDAHSVAMLLREERATLPRVHAEDDELASVQLWSRLEAEFSEDRTRLLNRLHNLLLLCDPGYAAGLPGLTTKAGITAARSYVAPGSRPVARERERAVRATAEQIALLDDQIAELRRKLERASKDSFRPLRAIKGIGAQITCTIIAELGAPRPGFGDEQLAALAGVAPLEASSAGATRHRLNRGGNCRLNLALHRVVLTQARTYGPARTYLARRRAEGRTPREARRALRRLICRRIIQAWRACFDQPLAAAA

SEQ ID NO: 89117 - protein, 315 aa, unidentified
MEQHTPTFAGIDVSKAHLDVYLHPDGSHRRFNNDKTGWRALRGWINDVRLQGIFYEATGSYHKGVERYLGKHGLPIARLDPRRARKFAQALGIIAKTDPIDARGLAHFGAFLKPPTISLPAPAFEQLKELVAARRGLMQQRTRIINKSKTVSVPLLKRQLRLSKEQIARQIVQVDEACQKIVKSDPVLTQRLTILKSIPAIGDVTALTLLAEMPELGDLNDKQAASLLGVAPMARDSGAWKGKRFIRGGRATVRRAVYMAALSAMRFNADMKVKYHALVKAGKPPKLALTVIMRKLIILANALIRDNRQWSEVRP

SEQ ID NO: 89118 - protein, 333 aa, unidentified
MKVFYLGVDVSKKKLDLCLRSNGKDILYDVIPNDLSSIKSWLTRTFEKFFLSEDSLVVCAEHTGQYTYPLVCATKSIGVYLCLEDAAKIKYCHGIPRGKNDKIDACRIAMYAERYNDCLQPYTASELIIQKLKNLSTERSMLVADRAKYQSQLKDQVDYMEHSIYIAKCNRVEGIINTFTDYIAQIDLEIKELINQAPVIAHQMDLLMSVDGVGERVALKMIMETDAFTSFTDPRKFCCHAGVVPFVYVSGSSQRSKNRVSNRADKSIKHLLHMAALSVSQVKNSPLKKYYDRKVEEGKNKMSVLNAVRAKLVTIMFAVIRDECFFIIGIDKM

SEQ ID NO: 89119 - protein, 402 aa, unidentified
MQEGTMPTIWVGIDAGKWKHHVVLLDAEGKTLLSQTVKNDETALLELLSSVIALAAGAPLRWAIDLNSGGSALLVALLAAHEQELVYIPGRIIHHAAATYRGDGKTDAKDARIIADQARIRSDLRPPKERDQASVDLHLLTARRLDLVHDRVRTINRLRATLLEYFPALEASFDYSKRQAALLLLTKYATPQTLRRAGKARLTRWLQARECRTAGQVADKALAAAAAQATQLPTQTVAAELVAELANDVLRLDSDISRVDSQIKARLQDTTSGALLQSMPGFGPVLAAAFIARTGSDLTEFESPDHLASAAGLAPVPRDSGRITGNNHRPKRFDRILLRTCYLAAHSSLKNSPASRAYYHRKRSEGKSHKQALIALARRRLNVIWAMLRDQTPFQEPAANAA

SEQ ID NO: 89120 - protein, 387 aa, unidentified
MPRPNDLSRCLGSFEQDACLVAVIELSQSSWLIAGAVPGIERQPLKKITPDETALLRLLHRWRDEATRSGRTITRIAVAFEAGRDGFWLARWLTGHGVEAHVIHPTSVAISREHKRAKTDRLDTAMLMRVFLGWLRGERGHCGMVAVPTIEEEDARRPSRERENLVGERTRIVNRMKAALARLGIRGFKPELRKASRLVESLRTPEGLPIPPNTLDEMRRDLARLAILREQIAAVEQARLDRLEQTPQAGPHAMVRLLASIIGVGVETADMLVQEVLSRHLRDRRAVARYAGLTGSPDESGSKRREKGLAKSGNARARRGLIQLAWRFLMFQKESALAQWFRSRTEGARGARKTTMIVALARKLLIALWRMVTTGEVPQGVVLRQPA

SEQ ID NO: 89121 - protein, 364 aa, unidentified
MKTKTAPSVVLTSPAVPSGFTLGLDLGDRSHHVCVLGAAGQIIREASLPNTRPALAQLLAEFPGSTVALEAGTHSPWISRYLTGLGATVIVANPRKLHAISRSERKCDRRDAQMLARLARVDPALLHPIAHGSAQAQHDLLGLKLRDALVRTRVNLINAVRFTLKSLGHPVRNPSSEAFHKNVLADIPGDCLPVVQPLLTVLEQITSHIKALERDLVQRSKKDYPATQRLQQISGVGPLTALCFVLKIGDPQRFHRGRDVGAYLGLCPRRDQSGGTDKQLRISKCGDGLLRRLLVSAAHYVLGPFGPACALREHGQRLTGTGSAREKKRAVVAVARKLAVLLLSLWKHGTDYEPRATARVTTPA

SEQ ID NO: 89122 - protein, 360 aa, unidentified
MGNERTFVGLDVHARSVTGHALDAVTGEVWQRKLCPDPGEVLRWVSGLPGPVKVGYEAGPTGYGLYRCLNDHGVLCVVAAPSKLHRPHGDRVKTDARDAELLAHLLKLGGIVEVNVPSVEQEAARDLVRAREDARADLMRARHRVSKMLLRQGIVYSAGDTWTKVHDSWLRGQRFDQQSRQLAYDSAYEAMVLTVDRRNRLDRAIDEMAANSSYTPVVRRLGCLRGISTLTGFALAVEIGDWQRFTGATIGAFVGLVPTESSSGQSRSQGSITKTGNTHARRLLVEAAWHHAKPYRVPGKTMRDRWELAPPAARVRGHEGNRRLHQRWQRFNARKKRPAVADVAIARELAGWAWSLALLE

SEQ ID NO: 89123 - protein, 454 aa, unidentified
MGRAQSKAIAWEAMLVVNPNAAGLDIGSEEIWACVPANRAEQPVRKFGTYTPDLYALADWLQRCGIETVAMESTGVYWIPIYEILEARGVEVYLVNARHLKHVPGRKSDWQDCQWIQRLHSLGLLNGSFRPEGDMCALRAYRRHRATLIEHRAAHIQHMQKALHEMNVQLTQALSDITGVTGLAIIRAIVGGERDPLILAQLRNPCCAKPEAELVKALTGNYRAEHVFALKQALALYDVYTEQIRECDREIERQYSVLKPIHDDDLPPLDTSDKKNTHSKNGPSYDARTLLYQLLGVDLVAINGLNASTVEDIISEIGTDIECWPTDKHFCSWLGLAPHNDISGGKVLRSHTLKTHNRAGQAFRIAAQSVGRTQTALGAYFRRMRARCGPQKAIVATAHKLARIFYFMLKHRTPFHDIGADEYDKRQREREIARLHKRAAKLGFTLTQLSAQPA

SEQ ID NO: 89124 - protein, 428 aa, unidentified
MNPNDSTNTNDQTDPSAQPPQACIGLDWGDQKHSFALQARGGPIETGVLEHSAENLHRWLKELEQRFGGRPVRLGLETSRGAVIAALRHYPWLEIYPINPVTSSRYRSAFKPSGAKDDLPDALVCLELARDHAAKLRPLQLQDPQTLKLAGLVEARRDLVDRRTTLLNQLTSLLKSYYPQALVLLENLNTPMAVAFLKRWPEVISLKAARPAAVKNFFYQHNVRSEELVKKRLALMAQAVALTTEEARVSVAVLQLRALVDQLEVFQKHVARMDAEIKSAFAAHPDAALFRDLPGAGAQMGPRLCAAFGTDRAAYPDPASLQKYAGLAPVREKSSGQLWTHWRWNAPRFLRQSFVEWAGQTVRYCEWARVYYERMSKKGKKHAVILRALAFKWIRILWKCWQERIAYDDARYLKQLIHRKSPNAVTAP

SEQ ID NO: 89125 - protein, 419 aa, unidentified
MKTTKTKKIKTINKKTLIVTMDIGKTVHFGYFRAPNGKDIKPFPFYNFEKSFNEFWNKICKFKTEQNLEEIIVGFESTGPYAEPLFHFLRKKPVNLVQVNPVHTKRVKELEGNSPNKTDKKDPKVIADVISLGHALTLIVPEGASAQLRRLSQARERAIKGRTAMINQIQDLIFVIFPEFSQTMKNTKTKSSKYLIRNYPAPDSIVKLGLETLTMTLKKVSRGQLGQERAKALFKAAQTSVGIKEGRESILIEIDHFISNIEQKDQFINGLEQQMQKYLIQVPYSHSILSIKGISNVTVAGLIGEVGDFKKFNTISEITKLAGLDLYEISSGSHRGRHRISKRGRPLMRKLLFFASINAVKSGGIMHETYKQMLDRGMIKMKALTAISRKLLCIVFALVRNNTEYVMNYSNDHHNKLAA

SEQ ID NO: 89126 - protein, 543 aa, unidentified
MIMSTLQRISGARVQQQTEQTENQISLLLGANPREVIRQNQFNEDLFPPEVPTGMPSALLERRPDIRAAEQNLIAANAEIGVARAAYFPRLSLSGFLGGQSSQLSSLFSGPHSSWSFVPEVSQPIFTAGRIKSTVRLAKAQKDSALVQYQRTIQTAFTEVSNALIAHQRVRESRVHQEALVTAIVDRKRLAYVRYVGGVDTHKDLHVAAVVDEQDRVIETRSFATTRQGYRQMLAWMRAFGDLQRIGVESTGSYGAGLLRFMQQAGIAVLEVTTPDKQDRRRRGKNDDLDAQNAAHAAFAGQRTVTPRSRDGMIESLRVLMACRKTAVSARRVALQMIHNTIVCAPDGLRDQLRSLTRMQLVRTLASWRPDLTAYRDLESAYRIGLKSLARRYLELHDEIADLDAMIAAIVEELAPNLIARNSIGHVGAAQLLLTAGGNPERLRSEASFASLCGVSPVPASSGKTVRHRLNRGGDRAANSALHIIAIGRLRTDQRTKDYVARRIAEGHSKLDAIRALKRYLAREVFTLITQRRREINATRIAA

SEQ ID NO: 89127 - protein, 317 aa, unidentified
MGKYTTVCAGIDTGKHKLDVAIDGGAQRVQVDNNSEGHRSLSAWLRQREVERIGIEASGGYEQAVILSLRADGFVVIVFQPVQVRAYAKFVLQHAKNDNIDAVLIARCTAAAIEIHEPPDARLAPLAQHLTMIEQLTEDVGQLKTRREACREERIREFWKQEINRLKVLLNRELKQLVTVIREYRDLANRLDLIASVDGVGLRTAVAILVRMPEIGRVTREQAAAIAGLAPYDDDSGLRRGSRHIKGGRQRLRQSLYAAALPAVFYWNPQLKAFYRRLLVAGKPHTLALVACARKLLIFVNTVVARGTSWRSSAVTT

SEQ ID NO: 89128 - protein, 437 aa, unidentified
MLPTSHTIQSAGRARHTKNAMNTENYGALVTLDWGETEHAFATEVAESPANTGKIPATPESLHGWLEQIHERAGGRPVAIALEGGKSAVVHALLEHPWLVIFPVHPATSDRFRKAFTPSGAKDDIPDALVLLTILKQHRDLLRPLKIESPQTRKVEGLVAARRQAVDRRTRIACELGSTLKTYYPQALELCGREPATDLMLDFLTRWPELKSLKAARPASLRTFYAAHNSRHADVIAERLALIAQARALTEDRAVIEPAMLEVKMLVDLLRPLQKNIALIEERIAEAFEAHPEADLFRGLPGAGPATAPRLLAAFGTDRSRYPDACSLQKYAGIAPVTQKSGRSLWIHWRWNAPRFLRQTFVEWAGQSIPKCAWAKAYYQQQRAAGKHHQATLRSLAFKWIRILWRCWQDRIPYDEARYLASLRQQKSPLAARLAIT

SEQ ID NO: 89129 - protein, 352 aa, unidentified
MTRITTIGVDLAKKVFQIHGVDAEGKVVVARKLRRKEVLAFFAKLAPCLVGMEACGSAHYWGREIAKLGHTVKLMPPKYVKAYVKRGKTDAGDAAAICEAVTRPSMSFVPVKGIEQQGLSMLHSARTQLIGQRTQLINGVRGHLSEFGIIAARGLLGLAELAAIVRDKSNRRLPATARAALMILVRQIGAVSAEIAELDTALRKDNNASELGPRLETIPSVGPVIASALRARVTDARLFENGRHLSAWIGLVPENDSTGGKIRQNGLSKKGDRYLRSLLVNGAMAVVQQALKRPDKNPWVTKLLGRMTAKQAAIAIANKTARISWAIMVHGGVYEAGHRAAHYRAEACALTG

SEQ ID NO: 89130 - protein, 496 aa, unidentified
MSMHYTTKQKVEQVKEKLLAAIDVGKRSLHVKYMDYTRKVHNRKAYRFDNSSKGFEDLIDCTKKMCDSLGLEEAVFGMEATGHYWQNLAVHLEILGYTLVTVNQNHTKKVEEIVDGSQRKDDDKDPEGIGILMALGDWSPYYRPEGDYAEIRKAYRLLEWCTEDTTRYTNKLHGYLDKHLPGYEPCFGKEKGVTGALSLAVLKKAALPEDIINLGAEGIINIWKEAGLRGTKNRAEKIVSAVSGNKGYAITDGSQTCRLELACIVRELELAIRTEKEAEEQVRKIVARIPGAQRLLGIKGISYRTVAGFFAIVGDLKKRFSNVKQIVKLAGLNIVIRSSGTYKGEARISKRGCPELRAALYRVLTALLENTPAFKPLRDHFMKRTDNPLNAIKANVAMCNKLLRIFYAMVIHDEDYDEKKMLGDIKRMERTKVSQAAVEAGKLKNELDMILYGAKGKEVTNEMIESIRKVGKAMKGLVAVAERGTVKETLPQAVGG

SEQ ID NO: 89131 - protein, 373 aa, unidentified
MSKVSKFVGLDVHKETIAVAVARGDSAAESLGSIPNDADAVVKLVHRLGADDGLWCYEAGPCGYELQRLLSELGVNCIVVAPSLIPTKPGDRVKTDRRDALKLARLLRSGDLTAVWVPDAAHEAFRDLTRARQAAQEDLTRVRHRLTKLLLRLGVRAPATAWSKAYRQWLDALTLPQSLQQLVLDETRLAVAQGEQRVERLTAAITEAASQVSQAAPIAAWQSLRGIRLTTAAMVGAEIGDVTRFRSPRELMAYAGVVPSEYSSGGSTRRGRITKTGNAHLRFALVEAAWHYRHGPRLSKALKARQQGQPAEVLAIAERAQRRLNSRYRHLVARKTKQQAVVAVARELLGFIWAIAWAVHPDQRLRPAQRQAA

SEQ ID NO: 89132 - protein, 391 aa, unidentified
MSMYFIGIDISKYKHDCCIISAVDQQIVSKFTITNDKDGFEQLLISLNSLSNPEDIKIGFESTAHYALNLELFLENANHSFMEVNPVLIKEYKKSTTLRRTKTDSVDCESIARWLMTVEYKPHSKGFYHAYSLKSLTRLRDRLIRQRSFYLVKITNVLDHTFPEFKPFFNERLSKTAIYLLENYGSAEKMAHMNSASYDKLRCISRGKFSIQQFLHLKELAANTVGVNNSIFDIELNSLLTLYNSLCKEIKNLEAEITRLIEEVHPHYMSVPGIGPLSAAVIYSEYGDISNFTNPGQMLAFAGIEPGINESGTESHGGKMVKRGSSQLRYTLINCCLPLIRFDMTFATYYAKKRAEGKKHRVAITHVAKKLIRVIYALERQDVDFNAQKIR

SEQ ID NO: 89133 - protein, 340 aa, unidentified
MAIEMKVVGLDVAKNVFQVHGVDRRGETILRKRLRRPQVTEFFRHRTPCLIGIEATQGAHYWARVLRALGHEVRLLAPQFVKPYLKSQKNDANDAEAICEAVSRPNMRFVPSKSIEQQDLQALHRIRSRMIGSRTQLGNQIRGLLAEYGIVLPLHLSQVRAALPRLIEDDNPLLSGFGRQLLAALYEELCALEQRIEKIEEQVQQIHRSNPLCQKIAAVEGVGPVTATAVVAAIADGRTFHSGRQFAAWIGLVPRQHSSGDKQRHFGITKRGDPYLRMLLVHGARSVVYRAPNKNDSRSQWIAEKQRKLGTAKTCVAVANKNARVIWALLVRDEPYRRAA

SEQ ID NO: 89134 - protein, 376 aa, unidentified
MKKSTGKAMRFVGLDVHAETIAVAVAEAGGEVRSMGTVPNREDPVKRLVRKLNAGGPWEACYEAGPTGYALYWQLTKLGIVCTVVAPTLVPMKAGDRVKTDRRDAERLARGFRAGDLTAVWVPDPSHEALRDLVRAREAAKRDQLRARNRLSKFLLRHGRRPPEKMKAWTQVYITWIKSGVNFSEQAQQWVLEDYVDEVEHCSQRIKRLEGLIDEAVKTAPETMREVISALQALRGIAAMSAVTIVAEVGELSRFATARQLMGYSGAVASEHSSGQRIQRGHITKTGNAHLRRIVVEAAWSQRFKPILSRALKLRQEGLDPQIIGIASKARHRLHARYMQLLGKGKNKQQAITAVAREMLGFIWAIGVAVERKGAA

SEQ ID NO: 89135 - protein, 412 aa, unidentified
MSFALPDALFFTGIDWAAETHAVCVLDAAGKIAAEFVIEHSADGIATLIRRLARYGDPSDLPVAIERPDGRLVDLLLEAGHPVVPVKPNAIKTWRDGEVLSGAKSDAGDAAVIAEYLRLRAHKLKAAAPYSDKTKALRTVVRARGDLVEMRVAATNQLAALLDAHWPGAKAIFADVESPISLEFLTCYPTPAAAAHLGEKRMAAFCAKHSYSGRRTAAELLTRLRSAPAGATGEALTEAIRDTVLAAVAVLAALNASVKNLDRSTAAHLGEHPDSAIFTSLPRSGQVNAAQVLAEWGDARPAYEHPDSVAALAGVTPVTSQSGKHRAVHFRWACNKRFRVAITTFADNSRHASPWAAKIYNDARASGKDHPHAVRVLARAWIRVIWRCWLDGVPYDPAAHGAAAALAKQIAA

SEQ ID NO: 89136 - protein, 385 aa, unidentified
MRRAKKRGPGPSHVLMTPDHAGNVVGIDPHKRTLTATVADARGGILASAHFRVSGEGHRELEAWARQFGQIARWGVEGSASWGRHTAVFLCGRGHDVRDVCANRTPRSDRARQRGKSDMLDSERIAREVLARSLLPKAFKRAGQERGPDEQHQLLALWNNRRRSILTGRQHLVGEAEYLLCELPLELREQLPDTKAVRPRLAALARRNRRCRYDAPTRLRLQLLDGYRAEIQALDRQERQVVAELEELVRHSGSTLGELCGLSTRSVAELLVEVGDPQRFTEGGFARFNGSAPLPASTAEGPGEPVRHRYNPGGNRRINAVLYRMAVTQLRCEPRAQRIYANARAGGHTKKEARRILKRHLSDVIYRRMIRDLEPQLTDQPLLAA

SEQ ID NO: 89137 - protein, 341 aa, unidentified
MGEVSTIGLDIAKSVFQVHGVDVAGSVVIRKRVSRAKLLEYFGGLPRCLVGIEACPSAHHWGRELQALGHRVRLIAPSYVKAYLKRSKNDANDAAAICEAVTRPSMRFVPIKTKEQQTVLMLHRTRQLLVRQRTMLSNALRGHLAELGIVSAKGRNGTAELLRIIADRRVSPAVCGILEVLARQYGAIGTEIASIDKNIMVLHRACEASRRLAEIPGIGPISATALVAEIGDWKAFGSGRSLAAWIGLVPKQYTTGGKDKLGRITKQGNRYLRWLLVVGAMAVIRYARNHGTEKRPWLGRLMQRRPTKVAAVALANKIARMAWAIMVRDERYKEPKPLLAA

SEQ ID NO: 89138 - protein, 406 aa, unidentified
MNYLGIDVSKATSRYVFLDNDGEKLVKPFTLDNGHNDFNKLLDRLKELTLLPDNLLVGIEATGIWWENIYSLLTEHKFKVIVLNPHQTNKFREALRIKAKTDDIDAYVIAGLLRSQEYASSYIPEESIQCLREITKLRFQLVKDRQNYERQTNALLGLLFPELAQTAIKNPFAVSSMAILKAYPTAKHLAEAKPKNIEKIVRSIKGNNFNIQEIQSLIECAQKSIYSGRAKHDRGLNLIILLTQVESLQRAIAQLDERTNNILSPSDSNDANSFPGANLLTIPGVGPKTLAAILSAVGSDGQAFPDGKHLIGHIGFFPKIYESGETRHDNTMSNRGPKYLRAALYMSAVACLKHNPEFKALYDRKVSQGKTAKQSLVYVAKKLAHLCLSMLKSGEDYNPSRVFMPA

SEQ ID NO: 89139 - protein, 379 aa, unidentified
MYRILKIGMDVHTTNYTLCALESKFGTDDQVLANITVGPEHRNILDFIRRIKEKMDPKGQDQIDVECGYEAGCLGYSLYHTLTAYKLKCTILAPTTMLSEQGPRIKTDRRDAALIAACLSNGGFHAVHIPTDEDNAVKEYIRMRDDHKVALKRIRQQIGALCLRFGSIYSGNCWTGVHLNWLRTLKLPEMIREILNEYLATHDHLTATIDRLDKRIQEIAAQTQYREKVRKLECFLGIKTHTALSLIVNTGDFQRFRKGNIYAAYLGLAPGEHSSGESGGKRGITKAGNTHLRVLLTEAAEGICKGQIGRKSKVLLARQSGNPVEVIAYADKANIRLRSKYYRLIRHGKKRNVAVTAVARELACFVWGMMTDNIHGNVA

SEQ ID NO: 89140 - protein, 340 aa, unidentified
MIIGCDFHPRFQQIAYVDLETGEFFERRLNHPEEAERFYRSLAGTQVRIGLEATGNFRWFRQLIDGLGHEFLLGDPSAIRAASPRRQKTDKRDARHILQMLLEERFPAVWQPSMENEELRQLLLHRCRLVRLRTRITNQLDSMGKNEGLLGSKSWSAERRRRIEALPLSGWYMRRRVDLLDLLDELEKRIEPLEKAVVEAAEKNQQACLLMTHPGVGPIVSLVYVLTIGDWKRFPRSKELASYLGLIPAEDSSADKRRLGHISKQGNTLLRWLLVQAAMGAQRSDPSWHRRYLRLSLNKHHGVAKVAIAHKLAVRLYWMLRSGQNYKQLMERGSHVGQPV

SEQ ID NO: 89141 - protein, 351 aa, unidentified
MTNYKIGCDAHKHFSQFAVRDANGRLCQQRRIEHEPGAIRDFLVQFPSGTPVALESVGNWYWIVDEIEAVGCIPHMAHAAKAKVMMGNIHKTDKLDAAGLAVLEHLGTLPKVWIPSGEQRDRRELPRTRMALKKHVVGLKNRIHATLAKYAICIEAKDIFAGTGRRALEGALTSLPKETSYCASQELAVLDAVEAQIKNLEKRIKQQNAQTPSIQLLKTLPGIGDILAIVVDCEVGSISRFAYCDHFASYAGVVPKEQSSGGKVRYGHMLAESNHYLKWAFIEAANVISSRRNAPTWRNKHVVQLYERISSKKGHTKAIGAVARHLAEATFWVLKKGEPYREPKPHLPKQA

SEQ ID NO: 89142 - protein, 389 aa, unidentified
MLYVGIDAAKDKHDCHIFDSEGEVLCDNSTFANSKEGFQKLLELIKKFGKARGKTKVGLESTGHYSHNLLAFLEANDFEVVVFNPLSVNQSRKAGSLRKTKTDKNDARYIASLLVPDSSKPYQQQSYHIQELKSLTRARYRLVKEIQPVKNRYRRLIHILFPEIQRFFCKIDLPAVLGLLKELPSALDIASCNILTLTRILSQNSRGRFKRDKAEKLKSLAQNSIATYNRGDALELKLIVQRIEFMNAQKSELENEIKSIMLKLNSPITSIPGIGDILGAVILSEIGDRSFDTPAKLLAFAGCEPSSYQSGNYTATRTPMVKHGSKFLRNALFLATKAARLHSPSFTAYLARKKSQGKHEYVAISHGMKKMIRVIFSVLKSNTPYIEPI

SEQ ID NO: 89143 - protein, 337 aa, unidentified
MYLIHKRMKSWNVIFGVDVSKLTLDICCAERSLHVKIDNCSKGFEVFRKWCKAHGIRLGDSLMVMEFTGGYEYRFIQFCQSLSISYCRIPGLEIKQSMGMTRGKSDQADAFRIGQYGEEKSKRLEPSKPLDNNIVKLKQLLSFRKRLVREKAGLESTIKERKCMYTITKADTIIHIARAKIKANEKYIALVEKEIGQIIQSNESMLQNYRIITSLKGIGPVNAWMTIAYTENFTSFTDPRKYAVFVGVIPFEHTSGTSIKGRRRVSHLAHKELKQELNQAAKTAIVHDPEIRAYAERKLKNKQYPLVLNNVKFKLILRMFSLVKRGVKYVENYQKAA

SEQ ID NO: 89144 - protein, 356 aa, unidentified
MSQNLDSKVAVIGIDIGKNSFHIVGQDRRGALVLRQKWSRGQVEARLANLPPCLIGLEACTGAHHLSRKLQALGHDARLMPAKYVRPYSKGEKNDYRDAEAIAEAVQRPTMKFVATKTADQLDLQALHRVRERLVSQRTGIINQIRAFLLERDIAVRQGLHSLRAELPGILGTRTDVLSPRMLRVIEDLAGDWRRLDERIEGLSGEIDALAHHDKGCERLMTVPGVGPIISSAIVAAIGTGDAFSKGRDFGAWLGLVPKQMSTGDRTILGSISRRGNRYLRKLFVQAAWVVLVKLGPEQWERYGLKSWIEAAKKRLHHNVLAIALANKLARIAWAVLHKGRAFEYVKTNATASRSA

SEQ ID NO: 89145 - protein, 343 aa, unidentified
MGEVSTIGLDIGKSVFQIHGVDADGAVVIRKRISRAKLLEFFASLPACLVGIEACPSAHHWSRRLQALGHTVRLLPPSYVKAYLKRSKNDANDAAAICEAVTRPSMRFVPTKSEEQQSGLMLHRSRQLLVCQRTMLSNAIRGHMAELGIISAKGRNGTAELLEIIADEQDGRIPAAARFSLAVLARQYATTRSEIVAIEKRIHAWHRSSEESRRLEEIPGVGPIVATALVAEVGDWKTFSSGRSLAAWIGLVPRQHSTGGKDRLGSISKQGNRHLRWLLVAGAMAVIRYARQHGTKRLWLARLMGRRPIKVAAVALANKIARMAWAMMVRHERFEEPKLLPAA

SEQ ID NO: 89146 - protein, 344 aa, unidentified
MEHYVALDVSLRDISVCVIDGKGAVVFEGKTAAEPVGLAQLIRAKAPQVVRVGMETGATSPWLFHALTAAGLPVVCMDARQAHAALSLRPSKSDRSDARGLAEMLRMGWYREVHVKSVAAHERRTMLGVRHQLVTMRAELDGQIRGVLKTFGLILGAGNSDALIRRAEELADGHPMISGLVAKLAEVRRLVVLQVAAIDREIRRLVRSEPTLKRFMTVPGVGPITAVTFLSTIDDADRFKHARDVGPYLGLTPTRYQSGETDRQGRISKCGDTFTRTCLYEAAHVLLTKVQRFSPLKAWGTRLVKRIGMRKACIALARKIAVVLHRILVDGTEFRWTREEAQVA

SEQ ID NO: 89147 - protein, 385 aa, unidentified
MSSKAFVPRDYDVFAGLDVDKKSISVTFTNHQGFIRSLHMPYSVEHLVNHVRKHFPDQKVAFAYEAGPTGYGLYDGLVANSYPCLIASPSMIPKAPGQRVKTNRIDSVGLAENLRGGQLKSIHVPSPVYRELRHLTQLRDTFVSEMVGMKQRIKSLLLLEGIGFPPAPAGSQWSFMVKAKLRKLPCSGTVRFKLDELLDSLEFNEKRVVKTTQQIRRFCQTDPELSRCMKYVMSVSGIGSIVASQLLARIGDWRELKNIRQLGGFLGLVPTEHSTGDRTDRGSITHTGDGRLRSKLIQASWSAIRQDDELREFFGSVCQSHARHLASRVAIVAVARKLSVRISVVLMKQRPYVVREKVQSAPLTQEETSPQGTTRRQAEPGNKNS

SEQ ID NO: 89148 - protein, 371 aa, unidentified
MKSILSVGMDVHKNSFSLCAYDGYTGEIVSESTFASDVKLVIKFIEALKSRYENDVEIKCGYEAGCLGYSLYKLLTARGVDCVILAPTTMQVSAKNKMVKNDRMDALNIAKNLASGSYKSVYVPDEEDVEIKEYIRMIHDFKKELKRVKQEICAFVLRHGYQYDGKSKWTIRYMNWIRELEMSEIQRETLNEYIAEMENLNDKIDRFKNRIDEMYQSDRYNEKVSKLRCFKGIETFAAMTIQVETADFERFPSAKAYASYTGLTTGEHSSGDKNNRIGITKQGNTVIRKTLVECAQSLVKGNVYAKKSQGLKSRQKGMDVNIIEYADKATERLKKKYQKLIERNVPRNKAIVAVARELACFIWGMETGNIH

SEQ ID NO: 89149 - protein, 343 aa, unidentified
MYFIGLDVHKKTISYCVKDAAGRVYQEGKVGSTRWELDEWIRTMPQPRTIAMEATIFTGWIYDHLLPHAEKVKVAHPLMLRAIAAAKKKNDRIDAGKIADCLRCDFLPECHMASTEIRDRRRTLRYRSLVVRQMVQMKNRVSGLLMESGVSYNKQRLHKVGYFAELMTSNEDVQESIRPLLKLSREMIRRSQKLDYALVSSLERDPLLKERLRRLRTVPGVGPITALTWALEIGDFTRFSSIKQAISYCGLCGDEKSSADKVMRMPISKQRNKHIQRVLIEAAKLAPRQSPELAVIRARELERGNPNRATLAVARKMVSYMLAVERRGQDFVPAEEFSRTAAA

SEQ ID NO: 89150 - protein, 314 aa, unidentified
MNHETLGVGSILGCDVAKNSIVVFDSRTGRTRTIGNHPEGLAAFAASLPPDSLVVCEATGGYEAELLMAVHAAGRAAHRADARKVKAFIRSLGTLAKTDAIDARALARYGLERQATLPRWRPAEHQRDHLQRLVLTRRDLVATRQAWLNRAQAPGADSLHPHLTRLIEACQHTIDAIEADIEALLAQCRQLAETVRTLRTIPGIGPTTAVALLALMPELGQIKRRQAAALAGLAPHPRQSGNCERYRRTGGGRPEVKRLLFMAALSARRHNPALRDFYQRLRANGKRPLVAIIAVMRKLVVIANAKIRSIPATI

SEQ ID NO: 89151 - protein, 419 aa, unidentified
MSFKIFKFNCCGLDVHKTWIYACIGITDSNNRTEYKQARFSSFSKCLHQLCVWLVKYNCNDVCMESTGKYWIPVFNILEQHKIRVTLSHPKYTKPMKGNKTDRKDAKWICDLYMCGMVKPSFIPPADIRELRDLVRYRFKLTCMITGEKNRAQNCLTVSNLKLDDVFSDVFGKSSRSITEQILQHPGEKFDVSPFVDSRCKTPIEEIQAAVDGNISKEQDVKLRQCLDHIDELQKHISEVEQEILRLSDKYEAALNLIRTVPGFDKNPMTAIQVLSEIGGDMSVFPTAKHLVSWAGCCPRNDKSDRKIKSTRISCAGSYFKPVLVQIANALIKLKKHFEFTTRYKRIKTRRGHKKAIIARCRMILTAIWHILTDLKPYTSDGFLESRPVKKEKVLTTSQALNLLRQRGYLIKDEPSPVS

SEQ ID NO: 89152 - protein, 367 aa, unidentified
MSAEGEAIRSNDYRKDTTVKAPSTRPAAVLGLDVGKSSHWACLIDRDGEVLASAPVRNREAELDALFASAPAGTLVVVDQFRNIGSLAVRRARAAGLGVAHLPGLAASRAAGLFAGEAKTDERDAAVIARTALGVPDSLSGVPGRGEALEAARALSSQRDHVVACATRDKNRLRAVLLESCPALEAAVDLSDRRWLELLAGFGGAWGIARSGAGGPRAEAAGEAAAASTAPLEAETAALLEGDETYACLLTVPGIGPRTAAQLAVSVDIGRFPDHDHLASYCGIAPRVRSSGTSVRSVRASRRGDARLKSLLIFSCNSLVRSSGRCGEYYRACRARGMGHGRALKAVARKRLRAIYAVMRDRVPYRE

SEQ ID NO: 89153 - protein, 344 aa, unidentified
MNQHYVGLDVSLDQTSLCVLDGAGQVVCETKVDTDPAAIAACLCRAGVSVARLGLEAGPLSQWLYAGLMASGLPAICIETRHTKAVIGAMPVKTDRGDARGIAQLMRTGWFRAVHVKTRQAQEWRLLLTQRRLLVSKLIDVEAEIRGTLRGFGIRIGRVGRAGFAGRIRELLADQPKLLQVIEPVLVVQAALLAQRDVLHRLVLQAVREEEVCRRLMTVPGVGPITALAFRATVDRADRFTRSKDVGAHFGLTPRRYQSGETDRSGAIAKTGDVLTRHALYEAATSMLVHASKPSALRSWALAIAQRRGLQKARVALARRLAVVLHRMWSDGTTFQPLGRAAAA

SEQ ID NO: 89154 - protein, 341 aa, unidentified
MKYVGVDLHKQSISVCVMVKDGEKRKVERRCSLPCAEVEKIRQFFQQLGTFQVVVEATSSYEWFLLLIEDKANRCVLAHPKKLRVIAESKNKTDKVDAHVLAEFLLLDMIPEAHRPTPRVREHRVLVRHRDRVQRQITAVKCKLRHKAAFYNADRPNLFTAQGRKHLAEMAMSSADRFECRALEDQLAFLQEQLRAVDQELVKFAKTAPVTEREARAVLATMPLVGPVTTDIVLSETGDVRRFKSAKRIVAYAGLDPGLRESAGKGKQLSITKEGSRLLRWAMIETAWRLVGKTLRWRRLFDQLRASTGHKKKAIVGVARRLLCVLFAMLRDGKAYRLAAE

SEQ ID NO: 89155 - protein, 455 aa, unidentified
MSPPRQTRSPKAGTPPLPTLHPHAAGIDVGAREVYVAVPPGTCARPVRSFPTFTADLHALRDWLKQCRVTTVAMESTGVYWIPLFQILEAAGIEVCLVNARHCRNLPGRKTDVQDCQWLQHLHAVGLLRGSFRPADQVCAVRAVLRHRDALVRGAGRCVSHLHKALTQMNVQLHHVITDLTGVTGLAILEAILAGERDPQKLAALKDHRIKASRDTLAKSLQGDWRPEHLFTLRQTRALWRQHQALIAECDAQIEAMLRGFDAPAGGPVAALAAAKTSHRQPQRNEPQFDARTECHRVLGVDLTAVPGFAAPTVLTLVGELGPGFAAKFPTAKHFGSWLGLCPDNRITGGKIYSVKTRDVKSRVAEALRLAAQSLWRAQNYFGDLYRRWKARLGSPKAITAMAHKLARILWHLLKFREPFNPEVFAQAEAKLKRRQLARLQNLAATLNCQLVPNP

SEQ ID NO: 89156 - protein, 419 aa, unidentified
MNDQPTQPGLFIGIDWADQKHDIYVIDRHGKAFHRQIQHSAENIDAWVGEMLKLADGRPIAIMLEQSRGALVYALMFRKDVLLYPVNPKQLARYRESYPGGGKDDPTNAMYLGRMLRERIRTLTAWQPDDENTRLLAQLSQQRRKIVDGQTKLRQQLTALLKSYFPVVLELFGKDHQLPMLLSMLGRWADPRKLRRADRRLIRRVLRDHSTGSEQQQDEIIARIRSAQLLCDDEALITPSAMAAQLLVSQIQQSQKTIRDFDAKIAEVMKQHPDAHLFTNLRGAGSALAPRLLCAFGSQRDRWEDADSLASFSGIAPITRKSGKSRGVHRRFACPKYLRQTFHEFADSARRYCPSSRARYRMLRDRGMKHHAALRKIARSWIRILFRVWKTRVPFDCDRYITKLQQRCPEITPYLTQEN

SEQ ID NO: 89157 - protein, 342 aa, unidentified
MGEVVTIGLDIAKSVFQVHGVGADGEVLIRRRLTRARMLPFFAKLPPCLVGIEACNNSHYWARELIALGHDVKLMPAQYVKPYVKRGKNDAADAEAICEAVTRPTMRFVAVKSPEQQSLMMLHRVRLMLNRQRTQISNAIRAHISEFGVVAPVGRLGVERLLEVVADAGDDRVPEDARLCLQMLAAQLEVVKQQILENDRRVLASARRTELGRRLMDIPGVGPLLASAFVASVADPTVFRTGRDLAAWIGLVPKQNSSGGKDRLGSITRAGNRYLRQMLVVGAMAVIRYAERHGTKRPWLVQLLARRPAKVAAVALANKNARMVWALMTSGERYREPMPMAA

SEQ ID NO: 89158 - protein, 443 aa, unidentified
MRFVGGDVQALFVERVRGLDPVRCLLVPVDVGKATAMALVADLFGEIVVDPFGFDLTEGGVSVLVGAVSSAESERGAVMVRFGVEAAGRYHRTLMACLGRRGLEVVELNPGAVKEARSGQGKRRLKNDVRDLAGMADLLARGGGRPPQRVDTQMAVQSAWAAHRRRKLKARIALQNQVIGQIDVVFPGLTGCFSDLLETKAGRVIVHHVCEPSRIRRLGVEGLRSYVAKRGCVMTRPKAAQVVAAARDALRLDEAEHVAASAVLAVDVVLLATIQSEVEHAEGTLGAMLDQTPAGVLTTLPGIGVVRASNYGAALGDPHRFVNAAAAYRFSGLVPTDYESAGRRRSGQHISREGSVELREAIIELGRGLAGHEPDFAAYKKKKLAEGKKPSVAAVAVGRRAHRLCFAMMRDQTRYHPARWTLAVAAGRSVMTQTQKRVGVTAT

SEQ ID NO: 89159 - protein, 416 aa, unidentified
MSGKREIACGVDVHNKFIVATILSSDGLKLQDRFETNLEELLKFKDWLKENGCHKVALESTGNYWLPIYHVLEGSVNFILANAYQIKHIPGRKTDTLDSEWIAEICLKNLISPSRIFCRDHRELRSLTRTRESLIKVRTKIKNRVTHELEAACIKLSSVLSDVFGKSGRHIVDGLLNGMDLEEILESIPSRKVKAIKGEIRGTIQANLSPLQIFLIQSHLDMIDAITKQIVEIDSKISDQLSTRNEDMRIALSMPGMGFVSASTILAEIGDFRDFSSPDKLAAYCGLVPSVYQSAGKMINGHITKHGSPHIRSMIIEVAHAIIRTRQDTKLKKFFLRIKARRGTKIGVVALARKVLCILYHLLVHQEIYHDDLLGKPRKIKHIRAYSTTSMSLDEMIKTIIKAGYEVRKNEYFEGG

SEQ ID NO: 89160 - protein, 420 aa, unidentified
MPNIEIGVDSMVKENFIYVGIDLHKETHTAVMIDCYNQKLGEITFPNRPAAFPKLVTKVKKCNTDGKEVVYGLENAYGYGRALAVWLIDKGYLVKDVNTAISHRQAKHRGAMYRKSDSDDAEAIALATLNMLDKLPDAYPNDAYWSLGQLVHRRDNIMKQRTRLVNQLHEQLCIAYPSYKQFFNDISRPTALYFWEHYPSRKYLKGKSVEDLRAELVPVSHNKCSTKTCEKILDAVASDKVKNNAYQDARDMVTLSIVSDLQYYDKQLAEVDKMLEQMYKMLGCTLTTIPGVNVITAVKILAEIGDIKRFSNANKLAQFAGIAPLHLSSSGKGKDVATKQGNRRLQATIYFLAIQMVQISSKGTPRNPVVRAYYEKRKAEGKTSQQALICISRRLISVIYGMLKNGTEYRMPVVENAGEK

SEQ ID NO: 89161 - protein, 412 aa, unidentified
MTNETTRWFAAVDWGSEQHQACIIDVVGRLMGERAFPHSGAGLAALCDWLASVADDAASMTVAIEVPHGPVVDALLDRGFAVHAINPKQLDRLRDRFSVAGAKDDRRDARIAAAGLRTDPQLFRPVQTGDPTVIELREWSRLVEELQQERVRLGNRIRQQLWRYYPQLLELADDVAAEWVLELWTMAPTPAKASRLRETTLARLFKQHRIRRINAHTALGILRAPVFKVAAGVTEAAVLHLRSLVARLRLANCEFRQAERKLDELCAALACVKTASATLPSDAAILASLPGVGRITLATLLTEASAALTRRDYASLRTLSGVAPVTKRSGKTCIVVMRYAAQARLRQAVFHWARAAAQKDPKSRVRYDALRARGHSYGRALRGVADRLLGIACLLLLRREMFDPDHGTPAAL

SEQ ID NO: 89162 - protein, 360 aa, unidentified
MKQDVAPAARTVTGGVDTHKDLHVAAVVDAHDQLLGSRSFATTRHGYKQMLAWMRSFGVLQRVGVEATGTYGVGLLRYLQRAGVEVLEVTAPDRSDRRKRGKDDDLDAQNAAHAAFARRRTVTPKSRDGMIEALRVLKSCRKTAVSARRVALQMIHSTIVSAPDELRETLRALTRMQLIRTLAAWRPDLTSYRDVTSAYKITLKSLARRYLELHDEISDLDCMIAALVDDLAPALVTRNSIGHTGAAQLLLTAGDNTERLRSEAAFAALCGVSPVPASSGKTTRHRLNRGGDRAANSALHIIAIGRLRTDPRTKAYVAKRMAEGHSKLEAIRCLKRYIAREVFALIRQRAQDINRGQAAA

SEQ ID NO: 89163 - protein, 428 aa, unidentified
MNCNTQNAKIASITEKTLIIGIDVGSETHYARAFDWRNYEYSRRALEFSNTEAGFMALRAWVEDIAEKHGKTAVIPGMEPTGHYWFALGKFLQDNGMRPVHVNPHHVKKSKEPDDNNPNKNDRKDPKTIAALVNEGRFSYPYIPTGIYAEVRSLSNLRFQTQEELTRIKNRIARWFAIYFPEYKDVYGDLKAASGRMVLKVAPLPDDIIKLGAEGVNQIWRDAKLRGVGMKRAKTLITAAEHSVGSKEAPETARIELRHLLGDMEVYTSRLEELLLSIEGKLREIPYVDKLMEIKGIGLTTVSGFIAEVGDIGRFDNPKQLQKLAGYAIVANDSGKHNGESGISYRGRKRLRYVLYEAAISLIGKNAEFREIHEYYQTRKKNPLKKMQSVVAVACKIIRVFYTILTKGVDYDANKLMGDIRRPQKQTA

SEQ ID NO: 89164 - protein, 315 aa, unidentified
MKYHIGIDISKRDFHVCFDEVGIIEKFSTDIAGIDEFLKGLQEKKMTKGKTLIGMEATGSYHLPVAYRCTKAGYTVHVINPLITKKQNQTNLRRVKTDSADAKLVRLCLIQGAGYPFFETAETIKLKTLVRQRARFSMLRHHTRLKDEEVVNRERYLDVKITALDRELYDFLDEKIRGLDAQLRTYDFATQKLLQSIPGVGPQTATTCLSEIADIKRFPDGQKLTAWLGLDPRVHQSGTSINGKGYITKRGNKLLRTRLFNAASVAVLHENMFQKFFLQKRSEGKAYRVALCAVMRKMVHVIHAVWSRGTPFINS

SEQ ID NO: 89165 - protein, 369 aa, unidentified
MDDIIFVGLDVHKATVCIAIAEGSRGGEVRQLGIFENRPEILSKVVSRLSKGGRRLSFCYEAGPCGYGLHRLLTGYGHECVVVAPSLIPMKAGDRVKTDRRDALMLAKLHRAGELTAIWIPDAAHEAMRDLVRARATAVRVLVKARQHLQGFLLRHERIYRGARAWTLAYRRWLTTVRFEHPAQQIVLQDYIHAVQEAETRRDRLTQQIEELLRNWSMAPVVAALQSMRGVALVVAVTVVAEVGDFRRFANPRQLMAYLGLVPSEHSSGSSVRRGGITKAGNALARRVLIEGAWTYRMSARVSRKLHDRLEGLPAAVRDIAWKAQLRLCARYRRMAATGKPKVVVTTAIAREMVGFIWAIARLAQPALV

SEQ ID NO: 89166 - protein, 406 aa, unidentified
MISVGIDVSKGKSTVCIMKPGGEVLKTPFEVLHTMEGILSLVNLIKSYNDEARVILEDTGHYHWPVVTLLVEKGIFVCSVNALRMKKYCAQSIRRAKTDKIDSVRIASYGLTYWSELAAVMPTGDTYRELKLLARQYYQTTSMLIKSKVNLSNLLDQVMPNIQDILQDSASNHKLTDFVKRYWHDENILELGEKRFTADYCKWAKKQGYRMCERKAEEIFAIAQNGIPVLPNSQSTKIVVTEAVRILHEIEKSRDTILTQMQALAKTLPEYSVIKNMPCIGNTLAPRLIAEMGDIRRFTNKHALIAYAGIDAPPYQSGTFNATERHISKRGNKYLRKTGYEVMQCLIQHKPDGDSVFDFIQKKRGEGKCAKEAMIAGLNKFLRIYYGKVTEVYNAIDDQLIFGSEI

SEQ ID NO: 89167 - protein, 450 aa, unidentified
MSKDKGKKEKKNAIQGMPVLQYYAAGADIGDTKHDIAINDGQGGQIVRTFKTFTADVQEAVDWLKEEGVTTVAMESTGVYYLTFYLMLEEAGIEAYLVNARHVKNVTGRKKDDTDAMWIQRLHSCGLLQNCFQPDNDFRTLRTYVRQRKGLVTRCSDEVRRMQKALELMNIKIHVVISDLLGKTGMMIIKAIINGNYNPSELAKLRDPRIKATEQEIFKSLQGVWKEEYLFTLRQAHDMYFFYQQQIGECDIKIHEQLLKQIGKANQGDITVEKTIKKKGKPAKNQFSFPVAPLLMKLTDVDLCKIPGISEVSVLEFISETGIDTTKWKSSKHFAAWLNMVPNTKITGGRIISSRMMKKKNRAGQTLRMGASSLYQNKTPLGDYHRRMSAKYGGKGASLATGHKLARIIYKMLETKKEFCYDMLIESQKKYKENRIKQLEKQIERLKKVA

SEQ ID NO: 89168 - protein, 339 aa, unidentified
MQVTTIGLDLAKNVFQVHGVTEAGEIAFNRSLRRAQVLTFFEGVPPCLVGIEACGTSHFWAREIARLGHEVRLIPPAYVKPYVKRGKSDAIDAAAICEAVIRPTMRFVAIKTPGQQAVLALHRVRDLIVRQRTQIVNMLRGVLAEFGIVVRQGAGHAIAFAKRCLEGTQDDLPDLARELVTNLCHQLIALHRRVLWHGRQMNRAASRDARVARLRTIPGVGPITASAIVASIGDGHQFSNGRSFAAWLGLTPLNRSSGGKERLGRISKMGDRYIRRLLVLGMTSRIKQIQQRPEQFDPWFADILDRKPAKLAAVAMANKTARIIWAVLTREQDYRIRAI

SEQ ID NO: 89169 - protein, 355 aa, unidentified
MDSKKYIGMDVHKESISMAVMNGAGKIVMECVIETKANMILQFFDGMRGDLQVTFEEGTSAAWLYDLLKPHVTKLVVCDPRKNASMKEGNKSDKIDARRLAELLRLNHLNPVYHGEHGLRSLKELVRSYLTITKDLGRVMTRVKAIYRSWAIPCSGKQVYAPRHRAEWLGKINEPGVRRRAEFYYQQLDALRTVRQEVRRELLAEGKKHQAWKRLCQIPSIGPIRSAVLLGILQTPHRFRTKRQLWTYSGFGIETHRSADHRSVDGQLQRAKKQISIRGLNRNCNHDLKNLFKGAAIVASSKPGPFQEFYTALLTKGIRPEMARLTLARKIATIVLMVWKRGACFDAQHLKPQTA

SEQ ID NO: 89170 - protein, 322 aa, unidentified
MVEAVVGVDIAKKKCDVALFMNGKFKHKTCLNNRQGFEELSQWLKRQGVERVRVCMEATGTYGDELATYMHDAGHTVSIVNPARIKGFAQGELLRTKNDKVDAALIARFCVAMNPVVWTPPPLEIRRLQSLVKRADALIVMRTQEQNRFGTAHETIESSIKEHIGYLDQEIEKLKRQIAEHINSDPNLRTKRDLLSSIPGIGEATVAFILSALHIFEGVDRVQKTVPFIGLAPREVISGSSIKGKPRICKIGHARFRKALFMPALVAMRYNPMMIDFCNRLRKKGKNGKVIVCAVMRKLVHVIYGILKSGKPFDPNYKPNFA

SEQ ID NO: 89171 - protein, 322 aa, unidentified
MPEQQQHPLSFVGIDVSKARLDGHVRPDGGTFAEANDPEGIAAVVARLLARPPALVVVEATGGLEAPLVAALAAAGVPVAVVNPRQARDFAKGVGKRAKTDRIDAAVLARFAEVVRPEVQPLPDDQARRLAALVGRRRQLVEMRVAEENRLGGAAEAAVRRDLEAHIAYLSRQIGELDRELGEAIAASPVWKARDEVLRSVPGVGPVTARTLAASLPELGALSNKRIAALVGVAPIPDDSGTIRGRRRIAAGRGSVRSVLYMAALAAARSNPVLSAFYRRLVAAGKAKKLALTAVMRKLLTILNAMVRNNHAWDPSVALGTN

SEQ ID NO: 89172 - protein, 366 aa, unidentified
MKKISTVAIEGIQIFKQNQLTIGLDLGDRTSHYCVLDEPGQVILEQELPTTAKGFEQVFSKIPRSRIALETGTHSPWVSRQLTELGHEVIVAHARNVRLIGESSRKDDRLDARTLARLVRIDPALLGPVRHRSAKAQIHLTVIRARATLVSARTALVNAARGLTKSYGARLPKCGTEQIHRKITKELKPELREALNPLLAEIESLNARIAEYDTRIEQIAKEVYPEVSRLKQVKGVGPLIALTYVLTLDNPYRFRRSRDVGCFVGLRPGRRNSGMSEPQLHISKEGDRYLRTLLVQGAHYILGPFGQDSDLRRWGLKLSERGGRNAKKRAVVAVARKLAVLLHKLWVSKEVYEPLRNNRKQMAQVA

SEQ ID NO: 89173 - protein, 327 aa, unidentified
MDESRENVSVVGIDMSKHKFDVALLRDGKFKHKALRNDRGGHTALVSWLQARGVSTAHVCMESTNIYGEALGEYLHDRGFSVSIVNPARIKGFAQSELIRTKTDKADAALIARFCAAMRPGLWQPDAPEIRALRALVRRLDALVEMRQQELNRQQVANEVLLETLTDHIAYLDESIRAIKKQIQDHIDNHPDLKAKRALLESIPGIGEATIQVVLAEFADITRFKRAKCLASFLGVAPREIQSGCSVRGRTRMSKVGRSQLRKAFFMPALVAMRYNPPVIAMKERMLKAGKPKMAIVGAAMRKLVHLIYGVLKSGKPFDAEYITNQA

SEQ ID NO: 89174 - protein, 372 aa, unidentified
MNYNTVYVGMDVHKESFSLCAYTIEAEKASHYQRTEADYKKVLNYLEFLRTIYGDDANFICGYEAGCLGYTLYHQLTANNVKCIILAPTTMLEQRSKKRIRTDKRDAEIIAKCLAQHNYSPVHIPTAKDEETKEFLRMGDDHKLALKKVKQQILAFCLRHNYRYDGNSHWTAAHLKWLKALTPEALYKEILDEYLLTYQALSDKLERLDKRIEELSTQDEYKEAVKKLCCFIGVKTHTALSVLVEVGDFKRFASAQHFASYIGLVPGEDSSGDDQNRLGITKAGNRHVRLLLTEASQCYARGQVGFKSKELKARQSGNTPAVIAYADKANERLRRRYYKMVLNKCKKHNVAKTAIARELACFMWGMMTDNIA

SEQ ID NO: 89175 - protein, 443 aa, unidentified
MEEKLKKINPQGAGIDIGAEQIFVSAEDEGYQTFGCFTQEFKLAAAYLKERNVSNVAMEATGVYWIPLKDILEEEGVRVILVKAGDAKQLPGREKTDGADCQWIRTLHQYGLLRPCVIPEATIRQLRTYMRIRLDNIEMASQHIQHMQKAFILMNIRLHQVISQLTGASGRRIIEAILSGERDAEKLVLLCDNQILANKKKEVILSLQGNYRDEYLFMLGQGYKGWQFYNSLIIECDARIDEWLKQNTKDKEPLQQMTKGKMIRHHKPRIDNFHEKVLLLNEGKDLSQLPGLTDYTVLQIIAEVGTDMSKWKDAKHFVSWLGLAPKKHNSGKMKRHYSGSTNTKASQLFKESAQCLLKSKNIALGSFARRIRAFKGPAISIKATARKLAVMFYNVLTKGMQYVEKGIAKYEEQIKKTDIQKLARWADRMGFSLNPNQTNTVHQ

SEQ ID NO: 89176 - protein, 368 aa, unidentified
MIERVHGIDRHKSFWTISVLNRAGEEVRFEGTCREFREYVGELGPSDAVALEASNGSFWWADQIEAKGAKCFVVDPRKFRIIKDSWNKTDRQDARNLAKALWVHVVTGEFGIPTVYKPSGVIRELRKLFAQYCALNRQITRLKNGLQAIFVENGVELKREGKARLFPAESGLELVKELEVSAASRVCLEVSLQVLWSVEEAKERVAAEILLAGEPLKSQVELLITVKGVTPLIALAFLADVADIRRFRTLRKMNAYLGLVPRARNSGGKERSGHITRESRKLTRTILTQCVHHVAASSVSLDRYYQELRVKRGTGRARVAVIRRLCGMMRRMLLSGEQYRWMDRRLYEKKLRQYERVLKRMKEERTAA

SEQ ID NO: 89177 - protein, 456 aa, unidentified
MKKKNQKNNNKIIRIDALKQINLNAAGIDVGDSEMYVAVPEDRDEQFVRVFGTFTRDLVSIAQWLKQCHVTTVAMESTGVYWIPLFEILVEHGFEVLLVDARKIKNVSGRKTDIQDCQWIQQLHTYGLLNGSFIPEQNIRALRDMVRHRANLLRYRASHIQYTQKILQLMNLKLTNVISDITGTTGIRILRAIVEGKTDPKYLAAFRDPHCKKSQEEIEKSLEGNYREEYIFQLKQMLDLYDYYSSLITNLDAKTETMYQQLPSVVNPEERPLKPLKRNTNKKNKNSPAFDLRTQLYRICGVDLVQIDGLNTSTVQDIITDIGTDMSKWKTSKHFCAWLRLAPNNKITGGKVFFSHTPKSKNRANKALRLAAFSLANAKCALGAFYRRIRAKYGAPMANIATAHKLARIIYKMLKDKVEYVDLGEDYYNEKYKARLVRNLKDKAKSLGYQLVPTPV

SEQ ID NO: 89178 - protein, 411 aa, unidentified
MKRIIGMDIHRIFAEVAFWEEGRLRHHGRVDMTRSGLEGFGRSLSEQDEVVVEATGNAMSVVRVLAPFVGRVVVANPLQVKAIAYAQVKTDKIDAGVLAQLHASGFLPEVWVPDERTERLRRCVARRNQVVRHRTRIKNEVHGILHAHLIPKCPHADLFNGRGRVWLDGQVFPDDERAAIVRHIREIDRLAEDLKDLEGDIAKAAVGDPQIQRLLTITGVNAIVATSVIAAIGDIKRFSDASRLVSYFGLNPRVRQSGLRPAQHGRISKAGRSHARAMLVESAWAAARAPGPLRAFFLRIRAKRGHQVAAVAVARKLAVLIWHMLTREEDYQWQRPGLVAAKRRKLDLQSGAPTQRGVGRRGVAYTYNIKELRDQEKAAAEYAEHAYERFVRHWQPRGKKRCTGVTNETRQ

SEQ ID NO: 89179 - protein, 364 aa, unidentified
MDDPKQTREQVTLGVDTHAEVHVAAALDERGRLLGTCTIPTTVTGFAELIRWTGQLGELSRVGMEGTGSYGAGLARWLRAREVVVIEVDRPDRRTRRRRGKSDSVDAEAAARAVLAGTATAQPKAGSGAMEMVRTLRVARQSAIKARTQAANELHALVVTAPDAMRAQLRRLKVPQLVATAAAFHRSAELTSPTAATKLALKSIAMRYQHLSAEIDELDDHLDQLVTVAAPALVAIKGVGTDIASTLLTIAGDNPERLTSEGAFAHLVGVAPIEASSGKITRYRLNRGGDRQGNRALYLLAVGRMGWDPATRAYVERRTAEGRTKPEIIRCLKRYIARELYPVLLAMTPEARPVPSPKSSLQTV

SEQ ID NO: 89180 - protein, 351 aa, unidentified
MAEAQFKRIRRYTWFIGVDISKNKLDFSVMHNMVLILHKEITNDVDGIKSFIIELKTLEKFSMIKSIFVMEKIGFYSNHLTTVLLKIKANIVMGGAFHIKRTLGLVRGKTDKIDSIRLAEFAFIRRESLVLWKPKRPIINELAMLCNISDRLLTSINRLAVPINEQKSFIGNKQSAFQMQCCNRSISSLKADLLEVDSKLLSLIREDPELKRLFELIVSVDFVGPKTAIRLLISTNEFNDIKNPKQFACLIGIAPFPRESGTMRMKMRVSNLCDKKLKSILHICALCSLRGENGFKSYFKRKTENEGKPGFSVLNAIKNKIILRIFACVNQNRPFEKEYLNPKRKLEARNL

SEQ ID NO: 89181 - protein, 346 aa, unidentified
MNEIIRIGMDTSKHIFQLHGVDAQERPVLRKRLSRSAMLAFFGNLAPTIVVIEACGASHYWARELAKLGHEVKLIAPQLVKPYVTRNKNDGRDAEGLCEAGSRPRMRFVPVKTAEQQAGLMLLGVREQLIVRRTQLGNMIRGHAAEFGLIAAKGMDKLASLLTAVAQDASLPDLVRDLFSLLARQYEQLQVELKAIEVKLKALHRADAMSRRLAEVPGIGPVTAAALVMKAPDPHAFRSGRLFAAWLGLTPKDHSTGGKLRLGKITRAGDETLRSLLVVGATSVVKLAKGPKGRGPQWLIALLKRKSPKQAAVALANKMARIAWKLMTTGENYASARLNAAASRAA

SEQ ID NO: 89182 - protein, 319 aa, unidentified
MYSIVIGVDIAKLKFDVASLNNGKYKHKVFTNNEQGYHQFINWLLLLSADDKPLICMEATGAYSLPLAEFMINQGYAVSVVNPAQIKAFAGSELSRTKTDKTDAKLIARYATTMQPPLWTPPPENIRILQALTRRVEHLLEMIQMERNRLETATPTIIHSITAVLATLETELEATRKTIRDHIDNDPDLKQRHDLLITIPSIADASIPHLLTALSDHHGFTSAKQVVAFAGLAPSIRQSGQWSGKTHIAKKGDPILRKALYMPALVAWRHNPPIRIFCERLKANGKNGKAIVCAAMRKLIHLAFAILKSGQPFDPNYAA

SEQ ID NO: 89183 - protein, 492 aa, unidentified
MKTSRKTQSVYRNQNVSLRAVFERAGDPRKVLCVALDYATRKHLALICDGHGDVIKASFPVENNTEGIAFLIEQISASARRRKIPKNQIFLGGEDEPAYVANFTAALRDKGYLVVRVNAYEAKENRENLLASTDNLDLLGIAKTLLSRRARESGDASPQNPAYHHLREITRHRRVLVRQQTATANRIHAIADQLFPGFLDDSKSGLTAFCDASLELMKERFSAPEIARRKPTTLANLLRRHRIHHPDEVAAKIILLAREALPPAPHRVATLQRTLAAAVDLHQCLTRNADELRRDAALTLATIPYALLTSIPGIGFVLAAGVAGELGDPARLGRTDSLCGYAGIVSTTDQTGGPDSPAIQRHASPRCNRILKDWTVQSAQKIREYGPPELKDRIIRWENNGQHASFAAARRYLRLLRSLVTNQIPYLRPEGRGRHASTDDLAAAAQETWSVLQRKWRTIPGGLDLILDEAHPLGFWRRVLKETHGIHLPERP

SEQ ID NO: 89184 - protein, 365 aa, unidentified
MKKIRDYILKGQKISVGLEDSKKTWKVCVRSGKVVVHRISMEAEYEVLHNYLRNQYPGCAITVMYEAGFRGFELHDKLVADKYKCIVTPPHTVTQEKCSKKKNDDIDADRLAKNLENGDYKSCHVPDRIQREDRQVSRLYGQLQKDITRTCNRIRRTIEFHGLEKSFALGDWGRREYRNAEEKIPKLDIGESLRFSLQLLFKELYQLRHYQHEVLRKLRDLAKSERYKRVVSLLHTAPGIGQLTSIRLALEWGDMKRFKRKEEFAAFLGLIPSEHSSGEKEHLGHITKQGNRQVRAWLIECAWVAIRFDPVLLEKFNKVAMDALGKMKYKKMAIVAVARKLAMRLRGILLSGEPYQIGLIECTKS

SEQ ID NO: 89185 - protein, 366 aa, unidentified
MLQEAELSGQADSENDLGGSSEIMYFIGLDVHKKTISYCVKDAAGRVYQEGKVGSSRRELDVWIRTMPEPRMIAMEATIFTGWIYDHLLPHADKVKVAHPLMLRAIAAAKRKNDRIDAGKIADCLRCDFLPECHMASTEIRDRRRTLRYRSLVVKQMVQMKNRVSGLLMETGVNYNKQRLHKVGYFEELITTNEDVHESIRPLLKLSREMISRSQKLDYALISSLERDPLLKERLRRLRTVPGVGPITAVTWALEIGDFTRFTSNKQAISYCGLCGDEKSSADKVLRMPISKQRNKHIQRVLIEAAKLAPRESPDLAMIRARELEKGNPNRATLAVARKIVIYMLAVERRQQDWVPAEQFRCTAAA

SEQ ID NO: 89186 - protein, 339 aa, unidentified
MGLHCAVDLHGNNGYYGVVDETGKRLMSKRLPNDLSLVLGALSPFRDRLEGGVVVESTYNWYWLVDGLKENGIEARLANPAAIQQYNGLKNTDDETDAFFLTEMDRLGILPVGYIYPKEERPVRDLLRRRLLLVGQRTAHILSFQNMVARERGEQISSNNIQKLWPEEVSKLFDDERLVLMGQTNIEMIRFLTKQINQIESRVLADAKLKPEYEKLLTVPGIGKILGLTIMLETGDINRFPKVGNYTSYCRMVKSSRSSNDKKKGENNRKNGNKYLCWAYVEAANFIRRYCPEAKAWHQRKAARSKQVLATKALASKICKACYFIIKDQEEFDVRRMFG

SEQ ID NO: 89187 - protein, 415 aa, unidentified
MNQVRWFAGIDWASRKHQVCLLDAAGRIRGEREFAHGGAGLAELCDWLATESGAEPDAIALAIEVSHGPVVETLLERGFRVHALNPKQLDRFRDRFTLPGAKDDRRDAQVLAACLRTDPHCYRRLALDDPLVVELRAWSRLGEELQQERTRLANRMRDQLWRYYPQALQLTDDLAADWFLALWLAAPTPAKAARLRESTLAQLLKAHGVRRIAAAEALRILRQPPLLVAPGTAAAACAHIRSLVARLRLVSRQWREVQQNLDRLCAAAPDQDPAPGQPNEPRDAAILRSLPGIGRIVLATLLAEAHEPLKQRDYRALRALSGVAPVTRSSGNKRLVVRRLAFQRRLSNAVYHWSRVAIQHDPISRRRYAALRRRGHGHGRALRGVGDRLLAVACTMLANRSLFDPNRHANTASHA

SEQ ID NO: 89188 - protein, 446 aa, unidentified
MDKSKKNSKRIATFSVVHPHAAGIDVADTSMVVAVPPESIIENVRTFGCFTCDLHDIAHWLKECEVETVAMESTGVYWVQLFLLLQEYGFEVYLVNAKHVKNVTGRKKDDIDAAWIQKLHSCGLLSNSFQPNEQTRALRNLVRHRKVLIRDAARYLNRIQKVLELMNIKIHTVISDIAGKSGQDILRAILSGEREAERLAFFCDKRIKASHEEIVKSLEGHWREEYIFELNQSYQTYHFLHEKIRNCDSEIEKNLAAIVTHSRPEGILAINQRTKRKTNYKNRPGFNVTAYLKAIVGTDVTEIVGISEISALEIFSETGFDLSKWKSDKYFTSWLGTAPNTKESNNKVISSRILKKKHHAGQAFRMAASSLYGSQSPIGDFYRRIRARAGAGKATVATARKIAVIFYHMVTEKTNFNPDMLLKSQQKYKDHKIKILEKQLAKLKAA

SEQ ID NO: 89189 - protein, 349 aa, unidentified
MRFYTQQHRFYCGIDLHARSMHVCVLDQAGAVLFDRNLPARPEAFLRAIAPFREDLIVGVECMFAWYWVADLCQAEDIPFALGHALYMKAIHGGKAKNDRIDAGKIARLLRGGTFPVAYAYPKGMRETRDLLRRRTYLVRRRAELLTHLQILNAQYNLAPFPKKLSFAANRTAMDIAQRFADPSVQKSAAVNLDLIDRLDELIGELELYLVRTAKVDDVQTYHRLQTIPGVGKVLALILLYEMHDVGRFGDAGPFLSYARLVRCLHESAGKKLGCGGKKIGNAHLRWAFAEAACLFLRASERAKRWKQQQAARRGEGKALAILAAKLGRAVYHMLRNGTVFDEDKFLRG

SEQ ID NO: 89190 - protein, 316 aa, unidentified
MSAPQIFVGIDVAKAHLDVALRPTGERWTVANADASLAALVAQLQAVAPTLIVLEATGGYQRAVVAALAAAGLPVVVANPRQTRDFAKATGQLAKTDALDARALAHFAEAVRPSPRPLPDAQTEALRAVLTRRRQLVAMRTAEQNRLDSAPPTVHADLQAHITWLDQRLAALDDTLDTTLRTSPVWRERDTLYRSVPGIGPVCARTLLLELPELGTLSRQRIAALAGVAPFNRDSGTLRGQRTIWGGRAALRATLYMSTLVAVRHNPVLKAFYERLVAAGKAKKVALVACMRKLLTILNAMAKQKTLWQPREVSIA

SEQ ID NO: 89191 - protein, 320 aa, unidentified
MMAQNGLVVVGIDVAKDKVNACIRELSQRQMCPSTPQGHRKLVAWLRKCQVNKAVMEASGGYERDWAKVLRGSGIEVRIVDPKRVRSFAQSAGCLAKNDAIDAEMIAWFAETFSEAPGQVHDAAQEELQALVKARLNLVDLKIRLEAQSEHAAPGQAHKARVRVLKSLLEEIAKLEVAISAQVRASPHLAERAEIIESVPGFAKATSATLVAGMPELGQVSDEIVAALLGVAPYDDDSGKRRGDRHIKGGRRWVRNAIYMPCVGAATLNNPVFKAYYQRLIAKGKEPKVAITACMRKLIIILNTMIARRQKWDPHRYAVN

SEQ ID NO: 89192 - protein, 324 aa, unidentified
MEYSACGIDVSKDTLDVSVMIRGKPLARQFANTPEGYRALVGWLKHRKVAQVHACLEATGCYSLGVALALHEAGHKVSIVNPAQIRDFVRTKLGRNKSDQVDCGHIREYVALFSPPAWRPPSPALRRLCELQTMRNGFVASKVEWQNRAGSGGTDATATVLAQTTIAHFEAQIAAVEKAIAETIQGDDDMRGRHRLLVSIDGVGDVLAAIILAELPGLEVIANSAQAVAYAGLNPRQFQSGTSINRPTRISKIGNATLRSALFMPAMSAMRCNKAVAALVARLREKGRLKGKQIVVAAMRKLLVICFGVLKHGKPFVAETAMPA

SEQ ID NO: 89193 - protein, 421 aa, unidentified
MEVIHPRCAGIDISKKDAKVCVRAPGRGRARSVETVSTWGSMTKQILALRDHLVQQRITCVVLEATGDYWKPFYYLLEDLPDVEVMLVNARHVKALPGRKSDVSDAAWLAQLGAHGLVRGSLVPPEPIRQLRDLTRTRTALTRDRTREVQRLEKVLEDAGIKLSSVASSIMGLSGRDMLDALADGERDPAVLAQMARRALRGKISQLTEALQGRFTDHHAFMVRMHLDLIDQHTAAIDELTDRIEKVIEPFRAFRDLICTIPGIGPMTADVVIAETGSDMSRFASAAHLASWAGTAPGMNESAGKVKSSHARPGNPYLKGALGTAAMNLSRMPGTYLGVRYRRLSARRGPMRANVATQRAMLTAIWHMGTTGALYNDPGPDYFTRLNPSRAKQRAVSQLEAMGYAVTLHAAHNSGESQPHE

SEQ ID NO: 89194 - protein, 344 aa, unidentified
MDYFAGLDVSVKDTSVCIVDDTGKIVREVKVASEPEALLQILKSPTYRFKRIGLEAGPLSQWLFSALAEAELPVICVETRHMHAVLKAQINKTDRNDARGIAQMMRVGLYRPVHVKTLRSQKLRMLLTHRKLLQSKAIAIENDLRGTLRNFGLKVGMAGKVKFEARIKELVDNLPDLAVLVEPLLIVRRALREQIVILHRRLLAIVRDDEVCRRLMTTPGVGPVVSLTYRATVDVPARFRKSKSVGAVFGLTCSKYQSGEVDWSGRISRCGDEMMRVMLYEAAQSMLRSKKWSWLKAWAMQIARRRGMKKAIVALARRLAVIMHRIWVDGTEFRWTREQAAAAA

SEQ ID NO: 89195 - protein, 428 aa, unidentified
MRLPIGFVETGKKERIFIYEKRKTAFIGVDMHKDIHVAVVIDCWTNILGEITFPNRPSKFDKFMQDVKKIYKDLTPCFGLEDTRGFGRNFASYLLGHKFTVKHVNPAYTDSMRSSAPMSKKNDSFDAFCVAKVLRDMVDTLPDEEHNDLHWTIRQLVKRRNSLVKGIVIAKNQLNSNLTNVYPSYKKYFCDVDNKTALLFWEKYPHPQYLKGVKPETLLEELRAIHKGMKQEQAEMILTLSEQNSPKEKEFQTERDLIIKSLVREIRFKKQENEDIDNELKRLVDLTGYKLQTMPGINLITAANIISEIGNIERFPNSDKLAQFCGVCPVNFSSAGKGKDQRSRQGNRVLNAIFHFLAIQLVQISPSGKPRHPVFREYFEGKIKEGKTKPQALVCVSRRAVRIIYGMMKSKTEYKPFEKVQEVKEIQE

SEQ ID NO: 89196 - protein, 346 aa, unidentified
MNYAGWDLHQQFSQVVVGTKDGKKRKSTKIYHSPGMFEHPKVKEFLKPPVEVAVEACNGWYWVVDQLEKMGAKVHLAHPLKTKLIAEAKVKTDKIDANALYDLLRTDFLPESYIASSKERELREIHRHRAALVKIRTSVKNRVHSLLAKHGIFFKISDLFGIKGRLSLKKVMPSLKSVYKDELKRYLALIDWLNPEIEKIEEKIRRQVRDNPLSKLLETIPGIGYYSALLILSEIGDISRFARPKKLISYAGLNPGVDKSGKHFHNLSITKQGNSWLRWVLIQDAPHAARSDKRLGQIYHRIAIKKGKNTAKVAVAREMLFSIYWVLKKQAPYCPKSVTPIVGMVS

SEQ ID NO: 89197 - protein, 338 aa, unidentified
MKYKRIAIDTSKHVFTLHGVDEQERPVLRRELRRGQVEAFFGKQDATEVVLEACGGSHHWGRLFSRLGHRVRLIPPQYVKPFVKRAKNDRNDAEAISEAASRPCMRSVVVKTVDQQADGIILKHREMLVSQRTQAINALRGHAAEFGVVAAKGIVKVAALLMELAADNAIPATARAMFEQMGAHIEALDQRVAAVDSELAALHKANPVSQLLAEIPGVGPLGAITMALTVEPGNFASARHFAAWLGLTPKEHSTGGKQRMGKISKAGNERLRQLLFVGAMSVIRFAKPGGKSASAWLLQLLERKPRKLAAVALANKMARIIWAMMARGEAYRRQPVAA

SEQ ID NO: 89198 - protein, 362 aa, unidentified
MSDSTTWVGMDVHKENIVTVSISGDSGTVMTRWETPNTAKGKERLAARIAGLGKARCVYEAGPCGYDLRRFLDGKGIPCDVIAPSLIPTRPGDRIKTDRRDAEKLARMHRMGELTAICVPTPAQEALRDLVRAREDANEDLVRCRHRLQKFLLRQGRRFEGKSWTREHWRWVRALTFDDANAGTVLAEYVLAVDQQLERVARLDARIEEEAQNPGIAPTVARLKTLRGVRTLTAMTIHSELIDLSRFASPRDLMSFIGLVPSEYSSGGKQRRGSLTRAGNAHLRRVLVEAAWHYRHPPHRTGETIRKRREGQPPDVIETARKAEVRLYRKFTRMVMRGKRTTVAAVAVARELAGFVWAIGRI

SEQ ID NO: 89199 - protein, 389 aa, unidentified
MKYVGIDLHKKTISGCVVVKERGKRKIAARKRLECRDEAGIKSWFSELGKFEVVVEATASYEWFVKLVEPLACRVVLAHPKKLRIIAESKRKSDKLDAQVLAEFLASDEIPLAYRPCPRVREHRALVRWRGYIQRRLTSVKNKLRHILAAYNADVPNLFTAEGFAHLATVPLTASDRFVSEQLVTELEQHQERLRAANHRLREFAATASLAEREARAVLGSIPQVGVITADVILAELGDWRRFGSQAEVASYAGLVPGFRESAGKAKQLGITKEGSSLLRWVMIEFAWRMVGASRKWGGHYHRLEARIGAKKAIVAIARRLLGMIFALLRTGQKYALALETPPPASCRSKSPRDTNPSDPVCLRGQPRQPSSLGAGVYYGGPLSVPGKE

SEQ ID NO: 89200 - protein, 391 aa, unidentified
MIYIGIDVAKDKHDCFITNSEGEVLFNAFTIPNNADGFHDLFQKISSLTNDFSNVKVGLEATGHYNYNLLGFLIDKGLPTFVINPLHTNLFRKSLSLRQTKTDKVDAHTIALMMMSGVNLQSYSNTSYHNEELKSLTRYRFDKVQERAKLKTSISRLVNILFPELEKLVPSLHMVSIYALLAEFPSSAQIASCHLTRLTNLLANASKGHYNKEKAIEIRNAAKHSIGSNMPTKSLELKHTIRLIQELTSEIDEIECSIKSIMDEIRSPILSIPGINYRMGAMIIAEIGDFNRFSSPDKILAYAGLSPSTYQSGQLDGCYSHMEKRGSRYLRYALFNATKFVCIWDNQFSAYLAKKRSEGKHYNVAISHAAKKLVRVIYQLEKSGQLYHRAA

SEQ ID NO: 89201 - protein, 339 aa, unidentified
MLGIDLGRNVFHLVGLDSTGRVLIRKRCSRAQLLTFTANLQVQLIGMEACSGAHFLGRALREQGHEVRLMPAQYVKPYVQTNKSDYLDAEAIAEAVQRPRMRFVPIKTEEQLDLQALHRVRERWVMRRTAVVNQMRSLLLERGLTLPKGRSHLDEQLPRILEDAELNLSGSFRVLLAQLKLELEQLAARIEEMDRVIQKTARENEACQRLTEIPGVGPVTATALIAAVGNASAFGKGRRLSAWMGIVPGECSSGGKQKLLGISKRGNKYLRRLFIQGARSVLQQRYKQAPGLSSWLAQLLGRTHQNVVVVALANKLVRMAWAVLCKNERYRPPVFAGTT

SEQ ID NO: 89202 - protein, 386 aa, unidentified
MQASTVGTPTASRYGTIFITIELSQKSWLVTLHSPDQDKLSRHQLAGGDHAGLLALIDRIRDRAARALGGVPAVASCYEAGYDGFWLHRLLLAAGITNYVFDPASIAVDQRARRVKTDRIDGETMLRTLMAFLRGEPRVVRIVRVPSAEQEDARRASRERDRLVKEQTAHTNRIKALLRLLGMAIGNPRRRDWLSWLATQRDWQGRAVPPQMLGEIRHEHARLMLVRERLDALAKTPAQADPTPAAAQMIERSELLLRLKCLGPAFATTLTNEVFYKDFRNRREVASYFGLTPSPWRSGGIDRDQGISKAGNPRARCAAIELAWLWLRHQPDSKLTQEYRRRTLDAGKRIKRVAIVALARKLVVALWRYLTTGLVPDGAVLKAVKV

SEQ ID NO: 89203 - protein, 493 aa, unidentified
MYIGEASKFSPRSESTNGQPGRACSEGWGKEMAGKHEGERWEGSRRQLQGLPVIRRKVAGIDLGSEPHWVCAPTPDGSAREIASFGATTAELIRLGEWLKARQVESVAMESTGVYWIAPHEVLEAQGFQVLLVDTRQLARVPGRDKKTDPTDGEWIQRLHSCGLLRSSFRPEEAVCMLRTLVRDKANLVAERGDWLRRMQKSLDQMNVRVHRAVSDIDGVTGMAILRAIAGGERDALNLAKLRDPRCSKTEQEIAEQLSGHWREDHLFSLQQALQMYDAVEERIAAYEQEILRKLGEMERAEQRGQTAPPLNNGNKANMIKKRGQEPLRQALYRMSGVDATHIDAIGVETLEVVLSEYGPDLSRFPKEKQFVSHVTLAPHVPTSGGKPLRKRKRNSASTRVAAALRMAALSLRHSQTALGAYYRKMAQRLGGDIAVFATARKLATLIYRLLRWGQPYVDEGAKAYEARYHQQRIERLAATAKQLGYQLAPINA

SEQ ID NO: 89204 - protein, 431 aa, unidentified
MSERDYNKQVAKRQRIRSTTLVVGVDVGKAYNAVGFMNKEGKVLGNCAKLYNSREGFEQFMEMVEDLKARYRLKDVLIGMEPTGHYWRKLAYFAKGHGYEVRFVRTTALKHHRELNESASAKSDPRDALTIANITREGKYIDTVIEDGPLRQLRTLSKARERLLRYSVSAKNSLHAALDDYFPELHELFWSMGSRSLWAILDRCPFPEDVRLVEVSMLKGLIVKSSRKKAGAVQKAEALYQAATKSIGLRPIGSADRYRVQMCLEEVKRTVLTLKSMDQQMKSMLKEIPAAPYLLSIPGIGALSAAVFLGELGDPGHFHNARQIVKYAGYDPQESDSGSWVSRKFISKKGRWLMRKYLFFMSMRVVVLTHYFKTYYERKLETKNRVGQLPRRKEMLCAVAIKLIKVIFALLRDKRRFDDTRDTVMALSQAA

SEQ ID NO: 89205 - protein, 349 aa, unidentified
MSKSSSQYVGLDVSLKETSICVFDDAGKIVWRGRTGSTPEAIASAVKRHAPHAVRIGLESGQLSSWLFHELKAAGLPIICVDARHAKAALSLKVNKTDANDAFGLAQIMRVGWYREVTVKGLDCQAVRALLVARAQIVSQITALKNCVRGILKTFGRVLPKGLRSQFPGRVRAAIDGHPVLGAIIEPTLRVLEAMRAQLLVYDRAVIQRARSDDTARQLMSAPGVGTVVALAYMTGVEDPARFKRSSSVATYFGMTPRRYQSGEVDHAGRISKCGDGMVRGLLFEAAKVLLSRSARPSALKTWGEALGKRSGAKKATMAVARKLAVILHRMWTTGTTFQWNAEAASPAA

SEQ ID NO: 89206 - protein, 335 aa, unidentified
MKKVFVGIDVSKEWIDVCVTLDGKVVFHQCFDNNKPGFGKMVKWVKEYGKQPDWLVCMEHTGIYAQLLWHYLTQKTITYCVVPGQLISSGLEIRRGKNDRIDAGDIARFAMRYADELKPHRLPTQVLSRLKMLFAYRVRLVKAKGLISVPAGEAKVFAAKESKEMRSDSNSLVQILEARIKKVEKLIDQVINGDEQTRQCYQLIISVPGFGPVTACYLLIITHCFTTLNISRKLANFGGVAPHPHKSGKSIKGKTRVSPVADKKLKALLSSGAGSLINHHKPTQQYFLKLTAKGKNENLVRNNIKNKMLHTVCTVVKRGTPYLDNYQSTYKKNVA

SEQ ID NO: 89207 - protein, 343 aa, unidentified
MQTVTTIGLDIAKSVFQVHAVDAAGKVIIRRQLKRRYVLAFFEKLPPCLIGIEACASSHHWSRELQALGHSVRLMPPAYVKPYVKRQKNDATDAEAICEAVTRANMRFVETKTADQQSGLVLHRTRHLCMRQQTSVINAIRAHLAEFGVVAPVGRNGVEELLRVVADPDDKRVPEVARVCLVALGAQLRRLKDQVLEFDRMITAWHRSNKMSIRLDECPGVGPVLATALVATVADPKSFRSGRNFSAWIGLVPKQHSSGGKDRLGSISKQGDRYLRSLFVIGALAVIRYAKVHGTRHRPWLTALLARRPAKVAAIALANKIARMVWAMMAKCERYKEPVALAA

SEQ ID NO: 89208 - protein, 338 aa, unidentified
MEFKRIAVDTSKSVFTLHGVDAEERAILRRDLRRVPFEAFFAKLAPTEVVLEACGGSHHWGRRLTALGHRVRLIPPQYVKPYVKRGKNDRNDAAAIAEAASRPSMSFVPVKSVAQQADALVLSLRETLIGQRTQLVNALRGHATEFGVVAAKGIERVEGLLAKLAEDGSIPLVGREMLALLGQQIAQVNAVVAELEARLKAQHKANPVSQRLAKVPGIGPIGALSLAVGVDASRFESGRHFAAYLGLTPKQHSSGGKQRLGGISHAGNERLRQLLVVGAMSVVRFAKPGSKTASAWLLGLLERKPRKVAAVALANKMARIVWAMMARGEAYRGQVLAG

SEQ ID NO: 89209 - protein, 338 aa, unidentified
MNLSRIGLDLAKQVFQVHGVDRHEHVVCRRQLKRAQGRDFFRQLPPCLVAMEACGSAHYWARELRELGHTVRLIAPQFVKPYVKGDKHDAHDAEAICEAASRPSMRYVPVKSAEQQAVQSVHRVRSRLVRARTALCNEVRGLLGEFGLIATRRGRAATMALLETVTATEPAPLPAPMGELLRELKDELQTLEARIARLERQIQAHVRGDARIQRLLAVEGIGPISASAVAASAGDARQFRTGRQFAAWLGLVPRQHSTGGQQRLGNISKRGDTYLRTLLIHGARAVVRCCANKTDARSRWLQGLLQRRPANVVAVALANKNARILWALLSRETCYRPG

SEQ ID NO: 89210 - protein, 312 aa, unidentified
MPENTPPDYVGLDIAAERLDYCVNETDESNCPNNPIGRAELIAKVKRLSRPRIICEASGGYEKLVVAELLAAGIEVCVVQPARVRFFAYAEGLLAKTDRIDARLLRRYAQKVQLRLAVPVDAVLATLRELIEHRRALTTQLCEVEGRLPLAGVTLAKLLGRQRTFLKKQIEQVEKTLRQHIDNDPDLRSKSERLQQIKGVGPVLASTLLAYVPELGKIESSQLSALIGVAPHPRDSGKNRAPRHVRGGRSQVRHVLYMAAVCAARCNPILAAFYQRLRGNGKPAMVCLIAVMRKMVCLMNRLIQDPNFALAS

SEQ ID NO: 89211 - protein, 414 aa, unidentified
MLAPEIRYVVGIDVAKRTHTVCALDAQTGKVQLRPRTIEATATGYAEVCTLLQTWGDPQTILVGLEATGCLWEPLYEALTQAGYSVLVLNPRQTASWAASLGLRAKTDGLDAQTLARGLLAGYARASTVPSERVQELRTLTRARRDLVQSQTAAKQRLRDELVVLFPELPEHTPAHCDLFAPALLQLLETYSSAQAVAQAPLEEVTAVVTRASAGRWTQEQAQALQHLAQHSAASHRAVAARSLVVRTMARHLRDLQQHLADLETAIATVLADDADSQRLQTLSGIGPIIAATMRAELGDVTRFEGVDHVIAYAGLDPRTVQSGAFVGQKHLSKRGPGALRHVLYLAAVGAVRCRPEWRQRYQRLLDRGRPKKEALTILSRAVLKVVYHLLRTGTSYDPGALAALKPGPAPGRA

SEQ ID NO: 89212 - protein, 354 aa, unidentified
MVKPASNQIAIIGIDIGKNSFHVVGLDKRGAIVLRQKWSRGQVEARLANIPPCLIGMEACVGAHHLSRKLNSLGHDARLMPAKYVRPYSKGQKNDFRDAEAIAEAVQRPTMKFVATKTAEQLDLQALHRVRERLVSQRTGVINQIRAFLLERGVAVRQGPRFLRAALPNILAAPSEVLSPRMARTIEDLAGDWRRLDERIEDLSSQIETLAREDAGCDRLMSVPGVGPIISSAMVAAIGAGEVFSKGRDFAAWLGLVPKQISTGDRTILGKISKRGNRYLRALFVQAAWVVLIRPKSWERHGLKPWIEAAKKRLHHNVLAIALANKLARIAWSVLARGRNFEARTIAALNAQPA

SEQ ID NO: 89213 - protein, 328 aa, unidentified
MTNAATRESAPLDFVGVDIAQEALEWALHGVRDTHSASNNETGFQALLEALKDRRIGLIVIEATGGLERALAGFLLRHGLPVAVVNPRAAREFARSMGHLAKTDAIDAVALAHLAQTLAAKADQAGVAFVAPSVEVEALQAMVARRVQLLNMRTAEKNRLGGAMRVLHKSIEAVIKTLDKEIAKLERDIDAHLERHFKAQAQCFEAIKSLGPITCATLLAFMPELGTISNARAAKLAGVAPLNRDSGKERGKRHIWGGRRVVRCALHMAVLSAVRLNPVIKVFYERLIAAGKPKKVALTACSHKLLRILNAMARTGQPWNDEFHAVTP

SEQ ID NO: 89214 - protein, 356 aa, unidentified
MSYDVKYIGMDVPKEAIVIAVLNESGKLVMESVIETKASSILQFLHGLRGELHVTWEEGTWAAWLYDLLQPQVQPIVVCNPRRNAFLKEGSKSDQVDARKLADLLRTGMLRPVYHGENGLRTLRELGRSYQTISKDLTRVMNRLKALYRGWGIPCAGTQVYAPRYREEWLGKIVQAGVRRRAELLYQQLDGLQGLRRNLRPEFVAESRKHKAAKLLRQIPCIGPIRAARLIALMPTPHRFRSKRQLWTYSGLGIETHDSAQYRFVRGQLQLSKKPQQLRGLNRNHHHEMKEIFKSAATRASCGMGPFHDFYAGLLAKGMKPEMARLTLARKIAAITLTLWKKEERFDAEQLKTQAA

SEQ ID NO: 89215 - protein, 360 aa, unidentified
MLYLGIDQHRKQLTVSIRNEAGDVVLRRQVSTEWGRVRAFFDELRRLAQPERGFAAIVEVCGFNDWLLKMLTEYGCAEIVLIQVEKRSRKKTDRRDAHQLSGLLWVNRGRLLAGQRVEGVRRIHPPTDREAEDRQLTAARQRIGRHRTRTINKIKHLLRKHNLEQEQPAKGLDTKRTRQWLAALPLGPIDRLEMDLLLGQWKLWDDQIAKLELEIEKRQAKNATAALLATIPGCAAYGSLALASRIGSIERFPRPASLANYWGLTPGCRNSGEATDRLGSITKQGSAMARFVLGHMVLHVLRRDGRMKAWYGRIKRRRGSKIARVAVMRRLATIIWHMVKHNEPYVMGGPPPRKLAPRAA

SEQ ID NO: 89216 - protein, 343 aa, unidentified
MKLSYVGVDLAKNVFQLHGIDRHGQAVWRRRLRRKQWLKVLLDTIEPGCVVGMEACSSAHHWARQLQAKGYEVRLIAPQFVKPFVKSNKNDRNDAEAICEAITRPHMRFVPVKTVEQQDIQAIHRVRSTIMSQRNAKANQIRGLVAEYGIVAPQQMLALRKAVPEWLEDADNGLSVRFRALLHDLWLDLQHLQERLADLDRQIEQIAKDNPVTQRLQQLRGVGPMVATALVASVGDGSQFKKGRQMAAAIGLTPRQHSTGDKRRLLGISKRGDAYLRTLLIHGARAVVSQAKRRDDPLSLWVTGIAARSHTNVAAAALANKTVRIAWSMLRTESDYDPILAVA

SEQ ID NO: 89217 - protein, 348 aa, unidentified
MAHFVGLDVSVKETSVCVVDDAGKVILERQVPTEPDAIIALLTSLGVTYGRIGIEAGPLSQWLVNALTAAELPVICVETRHMKALLTAQQINKTDRNDARGIGQMMRVGLFKPVHVKTLVAQEQRMLLTSRKLLQRKLLDVESDLRGTLRNFGLKVGVVSGGRYEARIRELVVGFPRLAAIVEPLLSVRRVMRQQLAVLHKMLLDTVRDDPVCRRLMTAPGVGAVVALTYRATVDQPQRFVHSRAVGAHVGLTPKRYQSGETDYDGGVSKCGDALLRTMLYEAAQVLLTHGSKWSWLKAWGMRVAQRRGIRRAIVAVARRLAVVLHRMWVDGSEFRWNKDSAAAPTVA

SEQ ID NO: 89218 - protein, 330 aa, unidentified
MDAISVGIDVGKDSLVVARYPTGERWTSETTAEAVEALVTRLRAVSPTIVIVEATGGYERAVVASGAAAGLPMAVINPRQVRAFAQALGRTAKTDAIDAAVLAEFGARVQPPTRALADAETQALAALLVRRRQLVEMIGMERRRLAQAPATGKITRDLRNHIRWLERRVDDVDDEIGTAIQASPVWRVQEDLLRSVPGIGPTTARTLLGELPELGRLDRRAIAALVGVAPFNCDSGHHRGQRHIWGGRASVRASLYMAALVATRYNPVLAVFYRRLRAAGKPAKVALVATMRKLLTILNTMMKHQSRWNPEAASTPASPSRPARAVAVPV

SEQ ID NO: 89219 - protein, 321 aa, unidentified
MLTEASLSDKQYFGVDVSAEWIDVGRHGHVAVARIANTPEAIRAWLATLSPATVALVAFEPTGGYERALRRELVLAGLPFARVHPNELAAFRRRRGVKAKTDPIDARLLADFAAIELSGRGLAPLVEGDEALREMTTRRRQLIDQLQAERCRAALAELAIVREGLGAVIGVLTASLDRLEAAIESYIQAHPALAATARNMRSVTGVGPITVQTMLGELPELGRLSGKEIAALVGLAPQTRDSGKKRGRAATGHGRPGVRRVLFNAARSAIRWNPVMKAFYQTLTRDNGRPGKVALTAVMRKILVTLNAIARDQQPWKHANA

SEQ ID NO: 89220 - protein, 405 aa, unidentified
MRYYLGVDWADQTHAVWVVDESGTKIAARAVSHTAEGLGEWGRELDEWRAQGIALWAAIERPDGRVVDCLLDHGVVVYPVNPKALDRARDRFRQSGAKSDPFDARVLADFLRTDHAHLRALQPSSEAAQELKLLTEDCQRHIRQQTRLVNQLTATLKAYYPRALEVAEVTSALAREFLPAYPTPEALTALTERQWQRWARAHRLPEARAGELWAVLRQPQLPVPAHVVRAKARLMQTLMEQLRPVVAAVAQYRKAIDDFFASMPAAQWARTLPIGKHGLTARTLWARLGDAPGRWESFRHLQAHAGTVPVTKRSGKQQRVVQFRFACDKALRYVVDQVAYLSLLSSAWARPYYDQQRARGHSHRQALRALGAKWLKIIFIMWQRQVPYDEQYHLATMTRQQLGRR

SEQ ID NO: 89221 - protein, 358 aa, unidentified
MKYIGCDFHPSFQQIAMLDKETGELVERRLLHMEEARAFYEGLKGPAVVGVEASGNMDWFESLLARCQHEMWIGDAGAIARQEGRKQKHDRRAAALILKLMVENRFPKIWVPTVAERDLRQLLIHRQHLVRMRSRIKNQLQHIALNQGWQKKRKLWSQAGLELLRSLKLEPWTEQRRDTLLDMLEELEKKIRPLDLAVAKEAEERETARRLATHPGVGPVISLATVLTMGDVKRFTDSRSWVSYLGLNPSEESSGQRRRLGAISKQGNPFLRQLLVEGATSAARGDKDLGRVYTRLKARKHHGVAKVAVARKLAVRLYWMARTEKSYPEVVRTQGSQSHPVAAVMAVRLSRPPASPQQ

SEQ ID NO: 89222 - protein, 351 aa, unidentified
MERYIGCDVHAASCTLSVLNAAGKRLRRDVVETNGEALIGYLKQLRGNLQLCIEESEWSQWLVEILSPHVVELVVFRPEWKPGSKNDAIDADELAERMRTGRVGRPVYKDPKRFAALREWVRVYSMITKDVARTKNRLKSFYRARGVKCAGEGVYEREKRMKLGRVLPPARRGALELVGRELQALEVLKEEAASAMVRESRRHPIAGILETVPGLGPVRVAELMAIMLTPWRFRTKRQLWAYAGFGVVTRSSADWVLHDGRWVKARVVQTRGLNFNHNPKLKAIFKGAANTVISHGGPSPLLEHYEQLLANGTKPNLARLTIARKIAAIVLAMWKREEAYRPARSEELKAS

SEQ ID NO: 89223 - protein, 319 aa, unidentified
MNDAIVSFVGIDVSKHSLDVCVLPEGQQFTLDYSAESVRQLVRRLPAPGTCLVVLEATGGYQQRLVAELVEAGQLVTVVNPRQVRDFAKALGLLAKSDRIDAQVIARFGQQVRPRIVGKTSEKQAELQQLVTRRRQLVDLRTAERNREETVSSPTVRASLQHVLDLLTSEIEHLEQALQSLVESDDDWKHKLDLLQSVPGVGLITSASLLAELPELGQLNRQQIAALVGLAPFNRDSGQFRGQRHIAGGRASVRRLLYMAAVSARTHNPRLRAFAKRLAATGKAFKVVITACMRKLLVILNTLVKTNSHWTPQTLLKTT

SEQ ID NO: 89224 - protein, 420 aa, unidentified
MEVAQDDQEIIARVAALDIGKAEVVCCVRVPGVGARARRMQEVRTYSTMTRSLLAMADWLTGLGVTRVVMEATGDYWRPPFYLLENSFETWLVNAKDVRHLPGRPKTDRLDAVWLCKVAERQMLRPSFVPPPAFRELRDLTRYRVDLVTTRTAEKQRVEKLLEDALIMMSVVASDIFGVSGRDMMAALVAGERDPKVLAQMARGRMRTKTARLEEAFTGRFTDHHAFLLRTMLARIDGITADIDVVQGRIDEQIAPFAAPVTRLDEIPGVGVTTAQAIIAEIGLDMTRFPTPAHLASWARFAPGIAESAGRKKGNSGTGKGNRYLARALGEAAVGVRGTDTFLGERYRRLAHRRGKKKAIVAVGRSILMIVWHLLSDDDARFVDLGSDYYESRINLNRRTRNHVRELQALGYKVTLEPAA

SEQ ID NO: 89225 - protein, 338 aa, unidentified
MTTGLAAGTYELFVGIDIAATTAEVSTQRPGAKAGRSFKIDQTPEGFHRLVHTLQAPGNEPSHVLVVMEATGSYWMSLATRLVHEGFRVSVIHPSQAHHFAKALLKRAKTDAIDAQTLAQLAMVLQPEPWMPPPQIYYELQQRLAQRDDLLNLRQQVRNQLHALDQYPEVIASVRTRMESLLLLFQSQIDEVEGEIAAALNQDSAWAAAAERLQSIKGVGWVTAAWTLVTTLNFTTCDTVDALTAYAGLAPMPRQSGSSVWHRPSIGHSGNGRLRTAFYMATLTAARFNPAIKAFYNRLLEAGKPEKVARCAAARKLLHIAWAVVKKDQPFDPNYAQG

SEQ ID NO: 89226 - protein, 349 aa, unidentified
MTDKPIAGIDIAKDWLDICVDGGARVERIANRAEAVGAWLDRVEPRLVGFEPTGGHERILIAALRERSIPFLRVHPNDVIAFRQSRGVKAKSDPIDARLIQSFVTQELSRRGRRGSVIGDEQLRALVARRRQLLNTLQAERCRLALAAIAAVRDSLERVITALEGSLEAIETELAAAIAGNRETAALARLLQTIYGIGPITAFALIADLPELGLLTGKQIAALLGLAPHTRRSGKTRYRETIGHGRAGVRQALFNAARAAISHPSPFQDFYHRLVTRNRRPGKVALTAVMRKLLLTANAVARDRQPWRGSRQATPAPRAGGTKCRPHGEPIARRAGRVKAAAALGAGAS

SEQ ID NO: 89227 - protein, 345 aa, unidentified
MQITTVGLDLAKSVFQVHAVDASGDVVVRKTLRRSQVLPFFTRVPPCLIGIEACGTSHHWARELTKLGHEVCIMPPAYVKPYVKRSKNDAVDAEAICEAVTRPTMRFVAMKSTDQQAALSLHRVRDLLVKQRTQLVNMIRGLLAEFGIDIPVGLERALGLARQIADHECEPDVPAVAKQLLNLLCAQVLDTHVRLQAIDRAIIALQRTDEVARRLSTIPGIGPVGATALAASVANPGQFRSGREFAAWLGLTPSQNSSGGKDRLGRITKMGDRYLRKLLVIGATSLVRRAKYKPEAADPYLLALLARKPARVASVAMANKMARVVWAVMARGEVYQARHVPSLAA

SEQ ID NO: 89228 - protein, 304 aa, unidentified
MNGIGIDVSKRQLDIGTTDGETLQVSNNRSGFSELDAWLKKRPTRQIVLEATGGYEQPVLDFLHKAGHPVARANASRARKLAQGLGQIAKTDRLDAYALAQMAALVKLPPYQPLQSWQQKMREFVRARRQAMDALTIARQQQEMVLDRELRRLLQGNITRLQTLVERLGKQIVEQVGQQPQLKMLKSMKGVGPVLQAVLASYLPELGRITGKRIASLVGVAPMSHDSGTMRGKRSIHGGRAEIRQVLYMAAMSAMRHEPRLRDFYQSLRARGKEGKVAIVAVMRKMLVILNARVRDAESGLVPA

SEQ ID NO: 89229 - protein, 393 aa, unidentified
MLGRGLDRLAVQSLRHGGRAVVEPTTTYVAFDSSKETLAVAIAESGLRGEVRSWGKIANRADAVRKLVERLAAKHPKLIFCYEAGPCGYGLYRQILSLGHACIVVAPSLVPTRPGGHIKTDRRDAAMLAALFRAGELQAVWVPDADHEAVRELVRARQTAMQEVRRSRQLLLSFLLRHDRAMPTRHHWTRAHRSWLARQSFAHPAEQIVFEELIQRIEVACARQERHDDAIRTLLPAWSLAPVVAAIQGLRGVAMLAAVTLVAEIGDFHRFASPRQLMAWLGLVPKEHSSGRKVARGNITKAGNTRARRILVEGAWTYRLPARMGEDITRRNAGLPEAIRAAAWKAQTRLCSRYRRLQNTGKPQNVIVVAIARELAAFVWSIARMVQLPARTV

SEQ ID NO: 89230 - protein, 365 aa, unidentified
MQKLIKSAAQMEKPMDKPAITVGLDLGDRFSQYCMLNRDGEAIETGRIQTTEAALRRHFEGEPRMRVALECGTHSAWISRLLEQLGHQALVANTRKIRAITASESKNDRNDAEKLARFAAHDPRLLSPIRHRNAERQRDLDLIHARSTLVRARTMIVNSLRGLVKSAGGRLPGCSTASFQTRAIASMPAALAVAARPLLDQVEALNRNIAEMDRLIEQLAARYSEIERLRTVPGVGPVVAATYVLTLDSKDKVRRSRQAGAFLGLRPRQSQSGDSDPQHRIAKTGNVYLRSLLVQAAQYVLGRFGPDSELRRWGLKLAASGGKRGKKRAIVAVARKLAIILHRMWQTGDRWQAFPQAVREPARIA

SEQ ID NO: 89231 - protein, 430 aa, unidentified
MKWSNDVLLVGIDWGREEHAVCVLKVDGAVASEWTIKHSGSALEALTDRLCELAGGEADRVHVCIELTRGSLVETLMERGFHVYALNPKQSDRYRDRHFPAGTKDDRRDAFVVADALRTDAHRLRELRSDDPLTIQLREHVRIYDDLGADENRITNRLRDQLLRHFPQLVKFNAAISDPWMLDLIEQAPTPALARAFKAGDVSAILRKHRIRKFTVDDVLTMLRERDVFVVDGTVEAAADHIRLLIPQLRLVLEQKRQVTRRLEGFLERLSAPASNGEESSSPEKVEHRDAEILLSLPGAGTIVVATMLAEASWALRDRDYHALRAHSGVAPVTRASGKRKGRHATVHRRMARDERLSNAMYHFARVASQVEPAAKAHYAALRARGHTHGRALRGVGDRLLGMAIAMLKSGALYDSSRRRPALPADRIVA

SEQ ID NO: 89232 - protein, 408 aa, unidentified
MANHFQYFFGIDWGSERHRVCLMNREGRTLAERWIEHSGDSLAELAAWLRQQTSDSPSALAGAIECPRGAVVETLLEHGFAVFSINPKQLDRFRDRYSPAGAKDDRRDAYVLADALRTDMHCFHLVKLDEPDMIRLRELSRLDDELAQEQNRAVNRLREQFHRFFPQLLQLCQCADEPWLWELFESAPSPHRAARLTEAKIARILRQHRIRRITAAEVRAVLKTKPLALAPGAAEAAIEHALLLLPRLRLLLQQRTDLARRIGALLDELATPAEGQHEHRDAAILLSLPGLGRKVAATMLSEASQAIAERDYHALRCYSGTAPITKQSGKKKIVIMRRSANERLRNALYHWARTSVVWDQASKKAYALLRARGHSHGRALRSMADRWLKVLTSMLSTRTLFDPQRRTA

SEQ ID NO: 89233 - protein, 356 aa, unidentified
MSYEVKYIGMDVHKEAIVIAVLNETGKLVMESVIETKASSILQFLHGLRGELHVTWEEGTWAAWLYDLLQPQVQHIVVCNPRRNALLKEGSKSDKVDARKLADLLRTGMLRAVYHGENGLRTLRELGRSYQTISKDLTRVMNRLKALYRGWGIPCAGTQVYAARSREEWLSKIPQAGVRRRAELLYQQLDGLQALRREVRPEFLAESRKHKAAKLLRQIPCIGPIRAARLIALMQTPHRFRSKRQLWTYSGLGIATHDSAQFRFVSGQLQRSKKPQQIRGLNRNHNHEMKEIFKSAATRASCGMGPFHDFYAGLLTNGMKPEMARLTLARKIAAITLTLWKKEERFDAKQLKTQAA

SEQ ID NO: 89234 - protein, 347 aa, unidentified
MATTLNHHWCVGIDLHKDTLTACTFCRCCGEISFRKIACKCRKQIVDYFGALPRPHSVAIETVGFYRWLWETLDPIVDKLVLADATQARALAGRRLKTDREDAFNIAELLAAGRLPTSYAPTAEVQLLRDLTRHRHGFSRQHARVLCRVKSLMNANNRPGPDRLQSDGLTRYIKAQGPKLPEQHVAMLWNCVDQLALTERQIAQAEREIAQLVQGESFRSTYDILVSFPGVAMVTAATVLGEVGDFTRFTHRKAIGRFAGLNPRVFASGGKQRIGHIAKAGSPQLRWILQQAAWTAMRTDDNVRRIFLRIAKRSGRKAAAVAIARKLLTWMWSAVLKGETYRSGIAV

SEQ ID NO: 89235 - protein, 385 aa, unidentified
MKPPPRHVRRRSALLPQQPKGDQVIVVGVDPHKRTHTAVAVDQATGELEAELTIGARPPGHEELLAWARELGHERLFALEDCRHVSGALERFLIARGERVVRVAPKLMGQSRRSSRSYGKSDSIDALAVARAALSEPELPEARLAGAELEVKLLLDHREDLVGEANRMANRLRWHLHDIDPELGLARGRLDRSDWMERLARRLSRGEQTVRVRICREQLRRLRTLAREIKGAEAELAALVRSQAPELVELPGCGTLCAAKLIAEVAGVERFSDHAKLAMLAGVAPLDASSGRQQRHRLNRKGNRQLNLALHRIAVTQARVHPPARAYLERKRAEGKSRREALRCLKRHLARVVWRTLRAARSERMISISPNLQETEMPTPTPVLT

SEQ ID NO: 89236 - protein, 339 aa, unidentified
MEATTIGIDLAKDVFEVHGVDVKGRVVLQRRLTRKRLLECLAKVPACLVGMEACGSAHYWAREISHLGHAVRLMSPQFTRAYVKGNKNDANDAAAICEAVSRPSMRFVPVKNQQQQDIAALHRVRAQLIKSRTALANQIRGLLGEYGITVVPGIDRLRRALPVILEDEANGLSGMFRETLAEMAERLQWLDERCRRYERRIELVFRQDERAKRLGQIEGVGPLIATALVAAVGNAREFKSGRELAAWLGLVPRQHSSGGRSVLLGISKRGDRYLRALIIHGARAALRVAERKRDPRSIWISRIKLRRGPNVAAVALANRNVRVMWALLMRGDNYRMAAA

SEQ ID NO: 89237 - protein, 342 aa, unidentified
MKATTIGIDLAKHLFQLHGVDQHGKTVLKRQLKRDQMLSFFTNLPPSLIGMEACGSAHYWANKLQGMGHTVKLMAPHFVKPYVKTNKNDAADAEAICEAVTRPNMRFVPIKNGEQLAVLSLHRARQGFVKARTAQANQIRGLLAEHGIIVPKGIAHISLRLPELLEDAENDLPGTFRQLIERLGEHLKELAKQVNELEEQIWCWHKENSASQKLAKMPGIGPLTASALVASIGDAKQFENGRQLAAWLGLVPKQHSSGGKQTLLVISKRGDIYLRTLLIHGARSVLRVAERKTEYAGSWLAGVMERRNHNVTVVALANKNARIIWALLAHEREYDADHAVAA

SEQ ID NO: 89238 - protein, 367 aa, unidentified
MVEIITYERSTLVNSEKYIGLDIHQATISVAVLDSTGKVVMESILETKAATILEFFAGLRGTLSVTFEEGTSAAWLYDLLKPYVAKLVVCNPRKNALLKQGNKSDRIDARKLADLLRGNHLKPVYHGETGVRTLRERARSYLSTVKDLTRVMSRLKAVYRSWAIPCAGRDVYYRRHRAEWLGKIQEVGVRRRAEHLYLHLDLLQQLRQQARRELLADSRKHAMTAKFRQIPCVGPIRSALLVALLQTPNRFRTKRQLWAYSGLALETRTSADHRYVQGQLQRSKKQISIRGLNKDHNHDLKGLFKATATTASVRPGPFQDFYQRSLAKGIQPTMVRLTLARKIAAITLTLWKKGEDFDAKKLKSQAA

SEQ ID NO: 89239 - protein, 397 aa, unidentified
MSGFFWVGFDVGKTSHWVCVLDEEGEQLLSRKVEATEADIEAALSEIEKLCTPGERMVGLDLTGGPATLLEALLLDRQERVFRVSGIAVNRAREAYVGGERKSDAGDAQIIADQLRLRWKQLPQMRPPDEHLAELRVLVSHRRDLSQDNVRRIVRLRALLSGVFPGLEAALDLTKQSQLLAVTKVATPAAVRRLGEARLYRWLKARGVRKADDLTRRIIIAAKGQLHELPAAQAKATLAAEIASEVLRAKEQIAALESRLEELLSTLPQAAIIRTLPGMGPCLTAEFLAEASDLGRFGSADRLAAAAGIAPVLRASGASVYQRRAKRGNRILKRIFYQSAFCSLTASEVSKAFYKRKRQEGKSHKQAVIALARRRVNVLWAMLRDGRAYEEQPSSAA

SEQ ID NO: 89240 - protein, 384 aa, unidentified
MDTIITYVGMDTHKKEHSIACHYPGQEEIVRLKVRNTSSEISKMVKRILKKAPGEVRFCYEAGVCGFDLKRKIEALGCKCAVIAPSLIPVKPGERIKTDRRDALKLLAMFKAGLLTEVYAPDPQQEAARELTRLRQSARKDLMAARHRLLKFLVRHGYIYHQGSHWTGRHFRWLGSLEFENPLMRDVFDSYFTEMQHCMQRLDSLDKEVEQLAESEPYKEIVGVIKCFYGIDTLTAISIIAELFAFGRFANPGCLMSYLGLTPSESSSGEKQNKGAITKAGNKRVRRLLIEVSWHYRHPYHVSKALKERRKNQPQWAIDIADRAGRRLRKRYWYLVNRGKMPCKANTAVARELAGFIWSVLREYQARNMEKVAWRYNRKLWIDR

SEQ ID NO: 89241 - protein, 402 aa, unidentified
MNAVGIDVSKGKSMVAIMRPFGEIVSAPFEIKHTASDINSLVELINSVEGESRIVMEHTGRYYEVLAHQLSEANLFVSAINPKLIKDFDNDSLRKVKSDKADAIKIARYALDKWQNLKQYNVMDELRNQLKTMNRQFGFYMKHKTAMKNNLIGILDQTYPGVNTYFDSPARSDGSQKWVDFASTYWHVDCVRKMSLNAFIDHYQNWCKRKKYNFSQSKAEEIYGKAKELVPVLPKDAITKLIIKQTVDQLNSASTTVESLRTLMNETASKLPEYPVVMAMKGVGTSLGPQLMAEIGDVSRFTHKSAITAFAGVDPGVNESGTYEQKSVPTSKRGSSDLRKTLFQVMDVLIKTHPQDDPVYQFLDKKRTQGKPYYVYMTAGANKFLRIYYGRVKEYLSSLPES

SEQ ID NO: 89242 - protein, 426 aa, unidentified
MESTDEPVELVERVAALDLGKAALMACVRVPHEDRPGRRRQEIREYVTLSRSLLELADWLRCERVELVAMEATSDYWKPVYYLLEAEGFTCWLLNAKHVKNVPGRPKTDKIDAVWLAKVVERGMCSPSLVHPKPIRQLRDLTRYRRSLIRERTREKQRVEKLLEDAQIKLSSVIADIFGVSGRQMLEALIAGQRNPRALAQMARGTMRAKTAVLEEALTGHFEDHHGFLLQAMLDHIDALTAQIDALGARIEEVIAPFSEHVTQLDEITGVGTTAAQELIAEIGVDATRFLDAAHLVSWAKFAPIDHNSAGHKRGGNTGRGNPWLAGTLGEIVASVSRTDTFLGDRYRRLARRCGKNRAIVAVGNSVLTIIWHLLVDPDAHYHDLGSDYYSTKVNTRRRERDLIGQLERLTGKKVTLKLNASTPAA

SEQ ID NO: 89243 - protein, 470 aa, unidentified
MAVVMIGIDPHKASHTAVAISAAEEPLGELRVRACTAQAERLLAWAAAWPQRTWAVEGAGGLGHLLAQQLLGAGERVLDVQPKLGARVRLLTAGDSNKNDPNDARSVAIAALRSAGVREARPDDHAAVLKIWSKRYRDLGRTRTQVACRLHAVLCELIPGGLSKEITAGHAARVLEAITPAGAVEAARCELAAAFAEDLRGIDARIRQTRAKLATAIQATGTSLTGLFGVGPVIAAAVIGDVRDVSRFPGRDHFAAYNGTAPIEVSSGQRKVYRLSRRGNRRLNHAIHMAAVTQIRHRHSQGRAYYDKKLAEGKMPKEALRSLKRQVSNAIFACLQADARRAAARVKGPGGQQGNDSVASAAGSHPRHRLFGQATPGPGDHPTATFSSPAPGPAHGRGTAGHSPVAATPPPPTPQVQVERPQRSEDERSGGAARRRPHSAARKAKAKGSLITPQRPKGTSHPAKKTDGNP

SEQ ID NO: 89244 - protein, 348 aa, unidentified
MSWNLSAAVAVIGIDIGKNSFHIVGLDGRGAIVLRQKWSRGQVEARLVNMPPCLIGMEACVGAHHLSRKLKAFGHDARLMPAKYVRPYSKGQKNDFRDAEAIAEAVQRPTMKFVATKTADQLDLQALHRVRERLVSQRTGIINQIRAFLLERGVAVRQGLRFLRAELPRILAAPPDVLSPRMVRVIEGLAEDWRRLDERVDHLSGEITALARQDVGCERLMSVPGIGPIISSAMVAAIGTGDAFSKGRDFAAWLGLVPKQISTGDRTILGKISKRGNRYLRVLFVQAAWVVLIKPKSWEHHGFKPWIEAAKKRLHRNVLAIALANKLARIAWSVLANGRVFEARLEAA

SEQ ID NO: 89245 - protein, 370 aa, unidentified
MKMSIGVDLHKTQFTVCCLSEDRKIQESGIYPTKGRGYGAFIEKMLHWIEGGYEIAVAVESTGNTRYFCNQVMKAGVVVKVVNTLKFKIVNESVKKTDKHDARTLAEFLEKDMLPESILCSQESEDIRRLLKSRSVLVKALVSLKNQVHGLLLGYGIESRRGQLQSKKERQRILDGLADHKSDGNAARAVKPLLGTIDQIASEVKELERVLSDLVSGDEDVELLQTIPGVGLITAATIRAYTDDINRYESARKYAAHAGLVPWVQNSNKTIHHGHITKRGPRELRTAFVQMVMGMLRLQDKTYGYWLMRKYQIMKGHKGTGKSIIATARKMSTIVYAILKQREPFDPIRMLPDPKYIQMSKDARHYALAV

SEQ ID NO: 89246 - protein, 366 aa, unidentified
MKKISTVVLEGMQIFKENQLTIGLDLGDRTSRYCILDEAGEIILEQELPTTAKGIEQVFSKIPRSRIALETGTHSPWISRQLSQYGHEVIVAHARNVRLISESSRKDDRLDARTLGRLARIDPALLSPVRHRSAKAQMHLTVIRARAVLVSARTALVNATRGLTKSNGQRLPQCGTEQIHREIAKGLSQELRDALDPLLREIESLNERIAEYDTRIEQIAREMYPEVARLKQVKGVGPLIALTYVLTLDDPYRFRRSRDVGCFLGLRPGRRNSGRSEPQLHISKEGDRYLRTLLVQGAHYVMGPFGQDSDLRRWGLKLAERGGKNAKKRAVVAVARKLAVLLHKLWVSKEIYEPLRNNRNAMAQVA

SEQ ID NO: 89247 - protein, 325 aa, unidentified
MAKRITVCAGIDTGKRKLDVAIDGSCEQLQVENTAEGHKVLLEWLQRHKVKRIGIEASGGYEQPVVAALRRKRFVVIVFQPAQVRAYARFHLQRAKNDKIDAALIAACTAAVKQIYPAPDPRLSPFAEHLTMINQIGEDIMKLKNRIETCRNERIRAVWKEEIARLAKRQRTELKALAAAIRQYPDLAERLDLIHSVGGTGLATAVGILVRMPEIGQITREQAAALAGLAPYDDDSGDQVGARHIDGGRERLRRALYLAALPASFRWNPQLIALYQRLRAAGKEHKRALIACARKLLIFVNTVVARGTPWQGEPPAARTANPSTA

SEQ ID NO: 89248 - protein, 432 aa, unidentified
MYPPEATVPNPAIAAYVGIDWADQKHDVILCPQAEPAVLEHQVITHSPESLLDWVGNIQQRFGAKGKILVCLEQSRGALIYHLMGYECFELYPINPNQLASYRASFKPSGAKDDRPDAELLCELVRYHRERLVAWKPDTELTRKLATLNEGRRQAVDRRSALANEIKSTLKIYFPLALQVLENDTITALAADLLLHWPTLEALQRQSPSKLRKFFYGHNSRGEQKMLERLKLIREALALTHDAAVIEPAALRVQMLAEQLKSLLPYIARYEKQIAQLFDSHPDSFLFRDLPGAGSALAPRLFTAFGSDRSRFQCAQELASLSGIAPVRRASGQKSGKKGEKKASIHFRHACPKFLRQSFHEFAACSIRYCSWAERFYEAQRARGKTHHMAVRALAFKWIRILFVCWKERIPYDESRYLHALQNRASAHAQPG

SEQ ID NO: 89249 - protein, 334 aa, unidentified
MGKITTVGIDLAKNVFSVHAVDEGGAVVFRKTVTRSRLLATVVQWPACLIGIEACAGAHDWARRFQALGHSVRIMAARFVTPYRLRGKNDGNDAEAICEAVRRPSMRFVPVKSEEQQAILALHRVRQGFIEERTATINRIRGLLAEFGAVLPNRALEVRRGAAAASQGLPVLARGAISELLDHLRLLDERVVAQDRELEALARSSEAATRLMTVPGVGPLTALATVASVGRAHEFANGRQFAAWLGLVPRQWSTGGKARLGRITKRGDAYLRTLLILGARAALQMAARRDDKLSRWAIAVKERCGYHKAVVALAAKNARIVWAILARQSSFQAR

SEQ ID NO: 89250 - protein, 338 aa, unidentified
MTIVMGLDQHRGQITAEWIDTETGEIERARIAPAHREPVARFLQRFRGADLDVALEATTGWRFVVEEVRAVGGRAHLAEPAQTSDLRGSKKRAKSDRADARHLRELLMLARLPESWIPPDHLLDLRARVRLRHTLSDQRGEWQQRIQAVLYHHGLPKRRDLLSRENRGWVQRAALPQTAREQVTVGLGMIDALDVQIAPLDRELRAYARRQPGCRALMGHYGIGCLTAVTILAELGDCRRFSSSRHAVRYSGLDITVHQSDQRRAPGHLSRQGPPALRWALFEAAQVARRPGSPDRDYYIQAAERLGGNRACLAVARKLLKRSYHTLRELGEETLQPA

SEQ ID NO: 89251 - protein, 389 aa, unidentified
MKIYVGIDIAKLNHFAAAISSDGEIIIEPFKFTNDADGFQLLVSKLESFDKNSIIIGLESTAHYGDNLVRYLVAEFYQVCVLNPIKTCQMRKNNVRKTKTDKVDTFVIAKTLMMQDDLRFITFFDLDMMDLKALGRFRQKTIKQRTRLKIQLTTYVDQVFPEIQYFFKSGLHQHAVYALLKEAPSPKEIASMHMTHLANLLKVNSHGHFTKEQAKELRVLAQKSVGANDSAISIQITQTIQQIELLDSQLEKIEAEMTDIMKFNDSVIMTIPGIGYINGGMILGEIGDIHRFSNPNKLLAFAGLDPSVYQSGNFQAKTTRMSKRGSRVLRYALVNAAWNVVRNNATFKAYYDAKRAEGRSHYNALGHCAGKLVRVIWKMLTDEVEFNLE

SEQ ID NO: 89252 - protein, 337 aa, unidentified
MSKITLIGIDTAKHVFHLVGIDKRGNYAYRKKLRRQRLIPTLAQLEPCEVVLEACAASHHWARSITLCGHQVQLIAPQHVKPYRRGQKNDNRDAEAIISAALSPGMHFVGVKRVEQQAEQALHRVRSRILSHRNAAANELRGLLGEYGLVFRTGIKPLRAGAVCFIDSGQADALGLVEMVRDVLDELEWLQHRLDAYTHRIEQRVGNDAVSRRLCDELSGVGPLSASALRVKVADPRDFDNGRNFAAYLGMVPGHTGTGGKVKIGKIRRGHDRYVRQLMIHGARAVVQHLGAKQDEQSRWLRALLERRGFNIACVAMAHRNARQAWAILARAQAGQA

SEQ ID NO: 89253 - protein, 395 aa, unidentified
MLVTQEGPDVLSRYCPVQAFGRDKAVPSASNLECAIMKITQDVAVCSVVGGVDTHKDLHVVAVVDEHDHILGSQCFATTRHGFKQMLFWMRSFGQLRRVGVEATGTYGAGLLRYLQAAGVEVLEVTTPDKGDRRKRGKNDDLDAQNAAHAAFAGKRTVTPKSRDGMIESLRVLKACRKTAVAARRVALQMIQNTVICAPDELRDMLRKLTRMQLIRTLAAWRPDMTDYRKVASAYRIALKSLARRYLELHDEIADLDTMIAAIVDELAPTLVARNSIGHESAAQLLLTAGDNSERLHSEASFAALCGVSPVPASSGKITRHRINRGGDRAANSALHIIAIGRLRTDPRTKAYVTRRIAEGHSKLEAIRCVKRYIAREVFSLITQRRREINQLSAT

SEQ ID NO: 89254 - protein, 409 aa, unidentified
MATYFLGIDWADASFHVCVLDEAGQQVLNKQVSHQVEDLAEFGRWLLEQHQANIRLCATIEKPEGRVVDFLLDHQVEVYPVNPKALDRARDRHRASRSKSDPFDAFVLADFLRTDRGSLSVLAPNSPQAAELKVMTRDYGRLVRQQTRLLNQLTAALKEYYPRPIEVFDDLTTEIFMDFLEAYPTPDALRRLTRQQWQRFGKAHRMPATQVQQRWEALQAPQVGVPPFITRAKGKLVEVLVGQLRVTVKAVADYREEIARFFASMPEAQLTQAMPGGPSGMMLPAVLAEMGDGPGRWQSFQHLQAVGGTTPFTRQSGKGRGAFFRVACNRRLRYAITWYAYASLRQCEWARAYYDHQRARGHGHYQALRALGAKWLKILFVVRRDQVPYDETRHLANIARQNLRQALFS

SEQ ID NO: 89255 - protein, 388 aa, unidentified
MNNVGIDISKYKHDCFIVTDFGEVLNEGFSFENNAKGFSELLNELRKSDKENLRIGFESTGNYSINLKLFLEKNGYSFMEINPILVKEHIKSQSLRRTTTDKLSAMAIANYLVAKEYLPHLTSFYSTFSLKQLTRLRSDLVHQRSRYLVQLTNVLDCVFPEFKPFFDGKFSATALFILENYPSPEKIANMNVKSFDILRRKSRGKFSMDKFVMLKHLAKNTVGMYTDFYGIQMDALLDIHAQLDSKLTEVDAEITRIITEINPPTLSIKGVGEVSAAVIVSEFGDFSRFPNPGKMLAFAGLEPGYFQSGTAEHNGRMVKHGSAHLRCAILNCCRALRLHNEVFAAYYLKKIGEGKEHGVAVSHMAKKLIRLIFALETKGERFDPAKLR

SEQ ID NO: 89256 - protein, 319 aa, unidentified
MAQNDSVVVGIDVAKDKVDACVRSLSLRLTCPSSTQGRRKLTGWLRKHQVNKAIMEASGGYERDWAKLLREAGIEVRIVDPKRVRSFAQSAGRLAKNDKIDAEMIGWFAETFSAAPGQMHDAMQDELAALVKARIGLVELKTRLQSQNEHAAPRPVQKAQARILKSLAAEIAKLEVAISATIETTPQFAERAEIIESVPGFAKTTSANLIAGMPELGLVSDGIAAALIGLAPYDDDSGKRRGERHIKGGRRWVRNAIYMPCLGAATQNNPVLKAFYQRLIAKGKAPKVALTACMRKLITILNTMIARRQKWDPTLYAVA

SEQ ID NO: 89257 - protein, 366 aa, unidentified
MKQQTSAASETQTKGRNIIDYSGKTICVGIDVHQKDYQVAKVYKGICLGNHRMAADSDALIKHLRSHYSGADFKCVYESCSWGFNLQRRLKTAGMDCIVVNAADVSTTDKERKRKTDPVDALKLARDLESEDLKGIDIPDETLQKERNLIRYRSTLVGDINRSKNRLKSLLKFQGIEIPSAFARNSWSNCFLKWVQEQGLKEELGDTLLLMLEQIKLLRQLLLKVEKKLRELRKGKYNSAANLATSVPGIGPITAMLFLLEIGDINRFKGFDRLNSFVGFCPDKNSSGETDRDRGITSRRHKKLRTALIESAWAAIRIDPALMESYQALTKRMKGTFAIIHIARKLLRRLRSVMLTGVAYQKGTVV

SEQ ID NO: 89258 - protein, 335 aa, unidentified
MKKFDYYIGIDVSKLTLDVTILNECANDTETKHYKIDNTKNGIHQFVKKELGRYDSEQILFCFENTGIYSLPLAYYFSENSISYWQVPSMEIKRSRGITRGKSDKIDSKSIAFYAFTHLYKFRPSRLSLKSIQQLRLVVTEREKVLKSLAAFQTTSEVIDFVPKEIYNPVASINATMIKQLKTAAKKLEEKMVAIIESEEKLTQQFQLITSIPGIGKQTAIYLIIATKGFEAFDNWRQLACYAGVAPFPYQSGTSINGRNKVHPLADKKLKSLLTMCAIIVVRHDKEIKTYYDKKVSQGKSKMLVLNNVRCKLLARVFAVINRETPFINTLKFAS

SEQ ID NO: 89259 - protein, 368 aa, unidentified
MRMDVIGFVTFIGVDLHKCTVTLRAVRADGELLGQLKCDTKCIERIAEWIKSLPGPKWLAVEACPFVEWFIDRFTPCVDRLDIADATELSMRRGKRRKNDPNDALDIALRLARGECPLGYIADPQLMQLRKFGRHWRQLSRSLGKAKQGMKSMLNAANIRGPQFDGPRAHRWFLTFGGLLQPAQRLAFGNYLDQILLIERQREILRREMLTAARSPQFAATEQLLKSVPGIGPIWALIIASEIGPFDRFPNADALEFWAGMTADLKESAGRTQSGNITKAGSATLRWALCQAAVTLCQSDAKQEATRQRFIARMPRAKANVVMGRRLLRTLYAMVRDGKPYQCGERRDRTKAANKAKAKRNARTVQPA

SEQ ID NO: 89260 - protein, 396 aa, unidentified
MKKNHTSPPAPQGRVIGLDLHPDVFSAAALAGRDAATAQVEQSWDRLRTAELEKWARKLQPGDVVVLEASGNSFTAVERLRAAGVPAIVLESQRAGQIRKSYCANDRLDAVKLARIYLSGLAQPVWTPDETTRARRATLATYRKAVVTAVRVRNRLKSFLSDHHVRLGKGAQLTRDSGAKAVLAAAPWSSLQRMVLEEMLAELRMAHDRRQRLSAAIAREVAAYPRILQLMRLLGVRHIIAFAIMAVVGDIERFANPRKLVAYLGLTPSVEDSGLTIRGRGALVSAGRGDLRSLLTQAAQNAMNQKASPLHAWGWKLCLRKGHRNIAVTAVARKLTVSIWYLLKGLFRPLASVDDSLKVKLTKLATAIGLPAIRELGYKSKAAFIEEKEAWLLKPA

SEQ ID NO: 89261 - protein, 312 aa, unidentified
MIEQCFGGIDVSQDRLDVLLLPQGTAFSVANDEAGWSTLIGRLRGLPLTAIGLEPSGGYERGVLRALLAASLSVRRINPNRLRQFARARGALAKNDRLDARLIAEYVATMPTHVVRHDPAAARIGEIVTVRRQLRDEHVAVGNQAAQLEDAMLRRLAKRRLARIEADIRLLDKRLAEMIVADPDLARRYARLTSMPGVGPVLAFTLIALLPELGCMSRKQIAALVGLAPYDFDSGKLRGHRSIYGGRMPVRNVLYMAALSACRYNPALKAFHNRLATAGKKPKVILVAVMRKMITMLNAMLRDGASWQPQAA

SEQ ID NO: 89262 - protein, 347 aa, unidentified
MNLYKLPHKYYCGVDLHSRTLYLCVVGQEGGVLLHRSLPCDPTRFLLAIAPFREDLVVAVECVYSWYWLADLCAKEGISFVLGHALYMRIIHGAKAKSDRIDSEKIAVLLRGGLMPNAYAYPADMRATRDLMRRRLLFVRQRGSLLAHIQITHHQYNVDPPGKRITYRSNREGLGEAFEDPSVRQNIASDLTVADHLEVVIGELELAVLRQARVHDPNAFALLTSVPGIGKVLALTILYEIHDISRFPSVRDFASYCRLVKCERRSAGKSLGSGGNKIGNAYLKWAFSEAAVLFVAKSELGRTVLSRLERKYGKPKALSVLAHKLGRAVYFMLARKQAFDPQRFAAA

SEQ ID NO: 89263 - protein, 456 aa, unidentified
MKIPQSTIRLLTGRLVKILLNREVSTMKSNTQNAKIEAITEKTLVLGIDVGSETHYARAFDYRGIEYSKKPFKFSNTEAGFVTFKEWILDLKERHEKDKVVPGMEPTGHYWFNLGKFLQDNEMKPVLVNPHHVKKSKELDDNNPTKNDRKDPKVIAGLVREGRYMIPYLPDGVYADLRTASNIRFQLQAELTRIQNRISRWFNIYFPEYKTVYGKPDAKSGMLILKAAPLPEDILMLGIDGVNQIWRDAKLRAVGKARAKTLIEAAEHSVGSKEGAVSARMEIRMLLEDYESRNTRLQEVMVLIEELVKGIPMAEKLLEIKGVGIRTVSGFLAEVGDISRFNNPKELQKLAGLALVENSSGKHKGETTISRRGRKRLRYLLFEVAMSLVAKNPEFRELHNYYTTRRLNPLKKMQSLMVIAAKLIRVFYAMLTKGADYDPKKMVSDIKRPAVYLQAA

SEQ ID NO: 89264 - protein, 316 aa, unidentified
MERVEASTKIAGIDVAKSKLDVARLGSSQAVRFTNNAEGFEQLGSWLAAEGIERVGLEATGGYERAVVSWLQAHGYEVVVHQPLEVRLFARLKRRRAKNDRIDAMLIAAATAQVDTVKAAADPLLVELAEWMTAYEQASDQLAQLKNFLEHVTLPDLKASYLAQIQQAKAWKHQMLVAVVARIKSRADLKRRYALLMSLPGVGPVVAAGLVVRMPELGKLSPAQAASLLGVAPFDHDSGVFKGQRRITGGRARPRRLLYMSALAASRHDPGFSAFAKRLKAAGKKPKVILVAVMRKIIQAANLVLSRGTPWTLRNA

SEQ ID NO: 89265 - protein, 407 aa, unidentified
MGITCGIDWSESHHDVALIDEHGTVVARTRIDTGATGFHILLALIAEHGGSVDDTPIALETDKNLLVVALAKAGFTVYPINPRAVARYRERYGQAGGKSDPGDAAVLAHILRTDRHLHRPLPAVSEEGRAVKALARQHQEAIWALHQTVSRLRSVLLEFYPQALQAFPNLKHKAALTVLADAPTPAAGQRLTRGRVVALLRRSGRGNHPVLVEQILTDLHTPALGQPPRVEEAYGHTVRGLVAIVVAMGQAVDDLETELAREFDQHPQAAILRSVPGLGPVLAARVLGEIGDDPARFDNPQGLRAYAGTAPVTIASGRLRYVKARKVRNKRFGDACHWWAYTMLTKSAGARAHYDRRRAAGDHHNAALRNLANKLLGRLWWCLVNNQPWDEHGAWPDHGHTENPTAA

SEQ ID NO: 89266 - protein, 423 aa, unidentified
MDVLYERVAGLDVHKETVVACVRIMADGKARRECRTFAATTEQLTELRAWLEECRCTHVAMEATGVYWIPVFRIVDEGGFELILANAAHIKNVPGRKTDMNDAMWLADLLACGLIKASFIPNEEIQELRALTRTRKQLVREQTRHVQRIDKTMAEANIKLSSVLSDIMGASGRRIIEAMIAGVRQPKQLAELAGKQIKATPKELYDALHGRLTDHHRFLLELHLKQRDSLDETIRKIDLEIDQRIARTHAEVGGSQVPFRALIDLVSTVPGVSLVAAPAILSEIGPDMSRFPTAGHLVAWAGLCPGQNESAGKRKSSRLRKGAPWLKTMLVQCAWAAKRKKDSYYRAQFFRLQSRRGPQKAICAVAASILTAIYNILKDGVEHHDLGGSYFDRRPVELKANHLVARLKKLGFTVQLQPIAETA

SEQ ID NO: 89267 - protein, 429 aa, unidentified
MNYNTQNAKIASITEKTLIIGIDVGSETHYARAFSWRNYEYSKKPFAFSSDEAGFSSFKDWMDDIAEKHGMKVVIPGMEPTGHYWLNLGAYLQEQGMKPVHVNPHHVKKSKELDDNNPSKNDRKDPKTIAGLVNEGRFSYPYIPTGIYAEIRNLSNLRIQTQEEITRIKNRMARWFSIYFPEIKDVYRNPDAVSGLMVIKQAPLPCDIKELGVDGVNKIWRDARLKGAGIKRATTLVTAAEHSIGNTEAPRSARKEIRNLLEDYEGYKKRMDELMEEIKETLSEIPYIDKLMEINGIGIKTVSCVIAEVGDIGRFDNPKQVQKLAGYAIVADSSGKHNGESRISHRGRKRLRYALYEAAISVIGKNKEFKEIHSYYRTREKNPLKKMQSVIAVACKLIRIFYTILTKGVDYDGQKMLNDIVRPEIQPAA

SEQ ID NO: 89268 - protein, 472 aa, unidentified
MVPPLLPGFINRRCMMPRSKDTDRRSSGQFLTIHPNAAGIDIGATFHVVAVPRERDERPGRTFRTFSGDLHQMADWLTALGITTVAMESTGVYWIPAFEILEARGFEVLLVNARDVKHVPGRKTDVSDAQWLQQLHQHGLLRGSFRPRDGLVRLRAYLRHRERLVDYAASHIQHMQKALMQMNVQLHHAVADITGATGMRIMRAIVVGNHAPEQLAAYRDVRCQASEATIREALTGNYRPEHLFALRQALELYDFHRAKIAECDVEIEAVLRLLIEPRVPPETPLPSARHAKKTRNEITFDARPALYTMLGADLSQIHGFGPYTVLRLLAECGDDMTKWPTAKHFTSWLSLAPSNKISGGRILSSKTHRSSNRAAALLRTAAVSVGKTQTALGAFYRRLAARTGKATAVTATARKLAILFYRALRFGLMYADPGASAYEARYRQRVIHSLHRRAKSLGFTLVAATPAPQGVS

SEQ ID NO: 89269 - protein, 341 aa, unidentified
MQQQVNTVAIDLAKKVFHLVGTDTTGKILWRKRLTRQALMPFMAQLPPVTIGMEACGGSHYWARRFREHGHEVKLMAPQFVKPYVKTNKNDMRDAEAIAEAVTRPTMRFVPPKAIEQQDIQALHRVRERLIGARTALINEVHGLMHEYGIVIPKGVSKFRQAVVNKLDSDQDKLTALSQEMFQKLVEEFVTLAAQIAYYQEKLETLGQKHAECQRLMTVPGMGPMTATALVAAVGDVGIFKNGRQFAAWLGLVPRQHSTGGQTRLLGISKRGDSYLRKLLIHGARATLRWAQLKTDRRSQWIRGLLERRGWNRTVVAVANKNARIVWALLSRHGVYSEGVI

SEQ ID NO: 89270 - protein, 326 aa, unidentified
MTHDSSQLVSPLFAGIDVAKDTLDLARSDSGELLTFANDAHGIGRIVALLAAARPARIVVESTGGLERPLLEALLDVDLPVALVNPGRVRHFAIGIGILAKTDAIDASVLMEFARLAEPRLAQKRSENQAELDALITCRRQLTAARTGQANCRLSTRSASAQKSIDAVLKTLDKQIELLDEKIRKLIDSDDDFKHLDRLLRSVPGVGPVLSSTLLGELHELGDSDRRQIGALVGVAPFNHDSGTLRGKRSIRGGRTQVRCVLYMATLAAIRFNPVLRNFAQRLGRTGKASKTIIVACMRKLLTLLNAMVRDNLTWPELRVVKALDL

SEQ ID NO: 89271 - protein, 313 aa, unidentified
MSTQKKYAGIDVSKHKLNIAIYPSNEEWETGNDDEGIAQIVKKMKQKKVELVVLEPTGGYERPLVLALHLATVRLALINPRQGRDFAKSLGRLAKTDRVDAMMLARFGEATKPEPREIPDKASLELEALVLRRRQLVSIKAAEKCRRSTSLSFIRPEIDEHIRLLEKQIKVLGKQIDERIKNNEEWKARSKILETVPGVGEVTSMTLVAELPELGHLDKKKIAALVGVAPMNCDSGKYRGKRRIWGGRASVRSALYMATFAAVRWNPVIRPYFESLMARGKLYKVAMVACMHKLLGILNAMVAHNKPWCPQLS

SEQ ID NO: 89272 - protein, 313 aa, unidentified
MSQNNTSILYVGLDIAKLTLQLHLAGRFHALTNDPKGQAQLLKLLSDHPTAHVVCEASGGYEQALVRFLQAVDIPVSVIEAARVRHFARAQGQRAKTDPIDAALLTAYGYAIKPAATPALAPARQQLAALAQRRRQLLDLRTIERNRAEHYTDPFCVRQTRQLQKALDKQIEQCHQAITELIAKDAVLAHQAERLQAIPGVGAVTAATVLAEMPELGKLNPQTAAALAGVAPYNYDSGPLKGTRHISGGRQVVRCALYMATLSAVRHDRILKAFYQRLLAAGKAKLVALTACMRKLIVLMNHLLKNDNFQLAS

SEQ ID NO: 89273 - protein, 381 aa, unidentified
MKKDTRFVGLDVHAETISVAVVELDGEIRSWGSIPNRPEAVRRLVKRLGRAEQLRACYEAGPTGYVLYWQLTALGVPCEVIAPTLVPQKPGDRVKTDRRDAEKLAVLLSGGHLTPVWVPDAGHEALRDLVRAREAAKRDQLRARHRLHKFLLRQGRRAPMGIKAWTEKHLQWVRRTVRFEWAAQEAVLLDYLTEVDHAHDRIARLERDLDAAVEAAPERMRAVIRALQALRGVALVSAATIVAEVGALSRFARARQLMGYSGMVSREDSSGGRVRRGSITKTGNAHLRRIVGEAAWCYRHRPAVGAALRKRQEGLGEEVKAIAWKAQHRLCSRYRRLLAKGKTKQQVATAVARELLGFIWAIGVQVEQAHTPVRVQRRRAA

SEQ ID NO: 89274 - protein, 374 aa, unidentified
MTKSNILFIGLDVHKESIEVALAEDGIGGEVRHYGKIGGTLAAVDKLIRKLVSLGKTLHFCYEAGPTGYELQRHITKKGHICVIIAPSLIPTKPGDKVKTDKRDSVQLARLFRAGELTPIYIPEREDEAIRDLSRAREDAMIIQKSARQRLKSFLLRHNIRYAGKARWSEKHLRWLADEVRLPNAAQQVVFQEYVNTVTEAAARMERILKEIHHYVKLWRMYPVVEALMSMRGVQMVVAVTMVSELGDIKRFQSAKQLMSYLGLTPSEYSSGERTKRGGITKTGNRHARRILIEAAWAYRYIAKVTPEIQKRQENVPCKIRDISWKAQIRLCKRYQIMLKKDKPKNVVVVSIARELAGFMWAIAQEIEIPKPQS

SEQ ID NO: 89275 - protein, 356 aa, unidentified
MTEAYDGRQVVGMDLHRRRSVLVRMSEDGRRLGSARITNSPAALRQEIARAGKHPRVVLEATYGWYWAADVLEAAGAEVHLAHPLGVKAFTYRRVKNDERDSADLADLLRMGRLPEAWIAPHEVRELRELTRYRQKLVHLRTSCKDQVHGVLAKLGVPVACTDIFGVAGSAWLDTLGLPQPYAGKVTSLRHLAGELTTEITMLSEVIASLLAGDRGYQVIQQLPGIGPVLAAVITAEIGDVTRFKNAGQLCSWAGLTPRHRESDTKVARGHVTKQGSRLLRWALIEAIQRIPRDSAIGAAKDAIIARRGKEAKNIAKVAAARKLLTLVFYGMRDGQIRCLSRPPADPAITQTARAA

SEQ ID NO: 89276 - protein, 422 aa, unidentified
MKKRIYRKMPVNEFQPESITLAELAGRLVFAVDIAKVDMVAALAAGDGRVMNTISWKAPADNLTVLGILRGFRAQGVTVEVVMEPSGTYGDVLCHQLVQDGFAVFMVSGKRTHDAREMFDGVPSLHDAKAAAIIARLHADGLSRRLPEEQPERRQLRAALALMDLHQERYLQLVHRLEGWLARHWPELPTVIDLTSSSLMALLARMGGPADVAAAPARARRLLLGISHRLMPEDTVAAVIAAAATSVGVPLVGLERDALMAIATDAYRAHRAFTTAKTKVDQLAARTPAAALAPAVGHTTAAGIYAEVGDARSFSCARAFLKAMGLNLKEKSSGTVQGQLKITKRGPSRVRQHLWLAAFRWIQKDPIANAWYQRKKQRDGGKGSRAAVALMRKLAKALYHVGRGATFDSRKLFDTSRLPLPI

SEQ ID NO: 89277 - protein, 329 aa, unidentified
MKLVIGADVSKKKLNISEYDGKNHKLKVTLNKSSDIERFLKKYDKSKKDLLFVMEATGIYHLQLANILYERGFLVSVVNPLIIKRYAEMKMLRAKTDKVDAKVIAQYGYEQDVKLFQPRSKKRQRIIKILKAIEDLTVSKNSYLNRLEALDKDPLKERSVEECFNKLISELNISIKRLEKELKNLINKHYLNEYSRLLSISGVGPKTAIIIIAFFGRFEDFKNSKQVVSYIGTNPSPKESGSSLRGRGRISQKGNSYLRKQLFMTSLSAMQHNNACKNMYERLSLKGKEHKVLRVAVLNKLVRQIFVVLKYDREYDPNYEEKFTSLVYA

SEQ ID NO: 89278 - protein, 403 aa, unidentified
MNSVGIDISKGRSTIAVMRPFGEVVISPFEVRHTDSELSELARQLKILDGETRVVMEATGNYHAPVAKLLHDAGLYVSVVNAKLVHDYGNNELRRVKTDRKDAVKLANYGLDRWLTLTRYVPEEDTRLLLKNCYRQYRQYSKVQTVLKNNLISLLDTVFPNVNRLFSSPAREDGSEKWVDFVAEFWHCRCVSEKSEKAFANKYQRWCRKYGYNFNEAKAHTIHAEASGHIGVMPMSETTKLLVEQAVAQLRATSTALAALKHEMQSLASQLPEYPAVMDMFGVGPTLGPQLIAEIGDVRRFYSKKALVAYAGLDAPPNDSGDVTGRHKSMSKIGASSLRRTLFLVMSVYLQTAPLDEPVYQFMDRKRAEGKPYRVYMMASANKFLRIYYATVKAYLESLEHTA

SEQ ID NO: 89279 - protein, 466 aa, unidentified
MKKNDKKKVKSRKKRSKKRDLNSLPTLNINAAGIDIGSEEHWVAVPEDRDESPVRRFGCFTSDLHAMADWLKKCGIDTVAMESTGVYWVPLFQILETQGFDVKLVNARHVKNVPGRKTDVEDCQWLQQLHTYGLLSGSFRPDDSICVLRSYWRHRDNLIRYAAAHVQHMQKALTEMNIQLHKVISDITGVTGMRIIRAILDGERNLVKLAQMKDPRIKKSKETIAKALEGDYRPEHLFALKQAVELYFFYHHQIDACNHEIEDYLKQLESEIDSDPDVKTMKRNKQISKNEPSFDLTSHLYHITGMDFTKIDGLNVLTVQTILSEVGLNPEAFGTQKRFASWLGLCPENRITGGNIKSVRTRKVINRAAKAFRLAANSLKNSSSALGGYYRRMRARFGPPKAITATAHKIARIFFHLWKNGGTYQDLGADYYEQKYKDRVIKNMKKRAKQLGFQISLQPIVNAEVS

SEQ ID NO: 89280 - protein, 412 aa, unidentified
MEVLHERCAGIDVSKRDAKVCLRSPGNRPGTYQRTVVTYGSTFNEIARLRADLERARVSMVVMESTGDYWRPFFFGLAGTLNVELINARQAKHLPGRKSDVSDAAWLAELAAHGLLHGSFVPPEAIQELRDLTRTRKHVAEERTREFARLERGLEAAGIKLAAVASSLTTKSSRAVLDAMVAGERDPQTLAGLVHVSMRGKTGALIEALTGRFTDHHAFMTKFHLNNIDHLDDAMTELDARIDEVIAPFQAARELLTTIPGISTRVAEIVIAEIGVDMSVFPTAKHLASWAGVCPTQNESAGRVKSTNTAPGNHYLKAALGIAAMTASRSRNSYLAVKYRRLATRQGRMRALVAIEHTLLVLIWNMLTNGTAFEELGPDYYDRLNPERARNRAIRQLNTLGYEVQLTPTQAA

SEQ ID NO: 89281 - protein, 364 aa, unidentified
MSYRNRKNAQWREKPERTVGLDLGDRFSHYCILNAQGEVIEEGRIATTEKGLRQQFANVPRQRIALECGTHSPWVSRLLQQWGHQVIVANAREVRSITHSVSKNDRHDAEQLARLAQSDPELLKPIQHRSRARQQDLNLLRARHTLVRARTLVINSLRGLAKSAGGRLPNCSSESFPKRAAEHIPASLTPLATPVLEQVATLNTHIAALDQQIETLAQRYPEISLLRTAPGVGPVVAAAYVLTLDRPDSVAHSRQMGARLGLRPKQHQSGDRDPQQGITKISNRYLRSLLVQSAHYVLGRFGPDSALRRWGLQLAGTGNQGAKKRAVVAVARKLAVLLHAMWRTGQSYRPFPPLRVRAVPNSNP

SEQ ID NO: 89282 - protein, 415 aa, unidentified
MEKQRNKVCGADIHKKFLVATILSRDGTKSSGRFGMTLDEIFRFKEWVIENNCEQVAVESTGVYWVPIHTVLEEKIEVIIANAYKIKHIPGRKTDMRDSEWIAELCLNGMIEPSRIFPKEDRELRTLTRARESLVNNSTQMKNRTHQALESSCIKISSVLTDIFGKSGQKIVNGLLEGKMIDEILAGINSKTVKKKEQELRDAVKNSLDPAKILLIRNCLELMEEIEKKIKKLDIEIMSRSVRMKEDVEIAMSIPGIAFISASAILAEIGDYRDFKNGEKLAAWCGLTPRVSQSADMLVTGSITKQGSKHVRRMLVEVAHSISRTKNIVLKRFFLKIKEKKGTKKAAVALARKVLCILHHLLINREKYQENGNAKSKPVKFDWTSSQIQMTEQDMINVLANAGYIIKKKDARGCI

SEQ ID NO: 89283 - protein, 354 aa, unidentified
MSQTLKTAIAVVGIDIGKNSFHIVGFDQRGAIALRQKWSRGQVEARFANMPPCLIGMEACVGAHHLSRRLKALGHDTRLMPARYVRPYSKGQKNDFRDAEAIAEAVQRPTMKFVATKTADQLDLQALHRVRERLVSQRTGIINQIRAFLLERGVAVRQGLRFLRAELPRILATPPDVLSPRMVRVIEGLAGDWRRLDERIEGLSSEIEAVARQDTACERLMSVPGIGPIISSAMVAAIGTGDVFSKGRDFAAWLGLVPRQISTGDRTILGKISKRGNRYLRVLFVQAAWVVLIKPKSWERHGLKPWIEAAKKRLHRNVLAIALANKLARIAWSVLARGRAFEVRKVDEAAAQPA

SEQ ID NO: 89284 - protein, 342 aa, unidentified
MRSVVTVGLDIAKNVFQAHGIDAEGSVVFRKRLTRAKVTEFFAALGPCLIGIEACATAHHWARTLRELGHTVKLMPPAYVKPYVKSQKNDAADAEAICEAVTRPTMRFAEVKSIEQQSVLSMHRLRAQLIRHRTRLANTMRAHMAEFGIIAPIGRLGLERLIHIICDETDDRITPIVRRALGHLVNQHDQQVMQILDLDRQIMIWHRSNETSRRLATIPGIGPLAASALAATIGDAKVFSSGRALSAWLGLVPRQNSSGGKERLGGISKRGDGYLRSLLVAGSLAVIKYAQRNGTKRLWLVKLLERRTSKIAAVAMANKIARMVWALMIRGESYREPLSRAA

SEQ ID NO: 89285 - protein, 340 aa, unidentified
MNNVSIVGIDLAKHVFQLHAVDDSGHKVFSKKIKRDQLRTVIANLPPCIVAMEACGSAHYWAREISQLGHDAQLLPPQAVKPFIQGHKNDARDAAGIAEAAARPATRRVTVKTQEQQSLQALHRVRSRLVRARTAVGNELRGLLNEVGIIVAQGHRVIRQGDIRQWLDERHDQLGATLCNVIHDLLDEWLALDTRIAEYDKRLEAYVQASPCTKQLMSVPGIGPVNATLLVSHMGDPKRFPNGRQFSASIGLVPRQYSSGGKNVLKSITKRGNSEVRRQLVHGARAALRQFQRQEHPDRLAQWVIRLAARVGQRKAIVALANKMARICWSILAHQRSYQA

SEQ ID NO: 89286 - protein, 402 aa, unidentified
MNAVGIDVSKGKSMVAIMRPFGEIVSTPFEIKHTTSDIHSLVELINSVEGESRIVMEHTGRYYEVLAHQLSEANLFVSTINPKLIKDFDNDSLRKVKSDKADAVKIARYALDKWQNLKQYSVMDELRNQLKTMNRQFGFYMKHRTAMKNNLIGILDQTYPGVNTYFDSPARSDGRQKWVDFASTYWHVDCVRKMSRNAFIGHYQNWCKRKKYNFSQLKAEEIYGKAKELVPVLPKDDITKLIIKQAVNQLNSASTTVESLRTLMNETASKLPEYPIVMAMKGVGASLGPQLMAEIGDVSRFTHKGAITAFAGVDPGVNESGSYEQKSVPTSKRGSSDLRKTLFQVMDVLIKTHPQDDPVYQFLDKKRAQGKPYYVYMTAGANKFLRIYYGRVKEYLSSLPES

SEQ ID NO: 89287 - protein, 416 aa, unidentified
MPEGEGPVRYYLGVDWADQTHAVWVVDERGTKITARTVPHTAEGLSEWGRELDEWRAHGLELWAAIERPEGRVVDFLLDHGVLVYPVNPKALDRARDRFRQSAAKSDPFDARVLADFLRTDHPRLRPLQPSSDAAQELKLLTEDCQRQIRQQTRLVNQLTATLKAYYPRGLEVAELTTALAREFLQAYPTPAAVATLTERQWQRWARAHRLSEARTQELWAVLQRPQLPVPAHVVRAKARLMQALVTELGTVVAVVGEYRQAVEDFFAAMPAAQWIRTLPIGEHGVTAPTLWARLGDAPGRWESFQHLQAQAGSVPVTVKSGKQKVVHFRFACDKALRYVVDQVAFLSLRSSEWARAYYDAQRARGHSHREALRALGAKWLKIIFVLWERQVPYDESYHLATMARQQLRQRSKKIA

SEQ ID NO: 89288 - protein, 343 aa, unidentified
MKHIGMDIDSTNTHISVFSDRGRELKRTHVPTREADLVAFLLSIPGPKQVALEESQMADFVTRILEPHVAKVTRCLPQHNRLISESEKKCDREDARCLAELLYLNKLKAVHHAPWEYRQLREGVRAYWKVSRNLTRCKNQLKAFYLFNGVPCVGEKVYSARYRARFMEEIEKRSGNKKLLQQLYAQMDFYRGSKAQHVKILKELTESLQQSVRCLKSVPGIGFIGACTLTAYLENGWRLKNKHKLWQYSGVGVRHHESNGKGHRGASRKGNRYVKNALMTAASAISARRNADNALTRMWRAGVEAGIDPDRMRRNLARKVVVVAQRLLRFNEEYNDDRVVTTQ

SEQ ID NO: 89289 - protein, 351 aa, unidentified
MHARSVAAAAIDGVTGELVNAKLTPSHEHIKSWLIDLPGPVAVAYEAGPTGFGLSRALNAAGVRCEVVAPSKLQRPSGDRVKTDAKDAVHLARLLRLDEYTPVAVPSVTQEAARDLVRAREDARGDLMRARHRLSKLLLRQGQVYSGGHAWTGAHDVWLRRTGAQLAASATRTTFESDYDAVLAVKARRDRLDAAIAEMAADCEFTPLVHRLGCLRGVGTLTGFALAVEVGDWDRFTGKTIGSFVGLVPSEYSSGQSRVQGSITKTGNAHLRRLLVEAAWHHRPAYVVGKVMRDRWELAGPAARARGDEGNRRLHHRWNTMRARHKRHVVANIAVARELAGWCWSLAVLEE

SEQ ID NO: 89290 - protein, 320 aa, unidentified
MEQEPTYIGIDVAKAHADVAVHPTGLRWQAPYTEGGVQELISRVEALQPTLVLLEASGGLEIPLVAALANAHLPVVVVNPRQVRDFAKATGRLAKTDSLDAQVLAHFAEAVRPEPRPIPDAEARALASLLARRHQLVAMLVAEKNRLGKALPSVRSRIQTHITWLERELEDTDDDLQTMLRQSPVWCEKENLLRSVPGVGPQLALSLLAYLPELGTLDRKRIAALVGVAPFNRDSGPFRGRRKVWGGRVRVRTALYMATLVASRHNPVIRAFYQRLLAAGKPKKVALTACMRKLLTILNAILKNSTPWQAAIPQITGPCS

SEQ ID NO: 89291 - protein, 395 aa, unidentified
MFIVGIDIAKRSHEAIIIAEDGQVVRKAFSFRNNCTGYNLLLEQVRRLTLVKSQIVFAMESTAHYWLALYARLLKDGYAVMVLNPIQSHSLRELYIRKAKTDARDSLIIADLVRFGRCKASNVPQDKILALRELCRSRAYLVDMAADLKRKLIALLDRIFPEYESLFDSVFSKASIAVLSKYSTPQKVKNANLRKLTDILMESSNGHFGEWKAHQLKEAACSSFGIDDSGGVYPTLLGMFLEQILSLTAQADSLEKQISVFFQEFNNPLTSIPGVGTVLAATILSEIGDITRFSSADKLLAYAGLDPSVKQSGEFKSNQNRMSKRGSPYLRRAIWLASTVAVHRDPMFQTYYEKKISEGLHYMNVIGHVSRKMTAVIFAVLRDGQPYQPILQSAG

SEQ ID NO: 89292 - protein, 344 aa, unidentified
MSKHSVQAGDIAGLLRRFAQLKEKARARAGRDFPIITIQEAGLDGFWIHRVLQSEGIESHVVDPASIATSRRRRRAKTDKIDGETLVRTLLAYKRGEPRVCAMVKAPTPEEEDSRRLCRERKVLTAERVLHVNRIKGLLFCQGISGYEPLRRDRHERLEELQTGDGRPLPPHLRAQVNRELDRLELLLKQIKAVEAERDALLVAAHTPAAVPASMLLNIRGIGPEFAAVLWSEGLFRHFDNRRQVAAYAGLAPTPWQSGAVDREQGVSKAGNPRLRTTLIQLAWLWLRNQPHSALTLWFHERVSRNGGRLRKTTIVALARKLLVALWKYVTAGVVIEGAAMTAA

SEQ ID NO: 89293 - protein, 419 aa, unidentified
MTVVYPRCGGLDVHKKQVSACRIWQDGSGQQHVEETTFDTHTRALRHLAEWLAQRDVRDVALEATGPYWRPVWNILESCGLRLTLANPAHIRAIPGHKTDRRDARWIADLHQHGLIPPSFVPNSAQRQLRDVTRMRTKVVQDRGRVVTRLQAVLEDANIKLASVVSDVMGVSAQAMVRGLIGGRAKPAQLAELAFGSLRRKRPQLALALEGNFTPEHGFLAHRLLIQERMLRQQERALEREITRLLDDRQKAVIALWDTIPGVNQTLAAVLVAELGTHAEQFPDAAHAASWVGICPGNHESAGKRKSGKTRKGNRWLRVALVEAAWAATHSQGTYLAALYARLVGRKGEKRALVAVAHAILVAAYQMLRTNQPYRDPGPDYFDRLRPKHSVKRLVDRLSRLGYRVDLSPLADRQLADLQ

SEQ ID NO: 89294 - protein, 410 aa, unidentified
MELLHRRCCGLDVHKETVVACLRLVSDGKVTTEVRTFQTTTAHLLRLSEWLAANECTHVAMEASGVYWKPVWHILDDGEFELVLANAAHVKNVPGRKTDVNDAMWLAELLAHGLIRASFVPDTQTQEMRNLLRTRKQLVREQSSHVQRVQKTLEDANIKLDSVLSDLMGKSGRAMIEAMIAGETNPAKLASLAHPRAKASHEEFREALRGRVTKHHRFLLRLHLNQIDALNAAMATLDTQVEANLGPFRTAVELIMSIPGIKNLGANVIASEIGIDMSRFPSDAHLISWAGICPRNDESAGKRRSNRLRKGAPWLKTTLVQCAWAAVKKKNSYLQAQFYRIKARRGPKKAIMAVAASILTAIYHMLKDGTMYKDLGSNHFDRRSTDQQKNRLIKRLADLGYAVQIKPLSA

SEQ ID NO: 89295 - protein, 355 aa, unidentified
MDNKKYVGMDVHQATISVAVRDSAGKLVMESILETKASTILDFIRGLGGNLSVTFEEGTSAAWLYDLLKPHVAHLIVCDPRKNALLKVGNKNDRIDPRKLTDLLRAGLLSPVYHGESGVRTLQELARTYLTVTKDLTRVMNRLKGVYRSWAIPCAGQTVYAPRHRSAWLEKLVQPGVRRRAEQLYQQLDKLVEIRREARQELLRESRKHPAREYLSQIPRLGPIRVALLIALLQTPHRFRTKRQLWAYCGLALQTRSSGEYRYSGGQLQHSKRPPAIRGLNVNHNHDLKSLFKSTATQASGANDPWGDFYQNLLARGMKPAMARLTLARKMAAIVLRIWKKGEHFNPEPLKRKSA

SEQ ID NO: 89296 - protein, 328 aa, unidentified
MIISSPDSVFNHIVAFDVGKESLTIHVLPGGDRFAIANKPKAIRKLLTAQMRRNANLSLGTLLVVCEATGGYERHVLEICVELGIAAHKAHGSRVRHFAKYLGLIAKNDPLDARVLALFGLKTEDLRLYAPLTPEQEALIGLRARRDQIQAMLLAETNRLEHVRDASVSRSLKDHIAMLRKALAAFEARIVAHIQASETLARKAALMRSLKCIGPGTATVLLAYMPELGTFNKAGAACMAGVAPFDDDSGKSRLPRHIEAGRAAVRKALYMAALTAIWHNPIMKSHAEKLRRKGKPAKVAITAVMRKLIVTLNAILRTGEPWKHTQIA

SEQ ID NO: 89297 - protein, 320 aa, unidentified
MTGSPACVIGIDVAKATLDVHVRPTGQAFTVPNAERDIQELVVQVQALAPALVVLEATGGYELAVVGALAAAALPVVVANPRQVRDFAKGTGRLAKTDRLDAEILARFAEQQRPTPRPLVDAAREELDALLTRRRQLIEMLVAEKNRLGQVFVRNGARVTRSLKAHIKYLTRELARADDDLGRMIRESPAWRERDDLLQSAPGVGTVLALAMIAELPELGVLNRKAIAALVGVAPMNQDSGTWRGKRRIIGGRASLRTALYMGTLVATRCNPVIRAQYQRLVAAGKPKKVALAACMRKFVVILNAMVRHNTRWMETAAHA

SEQ ID NO: 89298 - protein, 352 aa, unidentified
MSEHAGRQFVGIDVHRKRSVLVRTGEDGQRLETTRISNDPEYLRAVMARAGESPEVVLEACYGWYWAADTLAELGANVHLAHPLGVKGFAYRRVKNDVVDAGDLADLLRMGRLPEAWIAPPAVRELRELVRHRAKLVGLRTSLKCQVHAVLASAGIAVAMSDLFGVAGTDLLEQVVLPAAMRAKVESCRRVIDLLDFEIAHVAKLAAGRLHQDPGYAAAQTIPGVGPVLGAVFCAEIGDVRRFGGPTQLASWAGLTPRHRESDTKVHRGRITKQGPKLVRWAAIEAVQRGGSGNPIGAYRQRIAERRPNARNQAKVAAARLLVECVFYALRDHHVRRLEAPVTTGTDRAVVA

SEQ ID NO: 89299 - protein, 453 aa, unidentified
MVQRKQKICFKPGQSREPLTITHPNTAGIDIGSASHYVAVPPDRDDEPVREFPSFTVDLIALADWLDACGVDTVAMESTGVYWIPLFELLESRGFKVLLVNARHVKNVSGRKSDVLDCQWLQQLMTYGLLSGAFRPAEDVCVLRALWRQRGMLLKGQARHVQHMQKALTQMNIQLTNVISDVVGETGQKILRAIVAGERDGQVLAKMKNARIRASTDEIAKSLQGNWRAEHLFALKQALDMFDFIGTQLAECDREIEQQLQSLQVHDGEPAKGKKRGRARNAPKFDLRTQLFKMCGVDLTRIDGIDVTTALAVISETGADMSRFPTVGHFTSWLGLCPGTKITGGKVMSGKTKRVANRAAQALRLAAAALRSSKSALGAYFRRMCGRMDKPKAVTAAAHKLARLIYTMLTKGEEYTDQGQDYYEERYRERVVRQLALRAEKMGMRLVVGEQPA

SEQ ID NO: 89300 - protein, 482 aa, unidentified
MARRKLSTFERLQQGKLNRKERRELTRRLHSTDPGLQIIHPDAAGIDIGNESHFAAIPPDRDGMPIREFGSWTADLHEMANWLKEHRITTVALQSTGVYWIPVVEVLEKAGLEVYLVNARGTKNLPGRKTDVQECEWIRKLHTYGLLRNSFRPPEEIRAVRTIWRQRDRWVQESGRAVQHMQKALTKMNVQLANTITDISGWTGQAIVRAIVAGKRDPWELAELRDRRIAATKEEIAHSLQGNWQEDVIFELRQSVEAYDFFQKQMAACDHELIQYMAAIEKREITPKQDLPKEATPLPSPKKARRSKTRRKNQPCFDLATELERVMGVDLTRIDGIDVMTAQVIYSEIGSDFSAFRDENHLASWLMLAPKRDISGGKVIRNVRAFGRNRVANALRLAAASLSRSDSYLGARYRRLRSRLDGPVAVKAMARHLACLVYRMVTRGQAYVDHGAAHYEAKRQDRELRALERKAANLGLKLVPAA

SEQ ID NO: 89301 - protein, 430 aa, unidentified
MGLIMATAIPPEHDEQPISYDWFVGIDWGSQKHQVCMLDRNRQVVGERVVDHDGASLAQLVTWLLTVSQGQPQRVSVGIEVPRGPIVEGLMERGFHVFAINPKQLDRFRDRHSVAGAKDDRRDAFVLADSLRTDRPSFRRLRLDAPQLFMLRELSRAEETLLEEFRRTTNRLREQLHRFYPHMLQWSAAADEAWLWDLIELVPTPAHATTVTADQVHQVLTAHRIRRVKADDVLVCLQAQALPAAPGVLEAAQVHCAFLLPCLRVLAEQLRSCAQQVEALLHTLAEELDEAGGPSDVAIVQSLPGVGRKITAGLFAEAAQPLTERDYQVLRTQGGGAPVTKQSGKRRQVVMRRGCNPRLRHALYHMARVAAQRDLHFSGVYEALRAKGQRHGQALRNIGDRLLRLLMAMLRHRTCYDASRMRCEPVVQMG

SEQ ID NO: 89302 - protein, 368 aa, unidentified
MDNEYYTTIGMDVSDRTTKVCVMAKERGTRRILEETTIPTTRDGLRAYLSGKCTGWPVVFETGTHCRWMKREVESLGMKAIVANPSKLRMVTESNTKNDRNDARELARFALADVGLLHPVRLRSERCQQMLRLMKARDLLVKVRTMHVNELRGFAKSMGFRLPSCPANKAHRQGKAGWPEDFESLAWPLMDMLETIDLKIRAYESQIKSLAESGELKDKIGRVREVYGIGLLSGAALVASIDADPWRFRKARDAGAYFGLVPKQRQSGEMDVQCHITRAGSGFVRRLMIEAAQIAMRETARDTDVKLKGHRICARGGKIAKKRALVAMARCLVVTAVALLKKPDAEYVPLSERARREFEAMRSAEMVA

SEQ ID NO: 89303 - protein, 342 aa, unidentified
MEKASMIGIDTSKHLFELHGRNDRGEVVLRRRLKRAQVESFFAEHPAATIGMEACGAAHHWARVLSGLGHQVRLMPPAYVKPYVKRNKNDAIDAEACCEALNRPGMRFVPVKTVEQQAALALHRSRELLVRQRTQLSNALRALLAELGIVAAKGREGLGRLIADLRADVLGLPPAIQSAALVLADRRAELEAGIDALERHIVAEAKADPAAKLLQTAPGVGPLTAHALLATVPDPARFDCGRDFAAWLGLTPRENSTAGKRRSGPITKKGDRTLRRLLVLGATAWLRQVAARPDKGSPWLLGLMARNRTKKKIVAVAQAARTARILWAMLTHSQPYRAPAAG

SEQ ID NO: 89304 - protein, 411 aa, unidentified
MEVVYESCCGLDVHAKTVVACLVTKGRKEIRTFATMTDELLQLGDWLSSAGCTHVAIESTGVYWKPVFNILEGLLTVVLVNARHIKAVPGRKTDVRDCEWLADLLRHGLLKASFIPPLEIRELRELIRYRQTLVTEHTAVANRIQKLIESANIKLGQVASEVLGLSGRLMLRALAKGEQDVTKLAELAQGKLKNKKAELRRALAGRFTQVQRWVLAEFLTRVEELEVALTRVEARIGEEVTACADPFVPAAVELLESIPGVGVRTAQTIVAEIGVDMERFPSAKHLASWAGVCPGNHESAGKRKSGQPTQGNKSVRTVLVEAAWAATRAKGTFLQAKYQRLVKRMPKQKALGAIAHRLLVISYHLLSRRVPYAELGSAPRDHQQVERQRRRLVEQLKTLGVTVTIAEAAVA

SEQ ID NO: 89305 - protein, 343 aa, unidentified
MDYFAGLDVSVKETSVCIVDDAGKIVREARVASEPEALLQVLTKTIYRFKRVGLEAGPLSQWLYSVLAEAGLPVICVETRHMRAALKSRINKTDRNDARGMAQMMRVGLYRPVHVKTLRSQKLRVLLTHRKLLQSKAIAIENDLRATLRNFGLKVGMIGTVKFEARIRELVANLPDLAVLVEPLLIVRRAVREQVSVLHRRLLALVRGDDVCRRLMTIPGVGPVVALTFRVTVDVPARFRNSKAVGAVFGLTPAKYQSGENDRTGAISRCGDEMMRMMLYEAAQSMLVRTVKWSWLKAWAMKIARHRGMKKSIVALARRLAVIMHRMWVDGTEFRWTREVVAA

SEQ ID NO: 89306 - protein, 412 aa, unidentified
MSQHDGPLFCVGIDWAATEHAVCVLDRDGRKAAAFTIDHTAAGFNRLAVRLSKLAQPEQMPVAIERPDGRLVDALLAAGHPVLPVKPNAIKTWREAEVVSGAKSDPGDAHVIADYLRVRFHHLRPAAPLSPHTKALRALVRSRGDLVEARVAAVNQLCALLDSHWPGAKAIFANIQSPIALAFLTRYPTAASAASLTEKRLAAFCAQHGYSGKKPAAVLLARLRAAPAGSTDPAVSKAIHDIVLGQISVLTALNTAIKALDRSIADKMDTHPDGSLFRSFPRAGTINAAQILAEWGDARAAFDHPDAIAALGGITPVTKASGKQRGVSFRWACNKRLRLALTTFAANSRFSSPWAADIYNKARASGKDHPHATRILARAWIRVMWRCWQNHTPYDPTLHGGAQRATEQPTAA

SEQ ID NO: 89307 - protein, 377 aa, unidentified
MKSIKFVGLDVHAETIAVAVAEQCGEVRSLGVIPNREESIRKLVKKLGPVEQLRFCYEAGPTGYVVYWQLTALGAKCEVVAPTLVPVKSGERVKTDRRDALKLARNYRAGELTAVWVPDAAHEALRDLVRAREAAKKDQLRAKHRLSKFLLRHGRRPPTGVKPWTLNYLAWVKKEVHFEQPAQEATLLDYLHEVEHAEARIDRLDLAIEEAVKSTPPKMKAVIEGLQALRGIAQVAAVTIVAELGEISRFPGARQLMGYGGIVASEHSSGESTRRGRITKTGNAHLRRVVVEAAWASRHRPNVGAALRKRQELVSEEVREIAWKAQHRLHTRYRKLTARGKDKGKVVTAIGRELLGFIWAIGVKVEAAQKEIERRAA

SEQ ID NO: 89308 - protein, 318 aa, unidentified
MNVIGLDISKDTIDVTLITAKGEMDYIKIGNSHEGFEKLIAWIKTKRVRKIAISMEATGVYYEQAAEYLSAVYTVYVINPLKIKDYAKSQFSHTKTDKADSKLIADYAKRHLDKLTPFRPSENPTLYKLINLLQQLKQQKHESQNRLHAAKDPFIRSTHESIILLLSKKIDETSKRIDSTIKQQKSLNAEYQNLQTIPAIGKDTAAILLRHLTDKTFRTANQFVSFAGLSPKIEQSGISVNKKGRLSRYGHRQLKRALFMPALVAYRINAFPQLLKNLEAAKKPKMVVIVALMRKLAKIAFYIHKAKTPFDKARHQTV

SEQ ID NO: 89309 - protein, 350 aa, unidentified
MAAISKDIIANIGIDLGKNTFHICAMNDKGTIVMRERLTRAALPKRLANIPPCLIGMEACAGAHHIGRQLVTLGHDVRLMPAKYVKPFLKGHKNDYRDAEAIAEAVQRPTMRFVHFKSDEQLDLQALHRVRSRLVGQRTAVINQIRAFLLEHGVAVRQGPGALRQALPSILARRTDVLSPRITHLIEDLTDDWRRFDQRIADVTREVEELAKQDEHCKGLMGVPGVGPITASAMVAAIGDGAAFSKGRDFAAWLGLVPKQISTGDRTILGGISRRGNRYLRTLFIQGARSVLQRSDGWEKKSFGRWLVAASKRLHKNVLAAALANKLARIAWTVLYHARGYDPAFEPKAA

SEQ ID NO: 89310 - protein, 324 aa, unidentified
MTDAVLGIDVSKNTFDTNLGAGIKARSQSFANSPDGWHHLIAWLGEHKIGQVHACLEATGRHGLGIALALHEAGHVVSIVNPAQIRDFARTKLGRNKTDQVDAVHIREYAELFKPRPWTPPSPAMRRLCELQTIRAGTVAGLTEWKNRRGSGMADDLALSLAETTIQHFTSQLKAVDQAIAETIDNDLELSAKRDLLVSINGVGEALAGIVLAELPGPDILGSSAAVAAYAGLNPQQHQSGISVNRPVRISKIGNAVLRTALYMPALSAMRYNPAVVALVDRLKAQGRLKGKQIVIAAMRKLLVLCFGVLKTGKEFDPAMAMGK

SEQ ID NO: 89311 - protein, 412 aa, unidentified
MVPHNTSTLASEVFAGIDWGGSFHQVCLINAHGDVIVQQRVQHDLAGLAELDRLLLVHRNAAGRLRVAIERADGLLVEHLHTIEVEVFCVSPKISARARERYRLAATKSDAFDAFVLADTLRHEHRHWRALSPASPALAELRAISRDRDRVVIAQQATENRLRAVLEAYHPAPLHLFSSLDRDITLDFVTDYPTPEQAARVGEARMQQFCRRHGYSGRTDPTVLVERLRPHLLSAAEGTEAGKAFSATMFTEELRLLNAHLRAYDKRLVELLDQHPDTPIFTSFPGIGPVVAAALISEMGEDRGRFPAPEALLAEAGLSPVTRASGRTRQVRFRYAANRRMRHMIDWWAFVAAREDAWSRRIYDDARARRQGKYRALRGLGSRWTRILWRCWTDHTTYDPAIHHKHQEPAQA

SEQ ID NO: 89312 - protein, 349 aa, unidentified
MKPALHSLGLDVAKLKFDVNVRLLADPQERRAASFTNDLRGFEQLRAWLRKHGITDSSQVHACLESTSRYGDALARFLYRHGFQVSVVNPRRTRNYADSQLTRTINDTIDARLIADFCASERATLRLWEPLSEDHAQLRELTRARQALVQQRDAFGNLLETATGLPRKIYQKQFRALDRQIKQLEKLIQTFTQEVLHPEFRKQIELAESIPGVGFITAATVLAELPPIDKIPQAAQAVALFGLDPFNKTSGQIVEARARLSRMGSHYGRRALYMPALCALRFNPIIRDLGLRLKAKGRKGKYLVVAAMRKLLRLIFGVVKQAKPFDPNWTNPTAPQSKQPSVQAVAPAL

SEQ ID NO: 89313 - protein, 408 aa, unidentified
MQVLYTRCAGLDVHKDTIVACVRCVSPPMHQEVRSFGTTTAQLLGLAEWLEEHGCTHVAMEATGVYWKPVWHILEDDFELVLANAAHIRNVPGRKTDVNDAMWIADLLAHGLIRSSFVPPQAIQQLRDLTRTRKQLVREVSQHSLRIQKVLEDANLKLGSVLSDVLGKSGRAMLDAIVAGQSDPAQLAELAQGTARNKTAELREALRGRITEHHRTMLKLHLQVVDALERTLAELDSTVGKALAPIQQRARLLTTMPGVSDLTASVLVAEIGVDMTRFPSAGHLISWAGLCPRSDESAGKRRSTRVRKSGTWIKTTLVTAAWAAVRVKTSYLRAQFLRIKARRGAKKAILAVAASMLTAAFHMLRDGTEYNDLGSDHFDRHDKSKTIRRLLKRLQDLGCDVPELAHAT

SEQ ID NO: 89314 - protein, 421 aa, unidentified
MEIAGLPVPVFCGVDWAEDHHDVALVNAGGKRLAKLRISDDAAGFTRLTDLLTEHGDSKDHPIPVAIETSRGLLVACLRATGRPVFAINPLAVARYRDRHSVARKKSDAIDAAALANILRTDMAAHRPLPKDSELAQAIAVLARAQQDAVWDRVQAHNKLRSQLREFYPAILAAFADKREGICSPEARTILAAAPTPTAAARLTRRRLQSLLKQAGRLRGIEAEADRLHEVLHREYLHQPPQVEDAYGRQTTALLRQLEAACTNADQLEAATRETFEQHPDAPIVSSFPGLGSLTGARVLAEIGDDRARFTTAGAMKAYAGSAPVTRASGKSCTVMARRVKNQRLAAVGYVWAFASLTASPGARAHYDRRKEAGDRHIAAQRNLFNRFVGMLFHCLQHGEYYEEEKAFPNQPGGDLPAQAA

SEQ ID NO: 89315 - protein, 463 aa, unidentified
MRKNEKKTTAIRFDSGLQQLRRDAAGMDIGAREIWVDVGVENDSEPVRRFETFTADLNRMAEWLIGCRVKTVVMESTGVYWIPACQILEDRGIEVLLVNARYAKNVSGRKTDALDCQWLRTLHCYGLLPASFRPAHEIVTLRSYLRHRQMLIQCAAAHIQHIQKAMTQMNLQLHHVISDITGRTGMKIIRAIVAGERDRQKLAAMRDARTHASQATIEKALEGDYRTEHLFALKQSLDAFDHYQKQIAECDRQIAQHIRSLESKAEPGSNLRPARSAKTRQRKRNLMEFNAREEAFRISGVDLTQINGINETAALSLISEIGINMNPWPTEKHFASWLSLCPNNKISGGRVLNRRTRKSANRARDTLCLCAQSLLASRSALGAFCRRICSRLGEPKGLIATAHKLALLIYRMLKYGRDYADIGQEQYEKQFKERALRSLARKAKELGFQLVSNSDLASEKAVP

SEQ ID NO: 89316 - protein, 413 aa, unidentified
MADQIQHKRNLTLIALDIAKKHHDAKVQYPSGKCVFVRIENTLDGYQRLLGIAKSTTDSIKVGFEPTSDYHRNIAYWMQQKGIECHLVSSLSCARAREMLYQTWDKNDRKDSSVILYLLQTGMSHPFYDPLVNDTMDIQEISNAYHQITIARTRCLNSLVNHNLTLYFPEAEQFLHNSRAEWFCKFLLKFPIPYAITRYKQATFVKRAWDLIGRKQYKQAFLEHLYEIAQQSIALPVDLNSHAVSTYKMQLARYIELSKLRVELEKQSETFLHEREDYQRLRTIPGVGAIIALIIIAESGQLSRFSHYRQYLNYCGFNLSSVQSGQRQSAFRLSKRGNARLRYAYWLAATVAIRQRENSFRAKYERYIRQNGASQDSKRKAYTAVAAKLARVAHAVVKKNVDYHGYFEVSQGT

SEQ ID NO: 89317 - protein, 313 aa, unidentified
MAQMVTNAGIDVSKQWLDVALWPKRDEVLRVNRDAAGLEELALWLRQRHVVRVGLEASGGYEREVIDALQAQGFEVALLNPLQVRRFAQAKGRLAKNDRVDARTIAQFTVVMIEAAQPSRRRELDALSEHLTFRRQLRAWIDDCTNQLEHLRDKALRRKTEARRVKLQGQLAAHDNALAKLVSEHADWNDLARRLRTVPGVGPVLSQTLIALLPELGSLSRRAVASLVGVAPFDNDSGQRSGNRHIQGGRAAVREVLYMATLSARTCNPVIAAFAKRLAGKEFKVIMVACMRKLLVILNAMLRDKMDWKAKAA

SEQ ID NO: 89318 - protein, 372 aa, unidentified
MNTVGLDLHRRRSHFAVIDEHGELLVSRGVANDRSTFLELLGDLDGETRIAVEATYGWEWAAELFEDAGYEFHLAHPKGTKAIAAARVKNDAVDAQTLAQLLRAGLLPESYAPPRQMRDLRDLLRHRIALTQLRTALKNRVHAQLARLGIQHDQSDLFGRAGRAWLADVELRESIRRRLDSLLALIDDFDREIAATAREIEAAAKEDERVAVLCQIPGVGEYTAMLVIAEIGEIERFPTARHLCSWAGLTPTVRSSDRTVRMGHISHQGSVALRWALGQAAQTAARPRQGGPLREDFERIAKRRGRPIAKVAVSRKILTLCFYGLRDGEIRCLASGARSRAKPTAGALTHTAANGNARASSRAVMTSSKATR

SEQ ID NO: 89319 - protein, 340 aa, unidentified
MLIIGCDYHPSFQQISFVDRETGECGQRRLDHRTGEAESYYRGLPGSRVRVGMEASGHGRWFERLLGELGYELWIGDPGKIRAAEVRRQKTDRRDAEHLLQLLLEDRFPRIWVPTLAERDLRQLVLHRHRLVGLRTRVKNQLQAVALNEGMQRKKRLWSKKGREEFEQLPLLPWAGRRRGDLLALLDGFDGSITQLSQAVEQEAKQRPEVRRLMTHPGVGPLTALAFVLTIGPWERFGCGKQVASYLGLIPSEYSSGGHQRLGHISKQGNTLMRWLLVEAAHVAVQREPQCHRYFVHLSLRRQHSVAIVAVARKIAVRLYWMLRREWDYQQTAQHGSHVG

SEQ ID NO: 89320 - protein, 342 aa, unidentified
MESAVTIGLDLGKSVFQVHGVDAAGAVVVQRRLTRGRLLAFFAKQRACLVGMEACAAAHHWGRELQKLGHRVRLMPPRYVKPYVKRQKNDAADAEAICEAVNRPNMRFVEIKTCEQQGTLVLHRVRLMLTRQRVQLSNAIRGHMAEYGLVAPVGRNGLQRLVSIIEDPDDDRMPAVARASLASLIRQLGLVNDQVLENDRLVRASARSTELGHRLMEVPGVGPVLASAMVATVPDPTAFKSGRDLAAWIGLVPRQNSSGGKEKLGGITKQGDRYLRQLLVAGALAVIRYAQRHGTRRPWLLHLLSRRTPKIAAVALANKMARMIWAMMVTGERYREPVVAAA

SEQ ID NO: 89321 - protein, 343 aa, unidentified
MSITMIGLDTAKSVFQIHGVNETGKAELKRKVRRSELIAFFEKQERCTVVMEACGAAHHWARILTGLGHTVKLIAPEAVKPFVKTGKKNDAADAAAICEAAARPDVKFVPAKTVEQQGILALHTVRSLLVKQQTMLANAIRGLATEFGHVVPKGLHNLEPLVALVDADEDMPEPTRQALGELHERFGELAKGIQSCEAGIVKHARSDATARRLATIPGIGPITASLIAATVVDISLFKTARQFAAWLGLVPRQHSTGGKTRLGRITKAGNKEIRKLLVLGATSMLGRAEGWHSALGGWLRDILQRRPVRLVTVALANKMARIAWAVMTRNEVYRAQGGVAATA

SEQ ID NO: 89322 - protein, 329 aa, unidentified
MKIPHIIGADLSKKNIDFASHQFKSHLKIENNSSGFQDLIRWFNSQSIDVSKVMIVMEHTGLYSYQLEHFLHHYQISFTKISGLAIKRSMGLVRGKSDKQDAARIAQYGFEKADRLIPDKPISDKMQRLQILHSTRERLVRNRTALIIAVKETQQALCLKKTDVIIATQLKVIKTQDQQIKKIDDEIQTIIEEEKTVKNNYHLLQSIKGVGKILALTAIIKTRNFTRFTNARKFACFCGTAPFENSSGTSIRKKTRVSHLADKRMKTLLDLAAKSAIQHDKELREYYLNRVAKGKSKMSTINVVRNKILYRMFAIIKRQTPYQPFPIAA

SEQ ID NO: 89323 - protein, 359 aa, unidentified
MTGTPIVADGFQFVVGVDTHAATHYYAIIDTRTGGLVDDAEFPTHDKGLLRAAAWITRRTGEPTGGDLDRVLISIEGTRSYGAQITALLAQAGYRVVDAPSPKRERGSAKNDHIDAVVAARGSLHKHLDQLADARAGQTSATLQILLTARNSMTSERTRAINALNALLRTQALGIDARRKVNRPAIRTIAAWRSRKSDTVAVATARAEAIRLATRILALDVEVDANEQALHDLVAETHPTLLELPGVGPVSAAVVLTAWSHPGRVRDEAAFARLGGVSPLEVASGNSHEHRLNRTGDRQLNRALHTIADSRMRHDPRTREYLARRTAQGLSKRRVRRCLKRYIARQLYRHLAAQGVDNP

SEQ ID NO: 89324 - protein, 343 aa, unidentified
MVHYVGLDVSLKQTSICVVNQAGSVVREDVVDSDPEAIAAFVRLKAPGAVRVGLETGPTSTWLWTELKRLGLPVICIDARHAKAVLKMQINKSDRNDAAGIARIMQTGWFKEVRVKDLDSHSVRALLSSRALLVKIKRDLENQIRGLLKNLGLVIGRAKFNVFATRAEELIADRPELVAAVRPLLDARKAIEQQIGDLDRKVLKLARYDVQVRRFMTAPGVGPITALCFKATIDDPTRFKRSRSVGAYVGLTTRRHASGEVDWSGRISKCGDAMLRTYLFEAANVLLTRVPKWSALKAWGIRLAKRNGLRKAKVAVARKLAVILHRMWIDGTEFSWSTKKAAA

SEQ ID NO: 89325 - protein, 405 aa, unidentified
MNAVGIDVSKGKSMVTILRPFGEIVSSPHEIRHTSDQINELIQEIRSLEGETRVVMEYTGRYHEPVARWLTDAGLFVSAVNPKLIKDYDNDSLRKVKTDKADSVKIARYTLDKWPKLKQYGDMDELRSQLKTMNRQFGYYTKLKTAMKNNLISLLDQTFPGANTFFDSPARSDGSQKWVDFVDTYWHVDRIRSMSLPAFTEHYQKWCKRKSYNFQPDKPAEIYEAIRNIIPVLPKDDVTKFIIRQAINQVNTASAAVEELRTRMNNVASQLPEYKVVLSMKGVGPSLGPQLMAEIGDVTRFTHKGALTAFAGVDPGKNDSGSYSQKSVPTSKRGSAPLRKTLFQVMDVLIKTMPQDDPVYTFLDKKRSQGKPYYVYMTAGMNKFLRIYYGRVKEYIAEHPEAVEN

SEQ ID NO: 89326 - protein, 347 aa, unidentified
MVHVGLDLSRTRLDVHVMDESGAPLAVTTALPEAGGLAALVSRIGAEFGGPVYAAIESMNGARFVHDQLELAGWQVEIADAQKVKGLAPLACKTDKIDSWVLAELSRRDLVPAIWLPTPTVRAERERARWRLHLVRHRTALKNRIHATLLAFGHPCPVSDLFGTGGRELLGRLALPEPWAGDTAAALALIDELDAEVAECERVLRQVGADHRYVPLLMTAPGIGWVLGYTIAAEIGDIARFASPAKLAGYTGLCPRVYQSGGKDHRGPLSKNGPKYLRWALIEAAVHAARHPVYAERYRRTKARLGRQRGPKVAQVDLARRLSEAIWHMLSTNKPFAPAGAALSLAS

SEQ ID NO: 89327 - protein, 387 aa, unidentified
MTASCKLAPGTAALDYDSTLIGALELSSKKWVFAVQLPGSKKHTRQVVEPSGSALVEMIERLKARSLAAGRPILRMILTYEAGRDGFWLARFLQRRGVEVHVMQASSLPVDRRARRAKTDMIDVEMLLRTLLAWLRGEPRVCSMVPIPSEADEEARRAHREREDLTGSRRSLVNKIDGILATLGISGFRALRRDRREQLANLRQPDGAPVPPAAQERIERLLDRLELVLKQIKTVEAARDAVVKKSSAQDESERMIRDLVQLCGIGAESATLLVREAFCRDFANRRSLGAYAGLTGTPFASGGMQREQGISKDGNRRLRALVVELAWFWLRFQPDSALAKWFRARVIGAKGRVAKIMIVALARKLLIALWRFAKDGVIPEGATMKAA

SEQ ID NO: 89328 - protein, 319 aa, unidentified
MKSKDEKLVFVGIDVSKATLDVALRPEEQTWSVSNDAKGIAKLAKALSKRLPALIVLEATGGYEMSAVVALVEAGLTVAVVNPRQTRDFAKAIGKLAKTDRVDAQMLAHFADAVRPKPRALPDEETRALQALVIRRRQLLEMQVSERNRLHLAHESQKASLESHIEWLEQELNHINTQIRDVLQHCAIWREKDDLLRSVPGVGPVLSCTLLSELPELGLLNRKQIAALVGVAPFNNDSGQKKGSRSVWGGRASVRCALYMGALSASQHNPIISDFYQRLINAGKPSKVALTACMRKLLTILNSMVQHGTHWQPNLAYHA

SEQ ID NO: 89329 - protein, 417 aa, unidentified
MNQYAACLGIDWADKKHDLCLFDTATGKKTKQVLPHTPQAISEYFTSLRARYPGQQIAVGLEQSRGPLLFALLQYDFLVLYPINPSTLAKYREAFSPSRAKDDPTDAEYAAELLMQHSDRLKAWHPDDDETRTLRYLVEHRRRLVGDRTRISNRMTSLLKCYFPQVLSWFPELSTVLVCDFLLRWPTLDRLRGVKRSTLLSFFRTHHSVRAATLENRLTAIKESVPLTTDRAIINSSVLMITALAAQLKTTIAAIKQFDLEIEKLCAAHPDFPLFQSLPGAGDVYASRLLAVMGTDRTRWATAQELACLSGIAPVMERSGQSTWIRWRYFCPKFMRQSFHEYAGESVKHSFWARAYYEQQIAKGKSRQAAVRALAYKWIRVIWKCWQTNTPYNEVTYLEALRKKGSPLLSYAAKNAA

SEQ ID NO: 89330 - protein, 314 aa, unidentified
MEYTAVGIDISKGTLDVYCSHTKRFWSVSNTLECIGQLVQELSQTRPDFIVFEPSGGYERLLMAALACEGLGFSRVNARQIRDYAKACGRLAKTDKLDAQILAQYGVKMHPRLTILSTPVQQALQTYGLRRRQLVEMLKAEKQHLPQYSKNEITDELKKHMDVLEASIDRLEKTMKALIQEDPLLVESFKILTSVSGVGSITALTLMSDLPELGHLNAKQIAALVGVAPQNYDSGNMRGQRHIQGGRQTVRNALYMAALSAIRSEPTLKEFYKRLKEQGKPSKVAIVAVMRKLIIWLNAKLADFYAPNKNLSVS

SEQ ID NO: 89331 - protein, 416 aa, unidentified
MKVIRPICCGMDVHKDIIVATIATTNQDGLAEYKQRQFNSQNYSLYELKTWLKENNCFDVAMESTGKYWIPIFNVLEDEIEVCVVHPKYTKAIKGKKTDKKDSKWIADLFRHDLIKSSFIPPKEIRQLRELSRYRIKLIGMRSSERLRYQNAMTVSNIGLASVLTDPFGKSATAIMKEAMNSNTIDEEKIKSLLQKSAKKKTEAVLKSLEGSHIETDQKLKMNIAMSHMEELDKHIEEVEFEMAKRCIPYAPLIACLIKIPGISYLAAMTIIAEIGVDMSQFETDKQLSCWAGLAPANNESANKKKSVRVSKAGSYIKPLLVQCALSAIKSNSEPYYRIKYTNIKKRRGHKKAIIAIARMMLVASYHILLTGEVFNPSDLEEIHKPKTSKNKLTAESALAFLQAQGYDVSAINLTV

SEQ ID NO: 89332 - protein, 377 aa, unidentified
MDKQTGEIIVQPISFTNDKDGFDFLIQKLKPYSKNSVLIGMEDTGHYHFALLKFLLDKHFNIALINPKTTDLTRKMQGGITKNDKLDTLTICDVLDTPQRKNQYRIIHVNTFDLYEQKQLTRQHHNLKEELNVYTNRLQKSIDIVFPEFNTLFKSKYGTVYMNVLKTFASAHHIANTDIRIIRKCFEIKGKGNRISLTPEKLKEYAKSSIGISSIAEEIQIKHLVVQIELLNEQIAEIDKKIEEFSIQNNSPILSIPGISHFSGTSILAELGDIHNYSKPSQVIKFAGVAPLHYESSQFTAQHTSITKKGSKYLRKTLYQIILSVINHNPVFKAYYDLKISQGKGHRCAQGHCVRKLLRIIYHLLNTNQQFDPKLLR

SEQ ID NO: 89333 - protein, 348 aa, unidentified
MRFYTQPHPFYCGIDLHARSMYLCILDRDGQTVLHRNMPSAPEPFLTAVAPFREGLVVGAECVFCWYWLADLCAREAIAFVLGHALYMKAIHGGKAKNDKIDSYKIAGLLRGGMFPQAYVYPAEMRSTRDLLRRRMYLMRERADLLAHVQNTNSQYNLPEIGKKIAYRANRVGVAERFVDPAVQKSVHIDLDLIGYLDTTLNDLELTITRLAKVHDAQTFHRLRSVPGIGKILALVILYEIHDIGRFPRVQEFASYCRLVKCAKESAGKHYGYSGKKIGNAFLKWAFSEAAVLYLRGNPDGQRYLERLARKHGKGKALTILAHRLGRAVYHMLRRKEPFDPQRFLATA

SEQ ID NO: 89334 - protein, 409 aa, unidentified
MSEETPKVVYVGLDWAALVHAVCVLSAAGKVLAQFTIEHTADGIAALIRRLAKYADPADVQIGIERPNGRLVDLLLEAGHPVIPVSPNAIKTWREGEVISGAKSDAGDALVIAEYLRLRHHRLHPVQPYSAQTKALRTVVRTRDDIVEMRVRATNQLSALLDDYWPGAKTIFADVESPISLAFLRRYPTAAAAAHLGEKRLAAFLTTHGYSGRRPAAVLLDRLRNAPPGTSDPVLADAVHDAVLALVTVLEALNTTGRQLDRSVVAHLGEHPDAEVFTSLPRSGQINAAQVLAEWGDSRAAYDGPDAIAALAGVTPVTKASGKQHAVHFRWACNKRFRRALTTFADNSRHESPWAAHIYAQARARGHDHPHAVRILARAWIRVIYRCWHTGQPYDATLHRGALQLPTAA

SEQ ID NO: 89335 - protein, 343 aa, unidentified
MHIASIGIDLGKTTFHLVALDGHGKVVSKKKFSRKQLLVYTANLQPALVGIEACSGAHFIGAALRRQGHDVRLIPAQFVKPFVKSNKNDFIDAEAIAEAVTRENMRFVPIKTDDQLDLQALHRVRDRLVHRRTAVINQIRGLLLERGITFAKGPAKLRHQIPALLEDADQNLTPRLRNLLGRVWQEWKQLQSDIEGVSQEIEVISSEDAACQRLRQIPGVGPLVATATVAAIGNGAAFHKGREFAAWLGLVPRQHSTGGKAKLFGISKRGNTYLRRMFIHGARAVLLRVKYDTGGLGRWVHQLEARAPRNVVTVAIANKLARIAWAVLAKGEDYRAAAAVGAA

SEQ ID NO: 89336 - protein, 343 aa, unidentified
MKDITTIGMDLAKNVIQVHGVDQRGKAVLKKQLPRRRFVEFFANLAPCLVGMEACGSAHHWARQLEKLGHQVKLMAPQFVKPYVKTNKNDAADAEAICEAVSRPNMRFVPIKNGEQQAVLALHRARAGFVKARTAQANQIRGLLGEYGIFLPQGIVHVTKRLPAILEDDESELPGAFRRLLVRLGEHLNELDRQVGELEAQIQDWHREDAASRKLAQIPGIGPLTASALVATIGDARSFQNARQLAAWLGLVPRQHSSGGKTLLLGISKRGDAYLRTLLIHGARSVVRVAERKADIPTWLTQLIGRRHKNVAAVALANKNARIVWALLAHDRDYQAAYAPGPA

SEQ ID NO: 89337 - protein, 313 aa, unidentified
MTEHTIGIDISKSHLDAFDLEGNEARQFENSAQGVRALQKWLAALAVTRIVYEATGPYHRRLETALSGKFPLVKVNPLQARRFAQAVGTHAKTDAVDARCLARMGAALGLEPDEPVSENLRELRDLQTARAALIKERGRLRNRRRILTSALLKRQTNARLTLVERQLGELDAEIARRIAEDTTSARKRDILSSIPGIGQIAAAAILTFLPEIGTLGRKQAGSLAGLVPHNRESGQWKGKSFISGGRKPLRDALYMPALVAMRFNPDLKAKYLQLREAGKPAKIALVALMRKLIEVANALVKADRLWAEKPACA

SEQ ID NO: 89338 - protein, 346 aa, unidentified
MVTTIGIDPHKATHTAVAIDEAETVLGELTVPADRYQIARLLDWAVKVDGDGDRVWAVESAGGLGYLLSQQLVADGEHVVDVPAVLASRVRVLSSGKSDKNDPNDARSVAIAALRQPALAVVRRQDHATVLRMLAKRHLELTSLRTQAVCRLHATLVLLKPGGMQRRLSAQQASRMLQGMRTLDTVGEQRRRGAKAHQVDIRRLDRDIKANKALIRQAVATAHTTVTDVYGVGPIVAAFLIGYTGDVTRFATADHYAAYNGTAPIEVSSGGKTRHRLSLRGNRKLNHAIHMAAVTQIRFDTQGRVYYDKKLTEGKSKKEALRALKRRISDAVYRQLVADQQQTTTS

SEQ ID NO: 89339 - protein, 346 aa, unidentified
MNNHNKKCTIKVLGIDLAKQSFQLHGVDEQGKVVLRKNLSRNKLTSFVANLPPCLIGLEACGGAHHWVRVFKSLGHTVRMMAPQFVKPYVKSNKNDAVDAEAICEAVQRPNMRFVPEKSISQQDIQCIHRIRSQLIARRTAQANQIRGLLMEYGIIIPKGISYIRKVIPHILEDADNKLTSLLRELLNELYDEMVYLDERISSLENKLKIISHQNEDCQRLLTIPGIGLLTATALIAAIGNISVFRSGRELAAWLGLVPRQHSTGGMPTLMGISKRGDCYLRTLLIHGGRTVVRVAHLYTDKRNLWISELDKRRGKNISAVAVANKNARIAWALLSKKESYQVTAI

SEQ ID NO: 89340 - protein, 338 aa, unidentified
MSKFSGIDLHSNNSVVVVSDETDQIVYERRHADDLAEILAVLEPYRAELVGVVVESTYNWYWLVDGLMEAGYAVHLANTTAIKKYEGLKYSGDEADAAYLATLLRLGLLPEGYIYPRETRGARDLCRKRMQLVQYRTAQILSIENILATQSGARMKSAQVQRLTDKQIEALGFAPDVTLALQANAALMRTLQRRIAVLEERLQVRVQLSADFALLKSVPGIGQVLATTIMLETGTVARFAKVGNFSSYCRCVQSVRLSNGKKKGEGNARNGNHYLAWAFVEAAHFALRGCPPAKSFYDRKKRQRNAVVTTKALAHKLARASYHILREHKPFEVARCFA

SEQ ID NO: 89341 - protein, 470 aa, unidentified
MQLSSPVRLLGIDLGITSDHTAVVVDDAGRVRARRRARSTVASLTALEAAALAGADPGTHLVVVVEPTGPAWLPVAVFYGRRGHTVLRVTSAKAADLRRFLSRHAKSNGIDAETLARLPLVAPSGLVPVELGSAARASLDRRVRAVARLTADIGRRKNRIRALAQAMVPTIGAALSEGLNHTDLAVLERYADPRALLAAGPARLTRLIAKTSRGQLGVAKAEALRTAAAEALGLWDGDSAAAFADLAAEVASEVRLVRAAEAERACHERARNAALSRVDPAGLAASLPGFGPVGTAQLVATTGRPGRFPHASAFKAFTGLTPRANQTGQTDRKHQPMTKAGPRALRSQLLQSADTARKLDPQLAAVYHVQMTERGATHRKALCVVAARLAERAWLTLARGEPYIICDLAGQPVTPEQAKQLIAAQFTIPTEVRRRRRSSTKAGKVPHAALKAQVKSQHEAGHEATFPPQA

SEQ ID NO: 89342 - protein, 346 aa, unidentified
MTHFVGLEVSVKETSVCVVDDAGKVVCERKVPTEPDDIVVLLTSVGEDYVRIGIEAGPLSQWLVNGLTGAGLPVICVETRHMKALLQAQQINKSDRNDARGIALMMRVGLFKPVHVKTLAAQEQRLLLTSRKLVQRKLIDIESDMRGTLRNFGLKVGVVSTIGYEARIRHLVEGFPRLAAIVEPLLTVRRVMRQQFAVLHKMLLDTVRHDPVCKRLMTAPGVGAVVALTYRATVDQPQRFVHSRAVGAHVGLTPRRHQSGEIDFDGGISKSGDTMLRTMLYEAAQVLLTQSRHWSWLKAWGMKVAQRRGMRRATVAVARRLAVVLHRMWTDGTDFRWGSEPGTAVA

SEQ ID NO: 89343 - protein, 437 aa, unidentified
MRPGKKPQKFAAFVGIDWADQKHDVCLAVPGSEDLERLQLQHRPEVLNEWIGTLRRRFRGRYVAVAVEQTRGGLVHSLLQHEFLVLYLINPSTSAKFRGAWKPSRAKDDITDAELLVEIVRLHRDRLRPWYPDDVPTRKLTLQCEHRRKAVNFRVKLTNQLRSALKAYYPLACEVCGDKLNSPMALRFLAKWPTLEALQKARPATLKQFYYRLNSRYPKVIEERLEKIATAEPLTTDEAIVESYAMQVLMLVDQIEAVQKHIARYDKAIDALFAEHPDRDIFASFPGTGKVFGPRLLAAFGTDRGKFADAQGMQTMSGIAPVIEASGKKHWTHRRWACVRFARQSFHEWAAESIRHSIWARACYAAARDRGLGHHAAVRHLAFKWIRILFRCWQENKPYDEVAYLTTLKKRGSPLWETIKEHPQAVKTYRGESPVIA

SEQ ID NO: 89344 - protein, 350 aa, unidentified
MSTGQPFALIAGVDLGDKTSHVCVLDAASGAVVERSTVRTSVASFERHFRRAEPMRVALETGTHSPWASRAIAGFGHDVIVANSRELQLVYNTRRKSDRIDAEKLARLARLDVKLLAPVQHRTAHTQQGLALLRSRSALVRARTMLINHVRGVFKSFGHRAPPGSTAHFPVLARKVLPAELAGSMLPTLTVLDGITAQISALEEEIRELATREYPEVALLMQVPGVGLITALTFILTLEDPSRFESSRIVGAYLGLVPGRRQSGARDEKKGITKQGDSALRVLLVQCAQYILRRSSPDSDLKRHGLKIASTNRTGGKQAAVIAVARKLAVLLHALWATGEVYEPLRNQAA

SEQ ID NO: 89345 - protein, 392 aa, unidentified
MLFVGIDIGKNNHVASMMDEYGKVVFKAFSFSNTTDGGNALFSKLSSYSSNPSDFEIGMEATGHYWLSVYSFLFEKGFLLHVINPIQTDGWRKGTEIRKRKNDTIDSVLIADLIRYGQFVQTRLADEDLFSLRTLTRFRTYLVESISDLKRKVVCVLDQIFPEYQSIFSDIFGKTSKEILLQFSSPIDFETISSESLAELLAQLSRQKVGAAKAEQLKAAASSSFGITFAKNSFTFQLKALIEQISFIENQVKETESEISNIMRKLDSPITTITGIGNVTGAAIISEIGDISKFDNPRKLVAFAGLDATVTQSGEFEASHNVMSKRGSPYLRKAIFQAALIASFHDPVLSVYYQKKKAEGKHHLTCVGAVARKMCNIIYAVLKNNQPYVPKA

SEQ ID NO: 89346 - protein, 368 aa, unidentified
MGESEFPNSKTGYLKLTKWVKNTSELGRSFDSSLVLFCGEHTGTCSIGLCEYLYAKGMKIWLESALKIKYRSGLKCIKDDKADAEMIAYYAKRFYEPGSCALFEPDSADLKTLRTLYQFRNRVVCDRVAIGNRISSGAFDCSTLVRNRMVKHHKEAQKDEKDIEKEMVKLMETSEELASNYQILISFKGIGPITAAALIIYTSNFKKFDNPRKFACYCGIAPFGKQSGTSINTKPHVSRFAHIGIKAAIVQACKSAMQHNAVIKAYAQRLYAKGKHEGIVMNNVKNKVMHIIFKMIQTQTLWEQEYQQKHMKECKAIPGKNGIGATEAAPIINATLKTSSSVVECTFLEEHSFQKNSKKTSSFSCVET

SEQ ID NO: 89347 - protein, 398 aa, unidentified
MTESSDYESVQVFIGVDVGKDTHHAVAINRSGKRLFDKALPNDENKLRSLISDLKQHGQILLVVDQPATIGALPVAVARSEGVLVGYLPGLAMRRIADLHAGEAKTDARDAAIIAEAARTLPHALRTLKLADEQIDELSMLCGFDDDLAAQTTQASNRIRGLLTQIHPALERVLGPRLDHPAVLDLLQRYPSPEKLASLGEKKLAAQLCKLAPRLGKRLAADIAQALAEQTVVVPGTNAAAVVLPRLALQLITLRKQRDEVALEVEQRVLAHPLYPVLTSMPGVGVRTAARLLTEVACRAFASAAHLAAYAGLAPVTRRSGSSIRGEHPSRRGNKALKRALFLSAFAALRDPLSRAYYTRKMSQGKRHNQALIALARRRCDVLFAMMRDGTFYTPQAS

SEQ ID NO: 89348 - protein, 341 aa, unidentified
MFNNNVIAIDLAKTSFHACNLNKHNKLTTNKAFTRKKLQEWLIKQPKSTVAIEACGSAHYWARFVQEHGHTAMLLPPKLVTPFRKGHKTDKNDALAIAIAAKQPEIKTTAIKTVEQQGLQGIERMRQHHSDFITATGNMLRGLVYEFGIVIPKGKAALSREIPFILEDAENNIPDAFRHQFADMFSFYQKSEKAMAKVEKKLAQLIKQQKTCQSLINLEGVGPVNALGLALALGERGESFKNGREASACIGLTPQQYSTGGVVVLGGIGKKRGNKRLRSTLIQGALAVTKVLKNREPKNSKEAWLKALMERCGVRKAAVALANKNIRTAWAMIRYDKAYQK

SEQ ID NO: 89349 - protein, 340 aa, unidentified
MSEIKRIAIDTSKAVFTLHGVDDAGRPMLRRNVRRRELLPFFEKLPPVEVVLEACGGSHHWGRALSTIGHRVRLLPAQYVKPFVKRSKNDRNDAEAISVAASQPSIISVPIKSLEQQAAAMLLSVRELLVRQRTQLVNALRGHAAELGMVAPLGEKGLAELRTEIAAADERAVPAAAKQALMLLGQETHRIETRLAAIEVKLMQQHRANPVSRRLSGIPGVGPIGALNFALRIDPAQFRSARHLAAWLGLVPRECSTAGRQRLGGISRAGDERLRQLLVLGATAVIRHAKPGRPATSPWLLSLLGRKPRKLAAVALANKMARIIWAMMTSGQAYRSQPAA

SEQ ID NO: 89350 - protein, 380 aa, unidentified
MTLDVYFRQCVGIDVSKDKFTACLYMYDRAGDVGCCTKSIDFANTKSGFNQMVRWSRREAVKERPLTYLMEPTGVYYEHLAYHLHKIGQTVYVVLPNKARKFCEAEGIKTKTDAMDARCLALLGCVSRRLKPWSPPAPIYRELRQMTRFHADLCEVRTSVANRMEALDHMEGMARSVHKNCERLLQEIDMLMEKNNKAIMEKVAEDKELLAKVKRIATAKGLREPTIVCIIAETEGFHYIENRKQLVSYAGLDVKAKQSGKDDPKHCISKKGNAHIRTALYMPALVAVRYNRQIKAAYGRICQKHPNGKMIGITAAMRRLLLLIYTLWKNGEEYDETRDTTHTPRKNEPELEYGPNDCIGRIDNEPADWDVADENGEPPL

SEQ ID NO: 89351 - protein, 492 aa, unidentified
MILQPKDGARNKLGGKARQKALARAQARKKPRRGKRTSRRGGQAVATTPSLSQLEHVNRNAAGIDLGAMVHYVAVPPGRDPETDVRCFETFTEDLEAIADWLTGCGVDTVAMESTGVYWIPLYELLEQRGFEVLLINPADLKKFRRKTDVSDCQWLQTLHTFGLLQGSFRPEEKIVTLRAYLRHRDRLVKCATDEVRRMQKALDQMNVKLTQVISDITGLTGMAIIRAILAGERDPERLAELRHVGCKNDAQTIALALRGNWREEHLFALRQALELYEVHLAKLKDLDGQIEAYLQTFEDRSEGQGQDLEPSRRKRALDPCLNSRDLVYKMTGVDLTEVDGIGGTAALQIVGEIGTDMSKWDTDKHFVSWLCLCPELHITGGRRKSNKSHTQPSKNRAAALLRMCGQSLLNAKCALGAFGRRIRARKGGAHAVTAVARKLAIIVYHMLKERRPYKDQGASYYEERYRQRMVENLRRRARQLGLDLVPLALPE

SEQ ID NO: 89352 - protein, 359 aa, unidentified
MREQRNKISFRGQKIYVGIDVHLKSWSVTVLSETSVLKKFSQHPSPEALYGFLTRSYPGAEYHSVYEAGFCGFWIHERLTALGIDNIVVNPADVPTKSSEKLRKTDTVDSGKLARCLRANELKGIYTPDSVSLEMRSLIRLKNSITKDTTRQKNRLKSQLRYLGIEIPQEFLTPFSNWSKRFFAWLKEIETLTPSGRQALDIHIRHLEELRRQKLEMTRALRTLAKTDRFREPLRLIMSVPGFGQATGMAFLSEICDITRFRNAEQLAAYIGMIPMCHSSGEKDGTGDITIRKHAVMRCNLIEAAWVAVRQDPAMNLFYTEQCKRMPKSKAIVKVARKLVNRLFFVLKHQTEYVNSIVS

SEQ ID NO: 89353 - protein, 343 aa, unidentified
MKLQVLGIDLGKTVFHLVGLDSTGRVVIRKRCSRRQLLAFTANLQVQLIGMEACSGAHFLGRALREQGHEVRLMPAQYVKPYVQTNKSDYLDAEAIAEAVQRPRMRFVPIKTEEQLDLQALHRVRERWVMRRTAVVTQIRSLLLERGLTLPKGRSCLDQQLPRILEDAELNLSDSFRVLLAQLKLELEQLAARIEPIDRVIQKTAKENEDCQRLTEIPGVGPVTATALIAAVGNGSTFGKGRNLAAWMGIVPGEYSTGGKQKLLGISKRGNTYLRRLFVQGARSVLQQRHKQAPGLSSWLAQLLARAHQNVAVVALANKLARMAWAVLCKNERYRAPVFAGTT

SEQ ID NO: 89354 - protein, 363 aa, unidentified
MQYLNDTELSSLEETRSQFNGCKAVIKLGIDVHQDFYTVVEQVGGSNPKPPQRFQKDAFLHWAAKLTGETCEVHAVYEACGFGFGLQRSLTALGIQCYVVCPQKLDEQNKRVKTDCLDAKALCLRLDRLVQGNRDALALVRVPTEEEEQLRAIHRQREQLVKARKRLEAQGRSLMVNHGIEPVKSWWKRRAFAALPVPEWMKELLGNSQPILLALQQKIAALTAQLQMAAAPNQPRGLGAMSSVIIDREIGNWHRFNNRRQIGSYTGLCPGEYSSGNIRLQSCVTKHGNPRLRAALVELAWRLVRFQPNYKPVVKWRQILAQGALATGAARKKAIVAVARQRAVDLWRIRTGRLTAEQLGLKI

SEQ ID NO: 89355 - protein, 372 aa, unidentified
MTSMPEPTPIDRAHDEREEVVLGVDTHKDLHVAAVLSGLGALLATRAFPTTTAGYRGLVAWARSFGALRRAGVECTGSYGAALTRHLQAEAIEVVEVNQPDKATRRKRGKTDAIDAEAAARAVLSGRATATAKTSNGPVEAMRVLRMARNSAVNASTKAINQLKAVLVGADPTLRDSLAGLGPASLVRRCAELPDPTPGSGLSEVDRAVVFTLRTLAARIMALKAEAYQLHKQLRALIAAHVPELLERRGIGPDSAAALLIAAGDNPERLCSEGSYAALCGASPVEASSGKTQRLRLNRGGDRQANAALYRITLSRLRWDSRTQDYLQRRLAEGKTRREAIRCLKRYIAREIFTLITPKAATALANQSANAA

SEQ ID NO: 89356 - protein, 367 aa, unidentified
MKQSSKVFVGMDVHKDSIDITLAEQGGEVRRFGEVGGDRTALLKAVRKLSSRGGELVFVYEAGPCGFWIQREITALGRVCWVVSPSLIPQRPGNHVKTDRRDSENLARLARAGELTPVHVPDVRDEAIRDLVRARDDAVIAQRRARQQLKALLLRNDIRYVGKTSWTSAHLRWLCELKLPQPAQQIAFQEYVDAITVATARIERFEQAMRDEVLTWRFAPAVAALQGMRGIQFVHAMTLVAELGDLTRFASPRQLMAYLGLVPSEDSSGQRRHQGSITKAGNAYARRALVEAAWAYRHPARLTRIIALRQDALPKQACDIAWKAQLRLCAKYRRLRARRVLETKIIVALARELSGFVWAIGQHVKPQ

SEQ ID NO: 89357 - protein, 336 aa, unidentified
MIGLDLAKNVFQAHGSDSAGAVVFRKRLRRDKVLVFFAEQPRCQVRMEACGSAHYWGRELSRIGHDVRLIPPAYVKPFVKRQKNDAADAEAICEAALRPTMRFVAIKSEEQQAAGAAFRARDLLVRQRTQVINALRGHLAEFGMVVAKGPAHVDRLLALALDKENGLPTELRPVLDILVDVLQSLNERISTLDGVISQQTDEDPDAKRLLTIPGIGRMTAAAILAFAPPAHTFKRGRDFAAWVGLTPLQRSTGGKQSLGRTSKMGERTLRRLLIIGASAVVRWSARKGAPKGSWLERMLARKPRMLVTVALANKMARIVWALLTKGGVYQASAAVV

SEQ ID NO: 89358 - protein, 358 aa, unidentified
MNTTVAHTRSFVIGVDTHARTHTYAVLAANGEHLDTETFPNTHAGRARAINWVGRRTGGDLGALWVIEGIGSYGVQIARQSALAGYRVAEAARMGRGGRRGIGKSDPIDARRIAAAVLPLTEKQLRNPRMDEGIRAAAQILLTARDELTGERTRAVNALTALVRTADLGIDARRSLGAKKVGEIARWRPREEDLATATARTEAVRLAKRILVLDAEITDNTNRIGELVDASPAAELVEETGIGPVTAATVLVAWSHPGRIRSEAAFAALAGVSPLPASSGNTTRHRLNRGGDRRLNRALNVVAMVRMVHHPQTRAYADRRRTEGKTDREIRRCLKRYLARRFYRHLNSAATAMGVDGI

SEQ ID NO: 89359 - protein, 336 aa, unidentified
MITSQKNQSYLFHVGVDLSKAKFDAVLLGTTKGQQHRVFDNTKPGIKKFIAWLEGHDGFHFRQALICMEHTGLYSRELVKAMVRIKAFVWLESPLQIKKSLGFLRGKNDKIDSYRIAYYAEKYADKARLVQANNELFMKLQDMMAARDRLMKTKGQLQRPLKELKRIDAATFQNLNRINQPVIKQLEKSLTHIKKEILELINSDEQIKRLYMLVTSVKGVGMVLCVQLLVYTHGFSRMKSGRQLACYAGVAPFEHTSGTSIKGRTHTSNFANMTLKSTLHLAAISSIQHNPDLKKYFERKVAEGKSKMCVINAVRAKILYRVLAVVKRGTPYQNVA

SEQ ID NO: 89360 - protein, 358 aa, unidentified
MNRTAGVSAGQVIGTIDGQQAVGLDIAKSVFQLHTVDMTTGEIINIQLKRAKVLEYFSNKRPCQIGIEACGGAHHWARKFAAIGHSVRLIHANAVRPFVAGNKTDATDARAIWLAIQQPGTKFVGMKTLQQQATLVLHRQRELLQKIKVMQTNALRGLLYEFGATFARGKNALFSEIEATLETLVTDIPQYIADSLREQVDRIKKLAVDIKAIEQRLAQRLRADADMRRANAIPGVGLLTATAVIATMGEARAFKSGREFCAWLGLVPRQSGTGGKVRLLGISKRGDTYLRTLLIHGARAVLSHAKEPGPWLQQIKARRPANVVVVAQAAKMARTIWAVVAKQQEYKVGYRSVKPQAA

SEQ ID NO: 89361 - protein, 365 aa, unidentified
MRTIGAERPDSSTEVAVILGVDTHLNFHVAVAVDHLGRCLGGLSVPTTVEGYEELLRWAKDFGPVKRAGVEGTSSYGAGLARHLRASGIEVLEVERPEHRRRRSRRNLQKSDPSDAERAARAVLAGEASGVPKSADGRVEMIRTLRAARRSAIKARTQAANQLQALCVTAPQGLRNRLRTLSTKELVRVAARFRLAGDPSDVPTATKFALRSVARRYEALSEEIGELEAHLDRLVAEAAPELVSLPGIGTDSAATLLVVAGDNPQRLGSEASFASLCGVAPIEASSGKVVRHRLNRGGNREANRALYMICLARMRRDPRTQEYVARRTQEGKSKREIIRCLKRYVAREAYRVLATYGARSSQIGP

SEQ ID NO: 89362 - protein, 341 aa, unidentified
MEGDLKYCGIDLHGNNNWVVILDDQDRVLYSRRHANDLSRLLPVLAPHRAELSGIVVESTFNWYWLVDGLQEAGYRVLLANTAAIKQYEGLKHRGDESDARQLAHLLRLGLLAEGYIMPKAMRAVRDLARKRMQLVQQRTAQILSIESSLSRHCGWKLSSNRIKCLCQADLDEMKLEALPLQGVQANVAVLQALQMQIDSLDEVLADYCRGEAGYRLLRTVHGIGEVLATVILLETGNIGRFADAGHYASYCRCVGSAYLSNGKKKGEGNTKNGNRYLAWAFVEAANFAVRHCEPARRFYQRKKAKRNSIVAIKAVAHKLARACYHMLKLKQPFCVERCFA

SEQ ID NO: 89363 - protein, 525 aa, unidentified
MVTKSKKQKQSSKSKPGKRYVGKPGGVIQQRVQQVGPEKFGIVAVDCAKKRSRWFLCDYYGRVIIEPTTVEHSAGSLKTMTQQIRETCQAEGITDTIAAVEMTGVYHRPVQAALRKAGFDTRTVHPFASSHYRKPLHPDLKTDDNDLEAIFHAAINGYGLALLEVDPVYRSLQRLARHRRNLVKQKARLQVQIRALMHQSMPGYADLFDDDKLFNKSIAMPIAKHFSSAESIKRAASDGIAKYLRSQKIRFQIRTIDRVTAWASIAADPDPLAPLLTDQWKQLAQLHALMKTQVEQTERETASFLVKTPYVLLLSVTGINVVSAGELAGEAGPIEHYASATALNGRAGLYPSRYQSDEVDRNSGMAKSCNRRLRAACILVAKNLIKCHSYYRGLAALWKTRKIATADQQCRIANRSNRMVFQVVSGRQLWRGKGIDREYLLLKLREFHRAHHSTLEQTVRDMDEAFAWLPKSAYAAEARPLEELAKKKGRGAKSIGDLLLPLLIRLGVGGSSGVESNSSEARSPH

SEQ ID NO: 89364 - protein, 341 aa, unidentified
MMMIGIDPHKGSHTAVVIDSGEVVISEIRVKTSADQIGELREWASTYPDRVWAVESARGMGYLVSQQLVAAGERVIDVPATMASRVRLLGSGKSQKTDPNDARSVAIAALRHSGLAMVQVDDHVRVLGLLAKRHRDVARLKNKVACRLHALLIELAPGGLTSEMTVNKAISLLERVEVDDQVTHQRVVIATELVEDIVRIESQMKASKKRIRTAVAASGTTLCDIRGIGPIGAAIILGSVGDITRFPTAGHFASYNATAPIEASSGDRRRHRLNPGGNRKLNHVLHIAAVTQLRYPSEGRDYYQKKIAEGKTTKEAIRALKRRISDVVYRRLLADARRRNI

SEQ ID NO: 89365 - protein, 458 aa, unidentified
MSRGQRRRTARPSPPPVLNPHAAGIDIGATEIYVAVPLDRDPRPIRRFGTFTQDLFAVATWLQQCGVTTVAMESTGVYWIPLYQILDTRGVEVCLVNARHVKNVPGRKTDVQDCQWLQYLHAVGLLRGSFRPPETVCAVRALLRHRDRLVRLAAVHTQHIQKALNQMNLQVHHVLSDITGVTGLAILDAILAGERDPDALARHRDRRVKASRETIAKALVGDYRAEHLFTLRQSLDSYRHYRRLIDACDAEVQALLATFASAIDPACHPIPRATTSHRKPQGNAPRFDLRTELYRVLGLDLTQIPGLNTTTVYTLFAELGPDLAKFPTSKHFASWLGLCPDNRISGGKVLFVQTRHVKHRVAQALRLAAQGLSHSASLLGAYFRRMRAKLGAPKAITATAHKLARIVYHLLTTRQPYAETRLAAAEEAHRHRTESRLRAQARALGYTLVPVPPDGAVS

SEQ ID NO: 89366 - protein, 332 aa, unidentified
MQFVGIDVSAKSLVVHLQPPKGTRQQLTFDNTGQGHQKLCRRLTKSGRPTRVAVEATGLYSLEIALALAAQPEVEVMVVNPRSLRDFARAQLRRSKTDTVDAQVLLEYVQRMPFRPWQPPTPQRLELRAIGRRLADLTDLITQEKNRLHAASFVASLAPAVRQDLQTHLQFLADQLKVLQREACQLIQSHPDLKEDFELLVSTPGIATYSAIQILGELSILPQEMGPRQWVAYAGIDPRSYDSGSSVHKPPQMSRCGNRHLRRFLFMPALVAVRRDPHVKAFYDELLARGKKPLQALVAVMRKLLHSLHGILRHRVPFEGQKFRVLKTSLAA

SEQ ID NO: 89367 - protein, 409 aa, unidentified
MEQIHDRVAGLDVHRDSVTACFRQLGPKGGVVREKDRFTTTTVGLGVLADWLAERQVELVAMEATGVYWKPVYYALEHRFELWLCNARNVKKVPGRKTDLSDAEWLADVAAHGMVRPSFVPPPPIRELRELTRYRKTQVDARVAEIQRLEKVLQDAGIKLTSVASKVLTQSGRAMIEALIAGEHDGQRLAELAKGKMRPKIPALTEALTGHFGAHHAVAAERILGHLDFLDVTIGALTAQIDARTASFDSVYKLLLPVPGLERPSIDVIVAETGADMSRFPSAADLASWTGVCPGNHESAGKRRRVGTTPGNQWLRRALIEAARAAVRTKGSYYGAQYRQIARRRGPNKAAVAVAHSLVEVIWHLLSTGEVFEDLGDDYFQRRRDPDRQARRLVAQLEELGFAVTIIAA

SEQ ID NO: 89368 - protein, 366 aa, unidentified
MKRLVLKEVGKQAQRPQPRAPEVGEVVIIGVDLSRSKWVYACRWGGHEQRRFGSPGELKHLQAVVREYQQRGCDVHVVYEACGFGYQIAWWVEAHNARVIVVAPSCVEKAPGAQVKTDGLDAGSLALKYERGMLKGIYIPTREQHEYRQLSRTYGQALKDRSRQQVRLRLLLQEHGYTPPAAGSSWGALERWVSTQQFAPPLGLCVTELMGLRTSAGSSARRLANELRAVGRLPQYVELGKALAAQSGVGRFTAIRFMLEVGDIHRFATADSLPNYLGLAPKEYSSGDMVHRGRIRKCGPGSLRAWLVQCAWAAVRADKDGPLVECFKRLEPRVGRKRAIVAVARKLALRLRARWLAFEEEVQQAA

SEQ ID NO: 89369 - protein, 346 aa, unidentified
MSVILALDLGKFKSVACLYTVETTGHSFRTIPTTPQTVHDLLVEVQPARVVIEVGPAAGWVKDLCEVLEIPTQVANPNHEAWRWKNVKRKTDKDDGLKLARLSAMGQLPTVTLPATRVRQWRSLIAYRHVLVSRRTAVKNNLRSILDRQGLTHACGKTGWTQAAVAALGQLARPVAEVSAEELWRGMVPVELQALEQVEQLLQQVEAKLQGLADAEAKVALLRTIPGVGPRLAEVVVARIDDPKRFENRKQVGAYAGLVPRQMESGTMSRTGRITGRGNKLLRGLLVEVSWMMQRYNPHLQHVFDRVCRGSKTRRKIAVVATARRLLVICWAMLRDGTAWRAPSAA

SEQ ID NO: 89370 - protein, 436 aa, unidentified
MTLINFVAANQKYYAFNLLSVFIMVFWSVQYLLQHLLVQTQVSHQLLQPLILILQLPQTPQFRHARPGKFFLPVNGMDYFLPLRLTVRNVLTRRITMNIVFLGIDLAKNVFQLCGLNQAGKPVYTKRTGRKELLQTLANIPACLIGIEASTGAFYWQREFEKLGHKVKVISPQYVRPFVRGQKNDGNDAQAIAVALMQPTMQFVPPKSPEQQDIQALHRARQRIVNHRTATVCQIRGLLLDRGIPIGSAVSRARRAIPLILEDAENGLSSRMRRTIAELYDLFNDLGRRIHFFDKEIETVFRQSEACPRIAKVKGIGPKTATAVVAAIGKGTEFKNGRHFAAWLGLVPRLHSSGDRQVLMNMTKKGDKHLRTLFIHGARAVVRVATNNNDGHMNQWVNQLKERRGFNKTTVAVANKNARIIWSMLRNDTGYQVVCN

SEQ ID NO: 89371 - protein, 461 aa, unidentified
MTRKLRESTTSAEWPLVNPNAAGLDIGSAEIWVCVPAERDPQPVRAFGTFTPDLQALATWLKACAIETVAMESTGVYWIPAYELLEDQGFTVCLVNARHLKHVPGRKSDIQDCQWIQRLHSFGLLNASFRPAAEMCALRAYLRHRATLIEHRAAHIQHMQKALQQMNVQLSQVLKDITGVTGQAIIRAIVAGERDPVQLAQLRDPRCANSTATIAKALTGNYRAEHLFALKQALALYDFYTAQLQECDGEIERQFSVLRPVHEDDNLPPLDTSDKRDTHSKNAPAYDARSLLYQLLGVDLVAINGLNASTVQTIIAEIGTDMSRWPSVKHFCAWLGLAPRNDISGGKVLRSRTAKTRNRAGQSFRLAAQSVGRTQTALGAFFRRLRAKHGAPKAIVATAHKLARIFFFMLKHRTPFHDIGAAAYDERERQHEITRLKKRAAKLGLMLVEPPAPPPGVQVSG

SEQ ID NO: 89372 - protein, 425 aa, unidentified
MSKDSTKNNRGVEHIVQQDKFVYVGIDLHKQHHTAVFIDCWNQKLGEIKFDNKPSAFPLLEKEVKKHTKKGLSVVYGLEDVGGFGRALAVYLTENKCWVKEVNPKLSTARRKSHITVQKSDSWDAECVARVLKDELLQLPDARPIDLYWAISQLVTRRKGVVKVLSGCIKNLHQQLGYHHPSYKKFFSEIDGKTALCFWEAYPSPRHLKDMETGTLAEFLRSHSNNGLSHKKAAQILFLIEADGDTYRDFQDKRDFIVQSLVRSIRFNQQELAQIEEEIGGLIKQLGLQLETMTGIDVVTAAELVAEIGDIHRFATPDKLARFAGIAPIICGSGNKVRNYKSKQGNRELHDIIKNLAIRQIAVTRNKKEPRNPYFHAYYEQKLTAGKTKQQAIVCIMRKLVNVVHYLMRTKAAYIIPEVSIKQAG

SEQ ID NO: 89373 - protein, 343 aa, unidentified
MKQLFIGLDVHKKTWAVTIQEDHLILKRFTIDADADLLIGYVTRHFPQHQVQCCYECCCCGYHIYHSLTAAGWEVLVANPDDIARGNKQVTTKTDKVDSAHLARELQAGRLKGIYIPNHKQEQFRSLFRRRNDLVKSLRRIKCHIKSMLLYYGIVLPETYDNVNWSKDMIQWVYKQRWSYAPATEAMKSRLEEYLFLRKQYLHVGNELRSYARKHFKKDYYLLRSVPGIGPLTAIGMLAEVGDIRRFRNIDYLSSYIGLVPSLHSSGEKTYSRGITYRSKRLLRSYLVEGAWVAAKQDPSLMVYYEERKGYDHKKLIIKLAAKTLSRIYHVIKTCEPYELLKP

SEQ ID NO: 89374 - protein, 386 aa, unidentified
MRGKTFIPHDYDVFAGLDVDKRSIAVTFTNHQGFIRSLRMPYSVERLLNHVRKHFPDQKIAFAYEAGPTGYGLYDGLVAQAYRCLIAAPSMIPKAPGQRVKTNRLDSVGLSENLRGGQLKSIHVPSGPYRELRHLTQLRDTFVSEMVGMKLRIKSLLLFEGIAFPPAPPGSQWSFRVKAKLRKLPCSGSVRFKLDQLLDSLAFSEKQVFKTTKEIRRFCQTDPELSQCLQYMMTVCGIGWIVASQLLARIGDWRELKNVRQLAGFLGLVPTEHSTGERTERGAITHTGDGRLRSKLIQAAWSAIRQDGELREFFRSVASTHPRTVAARVAIVAVARKLSGRISVVLRQQRAYGVREKVHSAPLTQEETLPQGTTRRQAEPGEAKDS

SEQ ID NO: 89375 - protein, 354 aa, unidentified
MADEIAVLGGIDTHTDLHQAAVIDSIGRHLATQQFETTPQGYQRLLDWLRSHGEVLAVGIEGTGAYGAEIARFLTTNEVTVIEVDRPDRKARRDNGKSDPIDAYGAATAVLSGRADGIPKSRNGIVKAIRALRVVRKSAVKARTQTINQIRTLIVTAPSAVRDKLRGLSARELVDTLARCRPTGELDDPACAVRIALRRLARRYQQLDEEIKDADREIGPLVTQAAPRLIALPGVGPETAGQLLMSTGDNPDRLRSEASFAHLCGAAPVPASSGRTHRHRLNRGGDRAANNALHTIVLVRMKYDQRTREYVARRTAQGMTKKDIVRCLKRFVAREIYRHLPHATYPAQSLPQTA

SEQ ID NO: 89376 - protein, 389 aa, unidentified
MNYLKYGIGIDMAKDNFDVCLSVIDTTQLVTIKATSSFANNLKGFTAFLSWSLKHLREALPAIYLLEATGIYHEHLAWYLFDNDCKVVVVLPNKAKKYKESLGLKSKTDSIDAKGLSRYACEQNLRLWQPVSKKIYGLRIITRQIEALSVQATQVQNQLHSLLHGMYRLKDIEKMLSKQLALLQQQKDSMHQQLLEVIEQDAVLKERFEKILKIKGLGALSLAIIIAETDGFAATQSIAQLTSYAGYDVVENQSGNRKGKTKISKKGNGHIRRALHFPSLNMVRYEQANFHLLYKRIYNKSNIKMKGYAAVQRKLLALIYTLWKKNEPFNNTFQKQASGNEEPGPSLASALQKPGKKIASGKPEATQDKLPSTNRRKPSLAYYKGMKKG

SEQ ID NO: 89377 - protein, 347 aa, unidentified
MRFYKHTHAFYAGVDLHARSMFTHILDNDGKTVFEADLPASPEAFRNAIAPYRAGLVVGCECMFSWYWLADLCEDDEIPFTLGHALYMRAIHGGKAKNDRIDAAKIAGLLRGGMFPMAYVYPRAKRDTRDLLRRRCFFVNQRAQLTAHIVNTNSQYNHPPLTKKLCYASNRSEDLAERFTQASTQASIRADLALIDAYDAQIDEVERVVLKNAKINDPTTLTLLRTIPGIGKILSLVLLYEIDQIARFPEVGNFLSYSRLVRCEHESAGKKKGSGGKKIGNAHLKWAFSEAACLMLRAESEAKKWLDRQARKRGKKKALSVLEAKLGRAVYHVWSKQQAFDLRRFFA

SEQ ID NO: 89378 - protein, 356 aa, unidentified
MQTQVTKKIDFSGKDLFIGLDVHKKSWSVTILVDGIEHRTFTQPPDPAALNHYLLRMFPGGNYSSAYEAGFCGYKIHRELNALGIKNIVINAADIPTSQKDKLQKRDPIDSRKIARGLEKGSLRGIHIFDRNMEELRSLNRTRFFLMRDLRRSKSRIKSFLHYYGEPIPAELDNNQWTFKFVAWLKQVQMKTPGGQDAFDNLISSYEYHRKQLVELSRLVRQRIREYDRELYSLLTKISGIGPLTASALITEIGDISRFNNIDQLGSYVGLVPKIRESGEITHTGGITFRCNSFLRTLLIESSWQAVRMDPAIMLYYKKHLINNKGHKVIIKVARKLLNRIRYVMKNKQPYLTGVA

SEQ ID NO: 89379 - protein, 317 aa, unidentified
MTKQDEYVGIDVSKKTLDVATLHRGEHRTVRHDEEGIRGICEQMLVLRPKLIVMEATGGYERELAIALVLAGLPVAVVNPRQVRDFAKAMGMLAKTDKVDAGVLALFGERIRPEPRGVPEKEVRELDALITRRTQLNEMLTAEKNRMGVAPRTMRPSILEHVRWMESQVKEREAELNQVIQASPIWRAREDLLTSVPGIGDVTAQSLIAMLPELGHVTAKRAAALVGIAPFARDSGPKKGKRSIWGGRASLRAALYMATLSAIRWNPVLRAHFKQLKARGKLFKVAMVACMRRLLTILDAMVRKNQHWTDVTLVHAP

SEQ ID NO: 89380 - protein, 395 aa, unidentified
MPDGVRWVGLGVHARASTVAVFDRATGEVVIRRVAGRPHGLLPVLREIPRPARVVCEAGPTGYGLARRARAEGIELEVCAPGRTERPPSDRVKTDKRDAIRLARRLAAGELTMVAVPSVEHEQLRDLVRCREDIRRDLMRARHRLGKFLLRREIYYEGPATPWTRRHRDWLASLRFADLASQLTMSDYLHAHDVLLARREQIEQELCQLAGDSLWAVTIARLRCLRGIDTLSAFGLCGEVGSFERFGHPDQLAAYFGIVPSENTTGQQRRQGAITKAGSTHARRLLVEAAYHYQRHPSIGQALERRQRDQPAEIINIAWRAQRRLHARWRQLKHARGKRNGIVAIAIARELAGFCWEIATWQAHPDRVPPASMPAGDTLTQAHSLPPKHEVAATA

SEQ ID NO: 89381 - protein, 395 aa, unidentified
MFIVGIDVAKRSHEVCMITSDGQTVQRPFSIRNNCTGYNLMLEKIRKHTNIKSQIVFAMESTAHYWLALFTRLRKDGYHVILLNPIQTSAMRDMFIRKIKTDAKDSFIIAELIRFGRYAESNVAQDRLLALKELCRNRFYLVDMAGDLKRKLIALIDRVFPEYEAQFDTIFCKSSVAVLKKYPTPQKLSNAHLDKLTELLWNSSNGHFGEWKARELRELARNSFGVEDCDGAYSTLILLMLDQIQSLSGKADALEKEISRLFQSFDTTVTTIPGVGPIIGAVILSEVGDISRFSSADKLAAYIGVDPSVNQSGEFQAAHAHMSKRGSPYLCRCIWMASQVAVQRDPMFRAYYEKKAAEGLKYMTIIGHVTRKMTAVVFAILRDHKVYEPVLPTAA

SEQ ID NO: 89382 - protein, 345 aa, unidentified
MKKIFIGIDFSKEKFDATLIKAEGLEECGPNVHEVFDNKTSGYRRLERWVRSNSDDIPVDNWLYCGENTGGYSIGLSNYLYASGYDMWLECAFKIKRSSGMQRVKNDRHDSWLIADYAMRNHDKAILYKPQSTALNSLREVFLYRHSLVKQRVALSVRRDEKRLTQEKSDAKTFMSLTSKHLVTEVNKAIAKCDQKIREIIASDDELCEVFEIVTSMPGIGPQNASCLMVYTDNFTRFDTSRKIACYYGIAPFGADSGKTVKEKPRVSPFANRMIKSLLSQAALAAIKADANISCYYQRLIERGKHPLLAQNNVKNKMLHTLVAMVRNKQKYNPDHIYNTVSGVA

SEQ ID NO: 89383 - protein, 405 aa, unidentified
MDVIIERACGMDVHKDNITACIMTPDGKEIQTFSTKTVFLLKLIDWIKEHRCTHVAMESTSVYWKPIVNLLESEGIEFLVVNAQHMKALPGRKTDVKDAEWIAQLLRHGLLKASYIPNRIQRELRELVRYRRSIIEERARQHNRIQKVLEGANIKLGSVVSDIMGVSSKDMLRAIANGEDDPEKLAGFARRTMKKKKEELELALQGYVNSHQRLMLKTILGHIDFLTEQIEILDQEIAQRVDSYEEDIERLDSIPGIARRMAEQILAEIGTDVKKQFPTAAHLCSWAALVPGHNESAGKRKSTRSKKGNKYLRSALTEAAQSVRGSKNYLGALYRRTAGRKGNKRAAIVVAHAILRIAYYLLTRKEMYVDLGEDYFDKQRQVSIVRHSVRRLENLGYIVTITEAS

SEQ ID NO: 89384 - protein, 394 aa, unidentified
MKLIGIDIGKNKHFFYVMDQQTGEIISQPVSFSNDKEGFDFLVQKIKSYPKDSILIGMEDTGHYHFALLKYLLDLQYTVALINPKTTDFNRKMQGGITKNDKLDTINICDVLDTPERKKQYRITKVNSFDLYEQKQLTRNHHNLKEEENVYKNRLQKCIDIVFPEFNKLFNSKYGIVYMNILKMFGSAENIANTDIRTIRKCFEIEGRGNRISLTPERLKECARSSIGISSSAEVIQIKHLSAQIELIEEQLTEIDKKIEEFSIQNNSPILSIPGISHFSGTSILAELGDISNYSKPSQIIKFAGVAPLHYESSQFNAQHTAITKKGSKYLRKTLYQIILPVIRHNPVFNKYYQLKISQGKGHRCAQGHCVRKLLRIIYHLLKTNQQFDPQLLR

SEQ ID NO: 89385 - protein, 353 aa, unidentified
MTQFIGCDAHKKYSVFVAVDEHGHVGRAQRVEHDRPGYRQFLEQLPARSSIAIEASGHYYWLVDEMERAGHLPQLANPAEAKRRMGKTKKTDKVDASNLAILLRNGTLPTVWIPPAQLRDQRELLRMRMFLVGTRTRVKARIHGALARYNVTVAETSDLFGVEGRRLLASRLEQLPEQTRGSVEQQLATLDFLELQIADAEQRLQPLRESSVEAGLLQTLPGIGKILGLVLSLEIGRVERFPSAAHLASYAGLVPRVHASGGHTRLGQVRSDVNRYLKWAFVEAVNGIVMQQRNYGGSHVLRLYQRIRRKRNHPRAVVAVARHLAEAAFWVLKKQEVYREPQAHPQTLSSTHG

SEQ ID NO: 89386 - protein, 345 aa, unidentified
MTTIDYIGFDIHKKTISFCAKAQDGTILEEGTIPALRNKLLAWAKARPRPWMGAMEATLFTGWIYDLLKPLAQELKVAHPPMLKAIAAAKKKNDKVDARMIADLLRCNLLPECYMAPVAIRDLRRMLRYRNLVVRQTTRMKNRMAGLLMETGVAYNKERLHGKAYFSELLGSLREVPGSVVELLQLSRGQVEFFVAIQRRLLKGLREHPELSQRVMRLQSIRGVGEILALSWALEVGEVERFASIAQAISYCGLTSAQHNSAGKEQRGPISKQRNKNLQTILIEAAKLAPRYNPPLAVVHERELKRGNRNRATLAVARKLVAYLMAVDKSGKPFEMRVSGQEAAA

SEQ ID NO: 89387 - protein, 451 aa, unidentified
MKDLSMEVVNPNAAGIDIGSRSHFVAVGQKEEDVKEFGVYNDDLSALAKWLKEHEVKTVAMESTGTYWQNLFTVLQGAGFEVILCNGKFTKNIKGKKSDVQDCQWIQKLHTLGLLSSSFLPDEATEQLRTYCRHRMNLIEQGADTIRKLQKYLRLLNFRLDIVVNDVTGLTGLSIIKAICKGEADPEKLASLRNGNCKKSEEEIAKALQYNGRKDYLFALRHEYEMYVTLQSRIEECDAEINTLLKAQISSDENKKQHHIEKKVHKRVNKNNPKNIDINLLSYQYFEGTDLLSIEGLGHSTVLTIMSEVGNGIYKFDTAKQFASWLRLSPNNKISGGKVLSNRIPKGSNRLKIALRNAANVIGNLKGTALSDFFKRIAFRKGRVSAISATARKLAVIIWNMLVKKIPYKPENTYEFLDQKRKRKVMEMKKLIHKFGITPDDLGLQLNISNL

SEQ ID NO: 89388 - protein, 397 aa, unidentified
MIAVGIDVSKSKSTVAILNGDGSIRAKPFDVHHVADELQALVDYIKRTSVPPTILMEPTSYYHYPLLKAFTEAELPVCLINPYQMKKYGDTELRKAKTDKRDSLRIAQYALEKSYSLIPYTPQDQKYEDLRFLSRQYSQRISTLTVAKVQLLSLLDETMPGITTILPLKSRDPDNCVLLRFIKRFKSFDVIRRMGKTRFLDSYQVLVKKTKDRFAGSKGLAIYELVLNSVTTRGENPLSAMTQDQCVDLVSTSQKAADEINLQMRIIAETMPEYKVLRSMAGVGDRLGPIILGEIGDIRRFHSGKALNAYAGNDAPPYQSGQFESRNRHISKRGNPALRKACFEVMQALKLTKPQDDPVYLFLLKKEQEGKPYNVAKMAAVNKFLRIYYARAMELYK

SEQ ID NO: 89389 - protein, 404 aa, unidentified
MIFVGLDWAEDHHDVCVMDEAGEVLGKRRIADGVEGVAELHALVGTHAQEPNEVVVGIEIDRGLIVAALLSAGYEVYAINPLAASRYRDRHATSGAKSDPGEAKVLADLVRTDRHNHRQIAGDTELVEGVKIIARAHQNAVWGRQRQVNALRSALREYYPGALAAFGTDLSSSDAISVLSIAPTPLLGRQLSRSKIISALRRGGRTRNVEKRAAEIQIALRAEYLEAPPGIGEAHGEVARSSLSLIEAYTKQIATLEVSLDERFEQHPDAKVVLSLPGLGTVLGARVLGELGDDRTRYAGSKSRKNYGGTSPVTKASGRSRVVLARYARNRRLATALDRWAFCSLTHSDGARRYYDDLRARGKTHGQANRQLANRWVGILHHCLERDELYREDIAWPRGPELAA

SEQ ID NO: 89390 - protein, 503 aa, unidentified
MTTGKRQAVHALQQPLTTVHRAARIPEQVREQAEACAKLASLPVQHEHAAGIDVGDASHWACVEATPDGSDRVREFPAHTPGLRQLVAWLRHCGVTTIALEATGVYGHVLYLTLLEAGFQVITIPPQFARQIKGRPKTDKRDCQWIQRLHKHGLLPSIFQPDEATHTLRDYVRQRANLVRLSGQHIQRMQKALELMNLKLTKVLGDVTGVTGLKIIRAILAGQRDPHELAKLRDRRCKHTETEIVEALDGRYRPEHLTELRLCLALWAKYQEAIAELDTVIAAQLRSMRRQTELPPLPPKPRVRGRKPHDPRFDVRTALYYLTGVDLTAIEGIDEIHALTLISELGSDLTKWPTVKHFTCWLGLCPNWQKTGGKVKSSRVRRGKNRAALALRLAAWSLMRNPSYLGAYLRRQRSRLGAPKAITATAHKLARIVYHLMRYGLAYVRQTEAAYAVQVRDRLEQQLHRRAKELGYELKKIEPKLETLMVNGEQLTVKDDGEIVAAK

SEQ ID NO: 89391 - protein, 355 aa, unidentified
MTQLSYHLSDFETFIGLDVDKNSFSYTIQDKFQTKKSKKMPSNPEHLYNYISNHFDPQKVICAYEAGPTGFHLQDYLTKKGIICLITAPASIPTARNARVKNNRIDSIKIADHLMSGKLKPIRVPQGIYRELRDLVKICENYSADRKTAKQRIKALLLYSNLYPAMKDPDANWSANYINDLKQIECSFAVRQRLDMLIEDLEYARKKLLSVHRTLKSFCRENDEINQYIHYLQSIPGIGFTIATMLLGKIGDPHNLQNPRELAGFIGLSPKENSTGDSVNRGSITHMGDKTLRFLLTEAAWVAIRKDTHLNQFFNRIKSKNHPKSASRIAITAVARKLTQIIYRVLKDERNYIPY

SEQ ID NO: 89392 - protein, 397 aa, unidentified
MYIVGIDIAKRKHEAAVIDGEGAVIIKPFSFTNNCSGYNRLLAMLTKAKLPLDEVSFAMEATGHYWLALFTRLQKEGFRVQVINPVQTNSIRSFYIRQAKTDPRDALLIAEVIRFGHFSESTLHPENIYELRELCRGRHAIVSMQADVKRKVVALLDQVFPEYETAFTNLFSDTSMAILQTCPTPKELSEMPLEELCHLIEVSSHKRFRMAKAQELQELARNSFGFAMAGDVFSTMIRLYAKHLVFLKQQVQEMDRKIAEIMDTLDTPITTITGIGPTLGAYILSEIGDISRFSSAAKLAAYAGIDPTMRQSGEYNGVRNRMSKRGSPYLRHAIWLAASSAVLHDPALKLYFQKKRDEGKPYMASVGHACRKMVSIIYAVMRDNKAYTPYIPNEISA

SEQ ID NO: 89393 - protein, 466 aa, unidentified
MRTETSAQASRRAKKELARRLRSANPGLEVVHPDAAGIDVGNESHYVAVRPDRDPEPVRRFACFTADLYRMAEWLRSCGVKTVAMQSTGVYWIPLCDILEEFGFEVFLVNARHTKNLPGRKSDVQESQWLLKLHTHGLLNNSFQPPSDIRVLRTYWRLRAEHATGMATCIQRMQKALTQMNIQLANVISDLSGRTGQAIIRAILNGERDPQKLAELSDWRIHATKEEIAKSLQGNWRPELLFIVRQQLDMYEAYQRRIAECDQELREHLAKFASAPSTSVDTCNPPQSKKSKRYRYMPPFPLSNELMRISGVDLTQIDGVDAMTAQTLISEVGFDMSRWKTESHFASWLGLCPDNRISGDKVLSRGTRRVINRAATALRIAASTLIRSKTYLGAQYRRLRTKLGAPKAITAMAHRLARLVYRLLKYGQKYVDKGADYYEQKSRQQQIEFVRKKAAQLGLQVTLAQP

SEQ ID NO: 89394 - protein, 373 aa, unidentified
MEWMAPAPGIAMCQSVVFIKDHEQEEPSVMKISTVGLDLAKNVFQVHGIDDAGEVMVRRSLRRRQVMPFFGKLEPCLIGMEACGTSHFWARELEVLGHEVKLMPPAYVKPYVKRGKTDAGDAEAICEAVRRPTMRFVGIKSAEQQSVVALHRTRDLLVGQRTQLVNMIRSQLAEYGMVLAKGIHHALRLVDQLVEGVVPDIPALACKIVIALAEQIRELQARLAMLEGEIKAWFHGNELARRLETIPGVGFITASALAASVTDPHRFTSARQFAASLGLTPKANCSGGRERMGRISKMGDRYLRRLLVNGMTSQLQSVRRKPEANPWVTGLLATKPDKLVTVAMANKAARIAWVIMTRGEVYCAHQPATEGTA

SEQ ID NO: 89395 - protein, 403 aa, unidentified
MNMNAVGIDVSKGKSMVAILRSYGEIISKPFEVKHTVSGIRSLIEQIQSIDGESRIVMEHTGRYYEPLVRELSKADLFVSAINPKLIKDFGDNSLRKVKSDKADAVKIARYTLDSWTELRQYSLMDEIRNQLKTMNRQFDFYMKHKTAMKNNLISILDQTYPGANTYFDSPAREDGSQKWVDFSATYWHVDCVRKLSLNAFIDHYQKWCKRRKYNFSRSKAVEIYEASKELVSILPKDDLTKLIIKQAVEQLNTASQTVEQLRTMMNEAASKLPEYPVVMAMKGVGKSLGPQLMAEIGDVSRFTHKGAITAFAGVDPGVNESGSYEQKSVPASKRGSSTLRKTLFQVMDVLIKTKPQDDPVSLFMDKNRAQGKPYYVYMTAGANKFLRIYYGRVKEYLSSLPE

SEQ ID NO: 89396 - protein, 340 aa, unidentified
MTIVMGLDQHRAQVSAEWLDTVTGEVCRARVAPADREAVRRFLGRFAGDELEVALEATTGWRFVVEELRGMGAVVHLAEPAQASALRGNKRRPKSDWSDARHLRELLVIGRLPESWIPPDHLLDLRSKVRLRHTLVDQRGEWQQRIRAVLYHHGLPHRAELHLLRREGLAWLEQVDVPDAAREQITVALAMSEALDAQIAPLDRQLRAYARRQSGCRALMRHYGIGELTSVAILAELGDCQRFSSSRQAVRYSGLDVTVYQSDQRRSPGQLSRQGPPVLRWALYEAAQAARRPGSPDRDYYDQAAQRLGSNRACVAIARKLLLRAFHTLRSLGEDALQPA

SEQ ID NO: 89397 - protein, 320 aa, unidentified
MAELSHCGIDVSKDRLDVVVLPNEQCFSVVNAAAGWAELIEKLRGLNIAAIGIEASGGYERGIVRALLAARYSVRLINPFKLRQFAKACGVLAKNDRLDARMIARFVATMPTRPMQRNVAVERLAELLTARRQLSEEKVAAENGSKLLEDSMLQRLYRRRITRMEADIMLLDKRLADMVAADAALAQRYELLISMPGVGPVLACTLVALLPELGQMSRKQVAALVGVAPYDFESGKLKGMRCIWGGRAPIRRVLYMAALIASRCNPALKVFHDRLQATGKKSKVVIVAVMRKILTTLNAMARDNVLWNDRRNGRCAVSAA

SEQ ID NO: 89398 - protein, 355 aa, unidentified
MSQEKYIGMDVHAATISAAVKNAEGQLLMECVLETKAATILEFIQGLRGTLALTFEEGTSATWLHDLLQPHVNRLVVCDPRKNALLRDGNQNDRVDARNLAELLRTNQVKPVYHGNHGTRALKELGRSYLTLTRDSTRVMNRIKSVYRSWAIPCAGTSVYSPRHRAEWLAQLVEPGVRIRAEHLYEQLDSLQPVRQAARRELLRESRKHAAVKLLRQIPAIGPIRSALLVALLQTPHRFRSKRQLWAYSGFAVQTYDSGEFRMVRGKLQRNRERITVRGLNRNHNHDLKNLLKGAASSAIQRPGPLQDFYAALVKKGMRPSMARLTLARKMAAITLIMWKKGVSFDPKQLQPQAA

SEQ ID NO: 89399 - protein, 352 aa, unidentified
MAYLAPPRVTIGVDTHLDLHVAHAKDQLGRRLETVSIPTTPAGYQSLLAWARGLGEVEAFGVEGTGSYGAALARFLRAHGQVVVEVNRPDRQARRRHGKSDPVDAEAAARTVQAGEATVVPKAGDGVVEMLRCLRVARATAVKARTQAGNAIKALVVTAPAELRERLRGLSTVKLVRTAAAFTPGTATTPTAATMLALASLAVRHQTLTAEIQTLDSELERLTAAAAPRLRALFGIGPESAAVLLVAAGDNPQRLRSEAAFAMLCGTSPVEASSGKIVRHRLNRGGDRQANAALHRIVVVRLRWHQPTKDYMARRLKQGKTKQEIIRCLKRYVAREVFAALNQLDQDLTKAA

SEQ ID NO: 89400 - protein, 347 aa, unidentified
MKYIGLDCHKQYDHATMIDTETGEIKVKKLAHIKEDFNDFIGDRAGTRMVIESCRDWSRTYELSEDLVEEIILAHPLKVKAIASAKIKTDAIDSRTLAQLLMADLIPQAHLRKRDNRVKQRVIRHRASMVVMRTRVKSRIHDLVDSQLLPPDVLKAKPRSLFSKKGMKWLTSLEWAKEEDKKIVESHLRVMEAINHEISITNDMVKQIYQKDRDAQLLATIPGIGVILAMLISTEIDGIERFSSVSKLCSYAGLVPSTHSSGGKTYHGKITSEGNRWLRWALVEAAVPASYADAEIKERLDIFRKKKSANVAKTAIARWLLKVVYHVLKERRPYITAYKTAKVGAAF

SEQ ID NO: 89401 - protein, 343 aa, unidentified
MHITSIGIDLGKTTIHLVALGERNKVLVRKKFSRAQLLAHTANLPASLVGLEACAGAHFLGAALRGQGHQVRLIPAQFVKPYGKSNKNDFLDAEAIAEAVTKQNMRFAQIKTQEQLDLQAMHRVRDRLVQRRTSLINEIRGFLLERGITFAAKPIHLRNNLPLVIEDLEQNLSPRMRWLLERLWQEWKQMEIDIKTVTEEIERISNEDAHCRRLRQIPGFGPLVSTATVAAIGNGAAFRRGRDFAAWVGVVPRQYSTGGKQKLFGISKRGNVYLRRMLIHGARAVLLRIKYDTGGFGQWVHRLEARAPRNKVIVAIANKLARIAWAVLSSGNEYRHQPLHSAA

SEQ ID NO: 89402 - protein, 361 aa, unidentified
MNATATTNRMTTAGTILALDLGKYKSLACLYDRNTAEGSFQTLDTCRDHLRCLFEQHRPGLVVFEACALAGWVHDLCTELGLPCKVANTASEAWKFKHSKRKTDKDDALRLAQLEALGQLPTVVVPPKQTREWRGLIACRQDLVGRRVALQNRIRVLLVGQGLPAPRGHRAWTEAGLHAIARHARSLAECGPDELWRGLLELALTEYHYLLALLKQAQARLDALAKADASVRLLESIPGVGSRTAEVIVAYLGEPQRFQTAKQVSAYGGLVPRQYQSGESDRRGRITRRGPALLRKLLVECAWVMLRYNRWARVVYLRLSRGKARKKQAIVALARKLLVRCWAMLRDKVRWRDEAVSAAAT

SEQ ID NO: 89403 - protein, 367 aa, unidentified
MQDSTIWVGLDVHKESITAAILEGEDSQAEVVRMSGDMNKVRRLFRRLAKRGPIRSCYEASGAGFVLHRALSEHGYGCEVVAPSLIPRKPGDRRKTDRLDALMLAKLYRSGHLTPVAVPSQDQEAIRGLLRLRLSYRRQAKSTKNRISGLLHYQGQHYNETKSYWTKKHRAWLRKLRGDLEGPSGICLSLELEHLEYLETQLNALDMEIERYSRCEPYREVVDSLQCLRGVKTLTAMTLAVEIGDIRRFRSPRALMAWVGLVPSERSSGDREKRGPITKAGNGHVRRILIEAAWNNRHKSGSDLILQRRRQGQNPEAVAIAMKAQHRLSKTFRRLWERKHPNVAVVSVARELCGFVWAIMRTTPQSV

SEQ ID NO: 89404 - protein, 420 aa, unidentified
MHHSLHVGIDVGLKDNTVVFTDETAMTRLARFTVPNDAGGAVRLVNEVADAMRRHKLSSLRIGMEATGVYAWHLAVFLSGSEVLRPFDAAVYLIQPRALKNHRKSFGSRLPKTDGGDAWLLTEYLGHPRLLPRPFRMDERTIPLQRLTRHRYHLVHQLTRTKNYAVSYVFLKASGLAQAPPLADPFGAAAAAILLEFRTVEELAAAPLTELVQVLNQSSRGHISNLEAIARAYTQAARDSYRLPGVLKEPVHQILSLTLQDIRYLQKQVKVVDNLIQREPLARQNRLLSIPGIGPVLSAGILAEIGDIANFPDDDQVAQFAGLTWPANQSAAFEGEDTPLARTGNAYLRYYFIEAANSVRRYDASFAAYYTKKSKEVTTHQHKRALVLTARKLVRLVFALLRDDRAYDPGHRSLFKPTAS

SEQ ID NO: 89405 - protein, 339 aa, unidentified
MKFKFILGVDVSKNWFNYCIMTNTLDLIQESKVDNNPKAIEAFLESLFKESYLDDMDQILLILEHTGIYVKHLVNAWLGQTGKLSIVHSSKVSNLLSGQTSWDEKTDAMDARRLSEYAIRYADKIKLWQAKDTNLELLQELQTQRKRTNKILSMLTVPLNESKKFNSKEIKERLTANHLDLIKETKKALKEIDRQLMAVINDDQNLKHLYKLITSVEGVGPVTAREVLICTSGFIDFLPTQAKSFAKYCGVVPLPKQSGKVNRKAKTSKRANMKLKSYLTMGATALIGTKSELGKYYQRKVEEGKPHFKVINAMRNKMILRIFAVVKNNTMYQKNLDLN

SEQ ID NO: 89406 - protein, 334 aa, unidentified
MKVLKQSIGVDVSKDTISCCFGHKDGTGSEQFSKAKSFENSPDGFRELMTWVNEQSCSADTWYVMEATGVYYENLAYWLLEQELNVSVVIPSKVSNYAKTLELKTKTDAVDARILSKLGLERQLRKWAVPTVLMREVRFLTRELRETKAKLVVSKNQLHAKTHAHRASAGTVRRLKRQIKLLEGQVIEIESELRVLVMNDVLLSEKVEKLESIPGIGFMTAISVVGETNAFALFDNSKQLVSYAGLDVRQNQSGKKEGKSKISKQGNNFIRHALYMPALSSSLHNADMKVFYNRVNMNKPSKKVGVTAVARKLLVLMYTLWKNDSEYVVNFKAA

SEQ ID NO: 89407 - protein, 362 aa, unidentified
MLQSTTIIAFDHHAATTVAAVLLPGHRTPALHALSSDVSTIQRFVARVQRQGPVACCYEAGPCGFELQRALTAHRMPCEVIAPALIPRRAGDRIKTDRRDAGQLAVLHRAGALTAIHIPSDQEEAARDLLRCREDIRADLLRARHRLSKFLLRHGRRFTATKKAWSKRHDAWLRAQMWPLPALDQTHRAYLRAVDEAGARLATVEQDLRALLDLEPLRARVVRLRCFRGIDDLTALTIAAELGDPRRFATAPSLMAYVGLVPSEHSSGAKRAQGGITKTGNAHLRRVLVESAWHYRHHPFVSATLRARQRGAPTDVIARAWTAQQRRHRRYARLAARGKRKQLIVTAVARELTGFVWAALTQ

SEQ ID NO: 89408 - protein, 408 aa, unidentified
MADKIAGIDVHKKVLMVVVMDARTPESKPERRRFATMPSELRRLSTWLQERGVEEAVMESTAQYWRSVWLELEPHMCLHLAQAFSNRAPRGRKHDFKDAERLVRRLIAKELILSFVPDGEQRIWRNLTRMKLQLTRDRVRIQSQIECLLEEMRIKLSIVVSDLLGSSGLRILHALANGETDAKSLALLGDDRLKCTEEQLVEALTGRSHPMHGQMLALQLERLRLLDEQIAKLNSLIAQAMKPHQDAVIRLAEVPGLGIDSAQQVIAEVGVTASTFSSAAEFTSWVGTCPGKEESAEENSSSRSAKGNKYMRRVLNQAAHAAARSKGTHFQAVFRRLLPRLGYQSAVWAIAHRLCRLVWKILHQGIRYIEQGIESEPKLLIYRAKYLAKQLRKFGYNVQITPANGAPA

SEQ ID NO: 89409 - protein, 354 aa, unidentified
MLIIGCDYHPSFQQIAVVDTETGEVKERRLVHREEAEKFYRDLAATGQPVRVGMEASGHSRWFERLLAELQLELWMGDATEIQRKRGRKQKTDRQDAQHILSLLLKDDFPPIWVPSWENRDLRQLLWHRHRMVQARTRIMNQLQAVALNEGLLCRKKLWRERGRQQLEAFQLAPWARRRRHDLLEMLDRLNPTITELSQAIEREVEKCPAAQQLMTHPGVGPLTALAFVLMIGDASRFQCGKQVASYLGLVPLEDSSGNRRRLGHITKQGSSMLRFLLVEAAQVTVRSLPEWRRKYAHLMMRRGRKTAKVAMARRLAIRLYWMMRQGWDYQQWSKFGSHAGQPGHRDGVPSNIE

SEQ ID NO: 89410 - protein, 419 aa, unidentified
MIEAVLERCAGIDVGKKYVVCCLSLGAANSTATEETRQYDTTVVELEKMRDWLLENQCSHVAMESTGPYWKPVFNLLEDHFTVILANAQQVKSLPGKKTDRKDGRRLAHFLRHNLIEGSFIPPVAIRQLRDLTRRRRKLLGAGASERNRVQKVLEDANVKLGNVLSDVFGASGQAMLEALLSNQGTPQQLAEFARGKLRRKMPEIVTALEEHRMREHHRFLIRQSLRHMAFLEEQVAALDEEILRQMKPFEKEFESLQTIPGIKATAAASILAEVGVDMKQFPTAHHLASWAGICPGNNESAGKHKGTQTRKGDPWLRGTLTESAWAASRKKGSSFAARFRRLAPHRGQKRALVALGHNLLIVVYQVLSTGQPYEEMGSTYHEERTKEARVRHHLRCLRALGALAPGADLTEVPHAPTV

SEQ ID NO: 89411 - protein, 341 aa, unidentified
MKSSVISIDLAKNIFQICALDEMRQVLFNKKVKRSELIHELRQFEPTVVVMEACYSSNPWGRRIEKLGHEVRLIPPFIVKPFVIGNKNDANDALAIAEASLRPKVRFVAVKSTEQQDIQSLQRIAERLVKVRTGDVNQLRGLLSEYGTVVGLGISTLMNAMPDIIEDASNELTVTARSFIQRIYENIKRTSLQIEEVKTQLIELVKDKQAYKLLLTVPGVGPVIATAIMAAVGDVNVFKNGRQLAAWIGLTPSQYASGEKNRMGKITKRGNSALRKYLIHGARTVLNWCEKKDDVLSCWLKKLKERMHGCKAVVALANKLARIIWSVLSSKQSFDVTKACA

SEQ ID NO: 89412 - protein, 349 aa, unidentified
MLHVGLDLSRKRVDVCLISSEGELVEHFRSPSDRDGLYGLSRRVAVYDEPVRGVVESMNGARFVHDELVRYGWEVLVADAQRVKGLAPLACKTDKVDARVLAELSFRDLVPAIWLPTPELRAERERARWRLHLVKHRATLKNRIHSSLIAFGHQVPMADLFGVAGRRLLAELDFPEPWRSHVQASLELIDDLERRIDAIERWLRRSGADHRYIPLLMTAPGIGWVTGFTIAAEIGDINRFSSPVKLTGYTGLCPRVKQSGDMDQRGSLSKRGPRYLRWGLMEAAIAASSHPLYKERYQRTKRRLGRQRGAKVAQIELARKLTESIWYMLTRNQPFKPFAPAGAIFALTA

SEQ ID NO: 89413 - protein, 375 aa, unidentified
MNNNNTLYVGLDVHKESITVAYAINSEPVELMGKIGTSPTDIQNLCKRLRSKSSQVSIVYEAGPCGYGLYRRLVKSGFDCMVCAPSLIPKKPGERVKTDRRDAIRLVRSLRAGDLSAVYVPGIEDEAFRDLARAWASARDDLRHARQRLKSFLLVHGGHYVGRADWGPAHRRWLSKYSFESPWRQLAFDEHRRTIEDRQAQCERLESALKEAVTEWRLYPVVEALQAMRGIQFITAVGLISELGDLTRFEHPRQLMSWFGITPSEYSSGGSRHQGSITKAGNSYARKLLVEAAWSYRHPARISPAIQKRQENLPRPVIDRAWDAQLRLCKRYRKLQAKGKNVNITIVAVARELAGFIWDMGRIAMSVAQQPQCHK

SEQ ID NO: 89414 - protein, 379 aa, unidentified
MTKIARLGIDTSKSVFQLHGVDDQDEMVLQKKLRRRQLLSFVGQLEPCLIGLEACGGSHHWARELKALGHQVVLLPPQYVRPYVTRNKNDKNDAEAICEAMDRPKLKGRFVPVKSAEQQAAQMLLGTREDAIKRRTQLSNQIRGYAAEFGVVAAKGLCQLGPLLARLASDDAIPALAKQMFVKLAQELAELGPHIAELDKQLQTWQRSNELCRRLREVPTIGPVGAGLLAIKVGHPAAFRSGRACAAWVGLTPKDHSTAGKQRLGGITRAGDEGLRAVLVSGATAYIQQVRRGRTTPSPWLADLLRRKPLKLAAVALANKTARIAWKLMVSGERYEARRACGQQRLGAAQWGRLRAEPLRRTSNAAHGADAMSTLRSSA

SEQ ID NO: 89415 - protein, 344 aa, unidentified
MENYAGIDVSLELSSVCVVDAQGKILKEAKVASEPDALVEFFETLGFAVKRIGLEAGPLSQWLHAGLKAAGFETVLLETRHVKAALSAMTVKTDRKDARGIAQLIRMGWFRPVHAKSVDAQEIRALLIARKQLLGRLIDVELSIRGILRGFGLKVGPVTRKNFEARIRELVAGQSTLERIAMAMLSARSALKAEYGRLHKAVLATVRDDAVCRRLMTVPGVGPLVAITYKSAIDDPHRIAKSKAAGALFGLTPKKYQSGEKDVTGGITLAGDEIVRTVLYEAANVLLSRITRFSKLKRWGMDVAKRRGSKRAKVALARKLAVILHRIWVDGTTYRWAEAGPIAT

SEQ ID NO: 89416 - protein, 422 aa, unidentified
MSYCPVAGIDVSKQFSDMCILSPDNKIFAQEKIYHDETSINRANALLQKAERLFFSKPVIVMESTSHYHLILFQFFSEHGYDVIVVNPLQSNSMKDFSIRKRKTDRVDAFKLAMMYRTKTLRPSQIPQTATRALRQLCRHRAELLNDVSSYKNRLTALLDQTFPGYDKVFSDVGGVTSCAVLVRFPTLTILLVEEESELVEVIAAASKSGYSFAKKKAGLLISAAQKAQTLGIHSCADETLIVCTIQMLRTLSESVLQIETAIDNLLAQRKEMRNNVSLLQSIPGVGSHSAAFLLGEIGDISLFKKPKQLAAYWVLDPTERQSGSFRGTKNKLSKRGFPYARAALHMGVVNSICKRGKDSAANPVLLSYYEKKCKNKPAKVAQAASMHKLVFIVFAVLRDQMPFELKTPEQHAVEQGFVKAA

SEQ ID NO: 89417 - protein, 317 aa, unidentified
MQEPVICIGVDVSKAELVIAADPERRPSSIANTAASILSWLREIPPNALIAMESTGRYHGLLAQLASEAGFKVFVLNARDVFFYARALGTRAKTDGVDAGVIARYLNEHHAHLHPWKPGTPLQQRLHELLTRRAQVVTHQCALRQVFLGINTQGVETKKLQEAFEALLDSIDQQVQALIASDAKMAQGSKRLQTITGIGPQTSALLATLLSRFDFANADALVAYSGLDPRPNDSGTKRGRRRLSKKGPPLLRRQIYLAGFAASHSKALGPLYRAIRDKGFSSTEAMLILGRKLLRVAFAIWKGTDVFDPTKLMPKTA

SEQ ID NO: 89418 - protein, 355 aa, unidentified
MDSTKYIGMDVHKESVSIAVMNSAGKLVVESILETKAATILQFIQGLRGNLHVTFEEGTWAAWLYDLLKPHVTKIVVCDPRRNALLKEGNKGDQVDARKLVELLRAGLLRPVYHGENGLRTLKELSRSYLTISKDLTRVMNRLKALYRGWGISCEGATVYAPHHRSEWLGKITEAGVRRRAEFFYQQLDALQALRQQVRRDLLAESRKHSERKLLRQIPSIGPIRAALLMALIQTPHRFRTKRQLWAYSGLAIETHDSAQYRYVAGQLQRSKKPQQLRGLNRNHNHDLKAIFKGAATKASSGAGPFHDFYEALLTKGMRPSMARLTLARKIAAITLVVWKKGAHFDAEQLKPQAA

SEQ ID NO: 89419 - protein, 353 aa, unidentified
MKCDKYMGMDVHQAMTVVTVMEAEGKVILETMVPTEASAIIRLLQSLSGPLHVTFEETTQAEWLCDVVRFFVADVVVCDPRHNKLLGEGSKADKIDARKLADLLRTGMMRRVYHGHEGHRKLKQLMRGYETLSIDTRRTMVRIKAIYRGRGIRTPGRNVYQPKQREQWLQLLTEPGLRERVGWLFEELDHLKPLRRQAKQAMLTESRKYQAVKLLRTIPQLGPIRAALIAATIDTPYRFRTRHQLWSYSGLAVVTHMSSEYEMKDGRVVRSRKPIATRGLNRNCNRRMKEVFIGAAAAAGHTAMYRDYLEALEKRGVRKEMARLTLARKIAAVALTIWKKGEAFDPKKLNWTT

SEQ ID NO: 89420 - protein, 325 aa, unidentified
MESKRLCCGIDVSHTKLDVCYQNNLGELFHLQVGNNNEGFKKILEHTGTDYHFVMEATGVYYIRLAFYLHQQGCNLSVVNALSIKRYIQMHLERNKTDKKDAAWICLYAVEQCPAYWQMPDSAYFESKQLYNTIREYTEQIKRINNQLHSLRLLPVPSKDTIKSLEKIVVCMEKEIKQLEQKLQLLLVEWQPDQLKSVSSIKGIGKRAAAMLIVFTQGFKQTQNHRQLISFAGLAPTQYSSGSSIQGKPRIYKRGGKNLRDVLYMCSMNAIKTNNACKALYERLRANGKTGKQALVAVMNKLLKQVFAVVKNNSLYQPNYCSAKP

SEQ ID NO: 89421 - protein, 349 aa, unidentified
MILVGCDLHTRKQQVALLNTDTGELWDQELSHDGDAVERFYATLPPPVTVGIESTGYSLWFHALLQRLGHTLLVGEAAKIRAMVVRKIKTDRRDARHLRDLLKDDRFPVVWIPDPATRDLRALIKHRLRLVRIRTMVKNGLHAIALNQRLALGPSLWSRAGLAQLHALVLPPHTRRRRDDSLELLQWLNGHIHELDLHVATAAAADPDARRLMSHPGVGPLTALATVLVLGPVGRFPNSKHVVSYIGLAPAVSASADKYRLGHISKQGSALLRWVLGQAAPLATRGDAALKRIYFAVLRRRGRPKAKVALARRLLIRLYVMLRDQIDYDEFCRRGRTQRPGLEPARIPV

SEQ ID NO: 89422 - protein, 303 aa, unidentified
MEYGAVDLHKKESQVRIITERGEVIDRRIPTTRGHLTTLFWGRPHARILIEASTEREWVAQHLETLGHDVVVADPNDALMYGYRSRRVKTDRRDVAALVEACRQGMYRPAHRRSAQQRNIQWQRNVRRELVAARTRGISLTRAITRHAGYRIAGGATETFLQRVAALPRPPVLDESLSPVRNVMEVIDEELSRVDTHFESVIADDPVVKRLTTCPRIGAITATAVVAAVDDVGRFAGRRGAAQVTSYLGWVPREYSSGEQQQRGRVMRSAQPVCPIVARPSRLAGVPVLRPAGRRPSELGTGD

SEQ ID NO: 89423 - protein, 354 aa, unidentified
MEKISRIGMDTSKQIFQLHGVDEAERVVLRRKLRRKEMMAFFAALAPTTIGIEACGGSHHWARELTRLGHEVKLIPPQYVKPYVKRGKNDAADAEALCEAMSRPTMRFVPVKSAQSQAALMLAGVRDRLVRSRTQLANAIRGYAAEFGLVAAKGPARIEPLLARIAADETLPALARELFAEQAKEYAQLGARLTAVDAKLMAWHRQDERSRRLTRIPGVGPIIASLLSMKTPDPHAFRSGRQFAAWIGLTPKDHSTAGKVRLGVITRAGDEALRSLLVVGATAVIWQARRGRGKPSPWLVDLLKRKPPKLAAVALANKIARIAWKLMTTGETYDDLSRTRSGTGRVLGATAKAA

SEQ ID NO: 89424 - protein, 356 aa, unidentified
MKYYTSTTEFNCGIDLHARQMYVCVMDRQGKKLVHCNVKDNDFAFFLKLIEPYQHDLTVCCECMFGWYWLADACEQAGLHFVLAHALYLRAIHGGKNKNDRIDSEKLTHLLRCNLLPPAYVYPAQKRPMRALLRQRVCYVWRRTELLNRIASHQLAHNRRPVKCTTRHNRDPWEQKILSTETHPLRTLALQTDLAMVRHYDEQIQGLETKLVQLAKEHSARDFTLLLSVPGIGENLGLTILHEVGDIERFPTVKDFLSYCRLVKGTVASAGKIKGLRGARLGNPYLRWAFGEAAVIAKRDHQVIGPLSQSLEARMGGNKFKANTVVAIKLARAVYFMLKNKTVFDPERLVSVLSKN

SEQ ID NO: 89425 - protein, 342 aa, unidentified
MDEYDGRQFVGIDLHRQRSVIVRQSESGEQLSAVRILNDPASLQLELKQAGSDPEVVLEATYGWYWAVDVLQAAGARVHLAHPLGVKGFRYRRVKNDVRDAADLADLLRMGRLPEAWIAPPQTRELRELVRYRAKLVAIRSGLKAQIHAVLAKAGVLIAVSDLFGVTGRQRLAKVPLGPAYAQRIRSLLELIDILDSHEARFAAMIAERLDTHRGYQAIQQVPGIGPTLAAVFVAEIGDVHRFTDPAHLSSWAGLTPRHRESDTVVHRGHITKQGSKAVRWAAIEAVQRHPTTAKISADKQRIEARRGKNIAKVAAARKLLTLVYYGLRDGHIRALDRARAA

SEQ ID NO: 89426 - protein, 347 aa, unidentified
MATVFGIDSHKSSLAVCGVDELGRELCSGLFANTEKGHRALLCWAKEQSGERRFGVEGTGGLARALTRMLVGEGELTVEVPGVLSERERRRLRKKGKSDPQDALAIARVAAREASLEPLSDDTAARELKLLCDYREQLTAERTRHQNRLHADLLALSPGYEQRCPNLVAKRHLAAAAQILRGVTGVQAELARRRLGTLRGLDRQILELERRISTLVTASGSSLTTLVGVGPLGAARVLGEVRDVRRFATKDRFASANGTAPIPASSGARQHHRLNRGGNRRLNRVIHTMALVQVRCDPRARTYIERRRAEGKSYRDAIRSLKRHLSNVIYRQLRLDAFAAESITLDR

SEQ ID NO: 89427 - protein, 413 aa, unidentified
MRVMIERVAGLDVHQETVVACVLIGKPGERPTKEVRTFRTMTRDLEALREWLLSLGVTHVGMESTGIYWKPVYAVLEGSFELIVGNARHIRNVPGRKTDVKDAEWIADLVRHGLIAKSFVPPPPLRELRDLLRYRRKLVESQAAERNRLLKLLETANIKLASVVSDVFGVSGRAMLKALIEGTASAQAMADLAKGQLRRKRADLVLALEGRVEEHHRFLLGLQLRRLEAAEEEIAALDARIDEKLEPYRAPHALLMQIPGVDRLVAAVLIAEIGIDMSVFLSVYHLASWAGVCPGNHESAGKQKSGRARNGNVHLRTMLVGAAISASRAKGSYLKDKFYRLKARRGSMRAALAIAHKILVAAYHMLAKGVGYREIGEAYLDQISQTRTVANLKRRLERLGFQVTLQSKAQSAA

SEQ ID NO: 89428 - protein, 354 aa, unidentified
MKCMTKYVALDVHQATTVASVRGESGRVLARAILATEEPAIVEFFRGMRGAVHTTFEVGTQSQWLYELVSPLVDRVVVCDPRRVARQGNKGDRVDADRLSELLRLGGLRAVYAQSAHRSDLKELTRTYRTLVDDSTRVMLRIKALFRARGIKTPGAAVYHPTKRMQWLTQLTDRGVRFRAEVLYAELDVLRELRPRAKAMMVTEARRDPAWSVLQTIPFFGPVRVALLLATMQTPWRFRTKRNLWAYSGLAVRTSSSADHKFIEGQVVRRRRAPLTRGLNRNHNRVLKDVFKGAATAAASQPGPLQEFYAALVARGTREEMARLTLTRKLAAITLRLWKRGEQYDPTKLTTQAF

SEQ ID NO: 89429 - protein, 447 aa, unidentified
MSDRTGLSRGDRNRNARLARLRVLVPPENAIVGVDLASDKQAAVVTDHDSRVLARRRVSARAWELGELLDWALARARAAGFVSMTVVCEPTGHRWRVLDQLAAQRALALVCVQPLLVYRAREREDLTFDKSDPKDAVIIARLAAGLHCYEPERADQVWARLRHLGASRLQLTAGATAAVNQVRDPLECAWPAVLDTSGAPFRSATWRAAVAVALDRGHGDLARVRRLGIDRFTAAVRRELPRWDATRPCLRIVRAVYAAAADPAGVMAQRSGALERASLAIDDWQHTRARLAQTEARMVAVLDDLGLTGLVTTIAGLTAVGAAAILAKTGDPNRFATPRSLVKHAGLCPRDNASGGYQGKTSISGRGRPGLRVAAWRAVWAALPNNPVMAARFTYLTTRDHNRLARQQARTACAAALLRWLHVVITRQVNWDPVVAAGGKPALRPAA

SEQ ID NO: 89430 - protein, 362 aa, unidentified
MRIIGCDLHARQQTLAMLDTATGEIVNLALKHEGDNVREFYSKLPHPVRVGIEATGSMQWFVNLMEELGIECRVGHPAEIRAAEPRKQKHDRRDADLILKLLVENRFPAIWLPSKELQDLRSLLRHRHQWVRMRTRIQNALQSIALANGLRRGTALWSHDGQNRIASLPLAPHTAYRRSELQAMYAKFEAEIEKLNQRVEEQACGRVGARLLMTHPGVGPVTALATEVFLGNPARFADSKALASYVGMIPREYSSGERQRLGGLSKQGNPLLRFLWGEAGAHAVRRDPELKRFYRRKLVQKGFGKASVAVARKLGIRLWIMLRDQIEYNEFCRRGQKQQKRSDACAGMPETPNGAKSHRPVD

SEQ ID NO: 89431 - protein, 332 aa, unidentified
MKKSAFIIGIDVSKDKLDIYFYNTKIHFIVQNNYRGFAKLLEAIYKSAKSEKDRVLICFENTGKYSKQLSVFLSEQDIRFVMSPSLAIKKSLGLVRGKDDRIDSKRIATYAYEKQDNLTPTKLPGYKIDQMKSLVLLREKLIKHRTAYKNGIKDLKDCYIEGETEFIKGVQKNLINQLTLEIDRIENGIKSIINEDKSMKKNFHLLLSIKGIGKITAFFLIAYTVNFTHFSNSRSFACYCGIAPFPYSSGTMIGKSRVHKFANKKLKALLDIIAKSAIRYNGEFKTYYQRRINQMGKSKMSTINIIRNKMIARAFAVVNRGTPYIDLHKFVA

SEQ ID NO: 89432 - protein, 342 aa, unidentified
MQVTTIGLDIAKNVFQVHGIDAAEKVVVRKQLRRRQVLEFFKALPSCLVGMEACATAHYWARELTKLGHQVRLMPAKDVKAYVKRKKNDAADAEAICEAVRRPTMRFVQIKSTEQQGRLMLHRARDLLMRQRTQVINAMRAHLAELGIVAAQGRDGIKELLKIIASEEDARLPVDAHTSLVVLAAGLQAVQTLIGSIEKRIMVQHRSNESSQRLETIPGIGVIGATAIAATVPDPKVFGSGRDFAAWIGLVPREDSTGGKQKLGPISKRGDRYLRRILVVGACAVLRYARHKPEKYPWLTKLLARKPFKVVAVALANKMARIAWALLAKGDTYRVPALAAAA

SEQ ID NO: 89433 - protein, 355 aa, unidentified
MNDAKYIGMDVHQATISVAVRDSRGNLVMEAILETKAETILQFIRGLRGSLYVAFEEGTWAAWLYDLLQPHVARVLASDPRKNALLKAGNKSDRIDARKLSELLYLNKLSPVYHGEQGIRTLKELARSYITITRDLTRVMSRLKAIYRGWGIPCAGQQVYAPRYRAEWLAKISEAGVRRRAELYYQQFDALAALRQGTRRELLAEARKHPAMRFLRQIPAIGPIRAALLIALIQTPNRFRTKRQLWAYCGLALRTYTSGEYRFVGGQLKRSKKVLAVRGLNINHNHDLKNIFKGAATRAAAIAGPFQDFYQASVARGMKPHLARLTLARKIASITLLVWKKGARFDAEHLKQQAA

SEQ ID NO: 89434 - protein, 349 aa, unidentified
MRFYNQQHRFYCGVDLHARTLSLCILDAKGTIVRQQTIAANPDAFLLAVAPFRDGLAIACECMFAWYWLADLCEQEKIPFVLGHALYMKAIHGGKAKTDKIDAHKIAVLLRGGMLPQAYVYPKGMRETRDLLRRRTFLVRRRAEALVHLSNTNSQYNQPPFAKKLAYAANRAQLDIVERFSDPSVQKNVAVDLALIDAYDTQIADLELYLARTAKVDDPQAFHRLRSVPGIGKVLALVLLYEIHDIRRFPEVGQFLSYARLVRCSHESAGKKQGTGGNKIGNAHLKWAFSEAACLLLRESEQAKKWLVRREKKHGKARALGALAARLGRAVYHLLRKREVFDRKRFFAS

SEQ ID NO: 89435 - protein, 340 aa, unidentified
MTVIIGIDPHKASHTAVAIGCDEHPLAEIRVRATCQQTEKLLAWAKPLGPRTWAVESAGGMGYLLSQQLVSAGEDVLDVPATLASRIRVLGTGRSDKNDPNDALSVAIAALRSPGLRPVRVADHGELLRLLAKRNHEIGRLRSLIVSRLHAALQNLSPGGIAKELNASDAIALLGAYEPVTPEEHTRYELALELLEDVKRLDVQLKASHKRIKTAVQASGTTLTELYGVGPILACELIGYSGDIRRFTNRDQFASYAGVAPVELSSGGRTVHRLSRRGNRQLNHAIHMVAICQIRQTNSEGRAFFEKKVAEGKTKREAIRSLKRHIANAVYRQLLLDATK

SEQ ID NO: 89436 - protein, 444 aa, unidentified
MTQDETLKKDGFKVVHPNAAGIDIASQMHYVAVPPDRDENPVRKFGSFTADLHEIAHWLKQCGIDTIAMESTGIYWVQLYLILEEYGFEVFLVNARHIKNVAGRKSDVLDCQWILQLHTYGLLNASFQPESITRELRTYMRQRKNLTEGYSIQIQLMQKAFEQMNIKLHNVIADITGKSGQLIIQAILSGERNAERLAELADKHIKASKEDLIKSLEGNWRNEHVFELRQAYELYHIFKQKINECDIQIEQVLDTLGNQNSHSDSEKQSRKVYSKNRFNFDATNYLKKIIGVDITKIFGVSELIATEIISETGLDMSKWATKKHFASWLNLAPNNRISGGKLLKTKKIKKKNKAGQAFLMAAFALQRSDNWLGEFYRRVKAKNGPAIATKATARKLSLIFYDMVKDKKEFNPIPINIYNLHFKERKMKYIINQALKYGMNIVPA

SEQ ID NO: 89437 - protein, 364 aa, unidentified
MDGPTSAASAAIFTGIEVSKAALDVALRPSGELWRCAHDEGGIAELVGRLQPLEPRVIVLEATGGLERLAVAALAVAALAVAALALAGLPVAVVNPRQARDFAKATGRLATSDALDAAVLAHFAEAIHPAPRPLPEAASQALSALVERRRQVVGMLSAEQNRFPQALPAVRPKVAAHIQWLEQALHERDAERDAERDAELDQTLRSSPLWRERDQLLRSVPGVGPTVSLPLLAHLPELGHGSVKPIATLVGLAPRNRASGSWRGTRALWGGRRQVRTALYMAAHGRTWPHMAALVGVRHNSVLRTFSTRLLARGKPKQVALIACMHKLLTILQAILQAILQAILQAILQAMLRHHTPWQPALLA

SEQ ID NO: 89438 - protein, 316 aa, unidentified
MANHVTKITLGVDAAKDQHLIYNWQTNLTTKLPNQLNNIKAWLKSFHGPVRIAIESTSDYHLTLVDEALALGYEVYLINPRQLVHYREAVNVRNKTDPLDAWLLARYLEHEVDQLRPFQPRDPRAQRVWRLVLRRATVVKSRQQLKQSFAEVQVSIRGVLTQLRDLLARIDRRILTLIRELGWWPDYQHCLSIPGIGSANASALVVAYHRGAFSGSDAFISYLGLDVRIRESGCFKGRRKLTKRGEPELRRLLFCASHPARHYHRFAEYYQRQLDKGLSKIAARMVLARKLARIAFTLMRNEETFIKEEKNYCVGS

SEQ ID NO: 89439 - protein, 272 aa, unidentified
MDYRVYCGVDFHARQQTICSLTTEDGVMSTHELNHQNKAELKAIYSQFSGPVLVGLEASGYSPWFEQLLEELGHEVWLGDATEIRRRARRRQKNDRRDAELILDLLVHNEFPRIHRPTPTSREILRMLRYRHKLVKMRTIIKNSLQALSIQSGLSLRARLFTGAGLEQLRRATMSPMMQYQRDQWLQSLEPLNQRILEAANWLQQQAAGDERIERLRTHPGIGLLTGLGLVHTLAPVGRFSNQRKVAAYVGFDPKERSSGEKKRYLGISKAG

SEQ ID NO: 89440 - protein, 410 aa, unidentified
MDLLRREVPASALVVAVDPGKAFNRVWLTTGERGMIGEPVSLPVLRDGVDELERLIDASGVIGAPVIGLEATGALHRAWAAEIERRWPGSLRLFAPSETTAARAQLGSRRFKTDDRDCAALVWLVRQGAGRRAEADTVEALRATVRHRAQLVDARRVLQQRLHDQLNALCPGLSAPPGHGRALKLESPTGQSVLACAAAFAGRPPSARSLLARAPGRMTRATAVFWAQRWKRLLAPPADAELRAERVGRELRRWQELQHDIERAERQLEALLGQTAGQILTTVPGVGIVRAAAFSAYTLPIERWPTAEHLYSATGLTPATYQSSTVTRRGRISRQGLPEHRDALMGIAWGLGQHSDAFGARDAELRARGFAPIQARVALARNACRLCWRLLDSQQPYDDRRYARARRRGR

SEQ ID NO: 89441 - protein, 340 aa, unidentified
MQVTVIGLDIAKHVFQVHGIDQSGQVLIRRQLRRGELIGFFRRLPPCLIGMEACSTAHFWARELAALGHEVRLMPAAYVKPYVKRGKSDALDAEGICEAVTRPTMRYVAIKSPEQQAVRMLHRTRDLLVRQRTMLVNALRGHLAESGIIAPQGLPSVPKLVELAEKARGAALPDLAWRCIRLIIAQLEDAHARIGQIEHEILAWHRTNELSQRLETIPGIGVVTASALAATIPDPGSFRSGRHLAAWIGLVPRQSGTGGKVRLAHISKQGDRYLRRLLVLGACTLMRHARGRTSLLAAWINALLARRPAGVVKTAIANKLARIAWAVLQDSRGYQAPAAA

SEQ ID NO: 89442 - protein, 337 aa, unidentified
MKYSGIDLHSNNSVVTVTDEEDRVVAEKRLPNDLTKIVGLLMPWREEMAGVVVESTFNWYWLVDGLQAAGFKVHLANTTAIKKYEGLKHSGDETDARYLAHLLRLGILPTGTILPPDQRAVRDLARKRMQLVRSRTAHILAVENITARQQGARISSNQVKQLTADAIDRMPLPEDVALAIKTNVAVITTLSAQIELLEKRLQEKVSTRTEYGLLTSVPGIGQVLATTILLETGPIKRFAAAGNFASYARCVDSVRTSNGKKKGEGNTKNGNKYLAWAFVEAANFALRYCAEAKRFYERKKAKTNNVVAIKALAHKLARACFHILKERKPFDVTRCFA

SEQ ID NO: 89443 - protein, 348 aa, unidentified
MKEVTTIGLDLAKNVFQVHGVDGLGEVVIRRQLRRRQVVPFFEKLPRCLIGVEACPTSHHWARELQALGHEVRIMPAAYVKPYVKRNKNDAADAAAICEAVTRPTMRFVAVKTAEQQSLLMVHRSRSLLIRQRTMLVNAIRAHLAELGIVAPVGLRGLKALLVVISDTEDGRLAPLARNSLTGLTAALKTVEREIASADRQILVWHRSNEASRRLESIPGIGPIIATALIASVADPSVFKSGRAMAAWIGLVPKQNSTGGKERLGRISKQGDHYLRWLLVAGAMAVIRHARKTDFATRPWLADLVRRKPAKVAAVALANRIARTAWVLLAKGGTYQQPRITTISERGL

SEQ ID NO: 89444 - protein, 376 aa, unidentified
MNRIIYVGMDVHKDTYSLCSFDSKQSYVFSELTVKAETSSVLSYLKNVEKHFVNDDVLFVCGYEAGPTGFSLCRDLQKKDISCVVMAPSSLATSPDAKKRKTDKIDARQLALHLAHNSYKAVHVITPEMEAIKELTRTRASALKAQKRAKQNLLSFLLRKGMVYPFGGRARYWTQQFFSWLKTLEFSNPVERYSFEEYLSEVNHQISRIKRLDDKIAALAEDPLIKDDVKKLCCFSGISTLTAVSFISEIGDFNRFQKAVYFSNYLGLCPGIHKSGLSSQSLGITKTGNKNLRRLLIESAQSMSHSQICGKKSLRLLARQKNMDPLIVAYADKAVERIKRKRSSMIFRGVHINKATTAAAREMACFIWGMMTNNIS

SEQ ID NO: 89445 - protein, 330 aa, unidentified
MNSICLSTDQLTTALPVLGLDVAKKSVQAELRTNGKRVRFGFENNAKGFAQLARMLKEQGAPKVWAGLEATGPYSHALALWLHGQSHRVSLLNPRRVKQYARSAGNRNKTDLLDAAIIADFVCAHLPAAWQPPTLEVAQLQALVRRREELSLMLQAEKNRLEGVASHVRCSLERIIDTLSAEKTRLEKLITQQIRSHQQLSRDHQLLCTIKGIGSLTAAILLAEMARPGQVERARQAAAHAGLAPRREQSGTSVRRNRGLGKEGNRYLRKALYMPALVAIKYNAPLRHFASRLRTAGKPKMSIVCAVMRKLIHIAFGVLKHQKPFNPSLA

SEQ ID NO: 89446 - protein, 339 aa, unidentified
MEVTTIGLDLGKDVFQVHGITADGTVVFNRTIRRRQLLNFFETLPCCLVGIEACGSAHHWARELIEIGHDVRLMPAVYVKPYVKRGKTDAVDAEAICEAVTRPTMRFVAVKSKEQQALLTIHRVRQLVVRQKTQMLNVIRGLLREFGHVIGNGPVAAMRFIKTFETDDSPDIPDVAKSMLKTLCDQVASLDERVKFYDKLVEYHAKIDERAKRIRTVPGVGPITASAIVATIGDGKQFKNGREFAAWLGLTPLNRSSGGKERLGRISKKGDRYLRRLLVIGMTSQVQRARGYPERVHPWIMQLLERKPVRLATVAMANKAARIIWAILTKDTYYRQAAV

SEQ ID NO: 89447 - protein, 400 aa, unidentified
MLSIGIDVSKGKSTVCGMKPGGEIVYTPFEVQHTREGMSELVSLLRSSGEEVRAVLESTGSYHCPVVAALLENGIFVSVVNSLRMKRFCSQSIRKVKTDRIDAMQIALYGLAYWQELQPARLPEDTYRELQLLARQYYQMTSMLIKAKVDFNAICDQVLPGMQELMNDHAGRHKLSDFVLRYHHTTHILEMGETRFRKDYCKWAEKKGYRNCERMAALIFATAQNGIPVLPNAPSTQIVITEAIRVLHTVEASRDAILTQMQALAKTLPEYSLVREMPCIGDTLAPRLIAEIGDVRRFHSKRALIAYAGIDAPPYQSGKFCANNRHISKRGNRYLRKTGYEVMQSYVMHKPANDPIFTFIEKKRSEGKSGKLAMVAGLNKFLRVYYGKVTELYRSLPAIE

SEQ ID NO: 89448 - protein, 442 aa, unidentified
MKKLVKRLSLINENAAGIDIGTEMIFVSVGGLPVKSFPTYTANLLEACNYLKTNNVTTVAMEATGVYWIVLYDLLERNNIEVFVVNGAHIKNVPGRKSDTQDCQWIQQLHSYGLLRSSFVPVSSIRKLRTYIRLRDDHIQMAAAHKLHLQKALDLMNIKIHNVISDISGASGIKIIQAIIDGQRDAEKLVLLCNEQILHKKKEQLLAALQGNYEEQYIFMLKQSLSCLDFYLLKINECDQQIEPLLKEMTVDKAAPSPAAAVHSPKVIKNHKPAIKDLHTLLLKLTQGKDASQIPGLTDQTFMKLIAEVGLDMEQWSTVKHFTSWLGLAPNKHQSGKSNKNISKRFKNRAGQIFREAARSLANSKFTALGGFYRRIRARSGPMVANVATARKIAVLFYNILRKGCAYAEAGLKQYDEQFKAHRIKMIQKMAHQLGMEVVPSE

SEQ ID NO: 89449 - protein, 451 aa, unidentified
MANSKTRADRIISRQLSHCTVEAAHLSAVGIDVHHDQLICCFQKLDPIAGELTSEHRSFGTTIPQLLEFAAWCRVRESSVILMESTGVLWFSPYRSLEDVGFDNDTLALVNARDVKAAVGRKTDAQDAKRLAEYARLGKFHKSFVPSRPFRDMRMVSRDIIRLSDDISRQKNRYNKNLNSVGCRATSVFSDVHGKAAGKILDAYIRGDRDFEEIVRSARKQLRATQQEILEAINFAMSDALRELLRSSYEHLQYLIARRDSQIALLERMQAPYQECIDRLMTIPGVKELPARLLFCEFTNEQQSFPDAAHFASWLGLCPGNNKSAGKSSSGKTPKGNRWARKTLTEVAHGIGLMKRGALKALFQAFKERRGARRAVVAIAHKVAMIMFAMIWDGSEYVETTCSALRDTRVKRLLQTSKNLREQRTVITLSGQIVDKDTGELIGQLSVDAAT

SEQ ID NO: 89450 - protein, 337 aa, unidentified
MSLYCAIDLHSDNNVVVVIDDNDRIVFRQRLANDLDVVLPHLAPFKDDLHAVAVESTFNWYWLVDGLAEAGYRLQLVNPCAVQQYQGLKQTDDESDAFWLAHLMRLKLLPLGYIYPKAERAVRDLLRKRLQLVRCRVTHMLSAQNQLWRSTGHKVDSKRIKQADSTLCKLVVDPNIQRAIQANFTVIATLNTQIAELEAAVKSQVAAKPEFRSLLTINGIGDILGLTIALETGDIRRFPTVGRFASYCRCVRSQRLSNGKRKGENNRKNGNAYLAWAFVEAAHSIIRHHKAAHRFYQRKRAQKNGALATKALAHKLARAAYYVMRDRVAFDDQRLFG

SEQ ID NO: 89451 - protein, 346 aa, unidentified
MLYAGLDLSRKRLDFCLLDQLGEKVEVGAAPPDADGLRGLAARIGRFREPVVAAIESMNGARFVHDQLEQAGWDVAIADAVKVKGLAPLACKTDRIDAWVLAELARRDLVPAIWLPDPEIRAERERARFRLHLVRHRTSLKQRVHAVLLAHGKPCPVSDLFGVAGRDLLERLALPEPWLGTVEATLQLVDQLDRQIVDCERDLQRLGAEHRYVPLLVTVPGIGWVLAYTIAAEIGDISRFATPTKLTGYTGLCPRVYQSGQSDRRGALAKNGPRYLRWALIEATMHACRHPLYRDRYQHTKQRLGRQRGAKVAQVDLARRLAEAIWHMLTRNQPFAPAGAADPLAA

SEQ ID NO: 89452 - protein, 385 aa, unidentified
MRRAKRRGPGPSHLLITPDHAGNVVGIDPHKRTVTATLADPRGGILASEHFRVSGNGHRGLEAWALAFGPVARWGVEGASSWGRHTAMFLCGRGYDVRDVCANRTPRHDRARQRGKSDVLDSERIARETLAHSLLPKAFKRAGEDQGPDEQHQLLALWHNRRRSILTSRQHLLNEAEHLLCELPLKLRDELPDSKAVRPRLSALAARNRRRRYDPPTRLRLQLLDRYAAQIAALDREEKTVVSELRALVRTSGSTLSELCGLETRSVAELLVEVGDPRRFTEGGFARFNGSAPLPASTAEGPGEPVRHRYNPGGNRRINAVLYRMAITQLRCEPRAQAIFATARAKGHTKKEARRILKRHLSDVIYRRMIRDLACSHPAQPLLAA

SEQ ID NO: 89453 - protein, 607 aa, unidentified
MSTTASLDRIGVGIDTARYGHRVSFLRPDRKPAAKPLTVMENRAGYQSLQDRLNQLHESHPDAKFHVRIDAAGQYAVNLELFLRSLNLPMTISVGEPKRNKDYQRAHFAKRTTDDTESQAMARFAVVELPDATPAPSPPMILLREVAGRLQAKVKQTTQAVNRLHNLLARTFPELATLTDDIAVAWALRLLQMYPTAERIAAAHLASLEKIPHLSREQAQALHQAAKQSVASVRGDLAEALVRDLVGQVQHCQKAEQHLRQLLVAAFSDLPASPHVQVLTIPGIGEATAAALVAKIVDIDRFATPNHLVNYFGVFPEESSSGVDKQGKPLPAGTLVMSRKGNDLVRSYLWNAARSAIQHNPAIGALYRRLRAKGKRGDVALGHCMRKLLHLVYAVWKTDRPFDKNHFPWEGCSDTPSSTTTSTSTAATPAANDKAVGHKRDLPADEVVTTASSTVGPAPRPVKSAAQPEGRARPKVDFAFLREQVSMEQVLRHLGLFPQLRGHGQQRRGPCPVHSPATAVEQTFSVHLGKNVFQCFQADCALKGNVLDLWAAIHRLPLYEAALHLAGTFEVPRTREEEPVTGTRCPGTARASESAPAAVTTTDQPLR

SEQ ID NO: 89454 - protein, 448 aa, unidentified
MSNRNGPSALRIQHPNSAGIDVGASSHFVAIPAHLDPESVREFSSVTADLKRLADWLVEHRISIVAMESTGVYWIPLFELLESRGMEVLLVNARHIKNVSGRKSDVLDCQWLQQLLSYGLLRGAYRPREAVCVLRAYTRQRSMLLRNQARCVQHMQKALVQMNIQLGNAISDVAGETGFRILRAIVKGVRDPLVLAAMKNARIRADEATIARSLEGNWRAEHLFALRQAIDTYDFNERQLGECDIAIDAQMAKLKIQDAVPEKARRRSASRNAPQFDARTRLAQMLGVDLTRIDGIDVSTALIIASEVGNDLSRFPSAKHFASWLGLCPGTHITGGSRISGKTKRCANRIAQALKLAAVALRRSQSALGAYHRRLCARMDKAKAVTASAHKLARLVYTMITKAEQYVDQGQAYFEQQHRDRAIRSLMHRAQQLGMTLIDLPTGTTTTA

SEQ ID NO: 89455 - protein, 304 aa, unidentified
MAIVAGFDVHRAQITFDALDTETGEVMRGRIDATPVAVARWAERFAGRRIDVAVEACTGWLFVCDALAAAGAVPHLAEPVETRALRGRKRRAKTDREDARWLRELLADGRLPEAWIPPEHVRQWRSRARLRHTLLNERTQWFQRIRATLFHHGIDGTPENLRTGHGRAFLQRLELPADARERIEIALAMIDAIDAQMAPLERELRQLARRQTGCRALMGLYGMGELTSLVTLCELGDVGRLSASRKAVRMAGIDIGVHRSDRRSRVGKLNRQGSPHLRWALYEAALAACRPSSPDHADYLALRP

SEQ ID NO: 89456 - protein, 338 aa, unidentified
MKLYGGIDLHANSHYWGVIDEGNKVVFKHKMANELGETVKVLESFGEKIEGVVVESTFNWYWLVDGLMSAGYRVHLANPAAIEQYKGLKHSDDERDALWLANLLRLGILPEGYIYPKEERPLRDLLRKRLQLVRHRTSHVLSIQNILSRSLGLKIRANEVKKLDEAWVEEVFKDRHLTLAVSSSIGVMRYLEEKIKQLEGVVERQVELRKEFAVLLSLPGVGKILGLTIMLEVGDIRRFAEVGNYASYCRCVRSTRISNGKSKGEGNRKNGNKYLAWAYVEAANYALRFYPEVSRYYHRKAAQTNRIVAIKAISHKLARASYYMMRDEVVYDSEKLFS

SEQ ID NO: 89457 - protein, 411 aa, unidentified
MEDTFIECCCGLDVHQGSIMACLLSGPANAKPRKEIRRFGTMPTDLTALREWLRAAGCTAVAMESTGVYWIPIYAALEGHFQVTVANPQRLKQIPGRKTDVKDCEWLARLLRQGMMPTSFVPPKPIRRLRELVRFRRRLVETIAGVRNRAIKELELAGIKLASVVSDVFGASGRAMLRALAQGQASPADMAALAKGALRRKLPELEQALSVPLEEHQRLMVDSALELLEFGEAQAARIERKIDEHLQPYRTQMELLMRIPGVDRIIAATIIAEVGVDMSVFPDEAHLSSWAGVCPGNNQSADKRFSSRIGHGNPYLKTALVQAAVSGSRKRGSYLKDKFFRLKARRGFRRAATAMAHKILVIVYHMLKFGRPYQDLGDAYLDQLSHRRTKRNLVQRLERLGYSVTLRPIAA

SEQ ID NO: 89458 - protein, 348 aa, unidentified
MLTIGIDPHKQTHTGVAVDPLGVPVAQRAAPARREGFGQLLEWARRLDGERIWVIEDVRHVSGSLERFLIDRGETVVRLPPRLMADARQGVRERGKSDPIDALAIARAALREGVETLPTARLAGVELEIRLLGLHRERLVDTRTRLINELRWQLHDLWPDWEIPKRVLIQAGWQTKIADRLKRAEGTIQVQIARDMIARIRELTRTITQLYRQLAELVAQAAPQLLTEPGLGVLIAAKLIGEIAGIDRFTSDAQLARISGCAPIPVSSGRTDRHRLDPGGNRQLNHAFHMLALTKILRDPRTAVYLAKQRRNGKTNREAIRSLKRHLVRRVYHLLRDPNSVPRTICLT

SEQ ID NO: 89459 - protein, 429 aa, unidentified
MRTESTPGARGPVFCGVDTHADSHWLCVLDWRGRKVLSRQFPADAAGYEALAGAIAAAGEPACVAMEGTSSYGAGLTRHLASLGMPVREALSPARMQRRRPGQGKCDEADAERAARAAMSGSKLGTPKSQDGWVDGVRCMLAARSGAVKARTSAINTARSLLTTAPEGLRSRFRGMGGPRLMEELPSVRAEGALGAALGALADLWAAARDTALDMERAIEASLEENCPALLAMYGCGPVSAAKLAVAAGDNPGRLRSEASFAAICGACPIPASSGKTVRHRLNRGGDRQANSALHEIARQRVMRDPETAEYAERARGRGKSDREVMRCLKRYVAREAYRALMHPHEIRRPEDASELVAARRAAKVSQVRAASILGTSEKYISMLERGQRELKPIRRAYEAWVEAGLPLDWDRRAFEAERKMDSKKHLAK

SEQ ID NO: 89460 - protein, 341 aa, unidentified
MTNNIQFSSVCGIDIAKSVMQVYKVSSDGVVSNKAVKRADFLDEFRNIPPALIGIEACGGSQHWAHELQSLGHTVRLMPPKLVKPYVTGLKNDKNDARGIYTALVMDVREVPVKSAAIRDLALLQTMRTKRQREKVAKINHIRGILSEYGLIMGKSVNAFLAKAGSLIVELKERADVSPYIVSELDALFQEVKEAIAKIKELETNIESIAKTLKHYDLFQSAPGVGPITAATMLVLLCNPEVFKNGREFAAYIGLAPKSSGSGGKNFPKKYECKNEVRTLLVQCAHAICRSRHKSDWVSSILARKPKKVAIIAVANKLARQLWIMAKKGEKFERRFILAAV

SEQ ID NO: 89461 - protein, 345 aa, unidentified
MNITRIGVDIAKSVFHVHAVDRHDQVQWRGKYSRDKWLDAICKRVPVGAEIGMEACASSHHWARQFQVRGYHVKLIAAQFVKPYVKSNKNDQVDAAAVCEAMGRPHMRFVTIKTVSQQDIQAAHRVRAELVHQRTAKANQIRGLVGEYGLVAPLGIAQLRAALPRWLEDAENGLTDEFRVLLAGLAEDLRHLDDRIAMVTERIKRHTQTDPMAKRLLSLPGVGTLTASALAGALGDAQAFKRGRDFAASLGLTPRQHSTGGRDRLLGISKRGDSYLRTLLVHGARAVLRYAGDKDDNLSHWIRQLAERKHPNVAVVALANKTARIAWAITRRDAAYEPELAAYVA

SEQ ID NO: 89462 - protein, 407 aa, unidentified
MKKKEVIEFEQVVERGCGMDVHKDLIVATIQGKDIKMQTKSFNAFTSSLIKLKEWLLKNGVTHVAMESTGIYWKPVFNVLGDDFKILLVNARHVKNVPGHKTDKKDSRWLAKLLLSGLLKGSFIPERPIRELRDLTRYKTKLTNQVTAEKNRFQKILEDANIKLSSVLNDVFGATGTKIINHILEHESYRPEDILQYVHGKVKSSREDIKEALTGYVTPHHRFMLKTIMRNILRIENTIAEVDTQIEVCIEPYKVERELLESIPGVSKVGSTCIIAEVGVDMGQFPDQNHLASWAGICPGSNETAGKNKSGRITHGDKYLRSLLVECGWAASRTKNTYLSAKYKSLVGRRGKKKAIIAVGHKILIATYFIIRDKIEFKELGTDHLNNFKRDRLIAYYRQQLEKLIAA

SEQ ID NO: 89463 - protein, 380 aa, unidentified
MQNDHQSSESVILGVDTRLDIHVGAVISQAGRLLGTLIIQTNQAGYLELLDWARSFGGLERAGIEGTGTYGAALTRYLIKNGIYVVEVNRPNRSKRRLEGKSDPLDAENAARTVLSGSSKAIPKMQSGACEALRIISVARRSAVKARTQAINQLRALLVSAPQDVRDKLWKSKPHECIAACINSEVSEHSPLRIALCSTLRSLAKRWMALTEELNELDESLDKLTRKYASNLRSQFGVGPHTAATLLAVAGDNPERLKNEAALASLCGVNPLPASSGKTVRHRLNRGGSREANNALWTIALVRMRSDPRTRTYVDRRTREGLSTKEILRCLERDIVRELYPLILSDLAYANRPILTEERQCRSRVVLQFAEKRAYQKAYI

SEQ ID NO: 89464 - protein, 369 aa, unidentified
MSTNVVYVGLDVHKDSIALAVAREGREPAETWKTIPYDGVRLRKALKMLVKSGERLKVCYEAGPTGFGLCRRLRKAGIDCIVAAPSLVPAKPGERVKTDRRDARKLAHFLRSGDLTEVHVPEEAVEAIRDLERARDDAKNAERAARHQLSKFLLRHDRRYEGSTWTLKHRDWIRTQQFAYPAQQRVLEDYLKTVEDLAERVGRLTQALEALVQETVLAPMVKALQAFRGFRVVSAVTIAAEAGDLRRFPTPQQFMSYVGLVPSEESTGKRRRQGSITRCGNRFLRRILVEAAWHYRHAPAMSKELRRRNQGVAEGVRQIAWKAQKRLHQRMYRLIYAGKSTQKAATAVARELAGFVWAVGQQPSLLEAR

SEQ ID NO: 89465 - protein, 339 aa, unidentified
MSKLLKNFVGIDISKTYFDAAIIKADDPYQRMHNQFPQTPIGFKKMMVWLKFQDVLFNDETLFCMEYTGLYNTGLVNFLVQGKAQLWVEMPLRIKRSAGFERGSDDKTSAIKIAAYAFRYQDKMQLWQPVDNSIEKIKRLTTQRERVVKAITELSVPVKELSECGCDKEAKQLEKVQRNALKALKKTKENIEQLIIKTVGQDAVLAKKIQQVKSIKGIGQVTAVSLLGYTKGFTSFSNGKELACYCGVVPFEKKSGTSVRFKPTVSPNANKKLKRLLHPCALSAIKNNAEIRSYFARKVAEGKNKMCVINAVRNKLIHRLFAVIRDDRVYEENYVRRCA

SEQ ID NO: 89466 - protein, 345 aa, unidentified
MYYAGIDAHLKSSTIYVMDEKGQKVKSTTVATSREGLRAALGVLARRRLLAAVESSGIALWVVGMLKELGAKVVVVNPNRVRLIAESRKKTDRVDARLLAELLRLGAAPEVHVPSEEARRKRTQLSVRRQLVRQRTALVNQARGLLRGWGVSLEARGLGTLEGWKRALRRKEVPLYVKELLGVLGGVFEQLSEALEGMKVRLNHEAEQDERVERLQTIPGVGRVSALTLVAAVDQVERFQNAKQMTGYFGIVPTVRASGEREEQGRITRQGRSEVRAVWIQAAHALARCRQPAAQPLQRWFHRVAYRRGLRTALVALARRMLSLAFYLLRDGTSYEPRRLRWAAA

SEQ ID NO: 89467 - protein, 333 aa, unidentified
MYAAIDIHKQVFQAAVLDAVSGELVEARFAATREALGNWAARWQGKLTDVAIEATCGWRWVHRELEPRGFTVQLAEPARARALKGNTRQPKTDRLDARWLAQLLAKKMLPESWLPPKDIERLRDLTRLRQSLRHDRTRWAQRLHAVLQHEGWPCARRSLLSPTGQRWLAALALDAGVRRLVDAHQAMIGAIEEQLAQIDRELRTLARSDPRLVALQALYGIGPVIASHLLAEIGEARRFRRSRQLVHAAGLDPVVLESGDSHRRGHLSKQGSPHLRWALMQAAQQAARRDRSPDHARYVAVQKRIGAQRAALTTARKIARRAYHVLAALEDAA

SEQ ID NO: 89468 - protein, 270 aa, unidentified
MIIIGVDFHPEFQQIAWVDTDTGEFQEKRLVHPEEAENFYRALAGKKVRVGMEASGHAGWFERLLAELRFELRIGDAAEIHSKRVRKQKTDRQDARLILQLLLEDRFPQIWVPSWENRDVRQLLWHRHRMVQARTRIMNQLQAVALNEGLRCKKRLWRERGRQQLESFRLAPWASRRRRDLLELLDRLNPTIAELTQAIEQETEKCAPARRLRTHPGVGALTALAFVLIIGDADRFHCGKQVASYLGLVPLEDSSGNTTILSRRQLPGFH

SEQ ID NO: 89469 - protein, 469 aa, unidentified
MPGEVGPPRSSAEKGQHPGSNTGYRLIRGLRCPKLHCPPRLKMSLGWQEMTLNDDVLIAVDPHKASNTAAVLDPVTKTVIEAARFANTVGGYAELIAFAARWAQRRWAVEGCHGAGRSLAQRLVADGELVLDVPAKLAARVRVYSRGHGRKTDKDDAVSVGLAALDGTGVTLVACDDATVSLRLLCDRREELTAQRTQAACRLHRLLAELTPGGMRRELSANKAQALLARIRPAGDVATVRVHIARDHLADIRALDARIKYLGGQIAALVTASGTGLTGLFGIGPVIAGRLLAEVGDVARFATKDTFASYNGTAPIDASSGEQVRHRLSRAGNRRINHALHMMAVTQIRYPATPGRLYYERKRREGKTPKEALRCLSGGCLTRSTISSSPTGGAQSERADHLRPRRRRGLHPPHQRPAHTRPHHPPGPYTARHHRVHRAGLERRPPRRHRDPRRQHPPPPRPPRPGDGR

SEQ ID NO: 89470 - protein, 351 aa, unidentified
MSKRTNAIAVSTIGIDTGKNTLHMIGLDEKGVIVLREKVSRSRIAARLVNVRPCLVGIEAGMATHYMARELVALGHVVKQVPPAFSKPFRQGHKNDFRDAYAIAEAVQRPSTRCVPIKTDDQLDLQALHRVRSRLVGDRTAVINQLRGFLLEHGITVRQGHRFLRQQLPQIMATRADVLSPRMIRIIEDLIEDWAHLDERVERVTDEIEGLARTDVSCGRLMTVPGIGPIIASAMVAAIGDGGAFAKGRDFAAWLGLVPRQMSTGDRTILGRITKRGNRYLRMLFIQGARAIQLHPASWAKHSFGPWLSAAARRLHCNVLTVALANKLARIALTVLLQGRNYETRIKPVAA

SEQ ID NO: 89471 - protein, 371 aa, unidentified
MLYVAVDQHAKQLTVSVRDEAGDVVLKRQVSTEWERVRRFWEEIRERSAVLGGFVVILEVCGFNDWLIVMLQEFQCSQIVMVQANERAATKTDRRDANRLGELLWVNRARIAAGQRVPGLKWIVIPSKEDAENRQLTSMRQRIVAQRTKCINRIKHILLKHNILQEMSTKGIQTIKATKWLRELSVPEIDRLELDQCLAQWALIEAQKKQIDQRIASRQEQDAQAQLLATLPGASTYSSLALSCRIGDASRFDSPKSLSHFWGLTPRCRNSGASTDRLGSITKEGSKVARFILGQLVLHVLKKDRWMREWYRRIKLRRGSKIARVAVMRRLTVVMWNMLRHREPYQCGGPEAVRQRRKPGPATPTNPALTS

SEQ ID NO: 89472 - protein, 457 aa, unidentified
MRKGKPKTIKIGVHEGLRRIRTDAAGIDVGASEIWVDVGAENSVQPVQPFQTFTADLNRMADWLKSSGIHTVAMESTGVYWIPVYQILEDHGIEVVLVNAAHTKNVSGRKSDVLDCQWVRTLHCYGLLAASFRPASDIGILRSLMRHRQMLIEFAAAHVQHMQKAMTQMNLQLHHVISDITGVTGMKIIRAIVGGERDPQRLARLRHERTVADEQTIAKALEGNYRPEHLFALKQCLDSYDNYQKLIEECHIQINQHLRTLESKADPQALKPARAPKAKGKRNQPKFDVRQEAFRISGVDLTQIDGIHESAALGIIAEIGVDMSPWKTEKHFASWLALCPNNKISGGKLLRRSTRKSANRVRNILCMCAQSLINSRSALGAFNRRLRARLGAPKALVATAHKLALLIYRMLKFGRNYVDIGQHRYDEKFKERSLKALARKAQEFGLRLVPAPIEVVP

SEQ ID NO: 89473 - protein, 353 aa, unidentified
MRKIQDYILKDNKIYVGLEDSKRTWKLCIRSDGMIVHETSMPADYDNLKRYLGGCYPGCRIQVIYEAGFSGFWLHDLLMRDEIDCVVTPANRVTVAKVNKIKTDKRDARRLAKNLENGDYVRCHVPDAERREDRQLSRTLEQIQRDIIRAKNRIRRFLDFHGLNGDMKHGNWYSSDYRKLRELPLQGSLKVCLDSYLHILDELEETKAAFQKELSLLCKKERYAQSVNAKKSIPGIGLLTAIRLTLEWGEMSRFPSGKHIASFTGLTSREYSTGDSIRRGRITGHGSESVRSWLIQSSWRALRLDPALLEKFQKVWKNSGSKKKAIVAIARKMAVRMRAIELSQYHYCTSVVE

SEQ ID NO: 89474 - protein, 483 aa, unidentified
MNKVISKTSKKKLFCGNTQNLLIVADCSKSEHLVHFFDCITGQYLYRHPLKIQNDLVGFNFLRKKIQVVLDKKRIRTNEVDFVLEDPASYSQEFIYFLQKEGFNVLYVNAFQASKYRDNTRASSDLLDLDGIVRSALMGQSYQTREMGEVYSRIKESHRERNRLVKEENRHKNIIHSQIDQLFPGYLSKTKSGIHPFSKACVELMSCSEFGPQLFLNGSSKRVLKLIAKAGFNEPQKVQEDLAQLSAKCLDITNLEPEVYVMRLNRLHAQLKLLKMRRECIELEEQSLAELLQHTPYALLTSITGSGIITVSAIAGELGDPAKWPDADKIASYAGIVPRQKQTGGSSKPTVTSTPPKAANKYLKNALMTIVRVAKSFQSRAYKETGIIHPLKAHFDCVALRGGSSYTSTSKKLLRIMIAMLRDETIYMPDIHTTPPELYLQWLEQCSGRMIEKWQASGIDPTPENYLGKWLKTKELLSQIIHK

SEQ ID NO: 89475 - protein, 356 aa, unidentified
MVMVLGVDVHKDTHTVVAVDEVGRADGERTVRATDTGHRQLLDWARRQVPQDRMWAVEDCRHVSTRLERALLAAGETVVRVPPKLMAGARSSARTRGKSDPIDALAIARAALREPDLPLARHDDTSRTLKLLVDHRDDLVIERTKMANRLRWHLHELDPELNIPARGLNRLNLLDRLITWLAEQSRPDRLGQVLARLAAELLTDIRAATVRINALEREINTLARQAAPRLMTLPGAGGLTTAKIVGETANITRFRSEACFAMHAGVAPIPASSGRTQRHRLARGGNRQLNAALHRIAITQVRITASPGQLYYQRRRAQGDTAMEALRALKRRLARVVFNLLQADTTIAINDLSTAA

SEQ ID NO: 89476 - protein, 380 aa, unidentified
MASMHDSVRFKTTVYAAIELSKKSWIVAIARPDRDRPSIHRIAGGNLADLIGRLRKAAGEKQRIVVCYEAGYDGFWLARSLAKIGIDCRVLDPASIQVNRRARRVKTDRIDSLALLRALIAIGRGERHVCAVVRVPTVEEEDARRSHRERQRLVRERTGHINRIKGLLFAQGIRGIEPKRRRTRIDFGKLTTAEGRPLAERLRRELEREYQRLELVQSQLRIVEKERDTADAQDPAVERKRELLCALQGVGGASAAILAREVFARPFASRRQLGSYLGLTPSDYDSGSTTRCQGISKAGNSWARRVLIEVAWLWRKYQPGSPLSHWYARKTADQSPRIRRIMLIALARKLAISLWRYVETGLVPDGAVMAKTTPHMAAAT

SEQ ID NO: 89477 - protein, 400 aa, unidentified
MRSVGMDVHRSFAQVAIFDGSKFTGEFRIELDHDAVVAFGQSLRADDEVVLEATGNTAAIVRLLTPFVARVVIANPLQVKAIAHARVKTDKVDAKILAQLHAAGFLPEVWVADDETLKLRRLVPERMALVRSVRRVKSRVQAVLHANLVPKYAGHLFGKGGRRWLATAPLPRTERDLLVRHLDELDWLNGKLEKLDRALARLSLDDARTRKLMTIAGISSVIATAVIAAIGDISRFPTPERLASYFGLTPRVRQSGERAAIHGRISKQGNAVARTMLIEAAWSAASVPGPLHAFFLRIKDRKGLNVAAVATARKIAGPIWQLLTKDTAYRWARPAFVAMKMRKLELRAGAPKAHGPAGPGHDYWIKEIRHREMELVAQAEAAYARMVEARRDKPPKPRKA

SEQ ID NO: 89478 - protein, 332 aa, unidentified
MQLLAIDLGKQSFHIHGITDEGEVISKKVSRSKLEAAVQKLSPETVAMEACASAHHWGRCFEAMGYPVRLIHPRFVTPFVKGSKNDAVDAEAIHEAALRPTMRFVPVKTTEQQDLQMLHRTRDRLIAQRTGLINHIRGLLGEYGIVIAAGAFRFRKDVRNVVAEASLSLLAKQNFNALIAEFEALDKRITEIDKKLVAICRTDDRCKRLSTLPGVGPVITTALIASVDDGRHFSSARALAAWIGLVPRQYTTGSKTRPGGIGKRGNQYLRRQLIHGARSVLIRIAGRNDRRAKWAQDLLARVGHNKTLVAIANKTARIAWAVLRSGESYKTA

SEQ ID NO: 89479 - protein, 409 aa, unidentified
MRVIGLDVHRNFAQVAILDNGVVKDHGRFAMDREAVLAFATKTLTQDDDVVLEATGNTAVIVRLLTPFVRRVAIANPLQVRAIAWAKVKTDKIDAATLARLHAAQFLPEVWMPSEKVELQRRLVAERTQLVSQMTRLKNRIQSILHANLMPRETGRIYGAKGRARLEALALPADQMRAALRHHDELGRLATELAAIDKSIAQQALEDENVRRLMTIGGVDLVVAFSVLAAIGDISRFSSPQKLVSYLGLNPSVHQSGDHPAFHGHITHQGRGHARGMLVEAAWSLAASPGPLSAFFHRISMKRGKQVAAVATARKLAVLVWHMLTKQQDYAWTRPALLQFKLRRLELSAGHPSRRGGKTPGPARDYSLKTVRDQERAWLEQAEAEYRRFVAGWKERRPARGATPAAKGT

SEQ ID NO: 89480 - protein, 345 aa, unidentified
MTIVKTRAITGGVDTHADMHVAAALDPIGGLLGVQEFPATAGGYAGLLGWLGGFGTVALVGIEGTGSYGAGLARHVTAAGIRVVEVDRSDRQDRRRRGKSDPLDAVSAARAAQSGRARGAPKGRDGAVEAIRALMVAKRSARSERVQTINQARALVVTGPDDLRTRFARHTAAGLVSGLASLRPRPGDVVGYATRIALRELGRRAEFLDAQLERLDELIAPLVAARAPGLLALHGVGPDTAALLLVAAGDHPERLRSEAAWAHLCAVVPIPASSGKVTRHRLNPGGDRQANHALWRIVLTRMSAHPPTLIYVERRTKEGLSKKEIIRCLKRYVAREVYRHLRAAG

SEQ ID NO: 89481 - protein, 345 aa, unidentified
MEHYAGIDVSLESASLCVVDATGRIVREAKIASEPEVLIGWFSRLGLVVTRIGLEAGPLSQWLYAGMRDAGLAVELLETRHVRAAFKTMPVKTDRKDARGIAQLMRLGWFRPVHCKSLPAQEMRALLTARKLLQTKNHDVEMCLRGVLRGFGLKVGATTPRNFATRIGELVTGHTTLSVVAEGLLAARNTLFAEWQKLEKRLRSLAREDRRVRLLMSAPGVGAIVALTYASAIDDPGRFKSSKTVGALFGLTPRKYQSGETDVTGRISKVGDRGVRTALYEAANVILTRPVKGSILKSWGMRLAARAGMRKAKVALARKLAVVLHRMLADGTSFLADKAAATVTR

SEQ ID NO: 89482 - protein, 324 aa, unidentified
MNVIGIDVSKAKLDCAWLKEDNKVKTKVFTNQLDGWKELVSWARTHTGNEISALYFVMEATGIYHENLANWLYDSGANVSIANPAHVKYYAQSLGGRTKNDKKDSIVLARYGVKERPMLWQPAPQEMRALKALLTRLDAVEKDLQREKNRQEKIIVSDTPTAVLASIKHMIEHLETEQKTLEKLIDNHIKTHKNLKENKKLLESIPGIGKVMSQRMLMVLGTHQFKDAHQCAAYLGLVPVQRESGSSIKGRSQLAKNGNRTVRAKLYMATVTATRYNPDIKAQYERLTKKGKSKMSALGAAMRKLVQICFGVFKHQLPYQPQIA

SEQ ID NO: 89483 - protein, 341 aa, unidentified
MKQHVCTVGIDLAKNIFHLVGTDITGKIVWRQRLTRHALGPFLAQLPPVTIGMEACGGAHYWARQFRHQGHTVKLMAPQFVKPYVKSNKNDMRDAEAIAEAVTRPTMRFVPIKDVAQQDIQALHRVRERLIGARTALINEVHGLMLEYGIVLPKGVAKFRQAVVEKLEAAKDKLTALSQELFWKLVQEFGTVEDQIAFYQEKLETLATTHPECQRLMTIPGIGPITATALVAAVGDVGVFKNGRQFAAWLGLVPKQHSTGGHSLLLGISKRGDSYLRKLLIHGARATLRWVRLQTDKRSQWIRGLLARRGWNRTAVAVANKNARIVWALLSRGGVYGAPVS

SEQ ID NO: 89484 - protein, 297 aa, unidentified
MKKVSTVRAAQSRNIPQQKLTIGLDLGDRNSWYCVVDEAGQIQLEQRVRTSGKALQEVFGAMPRSRIALEIGTHSPWISRLLREWGHEVIVANARKVRLIGESRKKDDRLDAQTLARLARIDPELLSPVKHRSAQAQADLTVIRARAGLVRARTALVNTARGLAKSYGERLLGCNVRNMNPEKAEGLSPELQRALEPLLSAIESLSERICEYNERIEKLAQESYPQVALLKQIKGVGTLIALTFLLTLEDLHRFRKSRDVGCYLGLQPGRRNSGQSEPQMHISRVENPAPGPHAGLS

SEQ ID NO: 89485 - protein, 386 aa, unidentified
MQKLNDFSRSLIALEPDGTLIAVIEMSLSSWLVAGIVPGVERQPLKKLAVDENALLKLLHRWREEAEKAGRRIERIAVAFEAGRDGFWLARWLKARSIEAHVIHAASVAVSREHRRAKTDRLDTELLKRAFLGWLRGERDHCKMVDIPTIKDEDAKRPNRERENLVSEQSRIINRMKAALIRLGIRGFNPKLKRATARLDGLRTPEDEPIPPNTLAELRRDMERRRLVRDQIRQIEEARLERLDHAPGDGPHAMVRLLARVIGVGIETADMLVHEVLSRNMRDRRAVARYAGLTGSPDESGRKRREKGLARSGNARVRRGMIQLAWRFLLHQKDSALTRWFRARTENARGTRKPMIVAMARKLLIALWRLVREGVVPDGVVLRPAQ

SEQ ID NO: 89486 - protein, 397 aa, unidentified
MYIVGIDIAKRKHEAAVIDGEGTVIIRPFSFTNNCSGYNRLLAMLAKAKLPLDEVSFAMEATGHYWLALFTRLQKEGFRVQVINPVQTNSIRSFYIRQAKTDPRDALLIAEVIRFGHFSESTLHPENIYELRELCRGRHAIVSMQADVKRKVVALLDQVFPEYETAFTNLFGDTSMAILQTCPTPKELSEMPLEELCHLIEVSSRKRFRMAKAQELQALAHNSFGFAMAGDVFSTMIRLYAKHLDFLKQQVREMDRKIAEIMDTLDTPITTITGIGPTLGAYILSEIGDINRFSSSAKLAAYAGIDPTMRQSGEYNGVRNRMSKRGSPYLRHAIWLAASSAVLHDPALKLYFQKKRDEGKPYMASVGHACRKMVSIIYAVMRDNKAYTPYIPNEISA

SEQ ID NO: 89487 - protein, 407 aa, unidentified
MDLLKTVFGIDVSSRKSNVCIMVNGQKVDDYAISNDMVGFNQLLDDLKQVTKPQIIFEATGVYSRRLQAFLDMHELRYVMMNPLEAKRKTKDDLHQNKTDKLDALYLAKLQSEHPQRLAYVQSKEYQELMANNRIYEQASHDLITNRNRLHKAIQLTFPEIEHLMVNPRGKNYWSIVLRFPHPDIVLETKEAEIIDFLKGLSGIGKKRANDIMQSLIRLAKVACPAVKKDSAHIRGLEMAINNILSAEEACQTALKEMTKLAPKRDLEILTSIPGIGENTALRIISELGDIRRFNNPSQLNAFVGVDPQVYESGNLTAHLSISKRGTAIGRKVLYLAINQIQSAKKAGNPSHIADYYEKRKRSSETASHKKAAIASIHKLLRTIFALIKNDQLYSYDVAKHNQRLLS

SEQ ID NO: 89488 - protein, 314 aa, unidentified
MYHYIGIDVSKKVLNVFDGKKDLVFENKENLSSLKKHLKKRYPDFSSLVILFEATRIYSFHLKAFCATHMLKAYIINPKTSHNFAKSLGKRSKTDTIDARTIWAYHKLINDKDITIPRVDQVLITLSSYLTSYRLTLKQRLSLANHLEGIKDKALYRLLKKELKRLCKLEEVLLIRMDSYIKQFPKFKEDYQRLLSISGIGQKTAISLLVLFHTYPNTNRNQITALIGLDPIQRLSGTSVHGRSRISKQGNRMMRKCLYMPTLSCIRHNHKIKVFYERLVLQHKPKKLAVIAAMRKLLLIAHTIYTNKTVYVPG

SEQ ID NO: 89489 - protein, 397 aa, unidentified
MYIVGIDIAKRKHEAAVIDGEGTVIIKPFSFTNNCSGYNRLLAMLAKVKLPLDEVSFALEATGHYWLALFTRLQKEGFRVQVINPVQTNSIRSFYIRQAKTDPRDALLIAEVIRFGHFSESTLHPENIYELRELCRGRHAIVSMQADVKRKVVALLDQVFPEYETAFTNLFGDTSMAILQTCPTPKELSEMRLEELCHLIEVSSHKRFRMAKAQELQALARNSFGFAMAGDVFSTMIRLYAKHLDFLKQQVREMDRKIAEIMDTMDTPITTITGIGPTLGAYILSEIGDISRFSSAAKLAAYAGIDPTMRQSGEYNGVRNRMSKRGSPYLRHAIWLAASSAVLHDPALKLYFQKKRDEGKPYMASVGHACRKMVSIIYAVMRDNKAYMPYIPNEISA

SEQ ID NO: 89490 - protein, 403 aa, unidentified
MSVELHVALDIGSVKHRVVIGLNGPGEPLEEFDLLHTPAGLSHFFERVHHHEQIHGASVCVAMEGFGGYARPLDSQVLAQGWRLYAINNLKFARFKEIFPAPAKTDAIDARRMLQLMRMRGQVPMAQALLQEVAPVDQLHQHLKALTRRRKQLVAERMSTSQRMQTELQATAPGLLAITGQADNLWFLGFLLCKDTLQKLKTVRKSTLLKLRGVGVAYAARIAQWQKTALFAASTTWSGPMIQADARRMLALRDDIAALDCQIGQLVEQSTVAQRLLSMPGFGPISAAELASEVGNIERFHDEASFAVYLGVAPLDQSSGKRFGARLPRQINPRARDALLIAVVHHMSQVQQSRAYYDRKRMQGKTHMQALRALARHLVRVLFSMIRHNRDYQVPSTNSVDCT

SEQ ID NO: 89491 - protein, 388 aa, unidentified
MPQSNDLSRSLAAFDQDRTLIAVIEMSQSNWLVAGLVPGLERRPLKKLSPDEDALLKLVQRWRNEAAQAGREIKRIVIAYEAGRDGFWLARWLRRRGIEAYVIHPSSVAVSREHRRAKTDRLDTELLMRAVLGWLRGEKRHCSMAAIPTIEDEDAKRPSREHEKLVGDRTRLVNRMKAMLARFGIRTFKPTLRKAADRLDDLRTAEGTPLPENTRAELRRDMMRLRMVREQIKEIEQERLRKLTAAPAEKGPPTMVRFIARIIGIGIETADMLVSEILSRGLRDSKAVARYAGLTGAPDESGRRRREKGLAKAGNARVRRGMIQLAWRFLIFQKDSALAQWYRARTADAHGATRKRMIVALARKLLIALWRMATTGEIPEGISLRAAP

SEQ ID NO: 89492 - protein, 341 aa, unidentified
MQITTIGLDIAKNVFQIHGIDSDEKVVVRKQLRRGQVMRFFEELPPCLVGLEACATSHYWARELARLGHEVRLMPAKDVKAYLKRNKNDAADAEAICEAVRRPTMRFVQVKSEKPQAHLMQHRARDLLMHQRTQLINAIRSHLAELGIIAPQGREGIKELLAIIAKDANTELPNDARASLIVLASQLQALQTTIGEIEKRIVVQHRANKESKRIQTVPGIGVIGASAIAATVPNPQIFRSGRDFAAWIGLVPRQMSTGGKPKLGPISKQGDRYLRRILVVGAVSVLRRAKLNPEKFPWITRLLARRPFKVVAVALANKMARVAWALMMSGKTCRAARFATT

SEQ ID NO: 89493 - protein, 426 aa, unidentified
MNEVDIIRLEQFRQLKKEIRGSKEHLIVGIDVAKDKHNAFFGTATGKTMFKRLVFENTIEGFNRLLIQADAIKIQHSLKKTVFGLEPTGNYHKPLGEFLIKCSHMVVLVSGVAVKRNRELLDGRWDKHDTKDSANVADLISQGKCLFYEYPSMALRDLRNLLSLKKKLKKQEHGLRVRIRNHVLAQYFPEMDSYYGQSESDSLEIVKWCLNPSVIAGLEYEQFLQLVAPQKRGIGQQNRLKAIWKKAVDSIGCDAGESLEFEAKAMVEALEHIRETICATDAKIKEICLEFPEYSYLLTIPGFGPDVSSKVLGAIGNPFRFNSGKQVLKMAGMDLSANRSGKNSDSAIPVISKKGKADLRYALYQAAMIASIRDQYFIVYYTNKLRGREKEKGIKTKMRVKLAAKMLIIAWTLMKKKEVFYTPQAY

SEQ ID NO: 89494 - protein, 368 aa, unidentified
MAHDNTVFVGLDVHKDSIVAACSVGFGEITTLGNVGTLQRDVQRLCQRMQSKAPEVRFVYEAGPCGYVLQRKLQRAGFTCHVCAPSLIPRKAGDRVKTDRRDAEKLVRSLRAGDLSFVHVPDERDEAFRDLVRAWNGARLDLRQAKQRLKSFLLVHGVHYSGNADWKEPHRRWLARFSFAEPWSQMAFEEHRRSIEDRLAQCQRLEQLLRQEAPQWRLFPVVQALQALRGVQFIVAVGVIAEIGDLTRFDNPRKLMDWIGLVPSESSTGQRIRKGGITKAGNGLVRKLLVEAAWSYRYTAKVSPIIQRRHEGLPAEIIDRAWQAQLRLCRRFRRLQAKGKHRNTVVTAIARELVGFVWDIARRTQLAA

SEQ ID NO: 89495 - protein, 375 aa, unidentified
MIATTHPEISVSEPTLYVAFELGKKEWKLAMTAGFGVQPWLRTVASRDWLGVARAIAQGRARFGMATAAAVVSCYEAGRDGFWIHRALVERGIQNRVVDSASIEVNRRARRAKTDRLDALKLATMLVRVCYGEKRVWSEVRVPMVSDEAARQVSRERTALTQDQTRLVNQMRGWLATWGAALPSRRRGAWWTTVRDWAGAALPAEVQARLARADVRLETVEAQIAELDAQQHTAVRTAAPSSALRQLVQLKGVATTSASVLLDEGLVWRAFRNRRQIGGVLGFAPTPYDSGETEREQGISRAGNARLQAISIQLAWNWVRWQPHSALSQWYRANFGTGKRARRIGIVALARKLVIALWRYVTSGVVPAGAILKVE

SEQ ID NO: 89496 - protein, 416 aa, unidentified
MAVTRWVGRAVGLDVHREFCELAICEDGRVRSGGRVASTPEGLGVLARSLLPSDRVALEVTGSCWEVARILEPRVNRVVVVSPDDTGIASARAKTDRLDARQLASLLWKGELEAVWVPDERCRILRRRLARRGQLMRARTRSKNEIHASLQRRLQAKPPCSDLFGVKGRAWLAALQLPAEERESVDAAMRHIEFLDQELAAVERLIAQQALSWPEIRRLMSVPGVNLICAASFIAAVGNANRFLTSRKLVAYLGLDPRVKQSGEGPARSGRISKRGSPSARWALVETCWSVVLQPGPMRAFYQRTKARRGHGKAIVATARKLAVLFWCMLTRSEDYAHQQPTLTRKKLRRLEITAGAPKYTRRAVGSWSTNLLMRQAERELALQAEASYKRMVQDQRAGAPARKSGASVTPERAQV

SEQ ID NO: 89497 - protein, 369 aa, unidentified
MENNNTVVGLDVHKETITIAVLRPGQDRSDQSATFENQPSTIEKKVKELNRRHAPLEFVYEAGPGGFALYRQLTQLGHRCAVIAPAWMPMKPGDRVKTDRKDAEKLSWYWRMKDLKEVRVPTPEEEAVRDMLRVREDVLANQLRARQRLLKFLMRQGRVYRNGKNWTKAHSEWLRQQKFELEYLSKTYEANYRILAEIDTHLADLNREVELLAQDEKHKTAVGYLKCLKGVNTLSAMTLLAESGDFRRFKNARSYMRYTGMVSWENSSGSRVYRGGITKSGNAHIRRVLVQGAWTYQLRSLGSPTLAKRRKGCPVEVIHLARRADERLHLKFRRMIGRNKRSQVAVVAIARELAGFVWAIGQMIPSDQQ

SEQ ID NO: 89498 - protein, 351 aa, unidentified
MPSRSTVRAVATIGIDMGKNTLHMVGLDLYGAIVLREKVSRGRIVSRLANLPSCLIGIEAGMATHYVARELAALGHDVKQVPPTYAKPFRQGHKNDFRDALAVAEAVQRPTTRFVPPKSNEQLDLQALHRVRSRLVSQRTAVINQIRGFLLERGIIVRQGLRFLRQLLPDILAKRTDVLSPRMARIVSDLAGDWRQLDDRIETVTDEIETLAKNDDSCRRVMTVPGIGPIISSAMVAAIGNGSAFSRGRDYSAWLGLVPKQMSTGDRTILGRISKRGNSYLRMLFIQAARVILVRPANWPKHGFGAWLVRAIQRLHPNVLAAALANKLARIAWTVLAQERSYEARVTTAEA

SEQ ID NO: 89499 - protein, 428 aa, unidentified
MNAPLNNDNTQNDYAAFIAIDWADRQHVFSLQVAGQSTKETGTLEQKPEVIGPWVAKLRERFGGRLVAIAVEQSRGALIHALLSYDFIVIYPLHPSTVAKFREAFKSSGAKNDPLDTDQILQILTKHRDLLKALNPDTEETRLLARLVEDRRQAVDLRTGHIQALSAALKEYFPQLLELLNGNLASRLACDFLIKWPTFEAFQQAKPSTIKRFYYGHNIRSPRLIEKVLGLASTAQALTTDGAIVESGRRLSQMYAQLIQTLNPVIEAYDQRIEEVFHDHPEAHLFNQLPGAGAALAPRLLSFFGTDRSRYEAAGNVQSFCGIAPVTKSSGKTRVVYFRHACPKFARQTFHEFARLSVAKCQWARNYVDYYRGKGKKFHTIIRGLAFKWIRILFRCWKNQTPYNDTNYMEVLKKRGSIFATLHLEQNA

SEQ ID NO: 89500 - protein, 357 aa, unidentified
MIAMKYYTSTTKFNCGIDLHARQMYVCVMDREGRKLVHTNIRNNDFNYFLKRVAPYRHDLTVCAECMFGWYWLADACQGAGLPFVLAHALYLKAIHGGKNKNDRIDSEKLAHLLRTNLIPPAYVYPAEQRPLRALLRQRILYVWNRSQLLARIQSHQLAHNRPTLRQTRPNREPWEEKLLAQEDNPIRQLALQNDLALIGHYDTQLTTLEGQLQQLTRQHAPRDYTLLQTVPGIGEHLGLTLLYEIGDIARFPSVKDFLSYCRLVKGTVASAGKLKGLRGAKLGNAYLRWAFGEAAVIAKRDPVVIGPLAQRLEARLGNKFKANTVLAIKLARAVYFMLRDHTVFDPERLVAALTHK

SEQ ID NO: 89501 - protein, 370 aa, unidentified
MTVGADVGKESLFVSDPDGAGRIFSNSEPGIDKLLKALPPGSTVAMEATGNYHKLLADTAYGRGFRVIVFNPKDVRHYATSISPRAKTDRVDAMVIAKYALVRADHHAYHPAPGIMATLRSMLRTRGSLVANRTACKNREKQRHESASYLHSAIEGLTASIGAIDQELRPIVATLPQYTRLKEIPGFGPVVTAYILAMLASVKFACSDSFVAFVGLDIKVKQSGKKKGRWCLTKRGDPESRRLLYLAAQAACRGDGPFRDMYLRYQLRGLSKIAATNAVARKLARVAWAMYTKNENYCLERVSRQPRGKSKKTGTSSAVIGDPKQTLKDAARSKLVEIGAGGAQDAVSTPPSPAAHSTGKRKPKYICHAH

SEQ ID NO: 89502 - protein, 403 aa, unidentified
MVFVGIDWAEAHDDICVVDEQGHVLAKRRVPDGLEGVGKLHALVAEHAEDPAQVVVGIETDRGLLVGSLVAAGYQVYAINPLASSRYRDRHATSGAKSDSGDARVLADLVRTDRHKHRPLAGDSNLAEAVQILARAHQGLVWTRQRQANQLRNALREFYPGALAAFDDLDAAGAVAILERAPTPSRGRALSKAKIISALRQGGRERNLEAKAAQIQAQLRLPQLEVPALLSQAYGHSVAASVAVIKQLNLQIAALEQELAASFEMHPDAEIYLSLPGLGVVLGARAMAEFGDDRTRFLNPKARKSYAGTAPITKASGTRKVVLARIARNRRLADACYQWAFSALTRSKGARHRYDVLRARGQTHHQARRALGNRLVGILHGCLTNRQIYSEHLAWSPHLEVAA

SEQ ID NO: 89503 - protein, 369 aa, unidentified
MADYREAFVAFDVAKIKHAVAVADSGRAGEVRFLGEIENRPVTIERTIRKLAKRYDRLHVCFEAGPTGYGLYRQVGDLGHDCMVVAPALIPKRSGERIKTNRRDAVTLARLHRAGELSAVWVPDIVHEAVRDLVRARQAGAEDLRRKRQQLLSFLLRHGRICDAGGHWTLAHRRWLARQAFEHQAAQIVFQETSDAIEDAAQRLHRLDEQLAAIVETWSMKPVVEAYQAMRGASFLVAVIFAAEIGDVRRFETPPQLMAFLGLVPGERSTGDTVRRSGLTLAGNRRARRALIEAAWTYRYPARVSEPLRARLEGLPKAVRDIAWKAQVRLCARYRRLAAAGKKPPVIAAAIAREMAAFLWAIGREVAPS

SEQ ID NO: 89504 - protein, 355 aa, unidentified
MFSMATQARQVYGGVDTHGRAHHAAAIDGTGQVLGDREFTATPDGYRQLITWLKQMGDVVKIGIEGTGSYGAGLARAATAARIAIVEVDRPDRRARRRKGKSDPLDALAAARAALSGEAAGVPKTRSGPVEAIRALRVARRGAIKARTAAFNQLHGLIVSAPASLRTALGDLRGQQLAGRCAAFRIDEDQIGDPAVAAKAALRAVARRIIALQEEIRAADRRAAPLTAAVAPKTTAVFGVGAEVAGQMLVTAGDNPERLRSEAAFAHLCAAAPIPASSGRTDRHRLNRGGDRAANTALYMVVVTRMRRHQPTRDYVARRTAEGLSKTDIIRCLKRFAAREIYYAIRADFQAAHAT

SEQ ID NO: 89505 - protein, 351 aa, unidentified
MKKSSDRYYVGMDLHSNNVMIGIINQEGQRIKDKKLDCDLDKIDQYLRPYKSQIQGVVVESTFNWYWLVDGLMERSYPVELANPAQIEQYSGLKHGNDKSDAYFLAELKRLNILPTGYIYDSVLRPVRDLLRRRMSLVHQRTALILSFKSLYARTTGQTLALSRVKTMSVDEAKKLYEHPANCYIAKVQKEHIGGLDQSIKEIEKVVLLSAQEIPCYTKLTTIPGIGKILAMTITMEIGDISRFKKPGHFASYCRTVDARHLSNGKKKANNNAKCGNRYLSWAFVEAANFAKRSSTDCRQWFDRKAAKSCSVLATKALACKLAKAAWYIVTQNTPYDARRVFPEKASATQS

SEQ ID NO: 89506 - protein, 362 aa, unidentified
MLYLGCDVHKKYTTMSFITEDGEVADTSSFSNDIEELKNLLSQFPDEEFSAVLEAGLNWGLIYDMLESIEEVRNVSLAHPPKVKAIASAKIKTDKIDSKILGQLLRVDLIPRVWVPCKEIRILKDMVRFRAFVVKVKTMIKNRIHDILRKSHINPPEVKDIFGKYGNMWLEGIELSDPRMDKLLRYHLKMKGVFEEMEKELKKWINKEMKTNEDLELVKTIPGIRDVFGPIIVLEIDDINRFPDPAHLHSYSGLAPSTHSSGDTYYHGKLIKGNRWLRWAFIEGAHTSVRVSPYFRKHYNRVKGKAGSQAASVTSGRKLATIAYKVLKEQRPYTEEYKANKTKVGCPLSVLAEEFFSRSCQE

SEQ ID NO: 89507 - protein, 393 aa, unidentified
MICVGIDVAKDKHDCFILSSEGEVLADVFTIQNNAEGFDTLLQTIRRCVCPGDKIKVGLEATGHYSYNILGFLLDKGLDTYVINPLHTNLYRKSLSLRKTKTDRVDARTIAAMLMSDVDLKSYTDTAYHNEELKSLTRYRFDKVRERAKLKQSVSRLVTILFPELEKLVPSLHMASVYALLSEFPGAKQVAGAHLTHLKAVLYDASKGRYGRDMATTLREAARCSVGSVMPTKSLELQHTIRLIRELDAEIEDIEAAIQSMMDEMQSPIMAIPGIGVRMGAMILAEIGDFSRFDSPDKILAYAGMSPSTYQSGQLSLSGAYSHMEKRGSRYLRYALYNATKYVCLWDPVFAAYLAKKRTEGKHYNVALSHAAKKLVRLIYAMEKSRQSYRNAA

SEQ ID NO: 89508 - protein, 350 aa, unidentified
MRFYTGQHRFYCGIDLHARTMYVCILDSAGEIVLERNLATTPDAFLEAIAPYRGDLVVACECLFTWYWLADLCAKEKIAFVLGHALYMKAIHGGKAKNDRIDAHKIAVLLRGGMLPQAYVYPPGMRETRDLLRRRLHLVRKRGQLLAHLQNLRHAYNRGAFAKRIAYPSNRDGVVAHFAGEPMVQANAALDLSLLDHYDKLLVDLELRLVRQAKREAPRGFHLLRSIPGIGKVLAMTIVYELHDVHRFERVQQFASYARLVKCAKESAGKRKGTSGAKMGNVHLKWAFSEAAVLFVRHSAEAKALLARLTQRHGKGKALSILAHKIGRAAYYVLVREKPFDAAKFFAHAR

SEQ ID NO: 89509 - protein, 426 aa, unidentified
MPYRIAGIDVHKKMLAVVVADVEVEGNYQFERRRFGSNPEQLRLLAEWLLEQAVEEVVMESTAQYWKPVWGALERYWKPICQKREGAGPMSGALHLAQAQSNRGRRGRKRDFPDAERLVKRLVAQELTLSFVPDAEQRLWRTVMRGKYQLTRNHARVQNRLEALLEEAHIKLSSLVSDLLGASARRMLKALAEGETNPVALAALADQRLRATPAQLCDALGACTELNPVYRRLLKMALEELQFIEQQIGKLDQEMATLLSRHQDAVERLAEVPGLGADSAQQIIAEVGATAATFPSAKNLSSWVGACPGDEESAEVNKSHRSPKGNRHMRRILNQAANAAVKHKGSIFDIVYRRQVPRMGHKQSIGAIGHRLCRLIWLILHQGVRYDERGPAVSRNSRQRRTAKMIRELRLLGYRIEPTVQLSNPA

SEQ ID NO: 89510 - protein, 378 aa, unidentified
MKTTRRSNSDKVMVRRSSKPKSLKERQMNQHKYIGMDVHKATTVNAVRDSKGEVIAEGIIQTKSATILDSIRGQRGILHVVFEEGTHAAWLYDLIRPHVASVVVCDTRKIPAQGNKNDRIDAKRLAELLRIGALMPVYHGEKSTRAVKELSRSYIGIIGDCTRIKNRLKSIFRGRGIDCSGSAVYNPEERKSWLRQLKDEAVRARADSLWDQLKFLEPLVEKAAKDLMVEARKHRADMKILQSIPGIGQFRAAIILGIVGTPHRFRTRKQFWTYSGLAVVTKTSAEYEVVNGRLVRSNKRPLVRGLNRNYNRALKEVFKGAAQSAASGPWKSRFEAMVANGAKESSARLTLARKIAAITLALWKRGERYDEKKLKHAA

SEQ ID NO: 89511 - protein, 420 aa, unidentified
MSEVMIGIDPHKGSHTAVAIGAGEEPLGELRVDACPSQAGTLLGWAAAWPQRTWAVEGAAGLGHLLAQQLVAAGEQVLDVPPKLAARVRLLQAGDTNKNDPNDAFSVAVAALRAPARRPVLAEGHAAVLKIWAKRHRDLARARNQAACRLHAVLCELVPGGHPTEISAAQAARLLEQVRPSDAVAEARCELAAEFLTDIRRLDAQRRECGKKLAAAVRASGTSLTGIFGVGPVIAGTVIGDVRQVFRFPDRGHFAACNGTAPVEVSSGGRKVYRLSLRGNRRLNHAIHMAAITQIRHKHSQGRAYYERKLTEGKTHKEALRCLKRRISDAIYAALVADARQAAAATRPQEGPGGQPGNLSVSRAAGSHPAHRLFGQATPGPATTIRPGATAGRAPAQPNRALRRRAAHSPAASKKPRTTT

SEQ ID NO: 89512 - protein, 416 aa, unidentified
MNNLLLSAFERYIAVDLHRKYVVVGGVNSRQEVVLPPRRVELDAWPRWAQANLRKTDVLVVESTSNAWDFYDQVEPLVGRAVVANPRLVKLIASARVKTDKVDTLALARLLAANLIPEVWVPPLIVRQVRGLLAHRRRLVETRTMSSNRLQSVLQRHNLPAPRGGPFSTANRTWWETLKISLTEKLRVRQDLDTLAHLDKHIAEIEDEVYRLSTTEPWAAQVAFIIQLPGFSVLLAMTILAAIGDISRFLHPKQLVGYSGLGAGIHSSGQTHRSGHITKTGRRELRWALVEAAWSAVRYSPHWQAEFKRLSSRMPENVAIVAIARKLLVVIWHVLTQQVADKHADQQRVAAKLMRWSWGLTQQQRGGLSTRLFVRRQLMRLQLAHDLTHFTYGGMPRRIASVDELLAACPEWAASG

SEQ ID NO: 89513 - protein, 435 aa, unidentified
MKVLYERVAGIDVHKDMVKVAIRSPGEKPWTRKTEILEFRTFYGVLQEMARELRRRGVTHVVMEASGVYTEPVYYALAEQDFTEVAVINPAHAKALRGHKTDAKDCARLAELFECGLLRGSYIPPAELKEVRDLTRYRMKTVQARTSEIQRLGKALESAGIKLGSVASSITGTSSTAMIEALIDGERRGGVLADLAIGRMRAAGKLADLSMALAGRFTEHHALLCRLHLDRIALFDDAVDGLDKRITGKAARWQREAGLLTSVPGFGDVVAQAWLGEIGPAPHRHFATHEKLASWVTLCPGNNISARKRKHGRTGDAGTYIKPMLVQAAWAAIRARGRLQARYNRLVRRFGGDKNPGAKKKAITAIAHTLLKIAYQVLKSGTPYQEPGADFYTRRESPEQKQAWLERQLLKLHPGCTVTVTVTVSPPEAALPAGT

SEQ ID NO: 89514 - protein, 328 aa, unidentified
MRMYAALDVHKVYSQIAVEDEDGVLLREERLENDPDMIEKFSDSLPPDTSMVLESSSSWYWMYSILSKRHKVILSNPIKTKAIASAKVKTDRVDALTLVNLLRGGYIPECYVPPKRIMELRELVRYRANLVRMRSNVKNYIHAYLLMNNVRISAKPFTKEFIDEVRKIEEPRVKGYLRLIDSLNDEMHEASRIICERASNDEDAKLLMTIPGISFFSALLIGSEIGDVSRFPDAYHLISYAGLAPSTHSSGGTTYHGRITKAGSPELRWILNQCVRVYIREEPDSEIAAFYNRLRKKKGDSKAIIAASAKLLKIVYWVLKEKREYYHG

SEQ ID NO: 89515 - protein, 363 aa, unidentified
MKTILALDLGKFKTVSCLLTEDHSSIPVFKTIMTNPKTFEQFLIDVKPSFLVLEACGVSGWVVDLARKLGVEVLVAHPGGEAWQWGKVKRKTDKDDALKLAQMARNNEIESVHVPSPEHRQFQQLVRYRKKLQSQATATQNAIRSNLMAQGEECAAGKIAWSKSYIENDLGKLRKPFEECTVSEYWRGTLDVQLTHLVATLKLMRCIEKQLALISKPDPRIEIVQSIPGVGIIGSQVIVAHIDDAKRFESARKVSSYAGLAPKKWQSGKMDRQNRISRRGPRLLRSVLTEVAWCAIRFNPYFKDLYDRVRGGSKSRKKQAIIAVARKILVTAWAMLRDGKNWSPRDAKLIAQSAPTLPSTSTA

SEQ ID NO: 89516 - protein, 419 aa, unidentified
MERSRSKVCGIDIHKRFLVATILERNGPKKTEKFQNTLEQLLKLKEWIITEQCEAVAFESTGEYWVSLYDVLQGYVEIIVANSYHIKWIPGKKTDTIDSEWIAELALNDLISPSRILSKEKRDIRALTRLREKLVNERTDHKNRVHKVLDSACIRLSGYFTDLFGKSGLRILKCILSGVPPEEVVRKLPKRLHTKSDAILNAVRTQLSAHQLIQLQTSVTMIDLLTDKIKDLEHTILNELRKDRRKLQILMSVPGIGTIGATTLLAEIGDVNDFSSPDKLTKWVGITPRVYQSADKLHTGSITKQGSKHIRWILVEIAHSCIRTRNTALRIFFDRIFNRSGYKKAIVALARKILKLVWHLLTNDELYQEKNTLLTKSSRLPNPHETKSFSVSTAIELLVKAGFQIIEGDDHPTKRDLGT

SEQ ID NO: 89517 - protein, 337 aa, unidentified
MEAIKMEGIKLYAGLDVHKEFIVGTIKDEKGNLVRFQRVTTNEDGAKQLFYGLNNVNAVFEAGRNWTYINSLIKPFCNEVIMAHPLKVKAIASARIKTDSIDSNILSDLLRADLIPQSNMPSQNIVDLREILRHRNFMVQMTTQLKNKCHAILAREGKSFSTPWGIRSNSRMSKIMTNSIYQRELNDIIEQIDFLKKKIDTVNGDIKKKEMDYPEVDLLKSIPGISTYSALLILAEIDNISRFPSPNKLAAYAGLVPSTYQSGNSCYQGKITKQGSKALRWILIQCTKTSIKKKHRLQTFYLRIKQKKGGQKATVATARKMLTTIWHLLVKNEYYIP

SEQ ID NO: 89518 - protein, 464 aa, unidentified
MRAGKQLWRNRKEKKEWGRRLQSEDPGLEVVHPHAAGIDVGNSTHYVAVRPDRDPEPVRRFECFTADLHRLADWLQSCGVKTVAMQSTGVYWIPLYEILEEHGLEVYLVNARHTKNLPGRKTDVQESQWLLKLHTYGLLNNSFQPVSEIRVLRTYWRQRGEHVRGAATCIQRMQKALTQMNVQLANVISDISGLTGQAIIRAIVAGERNPLKLAMLSDPRVHASHEEIAKSLEGNWRPELLFVLHQELDMYDTYQKRIAECDQRLQKHLASFTRPLPIQPPTQKLKTKKPAAKNAPRFDLSSELQRVTGVDLTRIDGIDVMVAQTLLSEVGLDMSRWTTESHFASWLGLCPDNRISGDKVLSRGTRRVVNRAATALRQAANTLMRSRSYLGAQYRRLRTKLGAPKAITAMAHRLARLVYRMLKYGQTYVDKGTEYYEERFRQQQIQLLRKRAAKLGLQVAEIHA

SEQ ID NO: 89519 - protein, 339 aa, unidentified
MGLYCGIDLHSNNGVYAVTDGEDRLLFRRRLPNDLAVVLRTLEPFREQLEAVAVESTYNWYWLVDGLQAHGYPMRLANPAKMEQYEGLKQTDDNTDASFLAHLLRLGILPQGYIYPAEDRPVRDLLRRRMLLVHQRTALILSLQGMFCREIGSTPSWRKIVQEDAEALCQRFGSQQELGFIATEQVEVIRFLARKIRLFEKRALEKATLRTSYEKLLTMPGVGKVLGLTIMFETGQISRFAKVGNYTSYCRGVSAKRLSNGKKKGENNRKSGNAYLAWAFVEAAHHAMRVCPQALKFYERKKAKTNGAVATKALASKWSKAAYYILRRQETFDLKRVFG

SEQ ID NO: 89520 - protein, 328 aa, unidentified
MFYLGMDVAKAKLDCCLLLDEATGRRKTKAVNNTRPGIVELLALVAKQNISPQELHVVMEATGVYHEQAALALADAGVTVSIVNPAQVKDFGRGLAVRTKTDGVDSFVLARYGALLKPVAWQPPPPEARMLQALLARREAIAQDMQRERNRQEKAAATDTPEPIRQSLADSIGFLSRQLAQLQQDIDRHIDRHPGLKHDLALLQTIPAVGPKVGSNMLSVMHSHDFGSAEQLAAYLGLVPVERQSGSSVMGRARLSKAGPARIRAVLYMAAVVATKYNPHIKAVYERLLARGKSRMSALGAAMRKLVHLCFGVIKTQTPYQPNYVKIA

SEQ ID NO: 89521 - protein, 385 aa, unidentified
MQASNVCTPTVDHFGTILVAIELSRQSWLVTMHSPDRDRISRHKLPGGDHAGLLALIERVQERAARALGSVPAVVSCYEAGYDGFWLHRRLMAAGITNHVFDPASIAVEQRARRAKTDRIDGELLLRTLMAHWRGEPRVVRIVRVPSAEQEDARRDTRERQRLITEQTAHTNRIKALLRLLGMAVGNPRRRDWLIWLAAQRDWQGQPVPPRLAAELEREHARLMLVREQLEALSQAAVGADAPAAAAQMARRSALLLRLKGLGPVFAATLTNEVFYKDFRNRREVAGYCGLAPSPWRSGATNHEQGISKAGNPRARHKAIELAWLWLRHQPDSALSQWFRERTLNGSGRIKRIAIVALARKLIAALWRYLTTGLVPEHAVLKAKA

SEQ ID NO: 89522 - protein, 349 aa, unidentified
MKIIGCDYHPSWQQIAWVDTETGEMGERKLMHADGEAERFYRELAAPALLGMEATGNSHWFVDLVAEMGHQVLIGDAAAIRAKQVRKQKTDRRDAAHILDLVLKNDFPKIWTPSIAQRDQRQLLIHRWGLVRLRARAKNELQHLAMNKGVQKKARLWSKTGQKLLRELPLQYWAGQRRENLLRLMTIFDEQIAVLDLAVEKAAQESEMARLLMTQPGVGPITSLAFVLTMGDVTRFQRGKQVASYLGLIPCEYTTGGRQRLGAISKQGNRFLRMLLVEAAHSVIRCDPGFRKQYLHHCHKKPKNVAKVAVARKLAVRLYWMLRTNTAYPEIVRMESSSRVALVGASARP

SEQ ID NO: 89523 - protein, 385 aa, unidentified
MTATTRPVDPTARHDTLHLSLELGEDGWTLSFTSGFGEPVLRRRIRSRDRTALLREIDAMKERMGLARECRAVSCYEAGREGFWLHRFLSAHGIENLVVDSSSIEVSRRRRRAKTDRLDGESLLDLLLRHRAGSRKKVWSVVRVPTVEQEDRRHLHRELQSAKRDRTRLTNRIKGLLANHGLTLDLKKDVPAQLAALRQWDGSALPAGLQARLAREWERVSFCTVLIERLEAERRELLREGDDPVLEKVRQLNLLRGIGTNSAWLYGMELFGWRQFRNRKEIGAIVGLAPTPHASGMQEREQGMSKAGNRHVRAMAIEIAWGWLRFQPRSELSQWYQRRFGSGSTRLRKIGIVALARKLLIALWRYLETGVVPEGAELKTDVRVR

SEQ ID NO: 89524 - protein, 343 aa, unidentified
MDHFAGLDVSVKDTSICIVDDTGRITREVKVASEPGALLAVLMNASHRFKRIGLEAGPLSQWLFSALAEAGLPVICVETRHMRAVLKAQINKTDRNDARGIAQMMRVGLYRPVHVKTLRSQKLRMLLTHRKLLQSKAIAVENDLRATLRNFGLKVGMVGTARFEARIRELVENVADLVVLVEPLLVVRRVVREQIGILHRRLLAIVRDDEVCRRLMTVPGVGPVVALTYRATVDVPARFRKSKSVGAVFGLTCSRDQSGERDRPGAISRCGDEMMRAMLYEAAQAMLLRSAKWSWLKAWAMQIARRRGMKRAIVALARRLAVILHRIWVDGTEFRWTREAAAA

SEQ ID NO: 89525 - protein, 313 aa, unidentified
MARITVGIDISKAHLDVYVYPSSDRFRVSYDDAGVAQLIERLKPCRDDGTLILEATGGLEVAITAALGSAGFQACVVNPRQVRDFARALGRLAKTDRIDAEILALFGDRVRPEPRPLPDAALRALEAQVARRRQLIDMLTAEGNRLGRAADGDVRKQIQRHIRWLERELKGVDTDLSDTIRRTPLWRAKDKLLRSVPGVGRVTSLTLLTDFPQLGTLQGKQAAALGGLAPFNVDSGSFSGRRRIWGGRAEVRTVLYMAALSATRWNPPIRRFYLRLVNAGKAKKVALIACARKLLVILNAILRDQQPWSVSEA

SEQ ID NO: 89526 - protein, 349 aa, unidentified
MITLGIDAHKRTHTVVAVDPLGRQLGTKTTAATTTADHLAIIQWADQFGAERCWAVEDCRHLSRQLERDMLAAGERIVRVPPKLMAHSRDSARTYGKSDPIDALAVARAALREPDLPTAHLDDAARELRLLVVHREDLVAERTRHINRLRWHLHEIDPTWDPDLRALTTLKHQNIAARRLASLDTVIARIAADLVERIRQLTSNINELRAELEHRTETAAPNLRRIHGIGPLASAKLIGEVAGIGRFRSRHAFARHNGTAPTPVWSGNNDRHRLSRVGNRQLNAAIHRAALTQARSHADAVTFLNRRAEQGATRKEAIRSLKRRLSDVIYRAMLADAGLTRNGHHEGAA

SEQ ID NO: 89527 - protein, 348 aa, unidentified
MTLVGCDLHSRKQQVAVLVTDTGEVLEQELLHEGDAVERFYRALPRPVTVGIEATGYTLWFHAVMQKLGHTLLVGEAAKIRAMVVRKTKTDRRDAQHLLDLLKHERFPTVWMPDPTTRDLRALIAHRVRLVRMRTMVKNGLHAIALNQRVALGPSLWTKRGLAQLQALSLPPHTANRRADSLELLTWLTTHIDQLDAQIAEAAAADARAQRLLTHPGVGPLTALITVLVLGPAARFPTSKHVGLAPAIHSSADKYHLGKITKQGNALLRWILGQAAPLAARADGELRRAYFAVLHRRGRPKAKVALARKLLVRLYIMLRDQIDYEEFRRRGRVRRSRIAVNPVSATTM

SEQ ID NO: 89528 - protein, 374 aa, unidentified
MTGEVILQPVAFSNNAQGFEFLISQIALYPVDSVLIGMEDTGHYHFALLRFLLQKNYNVALINPKTTDLNRRMDGGITKNDKLDTLNICDILSSNKLKKPYRLTSSKKFDLYEQKQLTRLHHSLKEQINVLSNRLQKCIDLVFPEYNSLFKSKYGKVYMSILKQFGSAKAIAQADIRTLRKCFDISGRGNRISLTAEKLKESAKTSVGISSLADEMQIKHLIAHIELLNDQLKEIDKKIEEFSTDLNSPIISVPGISHFSGTSILAEYGDIFNYSKPSKIIKAAGVAPFHYESSQYEAKHSAITKQGSSYLRKTLYQVIVPVIRFNKVFKDYYDLKRSQGKSHRCAQGHCIRKLLRVIYHLVTTNQQFDASLLR

SEQ ID NO: 89529 - protein, 389 aa, unidentified
MLLVGIDISKYKHDCCIINSDGVVIRESFSFKNDADGFALFLYTLNSLPDSEDIKIGFESTAHYALNLKLFLEKAHYAFIEFNPVLLAKFNKSQSLKITKTDAIDCYSIARWLGKVEFKPHTSGFYHTYSFKSLTRLRETLVKQRSFYLIKITNVLDVIFPEFKPFFNNRLGATALYLLENYGSSEKISRMNSASYDYLRKLSCGKFSIQKFIKLKELATNTVGESNEMFLMQLNSLLSLYRQCVSEIESIEFQITKLINNINPHYMTIPGIGPLSAAGIYAEFGDLSKFNLPAQMLSFAGIEPGYYQSSTSEHGGHMVKRGSSHLRYTLINLCIPLIQYNYVFAAYYDKKRSEGKPHRVACSHLVKKLIRVIYHFEMNDIDFDSSKLC

SEQ ID NO: 89530 - protein, 406 aa, unidentified
MTEVMIGVDPRKGSHTAVAIGVAEEPLGKLRVRATAAQAQRLVAWAAAWPERTWAVEGAGGLGHLLARQLVAAGERVLDVQPKLGARVRLLATGASNKNDPNDALSVAVAALRSPARRQVTADDHGAVLRVWSRRHRDLSRAKNQAACRLHAVLCELVPGGVPDVITAAQAARILERGTPSGAAGQARRELAAELLDDMRHLDARIRESSKKLAVAVKASGTSLTGIFGVGPFIAATVIGDAGDVTRFASRDHFAACNGTAPIEVSSGNRKTCRLSLRGNRRVNHAIHMAAITQIRHSHSDGRAYYDKKIAEGKTHKEALRSLKRRISDALYARLRADARQAAGNAQAGPGGQPGNDSDSSAAGSHPGHRLFGQATPEPSPTLRAGTPATRTVSLKPASKKPRRSP

SEQ ID NO: 89531 - protein, 432 aa, unidentified
MDIVHPRVAGIDVHKKVIWVAVRLPGLEPGQRAVTVRRFKAFWRSLQKMAGWLAELGVTDAAMESTGVCWWPVYHALAQAGIEVCVCNAAHMRNVPGRKTDLRDCQWIAELHEYGLLRPSFIPDAQVAALRQRTRYRKKLIEQRTSEGQRLAKVLEDAGIKIDSVASDMLGKSGRAMIEALIAGERDPARLAGLALGVLRRKTDELQMACDGRFTSGHGQMCRLHLDAYDHLTAQIAELDALVAEAAAPFQAIIARLVTIPGIGRRIAEIIIAETGGDMTRFATAARLAAWAGLAPGDNESAGKRKKAPARQGNRQLRTAMVEAAWATWRTTTRPGARFRRLARQFGKGNEKKAAVAVAHTLLNIAWAVMRYDSDYIDAGADYYERRDQRNREHLVRYHQNALARLGLQVIITQPGDGAPPPPSPPNPGQAA

SEQ ID NO: 89532 - protein, 338 aa, unidentified
MIVIGLDVHKQSVTAVAIDEAGRPLDEKVVMVGSDELLGWAAALSDQRLWAVEDCRQLTRWLERQLLAAGEELVRVPPKLTVPERRAGRTRGKSDPIDALAIARAALREPDLSRPRADEQVFRDLKLLVDHRDDLVDARRRAQQRLRWHLHALDPTFVVPLRMLGRASHLERVSRWLARQEHEMQVRLARELVAACRSLNRKIAELDQELAQRTAVIAPALLELPGCAAVTAAKLLAEIGPIDRFKTDAQLARHSGVAPLEASSGRSQRHRLDRGGNRQLNAALYRIAITQARYHPAARAYLERKQAEGKSRREAIRCLKRQLVRVVFNTLKASPVLT

SEQ ID NO: 89533 - protein, 473 aa, unidentified
MSKGSGTTRGDRRRNARRERLREMLPRDGAVIGIDLAEDKQAIAVVDHDVRVLARKTVKVKAFRLGEALDWAVGQARAKGFTHVTVACEPTGPRWLQVQRLCAERGLPLVCIQPLMSHIAREQQDYTTHKTDESDCVLIARLAVELHCYIPEELDETWAHLRHLGRRRQQLITSATASAQRIRDFLSVAWPTVTETCAQPLESVTWLAALQVVTARCGADPGRLAAMGVEAFTALVRSAVPGWGGKKGWGTICGRIFAALTSTEGVVVSSRRGLLRRVADELGDLQRARAQLRAVEADMVAVLAELGLSRLADIPALSAVGAAAILAETGDPRRYDSSSSLVKHAGMSPSDNASGAFYGEAHISRRGRPGLRLTVWRAVWPMLRYNPVMAAKYQAMTSAADDAAQAADTQADAGSRQASAAAAAARARRARARVACAASLLRWIYSLVVHDTSWDPGIASGPASSQHTPAEAA

SEQ ID NO: 89534 - protein, 404 aa, unidentified
MYYVGIDVAKEKHYICILDDTRELACKPFWIYSDILGLRNLVKRLAEISLNNDDFIIGVESTGAFSENLYEYITDADYKVILLNSYQTAKYRDFSTMKKIKNDSIDALVIAELLASDKYKESYISNDDYQSLKVLGRLRKSLSDKIKTIQREISTVMATVNPEITKVFPNIFTKTALAIIKAYPTAVDIQKATPKKLTKIFRHIKGNNFNDEKAKFLIELSKSSIYGGRAHESRALMIRTNIRILELLCQERDEIEVQINTLLYSKIETVDTSIENIKTIPGVSEKTISALLGECGDIKRFTSAKAFIAYLGLYPTQYQSGNSLSVGRLAKRGIPIAKHALYMAAIASVRHNSELNKLFRDKLSLGKSKKEALIIISKKLATIIYSLFKYNQPYQARRVFIPHR

SEQ ID NO: 89535 - protein, 396 aa, unidentified
MFYVGIDVSKDKSDICIKNENGNDLIHRFKITNKKADLEMFYEIIESIKSKTPGNSDVVIGMEATGIYSLPLYSALIRDGHKVKLYNPIQTNGFRKMNIRKTKTDPIDSAIIADMLRHSEPPQVSEIQDFHLFQLRELVRIRHRLIEKQSLCKVQLVRNIDAIWPDYESVMKRVFGATSLAILKKYSVPSKLRNESFEQFYELVQKKSRSKISRSKAEKLYTHAGNVLTIPELDSVISIEIKTLITQLELHDEQIRSVESNINQMMKQIDTKIMSIPGIANILGPTILGEIGNVNRFSNAKKLIAFAGLDPVVSQSGRFESKGGRISKRGSPLLRHALFLAANTAIQNDDNLKRFYVKKRSEGKHHFSALNAVAAKLLRIVYWVLKNKKEYQIQLS

SEQ ID NO: 89536 - protein, 368 aa, unidentified
MKKKKRMDLEIVNPNAAGIDIGSRSHYVAVGQGSDQVKEFGVYAEDHLTLIEWLQENEITTIAMESTGNYWQNLFTALQNAGFEVLLANGKFTKNIKGKKTDVLDCQWIQKLHSLGLLSGSFLPDHTTEQLRTYCRHRTNLLDTAASTSKKMSKYLRLMNLRLDVVVNDICGLTGLSIISLICKGEKDPQKLAALRNGNCKKSEEEIAKALQSNGRKDFLFALKQEFQIYHETQKKIEQCDKMIERFMNAYFKTNPELKKLKAPKKPYKRITKNTPKNIDLNQIAYKYFGGVDLMSIEGVSHATVLSIMSEIGPPGFKKFETGKQFASWLRLAPNNKVSGGRILVAKYQKEVIDSKSPSGMQQMSLVI

SEQ ID NO: 89537 - protein, 454 aa, unidentified
MGTPPRRSYEKRLGDVDERILSCSREEPLVYLTALSAATSRPITVACDVSAYKLSLFCSDLSRPGAVAEWEIDNGTEAITATLLMIAERARACGFEQLRVVVEPTGIYHRLLLRIARSLGLLTGMVDAGHVKKMRAVLFGDDGKTDARDTRAIEAVAAQGRLIPDRTKSEVYELLAHWGRLYQQAEAAMIDAKSRVHRAMTLLFPDFDFTTDFLYGSSGQAIMRCYGLEPHTIAASDLTRIYKRLRKVSNIRRSSVVRLLAQARQTVAAVTKSRVTELQARELAMAWEDVELAVRRRDAARIELEALYDQARALDPNLPNTQGTPISKAAMARLLGEAGPLSDYKSWRQVLRMGGLNLRERKSGTYVGNTKIARTGRPLIRSIVNQMALPLVRQNRLYGTYYHTKTGVQKMPGKKAMTAVGRKIVKMIWGWYRSGAAFDIGRVFTCQGDLRRAA

SEQ ID NO: 89538 - protein, 412 aa, unidentified
MEPIYTSCCGLDVHKKSIQACVRRIGKDGKIQEEIRSFGTMTQDIRDLADWLFEQEVTHVAMESTGVYWKPIYNILEGRFNILLVNARHVKHVPGRKTDVKDSQWIAHLLQSGLLKGSFIPDRAQRELRDLTRHRTKLVDQRASVVNRVHKVLEDANIKLGAVATDIMGKSGKDMIRALIEGEKDNAEMAELARRQLRGKIPQLRLALEGHVTDHHRFMLGELMDQLDYLDGQIDRFSQRIEEISRPFAEAIEEVARLPGFEKRAAENVIAEIGINMDQFPSAAHLNSWAGICSGSNESAGKRKSGKTTKGSKWLRSTLAQAAWAASRKKNSYFRAQYGRLAGRRGKKRAVIAVAHSLLTVIYYVLRDHVDYKDLGQDYFDKLNSKRIVPYLVNRLKNLGYEVNLVPLESAA

SEQ ID NO: 89539 - protein, 310 aa, unidentified
MDSIYVGIDVSKDRLDVHVLPSGQAFAVARDGKGLNELIERLGSIRPQLIAVEATGGFETIVAAAIAGAHLPLAVVNPAQVRHFAQALGKRAKTDPIDAAVIARFADAVKPEPRELPDEAARLLSELVGRRAQVIEMLVAERQREKRASAVRVRKSLARHIAALEKELPEIDRDIDTMVRGSPVWRETEDLLISFPGVANTIARNVMADVPELGRLTRREIASLVGIAPFTRQSGQWKGKSMIAGGRPFARSAIFMAALSAIRCNPVLREFYKRLLARGKPKMVALIAVARKILTILNAMVRDKKQWQPA

SEQ ID NO: 89540 - protein, 306 aa, unidentified
MKIIGCDFHPSYQQIAMLDSVTGEMMEKALSHERKEEVQAFYAGLEGAVRVGIEASGQSQWFERMLAELGHQVWIGDAAKIRASCERKQKTDRRDAELLLKLLVENRFPRIWVPTAAERDGRQLLLHRHKLVRMRTQVKNQLQALALNQGVQRKWKLWSESGRKQLESLPLLPWANRRRAELLQLFDHLEASIRELDRVVAEQAYQRREARRLMTHPGVGPVTALAFTLTMGPAERFGRGKQVASYLGLIPSEHSSGGHPQRLGQSANRAVRFCAGCWWKRRRVRCVMSRRCVVRINDWPSGSVVR

SEQ ID NO: 89541 - protein, 402 aa, unidentified
MNSVGIDISKGRSTVAVMRPFGEVVISPFEVRHTDSELSELARQLKSLDGETRVVMEATGNYHAPVAKLLHDAGLYVSVVNAKLVHGYGNNDLRRVKTDRKDAVKLANYGLDRWLTLPRYVPEEDTRLLLKNCYRQYRQYSKVQTVLKNNLISLLDTVFPNANRLFSSQIRGDGSEKWVDFVAEFWHCHCVSEKSEKAFTNKYQRWCKKHGYNFSEAKAHTIHCEASGHIGVLPKSETTKLLVEQAVAQLRATSAALTALKREMLTLAAQLPEYPVVMGMFGVGPTLGPQLIAEIGDVRRFYSKKALVAYAGLDAPPNDSGDVTGRHKSMSKIGASSLRRTLFLVMSIYLQNAPLDEPVYQFMDRKRAEGKPYRVYMMASANKFLRIYYATVKAYLESLEQV

SEQ ID NO: 89542 - protein, 325 aa, unidentified
MEVYGIDLSKEKFDVSFLDVGKEKKKIIRNNFNGICNFLKQVKDDCILVAEHTGSYGDLLVHLCYRYGIKIALVSGYSVKHSLGLQRGKSDSKDAYRIRKYGERFAEELRLEEPKSESIKELKELYTLREQLSKNRTSLLLGQKARMIGPSQSIVAYRSCKRAIMNLENEISSVEKEIEKVVQSDSELRDNYKLVTSIKGIGPVIANNLIIKTENFKRISTAKKAAAFAGVCPYPNSSGKMSMKSKTSHMADKKLKSLLFLAAKTAVAHNKEYSLYAERKKLEGKPYFLIMNNVSNKMLRTVYGVIQSRKPYDMNHICIDPRKMS

SEQ ID NO: 89543 - protein, 428 aa, unidentified
MNTTTTTTADLTPAPAPLPAPAAWIGLDWGHHEHAFALQTATGATEEGTLTQSAETLHAWLQALAQRFGGRPVAVGLETSRGAVVAALLQYPWITIYPINPVTSARYRKTFTPSGASDDLPDARVLLELVRDHTAKLRPLEPEDSQTVKLAGLVEARRDLVDRRTQVLNQITSLLRGYYPQALELVGDLDTALAVDFLRRWPDLLTLKAVKPGVLKRFYYTHHLRRPELLEQRLALVRQAVVLTPDDARVSVAVLQLRCLLDQLRALRQHVAIFDQEIKTVFAAHPEAALFRELPGAGPALAPRLCVAFGTIRTLYPDPASFQKHAGVAPVREKSGRSCWTHWRWQAPVFLRQSLVEWAGLTVVYSAWAKVYYQRMKAKGKGHHVILRSLAFKWIRVLWKCWQTRTPYDEAVYLRQLARRKSPNAVAA

SEQ ID NO: 89544 - protein, 410 aa, unidentified
MGLYCGIDWASDHHDVAVVNDDGQVLARGRVGNDAAGFAQALTLLADAGDTANDPIPVGIETDRGLWIAALRATGRVIYPINPLAASRYRARYAVSGAKSDATDAVLLANIVRTDPDAHRPLPADTELAQAIRVLARAQQDAVWARQQIGNQLRDLLKDFYPAAIIAFAGLPSGGLARPDARTILAAAPTPGQAAKLTPARLRRLLIKAGRRRDLDRDVERLRAVFTDTHLHQPPVLENAMGIQLTALLRQFEAANAAADELAEAAIAHFEQHPDAEIITSFPGLGNLAGARVLAEIGDDRTRFTDARGLKAFAGSAPITRASGKKTIVRHRHIKNRRLATVGSIWALASLRSSPGARRHYDARRAAGDWNRQAQRHLFNKFLGQLHHCLQTGQPYNEHRAFPPPLPLAA

SEQ ID NO: 89545 - protein, 346 aa, unidentified
MNETAMHWIGIDVAKGTFDAAVASPGQHANAATFKRLPVASFDRTPEGVQQFMGWLRKHVPAQHPLPVRAVMEATGVYSIELAALLCKACPEVRPAIANPERTSAFRKSLGLRNKTDRMDARALAFFGLERQPDAYEPLSPVQAELRSLSRCRDGLIETQKAHENQLAQNAPSPLVRKLLKRIIATTRAAVETIEEDMKRVIRSDEGLQHDYDLLTSIPGVGFVTASVVLAEFGDLRRFGCGRQIGAHAGVTAFRHDSGEEERPGHMSKKGNAYVRKILYMSAISASIYNPHMRVTYRRLTASGKEPMVALGALMRKLLVLMRAIIVSGKPFDPCGKPRERIAQHA

SEQ ID NO: 89546 - protein, 374 aa, unidentified
MRKSSKICVGMDVHKESIDITLAEVGGEVRRWGQIGGDRAALAKAVRKLEALGGELHFVYEAGPCGFWIERWVRARGHECWVVSPSAVPQKSGERIKTDRRDSEKLARLRRAGELVPIYVPAEQDEAIRDLVRTRDDAIIAQRKARQQLKALLLRNEIRYVGKSSWTAAHRRWLAELKLPQPAQQIAFEEYLDAVEVASTRVERLTRAIETSTEGWRLAPVVAALQVLRGVQFVHAVTLASELGDFVRFECPRQLMAYLGLVPSENSTGERRRQGAITKTGNHFARRALIEAAWAYQHPARVTRIIARRHSGLPKHARDIAWKAQLRLCARFRRLCARKLNKNKVVVAVARELSGFVWAIARGVTIAPDKSTVG

SEQ ID NO: 89547 - protein, 418 aa, unidentified
MSYKVAGIDIHKKVRMVVVATAAEEVADSASEALELECRRFGAGASERKHLCSWLRERNVREVVMESTAQYWKPVWLDREPHFGKLHLAQAHSNRAPKGRKNDFRDGKRLARRWLADELRLSFVPPGEQRAWRSLTRGKQQLVRDRVRLQNQLETLLEETRIKLSSVINDLLGVRGRRILQAMAEGQSDPEHWAALGDDRLRCNQQELMDALHGSLEPIHRQLWKLYLKRLELLDEQIGTLDRMVATALQQHQDAVIRVAEIPGFGVDSAQQLIAEMGIDAEAFPSARQCASWAGLCPGTEGSAEQNHSSRSAKGNRFVRRILTQAAQAAVKKKGSHFQALFRRFLPRLHYSGAIGAIAHRLGRLVCKLLHHGVRYIEPGHETNPKAKKRRAQKLAQALRKLGYEVALTPVVSKPEPA

SEQ ID NO: 89548 - protein, 374 aa, unidentified
MQHRRARRKVFSLTCTMDREGFEKLIVRLPEDKTSFLLGMESTASYHIPLFSYLAAHSYRVVIINPLLIHGFSKRSLRKTKTDKKDAFVIAQFLMREQKTLSAQTPDYLATELKDLARRREKLADHVTSLKADMKRILSVTFPELEYITGVFTKATLRLLMEYPSAHAIRRADPSAVANVFKSENQGNRPRTTVKALMDATASSVGIVSPAKELALKQEASLLMHVEEQMKETTKVLMNILNEKMKQDVEILCSMKGIGDNTAMNFLIEMGGTVEIYENDKKLIAASGLDPSTYESGKYAGKSKISKRGNRHLRRVIWLMATRVIINNELFRTYFYKRRKDGLPYKKAVLATAHKLIRIMFVMLSRKTYLVMVQ

SEQ ID NO: 89549 - protein, 374 aa, unidentified
MLQQQRLGHWSPSRDVRACPSTKKGVAVTIVDSARHVVGGVDTHRDVNVAAVVDINGGVLGVESFPTTADGHRRLSSWMSRFGVIERVGIEGTGAYGAGIARHVASLGVVVIEVDRPNRQKRRQHGKSDQLDAVEAARGALSGRCEGRAKSGDAHAEAMRVLLVAKRSARSTRIGTVVRLRHLMFTAPDELRARLGGLTVTQLVNEAAKLRPRPGGDVALHGTKTAAVILARRVQALDAELALLDEQLGLLVKAAAPELLNVYGVGVDTAAVLLVTAGDNPDRIETEAKWAMLCGIAPIPATTGLIEHRFRLNNAGDRHANNAIWRIVITRLGQHEPRSIAYMNRRLAEGKSKRYIIRCLKRYVAREVFRALPR

SEQ ID NO: 89550 - protein, 359 aa, unidentified
MPRTSKEISFNGQKIFVGIDTHLRNWAVTILTENNFHKKFSQDPKPEALANYLQKNFPGAEYYSAYEASYCGFNIHRRLNELGIQNIVVNPADIPTTDKEKRQKEDARDSRKLAMTLRSGELKNIYVPSVESEELRSLIRYRKTLVKDIARGKNRIKSNLYFHGVEIPFAHQQDSKYWSNKFTLWLNTVTHTTEYGTLVLQDLTDTNLNLRRKLLKVTKDTRMAAKSEKYSKLCTLLTTIPGIGIISAMTILSELETLERFTSFDKLSSYAGLVPTTHSSGEKDKTGKITPRANQILRNALIESAWVAARIDPALSLAYNELCKRMKATKAIVRIAKKLLNRIKYVLKNETGYVCSVVS

SEQ ID NO: 89551 - protein, 344 aa, unidentified
MQIARIGLDLAKYVFEIHGVDAHGTTVLRKTLRRHAVSTFFANLPPCLVGMEASNGAHFWAKTLLDLGHDVRLISPQFVTPYVKSNKNDRNDAEAICEAVGRPNMRFVPVKSAEQLAVQAVHRIRTRLVADRVRLVNQVRGLLGEHGIVVAKDIGNLRRALAGLGGDNEDRALNPMVRALMGELREELTELDARIVGYDRKIRELYRNSEICQRLGKVEGIGPVTATALVAAVGDRSSFKNGRQFAAWLGLVPKQRSSGGRARLFGISKRGDRYLRTLLIHGARAALGRVRDKQDPRSLWLGKMQLRRHPNVVAVALANKNARIAWSLLTSDNVYDASLSVGAA

SEQ ID NO: 89552 - protein, 370 aa, unidentified
MSVRRILAKTIDTDLEYEAIGIDLAKNCVSAALLTTDGEVVCIDRLDYSELEKSAQALSPTTFAMEPCTEMNYLVQKLEAWGHRCLVIGGKNVQNYVENHYSGQKTDLNDAQALAFLAQDKQLRTIKAKDIEQQKYASLTTLREQYIKQYRQTIVSLKGICQAWGLNISKGISGKARLKDLIENHAAFPEELKESLVDMVTHAQTTQKVLNKITKTLEVLAKNDKVCQLIQTIPGLGTICSCRLRATIGDIQRFKNPKDFPAYYGLVPRSIATGHNEKKGRITHRGDKTMRSLMVQAAGSLVNMATKGKLKSKQLTKWILKKQKEKMPWGKLVCAVAAKLLRIVRAILISSKPYNPKIAGVAKCSLPKGS

SEQ ID NO: 89553 - protein, 339 aa, unidentified
MSIVLMGLDQHRAQITVEWLDTATGEVSRRRIRPGDRRGFRRFLAQFESRQVEAALEATTGWRFLVEELRAAGHVAHLAEPGETAGLRGPKKRAKSDRADARHLRELLQQRRLPESWIPPEHILELRSKVRLRHTLIEERGTWQQRIQAQLYHHGAPHRRGLLMGENRRWLEALELPEAARSQVDVALAMIDALQAQLAPLDSELRGYARRQTGCRALQAHYGIGELTAVTILAELGDVTRFSSSRRAVRYAGMDITVAESDRRRAPGHLSRQGPPALRWALFEAAQVARRPASPDRGYYEQAAERLGGNRACLSVARRLLKRSFHTLRELGEEALAPA

SEQ ID NO: 89554 - protein, 355 aa, unidentified
MKKISTLQAFSNEIVKEQKQTIGVDLGDRWSFYCVLDEAGKIILEQKVATTPEAIQQTFAKMPRSLIALETGTHSPWASRLLTELGHEVLVAHAQKVELITKSNRKDDRHDARTLARLARMDPELLGPVRHRSAQAQIHLTVIRARAELVSARTALVNAARGLVKSYGQRLPKCGTQQVNRELAAGLSTELREVLEPLLQEIESLNERIPEYDERMEKIAQEVYPEVSLLKQVKGVGTQIALTYVLTIEDPYRFEKSREVGCFLGLKPGRRNSGNSEPQKKISKEGDRYLRTMMVQGAHYILGPFGEDSDLRRWGLKLAERGGKNAKKRAVVAVARKLAVLLHRLWVGGDPQSGP

SEQ ID NO: 89555 - protein, 316 aa, unidentified
MENPQPFVGIDVSSQGLDVDTVPVSQPFSEPNNEDGIASLTAHLKAINPQIVLLEATGGYEIAVAYALYEAGLPVVITNPKSVRHFAKAIGRLAKTDKLDAQVLALYAQRVQPPVQILRDQEQLELANLMTRRRQLQGMIVMEENRRRTCTPKVRANIDLSLAHLRRLLKDLDREIHDSIRRTPLWHEKAEILQSFTGVGPKVSASLIADMPELGLLPANKASALAGLAPMNQDSGKHRGKRMIKGGRPAVRRALYMAALVASRHNPVIKEFYQRLRLAGKPAKVALTACMRKLLVILNAMLKNRTYWNPQLPLAA

SEQ ID NO: 89556 - protein, 331 aa, unidentified
MKFEEVIGIDVSKLTLDAFIHSHQIFTQVPNTKKGYSKLLTWATKSTGCLMDKVLFCFEHTGMYSYALACHMTEKQMNYIMVPGLEIKRSLGIQRGKNDRVDAMRIAQYAYRRREEVTTYRLPEKAINKIRQLLSLREKLVKQCAGYEASLKDLPDFIESSESKVLVGVQRNMIKALAREIEKVEKEIDSVLESSPDIMNNYRLITSITGVGRQTALYLIIVTNNFLSFDDHRKLASYAGVAPFANTSGTSIKGRTKVSPLANRKLKSLLSACAVSAIRHDPEMKLYFNRRTEMGKHKMNSINAVRNKLLARVFAVVRRGSPYVPLCQYAA

SEQ ID NO: 89557 - protein, 372 aa, unidentified
MASILYVGMDVHTSNYTLCTYSIENDKEFGLVQFKPDYLNIVRYVNRLKEHHGRGTRIVCGYEAGGLGYSLYRSLTASNIECIILAPSTIPKAPNERKTDYRDAAKIARSLAYNSYRSVYIPDKEDEAVKEYIRMRDNTKDHIKQLKQRILSLCTRWKKEFTGTKKPWTVAHMKWLQHLEFEDPIAQEAFDEYVIQLNEANARLKRYDARIEKWAEMPRYAEKVSKLTCFCGIKTHVALATIAEVSDFNRFPNANRFAAYLGLVPGEYSSGNSVNRLGITKQGNSHIRRLLTESAQCYSRALPGKTSAGLQKRQQGNDPKVIAYANKGNERLKRKYRSIAARKPKPLAVTATARELACFIWGMMTDHLDQVY

SEQ ID NO: 89558 - protein, 350 aa, unidentified
MFIIGCDYHPSVQQIAWVDTESGECGELRLRHIEAAEQFYRELKKKGVSVRVGMEATGHSRWFERLLGELNYELWVGDPAQIRAKRVRKQRNDRFDAQHLLKLMLEDNFPRIWVPTPENRDVRQLVLHRHRLVGMRTRVMNQLQAIAMNEGVRRKRGLWTEKGRAQLECLRLPLWTTRRRQELLELLDRFDPSIDQLSQVIEQEAERMPEVQRLQTHPGVGPITALAFVLVLGTPDRFRCGKQVASYLGLIPCEDSSADSWRLGHISKQGNALLRYLLGQAAQSVARCDSEWRGQYAHLALRRNKAIAKVAMARKLAVRLYWMWRRQWDYQQLKKFGSHAGQLELRHGVK

SEQ ID NO: 89559 - protein, 407 aa, unidentified
MRIMYGVCCGLDVHKKVITAALMTGEEECVVKEFTTTTSALRVMVEWLKELKCEYVAMESSGVYWKPVYNILEMEGIPAMVVNAAHMKTVPGRKTDQGDAEWIADLLYHGLLKASFIPEKDQREYRELVRYRSSRTEERARELNRLQKMLEGMNIKLGDFVSDINGKSAGKLLNLALENDKLTDEQIAEASHGNLKASLEELKESLNGIITPLQRELVTMVIDVIKEQTEQIAKVEALIRKYTKSAYEEAAKKLEAMPGIGTKSAQAIVAEIGIDMSRFPTANHLCAWAGLAPGNNESAGKRKNAKTRKGNKHIKKTLTQSATAAVKNKNSFFHAQYHRLVVRKGNNKAIIAVAHSMLIAIYYILSGNEFKDLGADYYTQFNKDKKIKSYLKQLEKLGWTPPEVKAA

SEQ ID NO: 89560 - protein, 429 aa, unidentified
MSEAEFVKQEPQFAAFLAIDWADKKHVWCLQGAGLEKRESGELEHSPEAVEAWVGQLCQRFAHRPIAVALEQSRGALVFMLSKYEALHLFPVASTMAASMRQALYPSGAKDDPRDADLLLDLLLKHRDKLRRLVPDTEATRRVQNLVEERRKLVDEKTEQSNRLTSNLKIYFPQILDWFEQLDTELVCALLLRWPTLEELQKVPPAQLRRFFRKHHCRDQELIERRIVAIRQAIPAIRDRAVIEAKSTVVKVIVRLIRSLLEGIADLEEKIEEAAAGHPDFFIFDSLPGAGAVLAPRLLAAFGSQRERYGSAGEVQVYSGIAPVMEKSGKKKWVHCRIACPKFLRQSFHEWAGHSIAHSVWARSYYQQLRSRGKEHHPAVRALAFKWIRIVFRCWKDGVAYDENKYLATLARRGSPLAAVNVSIVRKTV

SEQ ID NO: 89561 - protein, 352 aa, unidentified
MKHLQLKEGDRLRRQCIGVDISKKKFTFCLCQSTEQDLHFYTKPKEFENSEPGFRCLLEWSGKEVDSSVPYSFLMETTGCYHESLAIFLVRKGLTVFVVHANKAKNFARLNGQRTKTDLVDSKMLATMGCDTANLKVWPLPDEKYLHLREMSRLSEQLEKTRTQVLGRIEAVTHSGFADKTVLNKHKALLKSIEKLQTANEKEMDELVDGDLVMCSGVQNMESIKCVGRKTAVLVVAETLGFHQMTSAKQVASYAGLDVKKEQSGDTDKKGHMTKRGNAHLRAGLYFPAIVASWSNPQLMEDYARICASHPQSKTIALVALERKLLCLMYSLWKNGKQWDPKYEEHKKEKTS

SEQ ID NO: 89562 - protein, 345 aa, unidentified
MTNLPLNTTAESIYRLFAGVDVGADELVLVIRKNGKSFDPQKYANTRSDRARLVNKLIKLPSIKVCLEATGIYHFDLAIALHDAAIPVMVVNPKASHNFAKVLMRNSKTDAVDANTLAEYVERMDFVAWTRPSNQVLALRGFARRIDALTGQKAAAKNHLHALSATQETPKALLRDAKLAISQLEKRIDALAVEAMILITDDLALKRIFELLTGIKGIAQTSAIALMGELLLLPPNLSHREWVKFAGLDPKAFESGKSVHKKMRLSKAGNRHIRSALYMPALSAKQHDPHISAYFQHLVDNGKKPLQAVCAVMRKLLHAIHGMLKHDQPFDNTRFYAIPTSIIAE

SEQ ID NO: 89563 - protein, 282 aa, unidentified
MNSKDIQRYIALDIHKEYVMVGGMNAAQEWVMHPRKVEMTRFRAWAAVNLRPGDAVVIETTTNVWDIYDIVAPLVTRTEVAHAGAVKQIAEARVKTDTEDIKRLLRLLITGIVPKVWVPPAHVRELRGLIAYRNRLVVNGAAVRNRLHSLVHRHNLQLPKGELSNASWWEVQSLSVLEKIQVRQELALLDRIEQNKAELDEELAKMSVGQTWGEQATRLLQLPGLGLIATMTVLSAIGDIRRFDSPKSLVGYAGLGAGVHDSGKEHKDKGITKSGARNYAGQ

SEQ ID NO: 89564 - protein, 357 aa, unidentified
MKTVVVAGRRSVVGKDVYVGIDVHKESWQVTVRTDGEEVFNGRVPGQYQSLKKLFERYQGCRMKVAYEAGPFGFWLSDKLVEDGIEVLVVPPSLIPVESGNRVKTDKRDSRKLARLLESNMLKRVYVLTPEEREHRDLLRTRRQIVDHRNDVARQIKSKLLFYGIASPFTTTTRWSFKYIEWLKTLRCDTDYLRESFDLLIDLYEYLTRQIVRINKKVVLLCHDKKYSDRIKLLCTAPGIGRLTAIEILVELQDISRFPSAEELASYIGLTPSEYSTGERTRQGRITRCGNKRVRTYLVESTWMLITKDPAIRLKYLKLKSLRGGKRATIAIARKLLIRIRRMLLDNAPYRMAAMAA

SEQ ID NO: 89565 - protein, 327 aa, unidentified
MRQHKSSTEKVKTSVAFDVCKATLDGHILVDGKVFSVPNADDGFDQIAAILADYHISLVLMESTGGYEDAAACFFQSIGYDVVVVNPRHARRFAQSMGIMAKTDRIDAAVLAQFASVLDSLPDRERYIRPLTDETRKFLSRMVTRRRQIVELITVEKQHLSCADDYSRQSINMVLPFLQAQLKDINDDISLYVKKNFSYLSKILSEIPGVGKQAVGVLIGDVPELGRIDNRQLSAVIGVAPFNHDSGKMRGRRFISGGRKQVRNVLYMGIISATRFNPVIKAFYERKLNEGKPKKVALIACMHKLLRIINAMVRDGTSFNPSLHTVS

SEQ ID NO: 89566 - protein, 359 aa, unidentified
MNATTVAVDLAKSVFEVAVADQNWKVTDRARLSRPQFERWFHNRTVGLVVMEACGSAHFWARQLQGLGIEVKLLPPKYVRAYVKRNKTDAADAAALLEAARCADIVPVRVKSVEQQALQSLHRVRSAWMATRTSRINGLRGFCREFGITIAVGSRLGIEQISRVLVDSSTAVPAMLRDTLKLLIDEIRLLEARIAQLERELTAAAKASVACERLLSVPGVGLLTATAMVAATGGSVSHFKDARHFSSWFGLTPKEHSSGSTRHLGRISKRGDRYLRMLLTHGARSVLRAATVAQRCGRPLDPLRQWGLNVQSRSNHNKATCALANKLARICFATLRDQEPYEKTKMLKKLERQAYPMPA

SEQ ID NO: 89567 - protein, 341 aa, unidentified
MQVTRVGLDLAKRVFQVYGVDVHGKRKLSKKLGRGEMLQFFAQLPACVVGVEACGGAHYWARELGKFGHTVRLMAAQFVNPYRKSGKNDVNDAEAICEAVGRPNMRFVPPKSEEQQALLMVHRARSLVVANRTAQVNQIRGLLGEFGLVVPVGLRRLRTQLPQILEDAENGLPVLARHVFAELLQELHALDEKIQRYDRQLQELARQSEPARRIMALEGIGPITATAFVASVGDARVFKNGRQFAAWLGLTPRQYSSGGTTRLGRITKRGDRYLRMLLVHGARAHLRFVERKNDPKSLWIKGLRARRHVNVAAVALAAKHARIIWALLAKGTTYRLPAAAT

SEQ ID NO: 89568 - protein, 352 aa, unidentified
MTSLTDLREVVDVVIGVDTHVQTHSAAVVDAVTGGVLGEITVDVTTEGYAELVEFAGAYPMFRVWAIEGTGGHGAGLSRHLLDLAEIVVELDRPERAPRRHGAKSDPLVAIRAAREALARTKLGTPRSGGKRRALSVLLAARGSAVRAATEAQQQVFSLVLAAPEPIRARFRGQKLPGMLTTAASLRVHPSWDVETTTTVLALRSLARRFRTLNQEAAEHQKAILAIIRSWRPDLLEQFGVGPIVVATVLCAWSHPGRIHSEAAFAMLAGVAPIPANSGQVTNRYRLNRYGDRQLNRALHTIVQSRSRYHAPTRDYLAGRTTEAKTSREIKRCLSRYIARDLPPPRKRHTTT

SEQ ID NO: 89569 - protein, 415 aa, unidentified
MDTTYAKVAGLDVHHKTIQCAIRCQESGKLFKESRSFGTMTRYLKQLADYLEAHGITHVALESTGVLWKPVWNILEGRFTLLLVNPRHLKKVPGRKTDVSDAQWIAQLLQCGLLKPSFVPPRAVRDLRDLTRQRAQLAGEHTRVANRVHKILEDANIKLGAVASDVLGVSGRAMLAALLRGETDLDKIADLAMNKLRHKIPELRLALEGRLTEHHRWGLRQQLNHLHFLEVQTSALTQQIAEIETELLPRDDAKRLDAIPGLNAIAIQNIIAEIGPDMSVFPDEHHLCSWGGLCPGNEESAGKRLRSRTRHGNRWLRRALSEAAWAASRAKDSYLSVQFHRISSRRGKNRALLAVGHSLLVIIYHVLKYHKEYKDLGRDYFDRLDPERLQRYLIKRLEALGNDVILKPRDPDTAA

SEQ ID NO: 89570 - protein, 347 aa, unidentified
MRFYTGQHQHYCGVDLHARSMYLCILDQQGQVVLHRNLRTEADAFLQAVAPYRDDLAVAVECLFTWYWLADLCQRENLHFVLGHALYMKAIHGGKTKNDRLDAYKIAALLRGGNLPLAYAYPAEMRATRDLLRRRTHLVRQRAELLAHIQNTCSQYNLPSPGVLTYKDRRRKIPDGFPDPVARRSVELDLQLIETYDALLTPLELELVHQAQEHDPDAFHLLRSIPGIGKILALTMLYEIHDLSRFPRVQDFCSYARLIAGTHESAGKPTGTGNRKIGNVHLKWAFSEAAVLFLAKYPKARRYKDRLATHHGKAKAMAILAHKLGRIVYYILQRRRPFDPKRCFADA

SEQ ID NO: 89571 - protein, 350 aa, unidentified
MKNTNTVGLDMGDKIHSICMLDAKGKVAERSEVANTAVAIRKRFERMKPCLVAMEAGTHSGWVSRILEELGHEVLVGNPRKLRAIWDSDRKDDIRDAEMLARIARFDPQLLHPIRHRGKEAQCDLAAIKARDELVKVRTALIAHVRGLVKSFGERLPTCSPECFHLRATAAMPTELVPALEPVVKSIEELTVRIRHCDAYVKELSERKYPETEGLRAIPGVGPITALAYVLTLEEPARFGKSREVGPFLGLTPRRDQSGQVDKQLRITKAGNAYLRRLLVQCANYVLGRHGPDCDLRRFGLKLAERGGKNAKRRAVVAVARKLGVLLHCLWKTGGAYEPNLRKSRKTKAA

SEQ ID NO: 89572 - protein, 346 aa, unidentified
MDTGYAGQQVVGLDLHRRRTVMVRMTEAGERLEAVRFVSDPAVLAEQIAKAGPAPRVVVEATYAWYWVADVLDAAGAQLHLAHPLGVRGFAYRRVKNDFRDAADLADLLRMGRLPEAWIAPPPVRAHRELVRHRHKLRQLCSGIKAGAHAVLAKNALFIARSDMFGLDGRRRLSALNLPEVFRLRLDSQLRLIDTIEQEIDELDKRIRVMFADDLGYRALLRLPGVGPVFAAILRAEIGEITRFPSPGQLSSWAGLTPRHRESDTTIHRGRITKQGSRLVRWACVEAVQRARPGTPMRNRYDQIVARRGGNAKHLAKVAAARELCECVFYALRDGHVRRLGEHGAA

SEQ ID NO: 89573 - protein, 448 aa, unidentified
MSQAAKLNVLDEHAAFVDVGSEKLHVSIAGGPPEVFGTVTAELHRLRDWLKSQQARGVAMEATGVYWLPLYSVLEAAGFVVTMVNGKQTRNLPGRKTDMQDCQWGATLHAHGLLRAGFVPPEHVRRLQDYLRLRGDHIANAAGCIQLQQKALERMNVKLHDVISSLAGVSGQRVIEGILAGERNPERLLEMCDQSIREKKRTRVIESLRGSWQEQHLFALRQAVESWKHYQRLIAACDQEIEKVLCESSGPPSPSDEPKRSLRKPGVNAPNIEDLHSLLTRWCGGKDLTVLPAHTDYSWLQLLGEVGTDLTAWPTEKHFTAWLGLAPGSHQSGKYKRATGRKRNRAGRIFCVMARSLARSKHLALGGFYRRMAARRGGLLAIIALARKLAVWFWRLMVHGASYVEQGLAKYEEQVLETKRRALARLAKQLGHLVIPNFQPKEAPVNGA

SEQ ID NO: 89574 - protein, 343 aa, unidentified
MQTVTTIGLDIAKSVFQVHGVDAAGQVVIRRQLKRRQVLAFFQRLPACLVGIEACASSHHWARELQLVGHTVRLMPPAYVKPYVKRHKNDATDAEAICEAVARANMRFVTIKTPEQQGCLILHRTRHLLIRQQTSVINAIRAHLAEFGIVAAVGRNGVEQLLGVVADANDKRLPEVARACLATLGVQLRVLKAQILEFDRMINAWHRSNETSRRLDNAPGIGPVLATALVATVADPKTFRSGRNFSAWIGLVPQQHSSGGKDRLGHISKQGDRYLRNLFVAGALAVIRYAKIHGTQHRPWLAALLARRPTKVAAIALANKIARMAWAMMVKGEHYKEPVALAR

SEQ ID NO: 89575 - protein, 397 aa, unidentified
MSTLFVGVDVSKDDASAQGLDREGKKLFYLEFSMDGEGFSRFLDRVKAHCGNLSEVTVAMESTGCYHINLFSFLSSEGIPCVVINPLLISNFARLSLRKTKTDKKDALSIAQFLLAHKDSLSRVAFSQNSQDLKDLARERESLTVMISGLKNDIRRLLKMSFPELEHRSKIFTETMLHVLIKFPSARALTAAKPKEIAKSLIHVEGKRKRVLIRAEEIIQMAKASVATDSAAKELILSEKISTLFYLEEKRKKITGVLVKTCQSMRVEDLEIITSIDGIKQINGSTFLAEVGEMNHFKSHKHVIAFAGLDPSIHQSGQYEGISRISKRGNRHLRRVIFLMTTCVVRSNNIFRQYFLKRKAEGLPPKKAILATAHKLLRVLFAMLTSKSYFRKEVVEV

SEQ ID NO: 89576 - protein, 428 aa, unidentified
MSPLPEHPFTAYVGIDWADTKHDICLQPAGDTRRESSCIRHQVAAIDEWANALHHRFGGPVAVALELAKGPIVAALQKYDFLVLFPINPATLAKYREAFQPSGAKDDPADAELALDLLLHHPERFSPLRLQSAAMRSLVSLVERRRQLVGDQSRLTNRLCDTLKQYYPQALEWFDDRGTVLFCDFLERWPTLRSVRQARTAVLETFFHAHHCRSTSRISARIESIRAAAALTDDPAIIGPCRLHVLALVAQLRAVLAAIVQFDREIAQVACTLPDYALFKSLPGAGAQLAPRLLAAFGEQRERFRSADELQKYAGIAPVTERSGKKSWVHWRLQCPKFLRQTFVEWAAQTIPRSFWAGAYYRQQRAKGSSHHIAVRALAFKWIRILYRCWQTRTPYNETVYLNALVKRGSPLLGKQGDSVKMGSCSPI

SEQ ID NO: 89577 - protein, 411 aa, unidentified
MQVIHERCAALDVHKKTVVTTILKTQADGSVQEWTRTFLTMTADLLALDDWLRSHGIEIIAMESTGVFWRPVFNLLEEGRQVILVNAQHMKAVPGRKTDVKDSQWLADLLRHGLLKASFIPPKPVREVRDLMRYRKTIVQERADEVNRLQKVLETANIKLASVATDVLGKSGRSMLDALLDGQDDPEMLAELARGRLRAKLADLRKALDGRVQPHHRLLLTRILAHIDFLEESLAQLQAEMEQYLDPFEEAMELVQSVVGIDETAAASILAEIGTDMTRFASEKHIASWAGVCPGNKQSGGKRLSGKTTKGNPYLRAILCEVAWAIAHTKDNYLSAFYHRVARRHGKPKAIMALSHKVLVIIYHILRTKKPYADLGADYFDQRDRGRIERHHIHRLEQLGYTVTLIPKEAA

SEQ ID NO: 89578 - protein, 419 aa, unidentified
MDPEQKGKATMILVGIDWAEDHHVVGVMDQDGRVLAHERVAEGIQGVGRLHALIGDYTDDPEQVAVGIETDRGLLVTSLVAADYQVYAINPKAVDRYRDRHSVSGAKSDRGDAKVPADMVRTDRHNHRRIAGDSDLAEAIKVTARAHQNLVWTRQRQINQLRSALREFYPGALAAFGTELAHSDALAVLGKAPTPELGRRLSTAQIASALRRGGRQRNIDKRAAVIRDALRAEQLAARALTVDAYGDTARALVAVITVLTAQIADLGSALADRFEQHPDAVILRSLAGLGIILGARVLSEFGDDPNRYEHAKARKNYAGTSPITRQSGKRKTVLARYIRNRRLADALTWWAFSSLTASPGARAFYDRHRSAGDGHHQALRALANRWVGILHGCLRHRTEYDEATAWPAAHTKKEVDIAA

SEQ ID NO: 89579 - protein, 409 aa, unidentified
MEIVQERCAGLDVHKRTVVACVITPEHKEVRTFGTMTRELMGMADWFSSLGVTHVAMESTGVYWRAVFNLLEGRDFELLVANPRYMRAVPGRKTDVKDAEWIADLLRHGLLRASFVPDRSQRELRDLVRYRKVIGQERARMVVRIEKVLEAANIKLTSVASHVLSMSSRAMLDELIAGNRDTEAMAELARSNLRSKRAQLKEALVGNFGPHQKFMLESHLRLIDQLDHEIETLNQQIEERMRPFQVQIDLLDQIPGIGRRGAEQILAEIGVDMSRFRSASHLASWARICPGMNESGGKRRNAAIGAGNLWVRSTLVEVALASVRSGRREPNFFSARYHRLAARRGGKRAAIAVAHSVLLAIYRMLKDGTHFEDLGPTHLDAKRRQAIALRNVKRLEELGFKVTIEEPAA

SEQ ID NO: 89580 - protein, 348 aa, unidentified
MVHFVGLDVSVKQTSVCVVDDVGKVILEQKVPTEPADIIAFLNSLGVTFGRIGIEAGPLSQWLVNALTTAELPVICVETRHMKALLTAQQINKTDRNDARGIAQMMRVGLFKPVHVKTLAAQEQRMLLTSRKLLQRKLLDVESDLRGTLRNFGLKVGVVSGSRYEVRIHELVAGFPRMAAIVEPLLAVRRVMRQQLAVLHKMLLDTVRGDPVCRRLMTAPGVGAVVALTYRATVDQPQRFLHSRAVGAHVGLTPKRYQSGETDYDGGVSKCGDALLRTMLYEAAHSLLIQSRKWSWLKAWGIRVAQRRGMRRAIVAVARRLAVVLHRMWVDGSEFRWKKDSAAVPAVA

SEQ ID NO: 89581 - protein, 476 aa, unidentified
MVTHAPRPTETAAVGAPAAPPKPRRARRTTPKPPALGMTYPDACGIDIGSTSHFVAVPADRVDPQQPCVREFPAFTADLHRLLQWLRDCRITAVAMESTGVYWIPLYEMLEAAGFEVHLVNARHVRSVPGRKSDVLDCQWLQQLMSYGLLRGAFRPSGEVCALRAVWRHRDMLLSYQARHVQHLQKSLTQMNVQLHHVISDIMGATGQAIVRAIVAGERDPAVLAQLRDRRIKANEADVAASLQGHWRDEHLFSLRQALALIDAYGEQIAACDAELQRLLEALKDHELPEQGLGAPKRKAAARNAVGFDARTALFEASGVDLTRIPGIDTSTALKVISEVGVDLRRFPTVKHFTSWLNLCPGTKISGGKVLSAATKASSNRAAQALRMAAQALRKSQSALGAYHRRLCARMDRPKAITATAHKLARLIYFMLTKGQGYVEAGQDAYEQKYRERVVQNLTKRARQMGFELTPTAAIT

SEQ ID NO: 89582 - protein, 363 aa, unidentified
MIVIGADIHKSTHALAAVSGDSGTVAGELEIRADEAGHRAALRWARTLDEERVWAIEDCRHLSRRLEQALIAAGERVVRVPPKMMGQARRGEREPGKSDQIDARAVARAVVREGVERFPAAFLDERALEIRLLADHRTDLVTERTRQINRLRWHLVDLCPELEARIPARQLDNNSMLDRIARRLRREERTARIRVALELVASIRSISRQAHMLERELRTLICSYRPALLAEQGLGVLTAATLIGRTAGAERFPTDAHFARQAGVAPIPVSSGRTDRHRLHRGGDRQLNRALHVIAITKARIDPQTRAYLDRKQAEGKTKKEALRCLKRHLARHVHRLLSMPPINPDRRTRIQQNTAISVPCLT

SEQ ID NO: 89583 - protein, 354 aa, unidentified
MKYHAGLDISLEETAICVVDDEGTIVKELRAASEPEALAAALGGLGLELARVGLEACSQAAWLHDGLKAAGFNAICIETRRAHAAMKTMPNKTDRNDARAIAQIMRTGWFQQVHVKSPQSRCWRALLVARKGVLQGMFALENVVRGLLREEGLKAGKASGRKFTDTVKELARADQVLDDIVTPMLEVLVTMQGQLADMTARVGAIAGADPVCRRLMGVPGMGAITTLTFMATVDSPDRFKRSRTLGAHLGLTPRRYQSGETDIAGRISKCGDGMARSALYEAAHVLLVLTRKPSRLKAWGLAVAKRWGFNRARVAVARKLAVILHRMWENGADFIWSARQATKQSAGALHPKSA

SEQ ID NO: 89584 - protein, 347 aa, unidentified
MRFYTKQHKYYCGIDLHTKKMYVCILDSEGKIRLHQNIRTDPESFLHILTPFREDVVVAVECMFTWYWIADLCVQHNIPFVLGHALYMKAIHGGKAKNDKIDSHKIATLLRGGMIPQSYVYPVRMRATRDLLRRRNHFMRKRAELFAHIQNTRNQYNLPDPLGCIAKPQNRKGIVERFDDPSIQKSISANLLMIESYDRLLTQLEHEIIASAKEHDLRSYALLQTIPGVGKILALVILYEIESIDRFPSVQDFVSYSRLVKCTKESNGKIYGTNGNKIGNAHLKWSFSEAAVLFLKGNEPGKKYLQRLAHKHGKAKALSILAHKLGRAVYFMLKNKEAFNQKKFLGL

SEQ ID NO: 89585 - protein, 381 aa, unidentified
MPSMQLRRDDVIVGVDTHKDNHVAVAIDGLGGRLGDIIVPTTIAGFEELLAFCLAFVGPAGRLIGFGIEGTGSYGVGLARYLRNHGHDVHEIARPARAVERRLAGKNDTIDAEHAARQLLAGHGLSTPKTADGAVEMIRLVKIAYDGAVQARTTAMITLKATLATGSEALRAELEKLTDHKLITACAALEGPAPLPPVRRGAPAVVVPGDPDAAMRHVLSSMAKRWLALHEEAKAHAASLKALTAAAAPQLVEAVGVGYDTAAQMLITAGDNANRIKSEAAFAKMCGACPIPAGSGKTNNRHRLYRGGNRQANAALYRVVIVRMRWHQPTIDYVARRTAEGMSKREIIRCLKRYLARELFRLLPAPDAVASPVGRELEIAA

SEQ ID NO: 89586 - protein, 346 aa, unidentified
MSQNNNTINYVGVDVAKKSLAVDGVGCCGELPNDAKGHRGLLRLLGKTAQPVHVIVEASGGYEQGLVRALHEANIPVSVVEPFRVRSFARAKGLRAKTDPIDASVLRAFGEAIRPRPSLPPRSEQLRLAELVTRRAQLIDSEVAESNRSAHYLDPLVRRQAKTYLRFLRRQIEQCESAIAQLIEKDQSIKQHSARLQQVPGVGAITAATLLADMPELGTLSDETAAALAGVAPYNNDSGPFRGQRRIRGGRASVRRALYMAALSAVRHDLILKGFYQRLRAAGKKPLVALVAVMRKLIILLNRLLKNPNLTLQSHSKRVEKGTQRAPKQTGQQLDGGAAVCLGASV

SEQ ID NO: 89587 - protein, 357 aa, unidentified
MTRISAGVDVSKNRSTVCIIDQDGKVIMRPFLVCHSTEELDFLADTLKRLNGEVRVIMESTSVYQYPIALHLKEKGIFISIVNAYKVKKFANTDFRGGKTDKKDSRTIASYGISYWYKRVEWQIPKDTYFNLNLLNRTYMNAKKHRQIILQELQHYIDCAMPGMDKELHSLNLSTKKDFMLDFVEKFWHRDEIVNMTEAEFTEVFTAWAKKKGYRPVEGKAAKIYAIAKSCIPYYPANPTVKTILQCIVDKLSGVNRTLVTIVTQMIEEAKKLPEYQIVREMPGVGDPLAARFFGSAGDIRRFKNSKALVAYAGIDSPPDESGDFSSTHRHITKKGSKVFRDTGYEIMMALRSQKRT

SEQ ID NO: 89588 - protein, 387 aa, unidentified
MPQPNDLSRSLVALDQNSTIIAVVELSQSSWLVGGVVPGIERQPHKKLEPSPERLLAVLHRWRDEAVRAGGTITRIALAFEAGRDGFWLARWLEARGVEAHVIHPSSVAVSREHRRAKTDRLDTELLKRGFLGWLRGERGHCSMVRVPTVAEEDAKRPNRERDCLVGERTRIVNRIKSTLARLGIRNFKPTLRKAAERLATVHTPEGIPLPPNTLAELQRDMARMGVVIGQIRQIEEARQKRLDQRHETGPHVMVRLLARIVGVGVETADLLVHEVLSRPMRDRRAVARYAGLTGAPDESGAQRREQGLARAGNARVRRAMIQLAWRFLRFQKDSALALWYRARTADSRSGTRKTMVVALARKLIIALWRFVTTGEPLEGVILRPAS

SEQ ID NO: 89589 - protein, 322 aa, unidentified
MSGSSVMIGIDVGKAHVDVAAIGGELPAALSHVGNDADGHSTLADGLARLKPELVLMEATGGYEAALACVLQAAGLRVAVVNPRMARDFARAMQRLAKTDRIDAATLAEFAGALAQRPDSERFIRPLSEPEQQDLAALVTRRRQLVSMQVAERQRLQLARPVARASIEALLEAIARQLDDVEVEMTRHVEQHHAQMAKLLQSVTGIGKVVAATLIAELPELGRLNRRQICALVGVAPYAKDSGASRGRRRIVGGRFEVRRTLYMATLTATRYNVAIRVFYERLVAAGKLKKVALIACMRKLLTHLNAITRDHLNVQGHAPIA

SEQ ID NO: 89590 - protein, 409 aa, unidentified
MAQFLQDIGTENLLVVAIDAAKFTHKAMVCNFYGDILVKPFEFDASMTGFDAIKRIIEIEKEKHGKEKVIVGIETTGHYYEDLVRRCHTIGYHVRIINAATTAQERQALLNWAKTDNLDLMAIVQSILHGRGTSSELSSGKVYTLQKLTRARRELVNEQTMTQNLIRMHMDHIFREYQGKSIWIKGKREHIKPFSDLFGKASLFMMRNYPHPSDILALGEAGLRKLSIRENLKLRDDCIKTLVEFAKESISQSKDHVEVELFLLTQKLDRLDLLKEQIKVLEEKIEDLFVETEGAMILSVPGIGVVTGAELFAEMGEISDFTHAGQLIKMAGTNPIVKQSGGRKPTYYGISKQGRRPFRNIVYQVGKSLSTNNPEMKEKYLALKERGKLTGQAYCHWKSNDSSSLFNDS

SEQ ID NO: 89591 - protein, 352 aa, unidentified
MTTMADTRARVTAGVDTHLDVHVVAALDGIGGELGVRDFPTTPAGYRAALNWLRTFGDVDLVGIEGTGSYGAGLTRHLLAEGVAVVEVDRPNRQNRRRRGKSDPVDALAAARTAQSGDATSQAKTRNGAVEAIRVLRVARSSAIHDRTQALNQMRALVSTAPDELRQELRGLSGYHLILTAAALRPGVQVTPLSATKTALRELARRLQYLAKQIERLDAILKPLVAATAPALVARYGVGTDTAGALLVAAGDNPQRLVSEASFAHLCGVSPIEASSGKVTRHRLNRGGDRHANHALWRIVMTRMVSDPETRYYVERRTKEGLSKLEIMRCLKRYVAREVYAALLAQQPLDRP

SEQ ID NO: 89592 - protein, 386 aa, unidentified
MTRPSNVLLRAINYDHTLVLAIELSNKSWVLAAQVPGFPQTKAQRTIEPNKNALLAAIDGYRARAAAVGHSVDRVIVTYEAGWSGFWLARWLIAQGVEVHVVQPSSVPVDRRLRRAKSDGIDAELLLRTLLAWLRGEPRVCSMAPIPDEADEDARRSVRERTELLSERVGLTNRIGAVLATLGVNDYNPLLQSRRRRLAELRTGLDEPIPPNALAKIERLLARLELVLAQIAELERDRDKVPAADAPDRAGQMIQQLTSLRGIGVQSATVLVREGFVRHFSNGKALGSYAGLTSTPYSSGGIDREQGIGKAGNRRLRMVMVELAWLWQRYQPGAAQVAWFRNRVGSTGRRIRKVMVVALARKLLIALWRFVMDGVVPQGAVMKPSI

SEQ ID NO: 89593 - protein, 329 aa, unidentified
MFYLGIDVSKAKLDCCLLLDNTTFKRKDKSIANNPKGFNELLAWIQKQSVELTDVHIIMEATGVYHEQAAYALHDAGVKLSLANPNYVRHFAHSLAIKTKTDGMDSFVLARYGLSTVPKLWIPAPVKARLLQALLNRREAIAQDLQRERNREEKALVANAPDKIQQSIESSIAFLEQQLQKLQDDIDDHIDKHPKLKQDVKLLESIPAVGERVGNTMLSVLHNHHFESAEQVAAYLGLVPVEHQSGTSVLKRPHLSKTGSASVRATLYMAAVVATKYNPHIKALYDRLLAKGKCKMLAIGAAMRKLVHLCFGVWKNQTPYKANFLHKSA

SEQ ID NO: 89594 - protein, 335 aa, unidentified
MQIYGIDLSKEKFDVSFLRLSSKSNVVTPVHHVVRNTQNGIKAFLKGLPSDSVLVAEHTGVYGERLLKMCTEMNVKIAYVGGHVIHTYKSGPDRGKTDEQDCNVLRDFGERFTDKLVYTTFPEEDIYELRQLSRQRTMLVEERKRIMTADKTEDCRPYRSEAVKRSMQHIVDLLDEEIKDMERDMLTVIRKHDKISNSYDIITSVNGVGLVTAVELIVKTRNFTTITTAKQYSAYAGTAPYEKSSGKMNQGAHVSKWGNRRSKTLLYICAECARMHNKEMKLYYERRTIIDKKAHHYVLNAIANKLLRLIFSLINKNEKYNPCYIQRDPRSININ

SEQ ID NO: 89595 - protein, 309 aa, unidentified
MSATFTYLGIDVSKHNLDLCYGSRRWRLPNSPSGFRRIAAFLAGQPQPVRALCEASGPYHRAMVEALRQAGAEVCVLNPRRVRDFARAEGRLAKTDSIDASVLADFGARMAPQPGPAPSPEQRLLAGLVERRRQIVAVHCAEANRLEAAEGPARDSIRAHLRFLKDQMAAIGADIGRLLDGSPELHAKALRMRSVVGIGPVVAASLLAALPELGQLSRARVGALSGTAPINRDSGMRSGSRHIQEGRIKVRQAAYMAALVAIRHNPVLAPFYLRLRANGKPAKVALTAVMRKLLIHINSILRQPALQLA

SEQ ID NO: 89596 - protein, 457 aa, unidentified
MKWYLGIDVSKGYADFALVSELLIQVEETFQLDDTRSGHEQLKIWLDALFRRHPHLEIDCGLESTGGFENNWYALLIKLSSSLPIRAARLNPSVVKNASKALLNANKTDAESAKEIAGYLKRYEDQIDFAVRDNQYASFRSLQNHLELVTKQKTQLINELKQILYSSFPELQRFCKQGIPAWVLELLMQYPSPEKLVKQKPVKLARIKGVTEEKAKSLIEKAQATIASRSNSTYEYLTVQLASEVKHKQEKIKQLKQYLDDHCKGKEKEWLESIKGIGSYSAAAIMIQIEDIHRFASPKELASYFGLHPLIKMSGDKRMVSRMSKQGRPAMRALLFMCANSAVRCDEHMRTIYARHRAKGKNHKQALGAIMHKMTRVIWGVLIHEKPYDSRIDLANQSKNIQNPVQDELKETENKRRMQQFDSDAPISRIASKKRKVHAASQVGEAELVRDLEHEPG

SEQ ID NO: 89597 - protein, 460 aa, unidentified
MRTLRDNATRIKRFRELKADLGTKRDRLLVGIDIAKAQHVAQVRHAHTRLLDKRLPIPNTPAGFAAFWAHLERRRQETGVAEIVCALEPTGTYHQALATFLEQHGVDVVLVAPQVAHHNRRTLDGTWSKSDPKDAHNLCDCLHGGHVCFYTLPAEPLTTLRHLVRLLRHARVELGACKSRLRVTLLPALAPAGAPLPPALVAALPPPLTQLLPAAQRRGLPAAAPLPAAFACESTDLAARVTSVQARLAALAADLVRVATPLPAYRLLLSLPGIGPTLAAILLAELGDIAWYSKFSQLRKLAGFDIIWVATGQWTGRARISKCGRPLLRWALYQAALGACRNAGWRARREALIAKRAGDPHAFHKGTVELAAKLLRLLWGVWRSGRPYAPARYAGAPGRPAPAPLRARAGRRGTPPAGTGRGEIGDPSASQAGRVSGRRAGERKNGNDRRSRGQASRSAE

SEQ ID NO: 89598 - protein, 371 aa, unidentified
MEESSKSLYVGLDVHKESIAVAYAPEERGTEVVSLGAIGTRQCDIDKLIRRLQSKGATLVFVYEAGPCGYWLYRYLTRKGLSCHVVAPSLIPRKPGDRVKTDRRDAITLARLMRSGDLSSIYVPGIEDEALRDLSRGRDDAMQDLKRSKRRLKSFLLRHDVRYEGRANWNAAHLRWLSEVVCPTPPQQIVFQEYVRAVSEQQERLQRVERELHEAVKGWRLYPVVEAIQALRGVELTSAVILMAELGDLTRFDTPRQLMSYLGLTPSEYSSGARRQQGGITKAGNSHARRALVEGAWAYRYPAKVSRHLQLRLEKLPAEVQAIGWKAQVRLCRRYRQLTARGKHVNQVVVAIAREMAAFAWAIARIVPLAS

SEQ ID NO: 89599 - protein, 379 aa, unidentified
MTCKECGQVVKLTRTMNKCYSNTELSSHEGTRCQFNGGTGAIKLGIDVHQDFYVVVEQVGGSNPKPQQRFAKAAFLHWAAKLKSQATEVYAVYEACGFGFALQRQLSALSIQCHVVCPQKLDEQNRRVKTDGLDAKALCLKLDRFEQGNRDALAIVRVPSEEEEQARAIHRQREQLVRARKQLEAQGRSLMVNHGLEPVQNWWKPRTFAALPAPQWIKELLANSQPILVALQEKIAALTMQLQSAASPDQPRGLGKMTSVILDREIGDWNRFSNRRQIASYTGLCPGEYSSGNTRVQSCVTKHGNPRLRAALVELAWRLVHFQPNYHPVRKWRQILAKGTLATGAAREKAIVAVARQLAVDLWRIKTGRLRAEELGLIN

SEQ ID NO: 89600 - protein, 342 aa, unidentified
MESIHYIGLDVHKKSIAYCVKSINGEVVKQGTVAAERQALRKWLLDLPDSWVGALEATMFTGWIYDFLKPHAVELKVAHPAMLKAITAAKKKNDRADAEKLADLLRVNLLPECTMMPEDLRELRRVLRYRNLVVRLATQMKNKMSGLLMEVGARNEKKRLHGHRYFLELLQTVEDVPDSVKDLLRLSRGNLELFTSAKKQLTTALREHPMIRERVQCLMSIPGVGEVLALTWVLEIGESDRFSNSRQVISYCGLCSAQKESAGKEKRGPISKQRNKYLQTILIEAAHLAPRWNDQLAELYSKELARGHRNRATLAVARKLAEYMLAVDRRGTPFKEIWQSAM

SEQ ID NO: 89601 - protein, 346 aa, unidentified
MMIIGCDFHPSWEQVAWLDTETGETGERRLVHADGDAERFYRQLPAPVLIGMEATGNSHWLVDLLAELGHELWVGDAAQIRASYVRQQKTDKRDAAHILKLLVEGRFPRIWMASSEVRDLRQLLVHRYKLVIIRARVKNELQHLCLNKGVQRQRKLWTKAGQQVLLELPLKLWAGRRRDDLLRLLAMLDQQIQPLDEAVKAEAQRDKMALLLQTQPGVGPITALAYVLTIGDVGRFPRGKQVASYLGLIPREHSSGGRQHLGAITKQGNRMLRMLLVEAATTAVRLDPEFRKEYLHRCHQKPKAVAKVAAARKLAVRLYWMLRTKVAYPEVVRIESSPRVRLVGAN

SEQ ID NO: 89602 - protein, 345 aa, unidentified
MNYCGMDVAMKSSYIYITDSQGRKRTAGEVPTEKSALISRLRPYLRGGLAVAIEAGNQTAWIHDLLVELGAEVTVVNPAKVKLIAESRRKTDKIDAKILCELLRLDGLPYPVHMPGRQTRSLRGLLVARRQLVSARTKLCNVVRGMLRQEGISLPSRCLNSLVAWRRLLEKEFTHDHLRPVISAYAESFVGLTSSLWSLDRELAQRERQDQRSAQLQTMPKVGRIASLTFLAAGDDVHRFGSSRKLVGYSGLAPTVRSSGERTEYGSISRQGRRELRAVWVQIAHLVAADTGRATTPLRRWYQRVAYHRGKKTAIVALARKLLVIAYRLLYDQTVYDVRRLRRVA

SEQ ID NO: 89603 - protein, 403 aa, unidentified
MNAVGIDVSKGRSTIAVVKPFGETVAKPFEVRHTKSGMNDLVNYLNTLDGECRVVLEHTGRYYEPMVRWLSGAGLFVSAVNPKLIKNFDNNSLRRVKTDKADAKKIARYALDKWPELRQYTAMDKIRTQLKLMNRQMSFYQKQQTAYKNNLIALVDETYPGANKFFTSPKRPDGSEKWIDFIEKFWHVDCVCNISLSSFTDKYQKWCKKHGYNFQPDKPKEIRDASLELIAILPKDDMTKMFIHQAVEQLNAISKAVEELRQQMDSLASKLPEYPVVMSMFGVGTTLGPQLIAEIGDVHKFTKRSQLTAFAGVDPGVNESGDYAQKSVHTSKHGSPYLRRTLFLIMDVLIQKQPEDDPVYRFMAKKRDEGKPYYVYMTAGANKFLRIYFGKVKEYLSNLPSEE

SEQ ID NO: 89604 - protein, 365 aa, unidentified
MEALIECAAGLDVHQGSVVACVIVGAAGRRSFRETRTFGTMHQDLAALRAWLLEKGVTHVGMEGTGVYWQPVYAALEGAFTLIVGNASHMRNVPGRKTDVKDAEWIADLIRHGLVRASFVPPPEIRVLRDLVRHRKTLVGNQSAERNRTLKLLESAGIKLAGVMSDVFGVSGMLMLQALAEGTAAPAAMADLAKRKLRRKRPQLTLALEGSLAEHQRLLLGMHLRRLAEIDRDRGEIEAAIGTAMCPFAAQQALLVTIPGLDTLTAAAIIAEIGVDMSVFGTVQRLAAWAGICPANHESAGKQKRRGTRKGNPYLKATLVTAAVCGARKAAAICATSFTGSGHVWERRRRPWPSATRSWSPSSTC

SEQ ID NO: 89605 - protein, 373 aa, unidentified
MENKILFIGLDVDDKNYHAYAICEDSVEGISFRSKPNIHHLIKSIKEKFSDKNYCLHFCYESTYSGYFLYREITKAGHECTIIAASLIPEMAGDRVKNDRLDAEKLAKYFMKGLLTPIYIPTETDEQVRALVRSRTFIKDQQKEIKKHAVAICKQLGWNYRHEEGSESSSYWTQKHKVWLKEKLKTASEYTQFNFKIIEAQMNDLEERMGQYEAELKRISELPEYCEKIKALICYRGLDILSAMILITEIGDIRRFSHPKKLTSFAGLDIREYSSGGVQRQYSITKMGNKFIRKILTEAAQNYNRIPVIGKDLRTRREGVNPKYTEVADRCMHRIHKRGKHLWHRGIAVNKVKTACAREMLGFIWESLKLVQA

SEQ ID NO: 89606 - protein, 351 aa, unidentified
MVVVGADVHKRTHTFVAVDEVGKQLGTLTVSADGKGHEKALRWAHREFGAALTWGIEDCRHLSARLEIDLLTAGESVVRVPPKLMAQVRASARTRGKSDPIDALAVARAVLREPDLPVASHDEDSRALKLLVDRREDLVAERIRMINRLRWHVHRLNPAKDPAPKALRSARNREQLATWLGPLSGIDAEIAREVLADIEQITPKIDTLERRIEAIVTQLAPSLVSMPGCGPLTAAKIVGETAGVTRFRSEACFAQHAGVAPIPVWSGNTAGRVRMTRAGNRQLNAALHRIAVTQIRVSDSLGKAHYDKRLAAGDSKTEALRCLKRRLARAVFRHLHTDQASHARTCIPAAA

SEQ ID NO: 89607 - protein, 340 aa, unidentified
MTITTVGIDLAKNVFAVHGVDQNGRTVLVKPKVSRAALPELIASLPPCVIGMEACSGAHYWARLFRQYGHEPRLMAAKFVSPYRMAGKSGKNDAADAQAICEAVRRPHMRFVPVKDESQQAMQCLHRTRQGFIEEKTATYNRLRGLISEFGVIAPQSADALRHMVSVQKSSLPLQVQQCVDDLMEHVDRIEANITEYDRILSHIAKTDHRSQRLMELKGVGPTTACALVASIGNAHDFKNGRQLAAWLGLTPSQYSSGGKSKLGRITKAGDSYLRTLLVQGARSVLIGAGKRTDSFSRWVCMLVERRGYWRAVVAIAAKNARLCWASLHYGDDFRLYSAS

SEQ ID NO: 89608 - protein, 415 aa, unidentified
MRIVHENVAGLDVHKKVVVAAVIVKQADGNWLEEKHSFGTMTVDLLELSDWLLLHGVIHVAMESTGEYWKPVFNILENNFEVIVVNAQHISKVPGRKTDQSDAQWIAELLQYGLLKASFIPPLGQRELRELTRYRSSFVRERATLVNRVQKVLESANIKLSSVATNVMGVSGRAMLEALIAGSASPEQMAELAKGRMREKREQLTKAMEGRVQAHHRFVLTELLCQIDSIEETITRFDQEIEAYCSPFEEVVELLDTIPGVGREAAEIIVSEIGNDMSRFPTADHLAAWAGVSPGNNESAGKRRSGRTRKGNQALRTVLNQAAHAAAHTKNTYLSAQYHRLAGRRGAKKAIVAVEHSILVIAYHLIERKEPYKELGGDYFDKRNVEATAKRLTKRLERLGYQVSLELQQPVGAPV

SEQ ID NO: 89609 - protein, 335 aa, unidentified
MVKSNIYVGIDLHKRKFDFVMMYPSGEVVKHGSRSTDADSVLEFASSLAVRHQVVLEPLENSYWFIDQLQPYAGSIHLANPGKVRLIAESRLKNDRIDARILADLLRVGYLPEVYIPEHHIQEWRCLIQHRIRLVRDRTRLKNRILGLLNREGCRVMSSDPFGKGGRAEIDSLELSSPLRRMVDTNLVTSDLLSSQISVLDKEIEQIGQADSIVDNLCTIDGIGYFTALAIRAIVGRMDRFRSVKAFASYTGLIPGYRQSAERVHHGSITKQGSPTLRWLLLQAVPHAVRHSDYLKRMYYRLCYRSSVAKARVAVAHALARIIYHVWMEARPYYR

SEQ ID NO: 89610 - protein, 349 aa, unidentified
MGMLAEQVDHVIGVDTHRDSLTAAVVDTTGSTLAARTLPADAFGYRSMLAFAREHAPHRRAWAIEGTGSFGAGLCSSLLEQGEWVLEVDRPVRAARRNGAKSDELDARRAAMEALSREHLAQPRRRGDREALRVLLATRQSAVAARTRTIGHLKALLVSAPDKLRSHFRHMGTEEQLMRCARLRTSVSQTVEQRFTIVALRSTARRALLLEAEANDRESEIERLVMQLAPRLLAEPGIGPISAGQILCSWSHPGRIRSEAAFAALAGAAPIPASSGRTVRYRLNRGGDRQLNRALHTIVLSRLSHHEETKAYAARRTAEGRSPREIKRCLKRHLSRRLFKLLEASVLGA

SEQ ID NO: 89611 - protein, 405 aa, unidentified
MRYYVGVDWADQTHAVWVVDESGTKIAARAVSHTAEGLGEWGRELDEWRAQGIDLWAAIERPDGRVVDFLLDHGVVVYPVNPKALDRARDRFRQSGAKSDPFDARVLADFLRTDQAHLRALQPSSEAAQELKLLTEDCQRHIRQQTRLVNQLTATLKAYYPRALEVAEVTSALAREFLPAYPTPEALTALTERQWQRWARAHRLPEARAGELWAVLRPPQLPVPAHVVRAKARLMQTLMEQLRPVVAAVAQYRKAIDDFFARMPAAQWARTLPIGKHGITAPTLWARLGDAPGRWESFRHLQAHAGTVPVTKRSGKQQRVVQFRFACDKALRYVVDQVAYLSLLSSAWARPYYDQQRARGHSHRQALRALGAKWLKIIFIMWQRQVPYDEQYHLATMTRQQLGRR

SEQ ID NO: 89612 - protein, 405 aa, unidentified
MDIQPIFRCAVGIDIHLALLCVCIIIAEPGVEPVVHRREFGGFQRDRRAMADWIASFKPDIVVMESTGIYWKSPYAALEKVGIHAQVVNARQVKKVPGRKTDTSDAEWLAMLARAGLLRGSFIPPERLHTLRQVSRHHQKITAMRAMEKNRLVKVLSDAGIRITAVVSDPHGVAATAIIDCLLDGGTPEQAITLAGGLKARREDLLAALQGELSADHRFVANTIRHHLRALEAQLADLERYLVEALQPHEAALQLLMTMPGIDQLAAAKLLVEIGVDMTAFGNAGRLCKWAGVCPGNDESAGKRRRGDTAPGNRYVRTLLCQIAWAAVRTTSQFKSRFQNLVSRRGTKKAIVAIGHKVLKTVFVLLSRQVPYHDSTVDYEALAVKRNAPRWIRQLRKFGYLPKMA

SEQ ID NO: 89613 - protein, 346 aa, unidentified
MKQYAGIDVSLESSAVCVVDAAGKIVREAKVLSEPEALIAWFAALDVPMERIGLEAGPLSQWLYAAMAKAGLSVELLETRHVRAAFKIMPVKTDKKDARGIAQLMRMGWFRPVHCKSLPAQEVRAVLTARKLLQSKLHDVDMSIRGILRGFGLKVGPTTPRTYVARVKALVEGHPTLEIIAEALLKARSVLADELGGFDRRVRSMARDDERARRLMTTPGVGVLVSLTFVSAIDETERFRSSRMVGAHFGLTPKKYQSGETDYTGRISKIGDVGVRTALYEAAHVILTRPVKGSDLKTWALGVARRAGMRKATVALARKLSIVLHRMLRDQTDFVAHRAAPVRAAA

SEQ ID NO: 89614 - protein, 338 aa, unidentified
MDHYVGIDLHSTNSYIAIIDNDNKKVFKKKTKNDLRLVEQILKPYQEQIKGIVVESTYNWYWLVDGLIDEGYRMHLANPSAIKQYAGLKHSDDVTDAFHLANLLRLGILPTGYIYPKEERPVRDLLRKRLQLVQQRTLQILSFQNLVARNLGKSMNGNDVKKLNEDDVEQLFRDEHLVVAGKASIATILFLSERIQQIEKIIHKVAKLKDEYKLLITAPGIHKILALTIMYETGPIERFKKVGNYASYCRCVGSKRISNEKVKGKGNRKNGNKHLSRAYVEAAHHALWHYEYVKRYYQRKMAKTNTIVARKTIAHKLARACYYIIRDQKSFDPTRVFV

SEQ ID NO: 89615 - protein, 381 aa, unidentified
MRKDTRHVGFDVDSRKIAVAVAEPGPEGEVRSLGEIPNREEAVRRLVKKLGPVGRLRVCYEAGPHGYGLYWLLSGLGVHCDVVAPTLVPVKSGDRVKTNRRDALKLARCYRAGDLTAVWVPDAEHEALRDLVRARETAKKDQLRARHRLGKFLLRRGLRAVAGMKNWTKSHLLWVKTLRFERPAQEATYLDYLHEVEHAGERVARLERAIDQAIEALPAEMRAQVAGLQALRGIKQVSAATIVAEVGPLSRFPRPKPLMGYSGMVSSEDSTGDSVRRGAITKTGNAHLRRIVGEAAWAYQYRPAMSAEMKKRQEGLSEEVKEIAWKAQHRLCTRYRRLLAKGKLRQKVTTAIGRELLGFIWAIGVQVEREQRSATPTRKAA

SEQ ID NO: 89616 - protein, 364 aa, unidentified
MHELTHIGLDVHKDTIAVAVLRSSTTTCDERVIPNTPEAVRKLLARYPDPSALRTCYEAGPTGYDTHRLVTSLGIACDVIAPSLIPKRSGVRVKTDRADARNLARLHRAGELVAVRVPTPAEEAVRDLVRVREEIKADRRIARQRIRSFLLRYGKRYPKPTDRWSFRFEVWMRALRFEEPLSQATFEHLLGAYFVRDSQLAAIDRQIEELALLDPLAEPVARLRAFRGIDTLSAVTIASETCDFRRFGTAASYMAFTGLVPSEHSSGASTRHGGITKTGNQHIRRVLVEAAWAYRYAPAVRGKLKKRLEGQPPEVAAYSWAAQCRLSGTYRKLAAKKGANKAVVAVARELSGFVWGAMTGNMGT

SEQ ID NO: 89617 - protein, 326 aa, unidentified
MTLSHSTDNIFVGIDVGGAGLDVAWHRGDSAHYANRPDAIATLVERLRTGPEVTRIVLEPTGGYEKVLVKALRQAQLPVEIIHTTRFNAYRALVGVKAKSDTSDARLLASYAAAPDDVRGRKAGYVALPEDATREELSELASRRDQIKHMIHAETCRLGTVRKTELRQMITAHLETLRAEDKRVHRMMLELVRQRDDLKRDQRLLKTIKGIGVKSALVLLASVPELGRIDNKAAAALIGVAPFVRKSGTMTAPARIHGGRAAVRSILYMAAVTASRHNPLLSLFYDRLIAKGKPPKVALVAVLRRLVVFANAVLRSGQPWKGASAT

SEQ ID NO: 89618 - protein, 387 aa, unidentified
MGAGYRCSIGDRVGRTKDCFMDTSYAVFCGIDVGKGEHHAVGLDAAGARLFDKALPNDETRLRAVFDDLAARGPILVVVDQPNTIGALPVTVARACGHDVAYLPGLSMRRVADLYPGQAKTDARDAFIIADTARTMPHTLRRVDIGDETLTELGVLVGFDDDLAGEATRISNRIRGLLTGIHPALERALGPRIAHLAVLEILSRCGGPSGIRQAGRRRITTLAVKHAPRMGARLVEEIFAALDQQTVVVPGSTAAEIVLPKLADSLKEVLQQRKSVAEDVERMLDEHPLSRVLTSMPGIGVRTAARILIEVGDGSGFASAGHLAAYAGIAPVTHRSGSSIRGEHPARSGNRNSNGPCSCPRSPRCTTRRAAPTTTANAPRARSTTPP

SEQ ID NO: 89619 - protein, 338 aa, unidentified
MEVYAGLDLHSTNTYVAMIDGENKVLYKQRHRNEISAILSAIEPFKKDIRGVVVESTYNWYWLVDALMDAGYQVHLANVSAIKQYEGLKQIDDRRSSLWLANLLRLNILPTGYIYPKEERPTRDLLRKRLQLVRHRTSHVLSVKNILARNLGIRMKTYDIKKLKASEIRTLFPDKEMRLAVMSSMGLIQHLEEEIDGIEKLITKKLKIRKEFTKLLTVPGIGEILGITIMLEVGRIDRFPTVGDYSSYCRCIRSIRTSNGKVTGYGNSKNGNKYLSWAYVEAANYARRYHETVRTYYERKMAKTNKIVAIKTVSHKLARASYYVMRDGVDYDQARLFA

SEQ ID NO: 89620 - protein, 426 aa, unidentified
MNATTDFAATIGLDWADQKHDLWLRPSDGAKTEHLRLDQTPDAIHEWVAKLGERFGRRRVAIAIETSRGPVISALMACDFIVLFPINPKALKDYRAAFSVSGAKDDRTDAMLLEELVRLHRDKLHALEPDTELTRKLGGLTENRRQLVDERSRLVNQVHSLLKTYYPLAETLLDRHMTTPMAADFLACWPDLSALQKAAPKTLRAFFYQHNSRGAKKMEARLATVKTARPLTQDEAIITPARHLVTALAGMLKVLHQALAGLDQVIAETFDQHPDAALFRSLPGAGPALAPRLLVAFGTRRDRFASAAEVAQFYGIAPVVKQSGTTKTTHMRSRCPKFGRQTFHENAGCACKQEPWAKRYYEDQKGKPEGGHHQAIRALGYKLIRIYYACWKHNTPYDGQRYLQALENHGSPLHKKLQTPTQKSGE

SEQ ID NO: 89621 - protein, 313 aa, unidentified
MNSIKVFGIDLAKSVFQVCVWMSDGTIASNRKNPRNKLLVTLRQFPANTLIVMEACATSHYWGRTFQSIGLLDHLIPTQHVKAFIRHQKNGANDAPAICKAALRPGIHFVTIKTVGQQDIKTPRSARQLMVEQRAAEANQARALGAELGIELSVGIHTLSQRSHELIEDPALDISPISRGLLFSLLENLHLLDECIRSMEHNILVLCQQLPKYKVLITIPRIELLIAAEFLNEFNAEHFTNGRQLSSRYRLVPKQCSSGGKNNLSSMTKNGNRDLRMLIIHGARSVMLWSQKHDDSIITSIYSKLFKLQESDK

SEQ ID NO: 89622 - protein, 340 aa, unidentified
MDYGCDYHPRFQQIAFVNTEGGECGGTRLQHVQEAEQFYRSLQGQAVRVGMEASGHARWLERLLAELGYELWIGDPAKIRAAAPRKQKTEARDAAHLLQLLMEGQFERMRIWVPKAGERDVRQLVLHRHRRVEMRTRVKNQLRTVALNEGMGPRPGLWSRKGQERFRALALPAWSERRRADNLELLADLLLRTTPLDAAVEQEAQRRPEVVRLMTHPGVGPSTALTFVLTIGEPMRFDCGKQVASYLGLIPAEDSSGGRQRLGHITKQANALLRGLLVEAAHSAARREPELGRCYRRLAMRKNRSIAAVAVARKLALRLWWMWRRGLNYAQFRTSGSHAG

SEQ ID NO: 89623 - protein, 338 aa, unidentified
MKLYAGIDLHANNSVVVVIDEDDRILYQKRVHNELGALLQVLAPYQATLQGIVVESTYNWYWLVDGLMATGYRVHLANTTAIEQYKGLKHTDDESDARWLAHLLRLGILPEGYIYPKEERAVRDLLRKRSQLVRQRTSNLLSIQNLLTRNTGSALSGNRIKQLTIEEVEELLPQAELALAVKSNMAVLQCLEEQIEQIEAVVLAQLKLRDGFQPLLTVSGIGQILGMTIMLETGEIGRFATVGDFASYCRCVSSQKLSNGKRKGQGNVKNGNKYLAWAFVEAANFAVRYNAQIKRFYQRKQAKTNGVVAIKTVAHKLARACYYILRDQVPFAVDKAFA

SEQ ID NO: 89624 - protein, 401 aa, unidentified
MTFVIGLDWGGAAHAVCVLDRGSGAVIDRFEARHDAGGLRDMERRLARHGAPGDLPVAVERPSGLIVDALVAAGHPVVPIHPNAVKASRPRYRANGAKDDRGDAYLLADLLRTDGHRFRPLTPPSDAIRALRALVRDRDDLVATRLQLANQLRALLESFWPGAAAIFADIDSPIALAFLERYPTPDSATRLGVKRLASFLAQHRYSGRRSPDELLARLRAAPQGLAGPVEAEAKGEMVRALVAVLGPLVTRILDLTARIRHDTAASEDGQIIMSFPRAGQLCAGQILAELGEDRARYLTPDQLAADAGLAPVTRQSGKSRGVSFRWACNRRLRTALTCFADNSRHACAWAARIYSSARGRGCRHPHAIRILGRTWLRVLWRAWQDRKPYDPVLHGAANAIG

SEQ ID NO: 89625 - protein, 332 aa, unidentified
MSVYVGIDVHRKRSQVAVVNEGGEVLANRNVPNGAQPILSVIGGLPPGTPAAYEAAFGWGWLLELLESYGFEPHMVHPLQCKAIASARLKNDKAGAATLAQLLRADLLPEAWIAPPQVRQLRAMLRHRAQLVRLRTLLRNRVHAVLAGHGHGRPAGCWSGAGRQWLASLDLPAVSREVIDDALALMDAVQQPIGRLDAEVRQRAKADPRVEVLTQLPGAGPFTALVLLAETGDITRFSSARKLASWAGLTPTVRGSDRTVHHGHISKQGPTWARWVLCEAAQTAKRHPDFAPGYQALARRRGKKIATTAIARKLLTRAYHLLTDAASGGAPS

SEQ ID NO: 89626 - protein, 355 aa, unidentified
MDSTKYIGMDLHKESISIAVMNAAGKIGMECVIETKASTILEFVDGLRGNVHVTFEEGTSAAWLYDLLKPRVTKLVVCDPRKNKSMREGNQSDKIDARRLAELLRLDHLTPVYHGEHGLRTLKELVRSYLTITKDLGRVMTRVKAIYRSWAIPCTGKQVYAASHRAEWLAKINEPGVRRRAEFYYQQLDELRVLRQQVRQDLLAESKKQQAWKRLCQIPSIGPIRSAALLGILQTPHRFRTKRQLWTYSGLGIETHSSADHRSVHGQLQRSKKSVLVRGLNRNCNHDLKNLFKGAAAVASSKPGPFEQFYAALVAKGMRPEMARLTLARKIATIVLIVWKRGVCFDAQYLKPQTA

SEQ ID NO: 89627 - protein, 349 aa, unidentified
MNFYTNTHPYYCGIDLHTRLLYVCIIDNENNILVHEKIDDSPDKLLALLKPYLGNIVVGVECMHCWYWVSDFCEEHNIDFILGHALYMKAIHAGKTKNDKIDALKIAKLMRGGNFPLAHAYSKEHRSIRDALRRRTHIMRMSAQLKAHVASTVSQYNLPALETRLDLRNSPDREKMRHFFPDEAVQKSMDLNLNIIETMVSELYKIEHYVKTQAQTHCATDLHILKSFPGIGKILALTILYEVGDIERFPTVQKFASYSRLVKCKAESAGKTHGTQGNKIGNAHLKWAFSEAAVLYLKGNDNAKRYLAKLQKRMSKAKALSALAHKIGRCTYFMLKNQQVFDEERFLNG

SEQ ID NO: 89628 - protein, 341 aa, unidentified
MKNLFIGVDFSKEKVDVAIIFADGLTETAPRVFNEFKTTVSGYKQLVKWVEKNSYGIDPSLWLFCGENTGDYSKGLCNFLYGKGYDMWLENAKSIKDASGLRRLKSDRADASMIAEYAMRNHDKAVMYKPLSESLAQLRELFLYRQMVVRHRCSFQVRRGEKKLAMEKSPIKTMISQSGRHIVSELNKEVEKIDKRIAELIKSDEELTEVFTIVTSVPGIGTQNAVCLMAYTDNFRRFNYDSRKIACYYGIAPFGKDSGTSVHSDPHVHYMANRQIKAMLTQAALAAVNFNPVMARYYMRLVERGKKKQVALNNVKNKLVHLVTAMVRNRQTFTPEYKISA

SEQ ID NO: 89629 - protein, 425 aa, unidentified
MAVYCGIDWAEGHHDIALIDDEGRLIAKRRIDESLDGITELTAMLAAAGDSAEAPIPVAIETPRGLLVAVLRATGRPIYPIKPLAVARYRERTSLSGKKSDHVDAMALANILRTDRHLHRVLPEDSALARSVAVLARAYQDAVWRRTKIVQELRARLREFYPGFLVAFTAGSGSGRGLSTTQLASGDARSVLAIAPSPADGLKVSKARVETALRRGGRQRRIASLAERIVAALRVPQLRQDPVVEHAMRTETLALLGVLDAVCDSVDQLTAALVETFAQHPDYEIITSFPGLADISGAIVLAEIGDDRTRFIDDRALQAFAGAAPVTRASGKSRTVTRRRTKNNRLAAIGHCWAFTAAARPSPTREHYLRRRERGDRHPAALRHLFNRMLGQLHHCLQTSQTYDPIKAFPHVTPAPTEPAEQVAA

SEQ ID NO: 89630 - protein, 344 aa, unidentified
MPSIVGGLDIHRKQITFDYLDLVTGEVKRGQVTPADRAHLRAWLARFEDPGEVAFAAEACTGWRYVIEELQRAGIEAHLAEPADTAAARGRKRRAKTDRADARLQRDLLTQGRLPECWIPPEHVLECRALMELYHDLRAEHTAWLQRVHAVLLHQGVPAFHDLSRTEAPAELAARAREHLSPAGQLQVALYLRMLEVTGGELDGLRRQLTAAARHLHGAKVLADSIYGVGPFTALALTCWLGGAGRFTSARKAVRFAGLDITVYSSDGKRSPGHLSRQGPPVLRWAVYEAGKTHARPLAPDHRYYAAVKDHKDGKRAALSEARKIIRRACHILSELGDDALAMV

SEQ ID NO: 89631 - protein, 356 aa, unidentified
MSHDVKYIGMDVHKEAIVIAVLNESGKLVMESVIETKASSILQFLHGLRGELQVTWEEGTWAAWLYDLLQPQVQHIVVCNPRRNALLKEGSKSDKVDAHKLADLLRTGMLRPVYHGENGLRTLRELARSYQTISKDLTRVMNRLKALYRGWGIPCAGTQVYAARGREEWLSKLPQAGVRRRAELLYQQLDGLQALRREVRPEFLAESRKHQAAKLLRQIPCIGPIRAARLIALMQTPHRFRSKRQLWTYSGLGIETHDSAQYRFVRGQLQLSKKPQQIRGLNRNHNHEMKEIFKSAATRASCGRGPFYDFYAALLAKGMKPEMARLTLARKIAAITLTLWKKEERFDVEQLKTQAA

SEQ ID NO: 89632 - protein, 333 aa, unidentified
MVEGTEGSHHKEGTTKMAKHSMVCAGIDTGKHKLDVALDQGPEQLQVDNSPDGHKSLAAWLRQRLVRRIGIEASGGYEQAAVAALRRDGFSVILFQPAQVRAYAKFILQLAKNDKIDAALIAACTAATKTIREPPDPRLAALAGHLTMIEQIIEDIARLKTRCESCRDERIRQCWKEQITRLRALARSEFKQLLAAIREHRDLAERLDLMASVKGVGLKTAVDVLIRMPEIGSLSREQAAALAGLAPYDDDSGTRTGERHISGGRERLRTSLYAAALPAAFKWNPQLIALYRRLIAKGKSHKKALVACARKLLIFLNTVVARGTPWTPNTAQI

SEQ ID NO: 89633 - protein, 412 aa, unidentified
MTVTNQFAAHVGLDWADKKHDVCVQFKNGERAFDVIEHTAEALDAWLTELHQKVKGRIAIALELKKGPVVYALQKYPFITVFPVHALSLARYRQAFSPSGAKDDPQDAELALELMLRYPQKIKAIEPDNADIRLLQQLVEQRRQLVEDKRRFVNRIINTLKQYYPQPLEWFSHRGNLLLCELIIRWPSLQQLKRARRDTIRNFLNAKGGRAMALTEQRVASIDNAIPLTTDPSVIEANALMATALATQIKVVSEIIKTYDERIETLFDTLPDAGLFKSLPGMGPCMGPRMLAALGDNRDRFNSAEEIQNYAGIAPVTERSGQKSWVHWRWQCAKFVRQTFVEWAAKTVNSSYWAKLYYQGLREKGKSHQSAIRALAFKWIRIIYRCWKARTCYDEAKYLLALEARHSPLLKP

SEQ ID NO: 89634 - protein, 399 aa, unidentified
MSQTLNAAIAVIGIDIGKNSFHIVGHDERGAIVLRQKWSRGQVEARFANMPPCLIGMEACVGAHHLSRKLNSLGHDARLMPAKYVRPYSKGQKNDFRDAEAIAEAVQRPTMKWVATKTADQLDLQALHRVRERLVSQRTGVTNQIRAFLLERGIAVRQGQRFLRAELPRILATPPDVLSPRMVRVIEGLAGDWRRLDTRIGDLSAEIEDLARRDAGCERLMSIPGIGPIISSAMVAAIGAGDGFSKGRDFAAWLGLVPRQISTGDRTILGKISKRGNRYLRVLFVQAAWVVLVKVKPDKWEGHGLKPWIDPPRSGCIATCWRSHLPTSSRASRGAFLLVAEPSRRASFKSRDRSRGAELAAEVCERMRRDGGSVFPALANTGDPNGPVEACPLMSSQAR

SEQ ID NO: 89635 - protein, 342 aa, unidentified
MSTTKNSAYHPSELAPILGIDVSKETLDACFMQLDGTSESMQVSNTAKGIQRLIAWVSKRVERCYVCLEATSIYGKQVSEYAYALGLPVSVINPRQTHAFAHSRLARTKTDTIDAQLIARFARSMLIEGRLPRFEPLSASMQALQALVRYRDTLVMQRVQVMNRLETTELTWIQRSEKAVLRLLDRQIDKVEAQILQQIEADPAIKGSFEILTSITGIGAVTATVLLAELPPIERFDSPKQVAATAGVTPRARHSGTRTPSSQPISKMGNARIRKTLYMAALSAMKYNETIKSFAARLVAKGKPGKVVVVAVMRKLIHISFALLKRQVRYQSEYKNLKLAAN

SEQ ID NO: 89636 - protein, 361 aa, unidentified
MAQAKTWAAFDVHVSGVVAATLDRDSGELRVQRLPGRSEDVAAFAAGLPGLVRATYEAGPTGFVLARKLEAVGIDCLVCAPGLIPRGASDRVKTDRRDAERLVRLLAAGELHRVAVPSVEAEALRDLVRAREDLRGDLMRARHRLAKLLLRHEIRFDGPERNWTQAHLGWLAGIELAQPASQRALEDYRGAVAALMIRREQLEAEIARALPESPWAQTARRLMCLRGIDTLTAAGLCAEIGDFHRFRHPAQVMSYLGVVPSEHSSGERRRRGPITKSGSQHARRLLIEAAWHYRRAPRVAGNLARRQRDGEPQVLALSWKAQRRLHHVWHRMEQRGKRRTIIAVAAARELAGFCWAVATAD

SEQ ID NO: 89637 - protein, 355 aa, unidentified
MSSLKYIGMDVHKETISLAVMNSAGKLLMESIIETKASTILQFFAGLRGDLHVTFEEGTWAAWLYDLLQAHVTEVVVCNPRKNALLKDGNKSDRVDARKLADLLRGNYLKPVYHGEHGLRMLKELSRTYLTVSKDLVRVMNRLKALYRSWGIAYAGKSVYLRGQREVWLNKIKEAGVRRRAEYLYQQLDTLLPLRKEVRRELLSESRKHSATEILRDIPTIGSIRSAHLVALIQTPHRFRNKRQLWAYSGLALETHDSAQYRYVDGQLLHSRKPQQLHGLNQDHNHDLKGIFKGAAHKAVSSPGPFHEFYERLLAKGTKPSLARLTLARKIATITLTVWKKGVRFDPEELKSQAA

SEQ ID NO: 89638 - protein, 341 aa, unidentified
MTTVSTIGLDIAKHVFQAHGADASGQAVFRKKITRTKLIDFLASQPRCLVALEACGGAHYWGREISKLGHTVRLIPPSYVKPFVKRQKNDAADAEAMCEASQRPSMRFVAIKDEEQQANGVVFRARDVLVRQRTQCINALRGHLTEYGWVVPKGTSHMATLIDQIEDPNCSLPKSACAVLSVLVTTLKSLEENIAILDAEISRRSSEDAIARRLMTIPGVGPISATAIAALAPPVETFRTSRDFAAWLGLTPLQRSTGGKQRLGATSKMGERTIRRLLIIGASAVVSQARRRGAPAGSWLARMLVRKPRMLVMVALANKTARIIWALLAKGEVYRAPAAVA

SEQ ID NO: 89639 - protein, 397 aa, unidentified
MHGLDHSIKFTRILAIDLGKFNSVACIYDPATTVHSFITIQTTPQSVHDLLTEHTGEDPSQTLVVFETCDCGGWVYDIASALGFTVAIANPSHEAWRWTKVKRKTDRDDARKLASMAAMKQLPTVHMPSPQQRQKRRLVHQRRSLVQRRTEVKNSIRSIFSQQGLLLVRGTKQWTKPGIAQLKAESRPLNQCSVDELWRGRLQVELEVLEMFDEQLKRVDHKLDALGSEDERIERLQQVKGVGPRLAEALVAHIDDPHRFKTARQVSAYVGLVPRQFESGTMKRVGRITRRGPSLLRGMLIEVAWMVYRHNPWAKRFVQNVSRGMKQRKKIAIVALARKLLVRLWAMLRDGSGWIDPDQPREQHKGQDGGVPPAGVWAPPEDTGAITALSSVVGAIG

SEQ ID NO: 89640 - protein, 369 aa, unidentified
MEHRSMFVGLDVHKETIDVSIAEGHREGEVRHYGVIASDLEPLDKVVRALRAPDRTLRFVYEAGPCGFGIYRHLTKRGEDCAVVSPSMIPKRSGDRVKTDRRDSLMLARLHRAGELRAIYVPDDADEAMRDLVRTREDAVGVGTQAKYRLKAFLLRQGRRYPGREGWTLPYRRWLTDLSFPSAAQHIALQEYRDAIGETEQRIERLTEQLRQLAPTWRWAPVVAALQALRGVSFITAIALVAELGDLTRFRHPRELMAYLGLVPSEHSSGPSVRRGGITKAGNPHVRRLLAESAWAYQGTPRIGRQHAYRQEGLPKVVCDIAWKAQLRLTARFKRLVARGKAKPKVATAIARELTGFIWAIAREVSPAP

SEQ ID NO: 89641 - protein, 398 aa, unidentified
MTESSDYESVQVFIGVDVGKDTHHAVAINRSGKRLFDKALPNDENKLRSLISDLKQHGQILLVVDQPATIGALPVAVARSEGVLVGYLPGLAMRRIADLHAGEAKTDARDAAIIAEAARTLPHALRTLKLADEQIAELSMLCGFDDDLAAQTTQASNRIRGLLTQIHPALERVLGPRLEHPAVLDLLQRYPSPEKLASLGEKKLAAQLCKLAPRLGKRLAADIAQALAEQTVVVPGTNAAAVVLPRLALQLITLHKQRDEVALEVEQRVLAHPLYPVLTSMPGVGVRTAARLLTEVACRAFASAAHLAAYAGLAPVTRRSGSSIRGEHPSRRGNKALKRALFLSAFAALRDPLSRAYYTRKMSQGKRHNQVLIALARRRCDVLFAMMRDGTFYTPQGS

SEQ ID NO: 89642 - protein, 413 aa, unidentified
MRKKTAEVELHYERCCGLDVHKKLIVACFRDGSNKTVREFGTTSKELRELAEWLTSVECEIAAMESTGSYWKPVFNILELLGLDVMVVNAQHVKNVPGRKTDVNDAIWMSSLLAQGLLKPSFVPDREQRELREVTRYRKSLTEERAREINRLGKMLEGANIKLTSVVRDVLGKSSRRLLNAALDDEALSDVTIKDMVEGQLAKKSSALADAMDGVLSKTQRLLIKAVLDHIDDMARRIADLNDIIKNEMEKYDKAIEQLDKMPGIGEASAQVILAEIGLDMNRFPTSGHLAAWSGLCPGNNESAGKSKRSPTRKGNATLKTTLVQCANAAVLTKDSFYRAQYEKLVVRRGRKRALVAVAHSMIIAIWHMLKHDEEYKELGRNYYNKFNPEKKIAMHLRKLTELGWIPPITASV

SEQ ID NO: 89643 - protein, 343 aa, unidentified
MNEISMIGLDLAKNVFQVHGVDASGKVVLQRRLGRKAVEKLFAKLPPCAVGMEACGSSHHWARVIGRHGHDVKLMPPAYVKPYVKRNKNDGRDAEAICEAMSRPTMRFVAVKSVEQQAMLSVHTTRALLVKQRTMVANALRAQLSELGLVAAQGHEGLHELMARLEVPSEEIPEMMRSALLMLVEQWQALDAKERVLEKQIVKAVRCDQEARRLMAVPGVGPIIASAVLAKVPDARLFRSGRDFAAWVGLTGRDHGTGGKHRPGRISKQGDRALRTLLINGASAHLRQQKRRGISDPWLRELLARRPYKVAMVAFAAKTARIIWAMLAKGEAYRDRTSAPAAA

SEQ ID NO: 89644 - protein, 328 aa, unidentified
MLGIDVSKDTLSCSLFDPSTKRQKWFKEVKNAPAGWKQLLRSTQPNVTWVLEPTGRYSQEVVRAARLAGRDVRLAQPKSAQLYLQSVQRRAKTDRLDAQGLALYGITHDLAPYPLKSEMHEEIDQLLLARKGLSQSLCELQARQRDLPRASAALAPAVAALREQLQVVDRQIAEMTRAPELAVVQELLKVHGIGPVTASTAASCLTSRSFSHSDQFVAFCGLDIRVRQSGKKNGQLGLSKQGDSELRRLFYLAAQSSLRAKNSPFKAQYDREREKGLSSTAAICAVARKMARLCWSIVHHKTTYDPQRVYQQPQPAPPAQAGSEAGCF

SEQ ID NO: 89645 - protein, 366 aa, unidentified
MDAIYIGVDFHARQQTTCYLKTETGELVISELKHQDKEQVRAFYQQFPSPVIVGLEASGYSPWFEALLEQLGCEVWLGHATEIRRRARWRQKNDRRDAELIWDLMVHDEFPRLHRPAATSREVLRMLRYRQKLIKLRTMAKNSLQAIALQAGLAKGKQLFTAAGQEEFKSAALSPVLQWQREHWFALLRPLNQQLLETMVWFKAQSKDDLRIQRLRTHPGIGLLTALCLLHTLQPVERFRNPRKVAAYAGFDPVERSSAERQHFLGISKAGSRLLRYLLVEAVQTAVRYDEDLKRFYKRVAERRGRPKAKVAAARKLLIRAYLMMRDEIDYAEFRHRAVAVRLARGGQGPSNVPAVLIGQPASPGA

SEQ ID NO: 89646 - protein, 408 aa, unidentified
MQVLYTRCAGLDVHKDTIVACVRCVSPPMHQEVRSFGATTAELLELADWLAEHDCTHVAMEATGVYWKPVWHVLEDEFELVLANAAHIRNVPGRKTDVNDAMWIADLLAHGLIRSSFVPPQAIQQLRDLTRTRKQLVREASQHSLRIQKVLEDANLKLGSVLSDVLGKSGRAMLDAIVAGEADPARLAALAQGTARNKTAELREALRGRITEHHRTMLRLHLGVIDALQRTLAELDAAVGKALAPIQQRARLLTTMPGISDLTASVVVAEIGVDMSRFPTAGHLVSWAGLCPRSDESAGKRRSTRVRKSGTWIKTTLVTAAWAAVRVKTSYLRAQFLRIKARRGAKKAILAVAASMLTAAFHMLRDGTEYTDLGSQHFDRQDRSKTIRRLLKRLQDLGCDVPVQAHAA

SEQ ID NO: 89647 - protein, 341 aa, unidentified
MKQYVGLDVSQKETAVCVVDETGRLIFEGRAKSDPGALAALLAKKAPDAERVGFETGAMSSWLWHELKRIGMPVVCIDARHAHAVLSVRMNKSDENDARGLAELVRIGWYREVAVKSEASQQVRSLLIARSRLVTMRRDLENQIRSMLKECGLIFPRAIAGQFQRCVIDLTGEGHVLWTVLLPLLSVHGHVCRELEGLDRQIRQMARTDETTRRLMTVPGIGVVTALTFRHTIDDPSRFRSATSVGAYLGLTPRRKQSGETDTVGQVSRWGDRLLRTYLFEAASVLLHRTKRWCSLKAWGLRLAKRNGMKKAQVAVARKLAVILHCIWVDGTSFQWSKEPA

SEQ ID NO: 89648 - protein, 330 aa, unidentified
MKKWKFTLGVDVSKNTLDISCSELNEHIKIRNGSEGFIQFLKWCRRLNIDLKESFLVLEYTGGYEYKFLQFCEAHPIVYARIPGLAIKNSMGITRGKNDQVDSFRIAQYGEEKYKSLQPSKPLNPAIIRLKELLSFRKRLVRENAGYKNSIKGREDMYEKNKKDIIVKSLQQKLKANTKIIEAIEVEMMQIVMNDEEMYLNFTLITSIKGIGKVNGLMTIAYTENFGSFSNPRSYAVYVGVIPFDHSSGTSIRGRKRVSHIANKELKQELNQAARSAIQWDKEMTAYAERKMETKCYKIVLNNVKFKLILRMFAVVKKGEMYVDNYKKVA

SEQ ID NO: 89649 - protein, 346 aa, unidentified
MPVYMGVDFHARVQTISYLTTEDGAIEQVELEHLKDDVRGFYQQFVGEVIVGFETSGYAYWFEEMLEELGHQVWIGDPAEIRRLARRRQKNDRRDANLILELMLRGDFPRLQRQSRESRQVLQQLRYRQRLVKMRTMTINTLRFMAMSRGVSIRGHLSSRVSQERMKSLPLSPVLNQQRDELVSLVQELTLKIARVQQWLEAQARQDGQVRLLMTHPGLGPLTGLCLVHTLSPISRFANGRRVTGYVGLDPMEDSSADRQRFGSISKQGSRLLRFLLVEAGQVAARQDHDLKQFYRRVQLRRNRPKAKVAVARRLLVRAFILLRDQIDYAEFLRRGVAARSARNSP

SEQ ID NO: 89650 - protein, 415 aa, unidentified
MNRLIERCAMLDIHKSQITACVRVPDDDGGRRQEVREFASTTSGLLTLADWLRSYGVTVVGMESTGVYWRAVYYLLEDEFECQLFNARHLRHVPGRKSDVQDAEWGCQLLEHGLVRASFVPPRPLRELRDLVRYRKAKIQERTREVQRVEKTLQDAGIKLSSVASEVLGVSARKMLDALISGTNDPDVLAELAKGALRKKIPALREALQGRFTGHHALLVGQMLAQIDFLDETIQTLSARIEELTAPFSRELELLDTIPGVDRRAAELILAEIGPDMSVFPTDAHLASWAGMCPGQHESAGKQRSGKTRKGSKWLRGTLTESAKAVVRTKGTYLSARYHRIKSRRGHAKATIATAHKILTAAYHVLQRGVPYNELGEEFFYRRDTENTERYRRRLIKQLERLGHKVTLEPLPEAA

SEQ ID NO: 89651 - protein, 400 aa, unidentified
MHYCGIDIAKRKHEASVIDESGRALSRSFPLDNSAEGAAKLFKFFSDNRIAKDSIVIGMEATGHYWLALYSFLVEEGYNIKVINPVQSDAFRKMYIRQTKNDSKDSYIIAQIMRFGEYHTTELAEESIIALRQLSRYRLCLVESAGNCKRRIITILDQVFPEYAGLFSDIFGATSLELLETYPLPDDIMNVPTQQLVDFLSKASKGRFKEDKANELKAIAKGSFGVAFAKDAFCFQIKQLVAQLQFLEEQISDLEEEVNVLMQSVDSPITTITGIGSVLGAAILSEIGDIRRFDHPSKLVAFAGLDVKVVQSGEFTGTQGKLTKRGSPFLRRALWLAANIAAFKDPTMSVYYQSLRQRGKHHYVGISAVARKMCNIIFAILSENKPYDPYYPKHIQIISD

SEQ ID NO: 89652 - protein, 425 aa, unidentified
MFAESRDDEQIIARVAALDIGKAEIVCCIRLPAVDGGRRVQEVSTHSTMVTSLCELANRLVGLGVERVVMEATSDYWRPPFYLFEAHGLDPWLVNAKDVKHLPGRPKTDRLDAVWLCKVAERQMLRPSFVPPADIRQLGDLTRYRIDLVGVRTAEKNRVDKLLEDACLKLSVVASDIFGVSGRAMMAALIAGERDPTTLADLARSRMRTKIPRLEEAFAGLRLGTFDDHHRFLLARMLARVDAVNADIAAVDTQIGQHLTPFADAVARLEEIPGIGPTAAAIIIAEIGLDMTRFPTPAHLASWAKFAPGINSSAGKTKGNGSTGHGNRYLARVLGEAVAGAGRTDTFLGARYRRIARRRGKNKTIVAVGRSLLVIIWHLLADPDIQFHELGADHYDRHVNTHTKRRNHVRQLEALGYRVTLEPAV

SEQ ID NO: 89653 - protein, 412 aa, unidentified
MKDLLEISCGLDVHKEKIVACILTDPLGKPTRSEIREFSTLIPDMIALRNWIVSKNCHHVAMESTGIYWMPIYEILEDAFSGDITLLVVNARHMKNVPGKKTDMRDSEWISTLLRAGLLNGSFIPEKRIREFRDLNRYRKSVIRDITSQKNRIEKFLQSSGFRLSSFISDIFGASGRNIILHLVEHGQIDKTALDSCLKTKTRNRIDEILMSVNGTLSEHQKAFLRILMTHYDSLKKHLAEIETSLEEDMAPFALQVEQLNSIYGISTTASCAIIAEIGIDMKPFKTAEHICSWAGLCPGNNESAGKRKSTSVTKGNPYIKSMLCEIAWVIAGKRNTYLSAWYWRIKQKKGAKKAIVALARKLLVIIYTMLKQGTLFDESCFETRRKHCEQKQLSRYIRELEKHGYHVEAQS

SEQ ID NO: 89654 - protein, 397 aa, unidentified
MIRVQRKEIAMKKVNSNVSCAGMDVHYKFSNVTFRDASGKVVSRQRLDHPDRQRLQERLSRWPKGIPVVMEASFGWGWLSDLLEQAGQDVHLSNCYKVEQMRKARGWVKTNKKDADLVSLLAFEQTDWWKVWRAPPDVRNRREQMRFRGDMVGSQTQVKSRIHAIFHRHGIFHEFSDLFGGKGRKFLVELCLYNPANLPAEALLALRGQLKLLDHLRRQLADVALILHKQLLKTPLTTRLKTIPGFGLILAHVLAAEIGKIERFKNQKSLASYSLLAPRADDTGEDDPSHSPKGRHLGLRGNRTLKWAFIEAAHGAVRSGGKWRAIFDRATNGGKKNCNRGYIKVARELVKVVYVVWAKGVDYQVIPPVRPGRKSNKKKSRSETGQLLHPMVHALPA

SEQ ID NO: 89655 - protein, 344 aa, unidentified
MQITTIGLDLAKHWFQVHGIDAAGKPAVKRRLRRSEVVEFFKGLEPCLVGMEACATAHHWARELIALGHEVKLMPPAYVKAYVKRNKNDAADAEAICEAVTRPSMRFVPIKDVDQQSVLMLHRARALLIRQRTMLVNALRAHMAEFGIIAPQGLRNVEQLIEAISDARTELPELARSILQLVVAQLNDTAARIRVLEARLAKWHRANTVSRLLASVPGVGIMGASAIAATVTDPSLFRSGREFAAWLGMTPRQNSSGGKERLGGISKRGDKYIRSLLIAGAVAILRHARDRATKDAEWVRGMLARKPAMVVAVALANRTARIVWAVMRRGSAYRATESLGQAAA

SEQ ID NO: 89656 - protein, 390 aa, unidentified
MLSIGIDVSKGKSTVCGMKPGGEIVYAPFEVQHTREGMSELVLLLHNSGEEVRAVLESTGSYHCPVVAALLENGIFVSVVNSLRMKRFCSQSIRKVKTDRIDAMQIALYGLAYWQELQPTKLPEDTYRELQLLARQYYQMTSLLIKAKVDFNAICDQVLPGMQELMSDHAGRHKLSDFVLRYRHTTHILEMGETRFRKDYCKWAEKKGYRNCERMAVLIFATAQNGIPVLPNAPSTQIVITEAIRVLHTVEASRDAILTQMQALAKTLPEYSLVREMPCIGDTLAPRLIAEIGDVRRFHSKRALIAYAGIDAPPYQSGKFCANNRHISKRGNRYLRKTGYEVMQSYVMHKPANDPIFTFIEKKRSEGKSGKLAMVAGLNKFLRVYYGKVT

SEQ ID NO: 89657 - protein, 339 aa, unidentified
MELCCGMDLHSSNTVIGIIDEKRKHLIDRKLPNDPELIRNFLKPYKPELKGIVVESTYNWYWLADLLQEDGYRVHLSHPVANEQYNGLKHSNDKHEAFWLAELLSLGILKEGYVYPRQVRSLRDVLRKRAHLVRLRSGLLVSLQHMISRNCAVKVKTGDMKRLRDDVISPLLSRDEALLLAGQTSKGVIDCLTRQIDKIERWALKRLHREGIFMGLVTLPGIGDILGMTILLETGPISRFREVGNYASYCRKVSSQWISNDKVKGRGNIRNGNKYLAWAFSEAAEHARRTNDACRRFYDRKLRQTNTKVAHNALAHKLARAAYYIMKNHVSYQEEKMFA

SEQ ID NO: 89658 - protein, 396 aa, unidentified
MLDANGEFLEERGFEHSLSALSVITDWLLNLAGNDAERIAVAIEKPHGAVVETLLNSGIAVFSINPKQVDRFRDRHSMSGAKDDRRDAFVLADALRTDGHRLQRLQLPPPEVVGMRELLRTRDQLVKNHVALSSQIRDLLTRCWPHLVSLAPRDKALDSFFCELLQLFFDVPETAELAPKIKDLVSKHRIRRVQPEQILETLQQSPLRVAPATIEATSAHLKLLLQQLLLVRQHRRDSDQLLEKWFKSQRATDEPFTDAAIIASFPGVGAFVLASVLSYAHDPVRLRNLDAFRSLSGIAPVTQKSGKRGQKKPNIFMRRARSLPLNNALHHWARVAVLQDHAFKEHYDRLRDRGHTHARTLRGVMDRILTMAVAMLRDRTLYDPARPSTRKKIDSS

SEQ ID NO: 89659 - protein, 411 aa, unidentified
MDVVNPRCAGLDVHKATVVACVRGPDTRRSARHAETKTFSTTVGGLTQLREWLLGHGVTTAALESTSVYWRPVYAALEDRVELVLVNARHVKMVPGRKTDVRDCEWLAHLLECGLLRASLVPPRAIRDLRDLTRLRKSLVRERGHHVNRIAKILELAQLKLSCVVTDIMGKTGRAILEALALGIDDPAQLAAGAQGSLRKTRAELREALRGGLTPHYAFLLQQHLSLIDTLDTHLVAIDARIEGAMVPFAAEAALGETIPGIATRSAQAIVAETGVDMSRFPTAAHLASWARLCPGNHESGGKRHAAGTGKGATWLRATLQETAWAAARTKKSYYHALFHRIRARAGAKKAIVAVQHAIIVALWHILKKRVAHHDLGADYFDRRNTDRLRRHHIRRLERLGYSVVLVDKVA

SEQ ID NO: 89660 - protein, 487 aa, unidentified
MRVYAGIDLAAKGKHEVFVLGQDGEVLVPRYRFATQADEIDRLREKVRALRPGAEVWWISEPTGTQWVTVGQYLLGLGDRYFLVSNQKAHDLRRFWARHVKNDAVDAEALARIGFMAPQALQPVKLDARVHSLSRWVKRLYRTGRTMGELKRSFWALAESLLPGVQRVLPDPLSAVGRAFFRRYANPFAAVRIGPKRFTQALERSAGRYAKAETIAALYALCDRAVELHRNAGMRLDFADLQEEVEFSLEELEQAAERQERIRSRLEPLVEELDPNGLLQSIPGVGMVTAAACLAALESHEFKRSRAFRAYTGLVPRVAESGQSQSKGRSLTKAGPSWLRTALYMAAEVARRWDPQLAAIYRQAMVEKGQPHRKAICAVATHLADRIYAVHREQRPYVVRDLQGNPVTSEQARALIDADLTVPEEVRARLRKTRKEPRERKNGSMSAASKGRGSREDSPSSTMLPEFYDTRPKGRVQHLMRQGFRAI

SEQ ID NO: 89661 - protein, 331 aa, unidentified
MSFSKIIGIDVSKMTLDVHVLPDHQVFKVENDAKGIRALIRKLAKECQIKPADSLFVFEFTGFYSHKLAVCLQEMNYPIVMLPGLELKRSLGITRGKSDLVDARKIAEYAYLRRDKMVPLSLIEKEIEQMKRLLSLRDRLVKQRAGFKVTLSEATRAIDHREDPSYFQIQEAMVKQLSQHIDKLDKQLLQIVDSHPEFKKQLDLIVTIKGVGVQTALNMIAVTHAFRKFPNARKFACYSGIAPFPYQSGTSIRGRTKVNHMANKKMKSLFGNITGCAIQHNAEMRLYYQKRIQEGKSIMSTQNIIRNKLLARIFAVIERGTPYVDIAKFAA

SEQ ID NO: 89662 - protein, 342 aa, unidentified
MYYIGLDVHKKTISYCVKDASGQVQREGTIGATRRELDIWIQTLPQPRIMAMEATIFTGWIYDHLLPHAEHVKVAHPLMLRAIAAAKKKNDRIDAGKIADCLRCDFLPECHMASTEIRDRRRTLRYRHLLVRQMVQMKNRISGLLMETGVSHNKQRLHKVGYFRELLASNPEIHENIRPLLRLSRDTIVRCQKTEYALVNSLKRDPLLAERIKRLRTVPGVGPITALTWALEIGDVSRFRSIQQAISYCGLCGEEKSSADKALRTPLSKQRNKYIQRVLVEAAKLAPRQNHELALIHEREKQKGNRNRATLAVARKMVAYLMAVDRRERDFVPAAGHRTTAA

SEQ ID NO: 89663 - protein, 379 aa, unidentified
MHHNTLFVGMDVHKESFTLCCYCAETEKFFKIQKISPDSSLVIKYLKSAKEYYDVNAHVVCGYEAGCLGYSLYRELSAAGVECIILAPSTIPVEKGKKRIKTDKRDAMNIAKCLANNTYKPVHIPTEETGEIKEFIRMRNDHKLALKRIKQQINAFCLRHKLHYAVRRHKWTQTHLEWLRKLKLDIMQREILDEYMLTLNYLIECIERLDKRIEELSQSPEYKEKVKKLSCFIGIKTITAMTTIAEVDDFNRFEDAGHFAAYIGLIPGEDSSGPKQNHLSITKAGNRQVRRLLLEAAHCYNRGQIGYKSKDLKQRQSGCSADVIAYADRANVRLKKKYFRLIARNKTPNVVYVAIARELACFIWGMMVNKFNRTPQTAP

SEQ ID NO: 89664 - protein, 372 aa, unidentified
MPQRSRVFVGLDTSKLKISVALAEEGRQGEVRFLGEIDNTPEAVRRLASKLASRHSELLFCYEAGPTGYGLQRQISALGHECVVIAPSLIPKRPGERVKTNRRDALTLARLHRAGELTAIWVPDPGHEAVRELVRARDAAMADLRAKRQHLQSFLLRHGRLFPGRKPWTRAHARWLSELAFEHPAQYLVLREYRQGIEDAQARLERLTQQIAEVLTTWSMAPVVEAYQALRGVALVAAVTFVAEIGDVRRFESPRQLMAYLGLVPCESSTGERVRRGSITKAGNTRVRRVLIEGAWTYRFPARMSRLLQERQAKLPQLVRTIAWKAQVRLCARYRRLMAAGKRQTVVTTAIAREMAAFLWAIGHAIEPRSAA

SEQ ID NO: 89665 - protein, 318 aa, unidentified
MTSYIGIDVGKKSLHIYLPIADKSIEITNNQQGLAKLLSCCVEYYQHLSDIIIAFEPTGGYERELKEFLKLNKVNFVTVHPNKVRSYAKAKGWLAKTDLIDSKLLSEYATVFSLLVKQDYNCKSQEDLYCFIQRREQLIAFKNQEIARLENHYNKVVIKSIKSHINQLDKQLIQVQKSIEELCNNDLAIKDKVSKLTSIPGVGIVAATTAICEIPQLGNIEFSQLTALVGIAPYARESGGYKGKRSIFAGRGNLRKVLYMAAVASLRCNKKLKEFYDRLLANHKPAKVALVAVMRKLLGFMHAVVKNNSFWNNNYVTP

SEQ ID NO: 89666 - protein, 371 aa, unidentified
MKQIRSFVGMDVHKATISISVAEDGRSGTVRFIGVIPNTPEAVQKMAKQLARHGELDFCYEASGCGYGIHRQLTGLGHKCTVAAPSMIPRKPGERIKTDRRDSEKLAILHRHGDLTPVWVPDTTHEALRDLVRARVDASMHLMRARQQLLAFLLRHGRSYPTGKHWTQRHRSWLAGQTFKEHAHGIVFHDYLETVWTAQQRRDALIEKISSMVASWSLGPLVEALRGLRGVDMISAATFIASTGDLSRFESPRLLMGYLGLVPSEHSSGGTIRRGGITKTGNREARRMLIEAAWSYQYPARIAKEKAEILVRLPKKIRDIAWKAQTRLCSRYRSMVARGKKPTVVVAAIARELAGFVWAIGQEMRLNMATS

SEQ ID NO: 89667 - protein, 320 aa, unidentified
MAKIICGVDISSKVLDVFLNQSFHRFPNTVAGIADLLVLCQQHQVDLVAVEASGGYERRLYLQLWAAGLPVAICNARAVRDFAKSMGRLEKTDTLDAAVIAEYACAKKKLVAHPPQPGEHQPLRALVARLRQLTEVRASQLQQRLLVTDDEALATFTRLIGFLNSEIRQLEQRITQLIDADPLWQNLDRAFRSIKGVADRTVACLMAELPEIGTLSHKAISKLVGLAPLADDSGKRRGPRSIRGGRSTVRHLLFIVASVVRRYHPDFAEFSQRLAAKGKAKKVILVALAHKLLIRLNAKARDARQFMEMTSPALTTTLSS

SEQ ID NO: 89668 - protein, 309 aa, unidentified
MEKLGYSVFENTACGFRKLLSWCSVIGRGCSAEDCLFCCETTGSYDRAMCLYLCAHRCFIWRESAIQIKRSSGVRKGKDDRSDSLMIAEYAVRHMDKAECFRPLDGTVEELRQLFLYRQRLVEERKGAAVSVSESFVGIKDGPVANRIKREMQRHLRHLDAMIRRCEILIRQTLMKDREVWDNFCRITTIKGVGLVNAVAFIVYTNNFQNFKTARQLASYYGVAAFRNRSGTSVDRRAQVSNLSNHRLKAYLAQAAECAARTNGIYRQYYERMVERGKHRMIILNNIRNKIIHTAFALVRDKCDFCIAK

SEQ ID NO: 89669 - protein, 352 aa, unidentified
MTIVGGFDVHRKQLTFDYVDTETGEVHCGQIRPATRMTLRQWLGKHCPDGNAEIALEGCTGWRYVVEELTAAGAVAHLADPAETAGLRGPKKRAKSDRTDARLLRTLLWEGRLPESAIPPAHVLELRTLGRLYCALMDERRAWQQRIHAQLFHQGCPPIRALLSQLGRDGVATAELSTAGRCYIEAALRRIDELTDEIEPLRTQLVSFAKRQPGCRALQRHYGVGPLCAVIIWAEIGDARRFSSSDQLVRFAGLDVTVYSSDGKRSAGHLSHQGSPALRWAAYEAAKCAARAGSPDYTYYHQVAERARGRKQGSGKNPTLAVERKLLRRCYHTLRELGEVALAPPAPERQAA

SEQ ID NO: 89670 - protein, 422 aa, unidentified
MFAESDDKEEIIARVAALDIGKAELVCCVRLPAPRGRLKRLQEVSTHSTMTSSLTELANHLVELGVQRVVMEATSDYWKPVFYLLEAHGLDPWLVNARDVKHLPGRPKTDVIDAVWLCKLAERQMLRPSFVPPLPIRRLRDLTRYRVDLVATRTAEKNRVEKLLEDACIKLSVVASDIFGVSGRAMMAALIAGERDPKVLAQLARRRMRTKITRLEEAFNGHFDDHHRFLLARMLGRIDSIDADIAAVDEQIEAHLAPFAETAARLDEIPGIGPIAAAAIIAEIGLDMSRFPTAGHLCSWAKFSPGINSSAGKTKGNGSTGHGNRYLARTLGEAAVVAGRTDTFLGERHRRIAKRRGKKRAMVAVGRSMLVIVWHLLANDNTRFTDLGPDHFTRHLNPDRHKRNHIRQLEALGYTVTLTPAA

SEQ ID NO: 89671 - protein, 383 aa, unidentified
MRIVCGLDVHKDSIYLCILSSTGEILEQVFGVLTTQLEEMRDLMLKYNVQEVGMESTSVYWIPVWRVLESHFELKLINPYFIKQLPGRKSDVKDAQWIAECMMKELVRGSFVPPERIQQLRLYDRRIYDLDDEIIRKLAKLDAVIQRCNIRLSNYVSNTDSVSYKSVIDKICEGVTSPEELVKEVHGRIINRHGKETIIASLKGCITEVDIDIMTQLKAEIDLAELHKQKCLEKMQDICEKEYSEQLSNLQTIPGVKMRAATSLIAEIGTDMTHFETANHLSSWAGLRPRNDQSNKTIKSRRITHGNRYLRRTIIQCAWGASRAKDYFFSRFSYYQTQVRKKNRMKVIVAISRKMLVCAWHILKENVAYKDFDNKILTSDTKG

SEQ ID NO: 89672 - protein, 343 aa, unidentified
MDYFAGLDVSVKETSVCIVDDAGKIVREAKVASEPEALLQVLTNTIYRFKRVGLEAGPLSQWLYSVLAEAGLPVICVETRHMRAVLKAQINKTDRNDARGIAQMMRVGLYRPVHVKTLRSQKLRVLLTHRKLLQSKAIAIENDLRATLRNFGLKVGIVGTVKFEARIKELVANLPDVAVLVEPLLVVRRVLREQVGILHRRLLAIVRDDDVCRRLMTIPGVGPAVALTYRATVDVPARFRNSKAVGAVFGLTPAKYQSGENGRTGAISRCGDEMMRMMLYEAAQSMLVRSAKWSWLKAWAMKIAKRRGMKKAIVALARRLAVIMHRMWVDGTEFRWTREVAAA

SEQ ID NO: 89673 - protein, 431 aa, unidentified
MKNRTNQRLEEITAGTLIVGVDVAKSLQWARFVDYRGVEIGKAMSFQNNRKGFESIVARIREHCKNKLLRYPIETVVIGMEPTGHYWKPLANYLMNESYRVVGVNPYHTKKSKELDDNSPTKSDKKDAITIARLVKDGRFFDPYLPQEVYGELRGLTNARVSVMKRQNAVKNTITAILDEYFPEIWTVFKKPLKGKASRQILRSCPFPSFILAMGEAGVLTEIKKAVKKTVGMKAVCALMSAAADSIGVQNGLDAAKMRLGWLLDELELAEKQLAEVEQAMGSMLHKTGYAAQIFGIKGIGIVTAASFLGEVGDPLRFQNARQIANYAGYNLVEDSSGKSKSGTCISKRGRKQLRSVLYQMAYTMVGCNAEMNTLYRHLVTRKNNPLKKKQALVVISKKIITVIYSLLKKQEAYDPALVLGAVRREMLMAA

SEQ ID NO: 89674 - protein, 412 aa, unidentified
MRRVIGIDVHRTFGEVVIWEGGILRHAGRVDMTRTALEGFGKSLRSTDEVVIEATGNSMAVSRVLTPFVARVIIANPLQVKAIAQAHVKTDKIDAGTLASLQAAGYLPQIWTPDAVTERKRRLAARRCQVVRHRTRIKNEVHSILHAHLIPKCPHADLFNARGRTWLARQPLPDDERAAVERHVRELDRLAEDLAVLDREIAQAAIDDPAVRRLITITGVNLTVATGIVAAIGDISRFRSPQKLVSYFGLNPRVRQSGLGVAHHGRISKIGRSHARAMLVEAAWAAAKAPGPLHAFFVRIRAKRGHQIAAVAVARKLTVLCWHLLTRGEDYLWARPALVANKARAMELQAGHPQQKGSRRGPAYAYNVKTLRNQEILVAAQAERSYERFVAQWKPRGPKQPARGRLESEGHQ

SEQ ID NO: 89675 - protein, 478 aa, unidentified
MDDRRLVGIDLGISSAHTVRVLGGDGSLVCRARAIPTLDSLEQVERVALAQTPAGTRLEVVVEPTGPAWLPIAVFFSARGHTVYRVSSAKAHDLRRVLSRHAKSNGIDADTLARLPLVDPAGLHPLELPSAERAALDRRVRACDRLTRQAASHKRRIKDLVHQLLPASPLVGELGQADLAVLERWADPHALVAAGRARLQRVLATASAGQQGAQRAEQWLAAASAALQLYGDHPAVAFTELAAEVTSEVRLLRATQAELAAHARQREACYQRVDPAGLARSLPGLATIGGPALVATMGTASRFATAGKFRCFTGLAPKASETGQSDRKGQPITKAGNRLLRTTLVRAADHARRQDPQLARIYWTQMVQRGKDHLGAVCVVAAHLAERAWTVMNRGTPYVVCDTDGTPVTAQQAKAIIADHWTVPEQVRLRRRSRKGKAPQQVLTGHVHGARGATRRPSPSPASLGRRTVPVKPTQPQP

SEQ ID NO: 89676 - protein, 394 aa, unidentified
MKLIGIDIGKNKHFFCVMDQQTGEIISQPVSFSNDKEGFDFLVQKIKSYPKDSILIGMEDTGHYHFALLKYLLDLQYTVALINPKTTDFNRKMQGGITKNDKLDTINICDVLDTPERKKQYRITKVNSFDLYEQKQLTRHHHNLKEEENVYKNRLQKCIDIVFPEFNKLFNSKYGIVYMNILKMFGSAENIANTDIRTIRKCFEIEGRGNRISLTPERLKECARSSIGISSSAEVIQIKHLTAQIELIEEQLTEIDKKIEEFSIQNNSPILSIPGISHFSGTSILAELGDISNYSKPSQIIKFAGVAPLHYESSQFNAQHTSITKKGSKYLRKTLYQIILPVIRHNPVFTKYYQLKISQGKGHRCAQGHCVRKLIRIIYHLLKTNQQFDPQLLR

SEQ ID NO: 89677 - protein, 343 aa, unidentified
MDHFGGLDVSVKDTSVCIVDETGKIVREVKVASEPDALLTVLTNPAYRLKRIGLEAGPLSQWLFSGLAEAGLPVICVETRHMRAVLKAQINKTDRNDARGIAQMIRVGLYRPVHVKTLRSQKLRMLLTHRKLLQSKAIAVDNDLRATLRNFGLKVGVVGTVKFEARIKALVADLPDLAALIEPLLVVRRVLREQTAVLHRRLLAVVRDDEVCRRLMTVPGVGPVVALTYRATVDVPARFRRSKSVGAVFGLTPSRDQSGERDRPGAISRCGDEMMRTALYEAAQSMLVHSTRWSWLKAWAMKVARHRGMKKAIVALARRLAVIMHRIWVDGTEFKWTREAAAA

SEQ ID NO: 89678 - protein, 343 aa, unidentified
MEHFAGLDVSVKDTSVCMVDGTGRIVREVKVASEPDALLQVVKNPAYRFKRIGLEAGPLSQWLFSALAEAGLPVICVETRHMRAVLQAQINKTDRNDARGIAQMMRAGLYKPVHVKTLRSQKLRTLLTHRKLLQSKAIAVENDLRGTLRNFGLKVGMVGTVRFEARVRELVADIPDLVNLVEPLLVVRRVLREQLAVLHRRLLAIVKDDEVCRRLMTIPSVGPVVALTFRATVDVPARFRKSKSVGAAFGLTSAKYQSGEINHSGTISKCGDDMMRSMLYEAAQIMLMRTTKWSWLKAWAMQIARRCGRKKAIVALARRLAVIMHRVWIDGTEFRWTRQESAV

SEQ ID NO: 89679 - protein, 341 aa, unidentified
MDTMIGVDLAKSVFQLHGAAMTGEVLFRKKLTRSQFLRFMSDHAPAVVVMEACGGAHYWARVMAELGHQVQLIAPQYVRPFVKRQKNDAADAEAIVVAAQRPEMRFVEPKTEEQQARAAIFRSRDRLVRQRTELINALRGVLYEHGHVFPTGAAHVGRIEALLRDPDNGLHPLVLADCLDLLDQISEKSGRIEARTRTTTALSAQASVTRRLQTIPGVGPLTALAVETFAPPMETFESGRAFAAWLGIVPRQHSSGGKQRLGKISKAGQGDIRRLLIMGAMTRLTPRGRRGVSEGSWLARMLERKPKMLVAIALANKMARQIWALLMKQEDYREPAQMTAA

SEQ ID NO: 89680 - protein, 323 aa, unidentified
MSKRTTICAGIDTGKRKLDVTLEAGRERLEIDNNSAGHQAAADWLRRHRVKRVGIEASGGYEQEVVAELRRKGFVVVVFQPAQVRAYAIFHLQRAKNDKIDAALIARCTADAKKIHAPPDPRLAPFAHDLTLLDQITDIIAGHRNRRETCRDPRIRQVWKEEIARLKKVQRTELKRLVAAIRQYPDLAQQLDLINSVDGIGLPTAVAILVRMPEIGRITREQAAALAGLAPYDDDSCDYVGVRHIEGGRKRLRSALYCAALPASLRWNPQLIALYQRLIAAGKKHKCALVACARKLLIFANTVVARGTPWIAQPTPVWIHRSA

SEQ ID NO: 89681 - protein, 414 aa, unidentified
MNARHSVTCGIDWAERHHDVALVDERGQLVAKRRISDDAKGFAMLTELLADAGDNEDNPIPIAIETPRGLLVAALRATGRGVYAINPMAVARYRERWTVARSKSDHADAMVLANILRTDRHAHRVLPADSELAQAIAVLARSHQDATWRRTKAVQELRAHLREYYPGFLDAFTAAGVTNLASADARALLAIASTPAAGVKLTRARIAAALRRGGRRRNIDRLADHLLQALRRPQLRQLRLVEQAMGVQALSLLAVLNAACAGMDQLAEAISESFPKHPDYTVITSFPGLADVSGARVLAEIGDDRSRFADARALKAYAGSAPVTRASGRSHAVTHRRIKNDRLAAVGYTWAFMALTNAPAARAHYQRRRAHGDRHAAALRNLFNRMLGQLHHCLQTTQVYNERLAFATPMPAAA

SEQ ID NO: 89682 - protein, 342 aa, unidentified
MDQVYVGLDLGSSLFQQVTINASGAISLNRSFATSEANLRKAFADLRGEIQVHLEAGELAPWVTAVISPLVQRVVCSHPAANAWIAKDADKCDRVDAFKLAELLRLNRFKEVHYPQPQSRRDFKTLVQHYDELTAQQARLKTKLKARFRMQGVIVTGERLFSAAGRKPVLAQVRSRDVRLAIAQLYEVLDQSISAQAQAKLLMLRAAQAFPEIKLFRTVPGVGPIGACRFSAYIHTPRRFSSKRKLWKYCRLSVSHCSSNGKPLRRPRLDRSGCGRLKDVSRKAFEVSVRARQDNGFKRAYQQALESTHDAVHARLTVQRKIVSTLRAIWLSHSPYREQLSH

SEQ ID NO: 89683 - protein, 368 aa, unidentified
MSDIIRIGVDTSKSVFQLHGVDAAERPVLRKQLRRRDFLSFFAQLPPTKVGLEACGGSNYWARELMALEHEPKLLPAQHVRPYVRRNKNDKQDADAICEAMSRPRMSFVRIKSAEEQAAQMLMTTRQRLIDHRTQLINTIRGHAAEFGLTAAKGPAHVEPLLARVAKDVTVPALAKELFAIHGQEYDRLKIELREIEAKLKVWHRGNEMSRRLAEVDAIGPIGGCLLAIKAADPQAFRCARNFAAWIGLTPKDHSTAGKMRLGVITRAGDEALRRTLVVGATSVIKQVRNGKTHPSPWLRDLVARKPPKLAAVALANKVARIAWKLMVSGERYDAARAGIISPTARVAPCSRRQGRCAPPAAVACGQP

SEQ ID NO: 89684 - protein, 423 aa, unidentified
MKLTYPICCGVDVHKTFLVATIITSEYVMPHYRQKRFSTFYSGLVAFKKWLLENNCKDVCMESTGKYWVPVWNVLEDSVHVVIANPKWVSAVKGNKDDKKDSKWIGDLFRMGLVPSSYIPSKDIRILREFTRYRSKLVSMRSSEKNRFQNAFTVCNLTLDAVVSDMFGKSATDIENYLLDTDIVDPAQCVSLLRGSLKKKSSDVVEAVSGFNMTPEQKERVRIVQGHFADIDRRIAQLDGVIGNLVAVYEGQISLLCTIPGVDRRIAITILSEIGTDMTKFGSSKRLCNWAGLTPASNQSAGKKKSVRISRAGVYLKPALVEAAHAAVKATEKHPYYRIKFERLMKRRGKKRAIIAIARMILTAIYAMLSTGEVFNPCDLDKFDMPEELKKKRTLASAKEAVRLLVSLGVVPAGSISLDALAG

SEQ ID NO: 89685 - protein, 419 aa, unidentified
MSKSLFCGCDVALENNTIWLMLDDGSQPTKLFNVDNNQLGAEVLVERIYSIAKEHCISDILIGTEATSMYDWHLLEYLAESKLALEFNLKLYRFNAKWIKNFKKSLAPKGKTDPIDSFAIAERLRIGRLPKEYVPDTKYQPLRKLTRFRFHLQQQIAREKDFFLANLFLKASAYSRVAPFGSTFSTTSLSVINDFFSVDELAAASVEELTEFILEKGKAHFSRPGEIVDNLKRVARESYRLKPELAPTVNLILASTFNNIRCYKDQVKLVDSAIAENLKAFKHTLDSIPGIGPVYAAGILAEIGDVNRFPNDSALAQFAGLTWPKYQSGKFQAEETRMSHTGNQYLRYYLVEAANSVKRYDATYKAFYEKKYAEATKHHHKRALVLTARKLIRLVWTLLTRQVLYQPGYCSFENLSKIG

SEQ ID NO: 89686 - protein, 414 aa, unidentified
MGYAVGINSNGAEPQPRRRVVSNVSIFVGLDVHKDSIDVALVECDRKATVRFYGTVGGDLADLEKAVRKIRKAHPFAEFHFVYEAGPCGYDIYRYLTRAGYECMVVAPSMIPKRSGNRIKTDRRDAIMLASLHRAGELDPVFVPREEDEAMRDLVRAREDAVKAARVAKQQLKGFLLRHGIKFSGSGDWKPSYMKWLAGLKMPNPAQQIVMQDYINAVKDGNERVTRFNVQIREVLPSWELAPVVNALQAMRGVALITAVTVVAELGDLKRFDNPRQLMSYLGLVPSEHTTGTTRRTGSITKAGNGHVRKALVEAAQTYRLPARISKSLLERQEGLPKVICDISWKAQVRLCTRFKKMIARGKKNQTVVCAIARELCAFMWAIAREVKLVTAQQLKDLSTGGRHDERSLRAHRA

SEQ ID NO: 89687 - protein, 410 aa, unidentified
MNPVVGLDVAKGESQVQAFLDKKKPYKRSFKVAHTIEGLESLYQYLREIENVTGIRPPVVLESTGHYHTPVVQYFEERGYLLIIVNPLISYRAKSSSLRKVKTDLIDARHLCELYYKEDLEPYKKRGIQLLNLRNLSRQHANITGIYVQTKLQFQAVLDQVPEYRGVFGDLYSVVSLLTLLEFPTSEDISAVDEETVANRINELCPGRSRKWANTQAEKLMAASARNPFQRTLYQSHILSLEMYIKMLLEYQKHLSKFEEEINALAKEIEEYKIIQSIPGIGEKIATTIISEIGEIDRFNHPKKLVAFAGIDPSIFESGKFKGSVNRITKRGSGRLRHALYMAVRCAIRDCRKKKTTDEIIPRNKRLREFYDKKREEGKPFKVAVIACANKLLQWIYALLQNNSTFQDLT

SEQ ID NO: 89688 - protein, 338 aa, unidentified
MTIVMGLDQHREQITGEWIDTETGEVRRARVAPADRAGVRKFLQRFRGYELEVALEATTGWRFVVEELRRVGAIVHLAEPAETAGLRGPKKRAKGDRADARHLRELLMLERLPESWIPPDHILDLRARVRLRHTLSEQRREWQQRIQATLYHHGCPQRRELMTGDGREWLQAQPLPATAREQVTVALAMIDGLEGQIAPLDRELRAYARRQAGCQALMAHYGIGPLVAVTILAELGDCTRFSSSRHAVRYAGLDITVYQSDQRRAPGHLSRQGPPALRWALFEAAQSAARRGSPDRDYYGDAAQRLGHNRACLSVARKLLKRSYHTLRELGEEALQPA

SEQ ID NO: 89689 - protein, 461 aa, unidentified
MAGVVIGIDPHKGSHTAVALDVHEKQLGRLRVRASSRQVDGLLEWASGWPRRRWAIEGARGLGQLLAQQLIASGERVLDVPPKLAARVRLLDSGQINKNDPNDARSVAVAALRAHELPELAAEDHAMVMRVWARRYHDLARLRTQVVCRLHAVVCELVPGGVRKYLRASQATDVLDRIVADSPVAQAKLELARELVADLERIDAQRREAKRRTARAVAATRTSINDVYGVGPIVAGTVLGYVRDIRRFPTRDRFASYNGTAPIEVSSGDRKIYRLSRRGNRQLNHAIHMAAISQIRHHDSEGRAYYEKKIAEGMTGKTALRALKRKISDALYTRMIDDARRLAAKDPGGHTGNDSASSAAGSHPETPALRKSHSRATANSKTGTGQRPLRLRPAPDRRRTSRRAAGVQVEPRPGPHRGRRQDRPNGQMSRSPLRTDRVIQPCVKIAGPAHSWVTAFPAPGP

SEQ ID NO: 89690 - protein, 355 aa, unidentified
MEGTKYIGMDVHKDSISIAVLNSSGKLVMESIIETKAITILEFVHGLRGSLHLTFEEGTWAAWLYDLLKPHVAKLLVCDPRRNGYLKQGSKSDRIDARKLAELLYSNMLRPVYHGEHGVRSLKELARSYLTITKDQARVMTRVKAVYRSWAIPCAGKQVYGQRHRLEWLGKIQEPGVRRRAEFYYAELDALRSLRLVVRSELLLESKKHNVSTLLSQIPSIGPIRAALLIALLQTPDRFRTKRQLWAYSGLAIETHDSAENQYVNGQLQRSRKQASIRGLNQNHNHDLKNLFKSASAVAAAKAGPFQKFYDAQIGKGIKPEMARLTLARKIAAITLIVWKKGVSFDARYLNPQTA

SEQ ID NO: 89691 - protein, 384 aa, unidentified
MDYFAGLDVSVKDTSVCIVDEAGKIIREVKVASEPDALLAVLNNLAYHFKRIGLEAGPLSQWLFSALAEADLPVICVETRHMRAVLKAQINKTDRNDARGIAQMMRVGLYRPVHVKTLRSQKLRMLLTHRKLLQAKAIAVENDLRATLRNFGLKVGTVGAVKFEARVKELVDNFPDLVELVEPLLVVRRVLREQISILHRRVLAAVRNDEVCRRLMTVPGVGPVVALTYRATVDVPARFRKSKSVGAVFGLTPARDQSGESDRPGAISRCGDEMMRTTLYEAAQVMLLRSAKWSWLKAWAMKIARHRGMKKAIVALARRLAVIMHRIWIDGTEFRWTREAAAPKGRSGSNAIGGNSSSTKRWNNVPRGTMDEVSSHVCLDLPFS

SEQ ID NO: 89692 - protein, 342 aa, unidentified
MNKVYVGVDLGSSSFQQAAINEDGATTMNRSYATSEANLRMAFAGLRGEIHVHLEAGELAPWAAAIIAPLVTRVVCSHPRDNAWIAKDNDKCDRVDAYKLADLLRLNRFKEVHYAPDQARRNFKQLVQHYDELTAHQARWKTKLKARLRMQGVIVTGERLFSSSGRKEVLTKLASRDLRTAIKQLYEVLDQSVMAQQQARLLMLRAAQAFPEIKLLRTVPGVGPIGACRFSAYIHTPNRFSSKRKLWKYCRLSVSRRSSNGKPLRRPKLDYSGCGRLKDVSRKAFDVAQRLRTDNGFKRTYQRALEATHDKTHARLTVQRKIISTLRAIWLTRTPYRDELSR

SEQ ID NO: 89693 - protein, 388 aa, unidentified
MHPTGPCPEQDPPRDRHHQATLYASLELSRSTWLVTSLAPGDRKMSKHSVAAGDGAALLALLARLRGRVERSAGGPVGVVVVQEAGRDGFWLHRLLEAEGVESHVVDPASIAVPRRQRRAKTDAIDGETLLRTLLAWRRGEPRVCAMVVPPTPGEEDRRRLTRERGALLEERTRHTNRIKGLLAGQGVYDFEPLRPDRLERLGALVTGDGRPLPDRLRAELRRELERLELLRRQIAEVEAERDAAAAAESEAGPSPVALLAGLKAIGPQTAAVLYHEGLYRTFANRREVAAYAGLAPTPWRSGKVAREQGISKAGNPRLRHAMVELAWLWVRHQPESAPSRWFRARVGQERGRVRRVAIVALARRLLVALWRYLAHGEVPEGAVLKAA

SEQ ID NO: 89694 - protein, 309 aa, unidentified
MSIHVGIDTGKSMLDVGFYPDKRCERFANTAEGHRALLLALAPLDVPHIAIEATGGYERGIVDALAQAGYCVTRLASHRATAFARAMGSFAKSDALDAQVLARMAAHITPQPYEVPAAERAELAELVRCRLQMVSQRDDNKRRLLQTRLAAAQQALRGMIEAASMQIRELDRCIATATKVADPASRLREVPGIGPVAEATLIAYLPELGRLTRQQIAALVGVAPYIDQSGCRNGARRVRAGRWIVRRAMYMATWAAIRTKGSALGERYRALRARGKVAKVALVACMRCLITAINAMVRDQVGWRQSAAA

SEQ ID NO: 89695 - protein, 409 aa, unidentified
MEVVHEVCCGLDGHKKSVTACVLWASGRRKQIREFGTFTRDLLELADWLRSCGVTHAAMESTGVYWKPVWNLLEGQFEVLLVNAQHIKAVPGRKTDQKDSEWIADLLQHGLLRASFVPPTPTRELRDLTRYRASLAQEINRIANRIQKVLEDANIKLASVATDTLGASGRAMLEAIINGEQDRQRLAEMSQGKLRNKLPELQQALEGRVTAHHRFLLRELLDHLYFVESKMRRIEQEIAERLGPFQSEVARLCTIPGVDRVTAWGLVAEIGLNMAQFPDAQHLASWAGLCPGSHESAGKRKSGKIRKGSLWLRRCLCQGAWAVSMQKNNYLSALYRRLAARRGSKRATIAVAHNLLVIAYYILRDKVCYRDLGPDYFDRLNPEGLRRRLTKRLEGLGFKVTLEPLAQVA

SEQ ID NO: 89696 - protein, 408 aa, unidentified
MAAVMIGVDPHKASHTAAAIGRAEEPLGDIQVRAAASQAEQLLAWAAAWPDRAWAVEGAGGLGHLLAQQLVTAGELVLDVQPKVAARVRLLASGNTNKNDPNDARSVAVAALRSPVRRRVTAEDHTAVLKVWSKRYRDLGRTRTQVACRLHAVLADLVPGGFNREITAGQAASMLKRIRPSGPAARARRELAAQFLADLRRLDTQIRDTRSKLAAAVQASGTTLTEIFGIGPVIAAAILGTVGDPSRFGDRDRFASYNGTAPIEVSSGGRKIHRLSLRGNRRLNHAIHMAAVTQIRHAHSPGRAYFDRKIAEGKTGKEALRALKRQLSDAIYTRLQADAARCGRSTAVETEGPGGQSGNGSVSSAAGSHPGRRLFGQATPGPQPSLRPAATARRVVQATAFKTSRRSP

SEQ ID NO: 89697 - protein, 317 aa, unidentified
MAQDDLVVVGIDVAKNKVDACIRALCVRRTFPSTAQGRRKLVCWLRKHKASAAVMEASGGYEREWAKVLREKAVEVRIVDPKRVRNFARSAGRLAKNDVIDAEMIAWFAGTFAEASSQGHDAAREKLAHIVNARCALIDLQIKLQNREEHPAPEPVQKMQARLLRAREIAELEAAIAAMIKATAHFAELAEIIESVPGLGPITSAGLIAAMPELGQVSNQAISALLGVAPYDDDSGKRRGERQIKGGRRKMRNLFYMACLGAATRHNAVLKAFYDRLIAKGKERKVALVACMRKLIVILNTMIARRQKWDASRYAVS

SEQ ID NO: 89698 - protein, 407 aa, unidentified
MDVIHRRCAGLDVHKVPVVACVRIAGEGAPAQQVQTFATTTSGLLALADWLSSFEVSVVAMEATGVYWKPVWHVLEGHFELVLANASHVKNVPGRKTDVNDAMWLADLLAHGLIRASFVPPVAVQELRALTRTRKQFVPERAAHVQRIEKVLEDANLKLGLVLTDIVGKSGRAVLQAIIDGHTDPEELLRSINTRVKARRTELLQALRGRISAHHGFMLKLHLGHVDTLDQTIAAIEKEVSLGLKPFRQSAEHLSTMPGLSAVSASVIVAEIGVDMSRFKTPGHLVSWAGLCPRNDESAGKRRSTRLRHGGNWLKTTLVQCAWAAVRVKGGYLQAQLHRLRARRGAKKAILAVAASMLTAAWHMLRNQTDWHDLGAAHFDRADRKKTVNRLLKRLRQLGFNAELVPA

SEQ ID NO: 89699 - protein, 481 aa, unidentified
MLIFFQTLSTKGWQVDPARYELPGKDLVLHTARPVREDRASLAAFLGQSMIGGTLRSATRYRRTRHPQEFLQKGIASMWYVGLDWADTHHDVEVPYLAGKRMGARRFAHSHDGLHELKQFVLSIAASPENLACIVETTHGLLISFLLEAGIPVYPVNPKTANQLRKAAGAKTDQIDAHLLAKLGRLDLAELRRLAPDSETVQELKTLTRDQDALIQTQTRLVNQLTACLKDYYPAALHLFAKLQQRSTLVFLQAYPTPQAAQAASVEELTATLRAGKHTNPTKAAPKIFEELHRPQLVASEVIVRAKSRLLLSLVKQLLLVIQEIASYDKAIRSLFLRHDDHALWSSLPGEGLRLAPRLLAEWGEDHSRYADAGSRQTLAGTAPVPFQSGNYAKAHKRFACVKPLRNALHQFAWQSTRQEAWALAYYQRKRAEGKTHSMAVRALANVWVRIIYRMWVSHTSYQTATFEAARLAHAPRPHAA

SEQ ID NO: 89700 - protein, 341 aa, unidentified
MNVTTIGIDLAKTVFSIHGTNQYGKVVVRKRLNRPKLLAFFAQLPPCLIGMEACSGAHYWARELTKIGHEARIIAPRFVAPYRKSSKNDDNDAEAICEAVGRPNMRFVPIKTVDQQAVLCLHRIRRGLTKERTAQINQIRGLLAEFGLIVPQGRYQARQRVPEILEDAENGLPMLARRLLNNINQRILQLDEEILVYDREIEAMARRDERAKRLMAIPGVGPQTATAMLASAPDPRQFKSGRHFAAWLGLVPRQYSTGGKPRLGRITKRGDKYLRTLLIHGTRAVIAKLANKDDRLSRWAKELVERRGYKRAAVALAAKNARIIWVLLMNQTEFKAQPAEG

SEQ ID NO: 89701 - protein, 462 aa, unidentified
MPKQRRGGKNSRRVAEDILEGLPPLNLNAAGIDVGNAAHYVAVPTGRDAQPVREFGSFTADLHRMAQWLKACRVDTVVMQATGVYWIGLYQVLEEHGLKTLVVNARYTKTLPGRKTDVQECQWLQKLHTFGLLNNSFLPPAEIRALRTYLRQRENLVTGAATCIQHLQKTLTEMNVQLANVISDLTGVTGMAILRAIVAGERDAERLAQLKNERIQASRAEMARSLEGNWREELLFVLQQSLEMYDLYREKIGGCDQRIEAHLKTMTAKVDVQAQPLPEARRAKWPRKHQPRFDLRGQLYRATGVDLTQIDGIDVQTAQTIISEVGVEMSAWKTEHHFSSWLGLCPDNRISGGKVLKRRTRRVINRASTAFRLAAWNLLRSQSALGANFRRLRARLGAPKAITALAHKLARLVYRMLKFGSQYVDKGMAYYEEKYRQHQIKWVMKQAAALNLQLVPAKAVTH

SEQ ID NO: 89702 - protein, 479 aa, unidentified
MAVGRMNRKQRKELTRQLRSEDPGLDVVHPRAAGIDVGNGAHYVAVRPDQDREPVRRFECFTADLHRLADWLQACGVETVAMQSTGVYWIPLYEILEERGLEVYLVNARHTKNLPGRKSDVQESQWLLKLHTYGLLNNSFQPTAEIRTVRTYWRQRAEHVHAASTCIQRMQKVLTQMNVQLANVISDLSGLTGQTIVRTILAGERDPKKLAELSHPRIQASREEIAKSLEGNWRPELLFVLKQEVEMYDIYQQRIGECDRELKAHLKRFADNVHRKPAEAGPVSEEQKDKKVPAKLPRSGKRAQGNAPCFDLRSELYRISGVDLTRIDSINVVVAQTVISEVGLDMSRWNTEAHFASWLGLCPDNRISGDKVLSKGTRHVINRAATALRMAATTLLRSRSYLGAQYRRLRARLGAPKAITAMAHKLARIVYRMLKYGQDYVDKGMQYYEDRHRRQQIELLQKTAAKLGLHIVEIQAVGG

SEQ ID NO: 89703 - protein, 376 aa, unidentified
MERGSLMLNTTTFVGLDVHARSIKAVALDAMTGEVRSATFGYDAAEVAGWVSSVDPSAKCVYESGVTGFDLQKRLASMGIDCVVGAVSKMIKPPADRKRKNDRNDAEFLARMLSVGNVVEVWVPDDGCEAARDLVRALDDAREDLKRCKQRLSKFLLRHGYVFSETTPTGRRKGNWTAAHWAWIKSISFPEKADNDVLEYYVDAVRQAMEDKARLERLVEAEASKPRWKRRIDSVRCLKGIDVTSAADLVFEAGEFSRFKSARSFAAWLGLTPSEHSSGESVRQGGITKAGNKHLRRVLVESAWHYLGCSPHSKDLAKGQVPDPAARRHAAKGVRRLVERRRAMLERGVHKNKANVATARELACWCWAVGRMIENG

SEQ ID NO: 89704 - protein, 456 aa, unidentified
MSRKPKNNKKKIGAPVLHCLNRNAAGADIGATEIYIAVPVDRDPQPVRHFSTFTEGLHAAADWLKACNIETVAMESTGVYWIPLFQILEARGFTVFLVNAHHVKNVPGRKSDVSDCQWLQYLHSVGLLNGSFRPEQAVCTVRSILRHRNDLVQMASSHVQHMQKALNQMNLQLHHVISDITGLTGLAIIEAILAGERNPRTLAALRDRRIKASEDTVAKSLVGDYRREHLFTLGQSLEAFRHYQHLITACDTEIEQYLEAFESKVDPPEGSTRVSPEEEPKGRKPSFDLKSHLYRIFGVDLTKVPGINVLTSQILLAEIGPDFSRFANGPAFTSWLGLCPDNRVSGGKVLSVKTRKVKNRAATALRMAAQSLHHSQSSLGHFYRRMRAKLGAPKAITATAHKLARIIYHMLTTRQAYNETIFELQEQNNRWRLERKLRKQARELGFEVVAAKPVAL

SEQ ID NO: 89705 - protein, 328 aa, unidentified
MEQELHFIGIDVSKAKLDVDVLRPDGRHRSKKFANTPRGHDELVSWLRSHNVPPAHVCMEATSTYMEDAAASLSDAGFTVSIINPALGKAFAQSEGLRSKTDAVDARMLAEFCRQKRPAAWEAPHPLERALRALVLRHQSLTDMHTQELNRRETAREVQMPSIDAHLLWLEAELKRLEKQIKDLTDDDPDLKHRRKLLDSIPGIGEKTSAVLLAYVGLKDRFGQARQFAAFAGLTPRRHESGSSVNRASRMSKAGHVSLRRALYMPAMVALYKTEWGKAFRARLEKNGKSAKLIIGAMMRKLAQVAYGVLKSGRPFDATLHEENGCAA

SEQ ID NO: 89706 - protein, 383 aa, unidentified
MDCTTPTAGSTLHCALELSKNTWLLGIQFPDRPQPSLYPIKGGNTEDLMAKLTAARDRCAKLSGWAPSIVLCYEAGYDAFWLARFLKARGIECLVVDSASMQVNRRARRAKTDRIDVGKLLRGLIAWLRGDRHVWSVVRTPSIDEEDLRRSHRERDYLVHERTAHINRIKGLLFAQGIRGINVKRQYKTLDVDKLVTGDGHPIPPRLASEIVREIARLALVQEQIAALERERDERPTPCTATEKERAQLMYLNGIGPAISAVMTREVYYRQFDNRRQVAGFLGLATSPYDSGEVERSQGISRAGRGQVRGTMIQAAWLWIKHQPRSTLTRWFLERTMGQGGRVKRIMIVAVARKLAIALWRFLEHGLVPQGAILSGQMTSMAR

SEQ ID NO: 89707 - protein, 453 aa, unidentified
MSRKKTKLQGVTEPPKIRTDAAGVDISPEVIYVAVDARRDPQPIRHYGTVTAELYRIANWLKACGVRTVAMESTGVYWIPLCQVLEERGFEVYLVNARHYKNVPGRKTDVCDSAWLQYLHAVGLLQGSFRPADEICAFRTVMRHRASLVEAASKHVQHMQKSLDQMNVQIHRVLSDVTGVSGLAMVEAILKGERDPRRLAELRDGRVQASEESIIAALQGNYRTEHVFTLKQSLESYRHYQKLIAECDRQIREQLEALEGRSGGSEPPDARKNMRTRSDEELRKEFFRIIGVDLTAIPGINVGTVQVLLAEVGPDLSRFRNAAAFSNWLGVCPNNSITGAKIKSSKTKKSENRLATALRMAAESLSREKSYLGQFYRRMKMHLSGGAEAVTTTAHKLARIIYAMVTRQLEYDATCFAEIEQRSHERARLRLIKQAEKFGFRLTPIQTAGGFVS

SEQ ID NO: 89708 - protein, 414 aa, unidentified
MDVLHPRCAGVDISKRDAKVCVRIADPGRAKAKSTVTTWGAVTNQILALRDHLIGEQVTLVVMEATSDYWKPFYYLLEDGPFEVMLVNARHVKNLPGRKSDVSDAAWLAQLGAHGLVRGSFVPPEPIRQLRDLTRTRTTITRQRAREIQRLEKLLEDAGIKLSSVASDISGVSGRLMLDAMIAGQRDPAELAELAKRRMRSKIPELTEALTGRFGEHHAFLARVHLDLIDQHTHAIDDLTARIEVVIEPFRGARDLIITIPGISTLVADVIIAETGADMTQFPTAAHLASWAGTCPGSNESAGRIKSTKTRPGNPYLKGALGIAAMSAARSRGTYLAAKYRRIAARRGPVKAIVAVEHAMLIAIWNMLTNGQNYTDPGADFYTRLNPDKAKNRALDQLRQMGYDVTLNPLAAAG

SEQ ID NO: 89709 - protein, 375 aa, unidentified
MKEKLRFLGLDVHAETIAVAIAEPDGEVRSLGTIANRTESVRKLVKKLGSVEQLRACYEAGPTGYVLYWQLAELGVKCEVIAPTLVPVKAGDRVKTDRRDAEKLARSYRSDDLTAVWVPDESSEALRDLVRAREAAKQDQLRARHRLSKFLLRSGQRPAPGVRAWTQIYMAWIRQIRFVQIAQEWTRLDYLHEVEHMGERVARLEQAIAEAAKLAPPELQEVIKGLQALRGIAHISAVTIASELGEFSRFEGARQLMGYSGIVPSENSSGERTQRGSITKTGNAHLRRIAVEAAWSYRLRPCIGPALRKRQEGVADEIKEIAWKAQHRLYRRYCRLAATRKDQRKIITALGRELLGFIWAIGIKAESAVRQRIAT

SEQ ID NO: 89710 - protein, 404 aa, unidentified
MNAVGIDVSKGKSTVAVLRPYGEVVVSPFDVSHTGSDLRALADLIKKLPGETKVVMEATGNYFESIARYLHEQNIFVSVVNPVLISDFGGNTLRKPKTDKKDSVKIASYALTYWLDLKEYTPQEDLRKSLKLLNRQYQQSIKLKTMMNNNLISLLDLTFPGINKLFTSPSRESDGHEKWVDFVLEFSHCDMISKLTIKAFAKKYKKWSDKNSYHFIESSCKKIYAFAKDCVSSVSSDKAIVFSVVQAAKMLISATENCHAIQSEMNRVASKLPEYDTVMNMYGVGKAVGPQLMAEIGDPRRFHSRKAITAYFGYDSENNDSGQKTTRSNPMTKKGSGALRRTLFILMQVLLQTKPQDNPVYDFLIKKKSEGKHYYSYINAAANKFLRIYYARVKEVLNVSEQMT

SEQ ID NO: 89711 - protein, 336 aa, unidentified
MIVIGVDVHKQSLTAVAVDEVGRAVAELTVGSPVELVAWLGSLDPERLWAVEDCRQLTGALERRLLAAGEALVRVPPKLMAPERRAGRARGKSDPIDALAVARAALREPRLDRPRAGEAALRELKLLVDHRDDLVDERRRAQQRLRWQLHDLDELTVPPGALDRPLWLDRVARRLRCAEQTVQIRIARELVGRCRSLTRSILALDRELQARTEQRAPRLLTLPGCGPLSAAKLLGEVGPIERFETDAQLARHAGVAPLEASSGKHQRHRLDRGGNRQLNCALHRIAITQARVHPPARAYLERKRNEGKSRREALRCLKRQLARTVYTTLKTESALT

SEQ ID NO: 89712 - protein, 421 aa, unidentified
MHVLYQRCAAVDIGKDVIAVAVRLPGDGPEHRQTIKRTFKTFYGVLKHAAGWLTAQQVTHVAMEATGIYSMPVYHALIEHGQFEKVLVCNAGHVRNVPGRKTDLSDAEWLVHLLECGLLRGSFIPPAQIKAARDVIRYRTKLTESRTSELQRLGNVLQDAGIKVDSVASTITTQSVRAMVEALIDGERRPLLLAELAKGKMRAKIPDLQRALEGRFDDHHALMCRLHLDHLDYLDEMIARLDTQIQDMMQPFRSQRDLLTSIPGIGPFAAAAVISEAGADIAETFPSAGHFASWIGVCPGNHESAGKRHSGKPRKGNQHLQHVLVECAWAASRTPGYLQSLYRWHVRKFGGSRNPTAKNKAIVAVAHKLAIIIWHVLATGKPYTDLGADYLDRRIDPAKETRRLIARLQALGHTVTIEPAA

SEQ ID NO: 89713 - protein, 414 aa, unidentified
MEVVNPRCAGLDVHKKLVVACALTSNAVKADGQPQPELARFGTMTQDLRELARWLAERGVVQVAMESTGVYWQPIWNILEEHGGFELLLVNAHHIKAVPGRKTDVKDAQWLAELLRHGLVRASFVPDRAQRELRELTRYRTALIEERTAHVNRLQKTLESANIKLSAVASDVTGVSARAILGRLIGGDEDPAAVADLAKGRLRTKLPELERALEGRFSEHHRYLVPRILAAIDFLDGEIADLDARVAELTRPFADAVERLDGIPGVGRRLAEVIAAEVGSNVERFPSAQHLASWAGVCPGNHESAGKRLGGKTRKGNAPLRRALVQAAHAASRARQTYPGAQYRRLAARRGKKRAAVAVAHTILGIAYHLLARNATYTDLGPDHFDRRDAEAIERQLVKRLERLGNRVTLQKVA

SEQ ID NO: 89714 - protein, 414 aa, unidentified
MNDVKTKFSIFVGLDWANKKHDVCVQIGDSDKRSFEVISHTPESIDSWLNELHKTAKGNIAIAVELTKGPIVYALQKYSFVTVFPIHGLTLARYRQAMFPSGAKDDPMDAELALDMMLKYPNKVKPLRPSSDQSRTLALLVEQRRSLVEDRRRNTNKLINALKQYYPQPLEWFCHRDTELFCDFLIKWPALHAVKRAKTTSIVKFFQARGGNAVSNTEKRVNAINKAIPLTQDNSVILPHKLLVVALCKQILTLIENIRIYDKQISQLFNSMPDAELFNSLPGTGLCLAPRLLAALGEDRSRFNSAQEIQNYAGLSPVTERSGQKSWVHWRWQCSKFVRQSFIEWSAKSVKQSYWAGLYYEQQRAKGKSHQSAVRALAYKWVRIVYRCWKTRTPYDESTYLKALKERNSSLLAA

SEQ ID NO: 89715 - protein, 377 aa, unidentified
MKAPSTRPGAVLGLDVGKSSHWACLIDRGGKVLASAPVRNREGALDALFSSAPAGTLVVVDQFRNIGSLAVRRARAAGLEVAYLPGLAASRAAGLFAGEAKTDERDAEVIARTALGVPDSLSGVPGRGEALEAARALSSQRDHVVACATRDKNRLRAVLLESCPALEAAVDLSDRRWLELLAGFGGAWGIARSGAEGPQAEAAGEAAAASTAPPPALIEAENRQVRFLAARISEALDEAGALEAETAGLLEGDETYACLLTVPGIGPRTAAQLAVSVDIARFPDHDHLASYCGIAPRVRSSGTSVRSVRASRRGDARLKSLLIFSCNSLVRSSGRYGEYYRACRARGMGHGRALKAVARKRLRAIYAVMRDRVPYRE

SEQ ID NO: 89716 - protein, 343 aa, unidentified
MEQYAGIDVSLESVSVCVVDSTGRIVREAKLACEPEALITWFGKLEVGMARIGLEAGPLSQWLYARMREAGLSVELLETRHVRDAFKAMPVKTDRTDARGIAQLMRLGWFRSVHCKSLPAQELRAILTARKLVQTKRHDLEMSLRGILRGFGLKVGQTTPRSFEARVRELVDGHPTLTVVADAMLLARAVLVEQLGKLQKRLVSLARQDTRARLLMSTPGVGVLVALTYVAAIDDPARFRSSKAVGAHFGLTPKKYQSGETDVTGRISKIGDASVRTALYEAANVILTRPVRGSLLKSWAMRVAKRTGMRKAKVALARKLAVILHRMLANGSAFVAGKAAAKA

SEQ ID NO: 89717 - protein, 340 aa, unidentified
MSLYGGIDLHANNSVIVLLNEQDEVIYRKRLPNTLPTILEQLAPYHTEVKGLVVESPYNWYWLVDGLMEAEYRIHLANPAAMQQYSGLKYTDDHTDARWLAHLLRLGVLPEGYIYPKAERAVRDLLRKRAHLVRQHTANVLSVQNIMARNTGSRFSVKRIQELTKQELTTLLAEETQVLAVTSSLMVLDCLRQQIKTLEQSVHKRLHHTPSYEQLLAVQGIGTILAQTITLETGAINRFPSVGHYASYCRCVDSTKMSNGKRKGTGNVKNGNPYLAWAYMEAAQFAMRFQPEAQRFYQRKLAKSRNNTVLARKAVAHKLSRACYDMMRDLVPFEAIKAFG

SEQ ID NO: 89718 - protein, 338 aa, unidentified
MVLIGIDPHKASHTAVVIDDRECELARVRVPADKAQVVALLDFAASYSPRRWAIESAGGLGFLLAQQLVRAGEDVVDVPATLAARVRLLGSGQGSKNDPNDALSTAIAALRDPHLRTVVVEDHAMVLRLLADRHQDLTALRTQAVCRLHALIAALTPGGVQRRLSAAGAVSRLRQVHPQTHVQAQRKQMASDLVADIRRLDTAIKDVKQRTAAAVTASGTSVTEVYGVGPIVAALLIGHTGDITRFPSAGHYASYNATAPIEASSGKVVRHRLNPRGNRQLNHALHMAAVTQLRNDTPGRAYYLAKIDAGKSKKEARRALKRKISDAVYRQLRADART

SEQ ID NO: 89719 - protein, 388 aa, unidentified
MQIVASRPQAPTTIRTDLGAIFVSLELSRSTWLTTSLSPGSGEKMSKHSVRDGDTAGLLERFAQVKEKARARTAKSFPILVIQEAGLDGFWIHRVLRSKGIESHVVDPASIATSRRRRRAKTDKIDGEALVRALLAYKRGEPRVCAMLKVPTPEEEDRRRLCRERKVLIAEQIEHVNRLKGLLFSQGISGYEPLRRNRWTRLEELQTGDGRLLPKHLKAQVRRELDQLELLLEQIKVVERERDTLLAAEETSAPAPAAMLLNIKGIGPEFAAVLWSEGLFRHFDNRRQVAAYAGLAPTPWQSGAVDREQGVSKSGNPRLRTTLIQLAWLWLRHQPKSALTQWFVEWVKRNGGRLKKTTIVALARKLLVALWKYVTAGVLIEGAAMKSA

SEQ ID NO: 89720 - protein, 401 aa, unidentified
MPFHGGLDWGGASHALCIIDGAGQVVGRLDVRHDAAGLADMVARLERIAPPADLPIAIERPSGLIVDTLVEAGHPVVPVHPNVVKACRPRYRAAAAKSDPGDAFMLADILRTDGHRFRPLLPVSDDIKALRALVRGRGDLVAARTAIANQLRSLLEGFWPGAAAIFAAIDSPIALAFILRYPTPDSASRLGEKRLASFMAQNAYCGRRSPAELLARLRAAPAGLAGDAEAEAKGELARALAIVLERIVGEIAKLSAKIEHAVAELPDGRVVMSFPRSGRICAAQILAELGDVRERFPTEDQLAAEAGVCPVTHASGKSRGVVFRWACNKNLRAAVTCFADNSRHACPWAAATYRKARDRGCRHPHAIRILARAWLRVLWKAWQNHALYDPQKHRAAAQIAA

SEQ ID NO: 89721 - protein, 391 aa, unidentified
MDKAWAGIDAGKEFHWAHVLDASGTELLSRKVENDEADIARLIDEALSLAEGIVWAVDQPGGSAALLLALLWERNQRVFYVPGLSVDRARDTYRGESKTDARDAHVIAEQARMRPDLGELEPGEQEIAELQLLLARRRDLITDRSRTIARLRETLLSLFPALERALDLNGKGPLTLLSHYQTPAQLRRAGHKRVAAYLRNRGVKGSNKVANKALVAAKAQSVTLPAQEVASRILAELAKDVLGLKERIESIDEEIGQRFFARPEARILTSLPGMGPILGAEFLVAVGDIRTFESADRLAAYAGLVPAARDSGKRVGNRRRMRGGNKTLKRVFYQSAFASLRGCAQSRAFYDRKRAEGKRHTQALVALARRRVNVVWAMLRDGSEFEERSAA

SEQ ID NO: 89722 - protein, 338 aa, unidentified
MEITTIGIDLAKNVFQVHGMNAHGKTVVRKRLSREKFLTFFANLPPCLVAMEACGSSNFWARRLKALGHDARLISPQFVKPYVKTNKNDFNDAEAICEAATRPQMRFVPLKSIEQQDIQAVHRVRQLLVQQRTALVNQARGLLREYGVFIPAGISQFRRAIAGVLEDAENELTDLTRALMADLYQRLLELDRQIADYERHIARLSREQPVCQRMEKVEGVGVLTATALMATVGDAKVFKNGRQMSAWLGLVPRQHSSGEHNRLFGISKRGDIYVRSLLIHGARSVLLRCKHKTDSKSRWLQRLIERRGFNRACVALANKNARTLWALMAHEEDYRLAT

SEQ ID NO: 89723 - protein, 383 aa, unidentified
MRNVCGLDVHKDNVFVCIDKEKGEKIQFKTGILTKDLDALRDTLVANDVTEIAMESTSVYWMPIWRILENDFKLYLVNPYAIKQLPGRKSDIKDAEWIATCLRKELIRGSYVPDSTIQQLRQYNRRIFDLNKEKVYKLTKLDALLHRCNIRISNYVSSIDSKSYKEVVRLLSEGIVDAERLMEAIHGRTVNRVGKDVIRAALAGVVNEVDIDLIRQYREELLIDDKHLKECQNKLTEICRNEFPKEFESLQTIPGVKERSATSILSELGADMKMFLTASALVSWCGLKPRNEESAGKIKSRRITHGNKYIRKTMIECAWGASRTQDCFYSNFSYIQTVVRRKNAMKVKVAIARKMLVAIWHVLSENVPYNDYKKPKAIADGNS

SEQ ID NO: 89724 - protein, 367 aa, unidentified
MRDSITVVGLDVHKNSIEIVTADTDGAMEVRHFGRIGGTMDALERAVRRLVSQGSTLRFVYEAGPCGYEIYRHLTGKGFSCKVVAPSKTPKKSGDRIKNDRRDAETLARLERAGELTAIYVPREEDEAMRDLTRAREDAVKALKTARHQLNAFLLRYGKRYPGKASWTPSHLRWLSDVTLPHPSQQIVLQESIMAVTGCTERVARLTDQILKLLSEWRLFPVVQALQALRGVAPIVAATTAAEIGDLSRFENPRQLMAYLGLVPSEDSSGESTHRGSITKTGNGHVRRVLIEAAHAYGFPARVSRHLLKRHEGLPQPVLAIAWKAQVRLCGRFRRLMARGKLKTKVVTAIARELCGFMWAIAREVKV

SEQ ID NO: 89725 - protein, 349 aa, unidentified
MNHYAGLDVSLEETAVSVVDEAGKIVRDLKVASEPQALIDYFRSSGLPLERIGLEAGPLSQWLCAGLRTAGFHVVCLETRQVKAALSAQKNKTDRNDARGIAQIVRTGWYQEVHIKSQRSQEVRVLLTNRRMLSNQRKDIDNELRGILRNFGLKVGKTGQGKGKFEARIRELLSQAPSLRAMVEPMLAVRKALVAEFERLHQLLLSIVRSDATCNRMMTTPGVGPVTALAYVSGIDDPGRFKASQAVGAHFGMTPRKYQSGEMDFNGRISKCGDALVRTALYEAATVLLTRVTQPSSLRDWGLRLAKSRGLGKAKIAVARRLAVVLHRMWVDGTEFEANTSQKRAPLAA

SEQ ID NO: 89726 - protein, 342 aa, unidentified
MQISTIGLDIAKNVFQVHGIDAAEKIVVRKRLRRRQVLEFFKALPPCVIGMEACATAHYWARELTKLGHRLRLMPAKDVKAYVKRNKNDAADAEAICEAVRRPTMRFVRIKSAEQQGQLMQHRTRDVLIRQRTQIINALRAHLAELGLVAAQGNAGVNELRAIVRDEQDTRLPIDARASVIVLAAQLEALESVIGAIEKRIKMQHRSSEASQRIEAIPGIGVIGATAIVATVTDPTIFRSGRDFAAWIGLVPRQVSTGGKQKLGPISKQGDRYLRRILVVGAIAVLRRAQENPGKYPWLTQLLARRPFKVVAVALANKMARMAWALLAHGDTYRAPELAETA

SEQ ID NO: 89727 - protein, 324 aa, unidentified
MQGKELSEQTTAAKSNVGIDACKSWLDTHVLPSAQTLRVPNTGEGIRKLKRWLDRFEVSLVVVEATGKWHRQVHRSLIAGGIAVAVTDPFRVRAFAKAKGILAKTDRIDARVLALFAALMSPDIRPPASQALEELAELVTARNSAVAEQTALKNQLAAACGTFLKRQLERRCTRIAKDIEVIEREIARHIAADEGLARRYVILTSIPSFGPTVAATLIACLTELGACGRKQIALLAGVAPIADQSGKREGVRVVWGGRPAVRRTLYLAALSAATHNPGMKLFYQRLIAKGKAAKQALIAVARKLIVLANTLIAEDRTWQPSSPK

SEQ ID NO: 89728 - protein, 460 aa, unidentified
MNQYYLGIDASKGYSDFVMLNAKKQPVIENFQIDDTFEGHARLYELLRSFNQDHPEATIYAAVESTGGYENNWFQSLLKFQGSLPINTAHLNPLGVSYNHKADLKRNVTDKISAQNVAEYMIAHPEKVSYQHQDSLASLRKQWGFITMLTKQSTQLLNQLESLVYNANPEILTYCKNGTPQWVLKLLTRYPTALRLSKAKAKSVARIPYVSKDRAQQLVATAKKSVASADDEVTEQLIMATVKQILDRNNTIKAQTKILTDKCAVPEVELLKTFIGISDYSAIGLMLEIQSVQRFLSSKKIASFFGIHPAYKKSGDGIWKYRMSKKGRKEPRRILFMVAMSAIKSNPLVRSIYQQAVQRGMKKKAAVGLCMHKILRIIYGMLKHNKAFDPEIDRKNRQKKPLRQRRVHQDKDRRYQDFDSKAPISRRQKMKREERKQSQNVSNVEYGINEASVPVTELAN

SEQ ID NO: 89729 - protein, 374 aa, unidentified
MAGDYDAFIGLDVHKETISAAVAMAGRDGEVRLIGVIPNEPDAIAKLARKLADRHNRMEFVYEAGPCGYGVYRQLANLGFHCRIVAPSHTPVRPGNRQKNDTRDAMMLARLLRAGELTYVWVPDPTHESMRDLVRARHLASHDVRKARAQIQMFLLKHGLRYEGKPWSCRHRSWLADRRFEHRGQQIAFQSYLNRLAQADSRKKELEDQIAAIIPDWSLGPVVTALQGLKGVGMVIAATIVAEVGEFSRFASPRKLMAYLGLVPGEHSSGGSIRPRGITKAGNTDMRALLFEAAWCYRTTPKVGQFMEKQKADVPQEAKDIAWKAQLRLNGRYRKLVGRGKKSNVAVTAVARELVGFTWDLARRYEPAPGAAPA

SEQ ID NO: 89730 - protein, 344 aa, unidentified
MNKVTIGLDIAKSVFHLVVMNQSGRVLKKKKLKRYQVLSYFSQLEPSIVVMEACGSCHYWCRELTKAGHEVKAIAPQYVVAYRKGNKHDYNDAEAIAEASQREGMRFVPFKSQEQQDIQLMHRIRERMIAQQTALSNQIRGSLAEYGIVYARGVATVVKELPFTLEEADNGLSMLARQLFQGLFNDLLVLRERIKEMDKELKAFAQNHPVCERLMSMTGIGPLIATALYAGIGQGQAFNSGRHLAAWLGIVPKQHTTGDNPRLLGISKRGNTYLRTQMINGARAALRHIGDKTDKVSQWCRACLARMSFNKACVALANKMARMAWAMLHHQQDYLPGQINKAAV

SEQ ID NO: 89731 - protein, 283 aa, unidentified
MSIVGGLDLHRKQLTFDYVDRATGELQRGKIAPADRRHLAGWLHRSTVCPDVEFAVEGCTGWRYVVEELQKAGVKAHLAEPADTAAARGRKKRAKTDRADSKLIRELLDGGRIPQCWIPPFLVLECRALLGLYHDLRREHTGWIQRIHAVLFHQGAEALGGGAISTEQGRVRLGQVAAEQLSAAGQVQVATAVAMLEVLEVQLDVLRRRLVGTARHLRGPKTLAEAIYGVGPITGLALCCWLGGTDRFGSSRKAVRFAGLDVTVHSSDSAGEFCSGGEGEVEA

SEQ ID NO: 89732 - protein, 345 aa, unidentified
MDIMYYIGLDVHKKTISYCVKDASGQVHQEGKIGATRRELDSWIKTLPQPRTMAMEATIFTGWIYDHLLPHAQQVKVAHPLMLRAIAAAKKKNDQIDASKIADCLRCDFLPECHMASTQIRDRRRTLRYRHLLVRQMVQMKNRISGLLMETGVSYNKQRLHKAGYFRELLSTNEDVHESIRPLLRLSRDTIVRLQKTEYALVSSLQRDPLLADRVQRLKTVPGVGPITALSWALEIGDVSRFRSIRQAISYCGLCGEEKSSADKVMRTPLSKQRNKHIQRVLVEAAKLAPRQDHDLALVYQTEKEKGNANRATLAVARKMVAYLLAVDREQRDFVPAEDHRRAAA

SEQ ID NO: 89733 - protein, 482 aa, unidentified
MTTAEQCSDLDQETARIRASGRVLRLHKEKIMTKRKEKQQRRSMVLEPDAAGIDIGAEEIYVAVPPDRDEESTRRFSSFTGDLHALADWLGRCRIQTVAMESTGVYWIPLFQILEERGFKVYLVNAHYLKSVPGRKSDVSDCEWIQYLHSVGLLRASFRPPEAICALRTLWRHRGSLLEMAAEHILHMQKALSQMNLQLHHVLSDITGTSGQAILDAILSGQRDPVALAQLCHRRVQSPRDKVAQALVGDYRPEHLFTLKQSLAGYRYYQKLILELDQETARLMQALPSATEDPIPPRTKPTAYHRKGNDPQFDLRSELYRIAGVDLTDIPGVSAATAQVVLTEIGTDVSRFRHASAFASWLGLCPEKRISGGKVLSCKTRQVKHRAATALRMGADSLCRAKGYFGEFFRRMRAKLGTAQAITATAHKIARILYHVLLTKEPYTETVFHRCDEQAQQRAEMRLRKQAARLGFQLLPIPVTGE

SEQ ID NO: 89734 - protein, 344 aa, unidentified
MKVTTVGIDLAKNLFQLHGVNEYGKVVFNRQLRRDQMAEFFVNLPACLIGMEACGSSHYWARKLQKFGHTVKLMAPQFVKPYVKTNKNDAADAEAICEAVTRPNMRFVPVKNVEQQAVLSLHCVRQGFVKARTAQANQIRGLLGEFGLIVPQGIGYIAKRVPELIEDASNDLPGSFRLLVQRMLDHLKELGRQVDELEMQIVKWHRQSDASSKLANVPGIGPITASALAASIGDAKSFDNGRQVAAWLGLVPKQHSSGGKQNLLGISKRGDTYLRTMLIHGARAVVYWAEKKPDTCSWINRLVSRRNKNVAAVALANKNARIVWALLAHEREFRPDYTTAKAAT

SEQ ID NO: 89735 - protein, 323 aa, unidentified
MNHNTTVFVGLDVHKDFIAVAYVPDDREAEIIYLGPIGTKQCDIDKLTRRLQPKASRLIFAYEAGPSGYGLYRYLLSKGYTCLVVAPSLIPKRPGDRVKTNRRDAVQLARLLRSGDLSSVYVPDLEHKAIRDLSRAREDTLKDLKAAKLRLKSFLLRHGIYYTGNASWTPAHLRWLSEVVCPTPTQQIVFQEYVHTVSEHEGRLTHLETELRDRVSSWKLLPLVSALQALRGVQFTVAVTTVAELGDLSRFDKPRQLSAFLGLIPSEHSTGEKRHQGSITKTGNTHARRAIIEGAWAYRYPAKVSRQIQERQQNLPKHIQDIA

SEQ ID NO: 89736 - protein, 381 aa, unidentified
MVKENFIYVGIDLHKETHTAVMIDCYNQKLGEITFPNRPADFPKLVTKVKKCNTDAKEVVYGLENAYGYGRPLAVWLIDKGYFVKDVNTAISHRQAKHRGAMYRKSDSDDAEAIALATLNMLDKLPDACPNDAYWSLGQLVHRRDNIMKQRTRLVNQLHEQLCIAYPSYKQFFNDISRPTALYFWEHYPSRKYLKGKSVEDLRTELVPVSHNRCSTKNCEKILDAVASDKVKNNAYQDARDMVTLSIVSDLQHYDSQLAEVDKMLEQMYKMLGCTLTTIPGVNVITAVKILAEIGVIKRFGNANKLAQFAGIAPLHLSSSGKGKDVATKQGNRRLQATIYFLAIQMVQVSSKGTPRNPVVRAYYEKRKAEGKTSQQALIKP

SEQ ID NO: 89737 - protein, 395 aa, unidentified
MFIVGIDIAKRSHEAIIIAEDGQVVRKAFSFRNNCTGYNLLLEQVRKLTLVKSQIVFAMESTAHYWLALYARLLKDGYTVMVLNPIQSHSLRELYIRKTKTDARDSLIIADFVRFGRCKASNVPQDKILALRELCRSRAYLVDMAADLKRKLIALLDRIFPEYESLFDSVFSKASIAVLSKYSTPQKVKNANLRKLTDLLMESSNGHFGEWKAHQLKEAACSSFGIDDSGGVYSTLLGMFLEQILSLTAQADSLEKQISVFFQEFNNPLTSIPGVGTVLAATILSEIGDITRFSSADKLLAYAGLDPSVKQSGEFKSNQNRMSKRGSPYLRRAIWLASTVAAHRDPMFQTYYEKKISEGLHYMNVIGHVSRKMTAVIFAVLRDGQPYQPILQSAG

SEQ ID NO: 89738 - protein, 409 aa, unidentified
MNLYLGIDVGKSNLAFCALDSDRQCRFQDETTNDLNGARQIKQTILAETHHQDYNQIIAGMEATSIYNFHPMTFLSTDPELKALGLTVIIINPYTSHHFSQLFDDGKTDKIDARHLADLLRVEPLGNPVMRQEKYVALQRLTRERYHLVRQLTDSKNHFLNNLYYRCNTLDQTVPTSVFGATMLTLLTDEELSLDEAAALPLAQLVDHLQRLSHGKFGDTEAVAKAIKQAVRSSYRLTKVVADSVNEILAVYAEEIRMLNKQIKSIDKTIAQVSSQVKGIQCLTSVPGIGPVYAAGIVAELGQIERFPDESHIAKYAGLAWLPHESGTSVRQKTPHTRKGNQYLRYYLVEAANSVRRYDTTYQRYYQKKYNEVPKYRHQRAAVLTARKLVRLVEVLLKNRQLYTAPPVA

SEQ ID NO: 89739 - protein, 358 aa, unidentified
MLADQYDVVIGADTHRDTNALAAVRSFNGALIASTTISTDDNGYRAAILFADTHAAGSRAWALEGTGSYGAGLARFLSARGERVIEIDRPARSDGPSHAKSDELDAARAARTALGRTSHPTPRIDPVHDALRALHSTRAGAVSARTAAINELRALAVCAPDRIRQRLRDTTIVTLVSSARTLRHRRNEPIDEHATITAIRLLASRIDQLTRESTLLERDLATLVRDSAPQLLAEPGIGVITAAQILISWSHPGRVRSEAAFARLAGAAPIPASSGQTSRHRLDRGGDRQLNRTLHTIVLSRLQHDERTTAYAERARRRGKTRRETIRILKRYLARHLYRLLEHPTTTTPTGITIGPCS

SEQ ID NO: 89740 - protein, 311 aa, unidentified
MTQHTIGVDISKAHLDAFRLEDGASHRFENSATGFRALRKWLGRAPIARIVFEPTGPYHKAFETAFSKTFPLVKVNPLQARRFAEAHGTRAKTDAVDARMLARMGAAFNLEPQAPCSKETLILRDLHVARAGLIKDRTRLRNRAQTQDIALLKRQTKARLTQVERQVAELDAEITALIEAHDATARNRDILCSMPGIGTVTAAALLTLLPEIGTLQRKQVASLTGLAPITRQSGQWQGKSFIGGGRKPLRDALYMPALVAMRYNPDLKAKYDALRAVGKPAKVAIVAVMRKLIETANALVKADRMWTPKTA

SEQ ID NO: 89741 - protein, 346 aa, unidentified
MEHYVGLDVSLKLTAICIVDRTGKIEREGVVTSDPETIAAFVKSHAPHVARIGLEAGATSTWLWTELNKMGLPVICIDARHAKAALKMQINKSDRNDAVGIARIMQCGWYKEVRVKDLDSHAIKALLVSRALLVKIKRDIENQIRGLLKNLGLVIGRAKMNVFAVRAAELADARPAVAAAVEPLLKAREAVGRQIADLDRKVLRLARNNAQVRRFITVPGVGPITALCFLATIDDPTRFKRSRSVGAYAGLTTRRYASGEIDWTGRISKCGDKMLRTYLYEAANVLLTRIEKWSALKAWGIRLAKRSGLRKAKVAVARKLAVILHRMWIEGTEFKWSSKEAANQPA

SEQ ID NO: 89742 - protein, 340 aa, unidentified
MNYEPITAVGIDVSKGKSMMAARRPMGEVVLLPKEYPHTEVGLERLALDILALGEETRVLMEATGRYHEPVAAALHGYGIRVTVINPLFIKQNGGGSIRKVKTDKADAMKIAKYALDNWVDLREYIPMEAIREQLKLCSRQYNLYMKNVVALQNNLISLTDKVFPGVNERFSSPDRADGSQKWVDFVITFWHCECICMVSEAVFTERYRKWCKRKGYHFSLQKAAELYMDSMGHVTTLPKNSSTKLLITTAAKELASAKATLAVMRSEMTRLARQLPEYETVRAMYGVGETTCAQLMAEIGDVRRFPRRSSIVSFAGVDPAVDESGKHISSYTPALPQEE

SEQ ID NO: 89743 - protein, 313 aa, unidentified
MAVHGSKNHIRISNNSEGFKQLLAWLKSLKIALEECWFVLEYTGGYEYRLVQFCNAKQITFTRVPGLQIKRSLGMQRGKNDKIDSKRIAEYGYEKREKLQQSKSCDPAITRLKQLLTQRSGFVNDKKAHEHRMKELLAMMEFKANDAIIKNYKVAVDFALKMIEKTEAEIKKVINQDQAMSRNFALITSIPGIGNVNGWMTIAHTENFESFADGRTYGAYIGVVPYEHSSGTSIKGKSRVSNMANKPLKADLSMAAKASVQHDPEMKEYYERRLAMGKRHMGIMNEVKFKLVLRMFAVVNKGEIYVKNPKLAA

SEQ ID NO: 89744 - protein, 430 aa, unidentified
MGLIVPSAMHAERDDQPVSYEWFVGIDWGSQQHQVCVLDRDRRRVGTRAVDHDGASLAQLAAWLWTLSAGQPQRVSVAIEVPRGAIVEGLLERGFHVFAINPKQLDRFRDRHSVAGAKDDRRDAFVLADSVRTDRPSFRRLQLDAPHLLLLRELSRAEETLLEDFRRSANRLRDQLHRFYPQMLQLCSAADAPWLWDLLQLAPTPAYAALLSEEQVQRVLKAHRIRRVKAPEVLACLQAPALPIAPGAAEAAQAHCGFLLPCLRVLAEQLQACSQQADTLLRTLAEEPGEGQSPSDVAIVQSLPGVGRKITAWLFAEAAQPLAERDYQVLRTHGGVAPITKQSGKRRQVVMRRGCNLRLRHALYHMARVAMQRDAHFSSVYAALRAKGQRHGQALRNIGDRLLRILMAMLRHRTCYEASRMRREPVVQMG

SEQ ID NO: 89745 - protein, 362 aa, unidentified
MFRQRTFAGLDVHARSVTGHAVDELTGELHRQRLPSDLGEVCRWLQSLPQPVTAAYEAGPTGYRLARYLGSRGIECVVGAPSKLQRPPGNRIKTDARDAEHLCRLLQLDQIVEVTVPSPEQEQARDLVRAREAVRGDLMRARHRVSKMLLRQGILYPGSKSWTGVHHHWLHLQHFDAPPQQLAYQDYVEAVLLTTDRRDRLDKAIEALAADSSYTPLVRRLCCLRGISTLTGFALAVEIADWHRFTGSSIGPYLGLVPTEESSGDSRYQGSITKTGNRHVRRLLVEAAWHHRKSYACPSKIMRQRWELAPGPARVRGHQGNRRLHQRWQYFQARKKKNTIAAVAVARELAGWAWSLAIMDED

SEQ ID NO: 89746 - protein, 344 aa, unidentified
MANHAVTAVDIAKSVFEVAVSIQPGRVKERERLPRKSFLRFFATRPQTTVVMEACGSAHYWARELERLGHQVVLLPPSLVAPYRKRNKTDRADAKALLEAYRDEDIHPVPIKSVYQQTLTSLHRARSKWMQARTATINTVRGLLRELGEFIPVGARNVVPSTHAYIGDAESDCPDALRAVLLNMCEEIRALEASIRRTEGQLEALAKEIPVVAQLRTIPGIGLITATALVAFVGDAQRFKNGRRFASYLGLTPKENSSGGKRRLGRISKQGNPYLRHLLIHCARSMMRAAGTKTELDRLRSWALEKAASRGPHKGAAAVANKLARTAWAIWAKNTTYCPQPAAA

SEQ ID NO: 89747 - protein, 446 aa, unidentified
MELLYTHVAGLDVHKKTVVVCCRIAGPNGQPRRETRTFSTMTADLLALSAWLTSLEITHVVMESTGEFWKPLYNLLEASFIVLVVNAQHVKQVPGRKTDVKDAEWLAELLAHGLLRGSFIPPLPQRDLRDLTRQRTNLVRERATVVNRLHKVLEWANLKLTSVATNIVGVSARAMLEAIVDGQGDAAALAELAQGRMRSKRKALEQALTGRVRDHHRFLIAKHLIHIDFLDEQIAEYDEQILAHIAAQSPTPAPVDAPSPTVGPGRSISAAVPSDEVVPLSWEEAVSIWDDIPGIGRRVAEQLVAEIGTDMSRFPSAAHLASWARIAPGNNQSAGKHHSGKTGHGNQWLRSALIQAAHAAVKVKESYLAAFYHRLVGRRGKKKAIVAVAHKILTIAYTLLQKRERYQEPGATYWDERRKDQLVHRMRNRIERLGYTVQLEPVAVAA

SEQ ID NO: 89748 - protein, 381 aa, unidentified
MYYIGIDISKFKHDCAVIDDSGEIVTPSWSFTNDAEGFSQLKLLLNSLDTETRIGLESTGHYGMNLKLFLESNNFSFMEFNPLLINRFVKSKSLRKTKSDSIDCMMIAHYLMTVEYKPYPSSFYHTEKLKSLTRFRDSLIRLRSRQLVELTNILDKVFPEFKPFFGSRFSVTALYILSNYSSPEKIANMNSKSYEALRKLSRGRFSTVDFAKLKQLAKNTIGTTEDYLLLQMQIVLDIYRQLDSKVDETEVSIKECVSDMNPPMLSVPGIGIESAAVILAEFGDFSKFKNASQMLSFAGLEPGYFQSGTYETTGKMVKHGSSYLRYALMNCAQTVVNYEPTFAMFYSKKRAEGKPHRVALLKSCYVSSTHCKLKTLHMMPI

SEQ ID NO: 89749 - protein, 442 aa, unidentified
MVRFVGGDLQGRFMARVRGVDALRCLVVPVDVGKWSAMALIADHHGEVVVAPFEFRLDEPGVRRLVSVIEVAGVERDAAVCRVGVESAGHYHRTLVARLRAGGIEVVELNPAAVKEARSQQLLRRLKSDERDLGAMAELLVRGAGRLPQVRDDAMAAQVAWAAHRRRKVAAHVALSNQVQGHLDLVFPGLGACFNDILRTKAGMVIVRDLADPDRMRRLGVEGLRRFVARRGVVLRRAKAEQLLEAAKIALRLPAAERAPVGALLAADMALLNVIGDEIRRCEHALEEVLAATPAGVLLSLPGVAVIRASAYGAAIGDPSRFPNAGAAYRASGLVPAEYSSAGRRRGGQHISREGSVELRSAIIELGRGLAGHDDDFAAYKRRLHSNGKRPAVAAVAVGHRAHRLAFAMLRSQEPYDSQRWASAVADGPVMAKTGGRPTRTT

SEQ ID NO: 89750 - protein, 343 aa, unidentified
MQAITTIGFDIAKSVFQVHGVDAAGQVIVRRQLKRRQVIAFFQKLPPCLVGIEACASSHYWSRELHALGHRVRLMPPAYVKPYVKRQKNDMADAEAICEAVTRANMRFVPTKTPEQQSGLVLHRTRHLFIRQQTSVINAIRAHLAEFGVIAPVGRKGVEELLRVVADPNDKRVPEVVRACVAALGSQLLSLKKQILDFDRMIMAWHRSNQTSKRLNCIPGVGPLLATALVASVADPKTFRSGRNFSAWIGLVPKQHSSGGRDRLGSISKQGDRYLRSLFVAGALAVIRYAKIHGSKHRPWLTALLARRPTKLAATALANKLARMAWAMMATGARYNYPASLRV

SEQ ID NO: 89751 - protein, 308 aa, unidentified
MYVGIDVGKTYLDIALGSDQTRRYPNNMAGIKQLMAWLAPLEPRQIAFEATGVYHLPLSRALAKQGWSRLKVNPSQSNALRNALGKRNKTDKEDALLLAECARLEIGRVSQDDEDQAALRRLMSYREGLLKRRGQVNSQLEAASWAQDEQLIGLLEQDLAHLAQQLHTLDKQLDTMLAALCEADVLLEMTGVGRCTTLAVLAYLPRSIWGQAKAAAAFAGIHPALRHSGRTLHSSLSRRGNPRLRKALYMAALVAVRHDETLKAFYHSLISRGKAKKQALLAAAHKLLRHMMGRLNAFLSGKGSFLIP

SEQ ID NO: 89752 - protein, 452 aa, unidentified
MRPTRAARKPAHRRTTAIRSDAAGIDIGARLIHVAVAAERDTRPVREFQTFTQDLYALADWLHTCGVRTVAMESTGVYWIPLFQILEERGFEVCLVNARHVKHVPGRKTDFADCQWLQYLHAVGLLTASFRPAQQICALRSLLRHRESLIQTAAAHVQRMQKALDQMNLQLHHVISDITGLTGLAIVDAILAGERDPAKLATLRNWRVHASVDTITKALVGDYRPEHVFTLRQSLGAYRYYQQLMAECDVEIERHLTAIPDAHPGVGSSVASGARRKPRGNEPRFDLRTHLHRLFGADLTTIPGIDVLTAHTLLTEIGPDLSKFPSPDAFASWLGLCPDNRISGGKVLSVRTRRVKNRAALALRMSAQAVQGSRTALGGYYRRMRAKLGGPKAITATAHKLARVVYHLIATGQRYEESVFLKHEAVHRDRLQKRLHAQAATLGLKLVPNVVP

SEQ ID NO: 89753 - protein, 320 aa, unidentified
MRNTVGLDISKLTFDATAMVGKTEHSAKFDNDSKGLDQFSDRLKSLGYQNLHICMEATGSYYEEVADYFAQYYSVYVVNPLKISKYAESRFKRTKTDKQDAKLIAQYCRSAKESELVKRQKPTDEQYRLSRMTAAYAQIKSECAAMKNRHHAAKDEEAAKAYAQIIKAMNEQLEVLKEKIKEQTEKPNCKEGVKRLETIPAIGRMTAAVLFHHLTSSKFETSNKFAAFAGLSPQQKESGTSVRGKGKLTKFGNRKLRAVLFMPAMVAYRIRAFPDFIKRLEEKKKPKKVIIAALMRKLAVIAYHVHKKGGDYDPSRYKSA

SEQ ID NO: 89754 - protein, 354 aa, unidentified
MIMIGADYHPAFQQIAFVDTETGELQERRLEQPEGAEKFYRELAAQGKRVRVGMEASGHARWFERLLAELNIELWIGDAAEIRRKRERKQKTDRQDAQHILRLLLKDDFPRIWVPSWENRDLRQLLWHRHRMVQARTRMMNQLQAVALNEGLRCKKKLWREAGRKQLEAFRLAPWASRRRQDLLELLDRLNPTIAALSQAIEQEVEKCPEAQRLMTHPGVGPLTALAFVLIIERADRFQCGKQIASYLGLVPLEDSSGNRRRLGHITKQGNSLLRFLLVEAGQVTVRSLPEWRSKYVHLTMRRGRKIAKVAMARKLAVRLYWMMRQGWDYEQLKKFGSHSGQPGHRHGVKSNIE

SEQ ID NO: 89755 - protein, 454 aa, unidentified
MARPKPSRARRDISPTHQGAAGIDIGATMHVAAVGPEQDPEPVRGFGTFTGDLHRLADWFKHCGVRTVAMESTGVYWIPIFEILDQRGFEVVLVNARDAKHVPGRKTDISDAQWLQRLHEYGLLRASFQPKGEIAILRSYLRQRERLLDYAASHIQHMQKALTQMNLQLHHVVTDVTGATGMTIIRAIIAGERNPETLASLRDRHCRASVETISKALVGNDREEHVFALTQAVELYDTYQAKIVGCDARIEAILKRLQKAASTPVSMPPPARSTKQQSNGLAFDVRGALHGLLGCDLTQIHGLGPYLALKLVGECGTDLSAWPTAKHFASWLCLAPSNKISGGKVLSARTRRSGSRAAALLRLAAVAVGRTETALGAFYRRLSARVGKAKAVTATARKIATLFYNTLRHGMSYADPGASYYEERYRRRVLANLERRAKSFGYVLQEAPARDDVS

SEQ ID NO: 89756 - protein, 315 aa, unidentified
MDDHTPDTVGVDISKAHLDLHRRSTGESARFANDADGFEELAAWVGDPAALVVYESTGPWHRNLEECLAGRLVLARVNPLRARRFAQAMGEEAKTDAADARSLAAMGAAMEVRRVEPRTQAQRDLDELATARDALVKDRTAALNREKHARHPLLRRQLKNRLAQIGRQIKALDDRIAKTTAEDAGLSRRMEVLTSIPGVGPVVAAGLLADMPELGRVDGKAAASLVGVAPWTRESGQWKGRSFIRGGRARPRRLLYMAAVSALRRNPDMARKYAELRARGKPPKVALTAVMRKLAVLANVLLKQDRLWAPEPVRG

SEQ ID NO: 89757 - protein, 339 aa, unidentified
MKYTPVGVDIAKHLIQVHFIDEHTGEMIDKQLRRQDFLMFFCNREPCLIGMEACRGSQHWGRELTKLGHKVRLLQAHFVKAFVMGNKNDVMDARAIWMAVQQPGKDIAVKTEEQQSVLVLHRSRRQLVKFRTMQINSLHGTLLEFGKTIHKGRAAMERELPEALERMKERLPPYLITVLENQYNRLNELDSLIEDIEKKLTSVARQNETCKRLLDIPGVGPLIATAAVATMREASAFKSGREFAAYVGLVPKQTGSGGKIRLLEISKRGNTYLRALFIHSARAAALLPKEPGPWITELKKRRPTSVAIVAMANKLARTVWAIAAHGSKYDKNHVSIRSY

SEQ ID NO: 89758 - protein, 407 aa, unidentified
MEVLHPRCAGLDVHAANVVACVRITSGRSATYEHRTVATTTRGLLDLADWLTAQGVTHVAMEATGVYWKPVWHVLEDAFTLVLANAMHIRNIPGRKNDKNDATWIADLLALGLIRSSFVPPAPIQELRDLTRTRKQLVREITRHTQRIQKTLEDANVKLTEMISDILGTSGRAVLQALVAGETDPERLADLTSGRLKATRAQLVDALHGRVTPHHRFMLHLHLTQIAALDTAVAAVEAQIREALTPFRAAVRLLTTMPGVSETAAAVIIGEIGDDMSKCPSAGHLLSWAGLCPRLDESNGKRRSTRTRHGAPWLKTTLVQIAWPAARKKNGYFHAQFLRLKSRRGPKKAIVAVAASMLTDVYYMLRDGVEFHDLGDQYFVQRDKTRLTNRLLQRLRDLGVEVEVKAA

SEQ ID NO: 89759 - protein, 377 aa, unidentified
MSNIIKWPGEADGPNPNQFLYVGVDIHKDKHTAVATNCFGHKLMEMEFANTAKDFKQFVASMQSLADQQNREFIFGLEDSFGYGLHLAKHLFDSHLPVKMIPPVLVDRSRKYETHPEKSDSLDALGVAKVLIQRIDTLPDYSISITDELAKEIKELAMDRDFLVKEQTRIKNQLHRLLHKTYGSEYQKKFKDIFALKALRYWKKYPTGKAYILVDDSILKNQVRRKINRLMDIRQECKEIENELKILLDRTGQKLPTMNGCGTVLASAVMAEIRNIERFHSLAALAKYAGLAPRQKSSGKTIRHVKSKSGNRKLNMAIHRIALSQISNSGNQYAKAYFKKKITEGKSKNQALCCLKRKLVNIIYMMLKHKQAYNYQK

SEQ ID NO: 89760 - protein, 339 aa, unidentified
MGLYGGIDLHGNNNVIAIIDDKDRVMYQKRLDNDLDIVLTALGPYRDELVGLAVESTFNWYWLVDGLMDNDYRVHLANPAAMEQYSGLKYTDDKTDSRWLAHMLRLGILPEGYIYPKKDRPVRDLLRKRCQLVRYRTSNLLSVNNLITRNSGSSVKGNVIKKLRDKEIDATTTDENLALAIKSNLAVIRCLEQQVENIERVVKKQSRLAPEYKLLLTVDGIGEILAMTISLETGDIKRFSRVGDFSSYCRTVSSEHRSNGKKKGKGNPKSGNKYLAWAFIEAATFAIRFNERARRFYQRKSAKSKPVVAKKALANKMARACYYIMRDRVPFDNERLFAT

SEQ ID NO: 89761 - protein, 343 aa, unidentified
MNITTIGLDLAKNVFQIHGVNERGETVLRKRLRRKDVLPFFATLGRCVVGIEGCGTAHHWAREIRSAGHEVKLIPAAYVKPYVKRNKNDSADAEAICEAVGRPSMRFVPVKSTDQQSVLMLHRARDLLVRQRTMLVNALRGHLAEYGIVTAQGIGNVGRLLEMLEDGNKLSIPALARRVLLSIVEQLRQLYLRIRELELEIMAWHKSNEQSQRLATIPGIGPITATAIVASVGDTSQFRSGRHFAAWLGLVPRQNSSGNKERLGRISKRGDKYIRRLLVIGATSVIRYARSKTAPRNDWINRLLARRPARLVSVALANKMARIAWVVLARGEVYRVPATVAAV

SEQ ID NO: 89762 - protein, 351 aa, unidentified
MEKYIGLDVHAASTTFAVIGQSGRRLRAHVVETNGQALVAQLKAIAGSKHVCLEEGAQSAWLYEILSPWAERVVVVTVPQSRGQKSDERDAYQLAEKLRTGALKNWVFKEPGAYRTLREIGRTHAMVVQDVVRVQNRIKALYRSRGIAVAGRSVYSEKSRKQYLDKLPDASRGAADMLYAQYDAIEQIRRQAEKDLVTEAHRHPISRVLETGPGLGPIRVAQLMPVVVSPGRFRTKRQFWSYCGLGIVMRSSSDWVRKKDGGWMRDDVQKTRGLNLNHNHTLKWIFKGAATTVITTLRTDPLHQDYQRLTAAGTKPNLAKLTIARKIAAITLSMWKSKEKYDPTKHRKPSS

SEQ ID NO: 89763 - protein, 423 aa, unidentified
MKKRIYRAVNVKDVSFEALFRAVEGKRIVVGIDVAKEVFYAALMSEAPEVCTIVKWNHPKQTRQFVGLLKALAASCLDVAMEPSGTYGDALRFLLFDSGIPVFRVSAKRTHDAAEVFDGVPSKHDPKDAVIVARLQLDGLSEPWPLRSEQERDLAAGVNTMSFFSDQFQQNICRLEGKLARHWPEVTSLLKLGSKTLLCLLRDVGDPAFVAKATEKSRSVMRRAGGNFLCSEKIDAVIASAGHTLGVPLTAGERRALAVLAGDALRARSEKQKAEVHLKHLCRSDPSICAMGKVVGQTTAAVLFCCVGDPNHFAGAAAYEKCAGLNIKERSSGRYQGKRKITKRGSGMARKWLFLATLRLIRDCPEVRAWYERKIQRDGGKHKKSGVVAVMRKLIQALWHVGRGEAFDPARMYNQNLLSLDRT

SEQ ID NO: 89764 - protein, 379 aa, unidentified
METSSKTCVAVDTEQATLFVALELSQATWLVGLHSPIADKISINRIDGGDTDKLLALIEKKREQAARQLGRPVRVVSCYEAGRDGFWLHRFLIGHGIDNRVLDSASILVDRRARRAKTDRLDAAALLRVLMALVRGEEQVCRVVQVPSIAQEDERRLSRERERLLHERNSHIARIKGLLALHGVRDYRLVVGVWKERLDAIRTANGHALPARAKTEIERECRRLWLAKEMLAEVEREIEQMIERDSAAAGKLIRVRGIGPTFASVLTHEVFYRSFDNRRQVGSYLGLVSIPWQSGGVRRDQGITRSGNARARRCAIELAWLWLRHQPGSALAGWYRTRIGTMTGRMRRIALVALARKLIVALWRYLQTGTLPEGAVLKA

SEQ ID NO: 89765 - protein, 416 aa, unidentified
MEVLYPACAGLDVHKDTVVACVRLAANGAARTEVRTFDTTTPGLLGLSEWLAGQGCTHIAMEATGVYWRPVWHVLSDGDFTLILANAAHVKNVPGRKTDVADAQWLAELLAHGLVRASFVPEAPTQEMRALLRTRKQLVLEAASHVQRIQKTLEDANIKLASVLSDVVGASGRAILQALIDGERDPEALLALVNPRVKAPPEKILAALTGRITDRHRFLLRLHLRQIDALDEAIADIDREVNRELDPFRDAVRLLRSIPGVSDLTAQVIVSEIGIDMSRFPTAGHLISWAGLCPRNDESAGKRRSTRLRKGAPWLKTALVQCAWGAVRKKSSYLQIQFQRLRHRRGPKKAICAVAASILTAAYHMLRDGTFYRDLGPDHFSSISQQTKAEQLVRQIERLGFTCRITSATAGEAVSV

SEQ ID NO: 89766 - protein, 356 aa, unidentified
MKEDKKNYFSGTDIYIGLDVHKKSWDASIYVENIFYKSMSISPPSTKVLSDILRKNFPCGNYYVVYEAGFSGYWIYDELTENGLDCVVVSPADIPMSNKDKNFKTDRNDSKQLAQKLRSGLLEGIHIPEKIQREHRALLRLRDKFVKDRTRIKNYIKSNLMFFGKVIGKDYEDTRSWSKKFIQGLSRVKYLSDQGKDVIAELLKMVSVYEESIKGIDAKIKQLSLTHQYKQDVEILCSVPGISTLSAMILLIEIGDFSRFEDTNKLKSFIGLIPQEHSSGEKEIKTGITRRGNKFLKKIVIESSWVAIKRDKTLLSLYTKLTKRMRGSKAIIVIAGILLNRIRSIIRKREFYRIAA

SEQ ID NO: 89767 - protein, 322 aa, unidentified
MAMLSFCGIDVSKDRLDVMVLPEQQCSSVRNDVAGWSELIKRLRGFSIAAIGLEASGGYERGVMRALLAAGMSVRQINPFKLRQFAKASGVLAKNDRLDARMIASFVAIMPTHPAQRRSPAVEQLAEMVTVRRQLSDEKIAAENASRMLESAMLQRLSRRRIARLATDIAAIDERLVKIVVSDAALTYRYRLLTSMPGVGVVLACSLIAFLPELGQLTRTKIAALVGVAPYDFESGKLKGMRCIWGGRTSVRNVLYMAALSASNWNPTFKAFHDRLAATGKKPKVVIVAVMRKMITILNAMVRDGIVWADRHSDRQSVPTAR

SEQ ID NO: 89768 - protein, 346 aa, unidentified
MSYSTTIGVDLAKNVIQVSVVSGHGKELLNRSLTRKKFAELLGKQNSALVAFEGCASAHYWARTAVRLGHEVKIIPAKAVTPFRQGHKTDSNDALAVAEAARRPNIKDAPMKSAEQQGLQAIQRARELLIHECVALSNHMRGILLEFGITIPQGFASLLRMLPEILEDAENELPDLYRPTLNRLHQRMLNLRVDIEAMTKEIEQLVKAHPVCQKLTALEGIGPICALSLYAVLGSGKAFAKSREFSAYLGLTPRQFSSGGKTNIIGLSKKVGNRRMRALLIQGALTYVYRMKEPKCAKDRWLRDLIDRAGPRRAAVALANKNARTAWALITQGTEYQRLQPLEVAA

SEQ ID NO: 89769 - protein, 347 aa, unidentified
MLHAGLDLSRKKLDVCLLSDEGEHLDQLAVPPDVDSLRRLARRVVEVHRQPVCAVIESMTGARIVHDTLEQQGWSVEIADAQKVKGLAPLACKTDKIDSMVLAVLSHRDLVPAIWLPDPRVREERELARFRLHLVKHKSALKCRIHSTLINFGRACPVTDLFGVEGRRLLERLEVPEPWCSNVTASVELIDDLEEQIAGINRRLKDGHADHRYIPLLMSVPGIRWVLAFTIAGEIGEIERFSSPERLAGYTGLCPRVNQSGEKDRRGPLTKHGPTYLRWALLEATMHALRHPAYAERYQRNKRRLGKQRGAKVAQIDIARRLTEAVWHMLTRNQPFAPAGAALRLAA

SEQ ID NO: 89770 - protein, 338 aa, unidentified
MTCYSGIDLHSTNSVVVVSDEADRALYQRRLPNELPKILAALEPYRGELAGVVVESTYNWYWLVDGLQAAGYAVHLANPAAMKRYEGIKHSGDETDAAYLAHLLRLGILPTGYICPPAERAVRDLARKRSQLVRTRTAQVLAVENVFARETGGRMSANVIKRLEVAGLGEFGLGEDVTCSLAANVAVIQALTAEIEKLEARLRQRVRPRPQYRLLKTAPGIGEVLTTTIMLETGPIERFAAVGNFASYARCVDSKHLSNGKKKGEGNVRNGNKYLAWAFIEAANFARRYCPQAQRFYERKKAATNGILATKALAHKLARACYHMLKDGQPFDVKRCFA

SEQ ID NO: 89771 - protein, 402 aa, unidentified
MPEHKSYRRFCGLDVGKNTHTLCIIDAQQNTLTPARSFHNDRRGFQMLLESLQQTGRKHTVLIGMEATGHYWYSLHHTLTRQGYTVTVLNPIQTARQAKREIRKRKTDKLDAQRIAVLLKNGQYRSALIPGELAMTCRQVTRLRYRLVRQQSRLKQLVQAYLHPIWPEYATLFANSFSVTSRTLLAQSPVPTDLLTWDEDHLSEFLRKTSRGKHGPQLAQDIRQAAQQSVGMQRGLPGSRLAIQVLLEQMDNTEPLLKKLKEQIESLAQQIPAYLHTLPGSTTRSVVSLYGEVDPIETFQSPSQLVAFAGLDPHVYQSGQYDAPRRRISKRGSPFLRQTLWQMAHHAVYQEGDLRRFWLHKRAQQKHHLAAVTAVTGKLCHIIWRIMTDERDYVPDRRSSQP

SEQ ID NO: 89772 - protein, 343 aa, unidentified
MKYKTITIDLAKNVFQACGVNEHIKPQFNKKLKRNELLDFMRQQSPTVVVMEACYSSHYWGREIAKLGHDTKLIPAQHVTPFVRGNKNDHNDAFAIAEASQRANIRFVPVKSEHQQEISCLHRIRERLVKNKTAMSNQARGLLSEFGVVFPCGHKALLNGLNSVIDNAQYSQRLHDMVKEMLSEYNTTIDRLNSIKTQLDEFVDESESGKILLSIPGIGVINASALLAAIDKGQAFNNPKEFAVWLGLTPKQHASGNISKMGGITKRGDRYLRKQLVHGARSVVSRAAKKTDPLSLWATKLRVTKPFNKVAVAVAHRLARLIWILLTRQERYRAASTSQEASA

SEQ ID NO: 89773 - protein, 347 aa, unidentified
MRIVSHSCAVYGVDLGKTTFHIAGADQHGRPTLRIKLRRDALLQFFATASPALVGMEACPGSHWLARKLIAFGHDVKLIPAQFVKPYLKSNKNDTLDAEAIAEAVTRPTMRFVPVKRHEQLDMQALHRLRAQFVHQRTALVSQFRCFLLEYGIAIHTGIGMFRRDATRILADDSNDLTPTMRQLLTDLWSDFLRIDERVTALSGQIEVSAKHDDVVQRLTTIPGIGPLGASALCAAIGNGKQFRSGRDLAAWIGLVPRQHTTGGKPTLLGISKRGNTYLRRLLVLGAQSCLMHLDRSRDRLGRWLDTLESRMHHNKVVIALANKLARVAWVVLTRPGALYEKMDPRF

SEQ ID NO: 89774 - protein, 352 aa, unidentified
MIIGCDFHPSFQQIACVEQETGEYEERRLNHRGEAEAFYRSLAGRAVRIGVEATGNDRWFHKLMSELGHELLVGDASAIHASAPREQRTDKRDARHILRLLMENRFPAIWQPSAGNQEQRQLLLHRCRLVRMRTRIKNQLDSIAKSEGLTGSRAWSAKRRQQIEALPLTGWYAERRKDLLALLEEMDKRIDPLDKAVKAAAEQNAEAQLLMTHPGVGPVVSLAYVLILGDWRRFPRGKQVGSYLGLIPAEASSGKHQQQMGHVTKQGNTFLRWLLVEAAIKAQSKDPSWHRQYVRLSMNKHHGVAKVAIAHKLAVRLYWMLRSGQNYTQIVERGSHAGQSVLAGGCSSRPIN

SEQ ID NO: 89775 - protein, 338 aa, unidentified
MLYSGIDLHKRTVVIATVDEKGKVQSEASLPATRSAVARYFHWLPEPTTATVEATSSWYWLRDLLDQQGVPLTLAHAKFVKAIAYAKVKTDAVDALMLAQLHRADLIPRAHMVSPELRPLRDLLRTRLHLVEKRTSAKNSVQRLLEKFNVPEPGRLPDEATLQASLYAEQIELLGDQIHRVEQQLQPQLIPNPDVQRLLWIPGIGKIVAFTLYLEIDGIERFPSVRQFFSYCRVVPGAKNSAGKTRHVRRKDGNRYLKLALSHAAVRAIQYFSEIKHFYQRKARQKNPAIARTLVQKELARSVYIVLKEQVDFNHTFKGQPLSKRKASKWPRQASPDV

SEQ ID NO: 89776 - protein, 388 aa, unidentified
MPYRIAGIDVHKRMLAVVVADVEVEGEYQFERRLFGSNPEQLRLLAEWLIEQPVEEVVMESTAQYWKPVWGVLERYWKPIRQKREDASPMSGTLHLAQALSKRGRRGRKNDFRDAERLLKRLVAQELTLSFVPYAEQRLWRTVMRGKYQLTRDHARLRNRVESMLEEAHIKLSSLVSDLLGVSACTELNPVYRRLLKMALEELQFLEQQIGKLEQEMASLLSQHQDAVQRLAEVPGLGVDSAQQIIAEVGAEAATFASAKNLSSWVGACSGEEESAGVNPNHRSPKGNRHMRRILHQSANAAVKHKGSIFEVVYRRLVPRLGHNQAIGAIAHRLCRLIWLLLHRGVRYEERGPAVNQRSKQQRTARMIRELRRFGYRVEPLTVQLNPA

SEQ ID NO: 89777 - protein, 394 aa, unidentified
MIYAGVDIAKTDHVIGAVDERGAEMCPPMPFKNTEAGLERAVAWLEGLAGSPSDVVVGMEATGHYWMACYSFLVARGYSVAVINPMQVKAVRKLKKLDKVKNDRIDAWLIAETLRIGQYDETRLATDEVASLRSLSRYLQSLRGMVAELKTQCICLMDAHFPEYAGVFSDMFGAGSRAVLSKSPLPFELARRRADSLARDIAEASRCGGKSSGYAAKIKAAAKSSIGVRLGQEAASFQVKSLIRQIEFADSECAGVEARLRSLLDEVEPLVLTIPGVSYVTGAQIVSEIGDVSRFRNAPALVSYAGLNSSVSQSGQFDSGGGPITKHGSPYLRRALWLAANRARQYDPGLRAFYDRKRAEGKPHRVAVTAVARKLCHIVFAVMRDQVPYDPGRE

SEQ ID NO: 89778 - protein, 454 aa, unidentified
MASHSRPRPRRQPPVINPNAAGVDIGATEIYVAVSPDRADPSVRRFATFTEDLHALADWLRQCGMTTVAMESTGVYWIPLFQILEVRGVEVCLVNARHVKNVPGRKTDVQDCQWLQYLHAVGLLRGSFRPADQVCIVRTLLRHRDTLIQIAASHVQRMQKALNQMNLQLHHVISDITGVTGLAILDAILAGTRDPQALAARRDRRIKASREAIAKALVGDYWSEHLFTLRQSLAAYRHDQTLIQECDAEVEHTLRGFDARIDPAAHPLPPATTSHRKPQGNEPPFDLRGELYRLLGLDLTQVPGLNTSTVYTLFAEVGADLSKFPSPKHFASWLGLCPDNRVSGGKVLSVHTRHVKHRLARALRLAAQSLHRSHSALGAFYRRMRTRLGAAKAITATAHKLARIIYHLLASHTPYDESHFADIERAYWQRLESRLRAQAKALGFKLIAAAAVTT

SEQ ID NO: 89779 - protein, 343 aa, unidentified
MKHIGLDVHSATTHASILSDRGRKIGNAVIPTRKADLVAFVTNIPGPKQVALEESQLADFVTRILIPHVTTVIRCLPQHNRLISKSEQKYDDADADHIAELLYLDKLKAVHHASWEYRQLREGVRAYWTASRDLARAKSRLKAFCLFNGVHCVGEKVYSRKYRGGVYKEIDNQSGNIELLKQLYANMDSCREAKTAHVKILRELSRVFQKDMVCLKSHPGIGFIGASTLVAYLENGWRLKNKRKLWQYCGIGIRRHESAGTGRRGASRKGNRYLKNALMTATASIAARRNADNALTRIWREKVQDGVPPKRMKRNLARKLAVLAHRSLRFKEEYDDARVMTTH

SEQ ID NO: 89780 - protein, 406 aa, unidentified
MLFLGDDWAEAHHDIELQDEQGRVLVRRRLPEGVAGLGQLHALVADHLEDTDESSSVIVGTETDRGGWVQALVAAGYVVYAINPIQAARYRERHTSSGAKSDPGDAHVLAEIIRTDRDHHRPVAGDSERAEVVKTLARTHQTMIWTRQRQTNQLRSMLREFYPAALAAFSGDLAGRDAIAVLAIAPTPTLGQSLTKPRIVAVLRSAGRQRNLERRAEQILTALRTEQLGLSEALTEAYGVSVRSLVAVIITMADQVQSLEAEVERCFGQHPDAEIITSQPGLGVVLGARVLAEFGDDNTRFADAKARRNYAGTSPITKASGTRRVVLARYARNRRLADALHQQAFAALTASPGARAFYDSHRARGATHNQGLRALSNRLVGILDGCLRHRIRYNEATAWSHRAAAA

SEQ ID NO: 89781 - protein, 443 aa, unidentified
MREQSPRVLHPNAAGIDLGSKEHWVALPPGRSQQVRPFGCFTEDLQEMAAWLQSHGVDTVAIESTGVYWVPVFQMLEKHGLDVQLVNAKHFKAVPGRKTDVQDCQWLQLLHETGMLRGSFRPADAICVIRSYVRQRDTLVSESSRHTQRMQKALEQMNVQLHKVLSDVTGETGLAIIKAILDGERDPQVLAAFRNHRCRRSPAEIAKALVGDWREEHLFCLQQELAAYEFVQTQIAACEQAALQALGALEAKAEAANLPKTTKRKNAETPTREALFIATGVDLTKISGLAGTTVQTIIAEIGVDATRWPNEKAFASWCGTAPKNKITGGKRYKAAKQSGSSRVAQAFKMGAQALANSQTALGAFYRRMRARKGPTFANAATANKLAKLFYRMLRYGEAFVEQGADYYETKYKERVVRGAIEKLRRLGYSVQVQETPRLTEAVT

SEQ ID NO: 89782 - protein, 424 aa, unidentified
MLAVGIDWAEDFHLIALGQPGEGVTEIRRINHTPTAVAALLAHIATLEPDPAEVRVVLETRHGLLVERLVDAGYTVLPVNPDLVARRRGPAKKKDDAEDARIACLLALDRYTSLRPLVPHGEGAGELRSIARDDERAARDQRRLLNRLRQDLLATFPAALELAADDLGAPTMLRLLQRWPTAQTLAAATRQELVSFARTCKHGWPDRLADHVQAALAADQFTPRDYLVHAKTDTIRLAATQLLAIGAQRRAWERRMGALLLGAPRYGRAKQPRTEELDQGQGFPGGKVYLSFPGLGDRLAARAAGEIGDHICQYESPNALQCYAGKAPVTRRSGKSELVVACRLACNRHLAGAVQQWAFCSLRQSGWAREFYDAQRRRGKTHHAALRALGNRWLEVLWHCLRKGELYDEAIHVANRNRALGRAA

SEQ ID NO: 89783 - protein, 344 aa, unidentified
MKITRVGLDLAKRVFQVHGVNEYGAAKLSKKLSRAEVLQFFAQVPPCMVGIEACSGAHYWGRELGKLGHTVRLMAAQFVNPYRKSGKNDANDAEAICEAVGRANMRFVSVKSEEQQAVLMMHRARTLVVSNRTAQVNQIRGLLGEFGLIVPVGIKRLRTQLPQILEDAENGLPLLAREIFANLLHELHYLDERIERYDRQLQQLASQSEPARRLMAVEGIGPITATALVASVGDARVFKNGRQFAAWLGLTPRQYSSGGTTRLGRITKRGDRYLRMLLVHGARAHLRFVDRKNDPKSLWVKVLKARRHINVAAVALAAKHARIIWALLAKGTTYRSPAAATAVT

SEQ ID NO: 89784 - protein, 339 aa, unidentified
MKYTPVGVDIAKHLMQVHFIDEHSGEIIDRQIKRDALLEYFSNREPCLIGMEACGGAQYWARELEKLGHKVRLLQGKFVKAFVMGNKNDVMDARAIWMAVQQPAKAVAVKTEEQQAVLSLHKMRRQLVKFRTAQINALHGLLLEFGETVRKGRASLDKAMPEVLERLKEKLPPFLIYQIEDQYRRLSDLDMQIDGIEKQLGAWAKQNEACLRIMDIPGVGPLVATAAVAIMGDAGTFRSGREFAAYIGLVPKQTGTGGKVRLLGISKRGDAYLRTLFIHGARAAALLAKEPNPWVTELLKRRPTSVAVVGMANKLARTVWALVAHNRSYDKNHVSVRPF

SEQ ID NO: 89785 - protein, 409 aa, unidentified
MSQNIAGIDVHKKLLVVVIVDQTRPDVVLQIRRFGTGSGELRHLSAWLCQYGVEEAVMESTAQYWKPVWMELEPHLRLHLAQAQSNKAPRGRKSDLADAKRLVRRFVAGELMLSFIPEPEQRSWRMVTRGRLQLVRERVQLQNQIESLLEEGRIKLSAVLSDLLGASGRRILRSLAKGESSPEEMAALGDRSLKCGLPALVDALTGSMGEIHRQLLAQHLDRIELIDRQITELNQLAATRMQAYQDAVTRLIEIPGIGAEAAQEILAEIGPEAAAFPSAEQLASWIGVCPGSNESAGENHSGRSAKGNRFLRRLLCQAAQAAARTNGSHLQSLFKRLVVRLGYVKSVWAVAHRICKIVWNVLHKGARFIEFSEARNPRAVQRAINHHLKALRRLGYAIPLPVQPEAARG

SEQ ID NO: 89786 - protein, 349 aa, unidentified
MVTLGVDAHKRTHTIVAVDGNGAEVGQRTVAATSAGHLEGLRWASQWPERRWAIEDCRHLSRRLTTELLVAGEAVLRVPTKLMAAARRGARTRGKSDPIDALAAARAALREPDLPVAQLDGPARDLRLLVDHREDLVAERTRIENRLRWHLHELQPGEEPPTRSLNRHATLRALEATLAGQPGVVARLARELVVRCRDLTVAINALEREICERVSGMAPRVLALLGCGALSAAKIVGEVGRISRFRSRNAFAMHAGTAPIPVWSGNHERFRLNRGGNRQINCALHRIAITQMQRPGPAQDDLTRRRAAGDTKTEAIRALRRRISDEIYRRLRADEAAANTQLRDFLAAA

SEQ ID NO: 89787 - protein, 436 aa, unidentified
MVKVFIGVDPHKLSATIEVVDERETVLARGRFGTDKAGYAAMRKHVVAWPERVWAVEGSNGAGRPLAQRLLADGQDVVDVPAKLSARARLFDTGHNRKTDAHDAHAVAVVAVRTQGLRVLSFDEALEALRMLADRREELTRQRVRTVNRLQRLLSELIPGNGKKDLTALQAKAILASVRPRDLPGKTRRRLAVEQLAELVAVEKKIKALTAELKKMVKASGSGLMDLRGVGPVVAARVLADVGDIARFADRNRFASWTGTAPIEASSGEIVRHRLSRAGNRRLNHMIHIAATTQIRLQTPGRAYYRRKLAAGKTRAEAMRCLKRRISDALYRQLLADAKTVHAAGPDAGPGGHRGATLHSSAAGSHPHTGTSDQPLPGPAPTTLPATKPHANPCAASAPRPSRRRAGAVKVERPTGRTTLTATSAGAHSAVSKPPS

SEQ ID NO: 89788 - protein, 325 aa, unidentified
MTYIGIDISKATFVAAFLHGKSYRTETFPNDAKGIRRFISKLDPAIHHCVMEATGNYCFLLLYLLDKSGIRASLINPKKIKNYARVMMSVTKTDSKDACLIADFGERFKPKPYKFPSEQIMILKQKKTVLRQLQKQLTATKNLLSSLEPLPVKDKKCLTSLKQTVTFLEKQIKYMQQEMEAVVTDVFDRQLKLLTSIKGIGVTLATALIIATGGFIYFDNAKQLSRFIGICPTIEQSGTSINIRGHINRNGDETLRSMLYVAAWSASQHNKACKECYQRLRGNGKSGKVAMIAVANKLVRQAFAVVTSNNSYIDGFVSTKPDTTV

SEQ ID NO: 89789 - protein, 361 aa, unidentified
MKKPAQHLIAEVPRRQAKVEMTIGIDLGDVWSHYCTLNQDGEVVDRGRFRTTPKAIEKWFTDVPSARVAMEAGTHSIWISAQLQELGHEVIVANVRELRAISHSDRKSDQVDAEKLARYARLDPNILRPIAHRTVEQQQALTLIRARALLVRLRTAAVNAVRGLTKSCGYRMPASATTCFAQRSVAVMPPGLAHALGPVLQQIAEMTVKIKLYDRQIQQLGQTEYPETQALLKVHGVGHLTALTFVLTLGSKERFGRSRDVGCYLGLRPRRSQSGDHDPQLGITHAGNAYLRSLLIECSNHILRPHGRDSALRQWGLHLAARGGKQAKSKAVVAVARKLAVLLHHLWSTQATYMPFYEQAA

SEQ ID NO: 89790 - protein, 343 aa, unidentified
MNEISMIGLDLAKNVFQVHGVDASGKVVLRRQLRRGAVEKFFAKLPPCTVGMEACGSAHHWARVIGGYGHQVKLMPPAYVKPYVKRNKNDGRDAEADLRGGRRPSMRFVPMKSVEQQASLAVHGTRALLVRQRTMAANALRAALSEIGIVAKQGLEGLRELMARLEAPSAEIPEMMRGALLLLAKHWQALDADERAIERQIAKAARCDRDSRRLMEVPGVGPIIASTVLAKVPDAKMFRSGRDFAAWIGLTGKDHGTGGKHRLGRISKQGDRVLRALLISGASAHLRQQIARGVSDPWLRDLLARRPYKVAMVAFAAKTARIIWAMLAKGEVYRDRASASAAA

SEQ ID NO: 89791 - protein, 419 aa, unidentified
MSFKILKFNCCGLDVHKTWIYACIGITDSNNRTEYKQARFSSFTKGLNELCDWLAKYNCKDVCMESTGKYWIPVFNILEQHEIWVTLSHPKYTKPMKGNKTDRKDAKWICDLYMCGMVKPSFIPPADIRALRDLVRYRFKLTCMITSEKNRAQNCLTVSNLKLDDVFSDVFGKSSRSITEQILQHPGEKFDVSPFVDGRCKTPIEEIQATVDGAISKEQAVKLRQCLDHIDELQKHISEVEREILRLSDKYEAALNLIRTVPGFDKNPMTAIQVLSEIGGNMSVFPTAKHLVSWAGCCPRNDKSDRKIKSTRISRAGSYFKPVLVQVANALIKSKKHPEFTTRYKRIKTRRGHKKAIIAICRMILTAIWHILTDLTPYTPEGFLESHPVNKEKVLTISQALNLLKQRGYLIKNDPSPVS

SEQ ID NO: 89792 - protein, 322 aa, unidentified
MVDENGKRVCKGKLPNDPGRILAALRPHQRDLVGIVVESTYNWYWLVDALMAEGYRVHLANPSAIQRYSGLKHADDQHDAVWLADLLRLGILPEGYIYPQEERPIRDLLRKRGHLVRLRTSLIISLQNILSRNCGVRLQGNDIKRLKEDRISPLLEDNEDLALAGRVSKETIDFLTRQIRAIESVVERKVELKESYRTLLTMPGVGKILALTIMLETGPIRRFAKVGNYVSYCRKVSSQWESNGKVKGKGNKKNGNKYLAWAFSEAAELARRFDASARAYYQRKRQKTNFLIAHAALAHKLARAAYYILRDQVPFAPEKLFA

SEQ ID NO: 89793 - protein, 374 aa, unidentified
MSEHSEAYVAFDSSKLRNAVAIADCGRAGEVRFVGAIENSAAATAKLVGKLAGKYGRLTFCYEAGPTGYGLYRQIKSLGHECLVVAPSLIPRKAGDRVKTNRRDALHLAKLLRAGELTAVWVPDERHEAMRELTRARGAAVEDVRRKQQHVSAFLLRHGLHYVGKTSWTKAYLRWLSELKLAHVEQRIAFEEMLLAVRQADERIGRLEEAIRAAVPDWSLSEVVTALMAMRGMDLVAATAFLAEIGDLSRFATPRELMAYLGLVPSEDSTGETIKRGPITKAGNRRARRILVECAWSYQHPPRVGKDKQAKVAAAPRAVREIAWKAQCRLCGRYRALTRRGKLKTVAVTAVARELAGFIWAISREVTTVRAAAS

SEQ ID NO: 89794 - protein, 341 aa, unidentified
MDHIGFDLGKVNSQLCIITAEGELIERRISTSRDSLTKLLGSRPPAHILIEAATESEWVARHLEGLGHEVVVADPNFAPMYATRSRRVKTDKRDARTLAEACRLGAYRPAHRTSDQQRHIRAKLAVREALVRTRAKYISLSRALLRRDGLRIAPGTARCFSLRLAELSLAVELRAELTPLLTLLEGLNEQIKQADEALSQMVIKDPLIKRLTTVPGVGPVTATCFVATLDDVTRFPDAKQARAYLGLVPTEYSSGERQQRGRINKAGPNRARYLLVEAAWSILRRRSPATADLYRWATAIRERRGTKIAVVALARKLAGILFAMWRDATDFKPSAPQPSKP

SEQ ID NO: 89795 - protein, 406 aa, unidentified
MWKEVVISTTRYFGLDIHKFYLVAIAVDADKQVVYGPRRVEWPQFEKWIEQTLSQKDRVVIEMTTNAWEVYDTLLPHVYNVLVVHPQHVKAIVNAQIKTDKKAAQTLAELLAAGLLHGIWVPDEYIRDLRMLTSQRKKMGRLGAAAKNRLHAVLHRHHILPPEGFELFHPKLRHYWEWLKVSAMEKVRIQSDLATLEFAQQQKAMLEEEMGKVAANDQRVPLLIQVPGVAMLSAVTIVAAIGTITRFPEARFLVGYAGLGARVHDSGERRTTGGITKMGRRDLRGAIIDAANAAVRHHPFWKKEFERLDYRLGRSRAIVTIARKLLITVWHVLREEIADKHHDPRDVACSFFKFAYAVKVRNLPDNLSALQFTRSQLDRLGIGADRHKIPWGTKTFKLPPSRLKQM

SEQ ID NO: 89796 - protein, 426 aa, unidentified
MNYTQNSKIAQVTEKTLVVGVDIGSEANFARAFNWRGQELSKKVFRFSNSLEGFQSFQAYMERCKSNASAEQIIVGCEPTGHYWFNLARYLRTQHINLALVNPYHVKQIKELDDNSPKKTDLKDPKTIAKLVVDGRYSYPYLPEGIYADLREAVSSRDRIVKELNAAANRIKRWLKIYFPEYLTVYKNFSAESGLTLLEAAPLPEDVVKLGAEGVNRLWRDKKLRAVGMKRAQTLVEAAQNSIGLDGGNCARMEMQLLLEDYRAKEIQLEKVTAVLEAETLKVPHAEKLLSIKGVGLITVAGFLSEVGDIRRFDSPKQIQKLAGLELKENSSGKHRGRSSISKRGRKRLRKILFQVMLPMIRNNAEFREVYEYFTTRQNNPLKGKQAIIAAGCKLIRVFYAILKHGVVYDPQKLRLDIVRPEMAAA

SEQ ID NO: 89797 - protein, 368 aa, unidentified
MKKDVTGFVTFIGVDLHKCTVTLRAVRADGELLGQLKCDTKCVERIAKWIMNLPGPKWMAVEACPFVEWFIDRYTPCVDRMDIADATELSLRRGKRRKNDPNDALDIALRLARGECPLGYIADPQLMQLRKFGRHWRQLSRSLAKAKQGMKSMLNAANIRGPQFDGPRAHRWFLAFGGLLQPAQRLAFGNYLDQILLIERQREILRRELLTAARSPQFAATEQLLRSVPGIGPIWALIIASEIGPFDRFPKADALEFWAGMTADLKESAGRTQSGNITKAGSATLRWALCQAAVTLCQSDTKQEATRQRFIARMPRAKANVVMGRRLLRTLYAMVRDQKPYQGGERRDRTKGANKAKATRKTRTLQPA

SEQ ID NO: 89798 - protein, 360 aa, unidentified
MRQLYAGCDLHGNNNLIGIVDGEGKRVFRRKLSNDLLLVRDTLKPFKEELVGIAVESTYNWYWMVDGLMETGYKIHLANPSAIQQYSGLKHSDDKHDAFWLAEMLRLGILPEGYIYPKEERPLRDLLRKRGHLVRLRTSLIVSLQNILSRNLGKKINVNDMKAIREDRVSFLLESNEDLALAGRVSKEAIDHLTQQIHKIEWVVQKRAALKESYRYLLTLPGVGKILSLTIMLETGPISRFETVGDYVSYCRKVPSRWMSNGKWKGTGNRKNGNKYLAWAYSEASEFARQLYPEPRDYYNRKMQKTNAAVAHSALANKLSRAGYYVMRDQVPFEPQKLFGTRVRGWNGEPELGLVKSHEV

SEQ ID NO: 89799 - protein, 341 aa, unidentified
MNIVVLGIDLGKTLCSMVGLDREGAVVLRRRIRRASLAAFVEKQSHCIIGMEACCGAHHFARQFASLGHNVRLMPPEYVKPYVKSHKKDDRDAEAIAEAATRPTMRFVPIKSEEQLDVQTLHRARERLVGTRTALINQLRGVLFDRGIVIAKGRPKLNLWLRENLPDNTLLTTRMRQLVDDMVDELHALDRRIKQLDQEFEALAKSDQRARLLRSVPGIGALNATALAAAVGDVSAFAKGRDFAAWLGLVPRQITTGGKPRLTGISKRGSTYMRVLLIHGARAALPYLARMDTQLGAWLQALLQRAKRNVVVVALANKLARIAWAVMSNQRPYEAVVASKG

SEQ ID NO: 89800 - protein, 364 aa, unidentified
MKRKVYVGMDVHKETIQIAYLTSNSKEILKEQQIKHNEVQIKKFIKKLKTEWNEIHCCYEAGVTGYPLYTYLKSLGVNCILVAPGKIPRQSTNKIKTDKRDAIKLARLMRSGELESIHVPSEEDEAVRDYLRSRDSLRLDLGRNRQRLMKFLLRKDIKYSTTKYWTVSHYKWLNNLHFNNEILQETFNDYYSRVRVQEENLKSMDKKIQEIAESEPYREKVGILRCFRGVDYLTAMFLLCEVNDFKRFKTAGSFMSFLGLVPGEYSSGSKRKQTGITKTGSPRLRRILTEAAWQHRFPGTGSKIITARRSGQPALVVALAEKASLRLHKKFRNLQLRGKTPQVMITAVSRELSGFLWAAMNLVA

SEQ ID NO: 89801 - protein, 319 aa, unidentified
MNTIGLDISQKTIDATLHKTDGSTCYTKVGNNWEGFQSIKEWIKANKVRKCVIGMEATGIYYEAAAENLSETHTVYVINPLKIKDYGKSQFNRTKTDKADSNLIAEYTKRHADKIIPYSKPKNRYLQKLINLKQQLKDHQKQIKNRLHSSDDEMIQAIHQDLIQAYQEKIEKTQTAIDAQIKAQADDGHYQNLQTISGIGKDTAAILYAQLTDKTFQTANQFVSYAGLSPQTEQSGTNVNKKGRLSRYGHRRVKRSLYMLALVAYRTGAFPQLVRNLTNAGKPKMVIIVAIMRKLAKLAYYIVKTGKPYDSTRHKAAQA

SEQ ID NO: 89802 - protein, 318 aa, unidentified
MSNTVFVGIDVSKDSLEIASSLETKTRNVTNDIEGIAQLATLIDQLKPTLVVCEASGGFEFDAAYTIQAAGWDIAVVNPAQARNFARAIGMTAKTDALDAKMLVEFARFLHQHPERERFIKPLADAERQKLQAFVLRRRQLVQMIASEKQRLCSVHPVARHSIRRVLKFLEEELDGSNKQIADHVKRHCSELAEALGSVPGIGAASVATLVADLPELGKISRRRIASLVGVAPLNRDSGRMRGQRSIFGGRHDVRRILYMATLSAVRFNPVIKSFYERLLEKGKRKKVALIACTRKLLGIMNAIANKLSRWEPRMNHA

SEQ ID NO: 89803 - protein, 431 aa, unidentified
MNYTQNKKIMQVKETTLVVGVDIAKHTHVARAQNYRGIQYGIPISFANTDGGFKQFIDWLNAMKEQYNKTNVMVGMEPTGHYWLALEQYLRGLDSVKLVLVNPAHVKKSKTLDDNSPTKNDKKDARVIAQLVKDGRYSEPHMPEGIYAEMRSAMTHREKLTRDKISLNNKIQQWLDKYFPEFTEVFANWEGKAALAVLKEVPLPSQIKQLSPEKIVEVFKKGAKRAVGIKRAKHLKKKALNSIGIKDGLKMASIELKNLLQQYELITAQLESLEEDIEKILKEIPGAKEMQSIKGVGAMTVAGFIAEVGDVRDYDHPRQIQKLAGLNLMENSSGKHKGQTRISKRGRPRLRSLLYRVAFPLVAKNEEFKQLHHYYTNRHDNALKKKQSLIALTCKLIRVLFALGKKQVKYDGEKLMKDIKRNQDLNIQEAA

SEQ ID NO: 89804 - protein, 345 aa, unidentified
MSRVYVGLDLGSSQFEILAMDREGVALERRGLKTSELNLRAAFSQLRQQLKCELHVHLEAGELAGWAREVIAPMVTRVVIGDPRRSAWIANDPTKNDRLDAFKLADLLRINRVHEVYYDDAKPRRVFKQVVQHYEDLTRRQAALKVKIKSRLRVQGLIRKDTRVFAASERETILDSLADKQLRSIIKQLYDLLDATRAQQQEALLTMREMSRQFPEIALLKKTPGVKLINACRFVAYVQNPHRFSNLRGFWRYARLGVVQQSSDGKPIGPQHLDHSGCGALKDVSRKTLEAAMRRRDNNLFKRAYEQSFARTGDATHARLSVQRKILAVLRAVWISGKPYCGDLG

SEQ ID NO: 89805 - protein, 316 aa, unidentified
MKNYIGIDISKATLDVYDGLESYKFENNLSGFKQIISLVTEIKDVVFIFEPTGIYSYALSQFCSDKKIAVVMVGPKESRDFARSLKVRSKTDKIDAKVLYKYQSHVEPNMIQIPIIDHHSIKVQEMLNVYEGILSAKQKLKNQIESVSKGDKDLIHTLHRIIDNLDREAQKIFNKIELFLLQDEANKKKYDAISTIPSIGQKSALYLCAFFLKYPSANAKEITALVGLDPVMKDSGTFRGKQRISKQGGQQLRNLLYFPTLCAIQYNDRIKHFYEGLTRRAKTKKLAVIAAMRKLILMAFSIFKSEEEYQPLLATI

SEQ ID NO: 89806 - protein, 338 aa, unidentified
MNNTSLIAIDLAKNIFQVCLMDKNHKIQFNKTFNRKTLIEFIIQQPPSTIAMEACYSSHYWGRLFNSFGHEVKLLPAQHVKPFVRGNKNDHNDAIAIAEASQRPDIKSVPVKTLVQQDIQCLHRLRERYVSQRTYLSNQTRGLLSEYGIVFNQGFKYLTMTLVELISPEDKRLSEVIKNELCHVYTDFIQVSKRLDDLNKSLMQIAHKHIQCQRLMSIPGIGVINATALYSAIGDGDQFKNARELSVWLGITPKQFSSGDKNRMSGITKRGDRYLRKQLIHGARSVIYRYKNRDDKLSNWVNNLVQRRGPNKACVALANKMARLCWILLQRKEMYIAQ

SEQ ID NO: 89807 - protein, 315 aa, unidentified
MTSARIYVGVDVAKDWLDVAQRPEGATWRLSNDERGIADLVERLVQLRPALIVLEATGGIEMPLVGALVAAHLPTVVVNPRQARQFAGATGRLAKTDVIDAQVLAQFGEAVKPEIRSLPDAATQQLSALLLRRRQLVDMLTAEKNRLRTAAPSVRPDIQDHIRWLERRLSELDGQLAQAIRSSPNWRERDNLLKSTPGVGPVLSVTLLAELPELGTLNRKEIAALVGVAPLNWDSGHFRGKRSVWGGRSKVRAALYMAALVAARRNPVIQAFYQRLVAAGKPKKVALTACMRKLLTILNAMIRHQTPWSVEHHAS

SEQ ID NO: 89808 - protein, 353 aa, unidentified
MTDTTSIAWLGLDAHSRNCVLAQLDDRGTELNCWRFPTDPQPLLKHVQAVPATVKRLMLEESNLARWISQLLKPVVQQVIVCDARRNRLISQDANKHDRRDAFALARLLRLNEFKPVWQPTDDQRVLFKRAAQAYENSVLRQTRLKLQIKSLFQHWGLFPAGAIVFSKAGRSAWLQKLPYDPLRSQARLLYELLDQALAGQAQARRLMCQAGRPFPEILHLRTAPGVGLVGAHLFVAYVQDPHRFAKFSRLSKYCRLSLRDRTSDNKPLGFKQLDRQGNGVLKAISYRAFLQATKRRSGPLWDFYQASLRHTGSTTHARLNTQRKILLTLWTLWLKGEDFDPNQFSRSQPIDV

SEQ ID NO: 89809 - protein, 426 aa, unidentified
MKEHIDYLSTLFVGIDIASRIHVISALDFNQDFFIKMKPFENTKEGAGTVEKMIADVLADNHQFKYVVIGMESTGFYGVHLANYLSTSELLAPFSVRVYCLNPKEVKNYKKSFNDIGKNDGIDSFVIADFARVGRIAIKPWRGSQYLALQRLTRHRMHITECITREKTYMLNNIYLKFSEYALLRNGEHPFANKYGATAEAILTEYTTNEDIVNSSIEELVEFINSKSKGRIADPEETAKIVQAAARNSYRLDKCLYEPLTISIASSFNCISSFEKELKAIDKAILQTVQGLNPEEYTVLNSIPGIGKVYSAGILAEIGSIKAFQNANQLAKYCGIVWNDNDSGDFESEDSRMSKAGNRYLRYYIIEATGSVINHCPEYKVFYQKKYAETRNHQHKRALALTSRKFIRLLFGLLDKGQLYSPEKSR

SEQ ID NO: 89810 - protein, 346 aa, unidentified
MERYAGLDVSLKLTSICIVDRTGKVEREGVVASDPEAIATFIKLHAPHVVRIGLETGATSTWLWTELNKMGLPVICIDARHAKAALKMQINKNDRNDAVGIARIMQCGWYKEVRVKDLDSHATKALLVSRALLVKIKRDIENQIRGLLKNLGLVIGRAKMNMFAVRAAQLAEDRSELFVAVEPLLKAREAIEQQILDLDRKVLRLARNNAQVRRFMTTPGIGPVTALCFLAMIDDPARFKRSRSVGAYAGLTTRRYASGEIDWTGRISKCGDKMLRSYLYEAANVLLTRVAKWSALKAWGVRLAKRSGLRKAKVAVARKLAVILHRMWIEGTEFKWSSNEAADQPA

SEQ ID NO: 89811 - protein, 355 aa, unidentified
MNAVGIDVSKGKSTVAVLRPFGEIVVSPFDVSHSPKELSKLVTLLKTLNGDTKVVMEYTGNYYLPIALFLRNNGFFVSVVNPILVKDYSTKSLTVRKVKTDKKDALKIASFALDRWNELSPFSAQSEARLLLKSYNRQYNQYNKLKIILKNNLIALLDQTFPGANTLFSTPTRKSDGHEKWVDFVLKFSHSECISKKSFSFFLKSYLSWCKKFGYKFSKSKAQAVYDFACNCSPSLSFSDSSALLVSNAIIQLNSINETLASLASEMNKIAATLPEYDSVMSMFGVGSVLGSQLIAEIGDVSRFPNKKALVGFAGLDASPFQSGNFNPQSRSISKRGAKNAVPSNVRRFATSTDE

SEQ ID NO: 89812 - protein, 315 aa, unidentified
MTTSSGKFVGIDVAKDNLDIVVMGEKKASQVGNDEVGISKLIKKLETLKPELIVVEATGGYQRAVVLGLYEAGLPVAVVNPSRVRQYARASGLLAKTDKLDAFNRAEFGKQMKPRWFEAKSESGRYVSALLVRRRQLEEMLKAEKSRLRTVPAAMRGSIERIIEILKEEIKRLEKELDRFMKENEDWQEQEQILTSAKGVGRITATTLLAELPELGKLDRKKIAALVGLAPMNSDSGKKRGYRKTKGGRMEVRNVLYMSTLTATRYNPLIQAQYQQLLKRGKVKKVALTACMRKFLTILNAMMRDKAPFKQMMPA

SEQ ID NO: 89813 - protein, 352 aa, unidentified
MKNYKRFIPESKIVFIGIDLHQKSWHVTAIVENQEVFSGNIPPEHEELFKFLRRFGSNPIEVAYEAGCFGFWLYELLMNSGIECTVTPPSLVPVESGNRVKTDRRDSRKLAYLLAGGMLKKVWVPSPQQLAHRQVIRRRKQFIGDRVRVQQRIKSELRCFGFPIPGPSGQWSAKLVRWLKAVSFQDYYQQQSFNHILEEYDYLCKLIEEQTRLLKTLAANEPYAAQVKLLRTIAGIGPISSMELLLELGDISRFARGEQLAAYLGLTPSQYSSGDKIRLGRITRTGKASLRGTLTEAAWRAIRKDQQLHTVFENLKARCGAKRAIIAIARRLLLRARRILLDQKPYNLVEAA

SEQ ID NO: 89814 - protein, 363 aa, unidentified
MQTVTTIGFDIAKLVFQVHGVDAAGQVVIRRQLKRRQVLAFFEKLSPCLVGIEACASSHHWSRELQALGHSVRLMPPAYVKPYVKRQKNDMADAEAICEAVTRANMRFVPTKTPEQQSCLMLHRTRHMFIRQQTAVINSIRAHLAEFGIVAPVGRKGVTELLHVFADPNDRRVPEVARACLAALGTQLLRLKEQILEFDRMIMAWHRSNQTSKRLRYIPGVGPMLATALVASVTDPTTFRSGRNFSAWVGLVPKQHSSGGKDRLGGISKQRRPLSPQPVRGRRTRRHPLRKDPRHQASALAHSVIRAAPDEGRRHRACQQDCADGLGHDGQGRALQATRRAGSVNEIAPDIRRDVKVGRANST

SEQ ID NO: 89815 - protein, 336 aa, unidentified
MVQIYGIDLGMSSFDVSFLSESGSVRHLSGVKNTVHGISKFLLSLPSAAVLCAEHTGVYGDLLLRLCTLNRICLCFVPGYQIKHSLGLQRGKSDPLDACRIREYAERFYDLLRPCFYAGEEMSELQELYRTRSLLVESRKRLDTLNIGDNCKSSVSLAAVHARRAVLAELNTQISGLDHEIEALIQNSSEFSRNYQILTSIVGVGPVTSCELIIKTENFRKLDTAKKCAAYAGIAPYPKESGKMKCGHKISPMGDKQLKTLLFLCARSAKEHNKEIRLYFLKKHKVEKKHFFVAMNNIANKLLRLIYSLIHKQQTYDRDYIQRDPRCVVISDTHKC

SEQ ID NO: 89816 - protein, 389 aa, unidentified
MSIDEHGRQLGRIRVAHSPEGLSQLDGYLEQRAGPGGKDQVACIVETPHGLLLAHLLEQGWAVYPVNPRTVERRRAPSGAKTDLIDAYLLAKTGRADFADLRRLNPDSEQIQELKTLTRDQDGLVQMQTRLVNQLTACLKAYYPVVLELFGKIQQPSTLAFLRAYPTLQAARSASVEELAATLKQSRYPGARQKAQQIATHLQLPCLQASEVTTRTKSRLMLALLDQLEPLLKQIAEYDKEIERLFLRHEDLELFQALPGAGLRLAPRLLAELGDDRSRYDSAASVQALAGTSPVLFQSGTYQKAHRRLGCIKPWRNALQQFAWQSTHQEAWAKQYYQRKRAEGKSHTVALRALANVWARILYAVWKTKARYQTTTFEQAQQAHAQRGA

SEQ ID NO: 89817 - protein, 340 aa, unidentified
MDHYAGIDVSLEYSSVCVMEAGGKIVREGKVLSEPEALLGWFGALSVSVTRIGLEAGPLSQWLYARLRQAGLAVELLETRHVRNAFKIMPVKTDRKDARGIADLMRLGWFRPVHCKSLPAQETRALLTARKLLQAKLHDIELSLRGILRGFGLKVGRTTPARFEARIRELVDGHPSLQVIAASLLAVRATLWREFNAFEKRVRALARQDTCARLLMSIPGVGTIVALTYASAIDDPGRFKSSKTVGAHFGLTPKKHQSGETDRCGRISKIGDRAVRTALYEAAHIILTKPLKGATALKSWAMRLAKRAGMNKAKVALARKLAVIMHRMLADGTTFSTQRA

SEQ ID NO: 89818 - protein, 395 aa, unidentified
MFIVGIDVAKRNHEVTVITSAGQVVCKGFRISNTCTGYNRMMERLGKLTNLKSQFIFAMESTAHYWLALYTRLKKDGHQVVILNPIQTHTMREMFLRKSKTDAKDSLVIAEVIRFGRYAASDVPQEKLLALKELCRNRAYLMDMASDLKRKTVAILDRVFPEYETLFDSVFCKTSLAVLAKYPMPDKLSRAQLGKLTEVLQKSSNGRFGEWKAREIKELAHGSFGVADCEGVYSTLIQLFLEQIHTLLETCSSLERQINELLLQFDTTLTTIPGVGTLLAATILSEIGDISRFSSADKLAAYIGVDPAVNQSGEFVGSHVHMSKRGSPYLRRAVWMASMIAVQRDPMFKAYYEKKASEGLRYMNIIGHVTKKMTAVIYAIMRDNKAYVPVMPVVA

SEQ ID NO: 89819 - protein, 451 aa, unidentified
MAKRREKRERRSVVLELDAAGIDIGAEEIYVAVPPDRDEESTRRFSSFTGDLHALADWLGRCRIRSVAMESTGVYWIPLFQILEERGFKVYLVNAHYLKSVPGRKSDVSDCEWIQYLHSVGLLRASFRPPEAICALRTLWRHRGSLLEMAAEHILHMQKALNQMNLQLHHVLSDITGTSGQAILDAILSGQRDPVALAQLCHRRVQSPRDKVAQALVGDYRAEHLFALKQSLEGYRYYQTLIPELDQETARLMQALPSATDDPIPPRTKPTAYHRKSNDPQFDLRSELYRIAGVDLTDIPGVSAATAQVILTEVGTEVSRFRNASAFASWLGLCPEKRVSGGKVLSCKTRKVKHRAATALRMGANSLCRAKGYFGEFFRRMRAKLGTAQAITATAHKIARILYHVLSTKEPYTETVFHRCDEQARRRAEMRLRKQAAQLGFQLLPIAATAE

SEQ ID NO: 89820 - protein, 423 aa, unidentified
MTSHDFAAFVGIDWGDQKHAVCLRTDGVEVQRELPQRAGEIEAWAMELRTRFGGRPVAVCLEQSRGPLIYALLKYEFLVLFPLNPLQATRYREALYPSGSKDDPLDARLLCLFLETHHDRLRAWQPDDEATRLLRLLAEDRRRFVDQRTAHKNQLRQRLKEFFPLAIDLLRGDLEDEWFLRLLIKFPSHAELQRASPRTLARMLPKHRRLPDDEPLDPRVAQIRTTIPLVTEGAVVKGGRLQVVQLARLILQLNATIAEYDGELAAELARHPEAELFRSFPGAGAALLPRLAAAFGTNRERYADAKELQQLSGIAPVQIRSGKSCVVRRRRACPKFLRQTFHEYADHSRKKSLWAKAYYQLLRGRGMRHHAALRALAFKWLRILYRCWQTRTPYDEQRHLAQLRLKQSPLLPLLEVPQSAEQP

SEQ ID NO: 89821 - protein, 462 aa, unidentified
MASRSKAPKGAKEAQAIDGLPVIRRNVAGIDLGSKDHWVCAPSRDGSGREVAKLGATTPELQRMVEWLKERQVESVALESTGVYWIPPYEVLEAHGFEVRLVDTRQLAQVPGRNKKTDPKDCEWIQRLHSCGLLKGSFRPGEEVCKVRTLMRDKGNLVAEAGDWVRRMQKALDQMNVRLHRAVVDVDGVTGMAILRAIVAGERDPRKLAQLRDRRCHKKESEIAEQLTGHWREDHLFSLQQSLKMYDSIQERIGEYEKEILKKMAAMAGERRGEEAAPLKNAHKAQAIRRRGQEPMRQALYQMSGVDLTQIDAIGVETVAVVISEYGPDLSSFPHEKEFVSHLRLAPYVPSSGGKQLTKKKRRNSASTRVAAQLRMAALSLRNSKTAMGAAYRNTARRLGPDVAVFVSARKLATLIYRRLRWGAAYVDEGLEAYEKRYQQIRIKSLTAKAKDLGFKLMPMTA

SEQ ID NO: 89822 - protein, 342 aa, unidentified
MESTRHIGIDLHRNCFTACVRLENGRNYLTEWRLEQLPKFVAKLRPNDEVAVEVTGNTRLFHDAVAPHVKRVVAVNPNQFQVITHSVKKTDPNDARNLALYLAKDLLPEVRMKDKTRAQIASLTQTRDTMVKLRTALKNKINNICSAHGINLSKESLASEKGLKAVLEMPFDPLVELELKILVEQIRSLNKSIAELEETISRESQKLEGHKHLTSIKGIGGLSAGILLSIIGDIGDFADEGKLAAYFGIVPRISHSNETEHSGRITKRGTKLGRTTLVQCALIAQRYSPYLKNYYERKKSRGTGKAIIALARKFLGIIYRTLKNKWLFEDFPNFVLAEEATA

SEQ ID NO: 89823 - protein, 369 aa, unidentified
MAKNGTLAKSQDLQPSFQTTTEQITIGIDLGDRFSHCCVLGPDGKILTEGRLRSTPETMARHFQDLPPSRIAIEVGTHSRWLSQLLTKWGHEVIVANPRTLRMIADSIRKSDRVDAHMLARLARVDPKLLSPIMHRKQESYPDIIQLKARDLLVKNRTRLMNAVRGVLKSAGLRLSPCGTSCFPSKAAMCIPDELKLSLTPLLETISHLNKQIYSLDKAIESTAQNRYPETNRLRQVSGVGPITALQYVLTVGEPGRFTHSRDVPAYLGLTPRRHQSGSIEQQLRISKAGNKQLRSLLVQCAQYLLGRFGPDSDLKRWGTRMFERGGKNSKKRAIVAVARKLAVLLHRLWITGDTYHPLYNVAATSVAS

SEQ ID NO: 89824 - protein, 314 aa, unidentified
MNALTSVGIDVSKATLEVALAPEAKPFSVANERSGIDKLQDKLPAPGTCLITLEGSGGYERLVIAELLDRGHHVAPVNPRQVRDFAKGLGILAKTDEIDACVLARFGQVVGPRSLEKPTGSQTELQQLVERRRQLISLRTAELNRRQQATSKRTIRSIDAVLKTLDRQITTLEADIAALVEQHADWKQKADLLTSAPGVGDVTAMTLLADLPELGQLNRERIAALVGLAPYAADSGTITGVRSIRGGRADVRNTLYMAALAGLRCNPVLKAFYERLIASGKQAKKALTACARKLLVILNTMLKTNSPWKAPHAL

SEQ ID NO: 89825 - protein, 335 aa, unidentified
MQIYGIDFAKDKFDVSFLAQTSKNVSNKPAHKVVRNNVSGVTKFIKTLPTDAVLVAEHTGVYGDLLLKHCTESHINIAYVGGYVIHTYKSAPDRAKTDMLDCAVLREFGERFADKLVYKTFPKKELYELKQLARHRTMLVEDRKRYVTANKGEDCRPYRSIQVKESMKRIMEILTEEIARTEKQMLDIIKAHEELSRNYDIITSVKGVGLVTAVELIVKTENFTTIKTARQYAAYAGTAPYEKSSGKMNKGAHISKIGNRRSKTLLYICAESARIHNKEIKLYYERRTIIDKKPHFYVLNAIVNKLLKIIFALVAKGQMFDYGFVRKDPRVIKYN

SEQ ID NO: 89826 - protein, 387 aa, unidentified
MIYVGIDIAKQKHYASVMSAEGEILIPSFPFTNDHTGFQLVLSKLSVFEKESILIGMESTAHYGENLICFLFSRSFRICVINPIQTAALRKTNIRKTKTDSVDTYLIIKALIMNQYRLFTQRDLETLKLKNLCRFRQKLIKARTKVKIQLVTYVDQLFPELQYFFKSGIHINACYTLLKECSDPDRIAAMHLTKLSNLLRIASHGRFKKDSAIALKELASKSVGTKNHTLSLQISQSIIQIELFDQQLQELDETIKSLMDGIDSVIKTVPGIGGLNGAAILGEIGDIHRFHSSCQLLAYAGLDPSVNQSGKFTAQHTRMSKRGSKMLRYALINAAWQATLNNKTFKEYYELKISQGRSHYNALGHVAHKLVRVIHKMMTDNLKFNLA

SEQ ID NO: 89827 - protein, 352 aa, unidentified
MEKSLFIGIDFSKKTFDVSVIHQSNLQSVDYQQFENSKEGCISLLKWIKTLTKEPCSNWLFCGEHTGLYSICLSEFLVKKDLFIWLENPLQIKQSSGIRRDKNDKTDSREIAFYAYRFQDKAKAYCLPDKALKSLELLLSFRERLLSNKQTLLVSSVEIRGVMKQNATARFIYEQSKKDIERINKEIKEVEKQMLEHIERDENLQENYKLVSSIKGVALINTVAILVATQNFTRFENSRQFACYTGMAPFGKQSGTSINTKPRVSRLADKKIKVLLTQAAKCAIRHDVNIRQYYERKLAQGKDKWLITNNIRNKIIHRIFAIVRSKQIYQVNYMNRFYGICKQKSVYSLKYS

SEQ ID NO: 89828 - protein, 343 aa, unidentified
MQVSTIGVDLAKNVFQVHGVDSAGKVVITRQLRRKQVIDFFSKIPPCLVGMEACGTAHHWAREVSKLGHTVRLMPPSYVKGYVRRSKNDAADAAAICEAVTRPSMRFVPIKSADQQALLMLHRTRDLLIRQRTQLINALRAHLAEFGLVAETGREGLGQLAAIITDESNREALPSAMKQALQAIVDQLAALELQIGTLDRAIHAHHRANDMSCRLETVPGIGVIGATAIASTVTDPSDFKSGRDFAAWIGLVPRQHSTGGKERLGGISKQGDRYLRRLLVIGATAVVRHARQQPQKHPWVMRLLAKKPAKLVAVAVANKMARIAWAIMAKGGYYRAPELAAAA

SEQ ID NO: 89829 - protein, 413 aa, unidentified
MDVLHARCCGLDVHKSSISACILLREAGRVQKHQRRFGAMTQDLRELGEWLRQFGVTQVAMESSGVYWKPVWNILERQFAVVLANAQHIKNVPGRKTDQKDAEWIAQLLQYGLLRPSYIPCEIIRDLRDLTRMRASLSQEASRISSRIQKVLEDANIKLASVATNALGKSGRAMLEDIISGEDDPEHLASLALGHLRVKIPQLRLALEGKIRSHHRFLLRRLLDQMQFVEHEIALLEERLEDIGRQRPELSQAVARWDTIPGVDRVAAWALLAEIGDNMAQFPTAEQLASWAALCPGNHESAGKRLRGATRQGSPWLRRMACQCAWAAARTKNTYLSSQFRRIAARRGKKRAIIAVAHTLIVIGYHLQKNQSNYDDLGGNYFDRIHSDGLKRYLVKRLQQLGQKVTLEPIEAA

SEQ ID NO: 89830 - protein, 312 aa, unidentified
MSKIILGVDISKKHFDVSLFIDNKHKNKKFSNDKSGFKSLESWIEKYDIEKIHVCLESTGFYGESLAEFLHKNGYKVSIVNPSCIKSYARSKLCRHKTDKIDAQLIAEYCDKYTPDFWQPLPEESKEVRELVRCIDALKLQHNQITNQLERKSSQSEAVSKVWEELKLKIEEKIQALYKEIDVVLGKNDILNKSYINLQTIPGIGKTTAITLLAEIPDINTFKNARQLAAYAGLTPSQRFSGSSIKGKPRLSKIGSRRLRKALFFPALVAKKHNSVIKNFCKNLEKKGKHAFAIVGAAMRKLLHVVFVVLTN

SEQ ID NO: 89831 - protein, 370 aa, unidentified
MLNTTTFVGLDVHARSIKAVALDAMTGEVRSATFGYDAAEVAGWVSSVDPSAKCVYESGVTGFDLQKRLASMGIDCVVGAVSKMIKPPADRKRKNDRNDAEFLARMLSVGNVVEVWVPDDGCEAARDLSRALDDAREDLKRCKQRLSKFLLRHGYVFSETTPTGRRKGNWTAAHWAWIRSIEFPEKADNDVLAYYVDAVRQAMEDKARLERLVEAEASKPRWKRRIDSIRCLKGIDVTSAADLVFEAGEFSRFKSARSFAAWLGLTPSEHSSGESVRQGGITKAGNKHLRRVLVESAWHYLGCSPHSKDLAKGQVPDPAARRHAAKGIRRLVKRREEMLGRGVHKNKANVATARELACWCWAVGRMVENG

SEQ ID NO: 89832 - protein, 340 aa, unidentified
METSIKFYLGIDVSKSWFDVSVLKVVNHEKQPMLTEQFVNTKDGIVSFSKWLKQQEVPFDENTLIVIENTGIYHRPVWEFCSKHNLPLHIGNAAHIKWSLGITRGKNDQIDSKRLCNYCYKQSDELKATPVLNPVFMNLKDLMTSRTRLVAQLQATKSYVKELLCTNDKALLKTLEKAHKAAIDGIEKSIAQIEKAINDLIVSDEKINRNYELIKSIPGIGSITAIYIICCTNNFANKPSGKQLASYAGVVPFEHSSGSSVRGRNKVHKMANKELKKLIHMCAVSSIRYSSEMKAYYDRKKAEGKPGLSVVNAIKNKLLLRVVAVVNKQEKYVENYQKVA

SEQ ID NO: 89833 - protein, 314 aa, unidentified
MKMAMLSFCGIDVSKDRLDVVVLPEGWFFSVSNDTAGWAELVVRLRPLTVSAIGLEPSGGYERGIIRALLAAGMSVRRINPNKLRQFARARGVLAKNDRLDARLIAEYVAIMPTRVVQRDAAVERLAEIVTMRRQLCDEHVAAENQAAHLEDAMLRRLSKRRQTRLEADIRLLDKRLAEMVAANVALAQRYELLTSMPGVGPVLAFTLIALLPELGKMTRKQIAALVGLAPYDFDSGKLKGHRSIYGGRMPVRNVLYMAALSASRYSPALKAFHNRLADADKKSKVIIVAVMRKMITTLNAMLRDSAAWQPRSA

SEQ ID NO: 89834 - protein, 355 aa, unidentified
MKYYTSTTEFNCGIDLHARQMYVCLMDRQGKKLVHTNVKDNDFAYFLKLVEPYKHNLTVCCECMFGWYWLADACQAAGLSFVLAHALYVRAIHGGKNKNDRIDSEKLAHLLRSNLIPPAYVYPAQQRPLRALLRQRIFYVWRRAQLLARIHCHQLAHNRIPAKQSRWTRDDWEERLLKAEIHPLRQLALSNDLAMIRHFDHQIFEVEKELYRQTKQLAAREYALLQTVPGIGENLGLTILYEIGDIERFPSVKDFLSYCRLVKGTVASAGKIKGLRGAKLGNPYLRWAFGEAAVIAKRDQFRIRPLAQRLEARMEGNKFKANTVLAIKLARSVYFMLKNKTVFDPDRLVAPLAKN

SEQ ID NO: 89835 - protein, 501 aa, unidentified
MNINHFPQEKLATFHAMNQSAIGIDVHSNLIVGVYQSSRFNSTRASIDGDTWNGDSTKKGLEDFAKWCKERKPEVLLMESTGVYWQSLYESLENEGFSNKDIVVVNARDVKNRRGNKTDLSDAIHLAEIARNGDYRASFVPKKEVRQLRCLWRSYHTLKNTRKRLLNVLHKQLYQVGCRASSVFSDIRGKIATQVIELLIGGKSGDELKEAIASVIKHSRGRLKATPDMVYEALRADMDSKVWYSIRQHLEHIKFIDKQLEAAFANLTIQSAPYEKTIQLLQTIPGIKYLTALGIVCELGDDLSAFKSVRKFSKWIGHAPGNNESAGKRYSGRTTPGNKYLKILLVECAAGIGLMKKGFLHEIHQRFKERIGTKRANVALAHKLCRIIYSILKNRTPYQERYKPILKEHRLGKAIKAVDGLRNMGLSCDDIEVTDTETGNSTIIYGANKYRRKLMKNKWYTEGKQSEMCFSHLLNSIRPVSAGNRLRLTLNLLRYLCYLTY

SEQ ID NO: 89836 - protein, 430 aa, unidentified
MESEEIDYAAWIGLDWSSDEHAICLQASGCSHLEHCTLEQNPKALHKWFSSLLTRFGGRKVAVAIEQSRGAVIHFLLGFSFVHIFRIHPKSLKNYRDALHPSGAKDDPTDAELLLQFATLHQDKIKPWVIGEPEIRFLLRLVEFRRKTVGKCVRLTNEITQLCKDYFPQALDWAGELNSVMACDFLLKWPTLEKLQKSSPITIRRFYEQHGSRRRDLIEDRLKQIRSELPLTTDGPVIEAAVLMVKTLVPQLRSIIDSIARFDQTIEKIFRKHPDAEIFKSFPGAGSTMAPRLLVAMGTDRNRFNSAEEVAQYCGIAPVTETSGKARWVHRRFACSQFVRQSFHEFAGHSIRFSVWAHDYYKHKRAAGKGYNAAIRSLAYRWIRIIYRCWKDRVPYNEQIYVQSLIRRQPHWLASSPLSKSYDSQNDPAL

SEQ ID NO: 89837 - protein, 352 aa, unidentified
MVTVGIDPHKHVHVAVAVDAVGRQVGRPLTVKNGPHLITGLLTWIRSISGGTPVTWAIEDGHGFARRLADGLLLAGQEVVWVPTRLMVAHRKLHAATSAKSDPVDAAAAAYAAIATPGLDRHRIDEQVRELRVLVDHRADLVKRRTMVINQLKAQLHLWLDHTPGDLLRAKTVASVTALVADASLRPHVRQTLHDMLTEVAALNHRVRADDITIKELVNPLAPTLLQITGISHTSAAVLIAEIGDITRFSSSAKLARYTGCAPIPVYSSDNERHRLHRGGNRRLNSVFYTAAIVQKRWDPAAQKLLARHASAKGTRGARRILQRHLVDVVHRAMHADQETWTHQIARCQQAA

SEQ ID NO: 89838 - protein, 418 aa, unidentified
MSRGNDNEILSIVHQVCCGLDVHKEQISATLLMNQRDGILREEVKEFGTFTDDLYELREWLLENECPVVAMESTGVYWRPVHNVLEDMCEVILVNARHVKKVPGRKTDISDSRWLAGLLRHGLLRGSFIPERHIRVWRDLSRIRKKYVQNLSDYKRRVHKLFESANIKIDSVVSDLFGVTGRNLMDLLVSGHEITLSDVETCAKGTLRTKTFELFKSIKGFFTEHHRFLLVSMLDVVKLLERQIERVHKRLGKLLSNRRDKVRMLMEIPGIDEVSAHAILSETGDTLEQFDTAASLACWAGLCPGNNESAGKRHSGKSPVKKHHLKTIMTEVSWGAVKKKGSYYREKYYRLKARRGSKKAIIAIAHRIIKAVFVVLKYGTPYRELGEDYLIHHNREGRLRNLTKKAAKLGYTLVPAKA

SEQ ID NO: 89839 - protein, 392 aa, unidentified
MRISVGIDIAKEIHWVTAIDADGAVQIDRKLPNTPADIATLSDELTALRGTVRIGLDVIGGIAGLAQAMLAEAGFALVHVPGIAVNRARQGTVGGENKSDPRDARTIADQVRTRPDLRPIEPAAELDLEIRLLVSRRGDIVQAQTQRLSRMRDLLVGIFPGLEACLDLKAKGPLHLLTKFVTPAELRAAGKKRLVRHLQAAGGLPKVEDLADLVLIVAAEQTVAVPAEPMTARLIRELANEALASRTRLIELDRELETLLQRHPDAALIRSLPGMGAVLTAEFIAEAGSLSRFRSADALASAAGMAPVLRQSGRTRFLRRPNGGNKGLKRVFYQSAFCSLNHDDSRAFYQRKRHEGKRHHQAVIALARRRVNVLWAVLNSRTPFQTGFKAAP

SEQ ID NO: 89840 - protein, 401 aa, unidentified
MPLHAGLDWGAAGHAVCVLDERGAVRARIECPHTHAGLADLLARPERLGPPPELPIAIERPSGLVVETLVAAGHPVVPIHPNVVKACRPRYRAAGGKSDPGDAYMLADILRTDGHRFAPLTPASDDLKALRALVRGRDDLVAARVGLANQLRALLDGFWPGAAAVFAAADSPIALAFLGRYPTPGSAGRLGPKRMRAFMAQHRYCGRRSAEDLLERLRAAPTGLAGDAEADAKGELVRALVRSLASLVAAIAELTSRIEHAVADLPDGRIVMSFPRAGRINAAQILAELGDVRARFQTEDQLAAEAGVSPVTHASGKSRGVVFRFACNRRLRAAVTCWADNSRHACAWAAERYAKARGRGCDHPHAVRILARAWLRVLWRARTDRKPYDPALHGAAVNLAA

SEQ ID NO: 89841 - protein, 425 aa, unidentified
MDTPAAVVAFSALDHFAGFDWATEKHDVVVVDRQGQVVLKLEFPDTAEGWAQLRDKLAPLGKVGVAVETSRGPAVERLLDLGQTVFPMNPKAAERFRDRKAPSGVKDDLLDAWAFADALRSDGHAWRPLLPQDPLTQLLRLLCRDEIGLIELRTSLVLQLREALREYYPAALEAFDDWVMAAAWEFIVQFSTPQALVKAGKRQWQKFMHAHRIYRPETAEKRLEIFARADKFASPSAAVTAAKSLLAVTLAKQLLTLENQIAEYRRQIEKLFADHPDSNIFNSLPGAGKKLAPRLLAELGDNREVFKTPQALQSFAGTAPVTRASGKSCSVSMRRMCNKTLRHTIHLWSDESRKECAWAESYYQQKKRQGHEHAQALRCLGQRWLKIIWKMWTTHTTYDEAHHMMNMVGHGSWVLGHLPELHPAI

SEQ ID NO: 89842 - protein, 427 aa, unidentified
MTNSQDLKFNAIENTDAIVGIDIAKNVHWAGIILPNGKEVKKSFSFHNNKKGFESLVETVKNVLTMLNFKKVIIGMEPTGHYWKACARYLKKIDWIKVVTVNPFHVKNAKEFDDNCQTKNDKKDCMTIARLIKDARFFEPYLPEGVWAELRNLSNTRAELVRKQNAVKCRLVATIDEYFPEYTKVFKKVLSRTSEEILKRCPFPEDIKSLGEEELLKHIKDTVKRGYSKKQVKEIFELAKESIGTSEGINGAKFQLKMYIEEAEMLERQIKLTEEELEKQLKETGFYESLISIQGIGIVSAAMLVGEIGDINRFDSYEQIRRYAGLNLVENSSGNHKGKTTISKRGRSLLRSILYRMAFTMVNKNKEIKELYKYLTTRKENQLKKKQAIIAVIGKILQIIYAVVTKNEEYKATRVFTQDRLEQLKVA

SEQ ID NO: 89843 - protein, 423 aa, unidentified
MFKIIKFNCCGLDVHKTWIYACIGITDANFRTEYFEARFSSFPKDLRRLAAWLQEHQCDEVCMESAGKYWIPVFNVLEETCKVTLAHPKYTKPQKGNKTDRKDAKWICDLFMCGMIKPSFIPPPAIRHLRDLIRYRIKLTNMLISEKNRAQNCLTVSNLKLDDVFTDVFGKSARSITEYILSHPGEKFDVAPFVDKHCKTPIDQIQAAVDGAISPEQAVKLRECLNHIDELNVHRDRIETEILQLVEPFSAQLGLIRTVPGMDKDPMTAILILSEIGSNMSVFPSAKNLVSWAGCCPRNDKSAKHVKSTRIAQSGCYLKPLLVQVANALLHSNKHPEFTERYRRIKSHRGHKKAMIAICKMLLTAIWNILSTGEVYNPSGYLIQTPRPTNETKVLTRKQALDLLRLRGFVIEDDPVEPEPLPA

SEQ ID NO: 89844 - protein, 341 aa, unidentified
MQNVTLVGIDLGKHAFHLHGQDAAGKAVFRRKLSRKQLIEFFATLHPCTIVMEACAGAHCMARKIAELGHEAKLISPQFVRPFVKSNKNDFVDAEAICEAASRPSMRFVTPKTVSQQTLSALHRVRDSLVRDKVCTTNQMHGFLLEFGVTLPVGNAVVRRLPALLAEHSLPPRLVAILERLHAHFKYLSEQIGEIEKELNRQLADDAIAQRLLTIPGVGPITASLLASQLGDGKQYRCGRDFAAAVGLVPRQYSTGGRSNLLGISKRGHKNIRRLLVQCARAFMLHLNRHTGKMADWVRSMLARRHSNVVACALANKFARIAWAIASRDAVFDPCTRSAPR

SEQ ID NO: 89845 - protein, 420 aa, unidentified
MEVLHPRCAGLDVHKDTVVARVRCVSEPRADETLSFATTTGALIELQEWLSAHAVTHVAMEATGVYWKPVWHLLEGYFELVLANAQHIRNVPGRKTDVSDAAWIAELLAHGLIRSSFVPPQPIQELRDLTRTRKQLVREISQHSSRIQKVLEDANLKLGSVLSDVLGKSGRGILLAMIAGQSDPEKLADLAKGTARKKRGELVQALQGRIRDHHRRLLKVHLEVVRALEQAVTDIDSAVGKSLAPIQKCTRLLTTIPGIADTAAQVVVAEIGVDMSRFASDAHLLSWATFCPRNDESAGKRRSTRMRKGGTWLKTTLITAAWAAIRVKGSYLQAQFLRLKPRRGAKKAIVAVAASMLTAAYHMLKNGVEYHDLGADHFSRRDRSKVVSRLIRRLKDLGCDVQLSEQPARGSLDQGSSILS

SEQ ID NO: 89846 - protein, 344 aa, unidentified
MSNHDSCGIEVSAKELLVKVRRAEEGVRERSFTNTPQDHPAIVGYLRRAGRVVRVCMESTGLYGLDLALALSGQEGIELMVANPRAVRHFAHALMRRSKNDPIDAGVLEEFAARMPFQPWVRPSPAALALHALARRLHELVEIQTAEKNRQHAAGLSQAIPAAVRRDLVRSLRAQQGAIERLTREARKLIAQDAQMAERFALLDSVPGIGETSAVQLLGELGVLAPDLSARQWVAYAGLDPRCFDSGSSVHKKPRISKAGNKHLRHTLYMPALVAVRHDPHFRGFYQHLQAAGKLKMQALVAVMRKLLHALHAMFASHQPYDGSKLFQLRSTPAQEVASAPALA

SEQ ID NO: 89847 - protein, 362 aa, unidentified
MCQNEVVEDLKQREPPVDKIIRIGMDTSKHFFQLHGVNPAEQPVLRRRLRRKQMLAFLAQLEPTVIGMEACGGAHHMGRELRGMGHEVRLLPPQFVKPYVKRGKNDAADAEALCEAMSRPTMRFVTVKTPESQAALMLAGLRDRLIRNRTQLANAIRGYAAEFGLIAAKGLAKIEELLLRTQTDERLPALARELFAAHAKEYAQLEVRIVEIEAKLMAWHRENECSRRLAEVPSVGPIGASLMVMKVQDPQVFRCGRQCAAWIGLTPKDHSTAGKVRLGVITRAGDETLRRVLVAGAMAVIQQVQRGRGKPSPWLTALLERKPPKLAAVALANKTARICWKLMVSGERYNPHTMAVAVDEAA

SEQ ID NO: 89848 - protein, 350 aa, unidentified
MRLPIVAVDLAKNTFEVAIVDQAEGQPRFKRLSRGQFERFIAHQPVSRFVVEACPTAQFWCRQLAGLGHDPRMLPAQYVASYRRRNKTDRADTKALLEADRAPDIQPVSVKTAEQQAIQQLHGVREQLVTARTAWINQARGILREQGFAIAQGAHKARQAIPEIIEDADNGLPDALREVLFDIVEHLRGIDERIQRIEHRLNAYKARDADAQRLSELPGIGLITSTALTSCVADIRQFDKPRQFAAWLGLTPREHSSGDRRQLGGISKRGNRYLRQLLIHGSRSALMMFLRKARRGEALDAFEQWAVRTYERVGFNKAVVGVANKLARRIVAICRDNSSYEPDTMAPAAA

SEQ ID NO: 89849 - protein, 328 aa, unidentified
MFFIGIDVSKAKLDCSLLLDVASNKRRAKVVANSKTGIVDLLAWCTKQQVPVHELHAIMEGTGVYHEQAALALSDAGATVSIVNPAQVKDFGRSLGVRTKTDGVDSFVLARYGALLKPKSWTPPAQEARTLQALLSRREAIAQDLQRERNRLEKADAIDTLPPIRQSINDSIDFLEKQLAKLQQDIDNHINNHPNLKDDRDLLISIPAVGPQVSNHLLSVMHNHDFQSAEQLAAYLGLVPVERQSGTSVLGRPRLSKAGPARIRAVLYMAAIVATQHNPHLKALYRRLQERGKSKMSALGAVMRKLAHLCFGVLKTRQPYQADYGIST

SEQ ID NO: 89850 - protein, 341 aa, unidentified
MEQATMIGLDIAKHVFQAHGADATGRVLFRKRLTRTKLLRFFTMQTPCVVALEACAGSHYWAREITKLGHTVRLIPPAYVKPFVKRQKNDAADAEAICEAAQRPSMRFVPIKDEVQQANGVVFRARDLLVHQRTQCINALRGHLSEYGYVFPQGITHAATLIDHVEDRNSTVPDNARTILKILIGTFTALETQIKQLDAEINRRSKEDSVARRLMTIPGVGPITATAITALVPAAEGFRAGRDFAAWLGLTPLQKSTGGKQKLGAVSKRGERTIRRLLILGASAVIRQACLRGAPAGSWLAQMLPRKPKMLVTVALANKMARVVWALLVKGGVYKAPVVAA

SEQ ID NO: 89851 - protein, 393 aa, unidentified
MYLVGIDIGKLKHSFCLLEKETGEILVEPVFFENSRDGFNALLSSFKHLPQRDILIGMEDTGHYNLALLKFLLDRNYQVALINPVATDLTRKMQGGISKNDKLDTLTICDVLSSNQRVKSYRISKYSSFDLYEQKQLTREHHNLKEEENQLTNRLQKCIDVVFPEFNSLFKSKYGIVYMNILKEFGSADAIAHADIRTIRKCFDTGRGKHISLTAQELKEAARNSIGFPSSSETTQIKHLVARIELIKEQIAEIDKKIEEFSIQNNSPILSIPGISHFSGTSILAELGDIHNYSKPSQIIKFAGMAPLTYESSQFTAQHTAITKKGCKYLRKTLYQIITPVIQYNPVFRKFYLLKIAQGKGHRCAQGHCVRKLMRVIYHLLSTGTQFDPALLR

SEQ ID NO: 89852 - protein, 447 aa, unidentified
MSNTIIRFVGLDVHKRVVEACIIEQSGNVVHRERFALNRRTLELFASKVLQPGDHAALEATTNCWAVADALRPHVAKVVVSNPLTTKAIAQAKIKTDKVDAHVLAQLLRCDFLPEVWQPDEATRRLRELTGRRSALVSQRTMMRNRVHSVLAMRLIEAPKKLFNSDGLAWLKGVELDAQGRMLVDSDLRQLAFLDGEIAVLDKELVQRGYASDAVKLLMTLPGVDVGTAQALLAAWGDFTRFRDADHAAAYLGLAPSTKQSAEHCYHGPITKRGNSTARWMLIEAAQHLDKHPGPLGVFFLRLMRKKCRNVAVVAGARKLARIAWLMLHNNQPYRYAIPRSTETKLAKLRVKATGKRRKGGTAQGAKRQALLPGGGRTIKSLAALCASEGLPQPQPLSAGERRTIAAAGCETYVAEVAATQVVPRRSRSGKLTGSSSLLQESGHGRD

SEQ ID NO: 89853 - protein, 352 aa, unidentified
MQEYIALDVHKHYTFAERERVDTQKVAHYRIEHSRGQIRRFLAGVEPGTTVALEATGNWYWVVDEIEEAGMKPALVHPRKAKVMLGCINKTDKLDVHGMNRLQRTGTLPTVWIAPAETRDLRDLPRTRMFLVDQRTQLKNRIQATLAKYALTVSGCSDPFGSNARRLIDKRVGELPEHTRLVTAELLQQLDLLTERIEAQEKRIKGLVRMTADMTRLTTMPGIGPILAIVVALEVGDITRFPSAENFASYAGTAPRVKASGGKVRIGRLRSDVNHYLKWAYIEAANCVCIHQRNYPFRHVTQLYKRIKGRKGHEKAIGAVARHLAEATFYVLSRQQDYRDPALNKRVVTTGT

SEQ ID NO: 89854 - protein, 361 aa, unidentified
MKYIALDCHKQYDHATMIDTETGEIKNKKMAHIKEEFREFIGDKAGTRMVIESCRDWSRSYELSEDLVEDIILAHPLKVKAIASAKIKTDKIDSQILARLLMADLIPQAHLRKGDNRIKQRVIRHRAFWIVIRTRVKCRIHDLVDNQLWLPEILKAKPRSLFSKKGMTWLTSLEWTREEDKEMVESCLRVMENINREISVSNKMVEEIYKEDRDAQLLTTIPGIGVTLAMLISTEIDGIERFPSASKLCSYAGLVPSTHSSGGRTYHGKITSEGNHWLRWALLEAVVPASYGDVEIRQRLNDLRKRKAANVAKIAMARWLLKVVYHVLKEKRCYAAAYNRLEREEPPFISSSEFTTCGLRS

SEQ ID NO: 89855 - protein, 269 aa, unidentified
MLSFCGIDVSKDRLDVIVLPEEQCSSVSNDGTGWADLVERLRGRSIAAIGIEASGGYERGVMRTLLAAGMPVRQVNPFKLRQFARASGVLAKSDPLDARMIASFVAIMPTRPAQRAPARAAQVAEVLAVRRQLSAEKVAAENASRLLEDAMLRRLSQGRIGRLASDIDLLDKRMVEIVASDTVLAHRYRLLTSMPGVGSLLACTLIALLPELGCISRKQVAALVGVAPYAFESGTLKGRRCIWGGRANVRQVLYMLEGPPLASRRARSL

SEQ ID NO: 89856 - protein, 338 aa, unidentified
MQLYCGIDLHAKNSYLAIIDERRQRIFKHNVANDRQLILSFLSPYKAELAGVVVESTFNWYWLVDTLMEDGYMVHLANPCAIQQYAGLKYIDDKHDAFWLAELLSLGILKEGYIYPRQERPVRDLLRKRGHLMKLRTSLLTSLHNTMANACGRKIPSHHVLGKEDRLSSHLSGNESLALMGQVSKASIDALTLQIKTIEAHAEKQCMIEPAYVGLLSLPGVGEILGLTILLETGPISRFPAVGNYVSYCRKAESTWKSAEKVKGKGNIKNGNRYLSWAFAEAAEHARRFDTASRNFYNRKVHERNGAVAHSALANKLARAAYYIMRDQVPYEEAKLFG

SEQ ID NO: 89857 - protein, 339 aa, unidentified
MKKLYGGIDLHGHNSVVVVLDEADQVVYQKRLPNELVQILPQLAPFRAQLQGLVVESTYNWYWLVDGLQEAGYVVHLANPAAMQQYAGLKYTNDDSDARWLAHLLRLEVLPTGYIYPKEDRAIRDLLRKRSQLVRQKTANLLSIQNLLTRNTGQAMKSNQIKQLTPAKVSELVALPEQALALQVTVAVMQHLTEQITQVERAVHARVKLRPAFQALLTVPGIGQTLALTIMLETGEIHRFPTVGQFASYCRCVGSIKLSNSKRKGQGNTKNGNKYLAWAFVEAAHFAIRYEPQIAQFYQRKRAKTKVVVALKAVAHKLARACYYLMRDTVPFDVTRAFA

SEQ ID NO: 89858 - protein, 334 aa, unidentified
MTNQYYIGVDVSKKTLDIYALKEQEKLFYLCISNDTKGFKTFDKECKKHGVIPQESILCLENTGLYGMLFAAWATEKKYKVWIENPIAIKQSRGLVRGKSDKKDAERIAQYAHRFQDRCRIWIPPRKVITELKHLLTVRNQLINAKKSLLTPLKESVSIINKKIQKTCEKTVNPAIESIKKSIKKVEKEINNLIKSDEQIAHMTDILTSINGIGIQIAIAFIVATNEFKQVKNGRALACYVGVAPFEHNSGTSVRGKSRVSVYANKSLKAILHMGALSVIKNSEEFRSYYNRKVQEGKSKMLVINAIKNKQVLRMYACIRDNRKYEKNYTLKLA

SEQ ID NO: 89859 - protein, 318 aa, unidentified
MENISQWVGIDISKATLDVYLRPMGKAMKVANTKEDISKLVETLKSYTVNLIVLEATGGLETELVIQLQEADLPVALINPRQGRDFAKATGKLAKTDAIDAQILAHFGEAMQPQILAVESEESRQLGDLISRRRQLVEMRTAEKNRRERARGKALVDIEAHLEYLDNCLEKLNQEIEELTQANQQWLEKVNLLKTVPGIGQVISTTLVSDLPELGQLTAKQISRLVGVAPINHDSGQHKGKRMIQGGRAQIRATLYMGAVVAMRHNPVIKTFYERLVGRGKSKKLALTACVRKILVILNAMVRQNQPWQLADNLPPCS

SEQ ID NO: 89860 - protein, 311 aa, unidentified
MNDTIGIDISKDKLDAYWLSKREHRQFCNDKAGVMALSRWASEVGVSKVIFESTGIYHRCLETGLAHHEIGFARVNPRQARRFCEGAGQLAKTDRVDAAMLAKMGSLLQLKADQPKSETLHDLKQLATARQALIKDRTAAKARLAATTHRLLSQQIKRRLSQIERDLSQVSDLVDTIIAADEALRGKADILVSIPGIAKVTACAILTDMPELGHLSGKQAAKLAGLAPISKQSGKWQGKEHIQGGRASVRRAVYLPALVATRFNPDMKAKYEQLVSTGKCKKLAITAIMRKLIVMANALLRDGRKWNEYPA

SEQ ID NO: 89861 - protein, 346 aa, unidentified
MMIIGCDFHPSWQQVSWLDSETGDCGERKLVHVNGDAKMFYQQLGAPVLIGMEATGNSQWFIELVEDMGHEIWIGDAAQIRASYVRKQKTDKRDAAHILKLVVEGRFPRLWTPDREQRDLRQLVLHRHKLVEIRSRVKNELQHLSMNKGVQRKHKLWSQAGQTMLRELPLKPWASCRREDLLGLLGMLNQQINQLDMAVQRAAEENPQSKLLMTQPGVGPNTALAYVLTIGDVSRFRRGKQIASYLGLIPREESSGGRQKLGAISKQGNRMLRSLLVEAAQTAVQHDPGFRKQYLHRCHQKPKGVAKVAAARRLAVRLYWMLRSQVGYPEIVRIESSPRVALVGAS

SEQ ID NO: 89862 - protein, 401 aa, unidentified
MFCERTSVGLDVHARSVVAAAIDGQTGEVFRTRLTPSHTDVLEWVGKLPGPCAVVYESGPTGFGLARALRSTGWRCEVAASSKLHRPAGDRIKTDARDALHLARLLRLDEVVPVRVPTQAEESARDLVRAREAARQDLMRSRHRVSKLLLRNGIVYSGGKAWTELRDRWLRQQRFDQAPTQAAFDDAYETVVLATARRARLDEKIIALAGDSEFTALTRRLGCLRGIATLTGFALAVEIGDWQRFTGAGIGAYLGLVPSEHSSGQSRSQGAITKTGNTHVRRVLVEAAWHHRTTYHRVWCCGAAGTRPGRGTSSRARRKSAPAHPLGQPEPPQETAGDRQRRRCAGARRLVLVAGGDARLNRPPRTDRWWSRGEEPQREEQRALRLLSNRSARSDFGHARP

SEQ ID NO: 89863 - protein, 418 aa, unidentified
MDRVVADIINPIACGLDVHSAVIAACLVRPGPRGGPSYEERSFSTTLRGLQELRNWLLESGWQAVGMEATGVFWIPVYSVLEGHVPMVVGNPNHMANLRGHKTDRKDAKWIAGLIRHGLIRPSFVPKAEFRDARELTRTRRQLINARPAMRNEVTRPLAHQGIPLGVKGLLSNVFGVSGMGILEALAEGRDVLEELPKLLYRTVKGKKEGISAALESGLREAIRPLLSLHLNRLEAVEEDLQKVEKLIAAHLAPFKDRLDLIMTIPGVSLISACVIIAELGIDMSQWPTSKHLSAWGGVAPGCRESGGKAKRTKTRKGNPFVCTTMVECAGAAVKKKDSQFGRLYRHLCARTGSKMKARMGIARKLLVIVYHVLSTLEPYAEPKAKVPSVRSKERSIRRHILELKKLGVDVPIPSVSA

SEQ ID NO: 89864 - protein, 352 aa, unidentified
MDKGNKLNFSGQHIYVGMDVHKKSWSVSIQSEQFEHKTFTQPPEVEKLTGYLEKTFPGATYHTVYEAGFSGFWLHDQLREKGIDCMVVNPADVPTKDKERAGKTDRVDCRKLARGLRNGDMKGIYVPPRVKVEDRTLVRTRQSMVRKQTRCKNQITSILFFYGITIPEEGRWTRRFIHWLESIRMERASGDFSLKAHLEELNHLRQIIANLNRAILSLSRTEEYRSDVLLLKSVPGISTLTAMILLTELSDISRFSSLDKLASYTGLVPDIKSSGETEYATGITFRRNPALRALLIESSWVTVRKDPALMMAFNKLSLRMKKTQAIVHIARKLLNRIRFVLKNRQKYVLAVV

SEQ ID NO: 89865 - protein, 316 aa, unidentified
MDNKSRVFGIDVSKARLAIGDYEGAVRLNIDNVPPAIAQWLSGLAPGSIIAMEATGAYYQGLAALAHAAGMRVFVLNPRTLKHYAEAIGQRGKTDPIDARMIARYAMHEQAKLFAWEPPPAATDRLGQLLQRRERLVHATQLLAQSLAGVSALKSAREELLASLKRMIKNVELLMRAELAHTPTLAALHQRLSSIVGVGFVVAMQLVVALTRLRFARVESFVAYTGLDPRPEDSGQRCGRRRLSKCGPRLLRCLLYNAGMAAAHSKLFKPTYLKLRARGLRSTEAIVILARKLARIAYALYRSGETFNPTRHLQTA

SEQ ID NO: 89866 - protein, 382 aa, unidentified
MQTIDTVNPTILLAIELSASTWLVAARVPGLEKPHLHRIDGGDTTALLALISSLQARAARRLDATISVVCCFEAGRDGFWLHRLLTAHGVVCHVLEPTSILVNRRARRAKTDRLDAEGMLRVLAAYLRGDHQTCSMVRVPTPEEEDAKRTHREREKLVQEKLRIENRIEALLFTQGIRKRPSLRSWERDLAALRTGDGREIPRHLRAELDRLRRRLIMTLELIREVEAERDQAAKTKPQDQACHKIAALSRIRGIGENFAAVLTREVFYRSFDNRRQIASYVGITPMPYQSGGMDRDRRISRAGNPRARTTMIQLAWLWLRYQPGSELAEWFRERVGTLAGRTRRIAIVALARKLLIALWRYTETGVIPAGAEIRAEITVAA

SEQ ID NO: 89867 - protein, 401 aa, unidentified
MNAVGIDVSKGKSMVSIMRPFGEIVSEPFEVKHTSSEIKALIALINSVDGESRIVMEHTGRYYEVLAHQLAEANLFVSTINAKLIKDFDNDSLRKVKSDKADSIKIARYALDKWTGLKQYSLMDEIRNQLKIMNRQFGFYVKQKTAMKNNLIGILDQTYPGANTYFDSPARNDGSQKWVDFIDTYWHVDCIRNMSLNAFTEHYKKWCKRKRYNYSQSKAVEIYENAKEVVPVLPKDEITKLIIKQAISQLNNASATVESLRQLMNETASKLPEYPVVMSMKGVGPSLGPQLMAEIGDVTRFSHRAAITAFAGVDPGVNESGTYAQKSVPTTKRGSSELRRTLFLVMDALIKSMPQDDPVYQFLDKKRLQGKPYYVYMTAGANKFLRIYYGRVKEYLAKLKK

SEQ ID NO: 89868 - protein, 404 aa, unidentified
MKVTYQTCCGVDVHKSFLVATIVKTTGGIEPSYQKKRFSTFNNSILEFKQWLLDNDCHDVCMESTGKYWVPVFNLLEDDINVVIANPKWVKAVKGNKDDTKDSKWIGDLFRLGLVKGSYIPCKKVRILREYTRYRYKLVSCRSSEKNRYQNALTVCNVALDSVVSDIFGKSSTSIIDYLLEQSGSSINHEEIASKLLRSLKSKEDAVIESVEGYQMTDAPKYRMRLVRAHMDYITAEINDVDKMIENMISSNTDFENAVQFLCTIPGVKRDSAITIISEIGTDMSQFSSSRRLCCWAGLTPGSNESAGKRKSVRFTRAGVYLKPALVQCAHAAVKSDKSPYYKKKYESLVKRRGKKRAIIAIARMILTAIYQMLSTGEQWNPSDLYKIDMPVALVEKQKAKAIK

SEQ ID NO: 89869 - protein, 351 aa, unidentified
MAMLADTVELVIGVDTHKDTHTAAVVVAATGAVLEQVTVLAAPAGYQQLLKLASRQPGQRVWAIEGTGGYGAGLTRFLHAQAEQVVELDRPKRTARRHGAKSDSLDAIRAAREALGRDQLAQPRAAGHRAALSVRLAARRSAVQATTDAQRQLHALVVAAPDTLRSRLRGLTTPRLVSTCGRLRLQTAWDVETIATAASLRALARRIQLLDAEIAEHTRAITALVRAWHPELLTPTGVGPIVAAVVLCAWSHPGRCPSDAAFAMLGGAAPIPASSGQTVRVRLNRSGDRQLNQALHVVVLTRLRYDPATRAYAQRRRAEGKTNREIRRCLVRYVARQLYRLLEGQPNFDPT

SEQ ID NO: 89870 - protein, 357 aa, unidentified
MSNLKYSVGIDVSKNDFHCCLSVIDTEQLVKVKSSHRFSNTVAGFKLFMDWVERGLKERLPVFYVMEATGVYHEQLAWYLHGRELQISILLPNKARKYLQANGAKSKNDRIDAKGLAQIAAEKRLELWVPPSKLLYELRCHTRQHQNLNEMCTSINNQMEAIRHSHFQARDIVKQLEKTVKLLERQIGEMEKSIEGLINSDVVLNSHYKHISVIKGIGLLSFAVIAAETNGFALFKDAASLVSYAGYDVVENQSGKHVGRTKISKKGNSRIRRILHMPALCAVREDQPQFQNLYERVYHRTGIKMKGYVAVQKKLLVMAYYLWKNNRSYDPRFNIKKIIAPENSGATHDKTPEGIFH

SEQ ID NO: 89871 - protein, 526 aa, unidentified
MPYHVRSSYRVLRKSNKPKRQSLQKPNGVISPRVRKVGGERFAIVCVDPAKHRSEWMMADYFGNLLIQPRTLEHQGRFFKSAVELIRQAQELHNIEDMIVVVERTGNYHLPPKRAFASAGFETRVVHPFATKQFRMPADPGNKTDETDLYAQHRAAVAGFGLCEYELESPYRELQLRARHRRNLVERAAAIACQIREHLHLAMPGYAKLFDRLFESPTALAIAHHCDSPARLLQLGQAGVSDHLRKNKIRHQVRSIVKVLTWAAQVADDNIQDGPMHHAIWTDLHELYQHFQRKISILEQELAGDLVQTPYVRLLAIPGINVVSAADLAGEMGPMTRYANSNAITGRAGLYPSRHQSDQTDHDSGPIIRQANRRLRCVLMRIADNLACHCAYYRGQADVDQKRGVDKRASRVKIAKRFSRLALACVAGDQPMRHPCFQQAGSILEKLRQFHRLHETSLEQLLADLETAVEQLPGSTRRREAEMVAGLLAQQTTRQRGTSAIGDVLPAVLARLNLKTTKESENRDRS

SEQ ID NO: 89872 - protein, 340 aa, unidentified
MTITTVGIDLAKNVFAVHCIDQNGKAVLVKPKVSRAALSELIAGLPPCVIGMEACSGAHYWARLFRLYGHDVRLMAPKFVSPYRMAGKTGKNDAADAIAICEAVQRPHMRFVPVKDESQQAMQCLHRTRQGFIQERTATYNRLRGLISEFGVIAPQSTDALRHVVSDQKETLPVQVRLCIDDLLTHVTNIEEKIAEYDRVLSRVAKTDHRSQQLMELKGVGPTTASALVASIGNAHDFKNGRQLAAWLGLTPSQYSSGGKSKLGRITKAGDAYLRTLLVQGARSVMVGAENRTDPFSRWVCSLIGRRGYWRAVVAIAAKNARLCWASLHYGDDFRLYSTT

SEQ ID NO: 89873 - protein, 387 aa, unidentified
MYFVGIDISKFKHDCVVVDSSGEVYCPSWSFTNDQEGFSLLLGLLNSIEGEKRIGFEATGHYGLNLKLFLEKQGYSFMELNPLLVSRFVRSKSLRKTKTDTLDALSIAHYLMTVEYKPYPTSFYHMDALKSLTRFRDSLVRQRSRQLTELTNILDKVFPEFKPSFKNRFSGTALYILVNYPSPENIYNMNSRSYDILRKKSYGKFSMGDFVHLKELAKNTVGRADDFLLLEMAAVLDIYSQLDSKIEEIEAKIKEYITILNPPMLSMTGIGSLSAAVILSEFGDFSNFESPSKMLSFAGLEPGYFQSGTSEYSGRMVKHGSPHLRYAIMNCCLPLITHNMVFAEYYAKKRAEGKPYRVALSHVAKKLIRVIYALQTQNVLFNPEKLI

SEQ ID NO: 89874 - protein, 310 aa, unidentified
MNDTVGIDISKATLDAFRMSDGRREQFSNDAAGLKKLKKWIGKAPTRVIYEPKGPYHRDLEQALSATNHGLVKVNPTRARRFAQATGQTAKTDRVDAELLARMGAVLNLEASPARSDAVMEIKELHVARIGLIKDRTACRNRLGTARCKVIISQLNARYRQIKAQIAQIDAELVRYIKADPELARRYEILLSIPGIGQVAAIALIVEMPELGSMNAKEVASLAGLAPITRQSGMWKGKARISGGRQIIRTMLFMPALIATKFNAPLRQIHEALIGAGKPWKVSITAVMRKLVILANALVRDDRIWAESRA

SEQ ID NO: 89875 - protein, 361 aa, unidentified
MRIIGCDLHARQQSLAMLETTTGEMVNLTLRHEGNQVREFYSQLPRPVLVGIEATGSMHWFLNLMDELGVECRVGHPATIRAAAPRKQKSDRLDAELLLKLVVENRFPAIWLPTKELLDLRALVLHRHQWVRIRTRIQNALQAIALANGLRRGSGLWSYDGQAKIALLPLLPHTAYRRSTLQAMYKNMEAEIEKLTLQVAEQAGQRSGARRLMTHPGVGPVTALATDVFLGDPKRFADGKALASYVGLIPREYSSGERQRLGGVTKQGSPLLRFLWCEAGAHAVRRDPELQRFYRRKLVQKGLGKARVAVARKLGIRLWIMLRDEIDYQEFCRRGQKQQSGAACAGMPETAYGAKNHRAIG

SEQ ID NO: 89876 - protein, 342 aa, unidentified
MIGIDVSKDRLDCNFMDAATQKSRWVQAVPRTKQGVSSLLKKTPQGVPWVIEPTGHYSTEVAKLAQAAGQPVLMAPSRKAKAFLNSLPERAKTDKIDARGLALFGLTRAASVPLRPYPLKQPNVEHLDQLLSARRSLAKARAKLTQQLAQLPLAAEALREAITSLTDQIKKLDTQISACVRSGAEFAAARALVAVPGIGPVVSAAIASALSKGFQHPDQFVAYIGLDIRVQQSGQRKGELGLSHAGDAELRRLLYLAAQASLRSKDTTFKAQYDRELAKGLTKTGALCAVARKMAKLCWSMHRHGTEYDPTRVYKHPTPPRAQVALEAVPDTTSPSDPTEGA

SEQ ID NO: 89877 - protein, 327 aa, unidentified
MRYIGIDVSKATFSVAYPLPNGGYKPREFKNTAKGVHEFIRTLEADDHCVMEATGNYSYLLLYLLNQANITTSMENALKVKNFARTMLSVTKTDKADAQLLSLYGERMRPAPFKMPSEAILLLKQKRAALRQFQKQLLSSTNLKKSLEVMPQKDAATFKAIDKIIETLEKQIRKIEEDLIVLTQKEFDRQMQRLTSIKGVGVSLAAAIILATGGFTYFDNAKQVSRYLGICPTYQQSGTSVHFKGHINRNGDAHLRSQLYVAAWSMSQHNAECNKLYMRMKEKGKSGKLIMIAVANKVMRQCFAVVKNDTDYVDGFVSQKPQSSNFS

SEQ ID NO: 89878 - protein, 311 aa, unidentified
MDATVVVGIDVSKDRLDVHVLPSGENFAVARDEEGVSKLVARLAALGPYAIAMEATGGLESLVAASLNGANLPVIIVNPAQVRAYAQALGKRAKTDAIDAAVIARFVEATKPVIRALPDADTVLLAQLMTRRRQIVQMIVAERQRQTQLPTRHLRRSAARLIKALQRELDVLDRDIDSSVRGSPIWREKEELLRSVPGVGPIIARTLLAEMPELGTLTRREIASLAGLAPWTRQSGRWRGKSFTGGGRAPVRAVLFMAALVGARFNPILKAFHQRLIAAGKPKMVALIALARKLLTILNAILRDNSPWQSA

SEQ ID NO: 89879 - protein, 356 aa, unidentified
MKNHHSFNDFVILGADTHLDIHVGAVLSYAGKLLGTKVIQTNQVGYEELFDWVLTFGSLERAGIEGTGAYGAGRTRFLIKKGLDVLEINRPDRSKRRLKGKSDPLDAENAARTVLSGSTKAVPKLQSGACEALRIISVARRSAVKAKTQAINQLRALLVSAPQDIRDMMWKSKPHECVTACMSFESAEKSPLFLALCCTLRSLTKRWLALAEELTQLDELLDNLIQEYAGSLRRPFGVGPQTAAILLAVAGENPERLKNEAALTSLCGVNPLPASSGKTIRHRLNRGGSREVHNALWTIALVRMRSDPRTKVYVQRRTGEGLSTKKILRCLKRYIVQELYPLILTDLGRAQLRTLT

SEQ ID NO: 89880 - protein, 320 aa, unidentified
MQKIALGLDISKQTIDAYFNGQEDFMCVMNNKSGIEKLIERIKNYQQQSKEIHACCEYTGVYYLPLASALHESGIKISVINPLSIKLYGEYRLRRTKTDKQDAKLIADYCEKENPPLWKPLSEKRNTLKVLNRRIEQLNALLNIESNRKDVSDTVIKSGIERIINSIKIEIESCKTAIQNLIDSDEELSHNQKLLQTISGVGKSTAAWLLSVLVDIDKFENSKKLISYLGLSPVIKDSGTSVRQAKISKMGDKKVRKALYYPARVACLRSKLWRPWFEQKIKQGKHPKQVYILMMCKIVKYAYAVIKTGQPFDENRHKPA

SEQ ID NO: 89881 - protein, 435 aa, unidentified
MAELHVLDPRAAFVDVGSERMHVSIAGGAPVVFGTMTTQLHALRDWLLGQQVHSVAMEATGVYWLPLYSVLEEAGLEVVMVNGRQTKNLPGRKTDMADCQWGATLHAHGLLRPGFVPPAHIRRLQDYVRLRNDHIMEAGACVQQMQKALERMNVKLHDVISDLSGVSGLAVVRAILEGQRDPEKLLTLCNKQIQRAKGERVKESLRGTWAKEHLFALRHALQSLEHYQRQIADCDREIQAVLPEPPDQQAPGQPVEGKADKRPGGNAPHIPGLRKILTHLCDGRDVTVLPAHTEYTGLQIISEVGTDLTKWCTEKHFTAWMGLAPGNRRSGKRRGNVKRSRNRVGRLFCVMARSLARSKDIALGGFYRRLAARRGGLVANIALARKLATLFWRVMVKGIDYVEHGLASYQAKVRETKQRTLKRLAKEFGQTLVPA

SEQ ID NO: 89882 - protein, 327 aa, unidentified
MTVYIGVDLHARQQTVAYMDTTDGEIKRRELHHQKDDVRGFYQQFTGEVITGVEASGYTNWFEEMIEQLGHSLLVGDAAEIRRLARRRQKNDRRDAELILDLLVHDEFPQLYRYSPESREVLRQLRFRHKLVKLRTIILNSLHALAIGAGLSLQAKLATAQGRTRLQELRLSPVLTTQRDEWLGIADELSQRILSVERWLKHQAKRDARVQRVQTHAGVGLLTSLCLVHTIGDVSRFSSTRKVTAYVGLDVTEHSSAERKVYGSISKAGSRLLRYLLVEAGQSAARARRTTAGLLSTGNEAEGQGEGKGRRRAQALGQMFHHAQRRN

SEQ ID NO: 89883 - protein, 449 aa, unidentified
MMEQDMATSKAKEVARLEVVHPDAAGVDVGSSGHHVAIRGDAPGQTVREFGCCTRDLHEMADWMLSNGVKIVALESTGVYWIPVYEVLERRGLEVLLVHARHVKGVSGRKSDVLDCQWLQRLLSYGLLRGAFRPQDQMCELRELNRLRTRLLRDQGRSVQHMQKALTVMNVQLTNAISDVAGVTGQKIVRAIVDGERDPQELASYRDARIKASEEEIAASLQGNWRTEHLLALKVALATFDFCGQQIGQCDVEIERAMQVLQRFTQEPEKGKKRSKAKNAPKFDVRERLFKMCGVDLTRINGIDVSTAMTIVSEVGTDMSRFPSDKHFASWLGLCPGTNISGGKRLGAASKRSANRATQALKQAAAALRTSQSALGAYFRTLCGRMDKAKAVTAAAHKLARLIYAMLTKGQEYTDMGQLYYEERYRERAVRQLQRRANKLGMLVVPAGC

SEQ ID NO: 89884 - protein, 331 aa, unidentified
MKQIYGIDLSKEKFDVCFIKENDTKESFLVVKNTFNGIVKFLEKLPDNALICCEHTGVYGDLLLFLCSQYNISISLVSGYEVRHSSGLKKEKTDMIDAKMLREYAIRFYDKIKECCYSNESMKELNDLYKLRSQLVKERKMLITHDQRNQHFPFNSIKANQITKTITDSLSEAIKELENEIMFIIHSNMELFKTYNTITTIKGIGQITACNLIIKTENFKGIDTARKAASYAGVCPFNNSSGKMQKKARVSNMADKELKTLLYLCTVVAVKQNPEFKFYYERKKLEGKPYFLIMNNLANKLLRITYSLVKTGNPYVIGHIVEDPRLAKKSA

SEQ ID NO: 89885 - protein, 407 aa, unidentified
MDLLKTVFGIDVSSRKSNVCIMVNGQKVNDYAISNDMVGFNQLLDDLKQVTNPQIIFEATGVYSRRLQAFLDMHDLRYVMMNPLEAKRKTKDDLHQNKTDKLDAMYLAKMQSEHPQRLAYVQSEEYQELMANNRIYEQASHDLITNKNRLHKAIQLTFPEIEHLMANPRGKNYWSIVLKFPHPNIVLETKEADIIDFLKSLSGIGEKRANDLAQRLIRLAKLACPAVKKSSAHIRGLEMAINNILSAEETCQTALKEMAKLAPKRDLEILKSIPGIAENTALRIISELGDIRRFNNPNQLNAFVGVDPQVYESGNLTAHLSISKRGTAIGRKVLYLAINQIQSAKKAGNPCHIADYYEKRKRSSETASHKKAAIASIHKLLRTIFALITNDQLYSYDIAKHNQRLLS

SEQ ID NO: 89886 - protein, 400 aa, unidentified
MLSIGIDVSKGKSTVCGMKPGGEIVYAPFEIQHTREGMSELVSLLHNSCEEVRAVLESTGSYHCPVVAALLENGIFVSVVNSLRMKRFCSQSIRKVKTDRIDAMQIALYGSAYWQELQPTRLPEDTYRELQLLARQYYQMTSMLIKAKVDFNAICDQVLPGMQELMSDHAGRHKLSDFVLRYHHTTHILEMGETRFRKDYCKWAEKKGYRNCERMAALIFATAQNGIPVLPNAPSTQIVITEAIRVLHTVEASRDAILTQMQALAKTLPEYSLVREMPCIGDTLAPRLIAEIGDVRRFHSKRALIAYAGIDAPPYQSGKFCANNRHISKRGNRYLRKTEYEVMQSYVMHKPANDPIFTFIEKKRSEGKSGKLAMVAGLNKFLRVYYGKVTELYRSSSAIE

SEQ ID NO: 89887 - protein, 352 aa, unidentified
MKIIGCDFHPSYQQIAMVDTETGELWEGRLEHEQGEARRFYQALQGQTVRVGIEAVGNSQWFEQMLVEMGHELWIGDAAQIRRLVVRLQKTDRRDAKHILDLLLDGRFPRLWVPSTQMRDVRQLLRHRQKLVEIRTQVKNQLQHLALNQGVRRKRRLWSVQGRAVLEQLPLQGWTARRRSDLLAMLDRLEEQVGELDRAVRTEAEQRPEVRLLMTHPGVGAVVGLAYVLTIGPTTRFPRGKQVASYLGLIPKERSSGGRQNFGPISKQGNTMMRTLLVEAAQTAARFDEELRRDYGRLKARKHSALAKVMVARKLAVRMYWMLRENKPYTQLYAQRPIARMQDSPGHSVVAG

SEQ ID NO: 89888 - protein, 417 aa, unidentified
MRNFNNKTTSPLNTPTTTPTLFVGIDIAKRNHCATAQNNCNKFTTKPVFFTNDKQGFEKLLNIVRQWKKEQNCQHVVFGMEPTGGYWLPLFHYLENQNFEVHTVSSVKVNHSKDILDNSPLKSDKKDALVISELVKNHNVLSYQVPSPEIQQVKNLMNHIKQQEEVLIIYTNRLESLLSIYFPEFNGIFKKLNCFSVITLLKKYPFPREIVSAGTDTIAALLQKASHGQIKRKKVERLMESAKNSVGLSGDFTARLQIENCLNFIELAEKSIESAKELLKEVLSKIPQAEIIDSIPGVGLMVTGSIVASLGDLTKYENAGQVLKMAGLSLGSQSSGNRRGKDRIIKRGNSMLRKYLYMSSLSHTYGGRYFYDKYILMVKKGKPKKVILVAIMRKILKIAYSLVKGNRKFDKNYEAGA

SEQ ID NO: 89889 - protein, 424 aa, unidentified
MKVTYQTCCGVDVHKSFLVATIVKTTGGIEPSYQKKRFSTFNNSILEFKQWLLDNHCHDVCMESTGKYWVPVFNLLEDKINVVIANPKWVKAVKGNKDDTKDSKWIGDLFRLGLVKGSYIPCKKVRILREYTRYRYKLVSCRSSEKNRYQNALTVCNVALDSIVSDIFGKSSTSIIDYLLEQSGTSINHEEIASKLLRSLKSKEDAVIESVEGYQMTDAQKYRMRLVRAHMDYITAEINDVDKMIENMISSNPDFENAVQFLCTIPGVKRDRAITIISETGTDMSQFSSSKRLCCWAGLTPGSNESAGKKKSVRITRAGVYLKPALVQCAHAAVKSDKSPYYKKKYESLVKRRGKKRAIIAIARMILTAIYQMLSTGEQWNPSDLYKIDMPVALVEKQKAKAIKQAKKLLQREGLLPPDEPLAS

SEQ ID NO: 89890 - protein, 400 aa, unidentified
MNDNDGIDVFLGLDVGKTNHHGHGLTPAGKKVFDRQLPNTEPKLRDVFEKLKTKFGTVLVIVDQPASIGALPLTVARDAGCKVAYLPGLSMRRIADLYPGEAKTDARDAAVIADAARTLPHTLRSLEATDEITAELTVLVGFDQDLAAETTRTSNRIRGLLTQFHPSLERVLGPRLDHQAVTWLLERYGSPTALRKAGRRKLVEVIRPKAPRMAQRLIDDVFDALDEQTVVVPGTGTLDIVIPSLARSLGAVHEQRRATEAQITVLLEDHPLSKVLTSLPGVGVRTAATLLVTVGDGTGFPTAAHLASYAGLAPTTKSSGTSIHAEHAPRGGNRQLKRAMFLSAFAALHNPASRTYYDKCRARGKTHTQAPPPLARQRTNVLFAMLRDGTFYEPRTPPLA

SEQ ID NO: 89891 - protein, 497 aa, unidentified
MSEGTAQPPFSRLCPRLLRKHSAWLIRHIPLTQKFHPQPLAPARMADWVHAHYARVRSPYAAQDKPFASDFTNPYRNGGDIMVKINYMSTLFVGIDVSSKTNSVYAMDFEENKYLSTSFGNNQPGADELVNRIAACMQKHKNLDTLLIVLESTSVYSVHISNFLASSEVLMPYKPYVFCVNPKTTANYRKSYIGMEKTDPTDAYLIADFGRVGRTKKLEPWRGGQFIALKRLTRHRMHLSECITREKTYMVSNLYLKFSELQLLEGDDKPFGNLYGATSSAVLTEFLSPQEIIDMPEEDLLAFLAQKSRNRISDLSKTSELLRKAARDSYRLDKCMYEPLNISLASSFNCIQAYQKEIRLIEQAIDKCIKGMNTNALIILQSIPGIGPVWASGILSEIGDITAFHSSDALAKYAGLYWPKGDSGDFISEDNQMSKAGNPYLRYYLGEAANSVRKHIPEYADFYARKYAEVSKHQHKRALALTSRKFVRLVFGLLAKY

SEQ ID NO: 89892 - protein, 405 aa, unidentified
MHSPTTTYAGIDWASRSHVICVIDQGGAVIERDEVEHDAAGLRRLVRRLTAKRVSGVAIERPDGPVVDALLGAGLTVVVIASRHVKALRTRYGLTGNKDDHADAYVLADVLRTDGHRLRPLLPDTPATVALRASVRARKDLVRARVRIVQQLSAHLERVFPGAVDLFADLDSPIAQAFLTRFPSAERAAWLGPRRFEAWLIGQRYPGRRTGAELHARLVAAPAGVTGPEADPLAAVTLGYVRAIAAVREQIGVLETRIAEQLALHPDGTIFTSLPRSGTVRAAALLAEIGDCRERFPTPEALACLAGAAPSTRQSGQHRAVTFRWACDKKLRDALLDFAEDSRFANEWAADIYRRAIERGKRHPHAGRILARAWVDVIWRCWQDRVPYDPAKHRALQRLVLAPAA

SEQ ID NO: 89893 - protein, 343 aa, unidentified
MKLQVLGIDLGKTVFHLVGLDSTGKVVIRKKCSRRQLLAFTANLEVQLIGMESCSGSHFLGRALREQGHEVRLMPAQYVKPYVQTNKSDFLDAEAIAEAVQRPRMRFVPIKTEEQLDLQALHRVRERWVMRRTAVVNQIRSLLLERGLTLPKGRSHVDALLPRILEDAELRLSGCFRVLLAQLKIELEQSTARIEQMDQVIQKTAKENEDCQRLTEIPGVGPVTATALVAAVGNASTFGKGRNLAAWMGIVPGEYSTGGKQKLLGISKRGNRYLRTLFIQGARSVVQQRHKQAPGLSSWLAQLLARAHQNVVIVALANKLVRMAWAVLSKNESYRAPILAAAT

SEQ ID NO: 89894 - protein, 379 aa, unidentified
MPETTRQAECNAARTLYVAFELSGKTWRLAVSTDRGERPRHYSVASGDLGAVQERLARARTWWGLPAATCVVSCYEAGREGFWLHRALTAQGVRNVVVDATSIERDRRAKAVKTDRVDAERLLELLVAWTEGRKRLRTVRVPSAADEDARHADRELATLKGVRTTLVNRITGLLGAQGIPLRLTPARRVDVAALRDWAGAPVGPGLAGRLTRELAELTAVRARIAGLEQARQTAIATAATPATAQMAQLVQLRGIGANGASRVVVEFFAWRGFRNGREVGALAGLTPTPYQSGAVAREQGISKAGNARVRTMVIELAWCWLRFQPTSALAQWYQARFGTGGRRQRRIGIVALARKLLIALWRYLDAGVIPDGAIVTGAA

SEQ ID NO: 89895 - protein, 416 aa, unidentified
MPLALPEARVFTGIDWASAEHAVCVLDAAGKITAQFTIKHSAEGITSLVRRLARYGDPADLPVAIERPCGRLVDLLLEGGHPVVPVSPNAIKTWREGEVLSGAKSGAGDAAVIAEYLRLRYHRLQPAAPYCDETRALRTAVRTRDDLVQMRVAATNQLAALLDAHWPGAKAIFADVESPISLEFLTRYPTPAAARHLGQKRMAAFLVKHGYCGRRPAAQLLARLRDAPPGTTGDALTEALRDAVLAVVTVLRALNGAVKDLDRSAAAHLGEHPDGAIFTSLPRSGQINAAQMLAEWGDCRQAYAGPGSVAALAGVSPVTRQSGKHRGVGFRWACNKRFRRAMTTFADNSRHASPWAAQVYADARAAGKDHPHAIRILARAWIRVIWPCWVNGVPYDPARHGAAAALAEQTSSQSAA

SEQ ID NO: 89896 - protein, 352 aa, unidentified
MSHIIDIMQPTPVVIGVDTHAEEHEAAVLDTTGRMLAHHRFPANDSGYRQLLAWAAGYGPILAAGIEQTGSYGAGLSRHLVAAGVDVREVHDTHRAVKARRGKNDVIDAEQAARKVLSGQAAAVAKDTTGVIEAIRQIKVARDSAVKSRTIALQQIRDLLVTGPDHLRQELAGRTLPAKARALAATTPTGAPGSPEHAAVTALGRLARRVMLLATEIRDADHDLETLVDATAPTLRALTGVGAHTAAQLLVSCGPNNRIHSSAAMARLFGIAPVPASSGKTNRWRLHRGGDRQANRAIYITVITRLAHHEPTKTYRDRRQKDGLSNPDIIRCLKRYVVREIYQALKTDLGWT

SEQ ID NO: 89897 - protein, 331 aa, unidentified
MGIRSRWKPVGGGSSLEADGTRRHERTMTRDLWAMAEWRAAPGVTPVALESTGVYWKPISDILEERFRVLLVNARHRKQVPGRKSDIRDCQGIAQRLQPGLLKGSFMAPRGQREWRDRTRLRTPRVEEKTRTLNRLPKEWEDAHSKLGSVASQVLGVSGRALLQALREGEQDAVKRADFAPRKRRGKIPEREKALQGHVPAHPRFMWKLLGKQLAQQEELIAELEGKIEEQTRPLAHEVERLDAVPGVDRRVAEGVLAEVGADRKPFPTPRHLASWAGMSPGNEESAGKRRRRSITPGNRWLKRSLVQAGSEPCQEHLLGVAVPAPGGTPR

SEQ ID NO: 89898 - protein, 430 aa, unidentified
MSVDRSREQEPLFAAFVGIDWADQKHVWCLQTADSPKRESGELEHTPEAVEVWVAQLCRQFAQGPIAVALEQSRGALVFMLSKYERLHLFPVPSTMPANMREALYPSRSKDDPRDADLLLDLLLKHRDKLRRLSPDTEATRRVQNLVEERRKLVDEKTEQINRLTSHVKIYFPQVLDWFDRLDREAACALLERWPTLEELQKVSSVKLRTFFCKHHCRDQEVIERRIVGIRQAVPAIRDRAVIEAKSAVVKVIAQLIRILVQGIAELDRKIEEQAAAHPDFFIFDSLPGAGPALAPRLLSAFGSQRVRYSSAQEMQAYSGIAPVIERSGKKKWVHFRWAAPKFLRQSFHEWAGRSIAQSQWARTYYEQQRQRGKGHHAAVRALAFKWIRVAFRCWKNGIAYDESMYVATLARRASLRSGSIVALSPAKSL

SEQ ID NO: 89899 - protein, 465 aa, unidentified
MSKGSGSGMTRGDRRRNARRERLRALLPRDGAVVGIDLAEEKQALAVIEHDVRVLARKTVRVKASGLGEALDWAVGQARAKGFDRVTVACEPTGPRWMQVQRLCAERGLPLACIQPLISHIAREQQDYTTHKTDESDCVMIARLAVELHCYIPEELDETWAHLRHLGRRRQQLITAQTASGQRIMDFLSVAWPAVTETCADPVESRTWLAALEVVTARCGADPGTLAAMGREGFTALTRGAVAGWGITRAHGPICARVFAALTDTEGAVTWSRRGLLRRVADELGDLKRTRAQLRQAEADMVAVLDELGLSRLADIPGLTAVGAAAILAETGGPRRYDGSSSLARHAGMSPSDNASGAFSGQAHISRRGRPGLRLTVWRAVWPMLQYNPVMAAKYQAMTRAADAAATEAGPRQGTAAQAAARARRAKARVACAASLLRWIYCMAGCDTSWDPAVASGAASQAKAA

SEQ ID NO: 89900 - protein, 319 aa, unidentified
MKNTNVEFSKEKVFIGIDVSKEDLEFFDSKSKKSIVFKNTRAGHRRIVALSKKLGAERICLEATGGYEKGVLGALLEAGLPACLVNPKRVREFARGHGINYKTDAIDAEVLALYGQQILPNVTVLASEKVRRMSALSRRREQIKKMLTAEKCRLDLADKEVRREIKSHIRYLERQTKKLEEKMRGLFDSSELTEDAAYIESIPGVGAGTSFVLLTGVPETGSISNRSISALVGVAPFTQRSGKWRGREKIQGGRELVRTKLYMAAHNVVLHNPHFTAYFEKIISRGKPYKVAMVAVMRKLLCLCNTLVKNKTKWDPSLA

SEQ ID NO: 89901 - protein, 437 aa, unidentified
MNVPAPLTDFADRKEQREKGAPDASDYERCAGIDVHKKNVVTTVMITHADGHVEEHVRSYPTMTAHLRALDEWLRKLQVEVIAMESTGMYWRPVYNVLEEGRTVILVNAQHMKAVPGRKTDVKDSQWLADLFRHGLLKASFIPPAPMRELRDLTRYRKTVVQERAHEVKRIQKVLETANLKVASVVSDVLGKSGRSMLEALVAGEQDPEVLTALARGRLREKRPQVREALHGRMQSHQQELISRILSHIEFLEAALVKLDRQIETRLVPYAQQVALLESLPVKMQKATAVVIAEIGVDRSRFPSAKHLASWAGLCPGNRESAGKRLSGTSTQGNPYLRAMLCQLAWALVRTNDNYLSAQYHRLARRRGKNRALMAVAHSVLVIIYHMLKTNKPYAELGADYFETLDRERLERGAIRRLEQLGYRVVLTPKDQDEEAM

SEQ ID NO: 89902 - protein, 405 aa, unidentified
MTIPTQVSQSPVSIYSPKSVPLQGAAFIPRDYDVFAGLDVDHHSIAATFTDHDRLLQSLQLSYSAAQLLNYVQKHFPQQRLAFVYEAGPTGFGLYDELVAAGHPCLVVAPSMVPTAPGQRVKTNRLDSKKLSTALRGGELKSIHVAAPKYRELRHLVQLRDTHVQQLTATKCRIKALLLYEGIAFPSDAGKEKQWSARVLDELLELPCSETVRFKLDQLVGTLHFNFNAAAAAQKQLHHYCKKDAELRQSIAWLKSLPGIGEIVATHLVARLGDPALITNVRQIAGFLGLVSSEHSTGDKQNRGEITRAGDSRLRNKLIQSAWVTIRKDPELRAFYRRIYARHPQKVAARKAIVAVARKLTTRIYAVLKEQRPFVLREVSTAPLTAEETAGPGNASTVNRTNSVS

SEQ ID NO: 89903 - protein, 383 aa, unidentified
MHASNICTPIADHNGTIFVAIELSQKAWLAVIHSPDRNRMSRHKLEGGDHAALLALVEGVRVRAARVLGREPAVVSCYEAGYDGFWLHRRLEAAGISNFVFDPASIAVEQRSRRAKTDRIDGELLLRTLMAHCRGEPRVVRIVRVPSRDQEDVRRGSRERQRLVKEQTAHTNRIKALLRTLGLAAGNPRRRDWLKWLAEQRDWEGEPVPPHYLAELKREHARLMLVVEQLGELSRAPELTHVSAAAARMAEQKACLRRLKSLGPAFAGTLVDEAFYKDFDNRRQVASYFGLAPSPWRSGRTNREQGISKAGNPRARQQAIELTWLWLRHQPDSALSQWFRQRTAGASARIKRIAIVALARKLMVALWRYLTTGLVPQGAVIKG

SEQ ID NO: 89904 - protein, 330 aa, unidentified
MESKYIGVDLHKAFFQACALTATGDRLWEGRFPRTAEGLAAFSVRCGTETRMAVEATGPTWSFVDALMPTGAQVCVVDPRKTRLKAGYAAKTDRLDARRLADALRRESVVSIYVPPPAIRELREVCRGRHQVVRIRARVLQMIRALLLRAGLGDPPVTRLSSPRGVAWLQAVTLPPDAERTLRRLVRVLQAVHLEALEAEAVVAERAQADPIARALDTLVGIGPVFALTIRGEVGDIARFRGGPELASYAGLVPRVDSSADRYRSGRITREGSPWLRWALVEAAMHAMKRRDRVGRWARQLAVRKGGFKARVALARVLCEDIVRVWPSNA

SEQ ID NO: 89905 - protein, 342 aa, unidentified
MEISTIGLDLAKSIFQVHAINAAGEVTVRKALRRSQVLPFFTKLPPCLVGIEACGTSHHWARELTRLGHEVRLMPPAYVKPYLKRGKTDANDAEAICEAVARPTMRFVPVKSLEQQAALALHRTRDLLVKQRTQLVNMIRGLLAEFGIEMARGLHHALELARRVADGRAPDVPELAQRVVTGLAHQIGSLQAQLAILEKELLAWHRSNELSQRLATIPGVGIVSATALAASVTEPERFRSGRQFAASLGLTPLQHSSGGKERMGRISRMGDRYLRRLLVIGMTSLIRRARTAPASVDPRIPAMLQRRPARIVTVAAANRTARVAWAIMTRGGTYRKPTMAAV

SEQ ID NO: 89906 - protein, 323 aa, unidentified
MNKDIKYFGLDISHLVFDVTDSDGNYYQFKNNVSGFKKFVKLLNCDSHCVMESTGYYHYQLAYYLLENDIKVSVENPLAVKRFIQMKLSKIKTDKSDSKLICDYAVQVDLKLWKGNTKDEMECLQITRALSVYTKQSTMLKNKLHGESVLGNPSKAVVSSLKRSLKQLEKEMEKLEDKLLILVKQAHQDLLTRLKTIPGIGRKTAIMLVVLTGGFDRFSSASELCSYAGLTPIIRQSGSSVKGRPRISKIGNQKLRNLLFMCSFNACKYNKACRDLYERIVAKGKSKKLALIAVCNKLLKQAFAIAKSGLIYDETYRSTLVKN

SEQ ID NO: 89907 - protein, 410 aa, unidentified
MNGRQEGQDGEARFGGVDWSWERHAVCIVDGAGAVVERFEAEHQAVGLQAMVRRLRRAGVGRVAIERGDGPVVEALLAGGLQVVVVSSRQVKALRLRYGTAGNKDDRFDAFVLADVLRSDGHRLASLTPDSSATIGLRALVRARKDLVKHRIALGNQLRANLLTAFPGAVGLFAEIDSPISLTFLTRFPSADRAAWLSDKRMAAWLAGVGYCGRQTPEQLMAHLRAAPTGLTGPAGAACATVTEQLVATLVDLRARIDTLDERIAESLALHHDAAVFTSLPRAGINRAALLLAEIGDCRARFPDDTALAAAAGVAPSTRASGKKHHVAFRHSCDKKLREALIDFAADSRQASPWAADIYQRARDRGARHPHAVRILARAWCRIIWRCWTENTAYNPARHGGLQQLLTAQG

SEQ ID NO: 89908 - protein, 456 aa, unidentified
MKIPQSTIRLLTGRLVKILLNREVSTMKSNTQNAKIEAITEKTLVLGIDVGSETHYARAFDYRGIEYSKKPFKFSNTEAGFVTFKEWILDLKERHEKDKVVPGMEPTGHYWFNLGKFLQDNEMKPVLVNPHHVKKSKELDDNNPTKNDRKDPKVIAGLVREGRYMIPYLPDGVYADLRTASNIRFQLQAELTRIQNRISRWFNIYFPEYKTVYGKPDAKSGMLILKAAPLPEDILTLGIDGVNQIWRDAKLRAVGKARAKTLIEAAEHSVGSKEGAVSARMEIRMLLEDYESRNIRLQEVMTLIEGLVKQIPMAEKLLKIKGVGIKTVSGFLAEVGDISRFNTPKELQKLAGLALVESSSGKHKGETTISRRGRKRLRYLLFEVAMSLVAKNPEFRELHNYYTTRRLNPLKKMQSLMAIAAKLIRVFYAMLTKGVDYDPKKMVSDIKRPAVYLQAA

SEQ ID NO: 89909 - protein, 400 aa, unidentified
MNSVGIDISKGRSTVAVMRPFGEVVISPFEVRHTDSELSELARQLKSLDGEARVVMEATGNYHASVAKLLHDAGLYVSVVNAKLVHDYGNNELRCIKTDRKDAVKPANYGLDRWLTLPRYIPEEDTRLLLKNCYRQYRQYSKVQTVLKNNLISLLDTVFPNANRLFSSPIRGDGSEKWVDFVAEFWHCRCVSEKSERAFTSKYLRWCRKHGYNFREAKAHTIYAEASGHIGVMPKSETTKLLVEQAVAQLRATSTALAALKHEMQSLASMLPECPVVMGMFGVGPTLGPQLIAEIGDVRRFYSKKALVAYAGLDAPPNDSGDVTGRHKSMSKIGASSLRRTLFLVMSVYAPLDEPVYQFMDRKRAEGKPYRVYMMASANKFLRIYYATVKAYLESLEHTA

SEQ ID NO: 89910 - protein, 309 aa, unidentified
MMYAGIDVSKGTLDLAVHGGPGTSFANTEAGIQQLLAALPRVTLLVLEATGRYHHSVTAALVAAGHPVAVVNPRQVRDFARSTGQLGKTDRLDAALLARFAAVVQPPVHALPDAATQELAELVARRRQLLEMRVAEQNRLEIRSKRIRKSVHRTLRMLDAELALLEHDLDDTIRQSPVWQATADLLQSVPGVGPQTARALIAELPELGRCTRREIAKLVGVAPHPRDSGTYRGARHCWGGRAAVRAALYMAAVTAARCNPVSRGLYQRLRTAGKPAKVALVAVMRQLLTILNAMLKTNQRWQPPLATTA

SEQ ID NO: 89911 - protein, 405 aa, unidentified
MMVIGVDAHKRSHALSAVDEGTGRVRGSREIKADEAGHQAAVRWARGLDSERVWAIEDCRHVSRRLEQALLAAGERVIRVAPNMMGASRRSQRERGKSDEIDAQSVARAVVKDGVESFPAAYLDERAMEIRLLFEHREDLVRERTRMQNRLRWHLLELCPEVEAKLKRGALSQLRALERLDRRLRQLSPCVRLRIAREELGHIRALTRQADQLERELLELIRAYRPALLDEQGCGALTAALLIGRTAGAERFRSDACFGRQSGTAPIPCSSGQQTQHRLDRGGDRQLNRALHTIAITRAQRDPATKEYLARKEADGKTRKGALRCLKRYLARRFHRLLSEPPLPAQPTITGEQVPQPAQALDAPACDASRDMSRTVQPSAIAERPAPKPETQRINAAPNPMICIA

SEQ ID NO: 89912 - protein, 398 aa, unidentified
MRLKAHPRLADFCPFLARLLDVGAILFARPQSFMEWPAPPSGVVGSPANQEEEGMDISVLGIDLGKNVCSVVGLDASGAVVMRRKVRRETLIALAEKLPPCVVGMEACCGAHHLGRVFAAHGHDVRLMSPEYVRPYIKAQKNDDRDAEGIAEAATRPTMRFVELKSQDQLDMQTLHRSRDRLVGERTALINQLRAILLERGMVAPQGKRKLEQFLAVLMDEQGGAGLSPRMIVLVADARTQWAEIDRRIAAFDAEFVRWVKENEEARRLMTIPGVGAIVASALVAAVGQAESFERGRDLAAWLGLVPRQFTTGGKPKLLGISKRGNKYLRRQLIHGARAALPYVAERDTPLGRWAKGLASRAHRNVAIVAFANKLARIAWAVLRRGERFAVTGMPVAA

SEQ ID NO: 89913 - protein, 347 aa, unidentified
MSITMIGLDTAKAVFQVHAIDGAGKAVMRRKLRRSELIPFFEQQEACTVVVEACGAAHHWARLLGGLGHEVRLIAPEAAKPFVKKGKKNDAADAAAICAAASRPEAKFVPVKSLEQQGTLALHSARSLLVKQQTMLANALRSLATEFGLAVPQGIGRLDELSALVAADETVPEPARQVFARLLEHCRATAEGVEALEAGIVAHARQDDTARRLATIPGIGPITASLIAATVGDIGAFESARHFAAWLGLVPRQRSTGGRTRLGRITKTGNREIRRLLVLGATSMVYRAEHWSSAAGAWTRGLLERRPVRLVTVALANKMARIAWALMTRKEVYRAKGRAAAAAEVAA

SEQ ID NO: 89914 - protein, 403 aa, unidentified
MNPNDSTNTNDQTDPSAQPPQACIGLDWGDQKHSFALQARGGPIETGVLEHSAENLHRWLKELEQRFGGRPVRLGLETSRGAVIAALRHYPWLEIYPINPVTSSRYRSAFKPSGAKDDLPDALVCLELARDHAAKLRPLQLQDPQTLKLAGLVEARRDLVDRRTTLLNQLTSLLKSYYPQALALLENLNTPLAVAFLKRWPEVISLKAARPAAVKNFFYQHNVRSEELVKKRLALIAQAVALTTEEARVSVAVLQLRALVDQLEVFQKHVARMDAEIKSAFAAHPDAALFRDLPGAGAQMGPRLCAAFGTDRAAYPDPASLQKYAGLAPVREKSGGQLWTHWRWNAPRFCGMGGPDRALLRVGAGLLRTHEQERQKARGDSPRTGIQMDSDSVEVLARANCLR

SEQ ID NO: 89915 - protein, 371 aa, unidentified
MPMMQHRYIGLDVHQASISIAVADEDRVPTSYGTIPNDPSAVRKLIARLGGCDVRLHVAYEAGPTGYGLYRQLSGLGIECMVVAPSLIPRQPGNRVKTDRRDALKLARLLRSGDLTPVWVPDQEHEALRNLVRARADAKVDQLRAKHRLSKFLLRQDCRPPLGVRNWCKRYLAWLHQLVFEHLADRAVFADYLAEVTAATERVKRLEAALRQCAQTTRQKRLVDALQAIRGIGFLSAVTIVAEAGELRRFPTAAQFMGYTGAVPREASTGPTHHRGRITKTGNRALRHVLGEAAHHARRAPCLSDQLKRRQKDVPQAVVDLAWQAQLRLHARYRHLSARLGPPKAIMAVARELAGFVWAVGQALPEASATA

SEQ ID NO: 89916 - protein, 314 aa, unidentified
MSAPIFVGIDVSQAQLDIAVRPGTRFSAANDEQGIVTVVEQMRTLAPILIVLEATGGLEVPLTGALATIGLPVVVVNPRHVRDFAKATGKLAKTDALDAQILAQFAEVIRPATRPLPDEQTQALAALLTRRRQLVEMLTAEKNRLSTAPKPIRKSVRAHIAWLERELRHTDTDLAQTIRESPVWRDKDELLRSVPGVGPVLTTTLLANLPELGTLTGKQIAALVGVAPLNRDSGTLRGKRTVWGGRAQVRTTLYMAAIVAARFNPVIRAFYQRLRAAGKAKKVALTACMRKLLTILNAMLKHRTPWCAEVAQHA

SEQ ID NO: 89917 - protein, 348 aa, unidentified
MHIAVLGIDLGKNSCSVAGLDASGRVVLRRRLHRDSVVKLASRLPACVIAMEACCGAHHLGRLVQAYGHVIRLMSPEYVQPYVKAQKNDERDAEAIAEAATRPTMRFVDLKSEDQLDMQTLHRARSRLVGQRTALINQLRAMLLERGIAVAQGRHRLARYLAQALDDGNAEPVPLSLRIRLLIEDMRAQWSELDRRIASFDAEFVAATRSDEAARRLSTIPGIGALNATALVAAVGDARSFARARDLAAWLGLVPRQATTGGRPRLLGITKRGNKYLRTLLIHGARAALPSLATTEGALGNWLRGLSARAHRNTVIVALANKLARIAWAVLRSTAIYSARISDRPTAV

SEQ ID NO: 89918 - protein, 321 aa, unidentified
MFKYNQIFGVDISKDVFDVMSSQGKHFKFKNSSKGFNQLTKHLTKKDLIVMEATGYYHYCLAKYLYDLGYTVSVVNPLAVKRFVQMKLSKIKTDKSDALAICQYASLNEVPIFTSKDSNQAECVQLMSLIEIYLKQRTALKNKLHGEKILGKPSKTVYHSINRSLKVLQKEIQLLENRLLELVKSHQQKQLTLLKSIPGMGTKTAIILIVLTDGFTKFENAKQLCSYAGTTPTIRMSGSSVRGKSRISKMGNQKLRNLLFLCAFSACKYNKACRELYERIVAKGKSKKLALIAVINKLLKQAFAVAKSGLFYDENYVSNLS

SEQ ID NO: 89919 - protein, 341 aa, unidentified
MNIVTVGIDLAKNVFALHGVDQSGKAVFVKPKVARGQLLETVANLPPCLIGMEACSGAHYWAREFSRFGHTVKLMAPKFVAPYRMSGKRGKNDAADAAAICEAVTRPNMRFVPVKDIDQQAILCLHRTRQGFIEERTALYNRLRGLISEFGIVLPQKVERLRREIGAHLEALPGWANRCVGDLLMHADRLNERIDEYDKAIAQAAKQDQRSRQLMQLPGIGPTTASALVASLGGGHDFKNGRQLAAWAGLVPGQYSSGGKARLGRITKAGDAYLRSLLVMGARSVLAGLGEKQDRFSRWARALVERRGYWKAAVAIAAKNLRLAWAALHYGEDFRLIEETA

SEQ ID NO: 89920 - protein, 344 aa, unidentified
MSEATQLKRFSQSPDPDALYAHLVRNYPEAEYYSVYEAGFCGFWIHYRLVGLGIHNIVVNPADVPTTTSEKLRKTDAIDSGKLARSLRAGELKGIYVPGSESLEIRSLIRLRDSITKDQTRLKNRIKSHLRYLGTEIPEEFSGPGRCWNRRFVVWLKGAETGTAYGRQTLDFLVRQYEALRGQRLEMLRAVRALSRTERFEKPLENLMTVPGIGQLTGMSLLSEIDDIRRFKRADQLAAFIGMIPMCHSSGISSDSLPGTYIPFSGEREGVGDITVRRSARLRSVLVEASWVAVRQDPALSMAYGSYCKRMAPGKAIIKIARKLVNRIYFVMKRNQPYVKCVVA

SEQ ID NO: 89921 - protein, 424 aa, unidentified
MKVTFQTCCGVDVHKSFLVATIVKTTGGIEPSYQKKRFSTFNNSILEFKQWLLDNDCHDVCMESTGKYWVPVFNLLEDEINVVIANPKWVKAVKGNKDDTKDSKWIGDLFRLGLVKGSYIPCKKVRILREYTRYRYKLVSCRSSEKNRYQNALTVCNVALDSVVSDIFGKSSTSIIDYLLEQSGSSINHEEIASKLLRSLKSKEDAVIESVEGYQMTDAQKYRMRLVRAHMDYITAEINDVDKMIENMISSNTDFENAVQFLCTIPGVKRDSAITIISEIGTDMSQFSSSRRLCCWAGLTPGSNESAGKKKSVRITRAGVYLKPALVQCAHAAVKSDKSPYYKKKYESLVKRRGKKRAIIAIARMILTAIYQMLSTGEQWNPSDLYKIDMPVALVEKQKAKAIKQAKKLLQREGLLPPDEPFAS

SEQ ID NO: 89922 - protein, 351 aa, unidentified
MDTLTRNNVNSDNVFVGVDTHKDSHTAVIVDYYGVKLDTLVIDTNTKGFKYLDEWASEHGSIRSFGIEGTGCYGKNLAEFLSNRNYQVIEIDRVNKQHRRRHGKTDETDAHAAAKAVASGQQTKQFKQTSGDTEIVRVIQLSRNSAVKTRTQVTCQIKSLLVTAPETIRKELSGLTTLKLVSRAANWRPANHLLSVTGATKHAIKTLAKRWLSLNDEIKQHDQDLKQILEKKAPKLLKLQGVGTDVAAKLVLAAGSNPQRLKTEAAFAALCGVSPVDCSSGKQQRHRLNQGGNRQANNALHTIAITRMNHDPQTKKYVTKKMSEGKTRKETIRSLKRHIARQIYKQLKQLT

SEQ ID NO: 89923 - protein, 455 aa, unidentified
MFRLVGSAQPLPVSITRLLLLRRSETALRGEVYMNFCPVAGIDVSKSFSDMCILSPDNKIFAQEKIYHDETSINRANALLQKAEQIFSSKPVIVMESTSHYHLILFQFFSEHGYDVIVVNPLQSSSMKDFAIRKRKTDRVDAFKLAMLYRTKTLHPSQIPQAAMRALRQLCRERVECLNDVTSYKNRLTAFLDQAFPGYDKIFSDVGGITSCAVLVHFPTPAILLAAEEAELVEVIAAASKSGYGFAKKKAELLISAAQKAQTLGIHSCADETLIVCTIQMLRTLSESVFQIEKAINNLLAQVKEVRNNVSLLQSIPGIGSHSAALLLGEIGDFTLFKKPKQLAAYFGLDPSERQSGTFRGTKNKLSKRGSPYARAALHMGVVNAICKHGKKTAPNPVLLSYYEKKCKNKPAKVAQAASMHKLVFIIFAVLRDQKPFELKTPEQHAFEQGFVKAA

SEQ ID NO: 89924 - protein, 355 aa, unidentified
MNDIKYIGLDVHLASISIAVLNAAGKLIMEVTIESQAAAVLDFMGGLRGALHVALEEGTYAEWLYGLLAPRVAQIVVCDPRQNPRRLGEKKSDRLDARKLAEGLRLGTLKPVYHGHPQGPALRELARSYRTLVSDTTRVMNRLKALYRGRGIRCAGTRVYSPRFRPQWLEQVKEPGGRCRAELLYQQLDLLLPLRHQARAAMLAESRRYAAQKILRSIPSLGPVRAALLMAWLKTPHRFRGKRQLWTYAGLALVTRSSADYRVVDGELERSRRRALILGLNANHHHELKALFKAAAASALARPGPLQAFYARRVAQGMKPELARLTLARKIAALALTLWKKGERFNVAHLKPQAA

SEQ ID NO: 89925 - protein, 374 aa, unidentified
MQKKLRFLGLDVHAETIAVAVAEADGEVRSLGVIANRAESVRKLIRKLGSGEELRACYEAGPTGYVLYWQLAELGVQCDVVAPTLVPTKSGDRVKTDRRDAVKLARCHRAGDLTAVWVPDGGTEALRDLVRAREAAKQDQLRARHRLSKFLLRTGQRPAAGLKAWTQLYMAWVRQLRYGQPAQEFTRLDLLHEVEHMAERVRRLEEAIREAVKLAPAAMQAVIRDLQALRGIAEISAVTVVAELGQISRFDSPRQLMGYSGAVPSEASSGKRQQRGSITKTGNAHLRRIAIEAAWSYRLKPGVGPALRKRQEGVPEEIKEIAWKAQLRLHKRYARLAASGKDQRKIITAVGRELLGFLWAIGVKTETASQAMAA

SEQ ID NO: 89926 - protein, 343 aa, unidentified
MGVFAALDVSQEETAICVVRPDGALVAEAKVPTCPDAIADWLTESADGLERVGMETGPLAVWLWNALTARQVPIICLDARHASGVLKMMPNKTDRHDARGLAQIVRTGWFKAVQIKSHDAYVNRALLTAREALVGMRVRLENEIRGLLKTFGVMFGKKVGGFMRRAEEIIARDLTAAPELVPIFEALMQARRDILARIAALDSQIRATARQHATVRLLMTAPGVGPITAMAVVAAFDDAARFRRSSSAGACLGLTPRRYGSGEISRNGRVSKRGDRFTRKCLYEAANALLCRNLGDTRLRSWAKAVAERTGPRKAKVALARKLAVTLHAMWRTNTPFREAATA

SEQ ID NO: 89927 - protein, 358 aa, unidentified
MPMLANVVDAVVGVDTHRDTHHVEIALPTGSPIAACSISNDTRGYAQLLAWIADHTPGPRLVVSIEGTRSYGLGVARALTAAGLAVIECEQPTRNNRRGRGKSDPIDAHLAVLTALRLDVERLPTPRADGDRDALRILLSARHDLTVATTAQTNRLRALLRDGDDGDRQLARGALTDTVLAGLARRRPPRDATRAQAVRQAEIRRLALAVRDTGRALKTNRAQLQAIVDELAPGLTDRRGIGAVSAAQVIISFSHPGRCRSEAAFAALAGASPLPASSGRTMRHRLNRGGDRALNRALHTIAMTRMNTCPTTQAYVARRTAQGKTPREIRRCLKRYIARELYRALTSTMTTTGASTRA

SEQ ID NO: 89928 - protein, 408 aa, unidentified
MQVLHPICCGIDVHAAQLTACLRRVSDDGQIRTELVNWGTTYRELLALRTWLQEHQCPVVAMESTGVYWKPVYHVLSEAVEVYIANSHEVRQRPGRKTDPRDATWLAELLAHGLIKPSFVPPPEIRALRDLTRIRVSLVQTRTQAKNRVYKILEDTNVKLARVVSDVFGKSARRMLDALVAGERDTAKLSALALGSLRRKIPQLEVALEGQFTTHHATLIAGALELVDVLGRQIATIDHQLQELLSPMTPQLAQLKSIPGVNAITARDILAEIGLDMPRFGSASRLAAWAGLSPGNNESAGKRRKGRTRKGNRYLRRVLVQCAWATRKTATFLGRTFRRLEAHLGSKKAAVAVAHKILVIIYHLLLEGTLYEEERYDRLLPGQEERERKRALKALERLGYTVTLDKVA

SEQ ID NO: 89929 - protein, 411 aa, unidentified
MDKFRGRVAGLDVHKKTVVACALTLEPDGSVVRSKGSFSTTSNGLVELAGFLDRAGVTTVAMEATGVYWKPVYYSLEGMFDELWLCNAHHVRNVPGRKTDVSDAEWLADVAAHGMVKPSFVPPPDIRELRELTRYRKTQISERGREIQRLEKVLQDAGIKLSSVTSRVWGVSTRQMIEALIAGERDPEILAEMARSTMRSKRPQLAEALSGRFGPHHATVARQIIAHIDFLDGSIAALSADIASRVAPFEQAVKVITSIPGIATLTAETIIAELGVDMSHWPTGGHCCAWGGLAPASHESAGKRKPVGTRQGGNWLQKALIEAAWSSVRSPGTYHNALFKRIARRRGPNKAIVAVAHSMLNTIWHLLSTGELYQDPGADFYDRLDNPAREAKRLTRRLETLGYTVTLTPAA

SEQ ID NO: 89930 - protein, 441 aa, unidentified
MPMRKREDDEVFPNAAGIDVGGSSHWVAVPRHADDEPVREFGAMTDDLNAMADWLLACRVDTVALESTGVYCIPVYEVLEQRGLTVWLVDARQMKYVPGRKSDVQDCQWLQKLMSLGLLRAAWRPGDEVCVVRAVVRQRAVLLTEQSSWVLRMHKALVQMNIQLAEVLSDIMGASGQAIIRAIARGERDPQVLAALRNARVRRSEEDIMRALQGNWREEHLFVLVQSLAMYDSLAQRVLECDAKIEALLVPLKRHEIELTGATKRGSPNPLGFNARLALASWAGVDLTRINGISEGAALTILSEVGPDLSRFASVKHFCSWLSLCPGTKISGGKLLNARTRRSANRVRQALKMAAMSLARNDSALGAFYRRLCTRMDKPRANTAVAHKLARMVYFMLKRGEAFVDQGQQRYEEQQRQRSIAALTRRASALGFRLEPATTPA

SEQ ID NO: 89931 - protein, 355 aa, unidentified
MATKARKVTGGVDTHGQTHHAAVIDALGRQLADRQFPTTPRGYRALLSWLVNFGQLERVGVEGTGAYGAALSRYLRSEGIDVVEVDRPDRKTRRTRGKSDPVDAYAAALAALSGRAAGIPKSRDGQVEAIRALRVTRRSAVKARTQAINQLRALILTAPAELRQQLRDLSTGRLLDTCARMCPTGDLADPVQATKAALRRLARRHQQLSEEIRELDAELAPLVTATAPDLLALPGVGIHVAGQLLTTAGDNPDRLHSEAAFAHLCGVAPIPASSGRTNRHRLNRGGDRAANTALHTIALSRLRWDPRTRTYLARRRQEGLTKPEAMRCLKRYIAREVYRKLINAPHHTKDKPTAA

SEQ ID NO: 89932 - protein, 422 aa, unidentified
MSYCPVAGIDVSKQFSDMCILSPDNKIFAQEKIYHDETSINRANALLQKAERLFFSKPVIVMESTSHYHLILFQFFSEHGYDVIVVNPLQSNSMKDFSIRKRKTDRVDAFKLAMMYRTKTLRPSQIPQTATRALRQLCRHRAELLNDVSSYKNRLTALLDQTFPGYDKVFSDVGGVTSCAVLVRFPTPTILLVEEESELVEVIAAASKSGYSFAKKKAGLLISAAQKAQTLGIHSCADETLIVCTIQMLRTLSESVLQIETAIDNLLAQIKEMRNNVSLLQSIPGVGSHSAALLLGEIGDILLFKKPKQLAAYFGLDPTERQSGSFRGTKNKLSKRGSPYARAALHMGVVNSICKRGKDSAANPVLLSYYEKKCKNKPAKVAQAASMHKLVFIVFAVLRDQKPFELKTPEQHAVEQGFVKAA

SEQ ID NO: 89933 - protein, 342 aa, unidentified
MSIVYVGLDLGSSNFQQVALNHAGVSTVNRDFSTSEANLVKAFSDLKGEIHVHLEAGELAPWAASVIAPLVTRVVCSHPQSNAWIAKDADKCDRIDAYKLAELLRLNRFKEVHYAPDQPRRNFKQLVQHYDELTAQQARLKTKLKARLRMQGVIVTGERLFSATGRKEVLVRVESRDLRAAIKQLYEVLDQSVAAQGQARLLMLRAAQAFPEIKLFRTAPGVGPIGACRFSAYIHTPSRFSSKRKLWKYCRLSVSHRSSNGKPLRRPRLDRSGCGRLKDVSRKAFDVAIRSRQDNGFKRTYQRALETTHDKTHARLTVQRKIVSTLRAMWLRRTPYCDELTR

SEQ ID NO: 89934 - protein, 455 aa, unidentified
MPRRRPSTRPVTMPILHPDAGGIDVGATEIYVCVPLDRDPQPIRRFGTFTEDLHALADWLTRCGVTSVAMESTGVYWIPLYQILETRGLDVCLVNARHVKNVPGRKTDVQDCQWLQYLHSVGLLRASFRPPETVCAVRSLLRHRDTLIQLAATHTQHMQKALNQMNLQLHHVLSDITGVTGLAILDAILAGERDPQVLARHRDGRIKASRETIAKALVGDYRPEHLFTLRQSLASYRHYQCLIAECDGEVETLLGTFASQIDPAAHPLPPAPPGRRKPHRKTPPFDLRAELYRVLGTDLTQVPGLQTPTVHTLFAELGADLSAFPSGDHFASWLGLCPDNRISGGKVLSVKTRHVKHRVAQALRLAAQSLSRSQSVLGRFFRRMRAKLGAPKAITATAHKLARIVYHLITTRQPYQESRLAAADAAHRRHSESRLRAQARALGFQLVPAPEQAVS

SEQ ID NO: 89935 - protein, 343 aa, unidentified
MKRITVGLDLAKSIFHVVGINEHGKQLFRKRLRRAQVTAWFAQQPPCRVGIEACSGAHYWARSLQALGHEVKLVAPQHVKAFARGQKNDYNDATAIAEAVNHGSIHFVPIKSAAQLDLQALQRLRSRLIRERTGLSNQLRGLLAEHGIVLPRSLRVLHQRLPDLLEDADNGLSSLFRRLLNLGWQHFLQVEAQVTELNRELAHAVQQDEACQRLLTIPGFGPVVASGFSIAVGDGGDFRRGRDVSAALGLVPRQHSTGGKPKLLGISKRGNGVLRSHLIRGARAVLIQAEGKPDALSQWALKVRAERGFNKATVALANKLARIGWAVLHQQSTYQPRHHPQAV

SEQ ID NO: 89936 - protein, 360 aa, unidentified
MKHYVMKYYSSTTEFNCGIDLHAHQMYVCLMDRQGNKLLHTNIRNNDFDYFLTRIAPWRHDLTVCCECMFGWYWLADACQAAGLKFVLAHALYLKAIHGGKNKNDRIDSEKLAHLLRTNLIPPAYVYPADRRPLRALLRQRIYYVWSRADLLARIQSHQLAYNRPALRQTRPNRDPWEAQLLAAEPDPVRQLALHNDLAMIRHYDTQITALEEELHRLTKQTAPRDYALLQTVPGIGEHLGMTILYEIGNLERFPTVKDFLSYCRLVKGTVASAGKIKGLRGAKLGNPYLRWAFGEAAIIAKRDHAVIGPLAQRLEAKMGGNKFKANTVLAIKLARSVYFMLREHTVFDPDRLVAALTRN

SEQ ID NO: 89937 - protein, 476 aa, unidentified
MARSKKARPDLALIPMLAHETIYIGVDVGKFRHVAGFLSRTLLQRHGHFEGCPTFTFEQSREGFRAFVDHIREYTPLEQATVLLEHTGHYHKNLEQYLLELDITVYRIHVQERPKGMMKTDKRDALGLANRLYTQLELGAQVADKMQLVRRSVPPTKAAAQLRGLTQHRYELSHHSTQLRNKLTSIIDELFPEFVQVFRDPNLPTALAFREALPTPHVLATANLSALRELRRSNFPSEAQLLHLQQLAAQTIGIKDVDRLRGLLLEQQLLIKELRLVQEHLEVLLTEISDIVTNCREGQILLSLPPIGPIQAATIIAAIGTIANFEKASELKAYFGWAPRRDQTGVSFDQTKLARRGVRPVKQMLFLMATRATLLDCEWARIYQRLLPRMATYDERIKGYRGKLKVIGRIAGQMASMIFALLKTDQELLSQVPPGQKPPPPMLYDPEIHRSHQEGHYRSLKPGIQPRKIIQLPKLS

SEQ ID NO: 89938 - protein, 347 aa, unidentified
MLHAGLDLSRKKVDVCLLSEQGEQLAQLVSPPDADALRSLARRIAESYREPVCAVIESMTGARFVHDTLEQAGWAVEIADAQKVKGLAPLACKTDKIDSLVLAKLSQRDLVPAIWLPDPRVREERELARFRLHLVKHKSALKNRVHSTLINFGKPCPVTDLFGVEGRRLLERLQVPEPWRGNVAASVVLIGDLERQIAEANCRLKHGHADHPYIPLLMSAPGIGWVLAFTIAAEIGEIERFPSPEQLAGYTGLCPRVNQSGEKDRRGPLTKHGPRYLRWALLEATMHALKHPAYAERYQRNKHRLGKQRGAKVAQIDIARRLTHAIWHMLSRNQQFAPRGAAFRLAA

SEQ ID NO: 89939 - protein, 423 aa, unidentified
MKVVYPICCGVDVHKRFLVATIITSKGITPHYQKKRFSTFNNAILQFKSWLLDNNCRDVCMESTGKYWVPVFNLLEDSINVTIANPKWVKAVKGNKDDTKDSKWIGDLFRLGLVPGSFIPNKSIRLLREYTRYRFKLVSCKSSEKNRFQNAFTVCNVALDAVVSDMFGKSASSITDYLVNSDSFDPQYCVSLLQKSLKKKADAVIESIEGYQMMPEQKYRVRMIRNHLDFIQQSINKLDNMLNVLAAPFESYIQLLCTIPGVDRTSAIMIISEIGTDMAHFSSSKRLCCWAGLTPGNNESAGKKKSVRITRAGVYLKPALVQVAHAAVKSKDNSYYRIKYERIIKRRGKKRAIIAIARMILTSIYHMFSTGETFNPSDLYKVDMPLELRDKQKEKALKKAAKLLITHGLIQETDIPGLPLQPT

SEQ ID NO: 89940 - protein, 476 aa, unidentified
MEAQKQGARRPDERSWHEMNRKQRREIARRIQSEDLRLEVVHPDAAGVDIGNESHYVAVPATRDRQPVRRFGCTTAELKDMATWLKQCGILTVALQSTGVFWIPVYDILEEAGLEVYLVNARDTKNLPGRKSDVQESQWLMKLHTYGLLRNSFRPPQEVRRMRTYWRQRNDLVRSAGRQIQRIQKALTQMNLRLANVLSDVSGVTGQAIIKAILTGERDPRKLAAFRDKRVKASEEEIARGLEGNWQEDLLFMLKQEQEGYEFCQKQIAECDARLEQYLQQTPDRSQGASLPEEKRKGRLQKKAKNPQFNLRTALFRITGTDLTQIDGIDVRTAATVISEAGWDMSKWENENHFVSWLRLCPDNRISGEKVIGKGRLRTNNRLATALRMAASTLRESDTYLGAQFRRLRTRLEAPVAIKAMAAKLARLVYRMLRYGMQFVDRGAMFYDARHRQRQINFLRRKAAKLGFQIVLAPAS

SEQ ID NO: 89941 - protein, 318 aa, unidentified
MAQEPYALFLGIDVSKRQLDVAEGEQGAYWHEPNDAAGIARLVVRVQPLRPALIVVESTGGLERPVLLALIQAELPVALVNPRRVREFAKSIGQLAKTDKLDAHLLARYAAAVHPPVTQLSSPDEQHLSALLARRKQLLDMLTAENNRRATAPLTVRTGIEKHVEWLKTEIAQVDKEMQDFQAQDEARQKKEAMLCSAKGVGPITARTLIADLPELGRLDRKQIAALVGVAPFNNDSGGWKGKRRVQGGRQSVRRVLYMAAVVASRFNPVIRPFYQSLIQRGKAKKVALVACMRHLLVILNAMIRTGQPWRVRTPLPA

SEQ ID NO: 89942 - protein, 345 aa, unidentified
MQVTTIGLDIAKRVFQAHGVDEAGRAVLRRKLQRVEVLTFFRGLPPCLVGIEACGTAHHWAREIRALGHEIRLMPASYVKPYVKRGKTDAADAEAICEAVTRPTMRFVPVKTPEQQAVLMLHRTRDLLVRQRTMLVNALRGHMAEFGVIAPQGISRVTDLLAVLLGEDEAVLPMLARQALRGLAAELESLGERIEATEAAILTWHKGNETSRRLATIPGIGPITASALVASLPDPTRFRSARHLAAWIGLVPRQNSSGGKERQGGISKQGDRTLRRLLVLGAVAVIRHARTRSAAEAGWLKRLLERRPAKLAAVAQANKTARIVWALLTRGGTYRAPTMPQPAPA

SEQ ID NO: 89943 - protein, 431 aa, unidentified
MKTDQESTVVYAGYVGLDWSSKEHVFCIYDCATAKRTKRKIPNDPAALLAFLAELRVLFGGKPVLLGLEATRASILPILLQHDFLQMILINPKTASDFREMFRPSCAKSDDLDAYYTCELIRAHSDQFRIWEPHDPLTRQLNACVEHRRELVDLRTQVANALHSALSASFPQLLELLNSQLTTSMAAHLLERWPTLEAAQAAGVDKLRSFFYKHNVRTSDKLEERLKKLAAAQPLLVCAEDREPAGMFIKALAAQSGQLHRSIDRFETKIAELVEKHPTAKLFKDVPGAGPQLRPRLAAVFGTQKNRFATAEDLTTYTGIAPIKQSSGETSLTCARWIRPIFIHQTWIEHAGCSIRKCAWARGLYEMKRQAGKTHFQALRAVAFKWIRVLHSCWVKDTPYNESIHLQNLQKKSPQLWQRLQELQKKKAVNN

SEQ ID NO: 89944 - protein, 339 aa, unidentified
MAILFVGIDLAKNVFAVHGVDEYGKAVLVRPAVQRAKLHELVASLPVCTIGMEACSGAHHWARLFRQHGHTVRLMAPKFVSPYRMSGARGKNDAADAAAICEAVQRPNMHFVPVKSEDEQARLCVHRVRQGFVEQRTATINRLRGLLSEFGIVLPQKAAIVRRQATAHLEDLPGWANTAVGDSLSEVHRLDERLAEYDRHVSHMAANDERSRRLMQLQGVGCTTASALVSTIGDAHDFRNGRQLAAWLGLVPGQYSSGGKARLGSITKAGDRYLRTLLVLGAKSVLAAAKSKDDRLSRWALALQVRRGYWRAIVAIAAKNARMAWAVLAKGESFRPILI

SEQ ID NO: 89945 - protein, 462 aa, unidentified
MARRKRKISLPSDALPPPLATANLHAAGIDVGAEEHWAAVPPCDDPQPVRRFGANTADLEAVADWLWDCGVTTVALESTGVYWIPLFELLETRGFQVLLVDPSKMPRNGRPKTDVHDCQWLQRLHTYGLLSACFRPEDQVVVLRSYLRQRATLLADAARDIQHMQKALTQMNIKLQHVVSDITGVTGLAIIRAILAGERDPTQLARLRAPRCKQDEAAIAAALQGTWRAEHLFALQQALERYAFQHRQLAACDARIASHLETVADQSHGAPLPPKRGQRRRHRNRPAFDPREPLHRMTGVDLTRIEGIDETTALIVISEIGLDMSKWPSEKHFTSWLGVSPQRRISGGKVLSSRTRPTTNRAAAALRLAAASLHHSKSALGAYFRRMKSRLGTPKAITATAHKLARLIYSMLKHGTAYVTQGLEAYEQQYRARVVKNLSRKARELGYELVKPVEATSETSLA

SEQ ID NO: 89946 - protein, 406 aa, unidentified
MKHVVAFDVSMGKSTIVIYNHYRQCEFEGEISHSKSSFETLNERLRFLTKQDGQALEIVFEATGAYSASLERFFQTEGYTYHRINPLEANLQMASMRRQKTDKSDAHELAKSHFRIKRSATYSQDDYYKQMRALTRYYDEIDTEINHLFNRMHAILQLSFPELERLFTTRSALFLNIVQLYPHPDEVVACSKTVIRNRLKANTKKNLSLARAEQKGIALLEAAKDSYPAISKEDVRCEQVRDYAKRIADLKEKKENLVKQMVELSRNRKEYQILISFPGIGEATAVRLIGELGDIHRFKNHKQLNAYVGIDIMRYQSGNTFYRDKINKRGNNKLRKILFYMIQTMITLRQKTKNHLVEYYDKLKTQPQRKPHKVASVACMNKFLKVAFHLITHEITYDYETASTYS

SEQ ID NO: 89947 - protein, 347 aa, unidentified
MRFYNNSHPYYCGIDLHARLLYVCIIDDKGEVVVHKKIKDDKEALMLILEPYIGNIIVGVECMHCWYWVADWCDDNNIDFVLGHALYMKAIHGGKTKNDKVDSLKIAKLLRGGNFPVAFNYKKEMRATRDLLRRRTKIIRHGAMLKGHVVNTNSQYNLPPTQVNLKNVSAREALKHSYDDPVVQRNIDLDMNILDFYAREISKVEHFILAQARQHNPAFLNILKTIPGVGRILSLTILYEIGDIDRFDSVQRFASYSRLVKCKAESAGKTYGTQGNKIGNAHLKWAFSEAAVLYLRGNDKARNYLNKLQKRMSKAKALSALAHKLGRCVYFMLKNKTVFDESRFLNG

SEQ ID NO: 89948 - protein, 400 aa, unidentified
MRTVFGIDVSKTNSEVAILVNGEKVHAYRMSNDIIGLSRLLNDLKTVHHPEIVFEATGVYSRRLQSFLEKNGYAYTRLNPLEAKKQLDSLRVRKTDKIDAEKLAQSQFILDRKPTYVQEEVYQLLRDLSRFYQNLTEDIVRVKNRLHKVLQVTFPELEYLLSAPTGEQYWNLVRAFPCKALVVELDDKTLSAIIRQSTSKRLSDKRVIYLVEKLISLAKQSYSAVTKTSPMIEEVRYYAKELLRLSEHRQAILDKMVALAQPLPEYEILRSIPGIAETTATSIIGELGDIRRFQSANQINAFIGIDLRHYESGNYLAQEHITKRGNPYARKILFKCIHNIVSASHTNPCHIADFYEKRKRQSQTTSTKPHTIASIHRLIRTMYYLITHNKLYDYASTQNH

SEQ ID NO: 89949 - protein, 425 aa, unidentified
MLPAGLPIKMGGMRLRHIGLDVHREFAQVAVWKDGQVSHRGRIPTTPEALHAFARTLTPSDQVALEATCNTYAIARLLEQYVARVVVSNPRRTRAIAEAKIKTDKVDAEVLVRLLAGGWLPEVWLPDNDTQTLRQRVAHRARLIQQQTRLKNRVHAILQRNLVLGCPRSDLFGKGGLQWLTAQAMPLLPSHEQQTIHATLRELALIAEELHVAEAPLAAVALQRRDVCHLLTIPGVDATVALALVAAIGDVHRFSSPVKLVGYLGLDPRVRQSGAQPASYGPITKQGRAHARGALAEAAWVAVKTPGPLRAFYQRVRARRGPHIAVIAVARKLAVLAWHLLTREEDYAFARPSLTANKLRKLELRAGAPAHRGRRGATHAYNLKETRRRERALGIQAERAYQQLTAHWQPRPQSTDASAPSGKRR

SEQ ID NO: 89950 - protein, 466 aa, unidentified
MTPRGGKRFRPSPADDLAVKHRHAAGIDVHAAVHFVAVAAEDVPAGFVNPDPKLPAGVRKFGAYTGDLRALADWLTACGVTTVALESTGVYWIPLYDLLASRGFEVRLVDPRQTTHAPGRPKSDVLDCQWIRRLHSYGLLTASFRPSDEVVRWRGFQRQREMLIRYAAQHVQHLQKVLEEMNVKLTEVVSDVVGLTGLKILKAIAAGERDPQKLARHRHPSCKTGVEEIAAALRGEWRPEHLFALRQGLALYEFYQGQLQECDAQIASCLRDFADRSRGASPPPGRRTHKPGKNEVRFGARELLFRLAGVDLTQVEGISETTALVVLSEVGPDLDAFPTEKHFVSWLGLCPQHRGSGGKIFKRRVRRGANRAARALRMAAQGCHHAKNALGAFYRRIKARAGGPKALVATARKLAERVYRLLRYGPEYVRQSEAAYEAAYQERLVKSMAKKAARLGYQLVPTPTRS

SEQ ID NO: 89951 - protein, 375 aa, unidentified
MTKSNILFIGMDVHKESIEIALADDGADGEVRRYGRIGGTLDALKKTLRKLVSEDKTLHFCYEAGPCGYELYRYLSDQGHVCIVVAPSLIPKKPGDKVKTDKRDAVQLVRLFRAGELTPVYVPDREDEAMRDLSRAREDAMIIQKAARQRLKSFLLRHNIRYPGRANWSEKHLRWLAAGVRLATPAQQVVFQEYVNTVTEAACRMERLVAEIHHHVKTWRLYPVVQALMTMRGVRMIVAVTVIAELGDLTRFENPQQLMSYLGLTPCEYSSGARQRRGAITKTGNHHARRILIEAAWSYRFFPKVSREIQKRQEHQPLPIREIAWKAQLRLSKRYKTMIQRGKSPNVVVVAIARELAGFMWAIAQAVPISNTSST

SEQ ID NO: 89952 - protein, 351 aa, unidentified
MLIIGCDLHTRYQVIAMLNSETGELVTRRLQHENGEAGAFYASLPAPAQVGIEATGYTQWFERLMAELNYELWVGDAAQIRARAVRRQKTDSRDAEHLLELLSTQRFPRLWIPSPEQRDLRQLLKHRHKLVTMVTTLKNQLHFLAMSQGLCRKSKLWSERGREELESLSLGPWARRRRQELLALLDQLQPQIAELDVAVAQAAAADPAAVDLMTQKGVGPVTALAFVLTLGPVERFQNSRQVVSYLGLNPREHSSGGRQRLGGISKQGNPMMRWLLVEAAQTAVRFDPELRRKYQPLKFRRGGSVAKVALARRLAVRLYWRLRQRKAETQPVRMPGSSGSAVVLPRAGSRH

SEQ ID NO: 89953 - protein, 343 aa, unidentified
MLTNNVIAIDLAKNVLQICHISVHGELLFNRALSRQKAKEFLTTTKPSIAAMEGCCGCHYWGQLAEKCGHEVRIINPKKVKGYLEGHKTDHNDALAIANAAIQIGIKYSRPKTLEQQTMHSLESSRRFLSRSVVSLGQHIRGTILGYGIANPRGEKGLKASIQSVLDGETPIPANVVSVLAMLWEQYKLLKYKLIEFEKEKNASTRQIEPCQRLMEIEGVGETTAAMLYTTLGDGKQFKNGRQASAFVGLTPKQHSSGGKVFMIGIDKCGGVKELRSLLYLGAMSYIGRLPETPKTRKDAWLAKIIKRIGYKKACIALANKIVRTEWAILRYETKYKPILLTN

SEQ ID NO: 89954 - protein, 394 aa, unidentified
MFLVGIDIGKNKDSFCIIEKETGELIVKPKFFDNNNIGFEELISSIQKLSNQDILIGMEDTGHYHFTLLKFLLDKKYQVALINPVTTNLTRKLQGGITKTDKLDTLTICDVLSSSQRVKSYRITKVDRFDMYEQKQLTREHHNLKEQLNVLKNRLQKSIDIVFPEFNSLFDSKYGTVYVNILKEFGSADAVARADIRTIRKCFDIKGKGRRIALTAEKLKEAAKNSVGFPSTAEVVQIKHLINQVKLIEEQISEIDKKIEEFSISNNSPILSIPGISHFSGTSILAELGDIHNYSKPSQIIKFAGVAPITYESSQFTAQHTAITKKGSRYLRKTLYQIITPVINNNEVFKTYYQLKLSQGKSHRCAQGHCVRKLMRVIFHLLSTNTQFDPALLV

SEQ ID NO: 89955 - protein, 331 aa, unidentified
MQHDPSDSVVPGSVPVVSVVVGIDVSKATLDCYLDPVGQRFQLPNDPDGIAGLIARLRPFQVRLVVIEATGRLRRRLAGELLLAGIPVALVNPRRAREFARSTGRLEKTDRVDARVLAEFGRGVRHRTLERLPEKQADLDDLISRRRALVQMRVAEKNRLHDQSPALARAQGRKLLRLIDQQVEDLDRAVAELIDGDDDWKRKGEIIASVPGVSRGTASQLIADLPELGRLSRQKIAKLAGVAPLAVDSGSRKGERHIRGGRGPVRNALYMAAFNAMRHCERFRRMAQRLRESGKAFKVIVTACMRKLLVTLNQMVRTGTAYDPKLNVSVP

SEQ ID NO: 89956 - protein, 346 aa, unidentified
MSTARIDLNSVTTVGLDLAKHVFRIHAVDADGKIVIATALRRRNVLAFFGALPPCVIGLEACGSAHHWARELVKLGHDARMMPPNYVKAYVRRQKNDAADAAAICEAVTRPSMRFVPIRSINNQALLMHHKVRELLVSQRTQLLNALRSHMAEVGIVAAQGPHGAHVLAAAILEGDSSIPLCVREALAPIVRQLQMLDHEIAASDRAIMGLAKTDETARRLMSVPGIGPITASAIAASVQDVSAFSGPREFAAFLGLAPRQNSSGGKERLGRVSKMGNRYLRKLLVVGAHAVLFHRRSHRDGLRTWAAKLMETKPFKLVAVAIANKLARIAFAVMRDVSIYGGAVA

SEQ ID NO: 89957 - protein, 370 aa, unidentified
MAKSTPLYVGLDVHKDSIAVAHAAGGRTDPPVFVGEIGTRQADIDRLIRRLQGKAPALRFVYEAGPSGYGLYRYLTKQGWPCDVVAPSLIPRRPGDKVKTDRRDAVELARLSRSGDLTAVYVPTVEDEAIRDLCRARDTARVTLKDAKLRLKAFLLRLGLHYVGRADWNAAHKRYLAKVVCPTPAQQIVFQESVRAVDEQVERLARIEAELQELAPRWPRYPVVEALQALRGVQWVVALTVVAELGDLTRFDNPRQLAAFVGLVPSEYSSGSARRQGGITKAGNGRAHRVLVEAAWAYRHPAKVSLHIQQRIDQLPKALQDLGWKAQVRLCKRFRRLVARGKHPNVVVTAIARELIAFMWAVARATPARA

SEQ ID NO: 89958 - protein, 345 aa, unidentified
MPIVGGLDIHRKQITFDYLDTATGEVRRGQIAPADRAHLRAWLARFAGRDDVAFALEGCTGWRYVAEELAAAGVAAHVAEPADTAFARGRKRHAKTDKTDSRHLRVLLEQGRLPECWIPPAQILECRALLEAYHDLRREHTAWIERIHAVFFHQGAPRLGEGALRTEHGLAALREAAAIHLSPAGQLQVATALDMLAAVEARMDTLRQQLLHAARHLAGARALQARLYGVGPLAGLAMTCWLGGAGRFSSARKAVRFAGLDITVYSSDGKRSPGHLSRQGPEILRWVAYEAGKTHGRGSAPGHDYYAAVKDRTDGKIAALSQARKLIRQACHILTELGDDALTAA

SEQ ID NO: 89959 - protein, 354 aa, unidentified
MSQTPNTAIAVIGIDIGKNSFHVVGHDARGAIVLRQKWSRGQVEARLANIPPCLIGMEACVGAHHLSRKLASLGHDARLMPAKYVRPYSKGQKNDFNDAEAIAEAVQRPTMKFVATKTAEQLDLQALHRVRERLVSQRTGIINQIRAFMLERGIAVRQGIGFLRTELPTILATRTDALSPRMLRVIEELAGDWRRLDQRIDGLSGEIEALARQDQACSRLMTVPGIGPIISSAMVAAIGTGDVFSKGRDFGAWLGLVPKQISTGDRTILGKISRRGNRYLRVLFVQAAWVVLVRIKTWERYGLKSWIEAAKRRLHHNVLAIALANKLARIAWAVLAKGRAFELTRTDDAGVRPA

SEQ ID NO: 89960 - protein, 341 aa, unidentified
MKNKSFIGIDISKNVIDASIFCKGAPIKDFPHAVFNNSRKGFGEMCTWLKKNHVVLLNSLFGMEFTGSYSMELEKFLNAKKYQFCMLSTHVVKHYPMGPKDKSDKIDSAKIADFLYRYDGTECVKPYKMPDKTMQRLKALTKERKFLVEQRTCFMNRRQLCTTKEAAQLYDGYIKEFSHDIENIELKMQNLLEADDSLSTTYKNLLTIPGIGFVNAMNVIVITRNFTAFETARQYASYIGVAPHFHTSGTSVRWRPRPSARCDGQAKADLSMAASVAVQCDAELQSFYNHKLGDKQDSDTKRKALNAVKFKLVLRMFAIGKQNRKWEPLDSKSSNEKLAIS

SEQ ID NO: 89961 - protein, 411 aa, unidentified
MDRIYDNCCGIDVHKKLIVACFRKGNKQEIREFGATTRELLKMADWLKDGGCEMAAMESTASYWKPLYNILESSGLNAMVVNARHMKAVPGRKTDLRDAEWIADLLQHGLLQPSYIPDKEQRELRELVRYRKSLVGERTRELNRLQKMLEGANIKLSGTVSDINGKSARNILEYLLTGASVDGPKYDEMYEQKIIAHNLKATKEQIIDDLNGVMSPLQRRMMKELLAHLDELNIHIKNLNDEIDNFMKPEEKQASHAIQDVTGIGNTSAQAIISVIGTDMERFPTDRHISSWAGLCPGDNESARKRKSGKTRKGNSLLRTTLITCAHSAVKNKKSYFHAQFMRISSHRGKKRAYVAVAHSMLIAIYHILKDGVVFKDLGADYYNQFNKERKINAYLKKLKALGWEAPVVAA

SEQ ID NO: 89962 - protein, 312 aa, unidentified
MYYIGIDVSKKDLSVFDGKKDLKFINQEGLKSFKKYLKKKVNFSDLVIIFEPTGVYSLYLKEFCAENSIKAYIVNPKKSHNFTRALGKRSKTDKIDARILYQFHKLIDLKDIKIPKIDQQAKALASYLTSYEFALKQRVSLSNHLESLRDKSLIALMKKDLKRAKKLEDKIFNDILEYVSKNQNLKEDYQRLLTISGVGDKTAIALLTLFKTYQGTNRAQITALAGLDPVRRESGTSVKGKVKISKNGKGIYRKIFYLPTICATVHNQKIRVFYQRLLAHHKIKKLAVIASMRKILLMAHAMYRDKTEYVTT

SEQ ID NO: 89963 - protein, 373 aa, unidentified
MQENSKIFVGLDTSKMKISVALAEEGRRGEVRFLGDIDNTSDAIRRLIRKLTGKFCELLFCYEAGPTGYGLHRQITALGHACSVIAPSLIPKRPGEHVKTNRRDALTLARLHRAGELTTIWVPDPGHEAIRDLVRAREAAMEDLRKKRQQLQSFLLRHGRIYPGLRSWTLVHARWLSNLTFEHPAQYLVLREYRQAIEDAEARLERLTQQVADVVSTWSMAPVVEAYQAMRGVAFLTAVTFVAEIGDVRRFETPRQLMAYLGLVPSERSTGEQVRRGSITKAGNPRARRVLIEAAWTCRYPARLSRALQVRQERLPKTVRAIAWKAQMRLCARYRRLMAAGKRQTLVTTAIAREMAAFLWAIGHEVEPRSAAA

SEQ ID NO: 89964 - protein, 339 aa, unidentified
MKNSLISIDLAKNVFQVCAMDDDQKIVFNKKISRKKLLHTLSQLEPTTVIMEACYTSHPWGRAIQALGHTVKLIPPYQVKPFVVGNKNDHNDAIAIAEASRRPKASFVPVKSLEQQDLQSLQRIRERMMKHRTATGNQLRGLLAEYSVVLPKGLRYLRAQVPLILEDTEQPLTVVARDFIHRLYRELVGHDKQINEIEKELFALVEQNEDYQRLLTIPGVGPLIATTLLSSVGDANYFKNGRQMAAWIGLTPRQHASGENSRMLGISKRGDRTLRKMLIHGARTVLNWCGPKTDKLSLWLKALSSRAHPCKVIVALANKLARIAWAVLASGKPHQAQAI

SEQ ID NO: 89965 - protein, 344 aa, unidentified
MTKASIAVLGIDLGKNSCSVAGLDRSGAVVLRKRMTRDGAVAFAATLPSCVIAMEACCGAHFLGRTFAGQGHTIRLMSPEYVQPYVKAQKTDDHDAEAIAEAATRPTMRFVTLKSEAQLDLQALHRVRERLVLARTALVNQIRAVLLERGVIVPKGRIVLMRRLDDMLIRGVVVSPRVRELLKMLRDECGDFDRRIEAYDDEFVTITREDPQARRLATIPGIGVINASALLSAVGDASAFAKGRDLASWLGLTPRQHSTGGKTKMLGISKRGNRYLRKQLIHGARAAMPHLAAKPTRLGAWLKQMLARSHPNVVVVALAAKLARVVWAVLRRDENFRQEALMGA

SEQ ID NO: 89966 - protein, 483 aa, unidentified
MHPQTTNRILQTFDVYRFSFESAGALALDNEYSGFAVVPAHYIAFAERKQARPSRSIYHFGRADMKPTDTQPFTAYVGIDWGDAKHDICLQAAGSDRREFDCIAHQVPRIDEWAKALHQRFGSPIAVALELSKGPIVYALQKYDFLVLFPINPSTLAKYRVTFKPSRAKDDPTDAEMALDLLLHHPERFKPLQPQSVAMRTLLSLTEHRRELVDDKTRLTNRLTDNLKQYYPQVLDWFEQRDTILFCDFLSRWPTLTQVKRARQTTLKAFFYAHNGRRPQVINARLDSIKATVSLTDDRGVIVPCKLRTLTLVAQLRITLQAIDQYDHEIAGLVTTLPDYALFQPLPGAGPHLTPRLLVAFGEDRERFQSADEVLKYSGIAPVTERSGKKHWVHWRLQCPTFLRQTFIEWAGQTINKSFWAGAYYRQQREKGSSYQVAVRALAFKWIRILYQCWKTQTPYDETKYLNALRKRGSPLIKNLSLN

SEQ ID NO: 89967 - protein, 328 aa, unidentified
MENNLKFIGIDVSKLTLDICVITSTTKFYEISNTQKDIQKFFLKELDSAGSAHVCIENTGKYSWELMRSLPGLDCMFYVVNPLHLKRSIGLVRGKNDQVDAERIAGFIKKNHAETKPFTVRRDEIETIQVLLSERSIRIGQKSQLATKSKELSTLNNPKLAKLIQTKNNRIVKELNKQIKELEALIKQIIENDSQLMLLNKQLKSIPGVGDILAWNMIVKTNEFKTITEPRKMACYTGVAPFSCSSGTSVFGKPRVSLLADKKLKKILHLGAMSAIRFNNDLAVYYHRKVEEGKNKMSVLNAVRNKIIHLIFALIKNQTFYENRLAVS

SEQ ID NO: 89968 - protein, 346 aa, unidentified
MNYAGWDLHQQFSQVVVGTKDGKKRRSLKFSHFPGMFEHPELRKLIQPPIEIAVEASGCWYWVVDELEKMGIKVHLAHPLKTKLIAESKVKTDKIDANVLFDLLRTGFLPESYIASTEVRQKREIHRHRAALVKIRTSVKNRIHGLLAKHGIFFNLTDIFGLKGRQALEKIMANLKPVYKEEFKRYLSLIDWLDKEIAKIEQKIRSLVKDISLAKLLMTIPGIGYYSALLILSEIGDISRFSRPKKLISYAGLNPGVDKSGKHFHNLPITKQGNTWLRWVLIQDAPHAARSDRRLGQIYRRIARRKGNNTAKVAVAREILEAVYWVLKKQAPYCPKSVTPVVGMVS

SEQ ID NO: 89969 - protein, 392 aa, unidentified
MVAVMIGIDPHKRSNTALVLDGRETVLARRRFANDSAGYRDLKAFARGWKQRTWAVEGARGVGLSLAQRLAIEGEHVLDVPAVLSARVRALGGGSGRKTDEADAYAVAVAGLRGHGLQVVKPEDEVAVLKLLSDRRQQLVEQRIATVNRLHDVLQDLLPGGASTRLTATKAHEILAALSLSDPVGQARKQLALEHADDVAELDVKIKAMAKRIAAALAQRPSALTDIKGIAAIGTALILGEVGDVRRFRSKHHFASYTGTAPTDVSSGDQNRHRLNRGGNRRLNYALHIAALVQIRFPGPGQNYYARKRAEGKKPLEAMRCLKRRLSDVVFHALQQDLQRRLEAAGPEGHSGATLQSSASDPTPMVSPSDQSLTGPATKNATPRRTRVKVAG

SEQ ID NO: 89970 - protein, 352 aa, unidentified
MDEVLISVDPHKASSTLAVFDPVTRTAIDGARFVNTQDGYRDLVRFAGQWKHRRWAVEGCHGAGRSLAQRLVADGEGVVDVPAKLAARVRVFSKGHGRKTDRDDAVSIGLAALGADGLHEVVLDDATVTLRLLADRRQELVALRTQAICRLHRLLAELTPGGVRRELTAPKAAAVLSRLRPRDEPGRIRRQLAMDHLSDVRALDRRIKAVGVQITDVVTATGTTLVGIFGIGPVVAGRILAEVGNVTRFPDKDHFASYNGTAPIDASSGEQQRHRLSRAGNRRINHALHMAAVTQLRHRASTGRAYYEHKLTEGKTRKEALRCLKRRLSDVVFRQLVIDHETAQREAITTHS

SEQ ID NO: 89971 - protein, 320 aa, unidentified
MDQHSAMVPVFVGIDVAKDRLDVHLLPSGEAFAVARDHAGLEQLVARLDQAKPALVVLEATGGFEITVAAALSGAKLPLAVVNPRQIRDFARALGRLAKTDALDARTIALFAERIRPEPRPLADAQAQRLAELVARRRQIVEMVSAESNRRRQARDPQLQRDLDTHLVWLRQALARIERDLDDSIRGSPVWRATEDLLASAPGVGAVTARTLIAELPELGRLDRRRIAALVGVAPINRDSGAFRGRRMVAGGRSSVRKALFMATLTAIRFNPPVRALYQRLTQSGRPAKLALTACMRKLLVILNAMVRDGRRWADSRSSL

SEQ ID NO: 89972 - protein, 413 aa, unidentified
MDLLYSSCAGLDVHKDTVVVCVRRRDAKGKVQQQTRTFGTMTGPLLALADWLAQEQVTHLAMESTGVYWKPIWNLLEDQFQILLVNAQHIKQVPGRKTDVKDAEWIAQLLQHGLLKASFVPATPQRHLRELTRQRRQLIQAKASVANRIQKVLEDANIKLGSVASDVLGVSGRDMLRALIAGETEPAALAELARRKLRAKIPALRLALEGRVTEHHRFLLQLLLDELTHMEALIARLSARIVEVLPPPLEEAVQRLATIPGIDERAAENILAEIGVDMDQFPSAGHLASWTGMCSGNRESAGKRQSGKTTKGNRWLRATLVQVAWAASHTKNTYLSAQYRRLASRRGKKRALVALGHTILVIIYHLLKKQTTYRELGPDYLDRLDTDRLTRNLIRRLERLGHKVTLQPQEPAA

SEQ ID NO: 89973 - protein, 410 aa, unidentified
METIHPHCAGLDVHKDSVYACVRRLSRDGKLDQEVRSFGTATRALLELSDWLASEGVTHVAMESTGVYWHPVWNVLEDRFAVMVVNARHVKQVPGRKTDVKDCQWIAQLLQHGLLRASFVPERPVRELRDLTRQRAQLIQEKARVANRVQKTLETANIKLGSVASDVLGVSGRQMIQALIDGDKTPGQMADLARRRLREKIPQLREALTGRVTAHHRFMLRQLMEQVRHLEGQIEAFDAQVELVLRPFEKAAVSMLDQVPGVDTRAAQNIIAEIGTDMSRFPSAGHLCSWAGMCPGNHASGGKRKRGATTEGNRWLKRTLMQCAWAASRTKGSYFQSQYRRLAARRGKKRAAVAVGHSQLATAYHLLRDGTEYQDLGSGHFDNLAETRRTKQFVKGLERLGYRVTIEKAA

SEQ ID NO: 89974 - protein, 356 aa, unidentified
MVEGSWVGLDVHARKVVAGVLDAKSGELRSLRAPTLPAETVKWLRRFPAPVRVAYEAGPTGYGLARACAGAGLACTVAAPSKIPRASGDRVKTDRRDAERLARLLRLGELVAVRVPEPHEEAARDLVRAREDARGELMRARHRLSKLLLRHGLVYDASAWTCAHEAWLRRQQFASRPLALAFDESYGAVLQAKTRRDALDRAIAELAAEPPFSEIVGRLCCLRGVSTLTAVGLTVELGDWTRFRPQSLGPFLGLTPSEDSTGERRRLGAITKTGNTHARRLLVEAAWHQRRPLRASATLEKRRQGQPAAVRTRADQSARRLHQRWHALERRGKRRTVVAVAVARELAGHCWALATM

SEQ ID NO: 89975 - protein, 435 aa, unidentified
MEIVYPRVAAIDVGKKIVAVAVRTPGQEPGQRQQQLRKFKTFYPVFYPVLQQMVGWLVDQGVTHVAMEATGVSWRPVFHALCEAEQLALVLVNARHVKHVPGRKTDANDANDAEWLAELCEVGLLRGSFIPLAEIAAIREVTRDRKQLTEARTSELQRLCKVLEDGGVKIDSVASSITTVSARAMVEALIAGERDPRVLPRACPWVMRNKLPDLAMALAGRFGAHHALLARMHLDHIDHLSGMIGRLDTQIEQLISPFAEQLRQLPTIPGIAERTAQVLISEIGVDMSRFPTADHLASWPPGLLASWAGLCPGTGESAGKHRSGTTRSGTTRKGNREVREALVEAAWAAGRTATYLGARFRRLHRRFGKKGGSKTAVAIAHDLIVIVWHVLHDGSDYHDLGADYFTRHDNPDATKRRLIRELQALGYAVDLTPAA

SEQ ID NO: 89976 - protein, 411 aa, unidentified
MNFTQNEKLNQVTTETLVIGVDIGSETHYARAFDWRGLELGKTWAEGLAEKTAKSNIMVGAEPTGHYWFNLASYFKEHHIKLVLVNPYHVKQCKELDDNHPSKTDSKDPKTIAKLGIDGRYNVPYIPEGVYAELRIAMNCRERIVREQVVIQNRIERWLKIYFPEYHEVFADFEAKSSLLVLSSMPLPADVVKAGADGVNWIWRENKLRAVGMKRAQTLYETAKRSMGCTEGSHAARLELRLLLEDYHTKKAQYDDVMAVVEDLCTQIPAVRKLLAIKGIGLLTVAGFFAEVGDLGRFQSPKQIQKLAGLAIRENSSGKHRGQSGISKRGRRRLRTLLFRAVLPLVANNSEFGEIHSYYTNRKDNPLKKKQSIIALCCKLIRVFFALATKDEDYDPVRLLGDIHHPAAAAA

SEQ ID NO: 89977 - protein, 357 aa, unidentified
MGKATGNLARVTRIGLDLAKTVFQVHGVDAKGEVVIARKLRRGTMLEFFGRLAPCMVAMEACGSAHHWGRQLVALGHAVNLIPPAHVKPYVRRNKTDAADAAAICEAAMRPGQRFVALRSIDNQAAVMRHRVRELLVGQRTALLNALRGHLSEIGVVTAQGAQHAYRLKRMLADGADENGEIVIPEHVRVALAPLAAQIDALDQAIAAIDDKLIETVKADEKARRLMTIPGVGPVIATAVVATVGEVSSFASGREFAAFLGLTPRQHSSGGKERLGRITKMGDRYLRKLLVVGATTVLHHAIGHNDSLRCWARQTLERKGGRAGFKLTAVALANKLARIVFAVLRSGEVYDDRPVAA

SEQ ID NO: 89978 - protein, 363 aa, unidentified
MAKRGPHEGGLTASEEKRSHATYVGLDLSVKQTSVCIVDKAGKVIREVKVATEPMAILAVLTEEALAIERIGLEAGPLSQWLYSALAEAGFPVICVETRHMKAALSAQLNKSDRNDARGIAQMMRVGLYRAVHVKTLASQKRRMLLTSRQLLQAKALDIENDLRGTLRNFGLKVGMVGTVKFEARIRELVADHPDLAAIVEPLLIARRVLREQLGVLYRQLLEIVRQDEVCRRLMTTPGVGPVVALTFRATVDVPSRFTSSKAVGAAFGLTPRRQQSGEIDRMGRISKCGDAMMREMLFEAALVLMTHSRKWSWLKAWGMKIARHRGMKRAIVAVARRLAVIMHRMWMDGTEFRWTREEAAAA

SEQ ID NO: 89979 - protein, 307 aa, unidentified
MAMTTMTETGCRVTGGVDTHKDAHVAAALDEVGRVLGTETFPATPAGYRELLRWLRSFGEVVAVGVEGTGSWGAGLTRFLTAAGLTVIEVSRPNRQHRRRHGKSDPADAIGAARAVLSGESTGTPKAQTGTVEAIRILRVARRSAVKARTQAANQLHAVIDTAPADLRQRLSSVITEQIVAMAARFHRCHPGTPAEAAKLTLRTLARRWQTLDDEITMLDAHLDELTAEVAPTLRAINGVGPQNAAALLAAAGDNPDRLRSAASFAALCGTSPIDASSGRQQRHRLNRGGDRHANCALYYVVMSRLR

SEQ ID NO: 89980 - protein, 343 aa, unidentified
MVQQTIIGIDLAKHVFQVCMVTPQGTLKMNTPVARGKLLALIARQPPALIFMEACGGAHDWARRFCAVGHEVRLLAPQYVTPFRRGQKNDPNDALALTEAGQRPNIPTVPMKSVEQQDLQALHRVRERLVKSRTALGNQVRGLLLEYGIVVPQGIARLRKRLPRVIEEADNGLSFVLRDLLQSLQSELSALDTRITDVTCQLARLSHEMEACQRLQEMEGIGPLSATALVAALGNGRDFQTGRQVAAWLGLVPRQHSSGGTTRLGGITKGGNSYVRRLLIHGARSVISHVRDKPDAKSAWIRQLVTRIGVNKACVAVANKMARVAWALLHTGEHYRKPVALFI

SEQ ID NO: 89981 - protein, 429 aa, unidentified
MNCTQNKKIEQVKETTMIVGIDVGSEKHYFRAFNWRGIELTRKPVAFSNSMEGFNSFYNTIVELIQKSELEEALVGIEPTGHYWFDLGQFMGEKNIKFVMVNPHHVHKTKELDDNSPSKNDRKDPRVIAGLVRDGRYFYSYMPTGVYAELRNASNRRFVLVEEQTRAKNRLQKWIAVYFPEYKGIYTHIDAKGGLLVLKQAPTPEEIVRLGVEGIIKIWKDAKLRGNGHKKAMLILNAAMKSIGLKSGLTEARMEIQDLIEDYELQTKRLERVNDLIKELCQQVRYADKLLEIKGIGITTVAGFIAEVGDITRFDSTKELQKLAGLELVSDSSGKHNGKTKISKRGRKRLRYLLFEAAISVVGKNEEFKEIHKYYTTREKKPLKKMQSLIAVACKLIRVFHVILTKGISYDATKMLKDIRHPGEQLKAA

SEQ ID NO: 89982 - protein, 378 aa, unidentified
MNVAETALHGKDTGAAGQLYMAVELSDKKWLLVLSDGARGASRYTVDAGDKRAVLDAIAKAKARCGLVGEVVVRSCYEAGRDGFWLHRWLLEQGIDNLVVDSASIEVNRRARRAKTDRLDGGKLLTMLMRYLGGERRVWSVVRVPTPQEEDARRAHRELEQLRQERTAHTNRIRSLLVLHNLRVKHVGGRDWGKWWAHHGPELPAALRAGIEREMTRLVLVKAQIKTLEVQQCTEVATGMQPQVAQLSRVRGVGLGGAWVLVKELFGWRRFHNRRQVAGCIGLAPTPYSSGDSQTEQGIAKAGNKRARWIMVELGWSWLRYQPESDLSTWFNHRFAHGGKRMRRIGIVALARRLAIALWRYLEHGVIPAGAKLKPSAG

SEQ ID NO: 89983 - protein, 436 aa, unidentified
MEEVTDEPLYRDRVCGIDIGKAEMHATIRVPSEKNPARRMSETRSFATTRRGVLELADWLRCWQVPAVVMEATSTYWMGPFFRLEAEGLECVLADAKQVKNLPGRPKRDPSDSSWLAQCFERGAVRPCFVATAEFRVIRLHTRYRRDLINERTREKNRAEKLLETAAIKLSSVITDLHGVTGRDIMGHLIAGERDPKALAQLARTRARAKITELQHALEGAEFFTGHHARLLKTMLERIGQIDAQISDLTAVIEELLAPYEEQLAQAESMPGWGRRSAEDAVAETGVDMTRFPTGGHLVSWAGRAPLDKQSGQRKGQARHKKGNTYLGGVLGETAISAGRTQTREGARYRKLARSRGKAKACVALGNTQLKAYHKLLSSPGMRYEDPGVEYYERRAATRRTITWHMRQIEAEGFDVTLTPREPGLADGAPSGAHAT

SEQ ID NO: 89984 - protein, 415 aa, unidentified
MDVVITRCAGLDVHHATVVATIRVPTDQGGRRIVTETFGTMAADLLALRDWLQAYGVTHVALESTGVYWKPVYYMLEDTFTLLLINMHALKRVPGRKTDVKDSEWLAQLLECGLLQSSFVPPPPIRELRDLTRYRVQQVRDRSQEVNRLCKVLEDAGLKMTTVITDVMGVSGRAMLAALVAGTTDAVVLADLARGMLRKKLPELQRALQGRFRAHHAFLLQQVLAKIDFLDEALGRLTAEIDRRLVPFEPVLAALDTIPGVNRTSAISIVAETGADMHRFPTAGHLCSWAAMCPGHNESADKRHSGKTRKRNRYLRAALIQTGLSATRKNGSALQARYHRVKRQRGHKKAVVAVGRQILEIAFHIMRDGVTYEELGADYFDRRHAERATRRHVRYLEALGFRVTIEKATLQCTSG

SEQ ID NO: 89985 - protein, 339 aa, unidentified
MTEVSTIGVDIAKRLFQVHGVDRSGGVVVRRTVRRSQMLTWFGKLSPCLVGMEACATAHYWARELRKLGHEVRLIPPAYAKAYVRRNKNDPADAEAICEAVGRPSMRFVAVKSEAQQAAAGLHRVREILMKQHTMLRNQVRGLMGEFGIVAAKGRRGFAELTAILADPDDQRIPSPLREALAAIVETLRGIDRKLEALERQLVQAGRENATFRRLITARGYGPILASAMAAMVIDPAAFRRASDFAASLGLVPRQEGTGGKTWLGPISKRGNGYLRRLLVNGATAVLKSKRAKEDPWLAKLIATKPRKLVAVALANKMARVGWALMTRQEDYRNAPAVA

SEQ ID NO: 89986 - protein, 359 aa, unidentified
MASIASDPADVIVGVDTHKDQHVAVALDGLGRRLGERFVSAAPAGYADLLAWAASLGRVAAFGVEGTGSYGLGLARFLRRHGIVVLEVARPPRKGQRRRQGKSDPVDAEHAARELLAGASAVTPKTAEGAVEAIRLLKVARDTAVTAHSQAMITLKATLVTASDTLRAELEPRTDFALVTACAELEVAGDLADPDVAARHALRALARRWLALHEEIKVHTRQLKRLTSQTAPALVATFGIGFDCAAELLCAAGDNAGRVRSEAAYAKLCGACPIPASSGKTTRHRLNRGGNRQANAALFRIVVVRMRWHPATIAYVQRRTTEGLSKREIIRCLKRYVAREVYRLLPVPTATPAEPLQAA

SEQ ID NO: 89987 - protein, 417 aa, unidentified
MERVVERAAGLDVHTKTVAACVRVPTETGERTQHIQTFDATTAGLLALRDWLLSHGVTHVAMESTGVYWKPVYYLLEDAFTCVLVNAAHIKQVPGRKTDVLDCAWIAQLLEHGLLRGSFVPPPPLRDLRDLTRYRQTLLEDRTRQVNRLHKVLQEAGIKLASVASDVLGVSGRAMLAALVGGTTDPTALADLARGRLRTKRPALQDALRGRFRAHHAQLLTHLLAHIDYLDDTVTALSTAIEEQMRPFAEAIHRLDQVPGLNQRTLERVLAEIGVDMTVFPTAGQLASWSGLCPGNDESAGKRRSGRTRKGNRALRSALIQAAWAATRAEGSPFAARYRRLRHRGHKKAVVAVAHALLRVIYHMLASGTHYRDVGADYFDRRHLERAARRAIRVLEGQGYRVLLQPAASLVRGGSFF

SEQ ID NO: 89988 - protein, 334 aa, unidentified
MNQKYFIGIDISKGKLDCAVILSDYTVVAENIIPNNVKKIKSFLNGFTKKHNTEFDQILVCCESTGIYNGPLRQMCSDLNIGLWEEHALKIKRASTDMRGKSDRKDAMRIAEYLVRYRDKALLYKQPSDVLKTLDQLNKVRETLLGSKLALQNQLGESKSFDPDGYKVLLKHYKQMIAQIENQLKKIDLEIQDLLNQHEEIQQNINLMKGVPGVGKQTAMQIIIYTQNFTVFKSVKHLACYAGVVPFQNESGVVIKRARVSKMASKKLKSVLHMAALAAVRTKSELKAYYIRKIAEGKNKMCVLNAVRNKILQRIWAVVERQTPFLSNENFRPI

SEQ ID NO: 89989 - protein, 370 aa, unidentified
MLNTTTFVGLDVHARSIKAVALDAMTGEVRSATFGYDAAAVAGWVSSVDPSAKCVYESGVTGFDLQKRLASMGIDCVVGAVSKMIKPSADRRRKNDRNDAEFLARMLSVGNVVEVWVPDDECEAARDLVRALDDAREDLKRCKQRLSKFLLRHGHAFSETTPSGRRKGNWTAAHWAWIRSISFPEKADDDVLAYYIDATRQAMEDKKRLERLVEAEASKPRWKKRADSLRCLKGVDTMTAADIVFEAGEFSRFKSARSFAAWLGLTPSEHSSGESVRRGGITKAGNKHLRRVLVESAWHYISASPHPKDLAKGQAPDPAARRHAAKGVRRLVERRRAMLERGVHKNKANVATARELACWCWAVGRMIENG

SEQ ID NO: 89990 - protein, 364 aa, unidentified
MGLERTSVGLDVHARSVSAAAIDGVTGELIRKRLVPTTDTVIEWVRGLPGPAAVTYEAGPTGFGLARALATAGIRCQVAAPSKINRASGDRIKTDGRDAVLLARLLRLDDIVAVRVPTVAQESARDLVRAREDVRVDLMRVRHRISKLLLRHGHVYCGGAAWTGKHEQWLDQIRFTGLQRAGTQAAYDADREALAMAVLRRRRLDEQITALAADSEFTPVTRRLCCLRGISELTGFALAVEIGDWSRFTGASIGAYLGLVPSEHSSGSSRRQGAITKTGNTHVRRLLVEAAWHHQPRYQIGATLRARWAQAPVAAQARGHAGNQRLHDRWTQLSIRQKAHTVACVAIARELAGWCWSLATMPET

SEQ ID NO: 89991 - protein, 340 aa, unidentified
MHHIAIDLGSRESQVCVRDSTGKILHEQKLGNMELLEVFDCPRAVVSMETCSEAFTIADQARSKGHEVRVVPSTLVRSLGVGARRTKTDRRDAQALSEVSCRIDLPSVHVPSSWSRDVKTICGLRDALVSSRTKCTNSVRGWLRTQLLRARLPRKTLPRKLREDFAARGQRLPTFVERQLVAIEALSEQIKAAEADIVAMAHSREVCVLLMSAPGVGPQTALRFAAALDRCDRFTDGHHVASYLGLAPGEDSSSSRKRITSITKAGSAPVRWLLVEAAWCALRLRPEDPMSRWALRIGQRRGRKIAVTALARKLAGVLYAIWRDGKPYDPTLTASTPSES

SEQ ID NO: 89992 - protein, 351 aa, unidentified
MLIIGVDYHPSFQEIAFLNQETGECGERQLNHSEGEAEKFYRELKQRGVSVRVGMEATGYSRWFERLLAELGFELWIGDPAVIKTKRVRKKKTDREDARLLLRLQLEKHFPIIWVPTPENRDLRQLLWHRHRLVQMRTRIMNQLQAVAMNEGKRWKKKLFSEQGRGQLEKLQLAPWASRRRKELLELLDRLNPTIAELTASVEQEAKRRPEVLRLMTHPGVGPITALAFVLIIGTWERFHCGKQIGSYVGLIPCEDSSAGRQRLGHISKQGNTLLRFLLVEAAQAAVRWDPDWRRRYLHLAMRRDRRIAKVAMARRLGVRLYWMWRNGREYSQSVEFGSHAGLPVIVHDVR

SEQ ID NO: 89993 - protein, 294 aa, unidentified
MKIENSINGCRVLQDWIKTKKVRKFLVAMEATGIYYEQAADYLSRHAPVYVINPLKIKEYAKSVFCHTKTDRADSALIADYAKRHSDRLNTYTIPHDRQLQRLINLQLQLKEQIKQAKNRLHASQDDFIADTHKAIICFLDAKLDQTASELDSLIKQQNALTRHFENIKTIPAIGKETALMLLHHLMAKPFQTANKFISFAGLSPKIEQSGTSVDRKRKNKYGHKKLKQSLFMPALVAFRMGAFPQFVKNLQESGKPKMVIIVAIMRKLAKLAYYIFKSGQPYDKSRHQAASHN

SEQ ID NO: 89994 - protein, 345 aa, unidentified
MLEKAEVAVVGIDIGKNSFHVIGLSARGEILLRQKWSRSQVEVRLANMPPCLIGMEACVGAHHLSRRLRTLGHEARLMPAKYVRPYSKGQKNDFRDAEAIAEAVQRPTMKFVATKTVEQLDLQALHRVRERLVSQRTGIINQMRAFLLERGIAVRQGQRFLRTGLPGILAAPDDVLSPQMVHLIEGLSADWRHLDERIDQLSNEIHAMARDDRNCERLMSVPGIGPIISSAMVAAIGAGDAFSKGRDFGAWLGLVPRQMSTGDRTVLGPISRRGNRYLRVLFVQAAWVVLIRPGSWERYGLKSWIESARKRLHRNVLAIALANKLARIAWSVLAHGRGFEASAMA

SEQ ID NO: 89995 - protein, 309 aa, unidentified
MAKIICGVDVSSDRLDARIGLEGAELSVERSAEGVDELLAFCRRHAVELVVMEATGGYEQLAFSLLWAKGACAIVNPRAVRRLAEGLGLLEKTDRIDAGVIARYGEVKNLVGQAPASEAQQKLKALVTRLSQVTVLQTAQTNQRRLVQDETVLASIDAFLALARSQIRQLEQAIAQLLSHDPLWQALDQSFRSIKGVADRTVARIMAELPEIGLLGGKAIAKLVGLAPLANDSGKRRGKRSIRGGRAGVRSILFTVAEIVRRHNPDFADLHKRLTALGKPKKAVRAAVARKLLVRLNAKARDARLAFNP

SEQ ID NO: 89996 - protein, 341 aa, unidentified
MEHYAGIDVSLECSSVCVVDAGGKIIREGKVASEPEALVAWFGSLGFSLMRIGLEAGPQSQWLFAAFRTAGLAVELLETRHVRKAFETMPVKSDRNDARGIAQLMRLGWFRPVHCKSLPAQEVRVLLTARKLVQSKLYDIEMSLRGMMRGFGLKVGPTTPKRFAGRVRELVAGHPTLEFVAERLMAAHEVLLRELNGFEKQVRAMARSDARVQLLRSIPGVGAIVALTYVSAVDDPKRFKSSKTVGAHFGMTPKKYQSGETDITGRISKIGDRSVRTALYESAQVILTRPVKGSGLKSWAARLARRVGMKKAKVALARKLAVIMHRMLVDGTPFNPAAAAA

SEQ ID NO: 89997 - protein, 353 aa, unidentified
MPELTTSSIVIGIDVHKYAHTAVALDCLGKEKERLTFSNDELDKCVGWLSRLGSTENLLIGLEDVNGHGFHVAKRLEEKGFSLIYVPPVLTDRERAHSVHKDKSDVLDAKRVGKVILHKKEETLPATWSIPQEKEHIRAIDLLLQERRDLVREQTRLKNQLHVLFHQHYGNGYRKGFASTFSLKALSWYTASLKKETSYLARSILRRIERLELIYNQIKEIDQTLYEESRHVPAISKLSRNLRGCGHLTACKVVAEIVTIFRFLDRDKLAKYTGIAPITKGTGRTIRVHTNPYGNRKLNQAIHTIALSQIGNRSLPEARAYYEKKLSEGKSKLWALRCLKRQIINRVYDILTN

SEQ ID NO: 89998 - protein, 391 aa, unidentified
MIAVGIDVSKDKHDCFILNSEGTVLADVFTIANNRIGFETLLSRIQSCSQGESKIKVGLEATGHYSYNLLGFLLDSGLATYVINPLHTNLYRKSLSLRRTKTDRIDARTIAMMLMSDVDLKSYSNTAYHNEELKSLTRYRFDKVKERAKLKSSVARLVNILFPELEKLVSSLHIAVVYALLSNYPGASYIANANTEELAETLCTASKGRYTKSKTAEIQVAAGVSIGSKMPAKSMELKHTIALIRELDKEISEVESAIDKITSQMDSPIFTIPGIGRHMGAMILAEVGDFSNFASADKLLAYAGLSPSTYQSGQLQNCYAHMEKRGSRYLRYALFNAAKYVCLWCPTFSAYLEKKRSEGKHYNVAISHAAKKLVRLIFAMQRSGKAFLADY

SEQ ID NO: 89999 - protein, 369 aa, unidentified
MADRITYVGLDVHKESIVVAVASGGLRGEVREYGRIANTATALDRLLRKLGDAGMVLRFCYEAGPCGYGIQRHVSARGHECVVVAPSLIPKRAGDRIKTDRRDAASLAKLHRAGELTAVWVPDPQHEAMRDLVRARLDAVHSLRRARQQLSGFLLRQGCHYGRPAWTKLHRRWLAGLIFEQAIRHIVLEDYIAAVEAAEARRDRLTAQIGTMLPDWTLAPVVAALQTMRGMAMVNAATLIAELGDLSRFADPRQLMAYLGLTPSEYSSGSSVRRGGITKAGNGAARRLLIEAAWSYRFPARLSRELLLRQESQPKPIRDIAWKGQVRLCARYRRLARSGKPANVVTTAIARELTGFVWAIARQVTVTPG

SEQ ID NO: 90000 - protein, 428 aa, unidentified
MQYALIQVLPDVPPGGVCAGIDWASTDHVACVVDMAGRVVDRFTAAHDRAGIAGMIARLRRAGAGEVAIERCGGPLAAALLAAGLTVVVITSRQVKNLRSRFSAAGGKDDRFDSYVLADTLRTDRARLRPLVPDTPATAALRAAVRARKDLVAHRVAAANQLRAHLAVAFPAAIGLFSELDGPLSLAFLARFGSQDAAAGLDEDAMAGWLSTLPARGNPAPPAVLCARLRSAPPGATGGDGGAQAGVTAALAASVASLATQIKALEIQIAGQLAGHASAHIFTSLPRAGTLRAARLLAEIGDCRSRFPDPWPLAALAGVAPVTRRSGSHTAHTFRWAVSHQLRDAVCDFAADSRHASPWAASIYHDARDRGKDHPHAVRILGRAWIYVIWRCWQDRTAYDPAKHTALQRLLDQQRAAQAARPAPQEDR

SEQ ID NO: 90001 - protein, 416 aa, unidentified
MSSKAKCDGRIKSDIVVVGIDVAKRRHVAAIRFPDGSTIKPFSFQNDREGFERLISRVERARFESGVDGTLFALEATGHYGHALQHYLLTGDRSVVGVNPAHTKRAKELLDGSPEKSDTKDAIIIADLAAHGRGRPVTQLDGVYAELRRLGKLREQLTTERTRYLNRYTGLVDLVFPELVGLVYDVTYPTIRNLLTKFPTAPDIARRPYRLIRRLLWKWSIGHYDEERCRQIHEASKRSVGVREGLEAIRLQMRLTLSSLRSVESQLSTVEKTQIEALWQVPYAEQLLTIPEIGRVTVATILGETGDLRQYRSAEALIKLAGLNLYSLSSGTFHGRTRITRRGRPLLRRIIFLAALRMGKRGRPLAEFHDRLLERLAKPQIAVACSRKLLRMMFAIVRDGTVYQPDRLAAPAQAVA

SEQ ID NO: 90002 - protein, 415 aa, unidentified
MSLKIVYKICCGIDVHKTFVVACIASTNDKGVTSYESHRFSTYTSGLKTLLQWLLKHNCKDVCMESTGKYWIPIYNILENDCSIVLAHPKYVKAIRGKKTDKKDAKWIADLFKHDLVAGSFMPPADIRQLRDLMRYRFKLTCFQSSEKNRLQNCLTVSNIQLGNVVSDTFGKSAQAILDKLLENPADTSFDLEPLVYKSLKKKLPELRDAIDGYITPEQVGKLKVIKAHYESLESRKAELEELILALAAPYQQELAILQTAPGIRSLFTAIGIISEIGTNMEAFPSAKHLCSWAGLTPTNNESAGKKKSVRVSKAGCYIKPLLVQCANAVVTSKKHPEIRNRYLRIKKRRGHKKAIIAIARMLLTALYHMLKNGENYNAELYRKYDLPPTNWEITVEQAIIIAKNQGYKIKSATA

SEQ ID NO: 90003 - protein, 364 aa, unidentified
MKKVSKVVKQTESAKDRPAITVGLDLGDRYSHYCVLNEEGEVIEEGRMQSTETAFGRHFEGEPRQRIALECGTHSPWVSRLLKTLGHQVIVANARKIPAITASESKNDRNDAELLARFAAHDPKLLSPVQHRSLERQQDLNLIQARSTLVRARTMIVNALRGLVKSAGGRLPACSTESLPVRVRASIPPALRAIALPLLKQVALLNRQIGSMDRQIEKLAAKYPEIKVLRTAPGVGPVVAAAYVLTLDRPDAAGNRSAGAFLGLRPRQSQSGDSDPQRRISKTGDSYLRSLLVQSAQYILGRFGPDSALRLWGLKLAANGGKRGKKRAIVAVARKLAVMLHSMWRSGNCFQPFPQPATDAAAAA

SEQ ID NO: 90004 - protein, 344 aa, unidentified
MLYVGLDLSRKRLDFDARLGDGELVERGAVPPDADGLAGLVRRLGDVQVLAVIESMNGARYVHDRLELEGWDVRIADAVKAKGLAPLACKTDKIDAWVLAELARLNLVPEIWLPDPAVRGERERARFRLHLVKHRSALKNRIHSILIAHGVASPSSDLFGMSGRRMLERLGLPEPWRSTTVASLALIDTLDEEIERCERELRLLGADHRYVPLLMTCPGIAWILAFTIASEIGDIARFPTPVKLVGYSGLTPRVEQSGESDRRGPLRKNGPDHLRWALVEAAHSASRHQLYRPILERNRDRHGRKRGTKIAALTIARKLAEASWYMLTRNQPFAPAGATRPLAA

SEQ ID NO: 90005 - protein, 392 aa, unidentified
MRFVGIDIASEKHVVAVVDEAGGVLVKPTGFGEDAGGYGRLFEFLGTAGEVLVAMEATGHYWKNLFAELAARGFPVALLNPVRTRRFAGEELERTKTDAIDALSIARFAQQKRPAVTRLTDSVTDEIRELVRHRERLVQDFGDRTRQLHRLVDLGFPELKRFIHTLDSQLATAVLHEWPTAEAFLGLPWKKLAKFRYDGVHIVGDELAKSIVETAKVSVGRHHGYAYRIQVQDTCEDLDLLRRRIKRLDGDIDTKLGDHEVGSLLTTIDGIGPTTAARIIAELGDPADFRDAAAIAAYVGVVPALKQSGKRTVSRAGLTPIGNARLRAALWMPTLTAVQKNAWLKAHYQRLRARGKLPKVALVACMRKLLTAVYSVAKHRRPFVPEMAGGSA

SEQ ID NO: 90006 - protein, 412 aa, unidentified
MSLPECDFYVGIDWAAQTHAVCVQDAAGKITAQFTIEHTADGFATLLARLGRLASDPMQVSVALERPDGRLVDALLEAGYPVVPVSPNAIKTWRDGEVLSGAKSDAGDAAVIAEYLRLRSHRLRPATPFTPATRALRTVVRTRDDIVAMRTATANQLTALLDAHWPGATKVFADIESPIALEFLTRYPTAKHAAGLGEKRMAAFCVKHGYSGRRSAAELLTRLRAAPAGTTDPDLVEAVRDAVLALVAVLRTLGETRKDLDRSVTAHLGEHPDAAIFTSLPRSGQINAAQVLAEWGDSRQAYDSPDAVAALAGLTPVTKASGKYHAVHFRWACNKRFRKAMTTFADNSRHQSPWAAEVYRRAIQRGHDHPHAVRVLARAWVRVIYRCWLDREPYDPARHGNANKINSGQLAA

SEQ ID NO: 90007 - protein, 422 aa, unidentified
MVAQRDPPKAQKNSTGGIDLVRYHVGVDVGKDRHHVSIRDVETNTYCKTVSITNDREGFAELVSSLERLSGDKSAFLVGIEACPYGLNLSYFLMGVGFNLVEVNPFRAGQFRKAQGMKAKTDRIDARSIAAILSLGDHKSLSIPDPILDNLKELTRFRTDLVDERATMIIHLREALSILFPEYDKVFRQLDSSGSLAVLAAFPGPEHLIAAGEETVGKVLSLASPHRMGRGMARRIIGAAQDTVGVVQRQPALGIKISILAKRIESLQSTIHELDRQITTLFNSLPCKPQGFPCGRAPTLAAIVSEIGDIHRFPTLKKFLSHLGWCPQSFQTGNYHMEHPRMSHAGNKHIRRLVWMLSINAIRMVPRYREYFLHRVSEGKAKMHILVAVGRKLLSALYAILKRGVAYDPNWEENSRLAMAKH

SEQ ID NO: 90008 - protein, 340 aa, unidentified
MDKVTTFAADIAKRIFSVYWVDAETGEIGTKTMTRTKFEEFMRTREPSRVVLEAGGSAHHWGRWLAQQGHEVRLIAAQHVRPFVRTNKTDGADARAIWEAAQRPEVKWVAVKSEASQAVLSLHRMRRQLMDMRRMQSNQLKALLYEFGVVAPAKITEAQLKDWVAAGRVPQLLASSFEEQIERIARLKREERELTRAIERHNANDALAMQLLAVPGIGVLSASALSAELAASAKSYANGRQFAACKGIAPRLSGTGGKVRAGAISKRGDPYVRTLLIHGARSVITHQRRAKRLSPWLSGLLERRPLNVAVVALANKMARTAWALAAHGRSYQQNYGAQAA

SEQ ID NO: 90009 - protein, 459 aa, unidentified
MGNARKGKIPAQLVEDEDYQLRHERVAGIDIAKAKADVCTRLPPSRAGGRRASRVEEVPATAGEVLALAGRLLADGVELAVMESTSDYWRIWFYLLEGAGLRVQLVNPRHARQLAGRPKTDRLDAQWIARLAEMGLLRPSFVPPPEIRALRDLTRTRLQLVRDRTREWQRLEKLLEGALVKLSSVVHSLARTKTARVIVEAIASGESDPGTLAGLAAGRVKGGRGAIAGALEGMQVRDHHRTLIRVHLDHIALLDRSVAAVEDEIQAALDAIPAAWGADATGETGPDAGRGPDPAALPAAERLAEIPGVSPALARAIIAETGLDMSIFPTAAHLASRAGLAPVASQSGPRTRKPGKGHGDAYLKGYCTQAATGAAGTGTFLGERIGRLSRRLGGNRARCAVARSILVIIWHLLSDPGARFADLGPGWHDSRADRDRKIRAHVRQLQALGLNVELSEAAA

SEQ ID NO: 90010 - protein, 410 aa, unidentified
MEVLHPRCCGLDVHKETVVACVRLVIDGKLVKEVRTFSTTTAGLIELSEWLTETKCTHVAMEATGVYWKPVWHILADDGFQLVLANAAHIKNVPGRKSDVKDSDWISDLLAHGLIRPSFVPDGPTQEMRTFLRTRKQFVHEKGSHILRIQKTLEDANIKLDSVITDIIGVSGRKMIEALIAGERDPAKLASFADRRLKASQQTLRQVLRGRVTAQHRFLLRLHLDQIDALDAAIARIDREVEASIAPFRTAVEQVRTVPGIKSLAAQTILSEIGIDMSRFPSSGHLISWACICPRSDESAGKRRSTRIRKGSPWLKTTLVQCAWAATRKKGSYLQAQYYRLRARRGPKKAIVAVAASILTAIYHMLKDGTMYQDLGPNHFDARAKERQKNRLIKRLADLGYAVELAPLPN

SEQ ID NO: 90011 - protein, 352 aa, unidentified
MRTSQKTPETITTIGIDLGKNTFHLVGLDKRGAIALQRKVSRSQLEHRLSNVPRCLIGMEACSGSHHIGRQLTALGHDVRLLPAQYVKPFLKGHKNDYRDAEAIAEAVQRPTMSFVAIKTPEQMDLLALHRVRSRLVGQRTGTINQIRGFLIERGIIVRQGVVPLRKALPDILGSNTDILSPRMVSLIVDLMQDWRRLDERIETVSTEIEALALQDDSCQRLMTVPGVGPIISSAMVAAIGNGAGFKQGRDFSAWLGLVPKQESTGDRTILGKISKRGNKYVRTLFVQAAHVVLVRRPNTAMRGLWPWIEQASKRLHRNMLAIALANKLARIAWAVLARGQAYQPRIAANAA

SEQ ID NO: 90012 - protein, 429 aa, unidentified
MRTESTPGARGPVFCGVDTHADSHWLCVLDWRGRKVLSRQFPADAAGYEALAGAIAAAGEPACIAMEGTSSYGAGLTRHLASLGMPVREALSPARTQRRRPGQGKCDEADAERAARAAMSGSRLGTPKSQDGWVDGVRCMLAARSGAVKARTSAINTARSLLTTAPEGLRSRFRGMGGPRLMEELPSVRSEGALGAALGALADLWAAARDAALDMERAIGASLEENCPALLAMYGCGPVSAAKLAVAAGDNPGRLRSEASFAAICGACPIPASSGKTVRHRLNRGGDRQANSALYEIARQRVMRDPETAEYAERARGRGKSDREVMRCLKRYVAREAYRALMHPHEVRRPEDASALVAARRAARVSQVRAASILGTSEKYISMLERGQREFKPIRRAYEAWVEAGLPLDWDRQAFEAERKMDSKKDLAI

SEQ ID NO: 90013 - protein, 348 aa, unidentified
MEVRVVSTPSAGADNVPVHCYVAIELSKSSWIVGFQTPLTNKTSQYQVKACDANALLELIERIRTRVARELRRPIEVMSCYEAGYDGFWLHRVLKAHGIHNHVLDPASLQVNRRARRAKTDRIDADRMVRALIRYLRGEPEACSVVRVPSVEQEDAKRLHRERRRLIAERVQHVNRIKGLCATQGIYHYAPLRKDRLARLDDLRTGDGRALPTRLKAEIARELKRLEVLLEMIATVETERDVILTSAASTHLNAGKIKMLAKLKAIGPEFATTLVGEVFYREFANRRKLGSYVGLGSSPFCSGPVDRDQGISKAGNPTARSMMIELAWTVAALSARQRLEHLVPGTRR

SEQ ID NO: 90014 - protein, 420 aa, unidentified
MKAYDVDDFDVLIGIDWADKKHDICEHPNHSDDYHYCVINSKPEGLHDWAMDLKKRYPNQKIAVACELKKGPLIYALSKYDHLVLFTINPSTVAKYRKAFTPSGAKDDPSDAFLQVEILTLHMDKISTIEPESASIRALSQLVEYRRSLVQDSVDLSNKITVTLKNYYPQVLEWFGEKDTMIFCDFILKWPSLNQVKKAKKQTLLNFFSAHNSHYPEINEARVIKIKNALPLTDDVGVIAPNQMLIEVLIVQFKALLQGIEKLNSAINTSYKAQRDKPIFDSLPGAGAKFAPRLLVAFGSDRSRYSDASEIQKYAGIAPVIERSGKKMWTHWRYSCPTFLRQTFVEWAGLSMRYSFWAKAYYDQQKSKGKPHNSIIRSLAFKWIRIIFRCWKTNTLYDESTYLEALKRRGSPLLKFAVTS

SEQ ID NO: 90015 - protein, 307 aa, unidentified
MFIGIDVSKDRLDVHVRPSSEAFAVARDSAGLEALVARLQTLAPQLIVVEATGGFETVVASAIGAAGLPLAVINPRQIRAFATACGQMAKTDRLDAQVIAHFAEAVQPEARAIPDESARALGELVTRRRQIIGMMVAERNRRRQLTQPRLLKTVDRILATLQEQLSAIERDIDEAIRGTPAWREKEELLTSAPAIGPKIARILIADLPELGTLTRRKIAALAGTAPFSRDSGKWRGQRSIAGGRGTVRAALYMAVLVSIRRNLPLAALYHRLRAAGKPAKVAIVAAMRKLLVTLNAMLRDKTEWRAA

SEQ ID NO: 90016 - protein, 413 aa, unidentified
MDVLHPCCAGLDVHKKTVVACVLRSDAAGVPARRVRTFGTMLDDLGQLRDWLAAADCTHVVMEATGVYWKPVYNVLEDAFTLLVANAEHVKRVPGRKTDVSDAEWLATLLRHGLVQASFIPERPQREVRELIRFRTSLIQDRARAVNRLQKTLEGANLKLASVLTDITGVSGQRILDALLRGETDPEQLAELAHWRVLQSKRGTLERALVGRLSDTLSFVVAQQLQQIRALDDQIVACDGRVGEELRPFDAEIELLDGIPGVGRRTAEVLIAEWGADLSRFPSAGHLAAWSGMCPGNKASGGKRQPVRTRKGNPWVRRSLTEAAWAAGRVKGSYLGVQFRRFAARKGRKHAVVVVGHSILTVAYYLLTHRVSYRDLGVEYLETRDRDATARQAVKRLQALGWDVRLTPCPVAA

SEQ ID NO: 90017 - protein, 400 aa, unidentified
MLSIGIDVSKGKSTVCGMKPGGEIVYTPFEIQHTREGMSELLSLLRGSGEEVRVVLESTGSYHCPVVAALLENGIFVSVVNSLRMKRFCSQSIRRVKTDQIDAMQIALYGLAYWQELQPTRLPENTYRELQLLARQYYQMTSILIKAKVDFNALCDQVLPGMQELMNDHAGRHKLSDFVLRYRHTTHILEMGETRFRKDYCKWAEKKGYRNRERMAALIFATAQNGIPVLPNAPSTQIVITEAIRVLHTVEASRDAILTQMQALAKTLPEYSLVREMPCIGDTLAPRLIAEIGDVRRFHSKRALIAYAGIDAPPYQSGKFCANNRHISKRGNRYLRKTGYEVMQSYVMHKPANDPIFTFIEKKRGEGKSGKLAMVAGLNKFLRVYYGKVTELYRSLSAIE

SEQ ID NO: 90018 - protein, 377 aa, unidentified
MSSTIIWIGMDVHKDTVMVAVYVDGASEPEVVKQLPNDRGKLKRFFQRWARRGEVRSCYEASGAGYVLQREITGWGYGCEVVAPSLIPVRPGDRRKHDQKDAIQLARLYRAGELVTIRIPTSAEERVRDLVRCRECFQREILRSRHYVTKFLARRGLVYREGKNWTQKHRDWVQQILTGGTLEPGDLSVLGEYLALLDYKTSRREDLDHQIEEIAFSSDYRAGVGRLRSFRGLDTIAAMTLLTEIGDWRRFERPGQLMAYLGLVPSEHSSGGREQRGPITKAGNSRCRHVLVQAAWHYRHRPAVGGRLKVRQRGQPPGVVAHAWKAQHRLHKLYHRIAARKSSRIAVVAVARELVGFLWAVMQELETEKAGELHSAA

SEQ ID NO: 90019 - protein, 351 aa, unidentified
MAEVTTVGVDLSKEVIVVGASDARGRTLYFKQLSFGAFGQWAANLPPCVFGMEACSSAHHWARFLAQHGHTPRLMAAEHVAPFRMSRGAKNDRNDAQAIAMAVVHPNMRFVTGKSLEQQAMLAWHRSRSGYVEERTALLNRIRGLLAEFGIWIGRSSGALVRHLPELMDDERLPELFRPILLHAQDHLRELKARIDECDARIADHALHNEDAQRAQQLCGIGPQIASALVATVSNPRDFRNGRQLAAWAGLVPKQFSTGGKSLLGPITKRGDAYLRGLLTQGARSAVQSALRRKPEKRSRLEQWIIELHGRVGYHKTLVAIANKYLRILWAILARKEDFDARAWLRHASNA

SEQ ID NO: 90020 - protein, 415 aa, unidentified
MRAHRNCCGLDVHKKIIAACLIREDAEGDSVREKRLFGTMTRDLHELAQWLCAAQVTAVAMEATGVYWMPVWNVLEPYGLQLLLINPEHYKAVRGKKTDMKDGTRIAELLQDGRLEGSYVPPAATRMLRDLTRYRTKLVQYQSSLANRIQRLLEQCNIKLAAVASDVLGVSAMAMLRALAQGETDAARMADMAKKQLRKKIPQLQLALEGCVLPHHRLLLSEMIEDLDHVETKIARIEETIEQQMRPFQSAVNRWLTVPGIKHRLAWTLVAEVGPTVEAFPSAADLVSWAGVCPGNNQTAGKRKSGTTRAGNPWLRRALCEGAWAASKSKGTYLQAQFRRLAALRGPKRALIAVANSILTAGYYMLHRATTYQDLGPDYFDKRNTVRATHRLVKRLEALGHRVILEPRFITDPSG

SEQ ID NO: 90021 - protein, 342 aa, unidentified
MSKVAIAAIDLGKHTFHLHAQDDRGHELYRKKFNRVALMQHLMNLEPCTVVMEACGGAHFMAQEAAKLGHTPRLIAPHLVRPYVKSNKNDFADAEAICEAATRPSMRFVPVKTQAQQVLAMLNSTRDSFIKDRTATVNRIHAALLEVGVSLAPGFKSINALPELLEASSISEPYKKNLMRLYRHFKHVEEEIKSLDKDVECQAAEDDLATRLMTLPCVGPITSTVLAAELGDGKQFKCGRGYAASIGLVPKQHSTGGKSVLLGISKRGDRNQRRLLVQCARVYLIQLERQKGALADWVRRLLASGHHSNLVVCALANKLARIAWAIAAHHTEFDAGPAAMNT

SEQ ID NO: 90022 - protein, 372 aa, unidentified
MNYNTVYVGMDVHKESFTLCSCKYEDEKASHYQRTPASYKNVLRYLAFLRTIYGEDTRFVCGYEAGCLGYSLYHQLENFNVECVILAPTTMLEQRSKRRIKTDKRDAEIIAKSLAQHNYSPVHIPTETDNQTKEFIRMRDDHKAELKKIKQQILAFCLRQGYQYDGSGNWTAKHVKWLRSLKTEGLYKEILDEYLLTYTILTDKLNRLDQRIEELASEEEYKEPVSKLTCFLGIKTHTALSVIVEVGDFQRFVSARKFAGYLGLVPGQHSSGDDRNGLGITKAGNTHVRRLLVESAQSYTRGKIGYKSRVLRSRQAGNSPQVINYADRANERLRRRYYKMVLKDGKKYNIAKTAIARELACFIWGMMTDNIY

SEQ ID NO: 90023 - protein, 348 aa, unidentified
MEHYAGIDVSLECSSVCVVDATGKIIRESKVASEPEALAAWFGSLRLDVVRIGLEAGPLSQWLFAAMKQAGLAVELLETRHVRRAFEAMPVKSDRNDARGIAQLMRLGWFRPVHCKSLPAQEARALLTARKLMQSKLLDVDNSLRGILRGFGLKVGKTTPKRFAGRIKELVAGHPSLETIAEALLAVHAVLQREFNALDKRVRLMARSDARTRLLMSVPGIGAIVALTFANAIDDPARFRSSKQVGAHFGLTPRRYQSGETDYTGRISKIGDAAVRTALYEAGHVILTKPLKGCTNLKSWAMRVARRAGMSKAKVALARRLAVIMHRMLVDATSFNSPVRKAPAVIAA

SEQ ID NO: 90024 - protein, 344 aa, unidentified
MATYYIGADVHSNNTDLAIEHRGQIVARYSVPTSIPSISAVLNSIQGKKILAMEEGPMAGWLYRNLHEKVDKLVVSEPRRNKLISSEGDRDDKIDSGKLAVLLRGNYLKAVHHTSDSHRAHLKHWVNLYHDRVRDAVRDINKIRACCRMHGVRIPRKVVRNPVRRRAWLSELDNSVLKVQLKMLWIGYDATREQVKIAKKQFSSYARKYPIIKSWSALPGIGIIRAATIFAYLDTPWRFKKRAKLHRYCGVGLVRITSGKDKKGRPKPARLKLPWAVNRRLKNAVMGAATTAIERGDNAFKDYYKRMISNGIAPANARHSVARKLVSTMSAMWKTGNEYDEKLV

SEQ ID NO: 90025 - protein, 368 aa, unidentified
MDSPFQDGIRCAKLEDQLTSIQLKGGVPMKGTTIGIDIAKNVFEVYVEDEAGQVVERRRLSRKKMVPWFANYPCAVVGMEACGGAHFWGRELAKLGHTVRLIAPQYVKPWVQTNKSDQADARAICRAVQEPGMRFVAIAGEAQQAVQAVHRVRRRLKENRTALVNQIRGIMLEYGVALPKGVAAVRKALPLLLAEERWAPLIRQFLREQHAELLEWDTRIVAVTKAITQENARQPVCQRLEQVRGIGPLSASALWLKAGGQTYQNGRHLAAALGLVPKHTGTGGKIRLGGMSKRGDRYLRSLLIHGARSVITHSREKQDPVSRWVHRLVERRGMNKAVVALANKNARVAFALIHEDQPYDVTKMCRAA

SEQ ID NO: 90026 - protein, 338 aa, unidentified
MQTGQTAQTYALFVGVDIAATTAAVATQRPGAKASQSFIIDQTPEGYTSLLRTLQRTGHAPCQVLVVMEATGSYWISLATRLVHEGFGVSVINPAQAHHFAKALLKRAKTDAIDAQTLAQLAMVLQPEPWTPPPQIYYALQQRLAQRDDLLNLRQQVRNQLHALVQHPEVIPEVRARMDRLLATFEAQLTEVEREIAAALTQDAAWAAAATRLQSIKGVGWVTAAWTLVTTLNLTSCDTVDALTAYAGLAPMPRQSGSSVWHRPSIGHTGNGRLRTAFYMATLSAAQHNPVIKAFYTRLREGGKPEKVARCAAARKLLHIAWAVIKKDQQFDPYYARG

SEQ ID NO: 90027 - protein, 365 aa, unidentified
MKKISTVATRQAKNFPPQKLTVGLDLGDRWSRYCVLDEAGKIRLEQRVSTTSKAMGEVFGALPRSRIALEIGTHSPWISRLLSELGHEVIVANARKVRLIAESRKKDDRLDAQTLARLARIDPQLLYPVKHRSVQADLTVIRARAGLVRARTALGNTARGLAKSYGERLRSCNVRNLNPEKAESLSPELQAALEPLLKAIESLSEHIVEYNERIESLAQQSCPQVALRKQIKGVGTLIGLTFLLTLEDPHRFRKSRDVGCYPGLQPGRRNSGQSEPQMHIRKEGDPYLRTLLVQGAQHILGPFGPDCDLRRWGLQLAERGGRNSKKRAIVATASKLAVLLHHRWVSGEVYKPLHNSSPTTVAAAA

SEQ ID NO: 90028 - protein, 350 aa, unidentified
MIIIGVDFHPGSQQIASVDTDTGEFEEKRLAHREEAEKFYRDLASRGAQIRVGMEASGYARWFERLLAELQIELWIGDASEIERKRARKQKTDREDAQHILQLMLQDDFPKIWVASWENRDLRQLLWHRHRLVQARTRIMNQLQAVALNEGLQCKKRLWRASGRQQLESFRLGPWASRRRRDLLELLDRLSPTIAELSQAIEQEAEKCPEAQRLMTHPGVGPLTALAFVLIIGQAERFQCGKQVASYLGLVPLEKSSGKRRRLGHITKQGSSIVRFLLVEAAQAAVRGDPQWRSKYLRLLMRRGRKTAKVAMARRLAIRLYWMWRERQDYQQSRSFGSHAGQPGNRDGVH

SEQ ID NO: 90029 - protein, 404 aa, unidentified
MIFVGDDWSEDHHDVCLMDQAGKRLASRRLPEGLTGIRQLHELIAEHAEEPDQVVIGIETDRGLWAGALAAAGYQVFAVNPLAVARYRDRHHVSGGKSDASDAKLLADLVRTDRHNHRPIAGDSLDAEAIKVLARAHQSLIWARTRHTNAMRSALREYYPAALLAFEDLAHGDALGVLGRAPTPEQGAHLDLPAIQSALKRGGRKRNIAARARQIRAALRSEQLAAPAPVAAAFGATTRAAVGIIVELNRQIAELEAELATHFEAHPDADIYRSLPGLGVILGARVLGEFGDDPNRYTSAKSRKNYAGTSPLTVASGKKRAVLARHVRNRRLYDAIDHWALCALTSSPGARAYYDHHRAAGDVHHQALRALGNRLVGILHGCLRHHTTYSEHTAWAHRQITQAA

SEQ ID NO: 90030 - protein, 335 aa, unidentified
MQSYGIDLAKEKFDVSFFDLTSKKVSNQPSHKVVKNNLKSIGRFLETLPSDAVLVAEHTGVYGDTLLKCCMDSNVKIAFVGGYVIHRYRATPDRAKTDVLDCALLRDFGERYPDKLKYKTFPEEALYELRQLARHREMLVEQRKQLITADKSEDCRPIRSLAVKRSMDRIKEMLDTEIAETEKEMLKVINGHESIRHNYELVKSVDGVGLITAVELLVKTENFTKITTARQYAAYAGTAPYEKSSGKMDKGAHISKIGNRRSKTLLYICAESARLHNKEIKLYYERRTLIDKKPRHYVLNAIANKLLRIIFTLVEKGEYYDANFIRQDPRAVKYN

SEQ ID NO: 90031 - protein, 343 aa, unidentified
MQTITTIGLDIAKSVFQVHGVDNDGKVVIRRQLKRRYVLAFFEKLQPCLVGIEACASSHHWSRELQALGHTVRLMPPAYVKPYVKRQKNDAADAEAICEAVTRTNMRFVPIKTPEQQSGLMLHRTRHLFIRQQTSVINAIRAHLAEFGVTAAVGRKGIEELLRVIADPSDKRVPDVVRACLAALGSQLLSLKKQILDFDRMIMAWHRSNQTSKRLNCIPGVGPLLATALVASVADPKTFRSGRNFSAWIGLVPKQHSSGGRDRLGSISKQGDRYLRSLFVAGALAVIRYAKIHGTKYRPWVAALLTRRPTKVAAIALANKLARMAWAMMARGERYNYPASLRV

SEQ ID NO: 90032 - protein, 420 aa, unidentified
MKVVYSTCCGVDVHKTFLVATIIKTTKGVQPSYQKKRFSTFNSDIRHFKQWLLDNSCFDVCMESTGKYWIPVFNLLEDKINVTIANPKWVKAVKGNKDDTKDSKWIGDLFRLGLVPGSFIPCKDIRILREYTRYRFKLTCCKRSEKNRFQNAFTVCNVALDAVVTDMFGKSASSITDYLITSDEFDPETCKSFLQKSLKKKADSIIESIEGYQMTSSQKERMLIIRSHLDFVQQSIDSLDSKLDELIAPYENAVSLLCTIPGVDRTSAITIISEIGTDMSQFISSKRLCCWAGLTPGNNESAGKKKSTKITRAGVYLKPALVQCAHAAVKSSTSPYYKNKYERISKRRGKKRAIIAIARMILTAIYQMLSNGETWNPCDLYKIDMSQEMQDKQKTKAIKQALKLLVSEGVISPESASVAI

SEQ ID NO: 90033 - protein, 410 aa, unidentified
MDVFCGIDWAEDHHDIALVNRDGGLLARARIGDDAAGLTRLLDLLAEHGDSAEDPVPVAIETPRGLLVACLRATRRVYPVNPMAVARYRDRHSVAGRKSDHGDAVVLANILRTDLHAHRPLPADSELAQAIAVLARAQQDAVWGRITAHNKLRSHLREYYPGFLAAFAAAKGGITRPEARAILAAAPTPADAAKLTLAQLRALLRKAGRSRGIDAGAARLRDALRKGQMRQLPLVEQAMGRQALALLRQLDAACHSADDLEQAATESFNLHPDAGIITSFPGIGPLTGARVLAETGDDRSRFTDAKGLKAYAGAAPITRASGKTRSVTRRHIKNNRLAQAGYIWAFSALTASPGARAHYDRRRGNGDRHAAAQRNLFGRLLGCLWHCLATGQHYNEKTAFPNQAARPAAA

SEQ ID NO: 90034 - protein, 338 aa, unidentified
MYYTGIDLHKKTSFITTVDEQGQVRARRNLPNQLPVILNYFCSLTQPTQVVIESMGSWYWLYDALREAGHEVIISNPCKTKAIASAKIKNDKIDSHMLAQLLRAELIAPVHVSRLETRQLKELLRHRSKLVNDARRMKNRIHMLLIKNNIQQPFSDLFGTRGIEYLRQLPLPAAYQAQLNVYLPLYLQLEQQIEPLTKQIQQLAKQHPMAMLLMSIPSIGPIVAMTFVAEVEDITRFASYRKLCAYAGLVPSLDSSAGKDRHGRITKQGSKYLRTALIEAAQCVARLRNCRLNVYFRKRLVRSGYSKAVTATAHKILQIAYYVLKNQQPYQEQYAARA

SEQ ID NO: 90035 - protein, 343 aa, unidentified
MNVTTIGFDIAKGVIQVHGVDAAGTVTLRKRMSRAGALKFFGGLKPCLIGMEACGGAHFWARELAGFGHTVRLISPIYVKPYVKRSKTDAADAAAICEAVSRPHMRFVPIKSREDQALAQAYKTRGLLVAQRTALVNALRAHLTEFGIVAPLGPAGAAQLIALVRTDVEPLPELARRTLLELADMIEATQARIAAFDAQLKELAATDEASRRLMKVPGVGPVAAGTLRALAGDVTRFRTGRDFAAWLGLTPRQNSSGAKVRIGAISKAGNRELRTLLVMGQMAVLRYALANPAKASPWLAGMIKRRPRLVVAVAMAAKTARVIWAMLARGESYRPLRVSTAAG

SEQ ID NO: 90036 - protein, 341 aa, unidentified
MNEITIVGVDLAKNVFVLHGASADGRTLLRRKLSRGRMLEFFAKLPTCMVAMEACASAHYWGREIGKLGHDVRLINPSYVKPFVKRQKNDAADAEAIAEAASRPTMRFVAVKSAEKQASSMAFKVRDLLVRQRTQTINALRGHLMEYGLVVPQGVRNISRLRELLETHTNLPEVARELCGELLLHIGALSDKVAALEKDLRRRARRDEMASRLMTIPGIGAICATAMEALAPSASTFGKGRDFAAWIGLTPRQNSSGGKDRLGKTSKMGQRDLRRLLVLGATAVVRWARRYGAPAGSWLARMLIRKPPKLIAVALANKLARIAWALMARGGVYQAPVLGSA

SEQ ID NO: 90037 - protein, 414 aa, unidentified
MLTERSPAPATRFVALDVHRQYLMVGAVDSQQHVVLFPRRFGFAAFAEWAHVHLTHADAVVLEATSNAWLLYDQLQPLVSEVVVAHPQAVKLIAAARVKTDSRDTIKLASLLAANLIPAVWVPPQEVRELRALVTHRNRLVQQRTQAKNRLHSVLQRHNFDPPPGTPFAVHQREWWLTLDLSLAEKLRVQQDLSLYQTLETLIQEIEAELGRLSTCDPWVKQVPFLVQLPGLGVLSALRILAAIGEITRFPSAKHLVGYAGLGASVHQSGETNRGGRITKEGRSDLRGVLVEAAWVAVEHHPHWKAQFERLAARIGKQKAIVAIARKLLVTIWHVLSQQEADCHAQVEAVTRKLLNWISHTGTIPGKKRDRLLLLYDYLDQLGLSEEVEQVNYYGSTYRLSARQKLLRATHQRG

SEQ ID NO: 90038 - protein, 357 aa, unidentified
MKKSTTQTQRIVVGLDLGDRYSHFCILDPEGQVIEEGRIATKKEALRRKFEGTEPMLVVFEVGTHSPWVDRLLQSLRHETIVANAGKVALIYRNERKHDRKDAHSLAELGQFKPRLLHPIRHRSEETQAVRALVRSRDVLVKSRTAFINHCRGVVKASGNRLPRCSAESFARKVATGIPEELRGGLGPVLEFIEKLNLQIRAYDRKIEKICEEQFPITEVLRQVSGVGPLTALWYVLTIEDPTRFERSRDVGPFLGLVPRLDQSGEQDPQRRITKAGDELMRRLLVGSANYILGPFGPDCDLRQWGQRIAARGGKNAKKRAAVAVARKLSVLLHHLWITGEVYEPFMRGTEKLEAAA

SEQ ID NO: 90039 - protein, 338 aa, unidentified
MEAYAGIDLHSTNSYIGIIDEKDQRHFAKRVPNSISQILVALEPFKENLKGVVVESTYNWYWLVDGLQQEGYKVHLANPSAIKQYEGLKHTDDKWDSFWLAQMKRLNILPEGYIYPKEERAVRDLLRRRLLFVRQRTSQILSLQSTITRNLSFEMSCNAIKKLQEEDVEDSFDSPCLVLTAKSNISVIQFLAKKIKCIENAVKSQVKLRKEFQLLKTIPGVGDILAMTIMLEVGDISRFAQAGNYSSYCRCVGSKRISNGKKKGENNRKNGNRYLSWAYVEAANFAIRFSQEAQRFYQRKTAMTNSIVAIKALSNKLAKASYYVMRDQVAYDANKLFG

SEQ ID NO: 90040 - protein, 388 aa, unidentified
MNVTADQPEAPTAIRTDLGAIFVSLELSRSSWLITSLSPGGGEKMSKHTVRGGDVSGLLQRVAQLSEKARVRTGKVFRLIVIQEAGLDGFWIDRVLQNEEVESHVVDPASIATSRRRRRAKTDKIDGETLVRSLLAYKRGEPRVCSMVKAPTPEEEDHRRLCRERKVLTAESVRHVNRIKGLLFCQGISGYEPLRRDRRERLEELQTGDGRRLPQHLKAQVDRELDRLELLLKQIKTVEGERDALLAAAQTAMPAPAAMLLDIKGIGSEFAAVLWSEGLLRHFDNRRQVAAYAGLAPTPWQSGAVDREQGVSKAGNPRLRTTLIQLAWLWLRNQPQSALTIWFHERVRRNAGRLRKTTIVALARKLLVALWKYVTTGVVIEGATMKAA

SEQ ID NO: 90041 - protein, 351 aa, unidentified
MLIIGVDYHPSDQYIAFADTETGECGERRLNHSEGEAEKFYRGLQPRAASVRVGMEATGYSRWFERLLAELGIELWIGDAAEIKTRRVRKQKTDSNDARLLLRLLLEDNFPRIWVPSPENRDLRQLLWHRHRMVQMRTRIMNQLQALAMNEGQRRKKKLWNEQGRAQLEGLPLAAWASRRRKDLLELLDRMNPTIEDLTRAIEREARRRSEAARLMTHPGVGPITALAFVLIIGTPQRFGCGKQIGSYVGLIPAEDSSAGHQRLGRITKQGSRLLRFLLVEAAQAAARGDTDWKRRYMHLAMRRERNIAKVAMARRLGVRLYWMWRNGWEYAEWVKFGSNAGQLGTGHGAK

SEQ ID NO: 90042 - protein, 355 aa, unidentified
MTSTKYIGMDVHKESISIAVRNAAGKIVMECVIETKASTILQFFDGLRGDVQVTFEEGTWAAWLYDLLKPHVTKVVVCDPRRNALLQEGNQNDRVDARKLAELLHNNQLRSVYHGDHGLRTLKELVRSYLTITQDLSRVMTRVKAIYRSWAIPCTGKQVYASRHRAEWLGKISEPGVRRRAEFYYQQLDALRCLRQEVRRDLLAESKKHKAWKLLCQIPSIGPIRAAALLGILQTPHRFRTKRQLWTYGGVGIETSSSADHHLVKGQLERNKKQVEIRGLNKNYNHDLKNLFKGAAVVAATKPGPFAEFYAELLARGMRPEMARLTLARKIATIVLIVWKRGVSFDAQHLKPQTA

SEQ ID NO: 90043 - protein, 348 aa, unidentified
MTHYVGLDVSQKLTAICIVDDAGRRLWRGQCTSDPEQIERTVRRRGGDGARLGIETGPMTPWLVHELRGRGLDVTCLDARHARAALKMQINKTDQNDAEGLAQIMRTGWYRSVYVKSFDAHQARALLGARAQLVGMTTRLSNHIRGVLKTFGMLPGAMRGLPFDRRVETLIAGRTEVAPIVRPMLAAWRQLRQQIATFDKAVRALAKSSPTCRHLMSVPGIGVLSVLADVSMIEDPARFGRSRSVGAHLGLTPKQYQSGEIDRSGRISKCGDTLARTLMYEAAVVLMTRVKRASGLKDWAQAIATRSGAGKARVALARKLAVILHSIWRSGEPFRWSGQPAAVSREFQ

SEQ ID NO: 90044 - protein, 343 aa, unidentified
MRRRCQYSIGVDVGKESLVVQVVRGPESTQGLKGDRGSWSNTRGGYRKLLTWLRQAGVHGWESRMVMEATGLYWKKAAQYFYAAGFEVWVVNPYRVHAYAQSMGRQGKTDRSDATVIAQYGHHGKGYAWVPDSEAIGKLRSLIRQREDVLCGLGQARNRLESWDQDPQGAAEVHASLKRTFRHFEKERKELDHAIHQCLEETAEWKEVVELLRTVPGIGDITLAWVLVETKGFQRFSHPQSLASYAGVVPHPYQSGTSVHRKDQISNSCQRSLRAVLYMAGLSAIRVNPLLKEFYQRLRQRQKPFKVALIAVVHKLLRILFALVRDRQPFRPTPAPTTQGVTL

SEQ ID NO: 90045 - protein, 405 aa, unidentified
MYYLGIDVSKASSRVVILNDNGEKHAKPFSIENDKSGFQTLLEQLKTLNISKNDCLAGIEATGIWWENLFCFLTENGFNIILLNPHQTNKFREALRKKAKTDDIDAYVIAGLLRSKEHASCYVPQESIQSLREFTKLRFELAKDLKNYQRQAYSLLALVFPEYEKTAIKNPFSIASMAILKEFPTAKDLATASVNRIEKIARHIKGNNLNTDEINKLIQTAKDSIFSGKAKDARGLSLKTILSLIEHIELAVKELEANILAILKGNDNDSDDFPGGNLLTIPGIAEKTVANIIQATGEHGQVFPTTTKFIGHIGFFPQIYQSGESKTANKISNRGPKILRWTFYMAAVSCIRHNRQMKELFNKKVSQGKSKKQALIYVAKKLAALCLSMLKSGLPYSPERVFVAA

SEQ ID NO: 90046 - protein, 353 aa, unidentified
MRQTTPAHEIVVGVDTHKHTHTAVALDALGARLGTMTAPVDREGYRRIEAWARAFGPVRAFGVEGTGSYGAGLSRALREAGHRVLEVNRPDRSARRRRGKDDPLDAEAAARAVLGGQATAEPKAGTGSVEMIRHLKVARDAAVKARTQAMLTLKAIIVGAPAELRERLEGIRGKLALVRHLAKMRPGPIVSTTASATAALKAIAGRWLALDEEIEAHDRELEALVSASAPDLMAARGVATATAAEMLLLVGDDPGRVRSEGAFAKLCGACPIPASSGRTNRHRLNRGGNRQANAALHRVVVTRMRLHRPTIDYVGRRTGEGKTKAEIMRCLKRYVAREIFGLLRKGSSAAKAP

SEQ ID NO: 90047 - protein, 360 aa, unidentified
MDKKPKKQRIAGGVDTHSGTHHAAVVLLNGRRLADAEFPATTAGYADLLTWMHSFGRLHAIGVEGTGSYGAGLARHLRGHGVRVVEVNRPDRRQRRAKGKSDPLDAYAAAEAVLAGRATAVPKAGDGIVESIRALHLVRASAVKARTACTNEMKALVITAPAQLREHLRVRTAAGLVQACSRLQPPQDLADLADPAAGVAAALRRLATRYQALTTEIADADKQLAVLVKQARPDLLTVRGVGVETAAQVLSTCGDNPDRLYSEAAFASLCGVSPVPASSGKTTRHRLSRGGDRQTNRALYMIVITRLGHDSRTRAYVARRTAEGLSKKEIIRCLKRYVARELYKILTHPRAKIKDLSVAA

SEQ ID NO: 90048 - protein, 376 aa, unidentified
MTAPTRPESSVCEATLYVAFELSAKQWKLAMTTGFGVEPWVTTVAARDLAGVTRAIARGRGRLCVSVETRVVSCYEAGRDGFWIHRALTQLGLANRVVDSASIEVNRRARRAKTDRIDALKLVRMLVRAWGGERDVWREVHVPSVADEAARHGSRERTALIQDQTRVLNQIRGWLATWGSGVPRRRADGWWTTVRDWAGTVLPAAVQARIARAEARLAQLATQIAELDAQQQRAVTAAAPASALGRLVQLKGVATTGASVLLEEGLIWRAFRNRREIGGLLGFAPMPYQSGEVAHDQGISRAGNERLQAISIQLAWNWIRWQPASALTQWYQHRFAGRGKRMRRIGIVAVARKLVIALWRYATMGVVPVGALLKRA

SEQ ID NO: 90049 - protein, 445 aa, unidentified
MTQRTIGIDLAIRGEHVAQIFEDGRPVGRPLRFRHDPVSLAALVARVTAGLEDGDTPQAVMEPTGMSWFPVAHWLADAGVGVARVKGKRVKALRRYLSEHAKTDLADAHVLAAIPGFGGPRLDPVHIPAPKSHALQRLTKQRGRMQDAVASAKRRLLDLVRWASPTLERVLPDFRTRLSLALLSRWVEPDAVLAARKSTIARFIASNANGNHPHGGPFVDTLVDGLRQAARDARALHRGHVDFTELQAEIAIEVDVVLAHLKALGDLERRIDALYTELQPDDVLRTIPGVGQHLAPVLLGVLHTAQRFHSERHLRGFCGLFPRRADSGGAERPGQTITQGGNDRVKRALMLAADTARKIDPDLAEVYWRLMMTKGHHHKQALCAVANRLVNRIHRVMRSAKPYVLRDHDGREISIAEARAMIAERYTVPEGIRASRRANRIMAST

SEQ ID NO: 90050 - protein, 403 aa, unidentified
MGSAVKSPCVAVDVSKGKSYYQGFIEIDKPANKATPVQHDLEGFKSMFELGQTLKETYGDVVYVFESTGIYHKALETFLMNHEEKCIILNPLEASKIRKTDLRSTKTDARDCKSIAKAYFMKDFRLYNQKDELYGKLQSMNGHYNFLIQQLREMKVHFRNALDIVYPRFDEVYSDPYSDIPTAVLKRYAHPDELKNKRVETIVKYIMKDTKRREPKAKDEAKKLKDYIDNVSSGCRSSSFEVTILKAMVNKISDQEVEIELCLDEMRELVSEVPLYHQLMSIPGIGDNLAIRLIGELGDLDRFERSEQLVAYAGIDPRVYQSGQMTGEHLHITKKGNKHLRTLLFLAVSSNVRIGKTNPILDFYNKKRQQTNPLVYKAALIACANKLLRIIFGMYKSGKNFHK

SEQ ID NO: 90051 - protein, 359 aa, unidentified
MASISLDDPQRKVVVGVDTHKHLHVAVAIDHHGARLGDLAVSADTGGYAQLEVWARALGRVDRFGIEGTGSYGAGLTSYLRRCGHRIIEVNRGDRRTRRLNGKSDTVDAEAAARSVLAGTSTSIPKTADGLSEMIRQVKVARDTARKGRTSAIITLKQIVVNAPAELRESLDGLTDKLLLDRCAGYRPGKIDTTTASAKHTLRALARRWMDLDAEIHGHDTVLDDLTAQASPTLRDGYGIGPDTAAEILIVFGDNPDRIVSEAAFAKLCGTCPIPASSGMTNKHRLYRGGHRQANAALYRTAIVRMRFHQPTIDYVARRTTEGLTKKDIIRCLKRFLAREVYQRVMVDHRAREALNAAA

SEQ ID NO: 90052 - protein, 378 aa, unidentified
MQASITRTPIMGEDDTICLAIELSWTQWLVAAVVPGDGRLSRFSVPARDLRALLDLINKLRERARRALGRETAMASCYEAGRDGFWLHRWLLSVGVANLVFDPASIAVDRRARRAKTDALDVEMLLRTLLAQRRGEPQVVRVVRAPSEALEDARRLERGRERLVKERTAHINRIKGLLATLGLEGGRPWRKDWPAWLGEQRDWQGQAVAAGLARELLAEHERLLLVVRQVAEIDALRVAPEHMLAPAIRELSRLKGIGPGFASLLGGEVFWKDFKNRREVAGYFGLAPSPWQSGSIARDQGISKAGNRRARHAAVELAWLWLRHQPESALARWYKARVGETKGRVRRIAIVALARKLMVALWRFLATGLVPADATLKA

SEQ ID NO: 90053 - protein, 344 aa, unidentified
MGEVITIGLDIAKNVFQVHCVDSGGAVVIRKRVSRLKVLEFFAGLPSCLVGIEACPSAHHWGRELQSLGHTVKLLPPSYVKAYLKRCKNDANDAAAICEAVTRPSMRFVPLKTREQQAALMLHRTRQLLVRQRTMLSNALRGHLAELGIVSGKGRNGIVELLGVIADAEDHRVPPVARAILEVLARQYRAIAVEIGLIDKSILAWHRTCEASRRLAEIPGIGPIVATALVAEVGDWQSFSSGRSLAAWIGLVPKQHTTGGKERLGHITKQGNRYLRWLLVVGAMAVIRYAKQHGAKNRPWLARLMQRRPAKVAAVALANKIARIAWAIMVRGERYKEPKLLMAA

SEQ ID NO: 90054 - protein, 334 aa, unidentified
MQGKMTSVRAGLAVYAGIDVCKAWLDVYLHPIGRSFRVPNSKEGCARLALELTSAAAGLVVMEATGKLHRLAHRELSAAGFAVAIVNPYRSRKLADALGQLAKTDKIDARVLAFYGAAIGPEVTPVPAKSLAELQELVLARQAGGANVYRERQALPHAGETALKNQAAAAASPVLKRLLKAQLKAQARLIAGLEAAIAALLARDAGLRRRCELLASIKGIGPVVAATLVACLPELGMLGGGQIAALAGVAPMNCDSGDMRGQRRIKGGRAHVRSALYMAAVAASRCNPDLKAFYDRLRNAGKAAKLALTAVMRKLVLLANTLIREDRYWTPKHA

SEQ ID NO: 90055 - protein, 334 aa, unidentified
MLYAAIDIHKHAFQAAVLDAESGEVVEERFAADRESLTRWTERWRGRVVAVAIEATTGWRWVWRELEREGFDVHLAEPVQTRALLGRRHSAKTDRLDARWLARLLAKEMLPESWIPPAQIQELRDRTRLRKALAEDRRRWGQRLHAHLLHEGWPCSRSNLLRPPGLRWAAALKLPEHARLQVDSLLAVMAALEEQLDRVDGELRRFARADQRCQALQSIYGIGPILACHLLAEIGEACRFQRAEQITRLAGLDPVVDESGDSRRRGQLAKAGSPHLRWALVEAAVHAHRTTAPDLALYRATRERRDTTVARLTVARKIGKRAFHTLRELELAAA

SEQ ID NO: 90056 - protein, 352 aa, unidentified
MEEVSVIGIDLAKRVFQLCAMTRSATIVWEKRLRRAAFIKFLEDEAPRCLVGLEACGGAHHWARWLVARGFSVKLMPPKTVKAYREGVHKNDRRDARAVAEATSRSQVAAVRIKSAAAQATQALMRVRERRIRQRVQTANQLRGLLNEFGIVLPKGHRLLLVRLGELIPTAEFAALPAIVQELVQTLSDEIIEQAAKVAAASAALTTAVQADMNCRLLMSIPNIGPINAAALSVALETPGAFARGRAFAAFLRLVPRQHASAETARLLGVGQMQACEMRRYLVLAAQGLLTRVDRMKELPQDRLLAWAGRLLRRKMRNVAVVAVAAKLARIAWAVMAHNQPYQPRPVGAQPV

SEQ ID NO: 90057 - protein, 389 aa, unidentified
MPYHVGVDVSKWKHDVFAMDQDGSVVLKPFQIRNDSEGFSNLLKSLGTLGDKAGVRICMESTGHYHKALYGFLADNGFSPSVVNPYLVSAFAKGLTLRKEKNDRADAIVLARYSFEKSPAPGEAQSDALEQLKSLTRARDKLVRERSDKIVVVTNCLDRTFPEFTGFFEVKSAIARFILSKRPDAKSIASMTPAFMEKARKVSHRASALKIRALKEAATRTVGRPDPAASAIVSATIPVLESVGEAIEKIEEEIKAIMSGLEEHVSSVPGISVISAAAILGEYGDVSRFANPGKMLAFAGLESSHSQSGQADSHGKMVKRGSPHLRYVLMNVAITAKNYNAVLAEYYAKKHGKEGKKRRVALNHVAKKLIRIIWKLQRDGVDFDASKLR

SEQ ID NO: 90058 - protein, 350 aa, unidentified
MPKAPLQHVATLGIDIGKNSFHVVGLDIRGAIVLRQKLSRGQVEARLANMPSCLIGMEACVGAHHLSRQLLALGHDVKLIPAQFVKPFRKSHKNDFRDAEAIAEAVQRPTMRFVPTKTVEQLDLQALHRVRARLVSQRTAVLNQIRTFLLERGIAVRQGLRSLRQALPDILAKRTDVLTPRMVHLIEGLMQDWHHLDERIDAVTDEIGALVAADEACQRLMSVPGVGPIIASAMVAAIGNGAAFRRGRDFGAWLGLVPKQTSTGDRTILGRLSKRGNTYLRSLLVQAARVLLLWPAKWPQHSFGNWLTAASARLHHNVLAAALANKLARIAWSVLSQNRTYEPRTAAVMG

SEQ ID NO: 90059 - protein, 350 aa, unidentified
MLIIGCDFHSRFQQIAMLDPQTGEMMERRLEHENGEPRKFYAGLATPARVGMEATGYAQWFERMLAEQGHQLWVGDAAEIRAAMVRKQKTDSRDACHILDLLLRDKFPRIWIPSTEERDVRQLLRHRYKLVCLRTSLKNQLHAMAMGQGICRKKKLWTAVGRKELEGLSLGPWASRRRQQLLEMLDQFEPVIDELDRAVIQEAEKRPAAVRLMTQPGVGPVTALAFVLTIGPVSRFQRSKQVVSYLGLNPTEESSGGRQRLGSISKQGNSMLRFLLVEAAQTASIYDPELRRDYQRLKFRRGSGVAKVAIARKLAVRLYGKLREAAQPVPPAPMQGSPAVSVVGESLSCF

SEQ ID NO: 90060 - protein, 354 aa, unidentified
MNEQKYVGLDVHQSSTVAAVHNERGKRVMESILETKRETIQSFLKGLTGTVHVTFEEGTHAGWLYDVIKPLVSELIVCNPRTNKLLASGNKSDRVDANKLAQLLRGGQLKGVYHGGVSVRALKELVHNYDALVSDTTRVMNRIKAIFRGRAIHCAGRDVYNPGHRGKWLHQLIEPMVRRRAEFLYQELESLKVLRREAKKEMLREARRHSAYQLLKQIPTIGPIRAAEIIARIGSPHRFRTKRQLWTYVGLAVTTRSSAEYEVEQGRVRRRHKTIVTRGLNINYNHRLKRVFKSAALNGIHREPFASFYQDLMRKGMRPEMARLTLARKIAAVTLRIWKKGDRFNELRLKREAA

SEQ ID NO: 90061 - protein, 337 aa, unidentified
MDHFAGLDISMDETHICVVDREGVVVYESKTASTAEAIADKLSDAPSCHRIVFETGRMAPILFHGLSQLGLPAVCVESRQAYQALRSLATHKTDRNDARGLAHLARAGFFKPVHVKSLSAHALRSLILARKKLVGQRVTLENQIRGLAVVFGIRLPRALTAAFIDQALKASEGVAGLSAAMRGLIAARTAVMSAVAAIDADMRRMTRASEACRRLMTIPGVGQLTALAFVAAIDDPSRIRRSRDVGAYLGLVPKRYQSGEVDYVGGISKCGDRRVRTLLYEAANVMLTRYNGQLKLKEWAFAIARRSSMRKARIALARRLAIIMHAMLRNGTEFVVA

SEQ ID NO: 90062 - protein, 368 aa, unidentified
MPSVTNKSTPIPDEPVAQRYRFVVGVDTHAATHSYAIVEAANGSLVDEQTFPTTTAGLGRARAWIARRTDGDLDGVLVAAEGTGSYGAVLAASLAEGGYRVVEAPTPRRERGRGKTDAMDAITAARSTLAMPLARLRDRRGGQDHVALQVLSTAREQLNAERLRAINGLTALARAHDLGIDARRALSSAQIRQIAGWRRRVEPLGSATARAESVRLAGRIVDLDIELKKNRDQLTAIVTDRAPELLAMSGVGAVTAAVVLCVWSHPGRVRSEAALAQIAGTAPIPASSGNTMRHRLNRGGDRRLNWALNTVVLTRMRTDQATREYVARRTVEGKSAREIRRCLKRYTTRQIYRTLNAAHPTLQPTSAA

SEQ ID NO: 90063 - protein, 386 aa, unidentified
MPQLNDLSRSLITLEQDATLIAVIEMGQSSWLVAGIVPGVERQPLKKLAVDESALLKLLNRWREEAEQAGHRIKRIAVAFEAGRDGFWLARWLRTRGIETHVIHASSVAVSREHRRAKTDRLDTELLKRAFLGWLRGERDHCKMVAIPTTKDEDAKRPNRERESLVGEQSRIVNRMKATLTRLGIRGFNPKLKKAGERLDDLRTPEDEPIPPNTLAELRRDMVRRRLVSDQIRQIEGARLERLEQAPCDGPHAMVRLLARVIGVGIETADMLVQEVLSRNMRDRRAVARYAGLTGSPDESGQKRREKGLARSGNARVRRGMIQLAWRFLMFQKDSALAQWFRARTENARGTRKTMIVALARKLLIALWRLVRDGVVPDGVILRPAQ

SEQ ID NO: 90064 - protein, 386 aa, unidentified
MIYVGVDIAKHNHYACVTNERQEVLSAPFPFTNDEVGFAKLTDSFAKYQKNDVIVGLEATSIYGENLIAHLSNLGYKIALINPIEISVIRKKKIRNAKTDKIDAKNICKYLATEEYRLMQPDEIQTLKLRNLCRFRQNLKKSKVRLKTQLVSYLDVSFPEYSSAFSSVHGKGAYAVLSEFPSASEIAKANVTRLTNLLKKASRGKFDRLKANELKTLAKHSIAAYNCDMSFQIRQTILQIQMLESQLNDVEKHICNLFDELDSVIATIPGIGAINGSMILSEIGDIKRFSNPNQLIAFAGLDPTVRQSGNFKARTTRMSKRGSGVLRYALVNAAWNVSLNNATFKDYYNEKIAQKGRHYAALGHVAGKLTRVIFAMLKNNMTFNLP

SEQ ID NO: 90065 - protein, 352 aa, unidentified
MSKKNTRNALDTSLSYAVIGLDLAKADCAVAAVPCSDDELGLIDRMDYESLFEQAEKLKPTLFAMEPCCGYSQISLRLQNMGHEVKVISGHAVKNWIATHKSNQKTDLNDATALAKLALYDHDLQPIRVKNVEECRIASVQAIRIQLRTQATKSLVCFKSLCQCWGIVIRRGSLNTKKMAEAVAAVEKLLGAEVVSSLMILRDAYKFTMKQINALDKLLDALVEANEQARTMKTVLGIGTQTAARLAVTTGDIKRFPMPRSYVAYFGLALRNIITGHSGTPSPSKRGALKPVSSRGQGKVSRRGDRVARSFIIQGAATIYPENRGIYTQSDSSKKSSRNIWSLAVVSVDQRY

SEQ ID NO: 90066 - protein, 321 aa, unidentified
MQPVTVTVYAGVDVAKASLQLHLQGRQTEFPNQPAGLAKLRQQLQTIPHVHVVCEATGGYERPLVQALHQAQIPVSVANPAQVRAAAQAQGQRAKTDRIDAALLTDYGQRYQPKPTPPTSASQDQLVALTQWLTQLIQAQALAKTQAEHHEAAFVCKQHAKLMAHFESQIEAVEKQIRALVAQDALLQQRVECLDQITGVGPRTAWLVLAHMPELGQLNRQQVAALAGLAPWTRESGTMKGLRCIGGGRPEVRLALYMAALSAARFNPVLQPFYQRLRAKEKPGKVALTAVMRRLLVYMNHQLKALAAAQAATKIDHAKTP

SEQ ID NO: 90067 - protein, 449 aa, unidentified
MSERTIAREAPCIRSTHDRGAAALPKKHLLTRMKTWQQLTHYAGFDWARDHHDIVVVDGQGRIVAQFRISHNAAGWEEFRRKIAVYPAVGVVIETSQGAAVDQLLQREGLTVYPIHPVAAQRYRERKAPSGNKTDLVDAWSLADALRLDGSQWKALQPMDPLTQELRLLCRDEMSLIEQRTALVNQLQQALNEYYPAAVAAFDDWTRPATWEFVIEFPTPEILLQRKRSRWEKFLHKHKLWRPQTAEKRLDIFAGAGAFCASPAVTSAKSLLAVSLARLLRALQNQLDQYRSQIEKLFEEHPDSGLFGSLPGAARYLAPRLLGEVTAEAQRFDEPQALQCLAGTSPVSYQSGQIHKVHVRRQCSKVLRQIIHLWADCARHAAPWIQTYYEKKRQEGKSHACALRCVGQRLLKILWKMIQTRTPYNADLHTKNQLAHGSWVLQLMRQKPA

SEQ ID NO: 90068 - protein, 536 aa, unidentified
MSAVKELAPHVGQSAACRALSVPRASWYRGLQPVAPPAAQPTPARALPPAERQTVLDHLHSERFRDKSPAEAFATLLDEGVYLCSVSSMYRILAESGEVRERRDQLRHPAYKKPELLATAPNQVWSWDITKLLGPAKWTYFYLYVILDIFRWDETAGLAETVKLFRSALQGAKGDQPMKKDSRKAKCMDKPAITVGLDVGDRFSRYCVLNEDGEVVEEGKIQTTEVALQRHFDKEPRQRIALECGTHSPWISRLLERLGHQVIVANARKIRAITASESKNDRNDAEKLAHFAYCDPFLLSPIRHRSPERQQDLNLIQVRSTLVRARTMVINSVRGLVKSAGGRLPKCSTADFAKQALPLISAELALVVAPLVEQVGTLTDQIRRLDKQIENLSQRYVEIKLLRTAPGVGPVIAAAYVLTLDSPDTVANSRQAGAFLGLRPRQSQSGDSNPQHSISKTGNIYLRSLLVQSAHYILGRFGQDCELRRWGLKLAASGGKRGKKRAIVAVARKLAVILHAMWRSGHPFEPFLLPATTAVA

SEQ ID NO: 90069 - protein, 403 aa, unidentified
MNMNAVGIDVSKGKSMVAILRSYGEIISKPFEVKHTVSGIRSLIEQIQSIDGESRIVMEHTGRYYEPLVRELSKADLFVSAINPKLIKDFGDNSLRKVKSDKADAVKIARYTLDSWTELRQYSLMDEIRNQLKTMNRQFDFYMKHKTAMKNNLIGVLDQTYPGANTYFDSPAREDGSQKWVDFSATYWHVDCVRKLSLNAFIDHYQKWCKRRKYNFSRSKAVEIYEASKELVSILPKDDLTKLIIKQAVEQLNTASQTVEQLRTMMNEAASKLPEYPVVMAMKGVGKSLGPQLMAEIGDVSRFTHKGAITAFAGVDPGVNESGSYEQKSVPASKRGSGTLRKTLFQVMDALIKTKPQDDPVYLFMDKKRAQGKPYYVYMTAGANKFLRIYYGRVKEYLSSLPE

SEQ ID NO: 90070 - protein, 400 aa, unidentified
MECVFGIDVSKENANVAVLVDNVVIKQFKIGLDQLGFSLLSDELNSFNAPLIIYEATAMYSRRLRAFLQRDGWKYTELNPLAAKKVMEEFRHTKTDALDAVGLARAMIKNHFRPTYQESPVYTELHDLERTYQQFNKDIVPNKNRLHRALQLTFPEIEHFMSSTDGVLYWHIVQRFPHPAIVLSHEENELTEIILTETSKKIGLKRAMKLANHLLALAQNSAPAKEPQSHAVRAVIALAKEVERINQLKAQIIVEMTTLGENLSEVPLLVSIPGIGIKTALCLIAELGDVRRFHSANAINAYIGIDLIRYESGQYEAKMHIRKRGNPYARKILYRAILNIISVSQYQPTLISANYKRKKQSAQSHGTKKIAIAAMSQFNRLMHHLILNNELYDSTTFMPE

SEQ ID NO: 90071 - protein, 423 aa, unidentified
MIYAGVDIAKVDHVIGAVDERGSEVCGPMGFKNGAAGFERCEAWLEGVAASPADVLVGMEATGHYWMALYAFLTSKGYAVAVIDPLQVRAVRRFKGLGGVKNDRVDAGLIAEAMRIGQYDPTRLATDDVQSLRTLTRYHQSLKSELAEVKVQCTCLLDAYFPEFSGVFSDMFGAAGRAVLSRSPLPSEVRRRRVDSLQRDISSAARGSRRVDGKAAEIKALAGRSVGIALGERAASLQVRSLVRQMDFLDAECAKIEAEVRGLLDRVEPLVLTIPGVSYTTGAQIVAEIGDVSRFRNASALVSYAGLNSSVCQSGMFDSGGGPITKHGSPYLRRALWLAASWARLHDPSLREFYERKRAEGKCHRVAVTAVARKLCHIVFAVMRDQVPYDPSRPGRDPSKHSVSGSQGAAKTKTKTNTETEAE

SEQ ID NO: 90072 - protein, 482 aa, unidentified
MKKKNIYINQSQELLTLFEEAGDSAKIMCVPIDYAKKDHVVMFCNGHGDILRKPFSVKNNPQGVKYITEQVSRSCRHHKINQNHVFFGGEDVGSYAENFASTLRSGGWLVAGVNAHDAKKQRANLQASTDRLDLMGIATMLLNRRANCSPAQSGIYRNLRTLVRHRRRLVVMTTEVRNRIHAIVDRLFPGFLDERKSGITPFSKSSLYLMENRFSASQIRRRRRSTLIEALRGLGTPKPDCAVAKLEEYAQQVLKTPDEYVSTLQLSMAQHVKHYRCLQENIEQLERETALWLAQTQGAFLTSVRGIGIVLAAGVSAEIGDPFEQKPLNNLVSYSGIIPRVIQTGGPEGEIYTGKVAKRSNRILKDYVVQSASHLGLHGPEDLMIDHKRRDAAGQHADFGIARRYLRMAMCLMRTSQVYLPPRLRKPGIKPEERAGYYLMTWPYLRDKWQKLGALEAAFSEDRPLGRWRNMVQEFYKIKLTL

SEQ ID NO: 90073 - protein, 349 aa, unidentified
MILVGCDLHARDQQVAVLDTATGEIQEQRLTHDGPSVEQFYAALPGPVTVGIESTGYALWFHALLHRLGHEVIVGDAAKIRAMVVRKTKTDRRDAAHLLDLLRHDRFPTVWLPDPAVRDQRTLVAHRMRLVRMRTMVKNGVHAIALNYRLALGPSLFTRAGVAQLQALSLPPHTSCRRSESLELLSWLNTRIKGLDDQIEEAAHAHPEAQRLMTHPGVGPLSALATVLVLGAVTRFPTSKHVVSYVGLAPAIESSAGKHRLGRITKQGNALLRYVLGQAGQVAIKRDPDLRRLYYAVLHRRGRSRAKIAVARKLLVRLYVMLRDQIDYQTFLYRAPAAARRKELMPTTP

SEQ ID NO: 90074 - protein, 352 aa, unidentified
MVVVGADVHKRTHTFVAVDEVGRQAGQRTVEATTAGHAQALRWARERFPGQDLTWAVEDCRHLSARLERDLLSAGQKVVRVPPKMMAEQRRVARTRGKSDPIDALAVARAFLREPSLPVASHDEISREAKLLVDRREALVGTRTRTINSLLWRVHELDPAHAPKERSLDKAKHQQTLRAWLLTVRGIVAELALDELDDVIALTVRIKELQRRIGALARRHAPSLLAMPGCGELSAAKLLGESAGVTRFKSEAAFARHAGIAPIPVWSGSTAGRVRMTRSGNRQLNAAIHRIAITQARMPGTLGRAYYEKKLAEGKSKTEALRCLKRRLARVAFHHLTTDHHNRHHAALPAAA

SEQ ID NO: 90075 - protein, 428 aa, unidentified
MTNRQPIPTDALLVAIDIAKVRNEALIEAPNHKRRRRLSVLNTRAEHDRLIETLRAYGKPVICAFEATGNYHRPIAWRLIEAGFDVRLVSSMALARTREALHNGWDKNDPRDAQVILHMLRIGATQRYHDPLRAGINDVQELSKTHEAIAKAKTEIQHRILTHYLPLYFPEIERFRGNSRSDWFFAFLDAFPTPASIMALSKEAFIEAAWDVVGRKVSKERLLADIYETARTSIGLPLPIDAPAIRMFRMVIAEARSLIRQRNEIEDMADAMLRDSADYKALRKVPGIGPVIALTILAEGGDLRRFRHHRQFLKFCGLDLSTQQSGQHRGQTRLSKFGNARLRRTLWIAGQVAIRQRENGFRHKFERYIAKDRDNPDLRRKALTAITAKMARVVHAIIKSGSDYRPFVEGRVPGGRISFCGAVRAPKG

SEQ ID NO: 90076 - protein, 346 aa, unidentified
MENGTYVGLDLSKTSTMATAVDPLGHRIRQKKLGVTDEELVRFLEEIPGPKLVVMESCNVWEHSYDAALSTGAEVLLANPFKVRLVSKATLKTDRVDSEKLALLARLNAIPEAYAPSPELRALRRLIRERIFYHAKWKGVASHTYAVLLQKGIPYRPEILTRVRLREELRTHGVPEVDRGLDALSKLEEISKPLDREIQRAFLDSKDAQLLATIPGVGKFTSLALVAFLSPIERFDSLDSVVKYCGLCPSVHQSGEKSYHGRLVWDCNTLLKWVLIEAQWNVRLRERKGDVARVGRRVARRGAANHGAVAAARKLARICVAILRRRTPYLPDSPGSSSRQVASAAS

SEQ ID NO: 90077 - protein, 401 aa, unidentified
MPFHGGLDWGGSAHAVCVVDAAGQVAARIEARHDAAGLADLLARLRKIAPAAELPIAIERPSGLIVDALIEAGHPVVPIHPNVVKACRPRYRAAGGKSDPGDAYMLADILRTDGHRFSPLTPLSDDIRALRALVRGRDDLVAQRVALANQLRSLLEGFWPGAAAIFATVDSPIALAFVGRYPTPDSATRLGEKRLAGFMAQHGYCGRRSPAELLARLRAAPLGLAGDAEAEAKGEIARTLAGLLERLVAAIAKLSSRIEHAVAELPDGRIVMSFPRAGRVCAAQILAELGDVRERFPTEGQLAAEAGVCPVTHASGKSRGVVFRWACNKNLRSALTCFADNSRHACAWAAAIYGRARARGCKHPHAVRILARAWVRVLWRAWQNRAVYDPEKHAGRLKPAA

SEQ ID NO: 90078 - protein, 529 aa, unidentified
MRAAGSNKSGCPDIIPKVIQQRGKGSVKKPSPELVNNFAAAHNRGGEQVATPEPRLGCPHPARVRQRSPTPVAAPGPSAERTLPQEGSYIRSHPLRVPEPLSIPTKMKTDWTEQTYFAALDWAKAHHDVVVVDRFGGIAAGFQFPHTAEGWKEFDQQMQPFGKCPMAIETSSGPAVDQLLQRDYPVFPINPKAAQRYRERKCPSGNKTDRIDAWSLADALRTDGQGWVQLIAQDDATMTLRLICRDENVLIEQRTALVNQLQAALTEYYPLALQSFEDWTKPFAWAFLRSFPTPQALSKAGKRRWEKFLHTQKLWRPGTASTRLEAWQKGQQLNASAAVASAKALLALSLVNVLQSLQKQIDEYRQRIRAAFEQHPDHDIFGSLPGAKDKLAPRLLGEMGSQRQAFPDAQSLSCRAGTSPVSFQSGQLRKARIRWACNDFLRHTVHLWADLSRRTCLWAQVYYAAKRESGHSHASALRCLGKRWLKVLWRMWQDRTTYDESIHLKSLQEHGSFVAKLLTPPPTQSASSL

SEQ ID NO: 90079 - protein, 414 aa, unidentified
MELLQERCAGLDIGKKDLKACVRTPNPSGRRSRRQEIRTFATTTNALLELRDWLVAQKVTLVVLEATGDYWRGAFYLLEDCLNVILVNAAHAKGLPGRKTDVCDAAWLCQMGECGFLKASFVPPEPIRQLRDLTRYRATLATERTREAQRLEKELEDAGIKLSSVATDILGVSGRAMLTALIEGERDVHTLAEMAKARMRPKIPQLVEALTGNFGEHHAFLCRLHLERIDQLSAAILELSERIEEQMRPFARQLEHLITIPGVGQATAEVIIAETGADMSRFRTAGHLASWAGLCPGHHESADKRKSGKTRHGNRWLGAALGTAAMAAARTKDTTYLGARYQRLVPRLGKKKTIVALEHSILTAIWHMLTHDLDYHDLGGDYFTRLDPDRTLKRIIHQANALGFTVRFDPIQTA

SEQ ID NO: 90080 - protein, 467 aa, unidentified
MLSDAMQTLAGRDADMTAEATGATSQRRVASCPVRERPRISWMRGDAPPRISFGRLRSRALGQAPPHRRREPGMIYAGVDIAKTDHVIGAVDERGAEMCPPMPFKNTEAGLEGAVAWLEGLAGSPSDVVVGMEATGHYWMACYSFLVARGYSVAVINPMQVKAVRKLKGLDKVKNDRVDAGLIAEALRIGQYDETRLATDEMASLRSLSRYLQSLRGMVAELKTQCICLMDAHFPEYAGIFSDMFGAGSRAVLSKSPLPFELARRRADSLARDIAEASRRGGKSSGYAAKIKAAAKSSIGVRLGQEAASFQVKSLIRQIEFADSECAGVEARLRSLLDEVEPLVLTIPGVSYVTGAQIVSEIGDVSRFRNAPALVSYAGLNSSVSQSGQFDSGGGPITKHGSPYLRRALWLAANRARQYDPGLRAFYDRKRAEGKPHRVAVTAVARKLCHIVFAVMRDQVPYDPGRE

SEQ ID NO: 90081 - protein, 347 aa, unidentified
MRFYTKQHQAYCGIDLHARSMYICILNQDGEIMLHRNMKASPEPFLKAIAPYREEMVVAVECIFTWYWLADLCAQEGIPFVLGHALYMKAIHGGKAKNDKIDAHKIAVLLRGGMLPQAYVYPADMRATRDLLRRRMYLTRKRAELLAHIQNTNSQYNLPEIGKKLAYKANRDGVAERFSDPAVQKSMEVDLALLGYYDPLLSDLELHIVKAAKQHNANTLYLLQTVPGIGKILSLVLLYEIHDIQRFPSVQDFVSYCRLVKCAKESAGKRYGTAGAKMGNASLKWAFSEAAVLFLRDNPAGQKYLTRLEKKHGQGKALTLLAQKLGRAVYYMLKRQKAFDMHKFLQA

SEQ ID NO: 90082 - protein, 351 aa, unidentified
MATTMTQTGVVCGVDTHANVHTGAVLDLNGQVLGVTSFPATLDGYGDLFDWVTGFGSITIAGVEGTSSYGKGLTRFLHSHHVGVVEVIRPNRQTRRLNGKSDPVDAIAAARAVLSGEATAIPKTGDGPIEAVRALHIARTSAIKAKTQAGNQIRDLITTGPTGLRERLHPLTTRQRVDVCRRLRITQGHDIAEAGTRQALRTLARRHVRLTAEIDELTQELDRLVKQVAPTLCALNGVGPDVAAKLLIAAGDNPHRMRNDAAFASLCGVSPIDASSGKQRRHRLNRGGNRQANNALWTVAMVRMSKDHRTQKYVQRRTKDGLTKQEIIRCLKRYIARETHTAIRKDLPNLT

SEQ ID NO: 90083 - protein, 354 aa, unidentified
MPEKPCKPTVVVIGIDIGKNSFHVVGLDQRGAIVLRQKWSRSQVQVRLANMPPCLIGMEACVGAHHLSRQLQALGHDARLMPAKYVRPYSKGQKNDFRDAEAIAEAVQRPTMKYVATKTVEQLDLQALHRVRERLVSQRTGIINQIRAFLLDRGIAVRQGLRFLRAELPGILASRSDLLSTRMAYMIEGLAGDWRLLDERIDRISDEIHTLARQDAGCDRLMSVPGIGPIISSAMVAAIGKGDAFSKGRDFAAWLGLVPRQISTGDRTVLGKISKRGNRYLRVLFVQAAWVVLVKPTTWERHGLKSWIEAARKRLHRNVLAIALANKLARIAWSVLARDRDFEPQSALTAVQPV

SEQ ID NO: 90084 - protein, 346 aa, unidentified
MVTLGADAHKRSHSVVAVDEAGRQLGAHTVAATSSGHLDVLRWAQRWPERRWAVEDCRHVTRGLEKDLLGVGEVVVRVPPHMAAEGRRSMRERGKSDAIDALAVARAALREANLPEAHLEEHSREVRLLLDHREDLVGERTRMQNRLQWLLHELEPGFQVASGALSRRPAIKRVEALLNGRSGLVAELARELTARTMQLNLRVDELERQLATILPTLAPSLLALPGCGVLTAAKLVGETADACRFRSRAAFAMHNGTAPIPASSGNQQRHRLNRGGNRQINAALHRIAVSQVRRPGRSHDYFLRRLAGGNTKREAYRALRRRLSDEVFRLMLIDQRQARSAKSAAA

SEQ ID NO: 90085 - protein, 338 aa, unidentified
MKIVRVGIDIAKTVFQVHGVNSAEKVIVKKTLRRNKVLTYFSNLEPCLIGIEACGGAHYWARELEKQGHEVKLMAPQFVKPYIKGNKTDANDAEGICEAVGRPSMRFVSVKSIEQQDILMLHRIRQKAVKSRTALSNQTRGLLAEYGIVVNKGIKTLRRELPCMLEDADNCLSSFARKHFHHLYEKLIILDDEIAGYDKEIKAIAKESDECRRLLTIPGVGVVTATALVAMIGNVSCFKNGRELSAYFGLVPRQHSSGGKTHLQGISKRGDTYIRTLLIHGARSVVKVAHKKTDSHSQWINELEARRGHNKAAVAQANKAARQVWAVLSKGEDYKVAA

SEQ ID NO: 90086 - protein, 369 aa, unidentified
MYQNGEAFIAFDTSKAKNAIAVAESGRDGEVRYLGEVANTRETTLKLVKKLEGKYGKLHFCYEAGPTGYGLYRQITALGHDCLVVAPSLIPSRPGDRIKTNRRDAVGLVKMLRAGELTAVWVPDEVHEAVRDLVRARDAAVGDLRACRQRVTSFLLRHGRSYPGKTTWGARHARWLAEQRFPHPAQEIALQESIHAVREGEDRLARLTAAITEFVPRWSMAPLVEAFQAVRGINLVSAVSFLVEVGDLRRFDNPRQLMGYLGLVPSERSTGDSIKRGGITKAGNTRARRTLVESAWTYRHPPRVGKMKLYQMQRVPAGVREIAWKAQSRLTARYRALMTRGKRNTVAVTAVARELAAFLWAIAREVAPA

SEQ ID NO: 90087 - protein, 403 aa, unidentified
MNSVGIDISKGRSTIAVMRPFGEVVISTFEVCHTDSELSALARRLKSLNGETRVVMEATGNYHAPVAKLLHDAGLYVSVVNAKLVHVYGNNDLRRVKTDRKDAVKLANYGLDRWLTLPRYVPEEDTRLLLKNCYRQYRQYSKVQTVLKNNLISLLDTVFPNANRLFSSPIRGDGSEKWVDFVAEFWHCRCVSEKSEKAFTNKYQRWCKKHGYNFSEAKAHAIYEEASRHIGVMPKSETTRLLVEQAVSQLRATSAALAALKQEMQSLASTLPEYPVVMDMFGVGPSLGPQLIAEIGDVRRFYSKKALVAFAGIDAPPNDSGDVTGRHKSMSKVGASSLRRTLFLVMSVYLQRAPLDEPVYQFMDKKRAEGKPYRVYMMASANKFLRIYYATVKAYLESLEHTA

SEQ ID NO: 90088 - protein, 313 aa, unidentified
MDKSFVGIDVSRDRLEVYVRPLGDRWWVPNTTQGRAVLVERLAALAPELVVLESTGGLERAVARTLQEAGIPTAVVNPRQIRDFAKATGRLAKTDALDAEVLARFAEVIRPEARPLADEGTAQLRELVVRRQQLIKMATAERNRLKRASPKMKLRIRRHLEWLEEEIARLDGEIEGMKLKREEWANRDRLLRSVPGVGPVLSATLIGCLPELGELRGEENAALVGVAPFNRDSGRWRGKRGIWGGRATVRAVLYMAAVAATRWNPVIREFYLRLIEAGKPVKVALVACMRKLIVILNAIVRDGRPWRYNPALT

SEQ ID NO: 90089 - protein, 413 aa, unidentified
MRERGRVLFLGDDWAEAHHDVELQDEHGRVLRRRRLPEGVAGLTQLHELIADHLEGEQEPESVLVGIETDRGGWVHALVAAGYTVYAINPKQAARYRERHTTAGAKSDPGDAHVLAEIVRHDRDHHRVVAGDSEQAEVVKTLARTHQTMIWTRQRQANQLRSMLREFYPAALEAFGDDLAGRDALAVLAIAPTPTAGRRLTRSRVITALRKAGRQRNLQTRADQILTALTNEHLGLSDALAEAYGISVESLVAVLTAMVAQAAALEGEVERCFGQHPDAEIITSQPGLGVVLGARVLAEFGDDKDRYAHAKARRNYAGTSPITKTSGIRRVVLARYARNKRLADALHQQAFAALTASPGARAFYDHHRARGATHHQALRTLSNRIVGILDGCLRHRTPYDETTAWAHRTPAAA

SEQ ID NO: 90090 - protein, 325 aa, unidentified
MEPKTLCCGIDVSFSSLDVCYQNNLGELFHLRVGNNNEGFAKIMEHTGTQYHFVMEATGVYYIRLAFFLYGKGCSLSVVNALSIKRFIQMHLERNKSDKKDAGWICRYAIEQRPPLWQMPDSAYFQGKQLYNAIREYQEQIKRFNNQLHSLGLLPVQSKEAIRSIERMKAGMKKEVKSLEGKLQELLQAWQPEQLKNISSVKGIGKRAAAMLIIFTQGFKHTHSHRQLISFAGLSPTEYSSGTSIQGKPKICKRGGKPLRDVLYMCAMNAMKTNQACKALYERLRAKGKTGKQGLIAVCNKLLKQVFAVMKSQTLYQPNYCSAKT

SEQ ID NO: 90091 - protein, 336 aa, unidentified
MTIIRIGLDTSKHVFQIHGVDENEKPVLQRQLRRSEVEKFFAKLPPTRIGLEACGASHHWARLLRGLGHTVMLMPPQYIKAYVKRGKNDAIDAEAICEAMSRPTMRFVPVKTAEQQAALTMLGVRDLLVKQRTMLVNAIRGHAAEFGVTVAKGPKPLSALLQRLASDEGVPALAREMIGVLAGQLDGLDVKLTAIEKRLMAWHRQDQTSQCLATIPGIGPITGVSFALKVPDPKAFRSGRHFASWIGITPREASTAGRQKLGRISRAGDEDLRRLLVIGATAVIRAAQPGRTAPWLLALLARKPKKLAAVALANKMARIVWAMMVSGETYRQPAQA

SEQ ID NO: 90092 - protein, 420 aa, unidentified
MKVVYQTCCGVDVHKSFLVATIIKTTSGIEPSYQKKRFSTFNNSILQFKDWLMKNQCRDVCMESTGKYWVPVFNLLEDQMNVTIANPKWVKAVKGNKDDTKDSKWIGDLFRLGLVPGSYIPCKPIRILREFTRYRYKLTSCRTSEKNRYQNALTVCNVALDSVVSDIFGKSATSVIDYLIEQSDNSINHEEIASRLLRSLKKKSDSVIESIEGYQMTDSPKYRMRLVRAHLDYITSTINDIDTMLDSLVAPYENAVQLLCTIPGVDRNSAVTVISEIGTDMTPFSNSKRLCCWAGLTPGNNESAGKKKSVRITRAGVYLKPALVQVAHAAVKSDKSPYYKQKYERIMKRRGKKRAIIAIARMILTAIYQMLSTGEAWNPTDLYKVDMPEPLKEKQKEKAIKQAKKLLISEGLISESQLVS

SEQ ID NO: 90093 - protein, 456 aa, unidentified
MAKQAIKQRDRKIRQLNPNAAGIDIGSQKHYVAVPTDRDNEPVRSFGCLTPDLHQMAKWLKSCRIETIAMESTGVYWVPVVAVLESYGFDVKLVDAYKVKNVPGRKTDVKDCQWLAELHRFGLLSGAFRPDRQIQVLRSYWRHRSTLVEACSTQIHLMQKALEQMNLQLHKVITDITGVTGMKIIRAIVAGERDAVKLAGMKHPLIKSSTETIAKALTGEYRQEHLFTLKQALEIYDLYQDKIAECDRHIEEYMKTFEHKADANDFDSKSGKNNRTKRRKNQPNFDLRTRLFEMTGVDLTQIDGIETMTAQTVISECGFDMSVFPTEKHFTSWLGLCPNNRITGGKVRKRSTRKVQNRAARALRLAAQSLHSSKSALGAFYRRMRARLGAPKAITATAHKLAKLVYRMLKYGMDYVDSGQQYYENQYRERVIRNLTKRAREMGYVVVCTNTGELVS

SEQ ID NO: 90094 - protein, 340 aa, unidentified
MRLYLGIDLHSSNSYLGIIDETGKRVFKRKLPNDPEMILAALSPYKNDIVGIVVESTYNWYWLVDLLMAEGYTLHLANPTAIQKYSGLKYADDQHDAFWLAEMLRLHILPEGYIYPKEDRPIRDLLRKRSHLVKLRTSLVISLQNIITRNNGVRIKGELLKALTTDHAAPFLEANEDLALAGKVSKTSIDFLTRQIKAIEANIEGKVALREPYAQLVTIHGVGKILGLTIMLETGPISRFDKAGNYVSYCRKVSSKWISNDKGKGKGNRKNGNKYLAWAFSEAAELARRYYPEARAFYNRKLKHTNVAIAHGALAHKLARAAYYVMRDQVPFMPEKLFAS

SEQ ID NO: 90095 - protein, 389 aa, unidentified
MLHDHLSDGPAAIRTQFGAIFVSLELSRSNWLVTSLSPGKGEKMSKHSITAGDVAGLLKLFADLKRKAMARTGQSYPIITIQEAGLDGFWLHRALQQEGIESHVVDPASIATPRRRRRAKTDRLDGETLLRALLAYKRGEPRVCAMVVAPSPEEEDRRRLCRERRTLIDERIAHVNRIKGLLFAQGISGYAPLRRDRRARLEALRTGDGRALPSYLTTQISRELDRLELLLDQIKAVEAEQDALLAAAGKGAGEQAAPDPVTMLLALKGMGANFTAVLWSEAFYRQFSNRRQLAAYAGLAPTPWRSGSIEQEQGVSKAGNPRLRSTMIQLAWLWLRHQGQSALARWFKAHSQRGRKTAIVALARKLLVALWKYVTAGVVIEGAVMKSAA

SEQ ID NO: 90096 - protein, 452 aa, unidentified
MKKAEVIKENLTASTWRELETNGKFDKNKKLSFISDDMLILGCDVGSETHYVRAIDTRGRELSKSAYSFNNDYEGFQSAKEWAVKIAAEHDKSQIVLGLEPTGHYWFCLATWMIANGISVVQVNPYAVKQTKEVEDNSQLKDDRKDPKLIANLVKDGNFGMPYLPEKIYAELRRLSMFRDQLNEDRIRTINRMHREMKIYFPEYKEALGKVDGAFSLELLKEAPFPDELTALGEEGIRQIWHAAKLRGRGYSRAREILQYAKASVGIKDGSIASKAAVKWFVQKIMELDVELAVIENQINQKCQEIPHTGNVLEISGIGENTLSGILAEMGDISRFDDVKEIQKLSGLGLVACSSGKHKGETKISHRGRKRLRYWLFQAAKSAVAHAEEFKELHMYYTTRADNPLKKMQSLIVIACKLLRIIYTILNTGTKYAPKKMLMDIRRPENKEAIVA

SEQ ID NO: 90097 - protein, 323 aa, unidentified
MSVKRAAGIDVSKAWLDVAVRPGGPVARFANTAAGHVEVVAHLAALPSGERPEVLVVEATGGLERAIDQALTAAGWRVAVVNPRQVRDFARCLGRLAKTDRLDAEVLARYGETLDPEPRPRPEARMQELRDLEARRRQLVEMLTMEKNRLQQAPPRTQAGLRRHLEFLREELADVTRQLADAIQAESTWRETTARLQTVAGIGPITATLLVLELPELGRLDRKALAALVGVAPFNRDSGVARGTRSCTGGRAVVRTGLYMAVRSAIRWNPAIRACYARLTAAGKRDKVAVVACIRKLLAILNVMLRTKTDWDPQRFQPAAATA

SEQ ID NO: 90098 - protein, 430 aa, unidentified
MKANRVKNLALITPTTLLVGVDGHQENNTAGFSLANGNEPVRPVKFGNNRRGFLELLEKTNRVMSRNGLDSVVFVLEPNGPYWQLLARFLSARDYVVKVVNPLQVKMNRQTGDPSPDKNDFRDARSAADLGRQGKFNQTALVDQRYEDLRMLAGLRDSLVEERSMHKHRLRCGLVRTFPELRRCTSDLFGKGIRALLRVAPSAEAVVWLGTEAVSEVLKSATRGRLGKKKAIQIVNAAKESVGYAEATCAVRLQVESILSVAELLSEKIEQIELEMERLVSDLDEAALILSIPGIGLVTAAAILGQIGGFSQYENPGQIRKLAGLDLVGSQSGNHQGKLAISKRGRKLLRKVLYQAAVSSLACNEVSIRFYNGLIESTRPNRLKKKQALVAVMGKLIEVMFALVRTGKPFEFEHEWTRPGQAPEDLAQAA

SEQ ID NO: 90099 - protein, 375 aa, unidentified
MNKDTLYVGLDTDKKHIAVALAEALPGGEVRCWGQVANEASSVARLVRRLQAGGRQLEVCYEAGPCGYGLYRLLNGKPGVRCQVVAPSLTPRRPGDRVKTNRRDALTLARLLRAEELTAVWVPDATHEAMRDLVRARGAGVADLVRCRQRIAGFLLRQDIRYAGKPWTRKHRAWLGQLVATLALPAHRLMLGEALQALDEATARRDRLTNHIAELMPGWSLAWLVEALQALRGFALINAVTLAAEIGDPRRFAKPSRLMAYLGLVPSEYSTSDRVRHGGLTKTGNGHTRKALIEAAWTYSRPARAPRDTARHAPAVAAIATKACHRLSRRYRRLTAGGKRPIVAVAAIARELSGFAWAIAQVAGPAAMAERSPRR

SEQ ID NO: 90100 - protein, 411 aa, unidentified
MIYCGIDWAERTHDVALVDDTGQLLAKRHITDDATGYKILLELLAEYGDTEETPIPVAIETSRGLLVAVLRTGTRKVFAINPMAAARYRDRHSVSRKKSDPGDALVLANILRTDMHAHRPLPDDSDLGRAISVLARAQQDSLWNRQQLANQLRSLLREYYPAALAAFANWTNGLCRPEARELLKAAPTPTRAARLTRTQLQAALKRAGRRRGIEAEADRLREVFRGEWAHQPPLVEDALGKQMLALLIQLDAACTAADQLAEAVEEAFPQHPDAEILLSFPGLGIQLAARVLAEIGDDRTRFADARGLKAYAGSSPITRASGKKSAITRRWVKNDRLNHAGYLWAFASLRASTGANAHYRRRREQGDWHAAAQRNLFNRMIGQLYHCLQHGQCFDESAAFPAGIEDAAQAA

SEQ ID NO: 90101 - protein, 365 aa, unidentified
MASYQSAAQLEPHVACAPNSNRCQSAGFGRQLVFVRMSQNTINYMKSNTATVYVGVDVAKATLQVHVQGRQTELKNAPAARTKLCQKLQTLTGAHVVCEATGGYERDLVEALHKANIPVSVVNPAQVRAAAQAQGQRAKTDRIDALMLTNYGQRYEPQPTPPTSRVQRQLVDLTQWLKQLIEAQATAKTQAEHHHDLFVRKQHQALMDCYQAQIQAVEDKLQALLKKDQALQQRVETLDAIEGVGSRTALLMLAHMPELGQMNRQQAAALAGLAPWTRESGTMKGVRCIGGGRPEVRLALYMSALSAARFNPVLRAFYQRLIAKGKLPKVALTAVMRKLLIYMNHKLKSLAAQPLSPVSAAQAQC

SEQ ID NO: 90102 - protein, 344 aa, unidentified
MTITTIGLDLAKNVFQVHGVNERGVAVLRKQLKRDQVAAFFAKLQPCLIGVEACGGAHFWAAKLTALGHRVKMMAPQFVKPYVKTNKNDSLDAEAICEAVARPNMRFVPVKAPEQQSVLSLHTARESFVHARSSQANQIRGLLMEFGLVVPQGIRHVYARVPELIEDASNELPGRFRLLIQRLLDHLKELDRQVCELEHEIEQWHRSSEVSKRLETIPGIGPITASALVASAGDPSNFKNARQFAAWIGLVPHQNSSGGKTQLLGISKRGNVYLRTLLIHGGRALVQLARTRADRAGTWLGKLVSRRHHNVAAVAMANKNARLAWALLSSGKAYEPGHVPAPRA

SEQ ID NO: 90103 - protein, 418 aa, unidentified
MTATHSIPSTVLVAIDISKHRHEVLIGVPGKKRRRRMTIMNTLEDFHRLSAALVGYDMPVRIGFEATGNYHRPLAHHLGQAGFDLKLVSSVGLARTREALHNSWDKNDPKDAQVILHMLEIGAVQFFHDPLVVGTADIQELSKTHEIVSRSKTELWHRILTHYLPLYFPEAERFHRSSRTDWFLAFLEKYPTPAMITAMSQDAFIADAWQVVGKKVSKERLLSDIYATAVDSVGLPVDPDSDAVRMFRLVLAEGRSLVRQRNEIEARAVELLSDLPDYQLLTTIPGIGPINAMTILAEAGDLRRFRHHRQFLKFCGMDLATVQSGMFRGQSRISKYGNARLRRTLWMAGQTAVLKRTICFRDKFERYISKDRHNAHLRRKAYTAIAAKMARTVHAVVNHGEPYRPFFEGVSPGGRTSL

SEQ ID NO: 90104 - protein, 332 aa, unidentified
MNRIVHFIGIDVSKETLDIALIKNNDKSHVCCFKVSNNPVGFKKMKRWLTAEKVTMECSVFCVEHPGLYSKAVSRFVLSEQSSLWLEMSLKIIRSMGVQRGKNDKIDAIRIALYAQRHQEDMKLYEPPRPIVEKLRLLLQLRKQLILSRNALQVPCNELSLIDALQGKQAMQLIRPSVNALQKNIDEVDRQIHSLIEGDEKLTHLFEMGTSVPGIGKITLAYLVCFTNEFKNYKTGKQLACYAGVVPFEYTSGKSVKGKPHVHNMANKLLKKQLHMGALAAVTYYEEFKTYYKRKLAEGKPKMLVLNNVRNKIILRLAAVIQKNQPYQKMTA

SEQ ID NO: 90105 - protein, 366 aa, unidentified
MKKVSIVRTEQSRNIWQQRLTIGLDLGDRNSWYCVVDEAGQIQLEQRVRTSAKGLQEVFGAMPRSRIALEIGTHSPWISRLLRELGHEVIVANARKVRLIGESRKKDDRLDAQTLARLARIDPELLYPVKHRSAQAQADLAVIRARAGLVRARTGLVNTARGLAKSYGERWRGCNVRNMDPEKAESLSPELQAALEPLLAAIESVSERIVEYNDRIEALAQQRYPQVELLKQIKGVGTLIALTFLLTLEDPHRFRKSRDVGGYLGLQPGRRKSGQSEPQMHISKEGDPYLRTLLVQGAQHILGPFGMDCDLRRWGLKLAERGGRNGKKRAIVATARKLAVLLHHLWVSGEVYEPLHNSARIVAAAA

SEQ ID NO: 90106 - protein, 339 aa, unidentified
MTSMVVGVDTHKATHSAALLNELGVVQGGLEVAASAAGYRQLLGWARSKSEARVWVVEGTGSYGAGLAKYLSEQDEVVYEGDHPKRSWRGPAGKSDQLDAMWVAKEALSGRRPSLPRARGEREFLRVLLTARNGAVEAEKQGLNQLYALVVSAPEPLRQRLGKLRAAALVKAWLRLRPHGDQETAVTALTLRSVARRVSALATEAAAYECQIGKLVAAQAPDLLALKGVGPLSAAQFLVSWSHAGRLRDHNAFAKLAGVAPLPASSGRVQRHRLNRLGDRQLNRALHLVAITRSRCDAQTQAYIARRTSEGKSSREIRRCLKRYLARRVFKLLERLDKT

SEQ ID NO: 90107 - protein, 400 aa, unidentified
MLSIGIDVSKGKSTVCGMKPGGEIVYAPFEVQHTREGMLELVSLLRSSGEEVRAVLESTGSYHCPVVTALLENGIFVSVVNSLRMKRFCSQSIRKVKTDRIDAMQIALYGLAYWQELQPTRLPEDTYRELQLLARQYYQMTSLLIKAKVDFNAICDQVLPGMQELMSDHAGRHKLSNFVLRYCHTTHILEMGETRFRKDYCKWAEKKGYRNCERMAALIFATAQNGIPVLPNAPSTQIVITEAIRVLHTVEASRDAILTQMQALAKTLPEYSLVREMPCIGDTLAPRLIAEIGDVRRFHSKRALIAYAGIDAPPYQSGKFCANNRHISKRGNRYLRKTGYEVMQSYVMHKPANDPIFTFIEKKRGEGKSGKLAMVAGLNKFLRVYYGKVTELYRSLPAIE

SEQ ID NO: 90108 - protein, 344 aa, unidentified
MRYFAGFDVSLEETAIGIVDETGRLVREGKVATEPEALDAYMRAGGLPIERVGLEAGPLSTWLHGELTAGGWTMVCIETRRLRAVTRAMPVKSDRKDAEAIAQAMRTSWYRAVHVKSAESQRIRVLLRNRKILQAKRLDIDNEIRGTLKAFGLKLGKVGRAGFAGRVRELVAGEAVLEAIMPPMLQARSALIAAFDKLHRQVLAIVRQDPVCRLLMTAPGIGAVTALGYKTAVDDPHRFRHSADVGPHFGLTPRRYQSGETDYSGRISKCGDAMVRALLFEAAMAVLYRVKAASRLKTWGRALMRRIGARKAATALARRLAVVLHRMWLDGKPFNPKPVHAAAS

SEQ ID NO: 90109 - protein, 394 aa, unidentified
MKLVGIDVGKNSHHFCVMDKENGEFNVTPTSFSNNKEGFDFLINSLKPYSKKSILIGMEDTGHYHVALLKFLLSNGYTVALINPKTTDLTRKMEGGITKNDKLDTITICDVLDTPERKKQYRITKVDRFDLYEQRQLTRHHHNLKEELNVYCNRLQKSIDLVFPEFNTLFSSKYSIVYMNLLKTFGSAEAIASTDIRTIRKCFEIKGRGNRISLTPEKLKECAKNSIGISSEVETIQIKHLVSQITLIKEQIAEIDKKIEEFSITNNSPILSIPGISHFSGTSILAELGDIGNYSKPSQIIKFAGVAPYHYESSQYNAQHTGITKKGSKYLRKTLYQIILTVINNNPVFKKYYLLKISQGKGHRCAQGHCIRKLLRIIYHLLETGQPFDPALLS

SEQ ID NO: 90110 - protein, 364 aa, unidentified
MVTQHPAAPKLFIGMDIHKKSWSIHLRTDISDHKSFTTPPDCEVLYNYVEANFPGHHVALTYEAGCCGFSAARYFLNLGWKILVVNPSDIPRMDKQQYQKTDTIDCRNLSKQLKSDQLKGIYVPGEDQDQLKSLLRQRSEITKQLRSVKAQIKSLLLYHGHPIPTQFDNPNWSKDFINWLGSIKWTYEPGKACMESKLRMYDVIHKEHLQLANLLRSYCRKYYKKDYYLLKSIPGIGGYLASAILAEIGDLRRFGSETELASYIGVVPIMRNSGGTESMQRVTPRCRALLRSYIIESAWVALRLDPVMQNYYRRHAGKNPKSIIIKIARKLINRMLSVIKNETPYQLNTTKIQSQKKQSIKQNN

SEQ ID NO: 90111 - protein, 359 aa, unidentified
MHARSVKACAFVPETGETIRRSFGYEPCEIASWASSLPQHAKCVYESGVTGFHLCRELRSMGVDCVVGAVSKMHKPAADRGRKTDRRDAQFLAVQLALGVVTEVHVPDAECEGARDLTRALADARDDAVRAKQRLSKFLLRHGFVYDERNSAGQRRNRWTRDFWAWVGRIDLGDGAAMATLDHYCVRVREADAAKAALEAKVKELAQQPRWKPTCDALKCLKGVDAVTAVSIACEADGFARFAAASGFAAWVGLVPSEHSSGESQFRGGITKAGNKHLRKLLVEAAWHYKGASRSPKGLAKGQIVDEATRRHANAGVRRLVDRRRAMDDAGKQSSVANVAVARELACWCWAVGRMAEGA

SEQ ID NO: 90112 - protein, 390 aa, unidentified
MSQSFDASRSLTAFEQDSTLVAVIEMSQSKWLVAAMIPGVARQPLKKLDANADALLKLLQRWQDEARKAGRTVRRIVCTYEAGRDGFWLARWLQARAIETYVIHAASIAVSREHRRAKTDRIDTELLMRSFLGWLRGEKRHCSMVAIPTMAEEDARRPSRERESLVGEQTRIVNRIKAVLALFGIGGVNPRLRKAAQKLETLHTAEGTPLPENAHAELRRDLERLRLVHDQIHIIESERLRRLALAPAAATGPHAMVRLIARVFGVGIETADMLVNEALARKLRDRRAVARYAGLTGAPDESGKRRREKGLARAGNGRVRRGMIQLAWRFLIFQKDSPLVRWFRERTADGRSTTRKTMIVALARKLLIALWRLVTTGEMTQGLKLRPAGT

SEQ ID NO: 90113 - protein, 313 aa, unidentified
MIRTAVHVGIDVAKDFVDVAIGDDGECFRVTTDTAGLDALACRVSGFGPGVVVGLEASGGYERPIIRRLHEAGIAVRLVDPARVRQFARAMGIKAKNDRLDAAVIAAFVATVDGALNVAEPARERLCEHVRYRRQLMEALTVIDNQARLTDDAGLEALAAERRELLRRQVDEIEHRIVRLIDADPAMSKTFALLRSVPGVGPVLAWTLIAEMPELGSLDRWKVAALAGVAPFDRDSGGHNGKRMIHGGRANVRKVLYMAAVAAARCNPPIQAFHQRLRDQGKPPKVAITACMRKLLITLNAIARDQVEWKPAI

SEQ ID NO: 90114 - protein, 334 aa, unidentified
MTSMTTTTPDVTGGVDTHGQTHHAGVLDPLGRQLGDREFPTTPAGYRALLGWLRSHGELQRVGVEGTGTYGAALARHLRLAGVPVVEVDRPDRKARRAKGKSDPLDAYSAARAALAGTASGVPKSRDGRVEAIRALRVARSSAVKARSQTTNQLKSLLISAPADLREQLRTLTTTALIATCARLRPNGDVADPEHATKTALRRLGRRYQYLSEEISEADTELRTLVTAAAPRLIALPAVGPEVAGQLLTTIGDNSDRLRSEAAFAHLCGVAPIPASSGRTRRHRLNRGGDRAANNALYIVVLGRLRHDPRTRAYAARRTTEGLSKPEIIRCLIG

SEQ ID NO: 90115 - protein, 423 aa, unidentified
MEVLHERVAGLDVHKDSVVACVRTMCGGKPTRECRTFNTTTDGLLALLEWLTFCRCEKVAMEATGVYWMPVWKLLSDGGFELVVVNAAHIKAVPGRKTDMNDAMWLTDLTAFGLIRASFVPDEELHELRGLMRTRKQLVREQTRHVQRIQKTLTEANIRLDSVISDIMGRNGRRMIEAMIAGVRDPRKLAGLADKRLQATPKELYDALHGRLTEHHRFLLQLHLRQWDTLETTIKDVDREVAIRVLRMDTEVKADKAKFSDLINQLTTIPGVSRLSALTILSEIGSDMSRFETAGHLVAWAGMCPSQNESAGKRKRTRLRKGDPWLKTMLVQCAWAAKRKKDSYYKAQFFRLQSKRGPQKAICAVAASLLTAIYHMLKDGTFHHDLGSGHFDRHTPHIKLKRLVGQITKLGFEVTLQPIADAA

SEQ ID NO: 90116 - protein, 343 aa, unidentified
MNEMSMIGLDLAKNVFQVHGVDASGKVVLQRQLRRGALETFFAKISPCVVGMEACGSAHHWARVIGLHGHDVKLMPPAYVKPYVKRNKNDGRDAEAICEAVSRPTMRFVAVKSVEQQAMLSVHTTRALLVKQRTMVANALRAQLSEFGIVAAQGHKGLHELMARLQAPSEAIPEMMRRALLALVGQWQALDANERALEKQIVKAARCDREACRLMGAPSVGPIIASMVLAKVPDASVFRSSRDFAAWVGLTGRDHGTGGKHRPGRISKQGDRVLRTLLINGASAHLRQQKRRGVSDPWLRELLARRPYKVAMVAFAAKTARIIWAMLTKGEAYRDRASAPAAA

SEQ ID NO: 90117 - protein, 368 aa, unidentified
MSKTENGRLCVGVDLHKTQFTVCAIDEEGEYLLERKYPTTEEGYEVFSQEMHGREEEGYSIELAVETTGNARYFKNRMEKEYFAVKVVNTNRFKVITLSTKKTDANDAATLAYYLMKEMLPEANLCSQTSEEIRRMLKTRTILVQSMVKIKNQIHGMMLGYGIETKAAQFQSKKKRQELMNDLADHEYSAFTASSLKVMLQIIDDLSEEIKRVEAQLAEMVKENEDVELLMSIPGVGINTATTIAAYTENLERFDGNYKRFASYIGIVPSVHNSNETKHLGRITKHGPQELRTAFVQAALGMVRLTKVTSEWRLIKDYHRKKDDKGSGRAIIALARKISRIVFVMLSKRETFNPDLMRISEQNFQQTA

SEQ ID NO: 90118 - protein, 352 aa, unidentified
MRVYIGVDFHARQQTVSYLKTEDGEIHQCKLDHQKDDLTGFYGQFEGEVVVGLEASGYIEWFEEMVLGMGHEVWVGDSAEIRRRARRRQKNDKRDSMLILELMMKGEFPRVHRQTIESRQVLKQLRYRHRLVKIRTIAKNNVQALAMSGGLLAKRQYTSKWRHQLRRLEREPMLGEQAKQLVRIIEEVTVEIKRVEQWLRKQAEADHRVLLLQTHPGVGLLTSLVLVHTLWPVERFRNGRKVTAYLGMDPVEDSSADRIRIGSISKQGSRLARYLVIEAASTAAKSDKGLKSFYRRLMSRQGKPKAKVAVGRKLLVRCFIMLRDQIDYDEFLRRGVEVRSSRLATGPLCLNP

SEQ ID NO: 90119 - protein, 404 aa, unidentified
MKGPIVSIDVSKGKSDYQAFKDLNVKYTGSRSIKHNKEGFDEIVNLVREMEKKLETEVCVVYEATGVYHRVLKKVLEDNNIKQFIINPLLSAKTRKNDSLRSPKTDKLDPKSIAKTYYSHSLHNSHKQETIYHELRELSRYYEDILVHIRKDKVAFRAQLDIVFPGYDTLFDDLYGPVALAVIEKYPHPEMLQKKKINTVSKVIQSKTCHRQAVSDTMADKAIEYSKTIYSGCDKDDIEVLILQRFIKKLNEDMAEAERTIGEMIKLAQELPDFSIIKSIPGIGDNLAARIIAELGDMTRFKKKNELVAFAGLDPRISESGKNDGDHMHITKKGNKRLRCLLYLAVTCSIRLKRDDNSIKDFYIKKKQQSNPMCSKAAKTACASKLVRIIYSMCKTGELYQYNK

SEQ ID NO: 90120 - protein, 421 aa, unidentified
MATVYRRCCGVDVHKDAITVTVLPPRDRPHLEIKQRVFRTFARDLRQMRTWLGNCRVTDLAMESTGQYWRAVWNVLEGHVPHLLLLNPLHVKALQGEKTDPIDSRRIATLLEMHSLRGSFVPNQEIRELRELMRQRVHLLEEINRVKNRAEQVCQCGNIKLSSVASDIFGVSGRRMLRALIEGNRDPAWMADYASSRLRSKRAQLELALEGTLSQHQRSLLATHMRHVEWLEAVVKEVEQEIERRMLSYQDTIRRLQTVPGIDRIAAWTIIAEVGPDASAFPDAHHLASWAGLCPGNRESGGKRLSGRTRHGNRYLIRVLCQAACASTRSRQTFLAAFYRRLRFRKGHQKAIVALAHQLLVIAYCLLSQGGEYKELGADYYEREQRPAVARRLAQRLIRLGYYVDLRDAESTAPTPHLSSP

SEQ ID NO: 90121 - protein, 388 aa, unidentified
MQIAADRPQASTAIRTDLGAIFVSLELSRSTWLITSLSPGGGEKMSKHSVRGCDVAGLLERFAHLREKARARTGQRFPIIVIQEAGLDGFWIHRMLNAEGIESHVVDPASIATSRRRRRAKTDRIDGEALVRTLLAYKRGEPRVCSMVKAPTPEEEDRRRLCRERKVLTAERVLHVNRIKGLLFSQGITGYEPLRRDRRERLEQLQTGDGHTLPDHLKGQVRRELDRLELLLNQIKAVEAERDALLAAERAAARTPAAMLLDIKGVGPEFAAILWSEGLFRHFDNRRQVAAYAGLAPTPWQSGSVDREQVVSKAGNPRLRTTLIQLTWLWLRNQPHSALTLWFHERVRRNGGRLRKTTIVAVARKLLVALWKYVTAGVVIEGAVMKPT

SEQ ID NO: 90122 - protein, 386 aa, unidentified
MYPCVIPLKFIPEQVFTNGMDAPAFESVYLSYRGHSLDEVEAMQISALGIDLAKNVFQLHGVNEAGKPVLLRQLRREQLSTFFAQIKPCLIGMEACGSAHHWARRLQSMGHTVRLIAPQFVKPYVKSNKNDAADAEAICEAVRRPTMRFVQIKNVEQQAALALHRVRHGLVISRTAQANQIRGLMAEYGLILPPRISSIKAGAPALLEQAADSLPQSFHQLMIGLLDHLKLLDQRVRELDQQIQAWHRDNALSQKLQAVPGIGPITATALVASIGDAKQFTNGRQLAAWLGLVPRQYSTGGKPKLLGISKRGDSYLRTLLIHGARSALRTAHRKPIGERWLNRLRERRHPNIAAVALANKNARIAWALLARDRIYDDTHESGSVAA

SEQ ID NO: 90123 - protein, 347 aa, unidentified
MEHYAGIDVSLELSGVCIVDAKGKIVKEAKVVSDPDSVVAFLRELGLSIERIGLEAGPLSQWLHAGLTKAGFETLLLETRHVKAALSAMTVKTDRRDARGIAQLIRMGWFRPVHCKSVDSQEIRALLVARKLLLGKLLDVEFSIRGILRGFGLKIGMVTRQGFEARVRELSAGQAMLEQVCAAMLAARSGLQTEYAKLHKTMLAIVRKDQVCRLLMTAPGVGPVVAITFKTAIDDPTRGAKSKAVGALFGLTPKKYQSGETDVTGGITRAGDEMVRTALYEAANILLSRVTRFSALKRWGMDVLKRRGTKRAKVALARKIGVILHRMWLDGTTFRWSKTERAAIGTA

SEQ ID NO: 90124 - protein, 387 aa, unidentified
MYPPELSHAMKPLYIGLDVHKEKTSVAIARPGANGEITYHGSIATSLITLERSLRRIAKSHNRTMQDLRVTYEAGGCGMWIARRLAQLKVPCLVAAPSLIARPPGDPVKTDRKDAEMLARLLRSGDLTAVRVPDETDEAIRDLCRARVDAIDDLRRTRTRLLGMLRRLGHNYNGRTHWTQKHRNYLRELSLPFAAHRVILEEQLMQIDQHEERIARIEQNMLGLLDAWRHKDLVAALMGFKGFKHIAAMVIVPEIGDFTRFAHPRKLVKYLGLNCREYSTGSREIKMGITKCGNPHARWILVEEAVHYKPAPKVSRQLGNRQQGLPRWVKELSWKAQNRLHHRFKALASRRMQHNKIKVAVARELAMFIWELGVRMQSLETPQPTNA

SEQ ID NO: 90125 - protein, 338 aa, unidentified
MKITTVGVDLAKSVFTVYGVDEHGKPALRKTVRRGKLLELFAQLPACVVGMEACSGAQHWARELRELGHTPRIMAAEFVEPYRRGGKNDTNDAAAICEAVARPQMRFVPIKSVEQQAVLAVHRLRQGLVEERTALANRIRGLLTEYGLVIGVGLDRLRKALPSILEDAENGVPGIAREVFADATRQLIELDARIGDYDRRIAALARASEPAQRLMKMEGVGPITATAIVASVGDAKMFRNGRQFAAWLGLTPRQHSTGGKQRLGAMTKHGDVYLRTLLIHGARAVLRVTPTHSDAKSRWAESLRHRRPDNVAAVALAAKHARIIWALLARGQHYRPAV

SEQ ID NO: 90126 - protein, 400 aa, unidentified
MIHMGVDIGKSKHAATAVNDAGECVMPPRFLTQDAGGFASLLGALDGLGGPASVVVGMEATGHYWKVLRHALVSRNYRVDVINPLITAREASADVRGRKSDKLDALAIANAMRKGGYSPAPAELAATDALKALTRHRRALVARRSDAKLRLISALDVAFPEAAKTLGDLFGAAALAVVRAFPSARLGALADIRALTSLFAKASGGQLGREAAEAYRAAARHSLSRTMRTEGEEFVIAQTVDEIRAVAAQIDEAERRILAEPQPVVAGVIGSIKGAGKIQPMAVAAELGDLSRFAGAGMAKKVLAYAGCEPRVRESGKWKGRPKMSKRGSHALRSALYLMAGTIRLHTPFFNAVYKRQVAMGKHHNVALSHVVRKIVEVMCGMYKTNTLFVPPQAEPTPCQ

SEQ ID NO: 90127 - protein, 345 aa, unidentified
MVVLGADLHKRNHTIVVIDETGRKLAEKTIPATTEGHLELRRWASAWPDRTWGLEDCRHLSRRLDTELVRAGESVVRVSPKLMAGMRRSGREPGKSDPIDALAVARVVLREPNLPIARLDGPDREVRLLVDHREDLVGERTRHEQRLRWFLVELAVAEPRPRSLDRPVVQAALSSALAERSEPVARFARDLLARIIELSATIRVLAREIETLTRVAAPTLLALPGCGPLTAAKIIGEAAGIGRFRSKEAFARHNGTAPLPVWSGNVVRHRLNRGGNRQLNVALHRIAITQIRLGGPGRTYLDHRQASGDTRTEAVRALRRRISDEVFRRLQADEAAGSTGLAVAA

SEQ ID NO: 90128 - protein, 375 aa, unidentified
MATIARLGIDTSKSLFQLHGVDEREEVVLRKQVRRGQFLGFVAKLAPTKIGVEACGASHYWARQLQALGHEVVLLPPQHVKPYVGRNKNDKIDAAAICEAMSRPRVRERFVAVKSAEQSAAQMLLGTRDGLLHRRTQLSNTIRGHAAEFGLVTPKGLAHIKPLLERIAADDTVPALAKELFAALGEEFAELGPRIARLDKKLKAFQRSDELCRRLVEVPAIGPVIASSMVVKIGNPAAFRSGRRCAAWLGLTPKDHSTAGKMRHGGITRAGDEGLRAALVSGATAYIQQVKRGRTRPSPWLAQLLKRKPEKLAAVALANKTARIAWKLMVSGERYDRARAEAREGLGATQHRGSTPSPSLQPHTAGQGASTMTAA

SEQ ID NO: 90129 - protein, 369 aa, unidentified
MTERTTRFLGLDVHKATITVAVAEQSGAPTLFGTIANEPGEVRKTVARLGRGVRLVAAYEAGPTGYDLHRQLVDLGVETMVVAPSLTPTRPGDRVKTDNRDALSLARLLRSGDLTPVWVPDREHEALRDLVRSREDAKAALMRERHHLTKFLLRQGVHAPQGGAWSRRHHQWLSKVEMPIAAHQLVYTDYLGAERAAEERVHRLERAIREAIEASPLLPLVAALQCLRGVGFLTASILAVEVGDFRRFATAPQFMAYTGLVPSEHSSGVSRRRGHITHTGNAQLRHVLVQAAHNARYRPSPPATFRRRLEGAPPDLVHICFSAQQRLHHRYWHLQRRLGTAKAVTAVARELAGFVWSVGQRMTEVPAAA

SEQ ID NO: 90130 - protein, 416 aa, unidentified
MDVMFKFCAGLDVHKKIIVACVLLSSPEGLQRHIQTFPTMLAGLEALAAWLSGFGVTHVAMESTGVYWKPVYNVLSAQFDVWIVNARDLHQVPGRKTDVKDAEWIAQLMRLGLLNRSFIPAVEQRDLRDLTRYRTRLTAERAAASNRLQKVMEDANIKLAAVATDSQGVSARAMLEALINGETDPAQLAELAKGRLRAKIPALEQALSGRVREHHRFMWREVLEHMDELNTRLLLLNERIRVLTAPYESIIERLAAIPGVDRYTAEVILAEIGPNVTPFPTAKHLASWACLCPGNNLSAGKRRSGKTRRGNNWLRTALVEAAWAASRRKDTYLGSQFHRLRARRGDKRAAVAVAHSILIVVYHLLAKPEVVFTELGGDYFLKRNPEQEQRRAVRKLEGLGFTVTLTPVGATAATAA

SEQ ID NO: 90131 - protein, 400 aa, unidentified
MNERKTQVWAGVDAGKGHHWAAVVDETGATLWSKKIENDESAILTALGEILGLADEVHWAVDISGTSSALLLAMLAAHGQRAVYVPGRTVNRMSGAYRGEAKTDARDAYVIAETARHRSDFAAIDVPAQLAADLALLTAHRSDLVADRTRMINRLRDVLTGIFPALERAFDYSSQKGALVLLTGYQTPAVIRRRGRARLTAWLANRGVRNADTVAATALEAAQAQQTALPGEDVAAQIVADLAAQILALDDRLKRIDKQIRETFRSHPQTEIIESLPGMGPILGAEFVVAAGDLSAYADAGHLASAAGLVPVPRDSGRHTGNLHRPKRYSRRLRRVFYMSAQTSIIREGPNRDFYLKKRGEGCKHVQAVIALARRRASVLWALLRDNRVFTPALPVTQAA

SEQ ID NO: 90132 - protein, 345 aa, unidentified
MNEISTIGLDIAKSVFQVHGVDALGAVVVRRQLRRGELLKFFAGLPSCVVGMEACGSAHYWARQVGALGHEVRLLPPARVKPYVKRGKKNDAADAAALAEAVGRPRMSFVPVKSAEQQSVVMLHRTRDLLVRQRTMLICALRSHLAEFGCIAAQGKGGFGRLVASLDGPEGRMLPKTALAALRLIAAQIDDGNKKIQALETAILMQHRQCETSRRLASIPGIGPITASALVAAVPDASIFKSGRQLAAWLGLVPGQNSSGGKERLGGITKTGDRYLRRLLVIGATGLIRYKRKNIPGGVAWLSGLLNRKPARLVTVALANKMARIAWAVLCRGEIYRAVAAPAAI

SEQ ID NO: 90133 - protein, 366 aa, unidentified
MTIMRDKGPIWLGLDVHKDSIAAGILGVGDTTPRIEAIGSGEDAVRRLVDRVGGQRTALRVCYEAGPTGYELHRLLTGMGIHCEVIAPSLIPKAGGDKVKTDRRDAARLVRLLRAGELVAIRVPTAAEEAVRDLCRARADVVDDLRRSRQRLGKFLLRHGQVYRGRSTWTLAHHQWLARVSFQEPALTQTLRHYLAILDEREACLAAIETDLRPWCAREPFAGQVAQLACYRGVGALAGLTFATEVCDWRRFATAPNFMGFTGLTPSEYSSGGSQRRGHITHAGNEHLRTQLVESAWAYRFPARIGAELARRQAGAPADTLARSWVAQRRLCGRFRRLSDRKHVRTVVVTAVARELAGFLWAEMTA

SEQ ID NO: 90134 - protein, 317 aa, unidentified
MSRSETVMGIDVSKVLLQVAVVPEETTWSANNDETGIGVLVERAKVLEPRLIVLEATGGLEAPVAAALATGGLPVVVVNPRQVRDFAKASGRLAKTDTIDAFMLARFGGAVNPPVRPLKDHHAQQLSALVVRRRQLVAILTAEKNRLSSAPPAIHENIKSHIAWLENCLDGINRDLQQAIKDSPLWCEKDALLRTARGVGPVLSVSLLAGLPELGSLNRKQIAALVGVAPFNRDSGAFRGRKSVWGGRSHIRAVLYMGTLSAIRYNPAIRTFYQRLCMAGKEHKVALTACMRKLLIILNAMVKNHTTWELRVEQKTA

SEQ ID NO: 90135 - protein, 421 aa, unidentified
MRAFGLDVHRDFCEVAIAEGGAIRSAGRVATRVDSLELFAQSLVGSDVVALEATTGADKIVSLLQARGIRVVVANTRKLKSITEAKAKTDRLDARTLARLLVSGLLDEVWTPDERTRTLRRLTNRRERLVRGRTRAKNEAHGVLARNLCDRPPVTDAFGRAGRRWLARLELPVDERLTLDGCLRQVDFLDTEIAALDSEIAKAALAWPEVLRLMTVPGVNVQTAATFMAAIGDIRRFPSPRKLVSYLGLDPRVRQSGSTPARHGRISKAGASEPRHMLGEVAWKVMLTPGPLHAFFERIRARRGPQIAATATARKLAVLFWHLLTRDEDYAFARPAMTRNKVRRLELLAGAPPQKGRKGIAGGKSKAVFEAERELSRQAEAAYRRLVSDWRSSNPATTGAAATPGRASPRPSKGKAARQTP

SEQ ID NO: 90136 - protein, 455 aa, unidentified
MSTRRKKSMPGRLSPAHTIDANAAGIDIAATEIYIAVPPDRDAQPVRKFTTFTEDLMGAADWLVRCGIETVAMESTGVYWIPLFQILEARGLKVCLVNARYVKNVPGRKSDVCDCQWLQHLHAVGLLRPSFRPSNQVCAVRSLLRHRDSLVQLSAVHLQHMQKALDQMNLQLHHVISDLGGKTGMAIVDAILAGERDPRTLAKLRDPRTHATEQTIAKSLVGDYRREHLFTLRQSLTAYRQHAELIAACDREIEQLLQEFSSGGGLGAEVVPAQKLSRKPRHNEMAFDLRGHLHRIFGVDLTAIPGIKTLTAHTLFTEVGRDLSAFRSAAAFASWMGLCPDNRVSGGKILRATTRSVNNRAATALRLAAQTLSRSSSWLGQSYRRMKAKLGAPKAITAIAHKLARIVYHLLTTGQAYDESVFAQQEAQNKQRNENRLRHQARRLGFELTMIPAEV

SEQ ID NO: 90137 - protein, 367 aa, unidentified
MKKVSTAAAKASKRISQQKLTVGLDLGDRSSWYCVLDEAGGVLLEQRVSTSPKAVREVFGGMAGSRIALETGTHSPWVSRVLSAVGHEVIVAHARKVRLIGESRKKDDRLDAKTLARLARIDPQLLCPVKHRSAKAQADLTVIRARAGLVRARTALVNTARGLAKSYGERLRGCNPRNMNPKKSEELSPELQTALQPLLAGLESLSEQIREYNERIEELAQESYPQVALLKQVKGVGTLIGLTFLLTLEDPHRFRKSRDVGCYLGLQPGRRNSGQSEPQMHISKEGDPYLRTLLVQGAQHILGPFGVDCDLRRWGLKLAERGGKSGKKRAIIATARKLAVLLHHLWVSGEAYEPLHNSQQSAMPAAA

SEQ ID NO: 90138 - protein, 397 aa, unidentified
MYIVGIDIAKRKHEAAVIDGEGAVIIKPFSFTNNCSGYNRLLAMLAKAKLPLDEVSFAMEATGHYWLALFTRLQKEGFRVQVINPVQTNSIRSFYIRQAKTDPRDALLIAEVIRFGHFSESTLHPENIYELRELCRGRHAIVSMQADVKRKVVALLDQVFPEYETAFTNMFGDTSMAILQACPTPKELSEMPFEELCHLIEVSSHKRFRMAKARELQELARNSFGFAMAGDVFSTMIRLYAKHLDFLKQQVREMDRKIAEIMDTLDTPITTITGIGPTLGAYILSEIGDISRFSSAAKLAAYAGIDPTMRQSGEYNGVRNRMSKRGSPYLRHAIWLATSSAVLHDPALKLYFQKKRDEGKPYMASVGHACRKMVSIIYAVMRDNKAYTPYIPNEISA

SEQ ID NO: 90139 - protein, 353 aa, unidentified
MAKMDEVLVRDQEVFVGIDVSLRSYAIAVRSGRELVHRCTVPARYEHLRGLWERLPGCRIHAVYEAGFSGFGLHDTLCADGIDACVTPPSKVPRSGDKVKTDRLDAQKLAEELEHGSLRRCRIPSLTLRTDREWSRYLQQLTEQQTRLKTQIKLRLALHGLTPPLDHSRRWSKAYRAQVLAMVGMDGPVAAILRDMLEQLAEVERRRTQVKQALRQLARTEAYCQPVQLLQSAPGIGWLTAIRLVLEWGDLRVFRNGMAFASYLGLTPSEHSSGDRTRRGSITRQGNGAVRTWLIEAAWKAIAMDPALEARFRRLAPRPVNRNRAIVAVARTLALRLRACWLSERPYVIGVVR

SEQ ID NO: 90140 - protein, 390 aa, unidentified
MQNVADQSVAPTTIGADLCAIFISLELSRSTWLVTSLSPGRGEKMSKHSVSAGDIAALLARFSELRRKACARTGKSFPIIVIQEAGLDGFWIHRVLLSEGIESHVVDAASVATSRRRRRAKTDRIDGEALLRALLAHKRGEPRVCSMVRAPTPEDEDCRRICRERKVLIMERVQHVNRIKGLLFSQGAFGYEPLRRDRRARLDALQTGDGRRLPEHLKAQVCRELDRLELLLEQIKAVETERDALLNAQQTKGLAPPPMLLGVHGIGPEFASVLWSEGLSRRFDNRRQVAAYAGLAPTPWQSGSVNREQGISQSGNSRLRTTMIQLAWLWLRYQPRSALTLWFQDRNERNGGRRRKTTIVALARKLLVALWKYVSAGVVIEGAMIRAAGR

SEQ ID NO: 90141 - protein, 401 aa, unidentified
MVSDFMKGRYNLMKIFVGIDIAKLNHFAAAISSDGEILIEPFKFTNDADGFQLLVSKLESFDKNSIIIGLESTAHYGDNLVRYLVAEFYQVCVLNPIKTCQMRKNNVRKTKTDKVDTFVITKTLMMQDDLRFITFFDLDMMDLKALGRFRQKTIKQRTRLKIQLTTYVDQVFPEIQYFFKSGLHQNAVYALLKEAPSPKEIASMHMTHLANLLKVNSHGHFTKEQAKELRVLAQKSVGANDSAISIQITQTIQQIELLDSQLEKIEAEMTDIMKFNDSVIMTIPGIGYINGGMILGEIGDIHRFSNPNKLLAFAGLDPSVYQSGNFQAKTTRMSKRGSRVLRYALVNAAWNVVRNNATFKAYYDAKRAEGRSHYNALGHCAGKLVRVIWKMLTDEVEFNLE

SEQ ID NO: 90142 - protein, 347 aa, unidentified
MRFYTQQHGYYCGIDLHARTMFVCIISQDGTVLVEKNIRARPGPFLDLIAPYRDDLVVAVECIFTWYWLADLCHEEGISFVLGHALYMKAIHGGKAKNDRIDAGKIAALLRGGMIPRAYVYPSPMRSTRDLLRRRLHLVRHRGRLLAHIQNTNHQCNHDDFRKKLTYKANREGVAEQFDDPSTRKSVEVDLALIGHYDGIIRDLELFIVRMAKQHDTDMFQRLRSITGVGKILALTILYEVHDVARFETVQQFASYSRLVKCSRESAGKRMGTGGAKIGNVHLKWAFSEAAVLYLRKNPAGQNYLARLTRKHGKGKALSILAHKLGRATYFVMTRSRNFDEKKFLAA

SEQ ID NO: 90143 - protein, 337 aa, unidentified
MNTEYSFFVGIDVSKRKLDLALLHEGKIRSKVIENSPRGYADLQDWLVAHGVVPAQTHLCLEATGPYGEGVATALADAHWPVSVVNPARIKGFAQSELARNKNDRADAALLARFCAALNPVLWQAPSVQWRALRAKVERLQVLKEMHQQESNRLEAHQVSQEALQAKSVSEHLSWLDEKIAALESDIDDHIDRHPGLKQDAELIESIPGIARTTAAKVLAYLGDVRRFHSAKALAAYVGVCPRERVSGSSVHGRTMISRAGNASIRHALYMPGMVALRHNPILKTFGERLLASGHAPKAVIGAAMRKLVHMIYGIVRSGVPFRADFCSKKLDFQDGI

SEQ ID NO: 90144 - protein, 435 aa, unidentified
MDVLHPRCAGLDVHKDTVVAGLRLAGDGAVRSEVRTFDTTTPGLLAMSAWLAENGCTHVAMEATGVYWKPVWHILSDGDFTLILANAAHVKNVPGRKTDVADAIWLADLLAHGLIRASFVPEAPTQEMRALLRTRKQLVREQSSHVQRIQKTLEDANLKLGSVLTQIMGLSGRAILDALIAGERNPDTLLTLVQRGVKAPPEKIRAALQGRVTDRHCFLLRLHLRQFDALAAAMAEIDAEVDRDLDPFRQAVRQLRTIPGVSDLTAQVIVSEIGIDMTRFPTAGHLISWAGLCPRNDESAGKRRSTKLRKGAPWLKTTLVQCSWSGCRKKGSYLKAQFQRLTARRGPKKAICAVAASILTAAYHMLRDGTLYQDLGDTHFNQAFPEQKAGRLVRQIAKLGFDCTIIPRAGARFLFSQVRHSCHSGRQKGQKAESD

SEQ ID NO: 90145 - protein, 407 aa, unidentified
MELSALYKCVIGLDVHQSQITACALIQQPNGGVRIEQRQFGGFMRDRRELAQWAASLNPDEVVMESTGIYWKSPYAALEAVGIRAKVVNARHVKHVPGRKTDVGDAHWLAMLARAGLLRASFVPPAALRELRLIARQRQKLVGQLASEKNRLHKVLTDSGIRLGVVVSDLHGQSARAMVKAIIAGHAPQQVIKLASRRLKASREELLDALQGELSASHRFVLDELMRHIEEIEARISRFDARLLEGLESERDTLALMQTIPGIDQIGAAMLLVEIGADMDDFGSADRLASWVGVCPGNNESAGKRKSGHTRKGNPYVRRLLCEFAHAASRTTSMFKSKFQALVVRRGYKRAIIAIGHKMLRTLFFMLKRREHYRDCATDYEALSVQRNAPRWIKALTRFGFITPASA

SEQ ID NO: 90146 - protein, 338 aa, unidentified
MNTNVVGLDIAKNIFHFYSLGIDGKATKKKLKRADLLRFFANYKVSLIGIEACGGAHYWARELTKLGHEVVLLNARYVKGFVVGNKNDFNDAQAIHEAVLRPNKRVVKIKTEEQQDMQLLHNIRQDLVDKRTALVNQLRGLLMERGIVIPKGINHVRKELPFILEDAENGLTHLSRELFAEHYDKLKELDKAIKSHEQRIARLCQQNPRSKRFLEVPGVGIITASIIAADIGDGKAYASSRDYAASLGVVPKQHSSGDKQVYLGVSKRGNRYIRKMLIHGARSVLKNCYDKTDKLSRWLQALIERRGFNKATVALANKNARILWAMASQDKGYEVRAV

SEQ ID NO: 90147 - protein, 428 aa, unidentified
MKNRNNQKLEAITQKTLIVGVDIVKETQWARFVDYRGLELGKALKFRNDKKGFENILASIEAICKNKRLDDVILGMEPTGHYWKPLANYLMMHEVTVVMVNPSHTKRAKELDDNSQTKNDKKDALTIARLVRDGRYYEVYMPQDIFAELRVLTNARISLMKRHNALKNTITAVMDEYFPEIVTVFKKPLKGKASMQILKSCPFPSLILELGVDGVLAEIKKAVKKTVGRKKAEQLVETAKTSIGVTYGIASAKLKLELMIEELELLTKQLAQIETSMELVLADTGFGEIILGIPGMGVVTAASFLGEIGDPMRFDNPRQISRMAGYNLVEDSSGKNKSGTAISKRGRKNLRSVLYQIAITMVAVNDEMKELYRYLKTRPNSPLKKKQALVVISKKIVTVIYNLVKKQTEYKAELVLGEFRKNQMKQVA

SEQ ID NO: 90148 - protein, 259 aa, unidentified
MRYIGVDLHKSSFYVTFMEESGTVSQQLTYRMNQLDEFKRELTREDCVALEATGNSRYFVKQISGLVKEVQVVNPSQFRVIKDSVKKTDKHDSELLALFLSKGLLPEIRQKDELHAQLKSLAQTRDKLVKLRTTLKNKIHNILSSHGIITRREAFSSKRSLRQVLSYDLPGPSRLELEVIVEQIEHLNEGIAKIDRELEERGRRLKGFENITSIGGIGKKSGTILLSIIGDINHFEDEKKLSAYFGLVPRVSQSNETHH

SEQ ID NO: 90149 - protein, 362 aa, unidentified
MRIIGCDLHARQQTLAMLDTTTGEVVEVTLKHEGDNVREFYCSLPGPVRVGIEATGSMQWFINLMEELGIECLVGHPAEIRAAEPRKQKHDRRDADLILKLLVENRFPAIWLPSKELQDLRSLLRHRHQWVRIRTRIQNALQSIALANGLRRGTALWSHDGQSKIASLPLTPHTAYRRSELQAMYEKFEAEIEKLNRRVEEQACERPGARLLMTHPGVGPVTALATEVFLGDPARFADSKALASYVGMIPKEYSSGGRQRLGGLSKQGNPLLRFLWGEAGAHAARKDPELQRFYRRKLVQKGLGKASVAVARKLGIRLWIMLRDQIEYNEFCRRGQKQQQSSEACAGMPETPYGAKSHRPVD

SEQ ID NO: 90150 - protein, 430 aa, unidentified
MKSNTQNAKIEAITEKTLVLGIDVGSETHYARAFDYRGIEYSKKPFKFSNTEAGFVTFKEWILDLKDRHEKEKVVPGMEPTGHYWFNLGKFLQDNEMKPVLVNPHHVKKSKELDDNHPTKNDRKDPKVIAGLVREGRYMIPYLPDGVYADLRTASNIRFQLQAELTRIQNRINRWFNIYFPEYKTVYGKPDAKSGILILKEAPLPEDILTLGIDGVNQIWRDAKLRAVGKARAKTLIEAAEHSVGSKEGAVSARMEIRMLLEDYESRNIRLQEVMGLIEGLVNQIPMAEKLLEIKGVGIKTVSGFLAEVGDIRRFNDPKELQKLAGLALVENSSGKHKGKTTISRRGRKRLRYLLFEVAMSLVAKNPEFRELHNYYTTRRLNPLKKMQSLMAIAAKLLRVFYAILTKGVGYDPKKMVNDIRRPAAYAQAA

SEQ ID NO: 90151 - protein, 356 aa, unidentified
MELQIQRGCGLDVHQATVVACLLTVLADGKVKKQIRAFGTTTRELLALSQWLQGEGCTHVAMESTGVYWKPVYAVLEGTFELIVANAQHIKNVPGRKTDVKDAEWIADLLLHGLLRPSFVPPKPIRELRDLTRYRRKLVESRSAERNRLLKVLETANIKLASVASDAFGVSGMQMLTALAEGKATPAEMAELAKGRLREKIPQLEPALEGRMEEHHRYLLKLQLRRMRDLDQDLAELEERIQQRLEPYREQLQLLEEIPGVDWTLAAVIIAELGVDMKVFPTASQLASWAGVSPGNNESAGKRRNARVTKGNFLSEDRLGGGRAGRHPSQGNLPARQVLPPESPAGCEASRGGHRS

SEQ ID NO: 90152 - protein, 310 aa, unidentified
MDIIAVGIDVSKDRLDVAVRPSGEAFAVERNAAGLDRLVNRLRELSPQIVALEATGGFETVAAASLGAAGLPVVVVNPAQIRAFAKALGQRAKTDPIDAAVIAKFAEATRPEPRPLPDDATQLLADLIARRRQIVDMMAAEGQRERRITDKRLKRSIARLRKALEKELAEIDNEIDDSVRGSPAWREKEDLLASVPGIGAIIARTLIAELPELGTLNRKQIAALAGLAPFTRQSGQWRGRSFIGGGRTSVRTALFMGALVAMRHNPVLKVFFERLRAAGKPKMVALIAVARKLLTILNAILRDRRPWQTA

SEQ ID NO: 90153 - protein, 367 aa, unidentified
MKKISTIGVTQTRSFRDQRLTIGLDLGDRSSWYCVLDESGAVVLEQRLSTTPKAMKEVFGGMPRSRIALETGMHSPWISRLLSELGHEVIVAHARNVRLIGESRRKDDRMDAQTLARLARIDPQLLAPVKHRSAQAQADLTLIRARAGLVRARTALVNTARGLAKSYGERLRGCNPRNLNEEKAQELSPELGAALEPLLAGINTLSAQIREYNQRIEHLAQTRYPQVALLKQVKGVGTLIALTYLLTLEDAHRFGKSRDVGCYLGLQPGRRNSGQSQPQMHISKEGDPYLRTLLVQGAQHILGPFGVDSDLRRWGLKLAERGGKNGKKRAIVATARKLAVLLHRLWVSGEVYEPLRNSGPFVATAAA

SEQ ID NO: 90154 - protein, 412 aa, unidentified
MSLALPEALFFTGIDWAAATHAVCVMDAAGKITAEFTIAHSADGITQLIRRLARYGTPAAIPVAIERPNGRLVDLLLEAGHPVVPVSPNAIKTWREGEVLSGAKSDAGDAAVIAEYLRLRCHRLQVAVPYSGETQALRTVVRTRSDLVDMRVAATNQLSALLEASWPGAQAIFADVESPISLAFLTRYPTPASAARLGEKRIAAFCTSQGYSGKRSAAELLARLRSAPAGTAGVALTTAPGTAVLALVAVLRTLNTAVKDLDRSATARLGEHPDGEIFTSLPRSGQINAAQMLAEWGDCRQAYGGPDAVAALAGCTPVTKESGKHRAVHFRWACNKRFRKAMTTFADNSRHASPWAAKIYNDARAAGKDHPHAVRILARAWIRVIWPCWINHTPYDPARHGAAAALAERITA

SEQ ID NO: 90155 - protein, 370 aa, unidentified
MLDTTTFVGLDVHARSIKAVSLDVMTGEVRCATFGYDAGAVAGWVRSVDPKAKCVYESGVTGFDLQKRLSGLGVDCVVGAVSKMIKPSADRRRKNDRNDAEFLARMLSVGNVVEVWVPDDECEAARDLTRALEDARDDLSRSKQRLSKFLLRHGLVFDERTPTGRRKGNWTRAHWSWIESIRFAEGADNEALAYYVDAVRRAAEDKARLEGLVEAETRKPRWRRRVDSLRCLKGVDTATAADLVFEAGEFSRFRNARSFAAWVGLTPSEHSSGESDRRGAITKAGNKHLRKALVEAAWHYLTCSARPKEPARGQAPDPGARRHAAKGVRRLVERRGTLLARGVHNNKANVATARELACWVWAVGLMAEEA

SEQ ID NO: 90156 - protein, 364 aa, unidentified
MYDSTTTVTVGLDVHARSIRVAAVRADELLEERTLPYDEEAVELVLRRWPVVRCCYEAGPTGFGLQRFLVERGIDCQVVAPGLVPQRPGDRVKTDSRDARKLARLLAGGLLEPIHVPSRELEAARDLVRAREDARLDRMRDRHRLSKFCLRQGRALPTSSWTVARRKWLSEQRFEFAAQQQTFDSYVHTVDLVDARIEALERAIRETAEQEPWRRLVASLRCLRGIDTLTALALVAEIGDFDRFSSAEELMAFVGLVPSEHSSGEQRRQGSITKVGNSHARRLLVESAWHARRRPTVGYQLARRQRGQDAVVVERAWRCQQRLYQRWQRMAGRGKPQQKIVVACARELAGFVWAIATEQPLRST

SEQ ID NO: 90157 - protein, 376 aa, unidentified
MLYLGIDQHKKQLTVNLRNETGDVLLKRQVSTEWARVREFLEALKKQAVREGGFVAILEVCGFNDWLVKLLVEYGCRETILIQPEKRSKKKTDRRDANTLGEILWLNRERLLAGKPVQGIRRVQLPSEQDAADRQITALRQRLGRLRTRTINKIKHILRKHNLEQECPTKGLDTIRGKKWLTEVSLGSIDRLEMDQLLVQWELWDEQIEKVDAEIVKRQAASKTAAVLATIPGCGAYSSLALASRIGAIERFPRPGSLANYWGLTPRCRNSGEATDRLGSITKEGSAMARFILGQLVLHLLRRDAWTKAWYGRIKRRRGSKIGRVAVMRRLTTVIWHMVKHNEPYVTGGPPRKKAKAQRGSGDERQRRRCPVGSEV

SEQ ID NO: 90158 - protein, 355 aa, unidentified
MIVIGVDAHKRTHTAAAVEEATARALADTTATADQDGHLQLLAFARRHGEQRIWAIEDCRHVSGALERFLLGAGETILRVPPNMMAGARKSARTRGKSDPIDALAVARAAIREPDLPRAFLAGPEREIALLVEHRAHLIRERTRLAKRLRWLLHDIDPTLEPADRTLSQLVTIQRVDRRLARREATIATRICREHLARLRDLTRRIDALKHELAPMVRRHAPALLTMPGCGTIVAARIVAEVANIDRFRTEAQLALYAGVAPLDASSGKQQRHRLNRTGNRQLNHALHIIAITQARIHAPARTYLERRRADGKSTKEALRAFKRHLVRRVFALLKAQANRTSSTIAGTAPTVCLT

SEQ ID NO: 90159 - protein, 358 aa, unidentified
MQEQRKELNFKGENIYVGIDVHLKSWSITILTEHNHHKTFNQPPEPEKLSTYLQAHFPEAVYYSAYEAGFSGLWAHYELESSGIRNIVINPADVPATGKEKMHKTDSVDSRKTARSLRSNELRCIHIPSQSTLSDRSLIRMRVSVVKDLSRLKQRIRMMLHFYGVETPKTFANDTRISKGFQWLKEDAAGAKGINREAFLFLVNEFEAEKQSLLTITRMVTGLSKKVRYKKNMELIRSIPVIGLITGITFLVEIEDITRFQSNDKFAGFIGIIPCCHSSGEKDNKGAMTPRGQVNMKAALIEGSWIAARVDPVLTLSFNRHCRRMESNKAIIGIARKLSNRIYFVLTKQTKHVCGVVQ

SEQ ID NO: 90160 - protein, 414 aa, unidentified
MSVQDTPGPRRAISAGVDWAKDNHAVCVLDGDGEPIERFTIPHNKTGLTRLNTLLDRHGVNDVGIERGDGPVIDALLGAGRTVFVIPPSQVKALRRRYGSAGNKDDRFDAYVLADTVRTDRRRLTPLLLDSEPTIALRKLCRARKDLVAHRVAVTNQLRAHLQTALPAVVDLFASLDSAVSLRFITRFTSQDALDRLSPKRLAAWLASVGYCGRADPAALHARVTDAARGADGEHGRALAGITHAYLATITTITAQIDVLAQQITEALTVHPDQQIFTSLPRSGTVRAARLLAEIGDARGRFPTPASLACLAGVAPSTRESGKARVVAFRWAVDKQLRDAVCDFAGDSRHSNAWAADLYRRARARGHDHPHCVRILARAWLDIIWKCWTTGTAYDPDRHRALQRLLDQDQKATG

SEQ ID NO: 90161 - protein, 405 aa, unidentified
MALECASWILGIDVGKEKLFCALLLKDETFRCRFDVEASLHGFQMMLERVKTETNGDGTVIFALEPTGHYWMVLGQFFEDHNQCYVLVHPLVVARSREVKRLNRGKTDAFDARLIAELACRGSVTRTQIPEDDWATIRFYAREYMDREKEIAREKNRMMSYLETTLPGFLDIFPKPLGMNSRACLRVLANFREVLQGDIVQFESQARKNITGKRLMTSRVRRLYEMLQRGDALGLRAGRKTLFWRIINSLDRLELYEKQQDMASKALISLYEQCEFKPYLDSVWGTSPLTNSLVLGFMGNPTSYDTPASLIKMAGCDPVSNESGKFKGKASISHRGRNLLRKAGDRISFLLEKRNTVFRNFMHHLTARPKNKLTKRQARIACINKYFRIIWVLCNHRVLFNPALA

SEQ ID NO: 90162 - protein, 313 aa, unidentified
MNETPCFVGIDVSKASLEVALRPFGRQQSFSNDDEGVARLVQWLRIEAPSLIVLEATGKFEQRVARALAVEGMLFNIINPRQARAFAKAIGILAKTDRIDASVLARFAEVLQPEARPLKTEETEALSDLVTRRRQVVEMITAEKNRQGTASKRIHRDIQTHIRWLEKRLEDLNDDIDELIRKSPLWREKEKLLQSVSGVGPVLVSTLLGALPELGTLNRKQIAALVGVAPFNRESGRYRGKRSILGGRGPVRSVLYMGTLAAIRYNPVIRVFYQRLFEAGKPRKVAITACMRKLLVILNTMIKNGTSWQHQPA

SEQ ID NO: 90163 - protein, 337 aa, unidentified
MKYCGIDLHSNNSVVIVSDEEDRIVFSKRLPNDLGQIGAVLWPHRRELAGVVVESTYNWYWLVDGLVDAGYRLHLAHPSAIKKYEGLKYSGDFADARYLAQLLRLGLLAEGYIYPREERGARDLARKRMQLVRCRTAQILSIENSMTRQSGTTLKGEAVKRLTAEQVDAFGFAPDVALAMEANRAVSQALGQQIEAIEKRLKESVGLRPDYHLLKTAPGIGRILATTIMLETGSIGRFAQVGNFSSYCRCVDSLRESNGKKKGEGNTRNGNKYLAWAFVEAANFAIRYCPEARSFYERKKRKANRVLAIKALAHKLARASYHMLRDQKPFDVGRCFG

SEQ ID NO: 90164 - protein, 421 aa, unidentified
MHEERRWFVGIDWASREHVVSLCDGEGKKIGQREFIHGGTGISGMIAWLLKASGGEPGEIHVAIETPHGPIVEALLERGFNVYCINPKQLDRFRDRFTVSGAKDDSLDSYVLADSLRTDMPLYRKLSVAEPLIVELREWSRIDEELKVERIRLANRLRDQLWRYYPQMLELGELDEDWMLDLWEAAPTPQKAARASKAAIARVLKKHRIRCFDAAQVLSELRKPALSVAQGTIGAAPVHIRMAIERLRVVNRQLADAELQLDRLCKKLAEPVAADDGENVPGQRQEHRDATILDSLPGVGRVVLATMLAESPDALQRRDYHALRSLYGTAPVTRRSGKSCIVTRRRACNRRLRNAVFNWGAVAVQHDPISKAKYQALRARGHGHARALRSVVDRLLYVACTMLENGTLFDHSFAEAKKTAA

SEQ ID NO: 90165 - protein, 300 aa, unidentified
MGQYVGLDVSLEVTTVHVLDEQGKRVWHGTCVSHPTAIEATIRKHAPDAVRIGLETGQLTTWLWQALTDAGLPMVCLDARQARAALNMKINKTDDNDAEGLAHLVRSGWYREVRVKSREAMLARSLLGARTQLLGIVTDLSNQIRGLMKTFGLVVPKGAGTVFEANVRRLFEDEKAVAAIVLPLLDAWCAVRAQAADLDRQLLSMVRENAACRRLMTIPGVGAVVALSFVTAIETPETFTRSRDVGAWIGLTPRRYQSGEVDYEGHISRRGDARLRSLLFEAAMAMLTRVRGESDLRSWR

SEQ ID NO: 90166 - protein, 343 aa, unidentified
MNEVTTIGLDLAKNVFQIHGVDASGRIVVRRQLRRSQVLPFFEKQAPCLVGIEACATSHHWAREIAKFGHEVRLMPARYVKPYVKRNKNDAADAEAICEAVTRPTMRFVEVKTEEQQSVLMLHRTRQLFVRQRTTLINAIRAHMAEFGIVAGIGRNGVERLLRLIDEGSDGRVPAVARECLQALRAQLVLVKRQILEADRRILAWHRSNELSRRLETIPGVGPLIATALVASIPDPHAFGSARDVPAWIGLVPKQNSTGGKARLGSISKAGNRYLRSMLVVGALSVIRRAKQVGYTRRAWLAELMARRLTKIAAIALANKIARIAWALMVSGTRYREPAPQAI

SEQ ID NO: 90167 - protein, 398 aa, unidentified
MISVGIDVSKEKSTICILKPYGEIVSRPFEVCHTEKELSELTSMLLRLNDDVRVVMEATGIYHLPVLCYLKEKGLFVAVVNPFEMKEYRCQGLRRVKTDKQDAVTISNYGIDHWYRLKNYEAEESVYAELKLLGRQYRHYMRMRVESVLELTHLLDYTMPGIKTLLKGWNETNGKDKLGDFAEEYWHYDNITKKSEEQFIESYLKWAKEKGYHQSQDKAIKIYALAKEGIPTVPSDTPSTKMLVQEAVRVLREVDNTLMTILTQMQALAKSLPEYPVVRAMGGVGNVLAPKLIAEIGDVRRFHSGKALIAHAGIDAPPYQSGQFIGTERKISKRGSSSLRKIGYEVMRCLKTHKEPEDAAVYRFILKKEKEGKSKRAAKIAGLNKFLRIYYARVMEVY

SEQ ID NO: 90168 - protein, 407 aa, unidentified
MSDHSEAYVAFDSSKLRNAVAIADCGRAGEVRFLGEIENSAAATATLVRKLAGKYGRLTFCYEAGPTGYGLYRQIKRLGHECLVVAPSLIPKKAGNRVKTNRRDALHLVKLLRAGELTAVWVPDERHEAMRDLTRARGAAVEDLRRKRQHVSAFLLRHELRYAGKQSWSKAYLRWLSELKLAHVEQRIAFEEMLLAVRQAEERIVRLEGAIRAAVPDWSLAEVVTALMAMRGMDLVSATAFLGEIGDLSRFQTPRELMAYLGLVPSEDSTGDTIDFMLSPKRDLTAAKLFLRLALSGTGGIRPRVINVDGHPAYARAIAELKRSGDLSRRCRCRSSPYLNNVIEQDHRFIKKRIAASLWFRSAEGALRTIDGYEAMHLIRKGQIRWLPKGDVVGQRQFIHTLFGIAA

SEQ ID NO: 90169 - protein, 404 aa, unidentified
MGLMTIQNSSDVAVFIGLDVGKASHHAVAVDKAGKRLLSKALPNDETKLRSIIDKLAIHGNVLLVVDQPATIGALPVAVAVDSGVQVAYLPGLTMRRVADLHTGEAKTDARDAAIIAETARTMPHTLRSVDLADERAAELSMLCGFDQDLTAQITATSNRIRGLLTQIHPALERVLGPRLNHPAVLDLIEAYPTPRSLEAAGAKRIKTKLKRNAPRMFNRLANEISDALAAQSVTVVGTDAAGVVLPHLATQLRALRSQRDDVAAQVERLVEAHPLYQLLTSMPGVGVRTAAVFIAETAGKTFVDASHLASYAGLAPVTRQSGTSIKGERASRRGNRRLKRALFLSAFAALRDPVSRTYYERKIGQGKRHNQAILALARRRSDVLFAMIRDGCLYDPPAPLQAT

SEQ ID NO: 90170 - protein, 345 aa, unidentified
MKITTIGIDLAKNVFQVHGVDERGKAALRKQLKRKDVVKFFANLEPCLIGMEACGSAHYWARKLSEFGHTVRLMAPQFVKPYVKTNKSDRNDAEAICEAVGRPNMCFVPVKTAEAQAVLALHRARQGFVKARTAQANQIRGLLAEFGIVIPQGIGHIAKRLPEILEDGENGLPGMMRQLVRALGEQLKGVDNQVEEMERQIKLWHRDSEPSRTLEAIAGIGPITASAYVASVGDAKSFKNARQVPAWLGMVPRHEGTGGKVKMGRISKRGDVYLRTLLIHGARAVIRQVERKPDQADGWLKKLLARRNKNVAAVALAAKNARIAWALLAHERTYQSDYVAKRTAA

SEQ ID NO: 90171 - protein, 412 aa, unidentified
MNQEENPSVVLFEQVVLRGCGIDVHEKTVVATIDGEGIVRETMTFDTYTSSLNSLRDWLQLHSITDVAMESTGVYWKPVFNILEQHFKVTLVNARHLKNVPGRKTDKKDSQWICKLLLAGLLKASFIPEERIRDLRDLNRYSTKLTQQLASEKNRIQKILEDANIKLSSVVNDTSGTVATKLIEGLMAGRTDLEALIAECYHGKMKASKAELLKAITGRMTGHHRFMLTQIKHHMAYLKSQIEVLQAEIDRLLEQDQQSVALLTTIPGVNKLTAVKLLAETGTRVEETFGSTKRLAKWAGICPGNNESGGKKLSGRTSHGNKYLKSLLVEAAWAATRTKGTYLRAKYDSMAARKGRKKALLIIGHKILNAVYIILTTKQSYNAYSVEEFEKQRSQTRIRHLKNELKELGVTA

SEQ ID NO: 90172 - protein, 423 aa, unidentified
MRSSKQAQQRSRAQLAAAVVGVDAGKFKHCLVVRPRGGADSKPFTFHTTRDGFDLAAEKILAVSGGAPSSQILVGIEFAGVYGFTFAYYLQQKGFQVVSVLASHSKRWKEVMHSQAIKTDEKDAGTITDLVAIGQFVSFPFLKKEYAELRYLVSARDNVSIQRTAALTRLKSVLQVVWPEFEQVFPKFHYITPLKLLARYPGPADLLKAPKRQVLKLMKEISRNHLGETTYQQLVAAAERTVGLPIAQGALKGEIPLLIEQIDVFARQMELIETRMEEVLGTLPEAEFLLSIPGVAPVSAAVFLGLIGDPQAYESSQQILKLAGLSLVERSSGTAKGQPHISKRGKPLLRKQLFMLALRAVRSDGMFRDRFVRHVARTGGKKLPVVVAVAREMLCLMFNIARERRCYTVEPPKRQNRRTEVAA

SEQ ID NO: 90173 - protein, 342 aa, unidentified
MTFVGCDLHTRMQQVAVLDTGTGEVSEHRLPHEGTAVEEFYAALPRPVTVGIESTGYAVWFHTLMQRLGHTLLVGDAAKIRAMVVRKTKTDRRDALHILDLLHHDRLPAIWVPDPATRDLRALLTHRMRLVRIRTMVKNGLQAIALNSRLACGSKLLRQAGVAQLQALALPPHTARRRDQSLELLAGLTTQIRELDDAITTAALGHPDAPRLITHPGVGALTALTTIVVLGPVSRFHDSKHVVSYVGLAPALHASANKYHLGRITKQGSPLLRFVLGQAAAHAARMDPDLQRTYGALVHRRGRPKAKVAVARKLLVRLFIMLRDQIDYDEFRRRGRPAPASA

SEQ ID NO: 90174 - protein, 326 aa, unidentified
MQTILNNCCGLDVHKDSVVACLIKSRTPLALSSSQEDVIKEMRVFKTFLDDLIQLRVWLEAEGCCHVAMESTGVYWFPVYDALESACGGKMELLVTNARHMRNVPGKKTDIKDAEWIATLLRAGLLRGSFIPPLNVRELRQVTRYRKNVVEDISTQKNRIEKTLQQAGFKLSTFLSDIFGVSGRNLIRVLIQKGKLTPIDVENETKRISQEKKNEIKLAINGSLSERQRQFLQLQITMLDDLLGHLTAIEQSIAKLSKPFMNEIDRLDTIPGIAITAATAIIAEIGVDMNKFPTAEHFCSWAGVAPGDNQSAGKKKVPELTLEIPI

SEQ ID NO: 90175 - protein, 308 aa, unidentified
MVTELEEDPVTIVGGLDIHRKQLTFDYVEVETGRLQRGRIAPADRAHLASWLARFDGQSPVAFAVEAGTGWRYVAEEMRNAGVEVHLAEPADTSALRGPKRRAKTDKADAQLLRELLTAGRVPECYIPPASVLEWRALLELYHDLRFEHTGWAQRIHATCFHQGTTRLGEAGVIRGCRARLDSIVDEQLSLVGRLQVNTALSIMDTLAEHLERLRRQLLGTARHVNGARALMAAIYGVGPMTSLALCAWLGGAGRFSSSRKAVRFTGLDITVHSSDGKRGPGRLSRQGPAVLRWLLFAAHPATATTAT

SEQ ID NO: 90176 - protein, 422 aa, unidentified
MRFIGLDVHRDFCEVAIAEAGRLRSAGRIETRVEALELFARSLDPDDQVALEATSGAPAIAALIEPHVARVVVANTRKLAAISQAKAKTDRLDARTLARLLASGYLEEVWAPDEQTRALRRLTSRRARMVRARTRAKNETHGVLARNLCPRPPVVHLFSKAGRRWLAELELPLDERLTLEGCLRQIDFLDVEIESLEKVLAEQALESPEIQRLMTVPGVNMITAATFMASVGDIGRFSSARKLVSYLGLDPKVRQSGNEPARHGRISKAGAAEARHVLGEVAWKVSRTPGPLRAFFERIRARRGPQVAATATARKLVVLFWQLLTREEDYAFQRPSMTRNKIRQLELLAGAPPRKGKAGVAGGKSQKLWDAERELSRQAEASYRRLTADWRATGPAKKVGAGATPGRASSRPSMRQAARQAR

SEQ ID NO: 90177 - protein, 431 aa, unidentified
MDDVARFAQFCKLRSEIRGSGKYLIVGIDIAKDKHHAFFGTPNGKSLWRRLIFTNDIVGYDRLVDQVNTLTTQHQLEQVVFGLEPTSNYHKPLACWLTQQGYMVVLVAGKAVKDNRELLDGRWDKNDTKDSANVADLIGQGKCLFYENPEDDIISLRTLLSVRKQLKKEEHRQRMRIRNGLLAKYFPEMERHWGSCIEENLAIMRWYLDPRKISETDFNLFVQQVTTTDRGGRQVNRLRKIYDAAKNSIGLPVNAAAVYEAKMLVERFKSVRQEALQTMEQIETICRQLPSYKLLLTIPGFGPYIAPLVLSALANPLRFKSRKQVIRLAGLDLNANRSGKKSQDSVPVISKKGDADLRYGLYQAALIASYHNDNFRRIYHRMLEGRQHERGIKTKARVKLAAKMLVVAWTMLKKNEPFDPNHLLAEPVQQR

SEQ ID NO: 90178 - protein, 355 aa, unidentified
MNDAKYIGMDVHTATISAAVRDSSGSLVMEATLETKAETILEFVHGLRGSLHVSFEEGTCAAWLHDFLKPHVTEVLVCDSRKNALLRVGNKNDREDARKLSELLFLNKLHPVYHGETGIRTLKELARSYLTITRDLTRVMNRLKAIYRGWGIACGGQQVYAPRYRAEWLAKITEAGVRRRAEIYYQQFDTLAALRQEVRRELLAESRKHPAMRLLRQIPSIGPIRAALLIALMQTPHRFRTKRQLWAYCGLALRTYDSGEYRFVGGQLKRSKKAVTIRGLNKNYNHDLKNIFKGAATRAAATAGPFQNFYEARIANGMKPPMARLTLARKIAAITLLVWKKGVRFDGEQLKQQAA

SEQ ID NO: 90179 - protein, 328 aa, unidentified
MEEVKRFVGIDVAKLALDLFIGSAGVGFSVANDEVGIQQLLRQLTPADFVIVEATGGLETAVASALAAAGIAVAIVNPRQVRDFARATGRLAKTDRLDAEVLARFGEAVRPAARPLADQQAQALEALVTRRRQLVEMLTAEKNRRARAPKVLHRSIDEHIRWLEKRLSGLDHELGELIRNTPLWRERDELLRSVPGVGTVLSSTLLAQLPELGMLNRKQIAALAGLAPFNRDSGNLRGSRCIWGGRAQVRRVLYMATVAAVRSNPTIKTFYFRLRTNGKHAKPALTACMRKLLVILNAMLHNKTHWQTPVHTSPTSPLLGAVSEYGCC

SEQ ID NO: 90180 - protein, 356 aa, unidentified
MKTVIAEVRTERLTIGLDLGDKSSAYCVLDGSGAVVSEQKVRTTPKALSDCFSGMAISRIALETGTHSPWISRLLSAIGHEVIVANARHVRLIAQSRQKDDRLDARTLARLARVDPKLLSPVTHRSAQAQADLSLIRARAALVRSRATLINTARGLVKTNGERLQGSSSRIIKSDVSMDLSPALRISMEPVLESIKALTLQIREYNRKIIALGKTSYPEVSLLTQVHGVGPLVALTYILTLEDPYRFAKSRDAGCYIGLQPARRNSGSCQPQLHITKEGDPYLRSLLVESAHHILGPFGADSDLRRWRLTLSARGAALGKKRAIVGVARKLAVVLHHLWVTGEVYQPLHQTTVATA

SEQ ID NO: 90181 - protein, 464 aa, unidentified
MTRPQRAPQQVHLEGLPAIHPNAAGIDIGANEIVVAVPPDRDAQPVRAFPTFTQDLQTLVAWLLACRIDTVALESTGVYWIPIYELLEQHGITPYLVNARHVKTVPGRKSDWNDAQWLQKLHALGLLHASFRPDGEMVALRTVVRYRAELIQHRAPHVLHMQKALQQMNIQLERVLNDIMGATGQLIIRAIVAGERDPVALAQHRNPGCKSSTETIAKALTGTWKDELLFVLQQALVLYDVYSAQIAVCDTQIGQMLAAMESRGTPDAPLPDLPPRKDGSRTKRAKNTPLPETRAQFARLVGVDLVAVMGFAASSVQTILTEIGTDMDRFPTVNHFCSWLGLAPHNDISGGKVLRSRTQKVVNRAAQAFRQAAQAVARSDSAIGAYYRAMRARKGPQQANVATAHKLARIVYHLLKYGEAYEAESAEEYDRKRQERELRAITRRANKLGYTLTQLGESTATSSP

SEQ ID NO: 90182 - protein, 422 aa, unidentified
MNEQEAVVYSVYVGIDWADLKHDVCICPRDSDTREFDVIRHCPEVIDAWVKDLHQQYGGRIAIAVELSKGPIVSALQKYDFIDIFPINPATLAKYREAFQPSRAKDDPTDAELAVDLLLRHPEHFKALKPQSTEMRTLTTMVEQRRCLVNERGRITNRLRSALKQYYPQVLEWFEHIDAPLFCAFLRRWPTLIQAKRARANTLKRFFHEHHMYRDGVVERRRQAINAASPLTLDEAVIAPYRMQVLVLVEQLELMFKAIDQFDDEIAKLASQHPDYALFQPLPGAGPSLTPRLMVAFGEQRERFSSAADVQKLSGIAPVTERSGQKHWVHWRLQCPTFMRQTFVEWAAQTINKSYWAGAYYRQQREKGSTYQAAVRSLAFKWIRILYRCWQSGVAYDESRYLKALERRGSPLVKRQEMPDSA

SEQ ID NO: 90183 - protein, 321 aa, unidentified
MQSSDFIGIDVAKATLEIATADATSPTQTLTNDRTAISTWLATLPATAQLALESTGRYHELAVELAGGRGLRVYLVNPRALHHYAKAVHRGAKTDRLDARLIARYLAHEHAQLRPYTPPSAAVQELLRLQRRRAQLMVTLTSLRQSLADLDVCRSEQRDALQGLRKLVAAVDARSAELLAAEPARADLAQRLATIPGFGPLNSRHYATLLPRLAPPRLSALISYVGLDPRPRDSGTFRGQRKLSKHGPAETRRLSYLAAMAAARYDDDWKNLKDQLIARGRSTTEAFCILARRLLRIAYALYRDGGVYDPAKLAPEGGQTT

SEQ ID NO: 90184 - protein, 485 aa, unidentified
MALVLAVVLGLLILEVAMSRRKPNPTSPDPASLALLQTLHPHAAGIDVGAAELWVCVPPGAVAVPHPPAVLPAHVRRFGAFTADLHAIAAWLRQCGVTTVAMESTGVYWIPLYDFLESAGFEVLLVDPRQVQRAPNRPKTDVHDCQWIQRLHSLGLLTAAFRPEEKIRVWRSYQRHRTNLIEDAGRHLQRIEKALEQMNVKLTEVVSDITGVTGMSMVRAMVQGERDPKALAKLRDHRCKESMETIAQALQGTWQPEHLFALRQSLELYDYYHQQIRDCDRVIEAHLQGMALPAVTPLEPTRRVRRRKDNEATFDARQRLHHVAGVDLTAIEGIEESTALVVLSEIGTDMSRWPSEKHFGSWLGLAPNPRKSGGKVKSSATRPGVNRAAQALRLAAKNLQRSRSALGAFFRRIAARRGLAKAITATAYKLARIVYALLKYGTAYVTQGLEAYETAYRERVVRQVKRKAMELGLVVVEREAVAQPS

SEQ ID NO: 90185 - protein, 371 aa, unidentified
MNTIVYVGMDVHKESYSLCCYCYDTDKIEYKQTIPADYRLILKYMEQVRTRYEGDVSFVCGYEAGCLGYSLYHQLTDHSVDCKILAPTTMAITNTNRVKTDRKDAANIARCLAFHTYSEVYVPDEIDNQVKEYIRMRDDKKQMLKKIKQQILAFVLRQGKHFDGGKAYWTIAHLKWLKELELNGLGKETLAEYLITYEYLVEKIERLDKRIEELASGERYNEKVKNMGCFLGIKTHTALSMVVEIGDFDRFAKARQFSGFLGLVPSEDSSAEDINRYGITKAGNRHLRRLLVEAAQSYTRGTIGHKSIALKKRQEGCAPEIIAYADKANERLRRRFYRLTLNKGVNRNKATTAIARELSCFIWGMMTGNVA

SEQ ID NO: 90186 - protein, 390 aa, unidentified
MIYVGIDVAKDKHDCCILDDEGRKLYPVFTISNDKVGFDELFSRIEEVTSDKTEIKVGLEATGHYSNNLLASLVDKGFPTVVINPLHTNLYRKGLSLRKTKTDKVDASSIAMMLMTDRTLKPYSEISYHNEELKSLTRYRFDKVHERSKLKASLARLVNILFPELEKLVPTLHQNSVYTLLEELPGADYIAGCHLTHLKKLLESSSKGRYSRDKAIEIRNAAINSIGTPMDAKSMELRHTIHLIWILSEEIEEIEASIKAIMDEMQSPIMTIPGISYRMGAMILAEVGDFERFDNADKILAYAGLSPSTYQSGQLDSSHSHMEKRGSRYLRYALFNATKFVCKWDESFGIYLGRKISEGKHYNVAVSHAAKKLIRTIYRMELTGQAYSPS

SEQ ID NO: 90187 - protein, 312 aa, unidentified
MTILCAAGVDVGRDFLDVSIAPIGRTFRVSNALAGIRTVVNRLHRAGVTRVVLESIGTYGMRLVRALADAGFEVGIVDPKRIKALRLAEGGRAKTDRLDAELIARFALLMSDAARPIPNAKALEIRTLSTRRRQLVEMAAMEKTRLKQALDPEVAQSCRLMIAQLSAERLRIEQRLQQHLLDEPDNADRAALLQTIPGIGPVVAMTLMADLPELGKLDRKAVASLAGLAPHPNESGAKVGARHIQGGRPCVRAALYMAAVSAARSDKGFKSEYQDLRGSGKPAKVALIAIARKLVVAANAILKTGQPWSHTA

SEQ ID NO: 90188 - protein, 353 aa, unidentified
MDRYIGLDVHSQSCTLAVEDARGKRLDERVLDTNGKVLVACLQGIAGTRHLCLEEGTQSAWLYELLEPHVAEVVVVQPEKRRGNKSDALDAWALAERLRTGAKTGRVFKAPRRFTALREAVRGYEMATKDLVRAKNRLRAAFRARGVSVARGAFADPDRHATEIKRLPSAQRRLADQLSERLKTAIAAHEVAEIWLREQGEALPEVARLATAPGIGLIRAAQVVAIVVAPERFRTPRQFWSYCGLGVVTRSSADWGRDPSTGSWKRRPQTATRGLNRNRNPLLKRVFKGAATTVITSMPNHPLHADYERQLTAGTKPNLARLTLARRIASAVLAMWKNKEDYDPVKQRPRTAA

SEQ ID NO: 90189 - protein, 409 aa, unidentified
MTTYIGIDWSSKKHDVCFVNAAGAAIARRVIAHTPTGFAEFEHQREQLQVEPAECVIGIETAHNLLLDYLWGHHYSQVYVIPPNQVNRESQARWPSGARSDPSAAYLLAEMLRQDRSRFPVWCPDSVLTRQMRRRVSLIMHLTRHITAMSNRLWAVLCRYYPAAITVFSELTAQIELAFILAYPTPQAAAQLTWTEFQAFAARQRYTQPRKLPAAFARLQQPQPQADADTVATFQAEAVQLAHLLLPLVQAKQTQVHELTRLFQQHPDAFLFDSLPGAGEILAPGLLVKFGDDRRRFPDAASVQALAGTCPVTDSSGKRHVVRFRKACDHEFRTLTQQWAKATLTVSPWAQAYWQEMRPHCRSNSAAYRRLANRWLAMVWKLWQTHQPYDEDYHLQQRAARSKPRPTNR

SEQ ID NO: 90190 - protein, 457 aa, unidentified
MARNRRKQSRIGFHEGLDQIREDAAGIDVGAKELWVDVGRKKDSEPVRRFESFTADLNAMADWLVAKQIKTVAMESTGVYWIPACQILEGRGIEVFLVNAAHAKNVRGRKSDMVDCQWLRTLHSYGLLPASFRPAADIGVLRAYLRHRQMLIEYAAGHIQHMQKALAQMNLQLAHVVSDITGVTALRIIRAILNGERDREKLAELKDPRARASAETIAKSLEGNYRAEHLFALRQSVDLLDYYQKHIQDCDRQISAQLQTMESRIDPVQQPMKKARSRKKKTRNQPTYDCREQAYRISGVDLTQIDGISESAALTLISEIGVDMSRWETEKHFVSWLTLCPNNKVSGGKILQRSTRKSASRARDTFRLCGQSLLGSSSALGAYCRRLCGRLGQPKGITAAAHKLALLVYRLLKFGRDYVDIGQEQYEKKFKDRALKQLARRAKDFGFQLVPSPQEVP

SEQ ID NO: 90191 - protein, 348 aa, unidentified
MALTIVETRAVTGGVDTHADIHVAAALDPVGGLLGVEEFPATRAGYARLLDWLGGFGTVCLVGIEGTGSYGAGLARHVTTAGVRVVEVDRSDRQDRRRQGKSDPLDAVSAARAAQSGRARGASKGRDGSVEAIRALMVVKRSAAGERTQTINQARALVLTGPDDLRARFTEHTAAALVAELASLRPRPGSTVGYATRIALRELGRRAEFLDAQLERLDELIVPLVATHAPGLLALYGIGPNTAALLLIAAGDHPERLRSEAAWAHLCAAAPIPASSGKTVRHRLNPGGDRQANHALWRIVFTRMGSHPATRAYVERRTKEGLSKKEIIRCLKRYVAREVYPHLRASAG

SEQ ID NO: 90192 - protein, 351 aa, unidentified
MAYRVAAIDVHKKVLIVAVATGANEVQDPAGEQLQFECRRFGATAQERLSVIAWLQHRGVSEVVMESTAQYWKPIWLDLEPHFGQLHLAQAQSNRAPKGRKDDYRDAKRLARRLLAGELMLSFVPGAIQRTWRELARAKEQYIHERVGLHNRLESLLEEMRIKLSSVITDLLGVSGRRILKALSEGQTDPVQLAGLGDQKLKCGREALIEALRGNPTTTQLQILKLHLDMLSKIDDVIGSLDRLLADELKQHQEAVLRLAEMPGLGVDSAQRLIAEIGVDAETFPTAEDFASWFGGCPGSNISAEQNHSSRTPKGNRYVRKLLTQAAQAAVKKKGSVFQALVRPILAKTIV

SEQ ID NO: 90193 - protein, 331 aa, unidentified
MKFLETSGIDVSKDTIDATLHLKKCHNQFSNNTAGFRSFIRWVEKRSGLNINQVQICFEHTGLYSMKLAAFLSNKEIKFSMVPALEIKKSLGIVRGKNDRLDAQKIAEYAYMRRDKLTSYNLPSSQVLQLQALLTLRAQMVRNRSGYQNSLKGIKTFFIRKDNEELYQTLQSGISGLNKKVKKLESQIIAIVKSDETIAFLYYLITSVKGVGLILGANFIVITNCFTNFENSRKFACYSGIAPFDKQSGTSLNAKSRVSHFANKKMKVLLNLAASSAIQCDPELKKYYHNRIANGKSKMSTLNIVRNKIVYRVFAVVKRGTPYVPFYKHAV

SEQ ID NO: 90194 - protein, 427 aa, unidentified
MPEHSPTTVIAETDVRPFAAFIGIDWADKEHAICLLDGHKVHHETLSHKTEAIDAWAEGLKRKFDGQPLAVMIEQSHGPLAHALLRHPHLVLFPINPKQAANYRKAMSNSGKKDDRSDAEWLARFVREHHPKLRVWQPDDEQTRELGRLVELRRKTVEIRKQIAQRVTAELKLYFPLAVELADELPQSLMRELLRRWPSLRELQRANPTTLRNCIARHLRRNEQRARELVQQIRAAKPLTTDRAIIDPSAMYVGMLVKQLVTLDESVEKFEAEIAKQFSAHPDAELFRGPPGAGVALAPRLLVAFGSDRQRFDTAFEVQCYSGIAPVTEQSGKSRHVRRRFACDKFLRQTFHEFADQAYKWCPWSKAYYQYLREKGQRHHAAVRALAFKWIRILFRCWKDRVPYDQQRYVQQLKSKAVPYAANIQTA

SEQ ID NO: 90195 - protein, 342 aa, unidentified
MKQYVGLDVSQKETSVCVVDEVGQVLFEGKAKSDPGALTALLRKRAPHAERIGFETGAMASWLWHELRRVDLPVVCIDTRHAHAALSVRMNKSDQNDARGLAELVRVGWYREVKVKSEESQKIRAILVARSRLVAIRRDIENQVRSLIKEYGLLFPRAIGLQFRNQVRELLGEDHQLLSAIAPLLSIHEQICKQQGTFDNEVRQLAKSDETTRRLMTVPGVGVVTALTFRHTIDDPSRFRSASSVGAYLGLTPRRSQSGETDINGKISRWGDRLLRTYLFEAATVLLYRTKKWSSLKAWGIKLAKRIGMRKAKVAIARKIAVILHCVWVDGTPFDWGQAKEA

SEQ ID NO: 90196 - protein, 386 aa, unidentified
MEPHLCVGIDVGCKAHRIGIACPDGSILEEFDISHSSAGFQEFFRRVEARRHQMSLPVAVAMEGYNGYARPLDRLVQEKGYRLYNVNNLKLARFKEVFPGAAKTDPIDTRKILELFTLKEHLPLAKDALQEVVATPAVNERLKRLSRRRRHLVNERIRVLNRMQADLEAVCPELLAITRKATNLWFLRFLTFRDDLGQLARVRRPTIQKILSVGQKYARLIREWQAKARFSGEVEYVGPMIIEDARRILQLHEQIHALDEAMEELHNHSEIARRLTTIGALERFASEGSLALYVGMSPLTRQSGLMSGSRSPRQVNRRAKAAMMTAVAHHIRCVPQSRAYYDRKRAEGKTHNQAIRSLGRHLVRVIWAMLRDGRDYEIREDIHPMP

SEQ ID NO: 90197 - protein, 338 aa, unidentified
MKVYVGMDLHATNTYVGMVDEENTVLHKQRFRNELPLILAALDPFKKDVQGVVVESTFNWYWLVDGLMAEGYRVHLANVSAIKQYEGLKQIDDKRSAFWLANLLRLGILPTGYIYPKEERPTRDLLRKRLQLVRHRTSHILSVKNILARNLGLRMKSEDIKKITDPEVKRFFPDREMQTMVLASVGLIRHLEDQISTIENMITKKLKVRKEFAKLMTVPGIGKILTLTIMLEVGDIRRFPTVGDYSSYCRCVKSIRTSAGKIIGYGNRKNGNKYLSWAYIEAAQAARRFHETVRSFYEKKMAKTNRIVAIKALSHKLTRASYYVLRDQVDYDPARLFR

SEQ ID NO: 90198 - protein, 399 aa, unidentified
MSKSAHLELRVGIDVGCHSHNVAIGLSSGEILDEFSVSHNPEGFRLFFSRVEKQEKKHGCPVSVAMEGFNGYARPLDTLVRARNYRLFNVNNLKLARFKEIFPSAAKTDDIDARKCLELFQLRDHLPTAKDVLQEVAATPEENDILKRLTRRRRRLVNERARVLNNMQTDLQAVCPGLLEITADAANLWFLRFLTSTDSLIKLARLQRTTLLKISGIGAKYARLIQEWQKQAHFSHEAELVGEMIQEDACRILELSDKIKVLEAKFEDIASRSVIAQTLSTIPGFGTVSKSELAGEIGTIDRFKDEASLALYLGMAALDNSSGKKKGTKDPKHVNTRAKAAMMIAVDRHRKCIPESQRYYEKKRSEGKRHNQAIRALGRHLCRVIFKMLKHEKGYEIRN

SEQ ID NO: 90199 - protein, 361 aa, unidentified
MKCVQSNKLDFSGQNIYVGIDVHLKSWSVAILSEHSVLKRFSQSPEPEALHKYLVSNYPGANYFSVYEAGFCGFWIHERLTDLGITNIVVNPADVPTMSKEKLRKTDAVDCNKLARELRSGSLVGIYVPGVETLELRSLIRMRNLIVKDSTRAKNRIKSLLRFHGVEIPEEFTRCSIGCWSKRFLSWLQALELSTEYGKKTLELHLEQFVRLRKMLLQETRAIREISRKAPFEKPIRFLTSVPGIGVTTAATLMVELDDIVRFKNADHLASFIGLVPMCHSSGESNGTGDITVRRHFMLRCLLIEAAWIAIRKDPAMTVAYTEYRKRMNPQKSIVKIARRLVNRIYYVLKHEKEYIPCVVK

SEQ ID NO: 90200 - protein, 361 aa, unidentified
MSSYQSFVGVDLHKCTVTLTAVSGQGETLTRLKISTKSTGKIAEWLSALPQPVHLAVEACPFVEWFIDRFRPCVERIDIADATELSNRRGKRRKTDWNDSLDVAARLARGECPLGFIADEELMQLRKLGRHWRHLSRLLSRSKHAMKSMLNAANLRGPKFDGAAAQRWLLANRDLLKPVQQQAFADFIDVVMLTERHRERLRREIVIATRSERFAPLVALLMSVPGIGEIWAAIIVAEIGPFDRFPNADALEFWAGMTADMKESAGRTTSGNITKAGSVTLRWALCQAAVTLCQCDARQEATRQRLVRRIGKPRANVAMGRRLLRILYAMVRDGKAFERGEPRDRTAAANRARLRRKKQVA

SEQ ID NO: 90201 - protein, 316 aa, unidentified
MPATPSSPPVFVGIDVAKDRLDVHLRPSGEAFSLPHNADAFEELVTRFVGLAPELIVLEATGGFEAAVAAALASAGLRLAIVNPRQVRAFARAIDRLAKTDRLDAEVIALFAERVRPEACAIPSTQVRALADLVARRRQIIDMITAESNRQRPTHDPRLQKSLERHLAWLQHELREIDRDLDGTVRGTPAWRETEDLLASVPGIGPITARTLIAELPELGLLDRRRIAALAGVAPINRDSGAMRGRRMIMGGRTTVRNALFMATVSATPWNPIIRVFYQRLTQAGRPAKVARVACMRKLLTILNAVLRDRRPWNVA

SEQ ID NO: 90202 - protein, 406 aa, unidentified
MAVMIGVDPHKASHTAVAIDQAEQLLGELRVRSSADQVERLLAWAAKWPQRTWAVEGAGGLGYLLAQQLVSVGETVLDVQPKLGSRVRLLATGNVNKNDPNDARSVAVAALRSKGLRSVAAEDHAAVLKLWSKRRRDLGSLRTQVVCRLHSVLCDLVPGGHPKKEMTAAQASRALAALEPAGAVQAARYELAMDFLADLRRIDTQMLEAKKRLEVAVKASGTTLTEVFGVGPYVAGTVLGYVVDVSRFADRDHFAAYNGTAPIEVSSGGHKVFRLSRRGNRRLNHAVHMAAITQVAQRHSEGRVYYDRKIKEGKSNKEALRCLKRRISDAIFAHLVADAKRKAQSGQMGPGGQRGNGSVSSVAGSHPERELFGQAAPRPVHTIRRTVTSRGSKSQEAVVKKSRKAS

SEQ ID NO: 90203 - protein, 432 aa, unidentified
MSHRIFVAEKDNFMAKRIHANGKASVQARYNITGGCDTDKNIIVAAIYHAETGNLEAREFKQHKADALRTAEWFRSQEVELVIIESTANYHMLYYDTLREEGINIAVINPIVVKALLRVEGKSDKGDAMTLARLAANFDLKTSNMPDSQQRELRLLFKRIDSWKQQRTQVTNRANGILTGYGFTVFRLVTLNTPAGLNILQGIIDRRTPEEIAALHRNRNKRPEIVKCAAVPLPDYILPYLEEVLGDVIMLNDRIKQAENEILDKINLSHLEKQVDLMTTVPGVTSMLALRIIAELGSNYHQRYCTAETFSKAIGVVPANEVSGGKLLKRRSSHGNARVKFHLLSASKAFAIHGKGPLKAWFDQYRSRVHYYKATSALARRIAEGLWWVMVKNEPYRYKLDHVENIESRPILVNNRLIDSATGEILKSFVED

SEQ ID NO: 90204 - protein, 350 aa, unidentified
MHYIGVDYHKKYSYVVVKDKEGKVEQRGTLNNSREEFQQFLQPYRPGKAVLEATRNWGLIYDWLEEILDDVALAHPLKARAIAEARIKTDKISADILCDLLRSNLLPEAYVPNKETREAKNILRQRMFFVRVQTMVKNRIWAILDRHPEILSRAPDVSDSFGASGMEWLRQVVLPGRDNQLLASELELLEVLKRKICQSNGVVKELANSDNRVRLLRSIPGLGPFFSVLVAKEIDDISRFRDAKKLCAYAGLVPSTYASGGKVFHGRITKTGNKWLRWAFIEAVSPAIRSDADLFAYYERLRTRKGSNAAKVATARRLLTITYRVLSQQRLYQRNKRMCRNRVPAALVTS

SEQ ID NO: 90205 - protein, 404 aa, unidentified
MLFVGLDWAETHHDVAVMDEGGQVVTARRVAEGLAGLTALHELLAGLVADPAEVVIGTETDRGLFVGALVVAGYQVYAVNPLAANRYRDRHTVSGAKSDAGDAKVLADLVRTDRHNHRPVAGDSELAEAVKVLARTHQSLVWTRRRQVNQLRSLLREFYPGALAAFGTEVGSRDALAVLQMAPTPTLGRQLSRAKLAAALARAGRQRGAQARAVQLQAALRAPQLQAPTIVADAYGAAALALVGVITTLNLQLIQLTEQLEHHFEIHPDAEIVRSLPGLGVVLGARVVAEFGDDPTRYANPKARKNYAGTAPITRASGKRQVVVARLARNRRLADACYLWAFSALTASPGARAYYDRLRAAGTTHQQALRALANRLVGVLHGCLRHRTASNEMQAWPATTQHAT

SEQ ID NO: 90206 - protein, 405 aa, unidentified
MRYVGLDWASESHDLTIIDDTATIIDRWAFTHDEAGITTTLARLAGHDDPGDLPVAIETSNGLLVERLLAAGHPVVPIHPNAFNATRPRWGASRAKTDPGDSYKLADYLRTEGHRLRRLALPDQATRDLQQLVRLRDDHVAAKVACTNQLAALLARHWPGAGTLFANLDSPIALAFLADYPTWASARRLGEARMAQFCHRYHYSGRRSPAELLARLRDAPQPAQPAISDTVAAQLVTAQATLLRSLLETIASLDKAITESTAAHPKTEVFAKLPRVGRVHLAQLLAEIGPILDRAVTLEQACAEAGVTPVTKASGKSLNVGFRYATNTRARQALTLWADNSRHAAPWAADAYQAARRRGKRHPHAVRILARSWMRVLWACWQHDTAYDPDQHAAARADHSTPAAA

SEQ ID NO: 90207 - protein, 348 aa, unidentified
MRFYTGQHQHYCGIDLHARTLYLCILNAEGNVLLHKNLPCDRARFLEAIEPFREDLVVASECIFNWYWLADLCAEHSIPFVLGHALYMRAIHGGKAKNDKIDALKTASLLRGGLLPMAYVYPAQMRSTRDLLRRRTHFVRKRAQLMAHVQNTFHQYNLPRPPGRLVYKYQRAPIPDAFNDPMLKKSVETDLALCDTYDELIRDLERTVVRQARVHDPQTLLRLNTIPGIGEILSLTLLYEIHDIGRFESVQRFASYARLVKCEKSSAGKRIGTSGHKIGSVHLKWAFSEAAVSVIRHLPQSKRLHDRLKRKYGKGKALSILAHKLGRTVYFMLKRNQAFDADRFLANA

SEQ ID NO: 90208 - protein, 349 aa, unidentified
MVIIGADLHKRSHTVIVVDEHGRKLAERTVPATPAGHLTLLRWARGMGERRWALEDCRHLSRRLERDLLTAGESVVRVSPRLMAGSRRSSREPGKSDPIDALAVARAALREPDLPVARLDGPERDLRLLVDHREDLVKQRTADQSRLRWHLHELLPGEEPPARSLARRHVLEDLATRLAGFDGTVARIAVDLVARIGELTMTIDRLETEIADLVADLTPTLLALRGCGPLSAAKLVGESAGAGRFRSPAAFARHNGTAPIPVWSGNDIRHRLSRGGNRQLNAALHRIAITQLQRSGRSRDYVAKRMAAGDTKTEAIRALRRRISDEVFRRMRHDEDLLTASQEAMPRAA

SEQ ID NO: 90209 - protein, 339 aa, unidentified
MGRFIGVDLHKNMFVVSFYEAASGNHQLWKYKLSAIGSFRRRLKKTDIVGVESTGNTRYFVDQIRDSVERVRVINPSQFKVISHSVKKTDDNDAKVIAEFLSKDMVPEVRMKDARTAQVSSLANTRDKLVKLRTALKNKIHNILSAHGIILKKEALSSKKALKTVLEQPVNPVALVELKVIVEQIESLNEGIKKLDQELEDQGKKLDGHENITSIKGIGGRSGSILLSVIGDIDDFENEKKLAAYFGIVPRVSNSNETERQGRITKRGSKLGRTTLVQCTLVAIRYSPYLNEFYQRIKARKGSGKAIIATAKKLLGIIYLTLKNKWVFEDFPNFVLKAG

SEQ ID NO: 90210 - protein, 346 aa, unidentified
MLYAGLDLSRKRLDFHLLDAEGGTVEVGAAPPDADGLCGLTQRLDRYGSRICAAIESMNGARFVHDRLERAGWQVEIADAQKVKGLAPLACKTDRIDAWVLAELARRELVPAIWLPDPAVRAERERARWRLHLVRHRSSLKQRVHAVLLAHGRPCPVSDLFGVRGRRLLGRLRLPEPWQGTLEASLRLIDQLDREIGDCERELRRLGADHRYVTLLCTVPGIGWVLAYTIAAELGDIGRFPSPRKLAGYSGLCPRVYQSGESDRRGPLAKNGPRYLRWALVEAATHACTHPAYRERYQHTKARIGKQRGAKVAQIDLARRLTEAIWHMLTRNQPFAPKGATDPLAA

SEQ ID NO: 90211 - protein, 348 aa, unidentified
MTLVGCDLHSRKQQVAVLDTRTGELVEQELVHEGDAVERFYSALPPPVTIGIETTGYTQWFHALMRQLGHTVVVGEAAKIRAMVVRKTKTDRRDARHLLDLLQHDRFPAVWIPDPDTRDRRALIAPRVRLVRMRTVVKNGLQAIALNQRLALHSALWTQRGLTQLKALALPPHTTRRRDDSLALVAWLTTQIDQLDAHIATVASADPRVQLLLTHPGVGPLTALTTVLVLGPLARFPDSKHVVSYVGLAPAVNASADKPRLGKITKQGNALLRWVLGQAAPLAARADDELRRRYFSILHRRGRPKAKVALARKLLVRLYIMLRDQIDYEEFRRRGRAPRPHQLPVAVM

SEQ ID NO: 90212 - protein, 339 aa, unidentified
MHVTTIGIDLAKNSFSLHGVDSQGKRVFNKTLSRGKLLAFLAQQPPSLIGMEACSGAHHWGRQLQAMGHRVGIMASRFVAPYRKGGKNDSNDAEAICEAVARPHMRFVPVKSVEQQALLSWHRVRQGLIKERTATINQLRGLLSEFGLIMPKGRYSAQHHIPDLLEDADNGLPTLARRLLNDVYLRLQDMNERLLAYDRELEHFCRQSEVAQRLTTIPGIGAISATALLASVGDPRQFKNGRQFAAWLGLTPRQYTTGGKIRLGRITKKGDVYLRTLLIHGTRAVLATLKDKQDRLSVWTRALIERRCYKRAAVALAAQNARILWAMLARGDSYQLKTA

SEQ ID NO: 90213 - protein, 358 aa, unidentified
MVQSKGINFDGQNIYIGIDVHLKTWSVTIITQSGYKKKHSQRSSAKALFEHLKKHYPNGNYQAVYESGFSGFSTYYALQEYGIDCMVIHAADVPTTQYENVMKSDPVDSEKLAKALKAGTLKGIYVRQKENLDNRSVVRIRKTLKQQLAGYKSRVKHLLYNNGVQLPECFDSLNTHWSKRFMSWLREDVVLLSSSRLGLELLLDQVELFRKSLLKANRLLRQLSKDPIYAERYSLLISIPGIGVNTAMCLLTEVDDISRFNNQREFASYLGLIPTSHSSGEKSCNGEKTFRGNKKIGPMLVESAWVIIRYDSAMSAAYGDYCKRMKPQEAIIRIARRLSNRVLSVLKSGKEYEYDKCC

SEQ ID NO: 90214 - protein, 578 aa, unidentified
MKNLYVGIDLAINGPHRASVYDPQKEQYLDNSFGFDISFEGFEHLLRRVGKHVSEEEKVQLNFVMEPTGLAWMPLSCYLVPRGHRVYRVSTLLSSDFRKFQSRHVETDRIDCRSLAKLPIVSKDKVYELYLPSADLGALCRKTRCMAKIAAQAASRKARIWSLFVMLNPGVLDAFGSRKFSLKGQVFLRNFANPFKVTVLGKEAFFERFRDLCPSAVADAMLETIYEVSLSTTKIYDLMAENGTLPFCMNQVEDEIGIELDLLNSEEEKISKLRSEIKVLYDQIDPEGYLMTPQGIGETIAPAILGMIGDVSRFPTIDAFRAYFGFIPKKKESSSRQIKGLGIHKAAQSLLKQYLFLAAETARRYDPEFAAFYDRLLGRGLHHYQATCACANKMAGRVYALLKRMQRAENTFYKSTSMVVDPEDQLKAEEVGYKLRDLDGNVIDKRTARKIILEKFPSKAEKRRIAERKNSSKKRGNQTQKQASEKQPERESTAPQESLSDQPRQIPGIVPDNSSMRSGKTLPIKTILEDTFPELFLQLKADPDNEGLLEIKETARDENMSSVEKLSKGGGKKVSKKA

SEQ ID NO: 90215 - protein, 363 aa, unidentified
MQQQVTKPDFSGQDIFVAMDIGNKSWMVSIMVGEIEHRTFSQPPIVEKLVHYLYHNFPGGRYRCVYEAGYQGFWIHDQLRHRGIDCIVVNPADVPTKHKEHTHKTNGVDARKLARSMRSGELDAIYVPSHSALEDRSLVRVRGRFVKKQTRCKNQIKALLTFYGIVAPDEVGRDHWSRRYILWLEEQIAFSRSSGDMALRSLLEELLFLRQTIARVTKEIRSLAETEPYRLDVSYLRTIGGIGVVSAMIFLTELIDIGRFHSLDHLANYCGLVPREHSTGEEQTIAGLTPRRNPMLRVLLVECAWVAVRKDPALLLAFTKLSARMPKNKAIIRIARKLLNRIRFVLKNQQPYETGIVSMAGTA

SEQ ID NO: 90216 - protein, 344 aa, unidentified
MLIIGCDFHSGFQQVAIFDNLTGEIEEKKLLHPAEAAEYYRSQADPVRVGMEAGAPCQWFRRLLTECGHELWMGDASKIRAAEVRKQKTDRRDAELILKLMLEERFPRIWVPSEEERDVRQLLMDRHHRMRARTQIKNQLQSLALNQGMQKGRKLWSAAGMQALRELPMMEHAARRRDQLLQGVIELDTQLAELDVLVRRQAEGREDARRLMTHPGVGPQTALAMVLTIGDVNRFENAGKVASYLGLIPGEYSSGNRQRLGHISKQGSSLMRFLLVEAGQSAVRGDEGLRRAYARLAAKKCRAVAKVMIARRLAERLYWMLRRNWTYVELARHAGEPGSSCGAK

SEQ ID NO: 90217 - protein, 450 aa, unidentified
MAQGSGLTRGDRNRNRKLADLRDVVRRDRAVLAIDLGEDKQVAVVMDHECRVLARKTVRAKAHHLDALLAWGTERAGKSGFAGVTVACEPTGHRWKALMGLADGAGQAFVCVQSMAVHRSRETDDYTLGKTDHRDAYLIGKLVTRLECYLPERADETWARLRHLGARRAALVTDVTAVRQQAADLLGCAWPAALGAAARPVESLTWRAAMAVVTARCAGRPERLRKIGYDRFLAAVRRELPRWGGKVVRHRIVKALWDALTDRRGVLQQRPGAIERIELLLEDWRGLRRAVAETEKRMLAVLDELGLTGLASSIDGVTALSAAVILAESGDPRRFSSGRAMVKHAGLNPSERTSATISGQTQISRRGRPGLRTAAWRAVWGALRYNKVLQARHARLTGREEGRRLADGQARMACAAALLRWLWAVITAGRAWDPAIASGQAAARTMAGAA

SEQ ID NO: 90218 - protein, 339 aa, unidentified
MSYRTSIGLDVHARSIAAAAFVPETGKIIQRRFEYDPASVIEWTRGLPAPVQLVYESGPTVFDLARKLIDAGLECKVGAVSKMLRPTGDRIKTDKRDAVFLARMLAVENVVEVHVPTPSQEAARILTRAHEDARKDLMRARHLLSKFLLRKGIAYEKGRSAWTKTHRKWLSSLSFDDPCERLVFDEYLAGVITMEQRCDRLDAAIGKLSATPGLAGVVNRPRCIRGISTITALSVLAEIGVFSRFPNARSFMSCLGLVPSEGSSGETVSRGGITRAGNGHVRTLLTEAAWHTARPYNPANATALEDTRHAPAGAADLAAEANRRLHARYLHLRSRGYQT

SEQ ID NO: 90219 - protein, 338 aa, unidentified
MNEIGIIGLDLAKQVFQIHGASPDGSVVLRKKLGRGRMLEFFAKLPSCIVAMEACASAHYWGREIGKLGHEVRLINPSYVKPFVKRQKNDAADAEAIAEAASRPTMRFVPIKSAEKQASSMTFKVRDLLVRQRTQTINALLGHLMEYGLVAAQGMQNVPRLQQLIETHPDLPETARSLSFGLLQHIESLTDQRPGARLAGQSSTGRGCLALDHHSRDWCNLRHSNGSLGTLGGGLSKGRDFAAWIGLTPKQNSSGGKERRERHRKWAARFAAAAHHWRHDRRPLGEATRRAGWYLAGKNDSDETAKANCSRSGQQIGAYRLGSHGPRGVYEDPAPGPA

SEQ ID NO: 90220 - protein, 331 aa, unidentified
MKKQNWVGVDVGSQELVVAVERNGKRDGTLSFENTAEGHRKLIRSITKRGASARVVLEATGVYGLDLALALKRASRVEVMVANPRAVSHFGRASLQRSKTDALDAEVILEFAKRMPFESWIAPAREILDLRAISRRMEALTKTATQEKNRLHASHQSAESSEVVRADVEISIEHLATRVAQLRDQALQLIASHPHLRDAFGHLISIKGIAELAGIQILAELAILPKDMSVRQWVAHAGLDPRQHQSGTSVHKPARISKTGNTHLRRALFMPALVAVQHEPHVTAFYEKLLGRGKTKMQANVAVMRKLLHAIYGMLTHDQDFKGEKFYAIGA

SEQ ID NO: 90221 - protein, 345 aa, unidentified
MKIVGCDLHTRYQQIAMLDEETGELIERRLEHESGEARAFYAALTAPVRVGIEATGHTRWFERMLAELGQELWIGDAAKIRASMVRKQKTDARDAAHLLELLLSGRFPRLWRPTMAERDLRQLVWHRQKLVWMRNAVGNQLHALAMGEGVCRKKKLFTKKGRIELEKLSLDVWASRRRQELLRMLDQLDASLREFDQAVAEQAEQNPAAVLLMTHPGVGPVTSLAFVLTLGPVERFARSKQVVSYLGLNPREHSSGGRQRLGSISKQGNPMMRSLLVEAGHTAARLDCELRQDYQRLKLRRGGGVAKIAIARKLAVRMYWMLRSQASYAQLVRMQGSPRATLVRR

SEQ ID NO: 90222 - protein, 343 aa, unidentified
MQTVTTIGLDIAKSVFQVHGVDAGSQLVIRRKLKRRYILAFFQKLPPCLVGIEACASSHYWARELQALGHRVRLMPPIYVKPYVKRQKNDMADAEAICEAVTRANMRFVPIKTPEQQSGLVLHRTRHLLIRQQTAVINAIRAHLAELGIVAPVGRKGVEELLRVVADGNDKRVPDVVRACLGALGTQLLSFKKQILELDRMIMVWYRSNETSRRLHYIPGVGPLLATALVANVADPGAFRSGRNFSAWIGLVPKQHSSGGKDRLRSISKQGDRYLRSLFVAGALSVIRYAKAHGSNHRPWLTALLARRPAKVAAIALANKLARMAWAMMAKGERYRNPVALAA

SEQ ID NO: 90223 - protein, 417 aa, unidentified
MNAVGIDVSKGKSMVAIMRPFGEIVSTPFEIKHTTSDINSLVELINSVEGESRIVMEHTGRYYEVLAHQLSEANLFVSTINPKLIKDFDNDSLRKVKSDKADAVKIARYALDKWQNLKQYSVMDELRNQLKTMNRQFGFYMKHKTAMKNNLISILDQTYPGVNTYFDSPARNDGSQKWVDFASTYWHVDCVRKMSLNAFIDHYQNWCKRKKYNFSQSKAEEIYGKAKELVPVLPKDALTKLIIKQAVDQLNSASTTVESLRTLMNETASKLPEYPVVMAMKGVGTSLGPQLMAEIGDVSRFTHKSAITAFAGVDPGVNESGTYERKSVPTSKRGSADLRKALFQVMDVLIKTHPQDDPVYQFLDKKRAQGKPYVCLYDCRCQQVSKNLLRTSERISRISSRVLIIHQNFQTSTGVVV

SEQ ID NO: 90224 - protein, 353 aa, unidentified
MKFYCGIDLSARDCHCGIDLSARDCHVCVIDEQLKIVVQQKLRNELPKICQLLAPYKANLKIVVESTFNWYWLIDGLQAEGFEVMLAHTLGLYLITGAKVKTDRRDAYALAKLLLVGAVPAAYIYPVETRPVRDLLRRRLHLVQVRAGEYGSLRRLLLRQGILSSKQQEIKTATEAELEQWFEHPLVRLHASQELQRIELYSQQIAELEKTILELAKTEQAYELLQKLPGVGQTIALTILYEVGELTRFANAKVFSSYCRVVSGIAQSGNVTGRGRASKQGNHYLKAAFSQAAVHAVRCYPKVRRYYERQLKRHQGRGRQMICYNIIAHKLAQAAFHVLKEQTEYREELLFGR

SEQ ID NO: 90225 - protein, 447 aa, unidentified
MSKKKAKGIPVINTAAAGIDIGSRFHVVAVPPELCDDPVKTFQAFTSDLHNMADWLVKIGITTVAMESTGVYWVAAFEILEDRGLSVTLANARDAKGVPGRKTDVNDAQWLQKLHACGLLKASFRPAREISALRSYLRQRERLLDYSGSHIQHMQKALTFMNIQLHHVIADVTGVTGMKIIRAIVSGERDPEIMAAMRDGRCKTDHQTMCAALIGNYQEEHLFALQQALELYDFYQLRIHQCDTQIEATLKGLSMSKPIPNAPLPKPRHKTKQPNQLNFDSRAAIYQLVGTDLTQIHGIGPYLALKLVAECGTDLSRWKTSKHFTSWLTLCPGNKISGGKVLSSHSRKTNNRLTAHLRLAATTVGRTNTALGAFYRRLAARIGKAKAVTATARKIAVLFYNAMRKGMTYQDPGADLYEQQYKDRVIKSLYRRAADFGYTLQENKSVS

SEQ ID NO: 90226 - protein, 391 aa, unidentified
MSESMALVGLDVHKSRTVAAVLDPATGELRMERLRGEPERVVPVFLEELDRPVAAVYEAGPTGFVLVREADRRGLDVRVVAPGSIPRAPGDRVKTDRRDAKRLVRLFAAGELRFAFVPSEPDERFRDLVRCLDDVRRDLMRARHRLSKFLLRRGVRFSGKTWTQQHERWLCTLAFEDPLSQAVFVDYLSAVQGLAQRRKTLIGVLEAAVPHSSHAETIGRLRCFRSIDTLTAAGLCAEVGDFTRFRTPALLSGFLGIVPSEYTSDEKRTQGQITKAGPANARRLLVEAAHNYRHRPRVGENLKARQSGQDPRVAQIAWRCQRRRTGAGCTSPQSAASRRGPSRSRSRASSPRSAGRPPPWTETHRHKGARRLPGRREQIRRPPRRHPRARE

SEQ ID NO: 90227 - protein, 378 aa, unidentified
MSSDNRILIAIELSRSTWLVAIRLPGVEKTRLRNIEGGDSEALLALVRELRAQAAVKLGEALDVACCFEAGRDGFWLHRLLTAHGVAAYVLEPTSILVNRRARRAKTDRLDAEGMLRVLATWLGGDRKIYSMVRVPTPEEEDAKRPHREREHLVQERLRIENRMEALLFTQGIRGRPSLRSWERDIAKLRTGDGRMLPCLMQAELNRLRRRLVLILELIHEMEAERAEALLATTDDVAARKITNLQRIRGIGANFSAVLVREVLYRSFRNRRELASYVGMAPMPHQSGGMDRDRRISRAGNPRARTTLIQLAWLWLRYQPGSGLSAWFSERVGTLQGRTRRIAIVAMARKLLIALWRYVETGVLPEGVEISAAEAAAA

SEQ ID NO: 90228 - protein, 350 aa, unidentified
MSIVAETVEHVVGIDTHARTHTYCLVHTRTGAVVDTATFPTSKSGNARAISWIHRRSPGSVLAAVEGTSSYGAGITAALLEQGFDVAEVRPAARSAHAHAGKSDLLDAEAAARSAIGRDYNTLARPRQTGARAALRVLLASRSIIDQQRTANRNALTALLRSVDLDVDARKPLTDAQIRVIAAWRIGRGATAAAASGIARREARRLAVTVLEQTELLKDNHRQLRQLTEQLAPGLQDLPGLGPVTAAIIVCAYSHHGRVRSEAAFAALGGIAPLPASSGNTSRHRLSRSGDRQLNRAFDIAVRTRMSYDPATRAYITRRRTEGRTNREIRRCLKRYVCRSVFRQLQASMA

SEQ ID NO: 90229 - protein, 354 aa, unidentified
MKYYTSTTQFNCGIDLHARQMYVCVMDRDGHKLVHTNIRNNDFAFFLKLVAPYRHDLTVCAECMFGWYWLADACQAAGLNFVLAHALYLKAIHGGKNKNDRIDSEKIAHLLRTNLIPPAYVYPAAQRPLRALLRQRLLYVWRRSELLARIQSHQLAYNRPTLPQTRSNRDRWEEQLLTQEDNPIRQLALQNDLALIRHYDTQITALEAQLQKLTKATAARDYTLLQTVPGIGEHLGLTLLYEIGDIHRFPTVKDFLSYCRLVKGTVASAGKIKGLRGAKLGNAYLRWVFGEAAVIAKRDHEVIGPLAARLEAKLGNKFKANTVLAIKLARAVYFMLRDHTVFDPERLVAALTHK

SEQ ID NO: 90230 - protein, 323 aa, unidentified
MNASELIFVGIDVAKETLEVAVDDKSKTRCIANAGREIAALVKELIPLSERIGVVLLEATGGFERQAAAALCAAGLAVMVVNPRQARDFAKSMGYLSKTDAIDARVLSHFARTLHQSAQRERLLMKLPDANQEALEALLIRHHQLVGMRVAEGNRLAQSHPSQHKSIKAVLKMLDRQIVSVDNDMSGMLKAHFADKLALLKDFKGIGPCTQASLMGALPELGQLSHAQIGKLVGVAPLNADSGRHKGKRITWGGRTAVRSALYMAALSAVRYNPVIKAFHQRLIAKGKPKKVALVACMHKILTILNAIVKSGSPWNPEHHKCA

SEQ ID NO: 90231 - protein, 351 aa, unidentified
MPATASTKIAVIGIDIGKNSFHIVGLDNRGAIVLRQQWPRSQVEARLANMPPCLVGMEACVGAHHLSRKLKALGHDARLMPARYVRPYSKGQKNDFRDAEAIAEAVQRPTMKFVATKTADQLDLQALHRVRERLVSQRTGIINQIRAFLLERGIAVRQGQRFLRTELPRILAAAPDVLSPRMVHVIEGLASDWRWLDERIEGLSGEIEELAKRDAGCERLMSVPGIGPIISSAMVAAIGTGDGFAKGRDFAAWLGLVPRQISTGDRTILGKISKRSNRYLRVLFVQAAWVVLVKVKPNRWEGHGLKPWIEAAKKRLHHNVLAIALANKLARIAWSVLARGRAFEASKLQAA

SEQ ID NO: 90232 - protein, 340 aa, unidentified
MHYTGLDVHSNQSTLQHMTEDGYLGIDLEMDTHEECFTDFFNQFDQPSVVVLEAGRHHWWLNNILQQHPNINEVKVVDARRSRKLAEELSVQRGYGRAKNDRIDAEMLAEMARQGLAPEIHVPTIEQLAPRSLVRHRSQLLVQHTRAINKMHGLLGMHGVIIRTKDFFEQYAAKADVISTLPPYTFIIIDDLMSQISLYETQVGTIEAELDTMLPIDHPQIKLLTTAPGIGIVLSRIIYTEIRDIMFFKEPKYLISYAGLAPFEQDSNGKKGNIRLNKYSNHWLKYAFVEAAHHARTHEKYKHKYESDVKKHGKIRAKLNLARRLTKAVYWMLTRQQPFV

SEQ ID NO: 90233 - protein, 339 aa, unidentified
MAILFVGIDLAKNVFALHGVDEHGKAVLVRPSVPRARLHQLVAALPPCTIGMEACSGAHHWARLFMQHGHTVRLMAPKFVAPYRMSGKRGKNDAADAQAICEAVQRPNMRFVPVKSQHEQARLCVHRVRQGLVEQRTATINRIRGLLSEFGIVLAQKAATVRREAAARLEDLPGWGNTAVGDSLSELHRLDERIAEYDRHVVVMAREDERSRALMQLSGIGSTTASALVSTIGNARDFKNGRQLAAWLGLVPGQYSSGGKTRLGGITKAGDGYLRTLLVLGAKAVLAAAKNKDDRLSRWAMALEVRRGYWKAVVAIAAKNARMAWAVLAKGENFKPLEA

SEQ ID NO: 90234 - protein, 355 aa, unidentified
MKQQAIQYVALDVHQATVVVSVRDEQGLVVMRATVATEAKAIVGLVRGLGSRVHIAFEEGTQAQWLHDVLKPHAERVVVCNTRGRGTTDNKSDRIDADRLSELLRLGSLKSVFHGASGLLTLKELVRSYTNLVEDGTRVMLRIKALFRARGIKTPGTSVYGTSKRKGWLSQLEGRGARMRAEALFAELDVLQELRPKAKAAMIAEARRQPGWKVLRSIPFLGPVRVAQILAIMATPWRFRTKRQAWPYVGLAVVTRSSADQEFADGKLRRRRRAPLTRGLNRNHHPLLKSVFKGAANAAAATEGPLKDFYDACVARGVREDMAKLTLARKIVAIALRLWKTGELWDATKLTLQVT

SEQ ID NO: 90235 - protein, 462 aa, unidentified
MSRLSKPNTALEESRPFQGMSMVNENAAGVDIGAHEIMVCVRGPDHTQLVRSFGNYTADLYSIANWLGEHHICTVAMESTGVYWIPLFEVLESQKFKCLLISSKSLRRVPGRKSDVIDAQWIQTLHAYGLLTGAFRPESDLVALRTLLRHRARLLEHRAPHILHIQKALLQMNLQLSQVLTDITGETGFHIIRAIVDGERDPHKLAAMRNRHCKKGEDEIAKALTGTWREEHLFILSQSLELYDFYTEKISACDTQIEQNYGAIRPNWSDPEPAGQMAAEHFLPKRLAKNAPKDGEQIRAHLKRIGGVDLVAIHGISVPLAQTIITEVGTDMSKFPNEKHFCSWLGLAPKNEISGGKILVSRTLKTKNRAGQAFRLAAVSVMRADCAFGAFYRRMKSRLGPAQATVATAHLIARVVYRMLKYQVEYEPLSVSEYEKRYHDRQVKYLEKKAAKFGFQLMPAAT

SEQ ID NO: 90236 - protein, 350 aa, unidentified
MIIIGVDFHPEFQQIAAVDTDTGEFQEKRLMHPEEAETFYREFRVQGMKVRVGMEASGHARWFERLLAELQFELWIGDAADIRTKRVRKQKTDRQDAQLILRLMLEDRFPRMWVPSSENRDLRQLLWHRHRMVQARTRIMNQLQAVALNEGLRCKKRLWRERGRQQLESFRLAPWASRRRRDLLELLDRLNPTITQLSQAIEQEVEKYPEAQRLMTHPGVGPLTALGFVLIMGEAERFRCGKQVASYLGLVPLEDSSGSRRRLGHITKQGSSMLRFLLVGAAQVTVRSVPEWRSKYLHLMMRRGRKIAKVAMARKLAVVLFWMMRKEWDYEEMKKFGSHAGEPGNRHGVQ

SEQ ID NO: 90237 - protein, 361 aa, unidentified
MSESMALVGLDVHQAQSVAAVLDPVSGELRVERLRGAPAVVVPGFLERLGRPVRAIYEAGPTGFGLARAATERGLDVRVIAPGSIPKAPGDRVKTDRRDAKRLVRLFAAGELSFAFVPSEQDERFRDLVRCIDDARKDLMRSRHRLSKFLLRRGLRFPGRAWTQPHQRWLGKLCFDDALSQAVFVDYLCAVDALVGRRRTLIGVLGDAVAASSHAETVARLRCFRGINTLTAAGLCAEVGSFERFAKPSLLAGFLGIVPSEYTSDQKRVQGQITKAGPTHARRLLVEAAHHYRRRPRVSAELAARHAGQDPRVVQIAWRAQRRLHARWAHLGTQRGKPTGTVAVACARELAAFCWEAATLN

SEQ ID NO: 90238 - protein, 357 aa, unidentified
MLSSNVKYIGLDVHKEAISIAVLNGAGKLVMESIVETKSCTLLDFLHGLRGELHVTLEEGTWAAWLYDVLKPHVREIVVCNPRRNALLKEGSKSDKIDARKLAELLRAGLLRAVYHGENELRTLRELARSYLTISKDLKRVKNRLKALYRSWGISCVGKQVYTPRHREQWLNKIAQVGVRRRAELLYQQLDGLSVLRHTVRGELLAESRKHQAVKILRQVPLIGPLRATLLLALMQTPHRFRSKRQLWTYSGLAVVTHDSAQHRYVDGQLQRSKKPQQIRGLNQNHNHAMKDIFKSTALSASCCAGPLQDFYARLLAKGMKPDMARLTLARKIAAITLTLWKKGGSFDAEHLKSQAA

SEQ ID NO: 90239 - protein, 407 aa, unidentified
MLEVKVERCAGIDVGKKFLEVCVLIGPVDRKPAEEVRRFGVNVRDLEGLRAWLLEQGCTEVLMESTGSYWKPVFNILEGQLKVVLANPEQVKALRGKKTDRKDCRWLAGLLRHGLVQPSFIPPRDIRELRDLTRRRRTLLQNGTQERNRVQKILEDANVKIGNVLSDVFGTSGQAMLEALLENKLTAEQTAELAVGRLRRKIPDIVEALKEHRMSDHHRLLIGQALKHMQFIEEMVDELDKLIQEKLQPYEKQVELACTIPGIAHDSAASILAETGMDMSENGPFSTCHHLASWAGVCPGNNSSGGKRKSGRIRKGNRWLKATLSQTAWAGAAKKNSAFQFRYQRIKSRRGSERAAIAIGHAQIIQLYWVLRNGVPYPQQQRETEERQRQSLIRHHLIRLAQLGYTP

SEQ ID NO: 90240 - protein, 414 aa, unidentified
MEQKLIYLGIDWADDHHDIVITDDSAKTLNQFQIDHTPDGFALLHANIANYQKSPADVLIAIETNRGLLVHELIRTGYTVYAINPKAVNRYKDRHVLSKAKSDILDAQALAHLLRTDRHRFKALVPLPEDYRLLDRFCGDLRKLIDEKSRIVNQTISCLKEFYPKALELFSLNSQIFIDFLKAFPDHDTLRACKKKTFLAFIKKHRYPYPGKIEELWETIQSSTLQADTVTARAGKLRLLMLLDQLENLKIHCTHYEQEIQKILDTLPESNSIQSLPGVGDRLAPELVAALGPNGKDTHHRFHSAEEIAKLSGCVPIVKQSGKWEKVSIRHACVRSLRRTFHDWAFTSLKSSTWARAYYDYHKARNQSHFTILRNLGKKWIKILFAVWSKGTTYHEALHIQNLKARNIPWAMAL

SEQ ID NO: 90241 - protein, 356 aa, unidentified
MIVVGVDAHRQTHTAAVVNAQTAVELEVLSVFARPAGHEQLLDWATALSDERLWAIEDCRTLSGSLERYLLRAGERVVRVPPKLIAKVRDSARTFGKSDSVDAVAVARAAIREPGLPVATLPGPEREIRLLVDHRDNLVQDTTRYQRRLREHLHEIDPDMQPPLRTLAQRTTLDSLARKLAARPQDAQVRIARELIRRIRELVRRVKELKTQLARLVRKVCPALLELPGCGPLTAARILADVGDVHRFASDAHLSTYIGTSPLDASSGQQRRHRLNRTGNRRLNQALYLIAITQARIHPPARTYIARRVSEGKTSREAIRALKRYIARRIYRILTTGLQEVPPPRPITGSAPTRCL

SEQ ID NO: 90242 - protein, 356 aa, unidentified
MWIIGCDFHPSFQQIAFLDKATGEYGCRRLDHKSGEEERFYRNLAGQQVCVGVEATGGMRWFERLLGELGFEMWVGDPVKVRAAAAGKAKTDKRDADLLLRLLLENRFPRIWMPTAEQRDARQLVLHRHRLVQTRTRAKNQLHALATNEGLHPKRRIWSQAGQTELMSLALSPWASVRRQDWRELLEELNRRIYPLDQALQQQAEQRPEVQLLMTHPGVGPVVAMTFVLTLCKPERFATSKQVAAYLGLVPLEKSSGKRRQRLGHITKQGNSLLRALLVEAAHVAVRYEPQWKRKYLRLSMKKNRSIAAVALARCFSGSFVVDVEIGTQLRADPRVPFACRVARLAHWGLVNPRHR

SEQ ID NO: 90243 - protein, 343 aa, unidentified
MEKIARIGMDTSKHVFQLHGVDANELVVLRRKLRRTEMLAFFAAREPTVIGIEACAGSHHWARELSALGHEVKLLAPQLVKPYVKRSKNDAADAEALCEAMSRPSMRFVPAKTTDQQAALMLVALRDRLVRTRTQLTNAIRGHAAEFGLIAAKGLDKVEPLLVRIAMDESLPALARAIFTVHAEEYAALGARLRVVEAELMAWHRANATSRRLSAIPGIGPVIASLLVMKTPDPHAFRSGRAFAAWLGLTPKDHSTAGKTRHGGITRAGDEALRSVLVVGATAVINQARRRDKATAWLAGLLARKPAKLVAVALANKMARIAWKLMVSGEIYATGRMGATTAA

SEQ ID NO: 90244 - protein, 354 aa, unidentified
MEITTIGIDLAKHVFQIHGVDSAGKTVLRKQLRRDQLAAFVVQLPPCLIGMEACGGAHFWARKFRLMGHQVRLMAPQFVKPYVKSNKNDRADAEAICEAVGRANMRFVAIKPPEQQAVLALHRSRQGFVQARTAQSNQIRGLLAEFGQVFPQGIAALRQRVPDILEDASAELPGVFKALIQRLLDQLNTLDTQVSELDDQILAWHRTNPDSQKLQQIPGIGPITASALVASVGDVSQFNCARALSAWIGLVPRQHSTGGKERLLGISKRGDVYLRTLLIHGARSLICQAQAHPERYAWLNALIGRSNANIAAVALANKNARIAWALMAHDRAFTANYRPAQNRPEHTSEVQDNR

SEQ ID NO: 90245 - protein, 343 aa, unidentified
MTISMLGIDIAKNTFQLHGADNSGNAVHNKRLARHELAAHVANLPTCTIVMEACGGANYWARVFQGSGHSVKLISPQFVKPFVKTNKNDANDAQAIVEAASRPSMHFVPIKQVEQQDIQSIHRIRTRIVKNRTALINEIRGLCLEYGVVLIPGAARVKSSLCVAIADGDNELTPSSRESLQGLYEELVDVEARVKNLNTKIRQLCRQNENCQRILKIPGVGELTATAIVAAVPDPGEFRNGRHMSAWLGLVPRQSSSGDKQILLGISKRGDRYLRTLLIHGARAVLSHYKDLDNDYTRWVGRKKATLSHNKAAVALANKNARIIWSMLNTGEEFNIGAQAAAA

SEQ ID NO: 90246 - protein, 520 aa, unidentified
MSGSRTRQRPRSRCPDVLQKPRGTFHPRVQKVGPEHFGIVAVDCAKARSKWMLADFYGNVLVPPTLLAHNRFAVDATLDQLRQAMRDHDLKDLLVAIERTGRYHRTVQRAFAGAGFEARIVHPFATKQFRQPADPGNKTDDTDLAALHRAAVSGFALVEPGLDEAWTTFQLLIRHRRELVRKSAALRTQIRELLDAAFPGFAANFADLWERDCAGHLIRHFAGAADIRAAGLGGLCQSLDAADIRYQRRTLETILGWADQAATADLAADARRRFALALDDDRLQKAREIQTIERDIAAALVRTPYVLLLSFPGVNVVSAADFAGEMGPIEHYANSRAITGRAGLRPSRYQSDQVDRPNGPLVRCCNRKLRAAILRVADNLIKCNHHFNVLAHTWQQQHKDPRHTRVKVGLRFCRIAYQIVAGRQVFRHPCLQGRHYVLAKLMAFQRTRHRLGRVVARSALEHVPPREHGAEAKPLHEELQRIRRGGRHGPQLLGDILPIVLARLGVGEVQSTASGEEDPT

SEQ ID NO: 90247 - protein, 344 aa, unidentified
MYHYAGIDVSLESSTICVVDGTGKILRETKVASEPEALIAWFRSSGLALERIGLEAGPLSQWLYAALREAGFAVELLETRHVRDAFKSMPVKSDRNDARGIAQLMRLGWFRPVHCKSIEAQETRAVLTARKLLQSKLRDIENSLRGVLRGFGLKVGKTTECTFAARIGELVAGHPRLELVAKALLEAHAVLRREFNGLDKHTQKLARAHPPARLLMTTPSVGPIVALTYAAAIDDPKRFRSSKTTGAHFGLTPKKHQSGQKDYTGRISKIGDASVREALYQAAHVMLTKPIKGCSALKSWAMRISKRAGMRKAKVALARKLAVILHRMLADAKPFNPTAKAATT

SEQ ID NO: 90248 - protein, 483 aa, unidentified
MSQAKKHFQKPGARTTTAGKGKRGRKRKGMCLGDRPILEPNAAGIDIGAREIFVAVPPDRDEHPVQVFSTFTEDLERMAKWLVSCGVTTVAMESTGVYWIPPYDVLEQHGVKPCLVDARGMKNVPGRRTDWHECQWIQFLHSVGLLRAAFRPDGDVCAVRSLMRHRSELVQMAGQHIQHMHKALTQMNLQIHHAISDITGVTGLAIVDAIVGGQRDAQELAKLRDPHIKASEETIRKSLVGNWRPEHLFTLQQSRQMYQHYQEQIIACDEEIEKLLLTFQPRVDPTEKPLPPDRKKGKRGGKNKKKIVNPKTGFDLRTESYKLFGVDLTQIPGLMTMVLTLFSEVGRDMSRWKTAGQFISWLALCPDNDISGGRVLWKGMRKVHNRAGDLFRMAAYSLHHDPTPLGDYLRRMKSKLGPAGATTATAHKIAIIFYTMVKKQVEYDGTLWAARDAEREKRFEAKLKRQAQQLGYKLVPIEEKPAA

SEQ ID NO: 90249 - protein, 431 aa, unidentified
MKGGDFMKNNFLSTLFVGIDVSSKTNVLCALDFQGNKLLNLKALNNQPGAESILESILDCLNSNSFKFVVIALESTSFYSTHIANFLSSNEVLLAYSPMVYCLNPKTISNYRKSFVDMDKTDPLDAYVIADFARCGRIKSQPWRGAQFLALQRLTRHRLHLVEAIAREKTYMVSNIYLKFSQLTVLEKADRPFSNTYGATSEAVLTEFLSLEDIAYSSIEDLVAFIKDKGKNRFSNPVGTAELLQKAARDSYRLDKVLYEPLNIAIASSFNVIKALQIEIKEIDKAIEKNIKGINTTEYQSLISIPGIGPVFASGILAEIGSITSFSSNDALAKYAGLTWRIKQSGDYSADETNMTKTGNKYLRYYLIEAANSVKHRIPEFNEYYHKKFNEVPNHQHKRALALTSRKLVRLVFGLLTKNQIYSNSKVGEVQ

SEQ ID NO: 90250 - protein, 343 aa, unidentified
MTEIAVLGIDLGKNSCSVVGLDAAGGVVLRRRLHRDGVVKLAAGLPGCVVAMEACCGAHHLGRRLREAGHQVRLMSPEYVRPYVKAQKNDDRDAEAIAEAATRPTMRFVELKSEAQLDMQSLHRARDRLVGERTALINQLRAILLERGIAVPQGRRKLEIALDALLAEERIPLSPRTRLLVEDQRAEWRELDRRIEAFDEEFAAEARSDEAARLLTTIPGIGPLNATALVAAIGRAETFGRGWDLAAWLGLVPRQMTTGGRPKLLGISKRGNVYLRKMLIHGARAALPTLSKGETPLGAWLRGLSARAHVNTVVVALAAKLARIICAVLRSGQRFEMRAATVS

SEQ ID NO: 90251 - protein, 445 aa, unidentified
MEIINLNAAGIDVGSRSHFVAIGQGKEDVREFGVYNEDLKAVASWLKENGKTSVAMESTGTYWQSLFTVLQNEGLQVILCNGKFTKNIKGKKTDVQDCQWIQKLHTIGLLTGSFLPDSITEKLRTYCRHRSNLVEQAADTTRRMQKYLRLLNLRLDVVVNDVTGLTGMAIIKAICEGETNPEQLASLRHGNCKKSEQEIAKALQSNGKEDYLFALTYEYNTYLYIQEAIETCDIRIEILLQDQINNDENKREHTIKKKAHKRINKNTPKNFDVNLMAYQYFEGIDLMAIEGVSHSTVLSVMSEVGLEGLKKFESAKQFASWLRLVPNNKVSGGKVLSKKVPKGSNRLKIALRNAANAIGLLKDTPLASFFKRISYRKGHIAAVSATARKLAVIIWNMVIKKLPYNNDHGYEFLDQKRKRKVKEMKKQIIKFEISTDELGLNFSSL

SEQ ID NO: 90252 - protein, 452 aa, unidentified
MRCGRLLGMFARLSGVPWLLIEICARSLGYGCVSGVFHGPLLATGTNGWRSVVAQRDIAWIGIDVGKTHHWACMVDAEGKKLSSIKVANDEAEIVALITNAGSQARQVVWAVDIIGAPSALLLALLARADHAVRYASGRVVAAMSAAYVGEGKTDAKDAYVIAETARLRGDLPVIDTGTDLVRKLAVLTGHRADLIADRVRMINRLRDLMTSVFPSLERAFDYSSHKGAVVLLTGYATPDGIRRIGQTRLTGWLRNRNVRGSADVAARAIDAAKAQTVVLPGQDLCASIITELATAILALDDRLKALDAQIEATFAEHPQAAIIQSMPGFGPFLGASLLVGSNDLRAFPSAGHLAAAAGLVPVPNDSGRRTGNLHRPLRYSRPLRHVFYLSAQTSMMRAGPNRDYYLKKRSQGATHSQAVISLARRRIDVLWALLRENRMWTAAPPPLAQAA

SEQ ID NO: 90253 - protein, 349 aa, unidentified
MKATTIGFDLAKNEFQVHGVDAAGKTVVRKKLSRAQVLPFFARLSACTIGVEACGSAHHWARKLTELGHTAKLMAPHFVKPYVKANKTDAADAEAICEAVARPNMRFVPVKSVEQQAILAVHRVRSGLVAERTAQLNRLRSLLAEFGLIAPRGRRALMERLPVLFADETLPGVARNLFERQSTRIRQLDADIAAEEAVILDWHRNNELSKRLDAVAGVGPITATAMVASFGDGREFDNGRQMAACVGLVPRQHSSGGKTRLLGISKRGDVYLRMLLIHGARAVIRTLECRAKGGGNPTDQWLTKLLARRNPNVAAVALANKTVRVIWALLAHGRTYDRNWSAQRAAAAA

SEQ ID NO: 90254 - protein, 413 aa, unidentified
MRVEYERCCGLDVHKETVVACVIVPDAAGRAAKETRTFGTMTEELRALAAWLRAQGVTQVAMESTGVYWKPVFNVLEGEFDLLVVNAGHIKKVAGRKTDVSDAEWIADLLRHGLLRGSFIPSAQQRAWRDLTRYRTRLVDERTSEVNRLQKVLEDANLKLASVATDIMGLTGRLILQQLIAGETDPAILAGLAQGRLREKRALLAQALQGKVTPHHRFMLVEHLSHIDYLDEAIGRLDTEIEEQMRPFEEVLARWDQLPGIGPRIAQIMLAEVGVDLKQFEDAAHLASWAGLCPGNQESAGKRKSGKTRKGSRWLRRALTEAAHGAAHTKHKYYQAMYHRLVGRRGKKRAIVAVAHSLLVTGYYLITRKRDYQDLGHNYFDERQRKAVKRRAVRRLEQLGFQVSLIPASEPVT

SEQ ID NO: 90255 - protein, 353 aa, unidentified
MKYEKYMGLDVHQAMTVAVVLDAEGKVILETMVATEAAAVLRLVRSLSGPLRVTFEETTQAAWLYEILRSHVTEVVVCDPRRNKLLGEGSKGDKVDARKLADLLRTGMLRSVYHGHEATRKLKELVRAYETFSSDTQRTMTRIKAIYRGRGIATPGRGVYQAKQREQWLAKLPEAGLQQRAEWLYEQLDALKPLRKKAKQAMLTESQAHRAVGLLRTIPQLGPIRAAFIVATVDTPHRFRTKRQFWSYVGLAVVTHMSAEYEMKAGKVVRRRKPVATRGLNPNCNHRLKEVFISASTGGAGTEPYKSYLEKLKNKGMRSEMARLTLARKIAAVALILWKKGKEFDPKELNKTT

SEQ ID NO: 90256 - protein, 334 aa, unidentified
MENIALIGIDLGKNSFHIHCQDHRGKAVYRKKFTRPKLIEFLATCPATTIAMEACGGSHFMARKLAELGHFPKLISPQFVRPFVKSNKNDFVDAEAICEAASRPSMRFVQPRTESQQAMRALHRVRESLVQDKVKTTNQMHAFLLEFGISVPRGAAVISRLNTLLEDSSLPLYLSQLLLKLQQHYHYLVEQIKDLESQLKRKLDEDEVGQRLLSIPCVGTLTASTISTEIGDGKQYASSRDFAAATGLVPRQYSTGGRTTLLGISKRGNKKIRTLLVQCARVFIQKLEHQSGKLADWVRELLCRKSNFVVTCALANKLARIAWALTARQQTYEA

SEQ ID NO: 90257 - protein, 412 aa, unidentified
MDGVYKVAGIDVHKKMLAVVIANVAELGEYRFERRKFGTGDLESKALADWLTAEGVAEVVMESTAQYWKPVWQMLEGSFKLQLAQAQSNRAPKGRKSDFADAERLVRRLVAGELILSFIPDPEQRLWRMMTRSRYQLARDRARLRNQLEGFLEDCRIKLSSHLSNVLGVSGRKMLRALADGETHPATIAALANGGVRASQHALADSLAAASRLDVPRRQMLNLFLERLDLLSAQMDALAKMAAASLSEHRDAVKRLSNVPGLGADSAQQIIAEVGPKVATFPSPERLASWVGCCPGREESAEISKSDASPKGNATMRRLLSQSANAAIKAKGSVFEETYRRLAPRIGHGKAVWAVAHKLCRIVWKVLHDGVDYRELGQQPDPKSTERRVSKLMRQLRALGYQVQIQPTTIAA

SEQ ID NO: 90258 - protein, 509 aa, unidentified
MVPDAGAYVIGEDLITTVSIPFRRVTNERLRAAMRPTSTCEDAMTKTGKKQQRGRQRSGKVERGMPLVNVNAAGIDVGAKQHYVAVPPGRAEPAVRCFGTFTEDLQALAKWLQQCGVSTIAMESTGVYWIPLYQILESYGFTVKLVNARHVKHVPGRKSDVQDCQWLQQLESFGLLTASFRPAAQICVLRSYMRQRQRLIDYGSRHVQQMQKALTEMNIKLQHVLSDLTGVTGLAIIRAILEGERDRLKLAALKQRQIKSDVVTIAKALEGDYRPEHLFVLRQALELYDYFQQKIAECDDEIMKAMQTLESEATASLPATAKPPRKARSKHHPFPFASQQKLQRIMGVDLTRIDGINETTAHLVLSELGLDICHKWPTEGQFTSWLGLCPNNEISGGKVLRRGKRKVVNRLSNALRMGAQSLLKSKSALGAYARRMRAKRGTPIAINATAHKLARLIYRTLKYGQEYIDIGQQQYEQRYKENALKALQRKARQLGYQLVVSVHPSTVVP

SEQ ID NO: 90259 - protein, 340 aa, unidentified
MKKEVKFYLGMDVSKLWIDIVVMCVADHQKQPTVSGHFGNDAAGMKDLHKWLKKHNVSFDDNSLLVIENTGVYHRLVWEYCSSHGLPLYIGNATHIKYSFGIARGKNDKIDSERLCAYAFKNADEIKANPVLNPVFLKLKDMMTSRSRLLEQKNSIKVYLGELKLSNSKESQLIIEKAHKAALQGIEASINEVEKQIKLIIKENAAIENNYELLITVPGIGHLTAVYIICCTNNFICKITGKQLACYAGVAPFGNKSGTSIKGRDKVHKMANKELKKLLHMGAISAITHYPEFKDYYDRKVKEGKHKLSAINAVRSKIALRAVSVINNQKPYVDKYKKVA

SEQ ID NO: 90260 - protein, 415 aa, unidentified
MSLKLANLIGIPVVGLHQGQRTYAPRRQAGHMTAADQTVQGEKSACHEANGMDPALGLGWDVEVSTTEQETSMNIVRIGLDLAKYVFHLHGVDERGKVVLRKTLRRPGVAPFFANLPRCVVGMEASNGAHYWAKTLSEFGHDVRLISPQFVTPYVKSNKNDRNDAEAICEAVGRPNMRFVSVKSAEQLAIQAVHRIRSRLVASRVRLVNQIRGLLGEHGVVVAQAIGNLRRALPRIIDDEANGLNSIVRALIGELREELSDLDGRITIYDRKIINLYRMSEACQRLGEVEGIGPITATALVAAAGDGKCFKNGRQFAAWIGLVPKQRSSGGRSRLLGISKRGDRYLRTLLIHGARAALGRTRGKQDPRSLWLLKMRERRHANVVAVALANKNARIAWGLLASGMNYDQHLTVSSA

SEQ ID NO: 90261 - protein, 343 aa, unidentified
MFVAGIDAHTTFGMIVIVDSSGNVVHGPTRIRNQEADRLVRLLEDHKPVEVVVETSPSWPWIFDLLERPGIRVVLAHAKRLRAIADSTYKRDDVDAELLARMHLARLIPEVHIKSIEQREQATLIRNRVSLVRQRTAATCRIHAHLHNVGLSINRGHLLTRDGRRWLRSRAWPLFGPEQRLSIRMQLYLVAHLSSMIRSLDKRIERMGKDIPAVVLLKTISGIGPYRALLIATETMPIERFPSPAHLVSYAGLAPSSSQSGKRPIRHGSIPAGANRWLRGAFVRAVACHVQHAPESWLSLSYEQTRERLGWQVARVATARRLARAVHAMLRTGEVWRDKANER

SEQ ID NO: 90262 - protein, 514 aa, unidentified
MSEGTAQPPFSRLCPRLLRKHSAWLIRHIPLTQKFHPQPLAPAKMADWVHAHYARVRSPYAAQDKPFASGFTNPYRNGGDIMLKINYMSTLFVGIDVSSKSNSVYAMDFEENKYLSTSFGNNQPGADELVNRIAACMQKHKNLDTLLIVLESTSVYSVHISNFLASSEVLMPYKPYVFCVNPKATANYRKSYIGMEKTDPTDAYLIADFARVGRTKKLEPWRGGQFIALKRLTRHRMHLSECITREKTYMVSNLYLKFSELQLLEGDDKPFGNLYGATSSAILTEFLSPQEIIDMPEEDLLAFLAQRSRNRICDLSKTSELLRKAARDSYRLDKCMYEPLNISLASSFNCIQAYQKEIRLIEQAIEKCIKGMNPNALIILQSIPGIGPVWASGILSEIGDISAFHSSDALAKYAGLYWPKGDSGDFISEDNQMSKAGNPYLRYYFGEAANSIRKYIPEYADFYARKYAEVSKHQHKRALALTSRKFVRLVFGLLAKNQLYTGEKLDTEHNTESN

SEQ ID NO: 90263 - protein, 356 aa, unidentified
MEYIAFDAHKRYTLASVIRPDGQLVREQRIAHERGALREFLERCDRGSPVAVETIGNWYWIVDEIEAAGCVPKLVHARKAKLMMGEINKTDKLDARGLNRLQQSGTLPTVWIPPGELRDQRDLPRTRMVLVRQRTRLKNRIHATLAKYALHDVEVSDLFGVQGRALVRQRLTLLPPHTAYATQQLLEQIEGLDSQVRGFEQRIQAVFKPTPAIQQLLTLPGVAVTLAVVIALEVGDVARFATAEKLAGYAGTTPRVHASGGKTRYGPARPDVNRYLKWAFVEAANAICLTRGRTPRRHVSRLYERVARRKGHAKAIGAVARHLAEATYWMLSKGECYREPKVSSRVRPRGISAEAP

SEQ ID NO: 90264 - protein, 392 aa, unidentified
MAWVRHMVNGSVRREVRSFKTTTKELLALSDWLAGEGCTHVAMEATGVYWKPVWHVLSDGDFTLVLANAAHVKNVPGRKTDVNDATWLADLLAHGLIRSSFVPDGQTQEMRTLLRTRKQLVRECSRHVQRLQKTLEDANIKLDSVISDIVGLSGRRMIEALIAGETEPGALAAMAHRRIKATPDELEAALRGRVTRHHRFLLQLHLQQIDAVNAAIDQIDQEVDAYVEPFRATVRLLTTIPGIDELSACVILAEIGRDMSRFPTAGHLISWAGLCPKNDESAGKRRSTRMRKGAPWLKTTLVQCAAAAARKKASYLQAQFHRLRARRGAKKALGALAASILTSVYHMLISGELYRDLGPHHFDQRAKAVNTRRLVVRLQNLGYAVQITPLAA

SEQ ID NO: 90265 - protein, 410 aa, unidentified
MEIQMQCACGLDVHQATVVACLLTVLQHGKVKKALRTFGTTTRELTQLREWLQAEGCTHVAMESTGVYWKPVYNILEGAFALIVANAQHIKKVPGRKTDVKDAEWIADLLLHGLLKPSFVPPKPIRELRDLTRYQRKLVESRSAERNRLLKLLETANIKLASVASDVFGVSGLRMLEQLLQGQATPSQMAELAKGRLRKKIPQLEPALEGCMEESHRYLLQIQLRRLRELDETLAELDVRIREKLQPYVQQVEWLKGIPGVDERLAGVIIAELGVDMKVFASAAQVACWTGVAPGNHESAGKRRPARVTKGNVHLKTALVEAAHAAAHAKGTYLRDKYYRLKARRGAKRALVAVAHKILVAVYHMLSRGVPYHELGDAYLDQLNRKHLTRNLVRRLERLGYHVTLEQPAA

SEQ ID NO: 90266 - protein, 427 aa, unidentified
MAYRIAGIDVHKKKLAVVVADVEVHDEYPFERRWFGSNPEQLQQLAEWLLEQRVEEVVMESTAQYWQGVWGALERYWRPTCQKREGAGAMSGKLHLAQALSNRGRRGRKRDFPDAERLVKRLVAQELVLSFVPDPEQRLWRTVTRRKLQMTRLHVRMQNQLESLLEEAHIKLSGFVTDLLGVSARRMLQALADGETDPAALAALADKHLRATPAQLCDALGACTELNPVYRRLIKMALQELQFLEQQMGQLDQEIANLLRPHEDAVKRLAEVPGLGVDSAQQIIAEVGPTVATFPSDKQLCSWVAVCPGDNESGGVNYSHRSPKGNRQMRRILNQAANAAARTKGSIFEIVYRRQVTRLGHNQAIGVIAHRLCQLIWILLHRKVRYEERGPAVTETSKRKRTARMIRQLRALGYRVEALNLQTAASM

SEQ ID NO: 90267 - protein, 347 aa, unidentified
MNSVGIDLHRKRSHVAVIDGEGTEMLSRRIANDPATFLELLGGLGDETEVALEATYGWEWLAELLEEAGFQIHLAHPLRTRAIAAARVKTDSVDARTLAQLLRADLLPEAYVAPRELRDLRDLLRHRIALTQMRTALKNRVHAQLARAGIQQRHSDLFGPGGREFLRDLGLREEPRRRVDSLLALIDAFDREIESTTKVVDARAKADERVDVLTQIRGVGPYTAMLVIAEVGDVSRFPSARKLCAWAGLTPTVRSSDGKARLGNISKQGSRALRWALVEAAQHATRDQGPLGEAFERIAERRGRRVAKVAVARKIATLCYYGLRDGEIRCLARRCRPSTVVVMAGSS

SEQ ID NO: 90268 - protein, 425 aa, unidentified
MRSIALDVHRDFCEVAIKEDGELRSGGRIRTSVEELELFAQSLAEDDQVALEATGPANAIADILEPHVGRVVIANTRRVRAIAEAKVKTDKVDAATLCELLDAGFLPAVWSPDEPTRALRGLLGRRERLVRSCTRPKNTIHATLQRNLKGRPPMSDIFGRDGRGWLAQHELPAHERRVVESCLREVDFHSREIAALESELARLALGSEPIRRLMSVPGVSLVSAATFVAVVGDIRRFPSPKKLVGYVGLDPKVRQSGEQAARHGRISKQGSSQARHMLCEAAWIAVRTPGPLRAFYERLRARRGAQIALVATARKLCALFWHLLTREQDYAFGRPSLSRHKLRRLELMAGDPPRRGQRSGSKTSKREQRHERELSEQVEQAYRRLVEDWQQQPKNSGAGATPGRASSSHRMGQAARQGSAPGPAL

SEQ ID NO: 90269 - protein, 342 aa, unidentified
MSEYVGFDVSEEETSFCVKDVSGKILARGKVATDPVALFEVLRAHCVCPERIVLETGTLSGWLSRELGKLGIAVEVIDARQAHAVMKLQHNKTDANDAALLAEIARTGFCRPVCVKSEAAQADRILLKARAHLVGQRRATQNTIRGLLGSLGIRFAKGSGKLAGLVREALEGRDELRATIDPLLRAAAALEREIARLDKAVSGRAKDDPAVRLLMTVPGIGPVTALAFAATIGDAERFAKSRTVGAYIGLTSRRWQSGEMDYSGRISKYGDAMLRALLYEAANSLLTVVRKAHPLKDWARRVKKRTSHKKACVALARKLAVILHRMMITGEPFRWPQKEAAA

SEQ ID NO: 90270 - protein, 314 aa, unidentified
MMQKVFVGIDVSSEKLDLFVDQPETHLIYRNTPDGWEEIAQYLGQISPERIVLEPTGNYEKGILRTLLSYELPVARVNAARVRAFANALGLKAKNDRIDARVLAIFAKSMTTFVTELPSQALQQLQEVRRYRDFLSDQLVSMKHLKRTSEAAKPLLEKHIFEIQQMLKEIEKQIKTEVESQPALKEQIKTLSTIPGVSFISAVAILTEVPELGLISPKKISALVGVAPYVNESGKFKGRAKIFGGRARARKSLYMPVISAIRFNPQIKAFYQNLKERGKPSKVALTACMRKLLCTMNAMLREQKPWATHDPSPL

SEQ ID NO: 90271 - protein, 342 aa, unidentified
MEHYAGIDVSLECSSVCVVDGNGKIVREAKVASEPQALIAWFGALGFGLERIGLEAGPLSQWLFAAMKAAGLAVELLETRHVRKAFEAMPVKSDRNDARGIAQLMRLGWFRPVHCKSMSAQEIRSLLTARKLVQSKLLDVENSLRGILRGFGLKVGKTTKQTFAGRIEELVAGHPHLQMIAKALLAVRAVLRTEFAAFEKQTRRMVRSDMQARLLTSVPAVGPIVALTYASAIDDPARFKSSKQAGAHFGLTPKKHQSGETNYTGRISKIGDASVRTALYEAANVMLTKPVKGCSQLKSWAMRIKRRAGTNKAKVALARRLAVIMHRMLADGTPFNAAAAAA

SEQ ID NO: 90272 - protein, 430 aa, unidentified
MNCINDSRREQFQQLKKEIRGSTEYLIVGLDIAKEKHNAFFGTATGSALFRGMFFDNTLEGFRKLLAQVEALKAEYNLSKVVFGLEPTANYHKPLAEYLIKCGFMVVLISPFSTVKNRQLLDGRWDKHDTKDAANVADLIAQGKCLYYDYPEAAIRDIRSLLSFKKRLKKEEQALQVRIRNQLLAQYFPEMDRHFRTDVSMAVVRTCLDPSLIAGMEYDAFCRTVAPGKVNLRQQRLLQQIWQLAHQSIGCHVGETVTFEAQAMVSTIYHLRGTIKTLNDKIEELCLPFPEYPCLLSIPGFGPEVSSTVLGAIGNPYRFSCGKQVLKMAGYDLSADRSGKTALNAVPVISKRGKVDLRFALYQAALVASNTNHYFIMYFGRKVHARQQEQGIGTKMRVKLAAKLLIIAWTLMKKKEVFDPACINLGDTQV

SEQ ID NO: 90273 - protein, 458 aa, unidentified
MKGKRTSAENHSGMVTVHPNAAAIDVGATMHMAAVGADCTSDPVRSFGTFTGDLHRLADWFAECGVKTVVMESTGVYWIPIFELLDERGVEVFLVNARDAKHVPGRKTDVSDAQWLQRLHSHGLLRASFRPKGEIAELRAYIRQRERLLDYAASHIQHMQKALTEMNLQLHHVVSDITGATGMRIIRAIIAGERDPTVLALLRDTRCHAGVDIIEKALTGYYRAEHLFGLEQALALYDEYQQKVSACDMRIEAVLMTLASLRGSRGEPLGSPRRRMPRQANGPAFDVREALYALLGKDLTQIHGLGPYLALKLVAECGDDLSAWPSAKHFTSWLCLAPSNKISGGKVLSSRTRRSGSRVAALLRLAAVTVGRTETALGAFYRRLSARIGKAKAVTATARKIAVLFYNALRHGMDYVDPGASYYETRYRERVIGNLHRRAKAFGFILQPDTVASEVAVS

SEQ ID NO: 90274 - protein, 456 aa, unidentified
MAQSNQSSAMPVIHQNAAGIDIGSQFHVVAVPPDRTDKPVRTFKSFTGELHAMAKWLKKCRVDTIAMESTGVYWIPAFEILESYGFEVFLVNARAAKTVPGRKTDVNDAQWLQKLHQFGLLQASFQPSQKIAGLRAYLRQREKLLEYKAAHIQHMQKAMMQMNIQLQHVVTDVTGKTGLAIIRAIVQGQNDPNELVKLRDPHCKNSLEVMTAALTGSYKPEHLFALTQALELIDFYVEKIEACDRVIESTLKQLQQENDSTSPPPTLQKARGRESSKNNPSFDVRQSLFSFIGIDLTQIHGIGSSVALKLIAECGTDMTKWPTSKHFTSWLCLAPCNKISGGKILSSRTRRSSSKVATMLRLAAVVVGKTNTALGAAYRRYAARIGKAKAVTAIARKLAILFYNALRYGMAYVDKGANYYEEQYQKKVINNLHRKADALGYTLQKKALSISAAGVS

SEQ ID NO: 90275 - protein, 415 aa, unidentified
MSSVEKGFLRYVAIDAHKYYVVIGGVNAELEVVLPPRRIQLGELEAWLRAQLKATDKAVIEASTNTWTIYDQVARYAGEVVVAHPPHVKLIGGAVVKTDKHDVRRLAKLLAVGMIPEVWVPPLVVRELREIVSHRLRLVGACTQATNRLHSMLQRHNIAAPAGDPFAAKHRAWWETLPVSFTEKLRVRQDLATLDHFNQQVKEVETELGRLSTVSPWAEQVPFLIQLPGIGIITAMVILAAVGDIFRFEHAKNLTGYAGLGTYVHDSGETHRHGRISKRGRADLRQAMVEAAWVAARTHPHWKAEYERLSKRMLANKAIVAVARKLLVVVWHVLHDHEADRQAQPDKVAAKLRVWSGRLSPDQRQGLSHRHFVRLHLIHLGLGDELTHFRFGGKPCSLPPPDELRRLELASPSSA

SEQ ID NO: 90276 - protein, 358 aa, unidentified
MRNVALDLGVREISYCEVANGKVIRRLTVTKLSTLEEFLGPEAAPAKVAIEACREAWHVHDILSAWGNQVLLVDTTRARRIGVGEHGRKTDRVDAEKLAFAVERGGIPAAHLLSPHRRKLRLELSVRRALVETRAQYVTTVRGLVRAHGQQIRRCATSSFVKVVRETALKEEVRELSEPLLRVIELVDGQISEVEERIERLAKQEPVVELLATTSGVGAIVASAYVSVIDEAGRFRNAHQVAAYLGLVPGETSTGGKQRLGGITKQGNSYVRWLLVQAAWSILRKRGTDDGLAEWGRRIAQRRGKRIGAVAVARRLSGILWAMWRDGTEYDPHFAARATAGGLSAASHDRLEQSATQS

SEQ ID NO: 90277 - protein, 355 aa, unidentified
MDSTKYIGMDVHKESTSIAVMNAAGKIVMECVIETKASMLLQCIDGLRGNVHVTFEEGTSAAWLYDLLKPRVTKLVVCDPRKNKSMREGNQNDKLDARRLAELLRLDHLSPVYHGEHGLRTQKELVRSYLTITKDLARVMTRVKAIYRSWAIPCTGQQVYATGHRAEWLAKINEPGVHRRAEFYYQQLDALRVLRQSVRRELLAESKKHEAWKRLCQIPSIGPIRAAVLLGILQTPHRFRTKRQLWTYSGLGIETQSSADHRSLDGHLQRSKKQVLIQGLNRNCNHDLKNLFKGAALVASSKPGPFEEFYAALVAKGTRPEMARLTLARKIATIALIVWKRGVCFDAQHLKPQTA

SEQ ID NO: 90278 - protein, 457 aa, unidentified
MSRTRKTKRSGRIDRPEGIPILNPNAAGLDIGANEIYAAVPADRDEQPVRCFGTFTQELNGLSAWLHQCRIDTVAMEATGVYWIPTYQILEASGLEVCLVNPRYFQNVPGRRTDVSDCQWLQRLHSAGLLRGSFRPAPQVCVLRSLTRHRDNLIQLASTHILHMQKALDQMNVQLHHVLSDITGLSGLAIIDAILSGERDPQLLAKLRDGRVKASEETIVAALTGDYRTEHLFTLKQSLTAYRHYQKLMAACDRQVEQQLKRFDAQVDEAAKPLAPPKVRRRKLFSNEPNFDLRSHLYRIFGVDLTAVPGISVLTAHTILSEVGPDISKFRSASAFASWLGLCPHNDISGGRILSAKTRRVKNRAALAFRMAANALFRSQSPLGDYFRRMRAKLGAASAITAAAHKLARIVFHMLNTREAYNEAILNQHEHRFRARAEARLRAQAKLLGYSVIGATA

SEQ ID NO: 90279 - protein, 370 aa, unidentified
MEKRSMFVGLDVHKESIDISVAEDGRDGEVRHYGVITGDLEAVAKVVRALRAPTRRLRFVYEAGPCGFGIHRYLTGQGEDCVVVNPSSMPKRSSDRVKTDRRDSAALARLHRAGELTAIYIPTADDEALRDLVRAREDAVGVCTQARHRLKAFLLRQGRRYPGRAGWTRPYRRWLADLSFPLAPQHIALQEYRDTIDEAERRVDRLTDQLRHVAPAWRWAPVVDALQALRGVSFVTAVGLVAEIGDLRRFTHPRELMAYLGLVPSEHSSGPSVRRGGITKAGNPHARRLLAEAAWAYQGVPRIGRVMLYRQEALPKVICDIAWKAQLRLTSRFRRLVARGKAKPKVATAVARELTGFIWAIAREVPTPAA

SEQ ID NO: 90280 - protein, 345 aa, unidentified
MRIFGLDVHRTFAEVAVLDEGGVRSAGRIDLTAEALHAFGHQLTQEDDVVLEATCNTHAIARLLRAYVRRVVVSNPLQTRAIAEAKVKTDKIDAAVLARLHASGFLPEVWSPDELTEQMRRQVARRASIVQHRTRLKNRIHAILHRNLLPRCPAADLFGRKGRNWLAAQALPADERVTGESVLRELDHVGEDLAAIDRDLAQIALTHPAAQRLMTIPGVDVAVALGLVAAIGPITRFRSPQKLVSYLGLNPRVRQSGLQPAHHGRITKQGRAHARGMLVEAAWVAAKTPGPLRAFLPAHPRPARRADRCRRDGAQTDRAGLAATDHRAGLCVGSPVAGGSETAGA

SEQ ID NO: 90281 - protein, 356 aa, unidentified
MSRDVKYIGMDVHKEAIVIAVRNGSGKLIMESIIETKASSLLQFLQGLRGELHVTVEEGTWAAWLYDVLKPHVHQLLVCNPRRNALLKEGSKNDKVDARKLAELLRAGMLRPVYHGENGLRTLRELARSYQTISKDLTRVMNRIKALYRGWSIPCASTQVYAPRYREQWLHKIPHAGVRRRAELLYQQLDGLQALRRNVRPEFLAESRKQKAAKLLCQIPCIGPIRAGLLIALMQTPHRFRSKRQLWTYSGLAVETHDSAQYRYVDGQLQRSKKPQQLRGLNQNHNHEMKHIFKSAATTASCGVGPFRDFYAALLAKGMRPEMARLTLARKIAAITLTLWKKGGRFDPEQLKPQAA

SEQ ID NO: 90282 - protein, 337 aa, unidentified
MNFVGIDLHKQSISVCVVDRERKVLGRQRFACQWVTQIREFFAGLGPFRAVVEATASYEWLVELIEPLADRVVLAHPKHLRVIAETKRKSDKLDAQVLAEFLAIDLIPEAHRPTPRVREHRRLVRYRVHVQRRGATLKTKIRHVLSDYNADRPNLFTEEGLNYLTEIPVSPADRFVLEQLVEEWRQNHQRMLVVNQRLRDFARQAPPAEQAARAVLETIPGVGPVTIDVVLSELGDVRRFSSQKRAVAYAGLAPGIRESAGRAKQLGITKEGSRLLRWALIEAAWRLVDKTHFWGQVYERLRVRCGPKKAVVAVARRLLCVMVAMINTGGRYRLLST

SEQ ID NO: 90283 - protein, 508 aa, unidentified
MNVNTNNTKNQVKEKNSEKLTRAELRRQQKAEAKMAKSEKKKKTEKSPMTQEQELLLQKADAILKNLNSYTWRDLETNGKFSKNDKLSFISDDTLILGCDIGSETHYIRAVDARGRELSRKAFAFDNNEDGFQKAKEWAAELAALNSKDQIVLGLEPTGHYWFVLAAWMVANGISVVQVNPYAVKQTKELEDNSQRKDDNKDPKLIANLVKDGNYGMPYLPEGVYADLRRLSMFRDQLTEDRIRNINRLHREMKIYFPEYKEAFGKLAGTFSIRLLKKAPFPKDILDLGEAGIKNIWHEGKLRGRGYNKAGEIVRLAKESVGLNDGTEAGKAAVKWFAEKIEELTEQLSDIENRLQQKCREIPYAENILEIPGIGENILAGILAEMGDINRFDDVKEIQKLSGLGLVACSSGKHKGETRISHRGRKRLRYWLFQAAKSAVSHGKEFKRLHVYYTTRPDNPLKKMQSLIVIGCKILRVIHTILKKGIRYDPERMLKDIRIPTSQKSLAA

SEQ ID NO: 90284 - protein, 353 aa, unidentified
MRMIIGVDPHKSSHTAAALDPATNARVASVRVDASLAGYRELMRWAKPMPDRRWAVEGARGLGRHLAQWLVARGEVVVDVPSTATARVRELSRGSGRKTDVIDAAAAASVAALQGDAMPVVGEDHTTVFAMLEERRANLAAQRVRVANQLHAALRDLVAGGAPLAITAKSASTMLRSVRPVSPSEHTRKELAQDLVRDLRAVDGSLVDIEKRMSAALDECGSSLRDVDGVGAVTAVRLIGRTGHAARFATSDAFATYAGVAPIEVASGERTRHRLSRRGDRQLNSAIHLIAVTQVRMRDSIGRRYFDAKIAEGKTRNEAMRCLKRRLANYLWRLMIADERRAAAGVQDHEIAA

SEQ ID NO: 90285 - protein, 337 aa, unidentified
MEYFAGLDVSMAETQVCVMGRNGAVIHKAKVPSTPADIAAELAQLPTCRRIVFETGRMAPMLYHGLRQLGLPVICVESRQAYQALKLLATHKTDHNDARGLAHLARTGFFKPVHVKSLPAHAVRSLIIARKKLVGQRVTLENQIRGLAVVFGVRLPRALSSTFIRQALQASEGIPGLSAAMQGLVAARTAVLAAIVAIDGDIRRMVRASDACRRLMSIPGVGQLTALAFTAAVDDPKRFRRSRDIGAYLGLVPRRHQSGEVDYTGSISKCGDRRVRTLLYEAANVMLTRYKGALKLKEWAFAVAKRSTMRKARIALARRLAIIMHAMLRNGTEFKAA

SEQ ID NO: 90286 - protein, 330 aa, unidentified
MHVGVDVGKECLDICYPDGSKEHIGNTKRSRAKLIRKARAMSAIVSFEATGPYEENLADECLAAGVPAVRLDAWKTRKYAESQGMLEKTDAIDCEMIRDFAASLKPEQLRFVRPMSDGYRRLKRATSVRRNLIKAKTLVVNQLENILDKDVRASVSRVIDALERQIEKMDALCTEAIRSDDKMNALAVRFEQVVGVGPVLISTMLSSCPDIGSFTSKGIAKMAGVAPIENKSCTIRKKSKPRRGRRELRSALYMAAVSACHSNHLLEPVYKRFVDRGMPRRVALIALARHIAILMNYIAKYPDFNPAVDPKKAALLALPKRKPGRPRKNP

SEQ ID NO: 90287 - protein, 448 aa, unidentified
MAQRSQLKRMEIANPNAAGIDVGSASHFVSVPPDRDDEPVREFRSFTEDLEHLADWLVSCGIDTVAMESTGVYWITLFELLESRGLNVFLVNARHVKNVSGRKSDVLDCQWLQQLMSYGLLSGAFRPKDEICALRSVTRQRAMLLSYQSRHVQHMQKALTLMNVQLANVISDVVGETGQKILRAIIAGERDPLKLADLKNGRIEASKEEIAKSLQGNWREEHLFALTQAVELFDAYSKALQRCDVQLESMLKALSRSEAEPGPSRRRVGKAKNAPKFDARTYLFRICGVDLTAIDGIDITTALKVIAEIGPDLSRFRNAKHFASWLGLSPGTKISGGKRLSGATKGNANRAAQALKLAAAALRPSQSALGAYYRRMCGRLDKGKAVTAVAHKLARLVYAMLTKGTAYVDQGQAYYEERYQQRVIYHLRRKAAAMGLELVPIQAQGQSA

SEQ ID NO: 90288 - protein, 309 aa, unidentified
MEVRVIGIDIAKRYFQIHGVDVAGDVVLRRKLSRDAFLKLIGSLSPCVVGMEAGSGAHHWARQIAQLGHDIRLMPPQFVRPYVKTNKNDAADAEACCEAVQRPGMRFVPTKTVEQQTAMALHRVRDHLVRQRTATINALRGHLAEYGVVAPLMRTGLKQLFDVVIDEEDRSVAAELKPVLQMLVDEIQAVDVRISELDRRMKDAARANEACRRLVEVPGIGPLIATAVVAAVPDDRRFSSGRHFAAWVGLTPKQHSSGGKERLLGISKRGDAYLRRQLVNGARSLVGIDCGRTGHLWDWIHSLMSRRAP

SEQ ID NO: 90289 - protein, 359 aa, unidentified
MPSMTVGRGEVIVGVDTHKDEHLAVAIDGLGRRLGDFRLAANPGGYAQLTDWAAELGTVARFGVEGTGSYGSGLARYLRRNAHQVIEVSRPPRKGERRMSGKSDTIDAEHAAREVLAGKATATPKLANGLVEAIRLVKIARDTAVKAHSTAIITLKATLVTASDELRGELEPLTDFTLISACAALTANGDLGDPAQAMRHVLGCLARRWLELHEEIKVHSRQLKKLTKAAAPELVAAFGIGPDVAAEMLVTAGDNTERIRSDAALAKLCGACPIPAGSGKTNGRHRLNRGGNRQANAALHRTIVVRMRWHPPTIAYVERRTAEGLSKRDIIRCLKRFLAREIFGLLPAPSAPIGLVPDA

SEQ ID NO: 90290 - protein, 344 aa, unidentified
MEYYAGIDVSLESSSVCVVDAKGQVLREAKIASEPEALVGWFNQLGVELARVGLEAGPLSQWLYAGMRDAGLAAELLETRHVRDAFKAMPVKTDRKDARGIAQLMRLGWFRSVHCKSLPAQETRALLTARKLVQSKKHDTEMSLRGILRGFGLKVGQTSQRAFASRVRELVAGHPTLQLVAEALLATRAALGEQLSKLEKRVRMLARSDPQVRRLMSTPGVGVIVALTYAAAIDEPTRFRSSKAVGAHFGLTPKKYQSGETDVTGRISKIGDASVRTALYEVANVILTRPVKGSSLKSWAMRLAARAGMRKAKVALARKLAVVLHRMLVDGTTFSAERAAATRA

SEQ ID NO: 90291 - protein, 408 aa, unidentified
MRVMNCACAGLDVHKKTVVACALVGEASAEPRMEKRTFATTTTALLELSDWLRQQGVTHVAMESTGTFWKPIWAILEGDFDLTLCNAAHIKQVPGRKTDQKDAEWIAELLRHGLLKKSFVPPLPQQDLRELTRHRAQVTADRSAVSNRIRKLLEGANIKLGSVASDVLGVSGRRMLAALIEGETDPEKLADLAVGSLRDKRAALVEALRGRVRPHHRTMLRLLLAQWRFLDALIGETERDIEEAVRPFAAAVELCETIPGVSTTAARALVAEIGPRMEQFPSSAHLASWAAVCPGNNESAGKQFSGRTRKGNRWLKRTLCQAAWAASHTRHSYFASQFRRLAAKRGNKRAILALAHSILVVAYTLLKRNCAYQDLGADYFDKIQAEGLKRFCIRKLEALGHRVTLEAA

SEQ ID NO: 90292 - protein, 422 aa, unidentified
MSYCPVAGIDVSKQFSDMCILSPDNKIFAQEKIYHDETSINRANALLQKAERLFFSKPVIVMESTSHYHLILFQFFSEHGYDVIVVNPLQSNSMKDFSIRKRKTDRVDAFKLAMMYRTKTLRPSQIPQTATRALRQLCRHRAELLNDVSSYKNRLTALLDQTFPGYDKVFSDVGGVTSCAVLVRFPTPTILLVEEESELVEVIAAASKSGYSFAKKKAGLLISAAQKAQTLGIHSCADETLIVCTIQMLRTLSESVLQIETAIDNLLAQIKEMRNNVSLLQSIPGVGSHSAALLLGEIGDISLFKKPKQLAAYFGLDPTERQSGSFRGTKNKLSKRGSPYARAALHMGVVNSICKRGKDSAANPVLLSYYEMKCKNKPAKVAQAASMHKLVFIVFAVLRDQKPFELKTPEQHAVEQGFVKAA

SEQ ID NO: 90293 - protein, 414 aa, unidentified
MEVKQQADRAAGLDVHRDNVVAATRVNEAGGEVVVTKRRFPVTRRGIAELVAFLKEAEVTRVAMEATGVYWKPVYYPIEGLFDELWLCNAQHVKNVPGRKTDLSDAEWLADVAAHGMVRPSFVPPPEIRELRELTRYRKTQIDARGMEIQRLEKTLQDAGIKLTSVASRVWSVSSRKIIEALIAGERDPAVLASLVLGKLRPKMAELTEALDGYFGPHHALVCRQVIAHIDFLDESIKNLSGEIANRLLPFEAAMTLVCSITGIAEPSAQAILAEIGVDMTRFPTAGHLCAWAGVAPASYESAGKRRPAGTRHGSAWLKRVLLEVARAASRTKGSYFSAQYSRIARRRGPNKAAVAVANSMLAVIWHVLTHGCIYQDPGADYFERRHDPAIEAKRLQARIEALGFDVTLAPKAA

SEQ ID NO: 90294 - protein, 425 aa, unidentified
MKQRRFVEGEFRIYVGLDWGTEFHRACVLDSTGKILRQCRIDHNGQAITDFLRSLDNLANGQPGTIAMAIEVPRGPVVEAFLEGGFAVFSINPKQLDRFRDRHTAAGAKDDSRDAYVAADSLRTDQHCFRRTATDHPDMVRLREISRTEESLGEDLRRTVNQLHQLLLRYYPQLLQLNSTPDEPWIWALLEVAPIPQRGAKLTPARLKSLLAKYRIRRWTAEELQAILRTPPLPLSAGSADAISEHALLLLPQLRLLYSQRNKVRDRIEALLNHMTLLGREHPDCREHRDVGLLLSIPGLGYLIAAKLFTEDTNALAQRDYDALRAHSGAAPVTRQSGKSKQVLMRRGCSERLRNAVYHLARCSVLHDPHSKRHYAQLRGVGHKHGRALRGVADRLLTVLIAMLKTGQPYDANRRSDAATPAEAT

SEQ ID NO: 90295 - protein, 380 aa, unidentified
MVRLWGCMSKSGNMQPEYKLFKERTVAMKIVAGMDLGSERVQVCTMDEASRVLANQRMSWEPGRWKSWVEALGGAEQVEVAFECGPDAYRAKRILDALEVKSYPFHARSFRLMWGEKKKSDKIDARKIAGALRREGLPRRVELAEDRVAVLRNLVSERRMYQKIKQQLQNRVRGMSRQWGVELPKYEKNRTEQWWCEAGDCFEGAQRQAMARMTALALVCQQNLERIDDETEYWVEQAGLKENYERLLSLPGFGPVVASGVVAFLGDGHRFSSGKKWIAYVGFAPEVEQTGKGPARIGHIRKEGPSVVRWSLVLAAQAAAHGHQLDGTRWKEKFRRQQAANKRKVGIVELASRLGKLAYAVIRDQSQWDPHRLQRTTALK

SEQ ID NO: 90296 - protein, 425 aa, unidentified
MNTQRRWFAGVDWARESHHVRLTDEHGNDVGERIFTHGGAGLAEMASWLTTTCQADAPEIHVAIEVPHGPVVETLMERGFAVYAINPQQLDRFRDRFSVSGAKDDSRDARALASALRTDPQCFRHLTPVDPTVVELREWSRIADEIIAERNRLTNRMREQLWRYFPAFLKLDEDLGADWLLDFWELVPTPLKARRVREPTVAKLLKRNRIRRFDAAHVLAIAREEPVTVQAGTMEAATAHIATLVARLRLINRQLADAHRQIDALTARLVGGEESEPGQPVEQHDAANLRSLPGVGRIVLATLLAEAWEPLRRRDYHALRNLCGVAPVTRRSGKTSIVLRRRACHPRLANAVYHWARVAVQNDRVSRAKYEALRDRGHGYARALRSDAGRRGSSTQRAPHSSPLPSICRCRSRAAPGCGRKASLG

SEQ ID NO: 90297 - protein, 354 aa, unidentified
MSATANTTIPALSSIGIDIGKDVFHLVGFGEDGQIAFRRKIKRLALAETFRQLPPCIVGMEACLSAHFVSRTLRALGHEPRIIPAIYVKPFVKGQKNDYNDAEGIAEAALRPNLRVVKEKTQDQLDLQACHRVRSRLVSRRTATINQIRAFLIEQGITVRTGARALRNSLFEVLSNREDEISPRMQDLIVGLYEDWLWLDERIESITGQIEEISGSEVNCQRLMSVPGIGPLISTAMVAAIGTGEAFERGRDFSAWLGLVPRQYSTGGRPVLGRISKRGNRYLRTLFIQAANVILMRPHNWSKFSFGPWLAQAASRLHRNKLATALANKLARIAWSVLRNGRTFDTHRHEVSAI

SEQ ID NO: 90298 - protein, 338 aa, unidentified
MEVAVIGIDLAKDVFQIFGVDARGRAMLSKRLRRPQLAPFVAALSPCLIGLEACASAFHWARQFQARGHTVRIISPQFVKPFIRGNKNDGNDAAAICEAVQRPNMRFVPLKSVEQQDVQSLHRARQRLVNHRTALISQMRGILLDRGIVFAKSATRARRFLPLILSDPTSELSPLMRETLASLLELLRELDARVKRFDRQIADVFQASPVCQRIAQVEGVGPKTATAVVAAVGNAHDFKNGRHLAAWLGLVPRHRASGDRITLGGISKRGDQHLRTLLVHGARAVVRTAVRKTDARSQWVNALVARRGVNRAIVAVANKNARIIWALLARQEDYRRAA

SEQ ID NO: 90299 - protein, 359 aa, unidentified
MVYLGVDLHRKVSHVVALDAAGEVALSRRLVNDPAEFRRVFGELEPEPIEVAFEATYGWGWFADLLADAGVAAHMAHPLATKAIGAGRVKNDAIDARTLAHLLRTNLLPEAWIAPPEVREARRLVRMRASLVRVRSRLKCQVHAICADLGLQIEVSDLFGVRGRELLTTLALPAVTAGRLDANLRLIDALGGEIHLADREIVRHFRADPRIRRLTPIPGIGFLTAAMIVAEVGDIGRFGTPDRLCSWAGLTPTERSSADHTQRGHISKQGSRWLRWALVESAVTAARGPSLQHFFGPIKERRGTKIARVALARRLLTLAFYALRDEAGCRAYPVLAHPSRSTRARSPYGMASPDGRDFD

SEQ ID NO: 90300 - protein, 355 aa, unidentified
MSQEKYIGMDVHQATISVAVMDGNGKLVMECLLETKAATILEFVQGLRGTLSLTFEEGTSAAWLHDLLKPHVSRLVVCDPRKNALLKEGNKSDRIDARKLAELLRTNQLKAVYHGEHGIRTLKELGRSYLTLSKDVTRTMNRIKSLYRSWAIPCAGTSVYAPRHRAEWLAKIVEPGVRIRAERLYQQLDGLQSIRQQARRELLQESHQHPAVELLRQIPSIGPIRSALLVALLQTPHRFRSKRQLWAYSGFAVETHDSGEYRYVRGKVQRNRERITVRGLNDNHNHDLKNLFKGAAISASTRPGPLHDFYVARVAQGMRPTMARLTLARKVAAITLTMWKKGVSFDPQQLSRQSV

SEQ ID NO: 90301 - protein, 382 aa, unidentified
MREFGATTRELLELCRWLKDGDCEMVAMESTASSWKPLYNILEASELDAIIVNARHMKNVPGRKTDVKDAEWIADLLQHGLLQASYIPDKDQRELRELVRYRKSLVGERTRELNRLQKMLEGANIKLSGTVSNINGKSARAILEHVLTGEPFDDAKYDEMYENNVISHRLKASKEEIIDDLNGVMSALQRRMMKELLIHLDELNIHIRNLDDEINNFMKPEAKTASVALQEMSGIGETSAQAILAVIGTDMSRFPTAGHLASWAGLCPGNNESAGKRKTGRTTKGNCLLRETLITCAHAAILKKDTYFYAQFQRISAHRGKKRAYVAVAHYMLTAIYHMLKDGVVFKDLGADYYNQFNRERKINACLRKLERLGYRAEIAAT

SEQ ID NO: 90302 - protein, 355 aa, unidentified
MSEHYAGRQIVGMDLHRRRSVLVRMTDTGERLETVRISNDPQYLAQVMARAGEAPEVVLEAAYGWYWAADTLAELGAHVHLAHPLGVKMFSYRRVKNDQRDATDLADLLRMGRLPEAWIAPPATRELRGWVRHRAKLVGLRSSVKCQVHGVLAHAGIWVPMSDLFGVAGQQLLAELSAGTRLSVESRSRLDSALRVIAALEFEIELFTKLVNGRLRTDPAYRAIQAIPGVGPVLAAVFVAEIGDIGRFHRPQQLASWAGLTPKHHESDTTVHRGRITKQGSRLVRWAAVEAVQRVSGHTRLGQHRDRVAARRGRNIGVVAAARELLTLVFYGLRDHHIRALDTPAPPPAADRSAA

SEQ ID NO: 90303 - protein, 307 aa, unidentified
MIVIGIDPHKKTHTAVPAAESGRPLEDVTVPARHMGHERMLEWARGLDVDRVFAVEDCRHVSGSLERFLIERGEKVVRVPPKMMAGARRSQRASGKSDPIDALAVAQAALRSPDLPEAHLAGPERELRMLLDHREDLVGERTRIEGRLRWHLNDIDPTISVPLRSLGAFKWLDKLEELLAKREQTVQVEIARELVEDCWRLSKRANWLQRRIEQLVADSHSSLLEIPGVAALTAAKLVGEIAGIERFATNGKLAVHAGVAPLQASSGNTQRHRLNRRGNRQLNAASTASRSPKSGVTIRLGTTSSAR

SEQ ID NO: 90304 - protein, 501 aa, unidentified
MKTTSATPSSIYRNQNALLRALFHKAADPRKVLCVALDYAKRKHVALCCDGNGDILRQPFPVENSAEGVSFLIKQITATARRRKIPKCHIFLGGEDEPSYVANFTAALRLRQYLVLRVNAAEAAQNRENLIASTDLLDLLGIAKTLLSRRARATGHSTPASPADSKNPTDIYFEIREITRSRRILVRQQTAASNRIHALVDQLFPGFLDSFRSPLTPFCQASLALMKERFSSIEIARRRPLTLASFLARHGIRQSDEAAAKIITLASNALPPAPQRLSALQHALTATVDLRECLTRNANALRQQAALLLATTPYALLTSIPGIGFTLASGIAGELGDPRRLSSVDSLCAYAGIVPSTFQSGGPDQPASQGHTPARCNHILKDWTVQSAQKISLYGPPELKERIARWNANGQHALFAAARRYLRLLRSLVLNQVPYLDPRCRSSTATDQDHADAALQAWLVLLRKWRPIPEGISLITCESTPLGFWRRLVMESRSIHLPLKP

SEQ ID NO: 90305 - protein, 373 aa, unidentified
MNYSTVYVGMDVHKETFSLCCYTNEKEEAEYPQKVDGHYSKVINYLEAMRFHYGDGATFICGYEAGCLGFTLYHQLTDHGVKCVILAPTTMPKLKGKKKIKTDKRDAALIARCLAHRDYSAVHIPTDKDEQIKEYIRMRIDHKKDLKKTKQRILAFCLRHNYRFEDGTNYWTQKHLTWLRSLKPEGLYQEILEEYLLTFDNLTDKIERLDKRIEELASDEEYQEKVHNLTCFLGIKTQTALSVVAETGDFKRFASARHYASYLGLVPGEDSSGEGQTRLGITKAGNSHLRMLLIEASQSYSRGQVGYKSKALKARQQGCSPAVIAYADKANERLRRRYYKLTLSKSKKMSVAKTAIARELACYIWGMMTENIA

SEQ ID NO: 90306 - protein, 416 aa, unidentified
MINELEFAAYVGLDWGDRRHSVHLQVAGERKTESFDLEQKPEALHEWIARLQERFRGRLIAVAIEQRKGAVIHALMMYAFFVLYPINPKALARYREAFHTSGAKDDPTDSELLLDFLSEHSEKLRPWIPDAEPTRMLQALCEQRRKLVNRRVALTNRITSLLKQYFPQALDWIGDVASIQACDFLESWSTLAAVQRVATAKLQVFYRRHNCRKASVISERLEQIARARPLTTDLAVVEPYSLIVEASAAHLRGLIRAIQRLDKRIAELFAQHPEHDLFDSFPGAGAVCGPRLLTVLGTDRSRWNSAVELQSHSGIAPVTERSGNSCWVHHRLACAKFVKQTFHEFADQSIRYSAWARAYYDLQRSRGKSHHAALRALAYKWIRIIFRCWKDSKPYNEEAYIQSLRRRGSAVVEKLS

SEQ ID NO: 90307 - protein, 323 aa, unidentified
MQGKTSPERSAETRVYVGIDVCKDWLDVHLHPLGQQRRVANTPEGLKALKRWIATRPVALIVMEATAKFHRQAHRTLHAARFAVAVVNPLRARLFAEAAGQLAKTDRIDARWLALMGQALEPRALAPAPEAVEAMRELAHARSAAIADQTALSNQRGASQVAFLKAELGRRLKALAAHIKRLDAEIERRLAADPPLKRRYDILLTIPGVGPVAALALVIGLPELGACSGKAASLLAGLAPLACDSGEKAGERHIKGGRAFVRTSLYFAALTAARHNPPMRADYNRLRDAGKKAKVALTAIMRKLVVLANVLIKEDRPWKPIQA

SEQ ID NO: 90308 - protein, 372 aa, unidentified
MLIHYIDIAKRNFVIAVSSLSKTKTETNNPKGIAHTIEYLKKHKVALVVTESTGGLEIPAAKAIRRAGIAVIIANPRQTHQFAQSQSLTKTDAKDAKMPAFFAQMKAQKEDWQTMPYHPPTEAEEVLEALVNRRNQSADMRTAEKNRLHQVHETQVGSVKQLIAHFDRLIDELDKQIDDHTHTHFDGKAQVAEQIKGIGSITTATLMAMLPELRRLSHKRIAGLAGIAPHPRESGETKFKSRCFGGRSAVRKALYMATVAATRFEPLIRDFHQRPLSEGKPYKVAVTACMRKLLETFAKFLSLTTTEIPTQVFGCFRPKYRLILPKHPLNPPRTPDNQASGLPFRRQRAHLACWRLSTGSNTSPSDGFAHSL

SEQ ID NO: 90309 - protein, 400 aa, unidentified
MRAVFGIDVSKTSSEVAILVNGEKIHGYTILNDAIGFNRLLGDLKTVHNPEIIFEATGVYSRRLQAFLEEYSYAYTRLNPLEAKKQLDSLRVRKTDKIDAEKLAKSQLVHNRKPTYVQEEVYQHLRDLSRFYQNMTEDLVRTKNRLHKVLQVTFPELETLLSTPTGEQYWNLVMAFPCKEFVLSLSQSNLCEIVRQSTSKRISEKRIAYLTDKLIKLAKQSFCAVKNTSPMLEEVRYYAQELLRLSERRQVVLNDMVALAQPLPEYDILRSIPGIAETTATSIIGELGDIRRFQSSNQINAFIGIDLRHYESGNFLAKEHITKRGNPYARKILFKCIHNIASASHTNPCHIADFYEKRKRQSTIASTKPHTIASIHRLIRTMYYLITHNKLYDYSLTQNR

SEQ ID NO: 90310 - protein, 429 aa, unidentified
MNYNTQNAKIASITEKTLIVGIDVGSETHYARAFSWRNYEYSKKPFAFRNDEDGFASFKAWMDDIAEKHEMEKVIPGMEPTGHYWLNLGAYLQGQGMRPVHVNPHHVKKSKELDDNNPNKNDRKDPKTIAGLVNEGRFSYPYIPTGIYAEIRNLSNLRIQTQEEITRIKNRIARWFSIYFPEIKDVYRNPDAVSGLMVIKQAPLPCDIKGLGVDGVNKIWRDARLKGAGIKRAKTLVTAAEHSIGNTEAPRSARKEIRNLLNDYEIYKSRMDELMEEIEELLSEIPYIDKLMGICGIGIKTVSCFIAEVGDIERFDNPKQVQKLAGYAIVADSSGKHNGESRISHRGRKRLRYALYEAAISVIGKNKEFKEIHHYYRTREKNPLKKMQSVIAVSCKLIRIFYTILTKGIDYDGQKMLRDIVRPGMQSAA

SEQ ID NO: 90311 - protein, 339 aa, unidentified
MKNTKYYIGLDVHKQKTTYVVKDRIGNILLEGETATLYCEIEERLNPYLNNSIIGLESSTSYYTLYQQFLKNSYNIKVANTIQLRQLITKNDKLDAKRLSEMLRLGTFPCSYIPDEKIQHLRSLLKVRHSLIEEKTRCNNRIQALLDRNGIVMPNQEAFGKKWRQKLLQYIGSGEVSLELRYEYDHFKYLEEKSEHLGLEISGYTQKHWKKEYKLIQSITGFGPILSCYIIAHILPISRFASNRKLRRYAGVVPTTHESGDKKSKGHIPKTSSRKHLRWALIQAANSAGRTNTKLGYYYRKKKRQKKNASLAHVAVASSMIDIIYKVLTTKKPYNPKNC

SEQ ID NO: 90312 - protein, 527 aa, unidentified
MSKSTRGNGRGGTLVLKRGDDSLRRKAQKLGGERIGVVAVDVAKERVSAMVTDFFGNVLVPPENFPVTAAGLALLEQRIVAAGREHALKHIVIGLEQTGRLHEPVRRVLQQRWEVTLIHPLVTHHLRQGISPSVKTDGIDMDALFRAVAGCYGSPVRTLPVACERWRAVHRAREQIVDERTTLKLRMHERLHAVLPGFATQFANLWSSPTAMAIVAGFDGPDGIRRLGEQGLKRWLREHGAVCRQAKAAALLAWAGNAVPPAAAATTEAAILQADLKHLAMLNQRIETYERQSLEFLVQTPFVLLLSVLGISHVLGSGLGAEAGPMSFYPTARNLSGRAGLYPRRYQSDQTDLQGPMAQGEPFLRDVLLKIGRCLTWPRGAFSAWGESRRAAGLCERQIAAAMANRFCGIAHVMLLRGQTFKHPAAREPVSILGKLLNVAADLGIDGVAATALAMEAATRIPLQSRPLEISELNSGAWKNASRPRELGASPGTTRQISQTTVPAILAWLQKAENNHDIAHTTDFRSP

SEQ ID NO: 90313 - protein, 358 aa, unidentified
MSIVAHLYSFFIGVDTHARNHAYSIVTNTGILVETRSFPTTSAGIKRALTWAGRRTSGDLDTLWVVEGAASYGAVLTGHIAAAGYPVVEAGRMDAKARHGVGKSDELDSRRIAASVLPLDADQLRWPRHGEGVRQALRVLLAARDAMTTERTRMINSLTALVRTIDLGIDARKSLTSDQVDEIAKWRTRNEDVDLSTAREEAIRLAKRVLVLNDDLQTNHDRLTELVEASPAAPLLDEPGIGPFSTAVCFTAWSHPGRVRNEAAFAALAGVNPIPASSGNTRRHRLNRGGDRQLNRALHTVVMNRMVHDERTRNYVARHHGEEPTKKSKREIKRNLKRYLARRVYKILNALDTVPQPA

SEQ ID NO: 90314 - protein, 340 aa, unidentified
MNITTVGMDLAKNVFHVVGLDEHGHEKMKKQLSRRQVLKHFANHPACVIGMEACASAHYFARELRKLGHEAKLIPPQYVKAYVRGQKNDTNDARAIAEAVRVPSMRFVTVKTVAQQDVQSLIRLREGAINARTAAANRLRGLLGEYGLVRGKSLSTLRRALPEILEAVSNGLTDVFRRLLAQERQHLLELDAHIDTLTAELTALSKQDDRVQRLQTAPGYGPIVASVFASVMGDGKQYRRGRDASAAVGLVPRQHSSGGKNVLLGISKRGDRYLRSLLIHGARAVVNAAQKKDDPLSRWINHLREKRGMNKATVALANKLTRIGWAILRNGTTYQPAQAS

SEQ ID NO: 90315 - protein, 320 aa, unidentified
MEPILGLDVGKSSVHAVLLTEDTAPRRKAVPNTKAGFAQLDAWLKNRNVAQAHVCIEAGGYVEALALHLHVQGHTVSLVNPSRIKAFGQSELIRTKTDAVDAALIARFCRAHRPARWEPPPLETLALQRLVRRLESLKLMIFQERNRLERIEDGPIVDSIQEVIATLERQHERIQDKIRRLFEEHQTLKVRRDLLTSIPGIANATAEKILGEAPNLDGFSSSKSVAAYAGLSPQHFESGSMRAKSRISKTGNGRLRKALYFPAIVAIRWNPVVKAFARRLSLAGKPKLVIIAAVMRKLLVIAYGVLKSGIGWDPQRAIAA

SEQ ID NO: 90316 - protein, 351 aa, unidentified
MDRYIGLDVHATTTTMAIIGPSGKRIGTRVVETNGKALVEALRAIPGARHVCLEECTQAEWLWEILKPYSDELVVTTVPESRGPKSDARDAFGLAERLRSRDIETTVFKDVATFAGLRELNRLYTRIVGDVVRTKNRLKSLFLSRGIETADGSLYAESHQQAWLRKLPTAKRAAAETYFAELTALTELRDQVEADLLREAGKHPIGKKLQTCPGIGPIRAAQIMAVVVTPYRFRTRRQFWAYCGLGIVMRSSSDWVRDPSSRKWVRANVQSTRGLNLNRNAVLKQVFKGAATTVGAQRNTPLSLQFQRLLENGVKPNLAKLTLARRIAAIVLTLWKKNEEYDPTKHRKQDA

SEQ ID NO: 90317 - protein, 353 aa, unidentified
MRKQYSTGSFKGQIIYVGIDVHKTQWTVTIQHCGMSQKRFTMDPDPEKLAEHLKRNYPEAEYRSVYEAGFSGFEAHRTLCRLGVQNIVINPADVPTSGKEREKKNDNIDSRKLARELENGSLEPIYIPTQENLKLRNLKRREDQLVQNLTRIKNRIKGHLNFNGIKFISWAGGSLKIMEEEAQKHEDYTLLSMFRELRFLREEKLRVIRDERECLKKLKREQIQENIQSVPGIGFRTAVALQAELWDMKRFKTDDHLNSYVGLAPHTFGSGEDVIVKCGNRKKQQLHYLMVEAAWRAVLNNLEYKARYGALVGRGMNSKKAIVVIARKLMQTIRAVWLQDRKYVNLLPKSKMN

SEQ ID NO: 90318 - protein, 368 aa, unidentified
MVMVLGVDVHKDTHTVVAVDDVGRAHGERTIRATDDGHRQLLEWTRRQFPHDRVWAVEDCRHVSTRLERALLAAGETVVRVPPKLMAGARSSARTRGKSDPIDALAIARAALREPDLPVARHDDTSRTLKLLTDHRDDLVIERTKMANRLRWHLHELNPELDIPARGLNRLNQLDRLTTWLSEQTWTEQISQVLARLAAELLTDIRAATVRVNALEREITTLARVAAPRLMDLQGAGGLTTAKIVGETANVTRFRSEACFAMHAGVAPIPASSGRTQRHRLARGGNRQLNAALHRIAITQVRITGSPGQLYYQRRRARGDTAMEALRALKRRHTDQVVRGPQLAGHAVRRHQQILTLDPQPVVVFDWS

SEQ ID NO: 90319 - protein, 343 aa, unidentified
MAYFAGLDVSVKETSVCIVDDAGKIVREARVASEPEALLQVLTNTIYRFKRIGLEAGPLSQWLYSVLAEAGLPVICVETRHMRAALRAQINKTDRNDARGLAQMMRVGLYRPVHVKTLRSQKLRVLLTHRKLLQSKAIAMENDLRATLRNFGLKVGTIGPVKYEMRIRELVENLPDLAVLVEPLLIVRRVIREQLRILHRRLLAIVRDDEVCRRLMTIPGVGPVVALTYRVTVDVPARFRNSKAVGAVFGLTPSKYQSGENDRTGAISRCGDEMMRMMLYEAAQSMLVRSTKWSWLKAWAMKVARHRGMKKAIVALARRLAVIMHRVWLDGTEFRWTREVAVA

SEQ ID NO: 90320 - protein, 375 aa, unidentified
MIAYVGIDAHTTNYTLSTYLEGSAVPVNTNTYSPSVSNIVSYCKGIRKKIGNDTEIVVGYEAGCLGFKLKRDLEEKGLTVKILAPASITGTEINRRRRKKTDKRDAEAIARSLKNHEYSEVYTPDEEDESVRDFIRMQQDHKKQLRVIKQQICAFTTRHGYQYTDGKNYWTKKHLKWLKGLPLEGINKETLDSYLLSYETVSDRIEQMNKRIEEIAETDKYREAVHKLICFKSVKVLTALAVIVEIGDFTRFVKAKNFAAFLGLVAGELSSSDDQNQTGITKQGNTFLRKLLVECAQSFSRASSGKSEALKKRQEGNAPEVIAYADRANERLRKRYMRLVLHNRKNHNKATVAIARELACFIWGMMTGNIHTVLA

SEQ ID NO: 90321 - protein, 322 aa, unidentified
MSVSNQRCAVIDVSKSTLDIAISSIAQPFTVPNEDGGFNQILKELKQNETQLILMEATGGLESGVAGYLQSEGFDVVVINPRQARDFARAMGYLAKTDQIDAIVLLQMAKVINQHPEREKYIRPLPDVHRQLLAAMVVRRRQLTIMLTAERNRLHPSYPQNHESIRFIISVLKSEMARIETEMSAYISKNFSELSALLSAVKGVGAATVAVLLAEVPELGTLSRREISALIGVAPVNRDSGTMRVRRTVFGGRATVRTALYMSALVGTRHNQVIKEFYTCLVTAGKPKKVALTACIRKLLTILNAMLKNNEAWDPLYHQHAS

SEQ ID NO: 90322 - protein, 342 aa, unidentified
MEQYVALDVSLKEISVCIIDSEGAVVFEGKAAAEPATLVKLIRGKAPQVVRVGLETGSTSPWLFHALTSAGLPVVCMDARHAHAVLSMRPTKSDRSDARGLADMLRMGWYREVHAKSVTSHEHRTMLGVRHQLVTMRSELDAQIRGILKTFGLILGTGNKDTLIQRAEELAAGHPVMRGLVAKLAEVRRHVASQIAAIDRDIRHLARIEPTLKRLMTVPGVGPITALAFLSSVDDPSRFKHARDVGPYLGLTPTRYQSGETDRQGRISKCGDTFTRTCLYEAAHVLLTRVQRFSPLKAWGMRLAKRIGGRKARIAVARKMAIILHCIWTDGTEFWWTREKTA

SEQ ID NO: 90323 - protein, 349 aa, unidentified
MRYVGVDLHKHNFVVCFLDTSDTSKLRTYTLSSAGLDAFCRDLHPDDHMAVETAQNAYYFYDHVRSAVNDIVLVDPYRFAMIAKSKKKTDRHDAVTLARFLKLGWLPTVPIPSEKIRQLRQLCQARENLVQMATQLKNMGHAALLRNGIALKHAALNTLGGRRRVARTTVLVPLDNQILGVAVRQLEALDREIAVLETSILHLGKDLPGLPKLLQIRGLSTLTAIILLAEIGDIGWFETSKQLAAYAGLATSVRQSGGTDRHGKITKHGRRRLRTIAIRTVLAMINGKQTPLMEFYARKKHEKGAGKALCATARKLLTIIFVMLKRDLDYWYLEDRLYQRKLQMLRATA

SEQ ID NO: 90324 - protein, 388 aa, unidentified
MTPTSGSLSHPITLDYENTLVLAIELSKASWVLAAQVPGLPRIKAKQTVEPRTEALLAAIDGYRARSRAAGRPIERVVAIYEAGWSGFWLARWLARHGAETHVVQPSSVPVDRRARRAKSDGIDAELLLRTLLAWFRGEPRVCSMVPIPDEADEDERRRVREREDLVAERVSLVNRVGAVLATLGARDYNPLRRDRRARLEALRTALGDPLPPHAGARILRMLDRLELVCAQIAELERQRDAVLEAEAPDKAEEMIQQLAGLRGIGVQSATVLVREAFVREFANGKALGSYAGLTPTPFSSGTTEREQGIGKAGNRRLRTVMIELAWLWQRYQPGSAQASWFRERVGGTGRRMRKVMVVAMARRLLIALWRFATQGVVPKGAVINPAP

SEQ ID NO: 90325 - protein, 364 aa, unidentified
MINGGHVLQQPQTSERKRGMKYYSGLDVSVKETSVCIIDETGKICREVKVISHPDDLTAALKDPAWPIERIGLEAGPLSQWLFEGLATAGLPVVCIETRHTKAFLKAQVNKTDRNDARGIAQMIRVNLYKPVHVKTLTSQKRRALLTARKLLQEKAIAIENDIRGLLRKFGLKVGVIGTIGFDDRIRELVDDSAELLEIMEPLLSARQKLRETFTVLHSKLLAIVSEDRACQRLMTIPGVGPVTSLAFISTINGPARFSKSRAVGSALGLTPVLNQSGESHRIGRVSLCGDGMMRALLYEAAQVMLSRVKKWSWLKAWAMNIAKRRGRKKAIVALARRMAVIMHRMWKDGTEFHWTKDSMSAAI

SEQ ID NO: 90326 - protein, 375 aa, unidentified
MNKIRFVGLDVHADTIAVAVAEPGEEVHSLGIIPNRAESVRKLIHKLGPAERLRACYEAGPTGYALYWRLTALGVKCEVIAPTLVPVKSGDRVKTDRRDALKLARCYRAGDLTSVWVPDAAHEALRDLVRAREAAKRDQHRARQRLGKFLLRHGWHRPLHLKTNWTQRHLEWVKTKVHFEQRAQEIALADYVHEVEHMTARIERLEEGITEAARSAPPQMRAVIEALQAMRGIAEIGAITIVAEIGEISRFRGARQLMGYSGLVPSEYSSGAQRRQYSITKTGNAHLRRVVVEAAWAYQFRPWCGGYLLKRQKNLSDEVKTIAWKAQIRLNARYRALLANGKNKPQIVTAVGREMLGFIWAIGVKVETAQRQLAA

SEQ ID NO: 90327 - protein, 346 aa, unidentified
MVIIGCDFHPSWEQVCWLDTETGETAGQKLVHSAGEAQGFYAKLPAPALIGLEATGNCHWLVDLLQDLGHEVWIGDAAAIRASYVRQQKTDKRDAAHILKLLVEGRFPRLWVPDRQQRDLRQLLIHRHKLVRMRAQVKNGLQHLALNQGLQRKARLWSASGQQALRQLPLQPWAARRRQDLLGLLASLDQQIAPLDQAVKEAAQRDQMALLLQTQAGVGPITALAFVLTIGDVSRFPRAKQVASYLGLIPREHSSAGHQRLGAISKQGNGFLRMLLVEAAQSAVRYDSDFRREFQHRCHSKPKNVAKVAAARKLAVRLYWMLRTHQAHPESVAIESSPRVPLVSAS

SEQ ID NO: 90328 - protein, 438 aa, unidentified
MSNKVIFNLDELFISVGIDVGADFSWMSIALPNQQFVGKPFKILHNSIDSLTTAVSKIKEAEELYSLESRIFLESTGIYHYPLFCYLRDKGFNCSVINPIITKNSTNINIRKVHNDRFDSKKAALVGLKPDLKVSLMPSDLALNCRNLCREYYDLMDNRSAYVNKLQGELRMAFPQYLGIFSKVTINTSLTLLETYTSPSAFLEADKQEIIDIIKSTARFGLTYAQNKYNAIIQAATDANQFGYIIESNIKRIRLYISFIRKYDEEINDILESLHKLVDSNEDTKFVKQVHLIETFKGAGFLSAATIMGEIGDFSAFSKPKQLFAYFGLDPAVKQSGKFEGTKVQMSKRGSSIARRVIHTLSLQSISISRNGKAKNPVLREYYLQKCDSKPKLVAMGAVSHKVCNMIFAILRDNKPFEIITPQEHIKQYNAAKCDIAA

SEQ ID NO: 90329 - protein, 441 aa, unidentified
MTNRLQVGIDFSLRHVMLHVTTPDGQPLATHRSFTNAVSGYDQAKQLLCALVRKQGYSGMDIAGEATSTYWMPFFLNLSQDSALEPYDPHLVLFNPRWVAWYKKSQGAQNKTDATDAYYIADKLRTQRPQADWVPQLETMPLRFYTRLHFHLAQRLAGEKCYYLSRLFLIACAYGQQKPFSDLFGPTSRQVLQQWHATGDMPVDVLAEQLDEWSHGRLRDPLATARKVATAYQESLDMPPAIEEAVQRCLNLTLTGIVALEAQIAEVDQWIAAEAAKHSGITQLATIAGLGPVYASGIVAELGDVTRFLTGEKWDKRRQRMRLRNLRDAEDAVAKIAGLWWPQNASGDFAAEDRTMSKAGNRFLRYYIIEAANHMRVRLPEYEAFYARKYREATRHQHRRALVLTARKAVGLIVGLLRRGEPYRSQEERRALAEQQRPDGG

SEQ ID NO: 90330 - protein, 412 aa, unidentified
MLKIVYPICCGIDVHKKFIVACIASTDDKGVTTYKSKRFSTFTKGLRELSEWLHSNSCTDVCMESTGKYWIPVYNILEATCKITLAHPKYVKAIRGKKTDKKDAKWIADLFKHDLVAASFMPPLPIRQLRDLMRYRFKLTNFCSSEKNRIQNCLTVSNIQLANVVSDTFGKSSMKIIDYLLENPLAKDFDLVPLLHASMLHKLDDIRLALDGMISPEQQQKMNIILQHYDELEKCKSNLESLILSLSGPYAKELSLVSTVPGIKNPFSAIAIISEIGVDMSVFPTAKHLCSWAGLTPQNNESANKKHSVRISRAGVYIKPLLVQIANAVVKSDKHPEIRGRYLSIKKRRGHKRAIIAIARMLLTAIYHILKKGEPYNAELYKKAEILPQTRQITVEQAILLAHRHGYSVIAV

SEQ ID NO: 90331 - protein, 343 aa, unidentified
MDHFAGLDVSVKETSVCIVDDTGSIVREVKVVSEPEALLQVLGNPIHRFKRIGLEAGPLSQWLFSALAEAGLPVICVETRHMRAVLQAQINKTDRNDARGMAQMMRAGLYRPVHVKTLRSQKLRMLLTHRKLLQCKAIAIDNDLRGTLRNFGLKVGVVGTVKFEARIKELVENLPDLAGLVEPLLMVRRVLREQFSILHRRLLAIVRDDEVCRRLMTVPGVGPVVALTYRATVDVPARFRNSKAVGAVFGLTPSTYQSGEINRTGAISKCGDEMMRVMLYEAAQIMLVRLAKWSWLKAWAMKIARHRGMKKAIVALARRLAVIMHRIWVDGTEFRWTREVTAA

SEQ ID NO: 90332 - protein, 344 aa, unidentified
MATHYIGADVDSKMADLAVERNGKLVQRYRVPTSIACLREVLGEVRGRKELAIEEGPMAHWLYRNLQPVVDRIVICDPRRNAYIAKDGDKDDPIDAGKLAALLRGGFLREVYHSKDDQHVLLKQWVGLYHDRVREAVRQINKLRGRCRMEGVRPPRGTLCDPSVRSAWLKGLDDRALSKQLSLLWIGLDAVLEQVVQARREVSRLARRYEIIRYWRELPGVGSIRAATLYAYLDTPWRFRHRRKLWKYCGLGLERCSSGKDRYGDPKVGLLQLAWAVNKRLKNAVMGAAISAIQHKRNVFAYQYERLVQDGLTDSNARHTVARKMLTVMWGMWKTQRRFDERLV

SEQ ID NO: 90333 - protein, 457 aa, unidentified
MSRARKVPQTVKSVAEVDTLTRLNPNAAGIDIGLDEMWVSVRADRDAEPVRRFGMNTPDLIAVAEWLKACGVETVAMESTGVYWIPLYEVLEERGFQVYLVNARHAKNLPGRKKDETDAQWLRRLHTFGLLNNSFRPAGEMCAVRAYWRHRADLIEHRAAHIQHMQKALHQMNVRLSPTVKDITGVTGMAIIRAILAGERDPLTLARLRDPRCAQPEAEFVKALTGNYRDEHVFALKQAMALYDAYTQQILECDQELERKFSALKPVHDDDLPPLDTTDKRNTHSKNAPAYDGRALLYQLLGVDLVAVDGLNEVTAQIIISEIGTDMSRWQDEKHFCSWLGLAPHNDISGGKVLRSRTLKTHNRAGQAFRLAAQAVSKTNTAYGAFFRRMRAMHGPMKAIVATAHKIARAVYFMLKNRTPFHDINAEEYTQREREREIARLQKKATKLGFTLAPASV

SEQ ID NO: 90334 - protein, 353 aa, unidentified
MPIVAEQYTFVIGVDTHAATHSFALINATNGGIIDQAVFPTSPAGLDRACTWITRGIDEKAALVVIEGAGSFGAGLATRVTNIGLPIAESAAMPAAARRGVGKTDALDAVRIARSVLAVDITRLRTPRADGQRVALRVLTVAREEMVAERTRAINALTALLRTVDLGIDARKPLPHSQFKTIAAWRERKEDSVLATCRQEAVRLAKRIVALDGELVDNRRSLDSLVEDGAPELCKLPGVGSVVAACVLTAWSHPGRVRSEAAFAALAGTCPVPASSGNTVRHRLNRGGDRRLNRALTTVVIVRMRTHAPTRAYVARRRAEGRTTKEIMRSLKRYITRQLYRTLAAAHPVPETP

SEQ ID NO: 90335 - protein, 342 aa, unidentified
MYYIGLDVHKKTISFCVKDASGQIHQEGKIGATRHELDCWMKTLPQPWSVAMEATIFTGWIYDHLLPHAQQVKVAHPLMLRAIAAAKKKNDRIDAGKIADCLRCDFLPECHMASTEIRDRRRTLRYRHLLVRQMVQMKNRISGLLMETGVSHNKQRLHQVGYFRELLANNEELPDAIRPLLRLSRETIVRCQKTEYALVSSLQRDTLLAARIKRLRTVPGVGPITALTWALEIGDVARFRSIRQAISYCGLCGAEKSSADKVARTPLSKQRNKHIQRVLVEAAKLAPREDHDLALIYEKQKQLGNANRATLAVARKMVAWLLAVDRGEREFIPIEAYRSTVA

SEQ ID NO: 90336 - protein, 343 aa, unidentified
MGEVSTIGLDIAKSVFQIHGVDAGGAVVMRKRISRAKLLEFFATLPTCLVGIEACPTAHYWSRRLQGLGHTVRLMPPSYVKAYVKRGKNDANDAAAICEAVTRPSMRFVATKSEEQQSGLMLHRSRQLLVCQRTMLSNAIRGHMAELGIISAKGRNGTAELLKIIADEQDDRIPAAARFSLNVLARQYAAIRAETVAIERRIHAWHRSSEESRRLEEIPGVGPIVATALMAEVGDWKTFSSGRSLAAWIGLVPRQHSSGGKERLGRISKQGNRHLRWLLVAGAMAVIRYARQHGTKRPWLARLMDRRPIKVAAVALANKIARMAWAMMVRGERFKEPKLLPAA

SEQ ID NO: 90337 - protein, 351 aa, unidentified
MLLIGVDYHPSFQTIAFFIEETGEYAEQELNHSDGQAEKSYRDLKQRGIRVRVGMEATGYSRWFERLLAELGFELSIGDPAEIKAKRVKKQKFDREDARLLLRLMRENNFPQIWVPDPENRDLRQLLWHRHRLVQMRTRIMNQLQALAMNEGYRWKKKLFSEQGRVVLEKLSLAPWASRRRQELLELLDRMNPMIEELTAAVEQEARKRPEALRLLTHPGVGPITALAYVLIIGTTDRFQRGKQIGTYVGMIPCEDSSAGKQRLGHISKQGSSLLRYLLVEAAQAAARVHPDWRRRYHHMAMRRHRSIAKVAMGRRLAIRLYWMWRNGCEYSPALEFGSYAGQLECRHDVK

SEQ ID NO: 90338 - protein, 419 aa, unidentified
MSKSLFCGCDVALENNTIWLMLDDGSQPAKLFNVDNSQLGADVLVERIYSIAKEHCVSDILIGTEATSMYDWHLLEYLAESKLALEFSLKLYRFNAKWIKNFKKSLAPRGKTDPIDSFAIAERLRIGRLPKEYVPDTKYQPLRKLTRFRFHLMQQIAREKDFFLANLFLKASAYSRVAPFGSTFSATSLSVINDFFSVDELAAMPIEELTEFILEKGKAHFSKPSEIVDNLKRVARESYRLKPELAPTVNLILASTFNNIRCYKEQVKLVDSAIAENLKAFKHTLDSIPGIGPVYAAGILAEISDVHRFQNDSSLAQFSGLTWPKHQSGKFQAEETRMSHTGNQYLRYYLVEAANSVKRCDATYKAFYEKKYAEATKHHHKRALVLTARKLVRLVWTLLTRQVLYQPGYCSFEDLSKIG

SEQ ID NO: 90339 - protein, 478 aa, unidentified
MSQRKRSPCPSKAAKAARQPVSRAPRAQPVTLTIQHPHAAGIDVHSDMHMVCVPADRDPEPVRRFGANTCDLEAIADWLKQCRITTVALESTGVYWIPLLELLEARGFEVWLVESGQLAHCGARPKTDVLDCQWLQRLHSYGLLRASFRPPESLLALRSYWRQRQMQIRYAASHVQHMQKALEQMNVKLTEVLADITGVTGRRIITAILQGERDPDTLAALRDANCKNDVPTIAKALQGTWRPEHLFALQQAYDLYQFHHQQIGQCDTMIQAELAKLPNRAGAKAFTPKPRRCGRKANDLNFEACGPLFKALGVDLTEIEGIDVGTALVILAEIGVDVSRFPTEKHFASWLGVCPRVYESNKTQKKKGPRKGKNRVAIALRMAAQALGRTQSPLALFYRRIKSRIGGKGAITATAHKLACLVYRMLKYGRDYVKQSMEEYEKKIREQLKRSLHRKAAALGFILVPRTPAGPRTEPVSI

SEQ ID NO: 90340 - protein, 333 aa, unidentified
MFPVGIDVSKDTLDLCILYDDIKGRIRTKKIKNDRSAAANIFRWLRLQHCGPGDVHLIMEATGVYHERLAFSLHEAGGYVSLANPHRSRDFARGMGILTKTDKVDAYMLACYALLKKPQRWLPPSDEVRYLSALIRRRDALLSDAVREENRLEKYQSTHTPPDVISSCLRMARILREEVKATEQLIKTHIKAHEALQQDYDLLTSIPAVGPQLGMNMLIVLRSHDFESAGQVAAFMGVAPIEKRSGTSVRGKARMSKIGPPQLRAKLYMAALCARRCNKRMRSFYEELLLRGKPRMVAIGAVMRKLVHWCYGVLNSGKIFGSDAEFTAGTGSS

SEQ ID NO: 90341 - protein, 364 aa, unidentified
MLRVAHFVDAVVGGDTHVDTTSLCVVSPVGAVLAEITLDNDEDGYAQAVTWVLQSVPSERFLVGLEGTRSYGAGLCRALQAVGIRVVEVERPSRGERGRRGKSDTGDAVLAANKVLAMPPDRVPAPRAGDGVREALRLLTVDREQMTTQRTRLVNQLYADLLTGNAEQHALRKKDLTSGTLRKLAGARGRSGRPIDEQARLVVLRRKAQDIVRLDQQIRENERQLNTILDEVAPQLLEQVGVGPVVAAQLIVSYSHHGRCRSEAAFAALAGVSPIEASSGRITRHRLNRGGDRRLNRALHVVAVTRVKHDPRTRAYIQRRSKDLTDREIRRMLKRYITRDLYGVLRTIDALHPKRTTSTVTPAA

SEQ ID NO: 90342 - protein, 330 aa, unidentified
MKNLFCGIDISKDFLDYAICFDENKTISSTSKTENNKKGIISLIKHLQKEAGERNIWVCFEHTGHYGLLLASLLAERNIIFSMVPSLDILKSSGLTRGKTDAVDAKRIALYLATNNYKLKPSTLPSDEIFRIKTLLTIRQQYVKIRTQLKNAVKSLKIASKIVSMNSEIKQYEAEIRRYDNKIKGLETQIKKIICNNNQLLVNFNKITAILGIGLITATQFIVTTNNFTAFDNPRKFNCYCGLAPFEYTSGTSIKRPTKTSHYRNKELKAALFKAANTAISHDMQIRTYFNRKIDEGKHKMSVINAVACKLVYRVFAVVKRDEPFVRMAM

SEQ ID NO: 90343 - protein, 346 aa, unidentified
MTIVDCTRPVTGGVDTHLDLNVAAALDSIGGLLGVAEFRTTRIGHGLLVDWLGGFGPVARVGVEGTGSYGAGLARFLRGAGIEVVEVDRPNRQTRRRTGKSDPADAIEAARAALSGRAQGAGKTRDGNVEAIRALVVAKRSARSSKIKALNQIRHLGFTASDELRERLSGISRQHLGAAAARLRPRAGSDAITFATKTALSTLGRRVLALDEEKERLNVLLAELVGKTAPSLLELHGVGVDTAATLLVAAGDNPGRLRCEAAWAHLCGVAPIQASSGKVTRYRLNRGGDRQANSALWGIVITRLRSDPRTQMYMERRLKEGRSKPEIIRVLKRYVAREVYPHLPRG

SEQ ID NO: 90344 - protein, 323 aa, unidentified
MSQPNPLCVGIDVSKTTLDIATANNEFAQFTAGNDTDGFELIIAELRKHSVALVLMEATGGLEAAVACSLQAEGFDIAVINPRQARNFSRAMGYLAKTDRIDAKVLSQMAEVINRHPERERFIKAIPDAERQILAAMVVRRRQLITMLVAERNRLHPAHPQNRKSINTIIKVLEDELSRIDEAMNNHIKTHFKELAARLSSIKGVGAMTVATLLSEVPELGSLSRREISALIGVTPVNRDSGTMRGRRTIFGGRAGVRTALYMAALVATRFNPVIKDFYTRLITAGKVRKVALVACMRKLLTILNAMIRKNEEWSDSYHKFSL

SEQ ID NO: 90345 - protein, 344 aa, unidentified
MDHFAGLDVSVKETSVCIVDDTGRIVREVKVASEPDALLAVLTNPAYHFKRIGLEAGPLSQWLFSALAEADLPVVCVETRHMQAVLKAQINKTDRNDARGIAQMMRVGLYRPVHVKTLRSQKLRMLLTHRKLLQSKAIAIENDLRATLRNFGLKVGMVGTLKFEARIKELVENLPDLVVLVEPLLLVRRVLREQIVILHRRLLAIVRDDDVCRRLMTVPGVGPVVSLTYRATVDVPARFRKSKSVGAVFGLTCSKYQSGEIDRSGRISRCGDEMMRVMLYEAAQSMLRSKKWSWLKAWAMQIARRRGMKKAIVALARRLAVIMHRIWVDGTEFRWTREQAPAAA

SEQ ID NO: 90346 - protein, 371 aa, unidentified
MNHVTSIGLDVHARSITAVALDSITGEVRSQKFKHSPAEVASWILQFESPKAVYESGVTGFHLVRTLREFGVDCIVGAVSKMQRPAADKRKKNDRNDAEFLARQLMAHNIVEVFVPDEETEAARNLSRALEDVRGDLERAKHRLTHLLIRWGHVWDERTPEGKRRGTWTRAHWEWIRGIELPESAAQESLDYYISEVRHIEAQKKAIEKRIAQYAQRPRWQERVEALRCMKGIETMTAFALVAEAGVFSRFDSARSFASWLGLAPSEHSSGEHVSRGGITKAGNSHLRKLLVEASWHYTRATKERKRALNDPSVPFAISSHAAAGIKRLVKRRQHFTCDLRKRSVVANVATARELACWVWALGRMSEGTLA

SEQ ID NO: 90347 - protein, 312 aa, unidentified
MFVGIDVAKAELVVAVRPTGERLTAKNDEQGLLKLVRHLKQLRPERIVLEASGGYETATVVALAREGLPVVVANARQVRQFAQALGRLAKTDGIDAEVIAHFAEAIKPEIRPLPDEAHRELEALVTRRRQLVEMRAAELNRLKTAPRRIHPNIQAVIAFLSQQIDDNDRDLEQLLRSSNLWREADDLLQSVPGVGPVLSVTLMALLPELGSLDRKKIAALVGVAPLNNDSGERTGKRSTWGGRANIRAILYMATMAACRFNPPLAAFYKRLLERGKPPMVAIVASMRKLLTILNAILRTRQPWAPASLQPAV

SEQ ID NO: 90348 - protein, 380 aa, unidentified
MKKGSRFVGLDVHADTISVAVAEPGGEVRSLGTIPNRPDSVRKLVKKLGPTRKLKVCYEAGPTGYVLYWQLTGLEVHCDVVAPTLVPVKSGDRVKTDRRDAAKLARSYRAGDLTPVWVPDAAHEALRDLVRAREAAKKDQLRARHRLQKFLLRHGRRPPEKIRAWTATHLAWVKQVVRFDAPAQQEVLIDYLAEVDHARERIKRLEGAIDEAVKVAPESMRAVIEALQALRGIAKVSAVTIVAEVGQLSRFARPRQLMGYSGAVSSENSTGRRVRRGAITKSGNAHLRRIVGEAAWAYRHRPAIGGALRVRQEGLNEEVREIAWKAQHRLHLRYRRLAATGKPRQKVITAVARELLGFIWAIGVQVERQKPAAGPKRPAA

SEQ ID NO: 90349 - protein, 412 aa, unidentified
MQVIIERCAGLDVHQETVVACVLAGTPGQRPTKEIRTFCTMTRDLEALRDWLKAAGVTHVGMESTGVYWRPVYAVLEGHFELIVGNARHIRNVPGRKTDVKDSEWIADLVRHGLIAKSFVPPKPLREMRELLRYRRKLVESQAAERNRLLKLLETANIKLASVASDVFGVSGHAMLKALILGTASSEEMAALAKGRLRRKHADLVLALDGRIEDYHRFLLTLQLRRLDAAEQDITALDKRIDEKLEPYRTQHALLMQIPGVDWLVAAVLIAEIGIDMSQFLSVFHLAAWAGVCPGSYESAGKQKSGRARKGNVHLRTILVGAAISASRTKGSYLRDKFHRLKARRGALRAALAIAHKILVAAYHMLAKGVPYKDLGEAYLDEIGQTRTLANLKRRIERLGYHVILEPQAAAA

SEQ ID NO: 90350 - protein, 292 aa, unidentified
MAGKVTETAVVGGVDTHKDLHVAAVVDQNNKVLGTQFFSTTRQGYRQVLAWMTSFGALKRIGVECTGTYGSGLLRYLQNAGLEVLEVTAPDRMERRKRGKSDTIDAECAAHAAFSGIRTVTPKTRNGMIESLRVLKTCRKIAISARRVALQIIHSNIISAPDELRERLRNMTRMQRIRTLGSWRPDASEYRNVTNVYRISLKSLARRYLELHDEIASQLLITAGDNPQRLRSESESGFAALCGVSPVPVSSGKTNRYRLNRGGDRAANSALHIIAIGRLRTDDKTKDMSPDE

SEQ ID NO: 90351 - protein, 427 aa, unidentified
MLKHHTEPNPAEEFAAFLAIDWADEEHAFHLQVEGQSKVETGTLEQKPEVLGPWVAKLRERFGGRPIAVGLEQSRGALIHGLMAYDFLVLYPIHPTTVAKYREAFKSSGAKSDPLDAGQILEILTKHQDRLHRFNPDTVETRLLGRLVEDRRKAVGLRTTHVQALGANLKEYYPQALELTNGNLSSRLAGDLLLKWPTFADFQQAKPSTLKSFYYGHNVRSPEVIERVLALAEKSQALTTDPAIVESGSRLTQMYVGLIQALNPVIVKYDQRIQRVFDAHPEVKLFTGLPGAGPALAPRLLAFFGTDRSRYAAALNVQSFTGVAPVTKSSGKSRVVYARAACPKFDRQTFHEFSRLSVTHCQWARNYVQYYTDKGKKYHTIIRALAYKWIRILHKCWKERTPYNEDLYMERLKKRGSIFATLHLQTK

SEQ ID NO: 90352 - protein, 371 aa, unidentified
MDEPSTFVGLDAHKDTIVVAMLLPGAVHPVEWQLVNEPGAVRRLARKLEREAPGGVRCCYEAGPGGYVLQRQLVAAGIPCTVIAPSLIPVKPGQSIKTDRRDARKLAELFRAGLLTEVHPPSEDEEAVRDLCRARDDAQRDLTRAKNRLTKFLLRRGCVYCVGRRPTWSQKYWRWLHALSFERPADQIVCEDYLLAVEQVEARLEALDDQLGRMSTTAPYRAPVAALRCFHGIDTVTALALVAELHDPRRFPSARQLTAYLGLVPRESSSGSRRRQGGITGAGNRHVRRLLVEAAWHYRHKPQIGRALRLRRRGQPAAVIALADRALRRLTLRHRRMIYQGKHPNPVTVAIARELAGHLWNALQATTPARS

SEQ ID NO: 90353 - protein, 615 aa, unidentified
MGNARARKVPAQLVEDEDYQLRHERVAGIDIAKAKADVCTRLPPQRDGGRRASRVEEVPARAREILDLAVRLISDGVELVVMESTSDYWRIWFYLLEAAGLNVQLVNSSHARQLAGRPKTDRLDAQWIARLAEMGLLRPSFVPPPEIRALRDLTRTRLMLVRDRTREWQRLEKLLEGALIKLSSAVSSLARTKTARAILEALADGERDPKALAALAAAQVKGGRAAIERSLDGMMTGARHPMLIRAHLDHITLLDRTAAAIEDEIEAALGAIPAARGITADGVPSADPGPDAAALPAAERLAEIPGVSLMLARAIIAETGLDMTRFPAAAHLVSWAGLAPVARQSGPRSRKPGKGQGDAYLKGYCTQAATGAATTDTFPGERLRRLSRRLGGSRARCAVGRSILGQVAGARYRAPAPSEPDLPVIPASGSSKPLRTLRVAAAVLCPCGARLQEACTRAVAVLAFRSPSRAGFPGPPGAGWMSWRVTLIHQSCHSSGEPGRWPVSSSRSPHSGQLLSCLASRARVCASSGGPCLSRRYLQYPARPGSSGDAVPLTMTWRRIAVQECLTRQAPVPLSPKTHRSSRYGWNFPKYRAATQRWPLFGCECRAHFQVSFHM

SEQ ID NO: 90354 - protein, 344 aa, unidentified
MTYYTGIDVSLRSVSICIVNDRGEVCLETKVEAEIDAIVDRLRRFSSEVKAVGFEAGTLTQYLTYGLQAAGFEVICLEARQVSLTLAAMRNKTDRNDARGLAQILRTGWYSRVHVKSLHSHQVRALLASRKAILKKCVDLENELRGLLKVFGIRLPSRVGHGSFDAELRETVSNDEMLACALVPLLDARTVLYKTYLKLDNAVKGLVRVDPICRRLMSIPGVGPVTALTFKAAVDDPNRFKSSRTVAAHFGLTPRRFQSGEVDNPGHISRAGDADVRSALYVAAHSLLTRNAQWSTLKAWGVRLAKTRGHRRAVIAVARKLAVILHRMWIDGSEFRWGPEAAST

SEQ ID NO: 90355 - protein, 329 aa, unidentified
MEDVVVGLDLHMKTIQGTIMRMNGEIVKQEKFRTDKESLRRFLEGVPEGCKVALESLGFCWPWIDFIEELGCEPLLANPLKVKMRAEDVKTDKVDSELLANLTRMDWLPTCYVPSAELRWLRSLVRHRAFRVKMSTAVKNRSWSEFRKRDIGLSVDLSTRKGRDLAAALGVFEVVQNVELLEVVERQTNEVEKMLMGRYGNVKPVQLLMTIPGIGFLTALTLYAEICDIKRFPNPDKLAHYAGLVPRVHQSADHTRLGRETKANKWLKWIMVEVAWSHIRYCPDGRLAKVFEDAVRRKRDRRKAIKIVARKLVNVVWAVWKYEREFMVE

SEQ ID NO: 90356 - protein, 346 aa, unidentified
MEIHTLGIDLGKTIFHFVGLNTSGETVVRKKLSRKQLLLFTATSQVRLIGMEACGGAHFLGRALRQQGHDVRLMPAQYVKPYVKTNKNDYIDAEAIAEAVGRPKMRFVPIKSDDQLDMQSLHRVRERWVGRRTSVVNQIRGLLLERGITVRKGRRHAEAALPGILEDPESNLSGPLRMLLVQLQRELRQLQSQIEEVDAVILKAAHEHEACQRLMAIPAIGPVIATAIVSAIGNGAEFKKGRGFAAWLGLVPAQYSTGGKQKLLGISKRGNCYLRSLLVHGARAVMQCREKQSSGLSAWLGQLASRVHCNVAVVALANKLARIAWALLAKGETYRPPVLAANAVAV

SEQ ID NO: 90357 - protein, 328 aa, unidentified
MTKHITICAGIDTGKRKLDVAIEGRCEQLQVENTPEGHKALVAWLRKYGVKRVGIEASGGYEQPVVTELRRTRFVVVVFQPAQVRAYAKFHLQRAKNDKIDAALIASCTAAVRKIHAAPDLRLLPFAERLTMIDQISEDIARLKNRIESCRNAMIKKLWQTDIARLEKREKAELKVLVASIRKHRDLARRLELINSVAGIGLPTAVAILVRLPEIGRITREQAVALAGLAPYDDDSGERVGVRHIDGGRKRLRRAVYTASLAASFRWNPQLIQLYQRLIAAGKEHKQALVACARKMLIFANTVVARGTPWDDEPPARNASIAAPLSVS

SEQ ID NO: 90358 - protein, 421 aa, unidentified
MNANWSEQPFFAALDWAKEHHDVIVVDRVGTVVADFQFEHTAQGWDEFSQKMQAFGQCPVTIETSAGMAVDQLLQRGYTLYPINPLAAKDYRKRKAPSGTKTDRHDAWSLADALRTDGHAWRPLHPQDEATMTLRLLCRDEIALIENRTALVNQLQAALSDYYPLALESFKDWAKPFTWAFLRAFPTPQALAKAGQRNRQKFLHTHKLWRPDTSAERLALWERGQQLNASPAVLSAKSLLALSLATVLETLQRQIQEYRSRIEAAFAKHPDHDVFGSLPGAKEVLGPRLLSLIGSVREVFPDADSLMCQAGVSPVSYQSGKVCKARIRFVCDHFLRHTVHLWVDESRKTCDWAQTYYRAKRDQGHEHASALRCLGKRWLKVLWRMWRNHTRYDEAEHLKALQQHGSFVWQSLKYQLAEAAA

SEQ ID NO: 90359 - protein, 480 aa, unidentified
MNVKATRIKKQVNVENQAIKLLSKEELGIKIEVIKKELRSYTWRDLETNGKFAKNDKLSFITDDMLIAGCDIGSETHYIRAIDVRGRELSSGAFEFGNTSEGFANARAWVLALAAKNDKKQIVLGLEPTGHYWFALAVWMISNGVSVVQVNPYAIKQSKEIEDNSQLKDDRKDPKLIANLVKDGNYGMPYLPEKVYADMRRLSMFRDQLNEDRIRNINRLHRELKIYFPEYMDAFGKIDGAFTLEILKVSAIPSDITALGAEGMKNIWHNAKLRGRGYSRANEIVSYAEKSVGLTDGTGVGREAVKWYAEQILRLDEQLAEIESALHEKCREIPYAENILAINGVGENILAGILAEMGDISRFDDVKEIQKLSGMGLVACSSGKHKGQTKISHRGRKRLRYWLFQAAKSAVSHADEFKQLHEYYTTRSNNPLKKMQSLVVIACKILRVIYTILKTGTTYDSQKLLKDIKYPVSAQAAMAV

SEQ ID NO: 90360 - protein, 356 aa, unidentified
MQTQVTKKIDFSGKDLYIGLDVHKKSWSVTIVVDGIEHRTFTQPPDPLALRNYLQRSFPGGTYNSAYEAGFCGYGIHRDLNSLGIRNIVINAADIPTTQKDKLQKRDPVDSRKIARSLEKGSLHAIHIFDRSQEELRTLNRTRFYLMRDLRRSKNRIKSFLQYYGEPIPEEFDNNQWTLKFVSWLKQVKMQTGSGQDAFSNLISSYEYNRAQLLTLSRQIRQRIREYDNELYSLLKSISGIGPLTSSALITELGDINRFKNIDQLGSYVGFIPRIRESGETTHTGGITFRCNNFLRTLLIESSWQAVRMDPAMMQYYHKHLVNNKGHKVIIKVARKLLNRIRYVMKNRQPYITGVA

SEQ ID NO: 90361 - protein, 365 aa, unidentified
MFVGLDVHKATISVAIALRERGGEVRHWGTIPNRGDHVRRLAEKLDGAGRRLQFCYEAGPCGYGLHRQLTELGHDCMVVAPSLIPVKAGDRVKTDRRDAVMLAKLHRADELTPVWVPDAAHEAMRDLVRARATAVRVTGKARQHLQGFLLRHGRIYPGKKGWTKAYHRWLSTVRFDHPAQQIVLQDYIHSVTDAEARIERLTKQIADLLPDWSLAPVVEAVQAMRGVAFIVAVTVVAEVGDFSRFDNPRQLMAYLGLTPSEHSSGASVRRGGITKAGSSLARRALVEGAWSYRMQARVSRKLHDRIEALPQAVRDIAWKGQLRMCQRYRRLMAAGKPKVVATTAIAREMVGFLWAIARTVRPAHA

SEQ ID NO: 90362 - protein, 347 aa, unidentified
MTIVEDRPVITGGVDTHADAHVAAALDAIGGLLGVQQFPATAAGYADLLGWLGEFGKIALVGVEGTGSYGAGLARHLAAAGVRVVEVDRADRQDRHRRGKSDPLDAVSAARAALSGRASGAPKGRDGAVEAVRALMVAKRSARRERTQAINQARALILTGPDELRERLAGLSAAALAAAAAGLRPRPGDDVPGYATRIALRELGRRVRFLDVQLGRLDELIIPLVTARAPGLLALHGVGPDTAALLLIAAGDHPERLRSEAAWAHLCAAAPVPASSGKTTRHRLNRGGNREANHALWRIVITRMSSHPATRAYVERRTAEGLSKTEIIRCLKRYTARQVYRHLRDGG

SEQ ID NO: 90363 - protein, 342 aa, unidentified
MLDTDTGEVVEKTLEHEAEKVREWYSALPGPIRAGIEATGSMRWFLKLMEELGIDCEVGHPAKIRAAEPRKQKHDRRDAALRLQLLMANRFPSIWIPSMAQRDLRALLLHRHQWVRIRTRVQNALQAIALSHGLRRGSSLWSQAGQQAIGLLPLAPYTAQRWAALPWLYRHLQEQIDDLDRKVDQLAGQRPQARRLMTHPGVGPITALATEVFLGDPARFADGKALASYVGLIPSEHSSGGGQWCGARSKQDNPRRRFLWCEAAGHAVRHDPELKCFYRRKPVQKGLGKAKVAGARQLGIRLWIMLRDQIDYEEFCHRGQMRQKNGGAHAGMPDRESGPAAQ

SEQ ID NO: 90364 - protein, 404 aa, unidentified
MELTAIHKRVIGLDVHQSQITACAIIEGVDGSALVEQRQFGAFKRDRRALADWVASLAPDEVVMESTGIYWKSPYAALEEVGVRALVVNARHVKTVPGRKTDVGDAQWLATLARAGLLRRSFVPPALMRELRLISRQRQKLVGQLSSEKNRLHKVLTDSGIRLGVVVSDLHGQSARAMVKAIIAGHAPHDVLQFASRRLKASREELYDALQGEITGSHRFVLAELMQHIEEIEARIARFDARLLEGLSGHRNALALLQTLPGIDQIGAAMLLVEIGDDMSVFGQADRLASWVGVCPGNNESAGKRKTARVRKGNPYVRRLLCEFAHAARRTKSVFQSKFQALVVRRGFKRAVIALAHKLLRTIFFMLKRGEHYRDSAIDYEALSVQRNAPRWIKALTRFGYLSA

SEQ ID NO: 90365 - protein, 365 aa, unidentified
MKHVTTYVGIDAHKKDLFIAMLIGDAKTPVTWTVPNESNAVRRLVRKLEREAPGPVRACYEAGPCGYVLQRQLTTPGVTCQVIAPGLVPRKPGERIKTNRRDARKLAELLRAGVLTEVRPPTPEEEAVRDLCRARDDAREDLQRCRHRLGKFLLRRGLHYDGRNWTRAHRQWVDSLAWTHAAERLLVEDYLLAIDHVDARLIELDRQLVKIAEANPYREPVAWLRCFRGIDTLTAILILAELHDFRRFESPRALMAYLGLVPGEDSTGEKHRRGRITRTGNGLVRRLLIETAWHYQHRPNVGAALARRRKGQPSRVIAIADKAQQRLCRRFRRFVEQHKPAPKIAVAIARELAGFLWATLQAPAA

SEQ ID NO: 90366 - protein, 520 aa, unidentified
MARTRSRKQRRSRRPQVLQKPRGTFHPRVQRVGPEHFGIVSVDPAKARSKWMLCDFYGKVLVPPTFVPHHRGELQAALATLRDAVQTHGLKDLLVAVERTGRYHHPIKHAFAAAGFEVRIVHPFATQQFRQASDPGQKTDDTDLAAIHRAASSGFALAEAPLDRPWRELQLLVRHRRDLVHKSSALCCQIREHLDAALPGYAACFAELWESPLALHLPRHLGSSQAIGQAGLEGLRARLRQDRVGFQERSLHRLLVWASQAPPPDVAAERHLAIALLLDDDRRQKRHEIQALEQQIAAHLTRTPYVLLLSFPGIHVVSAADFAGEMGPISHYANSRAITGRAGLYPSRYQSDQVDHPHGPLVRCANRKLRATILAIADNLLACNRHFAALAAHWKAAGKDPRKTHVKVAARFCRIAYQIVAGRQVFRHPSLPGRSYILQKLLDFQSQHQTPTAECLAQLQAATDQLPRREHAAEAAPLVRALRHTRQARRRGPQPLGQILPIVLARLGVTPVQSPESGDS

SEQ ID NO: 90367 - protein, 353 aa, unidentified
MMLIGSDYHPSWQQISWLDQETGETGERKLVHATGEAEKFYKQLAAPARIGMESTGNCQWFVEMATAAGHEVWIGDAAKIRASDVRQQKHDKRDAALLLQLLREGRFPRIWTPSSEQRDLRQLLIHRHKLVRLRAQAKNELQHLAMNQGVQKQRRLWSKAGQKLLLELPLKPWASRRREDLLSVLELLDKKILSLDLAVKEAAGKDSNARLLMTQPGVGPITSMAFVLTMGDVSRFPRGKQVASYLGLIPREYSSGGHQRYGPISKQGNRFMRMLLVEAAQVAVRCDPQFRNEYLHRCHTKPKGVAKVAAARKLAIRLYWMLRTQKQYSEIVSIESSSRVPLAVRREADRPKD

SEQ ID NO: 90368 - protein, 410 aa, unidentified
MAERFVGIDVALREHRIAVLDRDGEAVGQSFTIAASKDGVATLLRTLAARAATAAQTLIGLEASGHLWENLEAALVSAGYRVLVLNPLQTRRYRDVVRRKAKTDDIDAHVIAGLLRSGAAQASYVPDEQIQSLRELARLRARLMDDRQNYLRQLIAQLDVVLPEHRTALGDLLSARARGILAQFPTAQHLAQASPRAIRRAAQDAGTRGFALDAAVAVRDAARQSLYSGKAAAARAQVVRTLVSQLERLTTAIDEVDRAATALLPPSEPGTGPSDADLLQTIPGIGPHTAATLLGELGVLARFTNARALVAYAGFYPVIAESGGRVATPRLSAVGSRIARQALYLAAVNAVRRSAEWRTIYLRKRAQSKKAKQALIVVAVKLLHTVYAMLKHRRPFNPSRLLVAAATIGT

SEQ ID NO: 90369 - protein, 343 aa, unidentified
MASIHYVGLDVHKKTVAVCVKQADGTIVERGTVAATREALTDWAEGQTMPWVGVLETTLFAHWIYDHLEPYAVELKMAQTRRLEAIASAKRKNDHVDAAMLADLLRCNLVPECYVLPRELRELRLQLRIRHFLLHQTVRLKNRLAGLLMEAGEPYNKQKLHQARYFGELLERLEHVPESVLDLLRMTRGLIEVFDRAQAALLRGLLTHPDLQARVGRLMTIPGVGQVTALTWALEIGEPERFSGVRKAVSYCGLCSAQDESGEHSRRGPLSKQRNAHLQTVLIEAAKLAPRWNPWLAEVHQQALTRGHPNRATVAVARKLVSLLLAVDKRGTDYEDRSSAVAA

SEQ ID NO: 90370 - protein, 375 aa, unidentified
MTDIVAQTHPFVIGVDTHARTHTYAVLTAAGEHLGTETFPNTTVGRTRAIAWAGRRSGGVSDALWVIEGAGSYGALLARDVTRTGYRVVEAAHPSRSRPGGGKSDPVDARRIASDVLPLPLHELRNPRQDDGLRAATQILLTAREELTGERTRAINSLTALLRIFDLGVDARRALSTRQIAEVARWRTRAENIATATARIEAVRRAKRILELNEEIDANLSRLTEFVNASPAAELPLRTGIGTVSAAHAFVAWSHPGRVANEAAYAALAGVNPIPASSGNTTRHRLNRGGDRRLNRALNIIAMVRMIHDPETRAYVARRRADGKTDREIRRILKRYLARSIYRSLNAVATSPTGEASSPLLTDRAGRPPRLVKTS

SEQ ID NO: 90371 - protein, 409 aa, unidentified
MKLFVGLDVSSQDAKICFLNGEGDCLQSFTITNDLPGALILKKKILDTASKSNCKIIKIGLESTSIYSYHPAMFLHNDKELRTYGSQVFMINPKQISNFKKSYPEMDKTDTIDAFVIADYVRFGRHTMSIVKEEQYMALQQLTRSRYQLVHALTKEKQHFLQHLGLKCSQFTQDVESSVFGNAMMELFLERFSLEEMAQMPLQELVFFLQEKGKKRFGNPEDVAKSIQKAVKGSYRLSKVVEDSIDLLLSTSIQIMRTYQAEIKEIEKGIESLMSTLPQTLDSIPGVGPVFAAGIVAEIGQIDRFADETRIAKYAGLFWKKYQSGRFTAENTSLTKSGNPYLRYYLVEAANSVRRHVPEYRDYYTKKSVEVPKHKHKRALVLTARKFVRLVDALLRNNQIYAPGRGVDR

SEQ ID NO: 90372 - protein, 352 aa, unidentified
MTLVGCDLHSRKQQVAVLVTDTGEVLEQELLHGGDAVERFYRALPRPVTVGIEATGYTLWFHAVMQKLGHTLLVGEAAKIRAMVVRKTKTDRRDAQHLLDLLKHERFPTVWMPDPTTRDLRALIAHRVRLVRMRTMVKNGLHAIALNQRVALGPSLWTKRGLAQLQALSLPPHTANRRADSLELLTWLTTHIDQLDAQIAEAAAADARAQRLLTHPGVGPLTALITVLVLGPAARFPTSKHVVSYVGLAPAIHSSADKYHLGKITKQGNALLRWILGQAAPLAARADGELRRAYFAVLHRRGRPKAKVALARKLLVRLYIMLRDQIDYEEFRRRGRVRRSRIAVNPVSATTM

SEQ ID NO: 90373 - protein, 343 aa, unidentified
MRHYAGLDVSVKETSVCIVDESGKVCRETKVPSHPEDLARALHDRAWCLERVGLEAGPLSQWLFSGLAATGLPVVCIETRHTKAFLQAQVNKSDRNDARGIAQMMRVNLFRPVHVKTLTSQKRRALLTARKLLQEKALAVDNDIRGLLRNFGLKVGPIGASRFETRTRELVDGIPELAEIIDPLLEARRKLRELFAVLHRKLLAIVRDDTVCRRLMTVPGIGPVVSMAFTATIDVPARFKRSKAVGAALGLTPILNQSGESKRLGRVSLCGDGMTRTLLYEAAQVMLTRTNKWSWLKAWAMKVAARRGIQKAIVALARRLAVILHRIWVSGTDFRWTREVQST

SEQ ID NO: 90374 - protein, 428 aa, unidentified
MSYRIAGIDVHKKMLAVVVSDVEIESEFQFERRMFSSNPEQLRSLAAWLVEQKTEEIVMESTAQYWKPVWETLERHWKPLCEKREGARRRSGTLHLAQALSNRGRRGRKRDFIDAERLVKRLVARELTLSFVPDPEQRLWRTATRKKYQLRRDVVRLHNQLEALLEEAHIKLSSLVSDLLGVSARRMLKALADGETNPAALAALAHERLRATPEQLCDALGACRELKPVYRRLLKMALEQLQLLEQQIGQLDQELATLLHPHQDAVQRLAEVPGFAVDSAQQIVAEVGPTAATFPSEKCLSSWVGACPGEEESAGVNYSHRSPKGNRHMRRLLNQAANAAIKVKGSIFEVVYRRCVPRLGHNQTIGVIAHRQCRLIWLILHQGTRYEERGPAVTMRSRYQRTWRMIRQLRQLGYRIESPSPQPGQAHA

SEQ ID NO: 90375 - protein, 291 aa, unidentified
MSNVKSSRLDFTGQPIYIGLDVHKKSWGVSIFSKYGEYKTFNQPPEADKLVHYLSHYFPGALYYAVYEAGYCGFWIHDQLRKKGIQCLVVNPADIPTKNKERRTKRDPIDCRKLARSLRNGEIEGIYVPCRSKLENRTLIRTRQSMVRKQTRCKNQIKGMLLFYGVVIPGERGMGHWSRRFIQWIERIRMERASGDIALKAHLEELNHLRQLIASLNRAILHLARTEEYRPFVRLLKTVPGISTLTAMILLAELGEITRFPSLDELSCYVGLIPDTQESGEKEYVGGITQA

SEQ ID NO: 90376 - protein, 431 aa, unidentified
MTRPNPTPTTAVLVAIDVAKSRNEVLIEVPGNRRRRRLTVANTRTEHDRFIAELQALAPRPVIVGFEPTGHYHRPLAWRLVQAGFDARLISSVALARTREALHNGWDKNDPKDAQVILHMLQIGAAKPYHDPLANEINNIQELSVTHEVISRAKTEVQHRILTHYLPLYFPEIERFKGNTRSDWFFALLEQFPVPAAITALSKEAFVAAAWSVVGRKVSKSRLLGDIWETAHRSIALPVSPDAPAIEMFRVVLGEARRLIAQRDAIEEAAIDLLGDHSDFQRLQQVPGIGPIHALTILAEAGDLRRFRHHRQFLKFCGLDLSTYQSGQYRGKTKLSKRGNARLRRTLWMAAQVAIRQRENSFRDKFDRYVARDRHDPDLRRKAFTAITAKMGRVVHAIIKRGDDYRPFVEGPVPGGGTPLYWCHEGASATL

SEQ ID NO: 90377 - protein, 332 aa, unidentified
MKGRRIMTASSSSDNLFIGVDIGRASFDVAWHRGAGARYANSSNAIAMFVGKLKAGPVPTRIVIEPTGGYEKPLVKALRGADLPVEIIHTSRFSAYRAMVGVKAKSDSSDARLLAAYAAASDEVRGRKPHHVVLPEDPIREELAELASRRDQLKHMIHAETCRLSTARNAALRQAIIAHLDMLKAEDQHTHKAMLTLVRTRVDLKRAQGLLKTISGIGDKSALACIALVPELGQIGNKAAAALVGVAPFTRTSGTLRAPARIHGGRAAVRSVLYMAAVSASRHNAVLRPFYQRLLAQGKKAKVALIAVLRRLVVFANAVLRSQQPWKGATLA

SEQ ID NO: 90378 - protein, 345 aa, unidentified
MKHYAGLDVSVKETSVCIIDEAGKICREVKVPSHPEDLVDVLKDPAWRLERIGLEAGPLSQWLFSGLVEAGLPAVCIETRHTKAFLKAQVNKSDRNDARGIAQMMRVNLFRPVHVKTLSSQKRRALLTARKILQDKAVAIENDIRGLLRNFGLKVGAVGVAKFDERIRELVEGMAELVEIMEPLLAARQKLREMFTALHRKLLSIVRDDGVCRRLMTIPGVGPVISLAFCATIDVPARFRNSKAVGPSLGLTPVLNQSGESLRVGRVSLCGDDMMRALLYEAAQVMMTRVQKWSWLKAWAMNVAKRRGLKKAVVALARRLAVIMHRIWVDGTVFRWTKEAAPATA

SEQ ID NO: 90379 - protein, 393 aa, unidentified
MICVGIDVAKDKHDCFILSSEGEVLADVFTIPNNAEGFDTLLQTIRRCARPEDKIKVGLEATGHYSYNILGFLLNEGLDTYVINPLHTNLYRKSLSLRKTKTDRVDARTIAAMLMSDVDLKSYTDTAYHNEELKSLTRYRFDKVRERAKLKQSVSRLVTILFPELEKLVSTLHMASVYALLSEFPGAKQVSEAHLTHLKAVLYDASKGRYGSDMATTLRDAARCSVGSVMPAKSLELRHTIRLIHELDAEIEDIEAAIQSMMGEIQSPITTIPGMGVRTGAMILAEIGDFSRFDSPDKILAYAGMSPSTYQSGQLSLSGAYSHMEKRGSRYLRYALYNATKYVCLWNPTFAAYLAKKRAEGKHYNVALSHATKKLVRLIYALEKSKWPYSTAA

SEQ ID NO: 90380 - protein, 347 aa, unidentified
MNYIGADCHISSLDFAVVNEKGNITQKAKVETSALEFMKFVKSIPKPRKIYIEEGELADWLLETSLKFGEKLIITDPKINKWIGKAGKKDDKIDAEKLAQLARGKYIKEIYHPVNKRRRFKELVFAYHDTVKSQTRIKNKIKASFRREGIRCSGDTVYSDKYRKEWQKKLPANMVVRLIVNQLWTQLDQIRAAKETLKRHIRIQGKQFSEIKKFIKVPGIGLIHASTISAIIETPHRFANKKKLWMYAGIGIAERKSGEKVYSKKLTREYNRLLKNAVKQATEAAISARDNQFRRQYLKLTIEKGIATHKAKLTVARSLLAAIYGMWKKGEAYDPQIDNKRFKENNK

SEQ ID NO: 90381 - protein, 278 aa, unidentified
MHQEWILRPRQVETTRFRDWAERNLKEGDAVVVEATGSVWDIYDIVAPLVSKTVVAHARKVRQIAEARVKTDKEDIKRLITLLIADVVPEVWVPPVHVRELRSLISFRWRLNKQMTMSKNRLQSVVQRFNLNPPEGGLLTEKNRGWWEEQEFSDLTGFEVEQDLEILEALDRQKEALDQKLAELSNSEPWASDMVYLMQIPGFGPVFSMVILSAIGDIKRFSHPKKLVGYAGLGAGVHASGEKYQEKSITKEGRKELRWAMVEAAWRAVGSDPYWNAQ

SEQ ID NO: 90382 - protein, 313 aa, unidentified
MKSGAYQLVEMDKFVNTLEAGDEIAVEATCNTRWFAEQVQEKVSRVVLVNPREFEVVKNSVKKTDKNDALNLARFLKADLLPEVRAKREETERVQSLVNTRTKLVRLKTSLINKIHALFVSNGRKLKKASLASDKGLEKVLLSEWSAIERIELEIIIEQIRSLKVSIKKLDTAIEAESGKLKGFESLVSMSGIGSLSAGILLAVIGNIKDFATADKLASYFGIVPRVSNSNEKVNHGRITKRGNKTGRTTLVQCSLAAIKKSEYLKNYYEQVKARRGHGKAKIALARKYLGIIYNTLSNNWVFADFNNFELAE

SEQ ID NO: 90383 - protein, 373 aa, unidentified
MEEITKIHVGLDVHKDSISVGAAEPGRQSARVVGKVAHDMGKLTKLLSRVGAPERLHLVYEAGPTGYGLQRALAAQGYTCEVIAPSQMPRRPGDRVKTDGRDCIQLAECSRAGQLRAVWIPEPADEAMRDLSRAREDAVNSRTRARHQLKGFLLRHGLRFAGKTSWTKAYGEWLGSLNFEAQPAQTAFTEYWLEVQSADARVQRLTQALRDAVPGWRFEPVVKALQALRGVELVTAVGLVAEIGDLRRFEHPRKLMGYLGVVPNEASSGDRVRRGSITKTGNAHARRLLTEAAWHYRFKARIGSHAQRRQRDLSPPVCEIAWNAQLRLNKRFATLQARGVQLNKACVAVARELAGFVWAVGRQSMLETGDWQT

SEQ ID NO: 90384 - protein, 414 aa, unidentified
MELLHERCAALDIGKKDLKACVRTPSPKGKRSRRQEIRTFATTTNALLELRDWLVAEQVSLVVVEATGDYWRGAFYLLEDQLNVILVNAAHAKGLPGRKTDVCDAAWLCQLGECGLLRASFVPPEPIRQLRDLTRYRTTLTAERSREAQRLEKELEDAGIKLSSVATDITGVSGRAMLAALIDGERDPQVLAEMAKTRMRPKIPHLVQALTGNFGEHHAFLCRLHLQRIDELTAAIAELSARIEEQMRPFARQLEHLMTIPGVGQTVAEVIVAETGTDMGRFRTGANLASWAGVCPGHHESAGNRKSGKTRHGDRWLTGALGTAAMAAARTKDTTYLGARYRRLAPRLGKKKALVAIEHSILVAVWHMLTNNVDYHDLGGDYFARLDPERAMRRIIRQANSLGFTVRFDPIQAA

SEQ ID NO: 90385 - protein, 370 aa, unidentified
MKKSSKKKSEKLSEKTMNDGVAAIGIDLSDRTGRFYAIDDEGKKIADGKIALRTPELEKWAMSIAPTLMVIEAGTHSPWISRLLARCGHEVIVANPVKVALITQNVNKSDPVDAEYLARLGRFDRELLFPIQHRGEQAQIDLQVIRTRDIAVKMRTTAISHVRGAVKSFGGRLSQCSTEAFVNTTRKEVPEALKTALDPMFVLIDQLTKTINGYERQVLKLVEQRYPEVERVSQIKGVGALTGLAYVLVLEDAKRFADSRSVGPYLGLTSKKDQSGDSDPQRGITKAGNRLLRRLLVQSAHYIQGPFGVDSDLSRHGEKIAARGGKRAKKRATIAVARKLSVLMHRLWVSGETYEPLRNSTSTAEATKAA

SEQ ID NO: 90386 - protein, 355 aa, unidentified
MTVDAPGSDKLSRHAVAGGDGAALLDLLARLRTTAERRTGRPIEVLVIQEAGLDGFWLHRLLERHGTSSHVVDPASIAVNRRHRRAKTDAIDGEMLLRTLMAWARGERRVCSMVRPPSPEEEDRRRLTRERATLLKERIQHTNRIKGLLCGQGIVDYDPLRKDRLARLDALETGDGRPLPERLKAEIRREIERIELVCSQIAAVERERDALIERASEATGPETPAAALARLKGIGGELGSLLWLEALFRRFDNRRQIAAYAGLAPSPWQSGGTDREQGISKAGNRRLRHAMVELAWFWLRHQPDSALSAWFRERVGQGRGRIRRIAIVALARKLLVALWRYTTQAVVPQGAAFKA

SEQ ID NO: 90387 - protein, 481 aa, unidentified
MNSKQVFKKQNQDICEIFNHAEHPKKVMIVAIDYAKHAHFALICDGCGTSLKAPFEVENSSEGLRFLQQQIEASLRRHFIPAKQIIIGGEDCGSFSLNFVHALGRTGYLVIGVHAQEAKLQRENYQASTDKLDLLGIAKMLLDRRGSTRSGKVPHERNLRNITRHRAAMVNNKTALRNRIHSLVDQIFPGFLDERKSGITAFSAASCHLMHDRFSPAHFRRRKQKVLVRELQKFEVKEPEVKAAKLLAYATEVIESPSELVGTLQSSLRNEIILYEGLIRCIEQIEKEMALLLAPTPGALLTTIKGTGITLAAGVTAEIGPMAFQNSLRRLTSYAGIVPRVKQTGGSENAASHGTVSRRCNRILKNYIVQCGCHLGLHGPDDLREDHQRRTSNGQHADFGMARKYLRIGSYLMRYNQVYLPPELRKHADRDVLKNYYLKQWPIWRKKWQQSGAISQAFSPENPLGIWRIAIQEIYEISLPL

SEQ ID NO: 90388 - protein, 375 aa, unidentified
MSHVEGLNTETIVVGVDVHKYSHTAVAIDCFGQELGEHEFSNDYLVDFVVWLNSLGLRENLLVALEDVNGYGCHIVKHLANEKIVMRYVPGILTERHRKQSIHREKSDRVDALRVAKVILTNYEETLPAKESIANQNERATATSLDFFLVERRSLVSEKTILKNQLHAMLHQCLGDHYTDQFTKPFNTKSIIYYLKTLKPKTATDTEQLALIMSIRRRLERLKLLTNQIKEIDQEMAKVAKSSKAINSLRSEIKGCGHITACTLLAEVTTIKRFQNKAQFARYSGIAPIHKSSGSHNRLYTSPYGNRKVNRALHTIALYQISRTKDPDSLGRIYYDKKLKEGKTKLWALRCLKRQLANRVFQTLKQEYLTHPELN

SEQ ID NO: 90389 - protein, 455 aa, unidentified
MRTDRYQQKRQAVLGKSILGIDPGKAKHHGAILDASGAQQGTSFGFSVSREGFDHTLWKQIQKRLDAYRPEDLVIAVETSCNLWKTIAHYCHEKGYTVALVKPLTTYHSRSLMKHDFSRTDPKDAFLIADNTQKGHYDVFQVFNPHLEAMHQLSITYDKLWKDRVKAKLRLRSFMETYFPEYLSAFAIDTKTSLYLLGKYFLPRHFLELDIEEEAPVLLRSSMRHHGRETLVDLRAWAKTSIGVPACQVKEDALRIVLDGWVEDLQGVEDQIKRVEKALIGLAKQDPCFDILTSIPNISQNLAAQFIAETLGPDRFDHFKQIEKLAGLNLRLSQSGKYAGRRRVAKIGNTRLRRILYQMTQLTAKTVPQVRCKFRRRQLKRKCYRKSIIASTPQLLRLIVSLIQEGRCYQHKTDWNRELRKLEKAYDKQEKTSPKPTYKNSHIRRQKLVEQNRAA

SEQ ID NO: 90390 - protein, 379 aa, unidentified
MIATTRPEMSVSEPTLYVAFELGKKEWKLAMTSGFGVAPWLRSVASGDWRGVDRAIAQGRARFGLAAAVPVVSCYEAGRDGFWIHRALQQRGIRNRVVDSASIEVNRRARRAKTDRLDALKLVTMLVRVCWGERRVWSEVHVPSVAAEAARQVSRERTALTQEQTRLTNQLKGWLATWGATLPRRRPSGWWTTVSDWAGAPLPVEVQARVARAEARRAVLEGQIAELDAQQRAAVTTAAPASALRQLVQLKGVATTSASVLLDEGLVWRAFQNRRQIGGLLGFAPTPYESGESAREQGISRAGNNRLQAISIQLAWNWVRWQPHSALTAWYREQFGTGKRSRRIGIVAVARKLVIALWRYVTTGVVPAGAILKGARPVA

SEQ ID NO: 90391 - protein, 466 aa, unidentified
MLTPISGHLHVGVDIGSRCHAVAIGLSDGRLLEEFEIAHSAAGFEDFFSRIEAQSESHPYPVVVAMEGYGGHARPLDSLVAERGWSLFNVNNLKLARFKEIFPAAAKSDRIDTRKTLELLQLREHLPLAGDVLQEVMARPEENDVLKRLTRRRRRLVNERVRLTSVLHSDLQAAAPGLVEITRDVANLWFLNFLTCRKDLRTLARIRRASLLKLPAIGACYADRIQAWQKCTCFSRDAGLVGTMIRQDALRVLELKRQIKALDDEIARVAETSSAARRLASIPGFGAVCSAELAGEIGNIARFKSEASLALYLGMATLDHSSGKLRGSKSPKHVNTRAKAAMMNALDRHRKEVLQSQRYYETKRAEGKTHNQAIRALGRHLCRVIFKMLRSDRPYRIDPPGDLADNQMADNQMKASAREPGSNSGSQPSNPPAADRENGPPGGRPSKVRSSPLAAIGSPACTAGPP

SEQ ID NO: 90392 - protein, 403 aa, unidentified
MTKYHVGVDVGKYRHHVTIRDISSDTYCKSFSLTNGREGFDEFISCLEKLSVGKNDFLIGIEACPYGVNLSYFLLGVGFNLVEVNPFRAGQFRKAQGKKAKTDKIDSRTIAAILSLGDHKILSIPDPILDNLKDLTRFRTDLVNERATMIIHLQEALSILFPEFNSVFRQLDSAGSLAVLATFPGPEHIIAAGEETVGKTLSLASPHRMGRGMARRIIEAAQNTVGVIQKQPGLGIKISILAKRIMSLQLTIRELDKQITEMFDSLPCKLQGFPLGRAPTLAAIVSEIGNIHRFPTLKKFLSYLGWCPQTFQTGNFRLEHPRMSHAGNKYIRRLIWMLSVFGVRAVPLYREYFQRRVMEGKSKMHILIAVGRKILSTLYAMLKKGVPYDPNWEENGHIAVAGR

SEQ ID NO: 90393 - protein, 392 aa, unidentified
MDSPPPRHHSATVAFEEANGSEGETMKKHSSKHNPLSSTDVELCTTICVDLAKQVFQLAGEDASGRVIYEDRIKSRQAFHDFLLKLPPTVTVLMECGPGAQAWARLLQGKGNAVRILPAQRVADHRSGAKNDRNDALAILRAGRDTSIAAVPIKSTTALAVQALHRIRRGSIKRHTAIGNQIRGLLLEHGVSMPQGDAAISKHVPRAVEDASLPLPDLLRELLDELLTDWQSLAERIAGLSRRLETTAKEDAVAQRLSTIRGVGPIIATAIVAKETEPSRFASGRMYAAFFGIVPDQHSSGNKIRLGRMSKRGDGYIRSLMIQGAHAVLSQLKPDSDQPDDRRLSRWLSRLGRKEAAIRLANRNLRIIWALLKSNKVYQRKPNSNSEAAMSL

SEQ ID NO: 90394 - protein, 432 aa, unidentified
MKKIRENAAGIDIGAKKVFVSIEDQEVKNFFTFTEDLEQLRDYLLKHKIKTVAMEATGVYWNILYEILEEAGIDVWLVDGRQTKQVPGRKTDVKDCQWIQQLHSYGLLNRCFVVESDIKELRSYQRLREDHIRSAAMHVNHMQKALTEMNIRLKEVLSQIHGTSGLAIIEAILKGERNKETLLKMCHSSIIKNKKEEILKSLNGKYTQAGLFALRQALESYNFYQRQIQQCDKMLDKVIKRMGDGGTDQKQQSLRKPIRHNKPDINNLGISLIKIFGGKDATVLSGITDYTWMQLLSETGTELTRWPSEKHFTSWLGLSPGQHTSGKTKKNKRKAGRPKAGQIFRQIAQSLLTSKHIALGAFGRKLRARKGPSIAIKSMARKLAVLYWRIMVKGLEYVEKGIHKYEEQLLAQRHRTLIRLATELNAQVSYNL

SEQ ID NO: 90395 - protein, 428 aa, unidentified
MQAVEASERTQAVWEAVIERCCGLDVHQKTVTACLLAGELHQQPGESLHTFSTTTRGLLELRDWLAEHGCTHVAIESTGIYWRPVFHILEDTVTVLLVNAYHMKQVPGRKTDLKDAQWIARLLRWGLLKPSLIPPKPIRDLRDLCRYRKKLTEHASAEKNRIQKVLEDANIKLASVVSNVFGVSGRAMLEALMQGEMSPEETADLARRKLRSKIPQLVEALEGHVNEHHRFLVQMQMEHLEYLEEAIARLHERINEKIRPYQHEVELICTTPGIDTVSAQHIFAEIGGDISVFPSEGHLASWIGVCPGNNESAGKRKSGRTTKGNRWLKALLVQTAHASSRTKGTYLKAFYHRVAARRGKKRAALAVAHKQTTIIYHELSENKPYQELGENFFDLRNQKALEHRLVRRLRNLGYRVDLHPEPVTSQCS

SEQ ID NO: 90396 - protein, 457 aa, unidentified
MSKSQNPTKEVIPIMKKRIYRRMPVNDLQPETVSHADLGGKLVFAIDVAKVDMVAALAAAGGHVLHTICWKAPEQNPTVLAILRDFRAAGVTVEAVIEPSGTYGDVLRHQLEQDGFPIFMVSGKRTHDAKEIFDGVPSLHDAKAAAIIARLHADGLSTRLADEVPERRQLKAALAIMDLHQERYLQLVHRLESWLARHWPELPTLLELTSSSLMALLARIGGPADVAAQPGQATKLLRGISHRLLDDEKIAAIITSANTSVGVPLVGLERDALMAIAAEAYHAHRAFATARTKVAQLAATTPAAALAPVVGPTTAAAIYAEVGDAKSYHCTRAFLKAMGLNLKEKSSGTVQGQIKITKRGPSRVRQLLWLAIFRWIQDDPIANAWYQRKKQRDGGRASRAAVALMRKLAKGLYHVVRRWPVRRRDHLPRRRACTKAPASRRCLTPRATLRVRLRTHS

SEQ ID NO: 90397 - protein, 341 aa, unidentified
MSNANTYIGVDLHKKSCYVTVMNGDGQIKKQTEISTDSDKVSRFFKKYTAGQVAVESTMNWIPFYENLESLGCHVVLSNPLATKAIAAARIKNDKVDSKILADLLRTNLLPTAYIQPREIRDLKELVRQRVSYVQWRTMLKNKIHSVLFKSNVAQGFSNLYGIAGMKWLRNLELRGIYRQELDRYLKTLDLLNGQIEELSQTIMDTAKTDYDCKLLMTIPGISYFSALVIKSEIGDISRFPNSNKLCAYAGLIPSTYASADKVRFGRITKRGSKWLRKSLIDAATSGSRHPSRLCFFYRKLKKNKGTGKAKVATARKLCTIIFAMLADKQPFREFTPIKQR

SEQ ID NO: 90398 - protein, 353 aa, unidentified
MKKVLKEVAGIDVAQKELVVSLGRLYENLDIEIISYKVFKNTENGIKYFIDWVASNSNNANSVRYVMEATGVYHEKLAYALDESGFDLSIVLPNKISNFFRTLDINTITDKTASQAIMRFGLERKLDNWNRPKEAYRQLKQLTRERDQIVDQRSMVKNQLHAEKAEAVPNERSLKRIAERIKFLNGQEKEIKMDIATLLKDYPDIMERVKNICTIPGVRELTAVIVLAETNGFELIRNKKQLTGYAGLDVREKQSGTSVKGKPRISKKGNRHLRKSLHLPSLSSVKYNKSHRDLYARIVAKSGIKMKALIAVQRKMLELIFVVDKNKTRFDNDHQQKRTLDANAESILLQTSL

SEQ ID NO: 90399 - protein, 400 aa, unidentified
MMTPDDIDVWVGLDVGKSAHHAHALDHDGNTLYDKPLKQDEKAIRTMLGKLSKHGRVLLVVDQPNTIGSLPLTVARNMGIAVAYLPGTAMRRTAQLLPGDAKTDRRDAHVIAWAALKLPETLRDAGPDDETLAALKLLAGHDEDLAHESTRHVNRLRSLLLQTHPAFERALKGERITRDATLALLERYGGPMGVKRAGIEDVKDWAKSNGLRAGRIIDDMFKAIGEQTVTVPGTLMAETIIPSIAHDIKTIRDRRREVDRQVEKLLEDHPLLTVLTSMPGIGVRTASNILLGIGGDIANFKSSAHLAAYAGISPATGQSGTSIKGERPSRRGNKRLKNALWQTAFVASTKHPPSVAYYKRKREQGKHHNAAIICLARRRCDVIYSMLKNGTLYQEPALVA

SEQ ID NO: 90400 - protein, 411 aa, unidentified
MIKENYIYVGIDLHKETHTAVMIDCYNQKLGEITFPNRPADFPKLVAKVKKCNTDGKTIVFGLENAYGYGRALAVWLIDKGYLVKDVNTAISHRQAKHRGAMYRKSDSDDAEAIALATLNMLDKLPDAYPNDAYWSLGQLVHRRDNIMKQRTRLVNQLHEQLCIAYPSYKQFFNDISRPTALYFWEHYPSRKYLKGKSVEDLRAELVPVSHNKCSTKTCEKILDAVASDKVKNNAYQDARDMVTLSIVSDLQHYDKQLAEVDKMLEQMYKMLGCTLTTIPGVNVITAVKILAEIGDIKRFSNANKLAQFAGIAPLHLSSSGKGKDVATKQGNRRLQATIYFLAIQMVQVSSKGTPRNSVVRAYYEKRKAEGKTSQQALICISRRLISIIYGMLKYGTEYRMPVVENAGENR

SEQ ID NO: 90401 - protein, 304 aa, unidentified
MNATTVKRSSASLVGVDVAKSVFQLAVADGNWKVIETHRLTRSQFERWFVNREVGLVVMEACGSAHHFARWLNGLGIEVLLLPARYVRAYVKRNKTDAADAAALLEAARASDISPVRVKSVEQQALQGLHRTRSLGMGTRTSRINALRGFCREFGIAIAQGSRLGVEQISRVLADPNSAVPELIRGTMKLLVEEIRLLEARIAQLERELSVLAKQSPACTILLSIPGVGLLTATAMTAATSGSVSHYKSSRHFSSWFGLTPREHSSGNTRHLGRISKQGDRYLRMLLTHGARSVLQQGHLRSGQ

SEQ ID NO: 90402 - protein, 364 aa, unidentified
MCILSENGEKVQEKYGVLTKELDTLRDVLVENNVGEVAMESTSIYWMPIWRVLESDFDLKLVNPYFIKQLPGKKSDVKDAEWIAICLQKGLIKGSFVPDVAIQRLRQYNRRIFDLNKDISYKLTKLDMALQRCNIRISNYISSTDSKSYKKVVEKLASGLTDPQELEKCIHGRTVNRFGKDIITASLTGVINETDIDIMSQLKSEIDLAERHKSECLMKMREICMENYPEQLENIKSIPGIKEQSATSIIAEVGVDMKMFLTAAAIVSWCGLRPRNEESAGKIKSRKIVHGNKYLRRTLIECAWAASKTQGCFYNKFSYTQVNIRKKNVLKVRVAVARKMLVTIWNILSKGEAYREILDCIQPQ

SEQ ID NO: 90403 - protein, 378 aa, unidentified
MSITQTVLQGQDTVIQADLYLSFELSDKQWNLTLSDGRRGPSRYSIEAGDTSAVMQCIVKAKARCKLDPRAKVHSCYEAGRDGWWLHRWLREQGIDNIVVDSASIEVNRRARRAKTDRLDGDKLLAMLLRHRAGERVWSVLHEPTAQDEDARRMHRELERLTHERTAHTNRISSLLVLHNLRPRLIIGGRKWAPWWASHSEQVPPALRAEIERESARLALVKQQVKALEAARRQDLADGKQPLVAQLSQLRAIGPKGAWILVKEVFGWRRFANRRELAGCLGLAPTPYASGDSQTEQGISKAGNRRARALLVELAWSWLRLQPDSALSQWFNQRFAASGKRTRRVGIVALARRLAIALWRYLERGEIPDGAVLKPTGA

SEQ ID NO: 90404 - protein, 315 aa, unidentified
MEAMIEKCAGLDVHQETVVACVLFGSLDQRPQKTVESFSTTTTGLLKLSDWLSSYHVTDVVMESTGVYWKPVWNVLESDFHLVLANAKHVKNVPGRKTDVKDAEWLAKLLRSGLIEGNFVPPEDIRDLRDLTRYRKKLIHQRTSEQNRIHKVLQDANIKLTSVLSNVFGVSGRRILEAIINGEKIEMRNLCEMVDGRTKASLADIANAMNGRIRRHHREMMRYHWEHMTYLEKSIEELEKQIDLCLEPYRKEVELLDTIPGLNKNGAATFIAEMGVDMSVFKSVKHLASWAGLSPGNNESAGKKKRVKLQKETKH

SEQ ID NO: 90405 - protein, 345 aa, unidentified
MEHYAGIDVSLESASVCVVDATGRIVREAKVASEPEVLIEWFRRLGFAVARIGLEAGPLSQWLYAGIREAGLAVELLETRHVRDAFKAMPVKTDRKDARGIAQLMRLGWFRPVHCKSLPAQEMRALLTARKLLQTKNHDVEMSVRGVLRGFGLKVGPTTPRTFAGRIRELVAGHTTLSTVAEALLAARSTLFEQWQKLEKGLRSLAREDRRVRLLMTAPGVGPIVALTYASAIDDPGRFKSSKAVGALFGLTPRKYQSGETDVTGRISKIGDGGVRTALYEAANVILTRPVKGSTLKSWGMRLAARAGMRKAKVALARKLAVVLHRMLADGTSFLADKAAAAATR

SEQ ID NO: 90406 - protein, 406 aa, unidentified
MKCFVGLDVSSTKLDVCIMLSDTSTPVTASLSNDLSGATEIKNHILDLNHTYHFERIVIGMEATSLYSFHPAMFFHEDSQLKELHVEIMVEQPNKIKKYRDAFYIADYFRIERFSPSFLKEEKYMALQHLTRTRLQIIEQLTRTKQHFIENIYYKCNTLAYQFKKEELSTNLWSSTMMTLMTDEMTLDELANMPLQELDDWLQKLGKGHFKDSEKLAQTIQAAIRGSYRLSKLQQDSVNVILGLLAREIRNLEKMIKEIDKAIEDMVETIPEYQCLTSIPGVGKVYAAGIIAEIGQIERFKDHPQVAKFAGLNWREKQSGNSNSQHTSLVNRGNRYLRYYLVEAANSVRRYDDEYKDFYKKKYHEVPKHQHKRAILLTARKFVRLVDVLLRNHQLYTPPRRIMEDN

SEQ ID NO: 90407 - protein, 342 aa, unidentified
MAIAIVGLDLAKHVFQVHAVDEAGRAVLRRQLRRAGVEAFFKTLPPCVVGMEACASAHYWARRISALGHEVRLIAPAKVKPYVQHGRKNDANDAAAIVEALMRPHMVFVPIKTEEQQAVLMLHRARDLLVRQRTMLVNAIRAHLAEFGIVAAQGRHKVKALITGLDNTEMPEVARIALWQIADQIDECDKRIDALERRILAWHKSDEASCNLATIPGIGPITASAIAATVPNPSGFKNGRQLAAWLGLVPRQNSSGGKERLSGITKTGNTYIRRLLVIGATSVIRFARSKAPGTAEWLKKLLDRKSARLASVALANKMARIAWSVLTRGEVYRDIHPVPKPT

SEQ ID NO: 90408 - protein, 376 aa, unidentified
MENDSTLYVGLDVHKDSITVAYALGNDEVELLGKIGTTQADIERLCKRLQSKARRVCIVYEAGPCGYGLYRELVQKAFDCMVCAPSMIPRKPGERVKTDRRDAAKLVRLLRAGDLSAVYVPSVEDEAFRDLARAWVSAKDDLKRARQRLKAFLLSHGVRYAGRADWGPAYRRWVSTYAFASAWQQLAFEEHRRSIEDRLTQCERLEAALREAVVEWRFYPAVLGLQAMRGVQFTTAVGMLAELGDLSRFVHPRQLMAWLGVTPSERSSGGKRHLGSITKTGNSYARKLLIDAAWSYRHPARVSPEIQRRHEGIPKAIIDRAWDAQIRLCRRYRKLAARGKNVNIAVVAVARELAGFIWDVTRLAMSLAIPRQAWTP

SEQ ID NO: 90409 - protein, 349 aa, unidentified
MLYVGLDLSRKRLDFHAAAADGELVAAGGAPPDADGLRHLVRRLGDAEVVAVIETMNGARFVHDQLELAGWDVRVADARKARALAPLACKTDRIDAWVLSELARRDLVPEVWLPDPSIRAERERARFRLHLVRHRSALKNRIHATLIAFGHPCPVSDLFGVGGRQLLERLALPEAWRETLETSLYLVDELDEEIEECQRELKRLGADHAYVPLLTTIPGIAWTLAYTIAAEIGDIARFPTPVKLIGYTGLCPRVYQSGESDRRGPLRKNGPRYLRWALIEAAQHAARSPAYPYRPLYERTRQRIGRNRGGKVAKIVIARKLAEAIWHMLSRNQPFDPCSGRRLVSLTAN

SEQ ID NO: 90410 - protein, 425 aa, unidentified
MRLVYPVCCGVDVHKTFLVATIITTANNIFPKYQQKRFSTYYSGLLEFKQWLLDNNCKDVCMESTGKYWVPVWNVLEAASINVVVANPKWVSAVKGNKDDKKDSKWIGDLFRMGLVPGSYIPIKDIRILREFTRYRSKLVSMRSSEKNRFQNAFTVCNLTLDAVVSDMFGVSAKAIENYLLDTDTVDPNYCVFLLRGSLKKKASDVVEAVKGFNMTAEQKERVRIIQDHFDDIDKRIAQIDNVISQLVANYEGQIALLCTIPGIDRRLAITIISEIGTDMSVFGSSKRLCRWAGLTPGNNESAGKKKSVRISRAGVYLKPALVEAAHAAVKATQKSPYFRTKYERIMKRRGKKRAIIAIARMMLTAIFAMLQSGEVFNPCDLHKFDMPEELRKKLTLSSAKDAVKLLVSLGLVPEGSISLEPLAG

SEQ ID NO: 90411 - protein, 392 aa, unidentified
MYIVGIDIGKNHHEASIVSPEGKQIGRSLRFATTHKGADSLMSFIFKNIGNSPCVFGMEATGHYWYPIYSFLKAKGYTIYVINPIQSDSLRKMYIRQTKNDSIDSFLIAKVIRFGQFGTTSMADENILAMRQLCRYRDSVISSRTEIKLRIGTIMEQIFPEYEKQFSSLWVSTSMGILEKYLTPENIENAPIDELFEIIKDKSHNRLTRAKAISIKEAAADTFGIKIAQDAFSFQLKQLIDRMNFLDKQIEALDCQILEYYEKFDCYLHTIPGIGIIGAATILAEIGDISRFKNSSSLIAFAGIDPTVRQSGEFNSTHNHMSKRGSPYLRHAIFLAATTCSFHTSPLNAYYKKKRDQGKHHLTATGAVARKLTTVIYAVLRDSKPYEPKKFC

SEQ ID NO: 90412 - protein, 343 aa, unidentified
MQTVTTVGLDIAKSVFQVHCVDAAGQVVIRRQLKRRYVLAFFQKLPSCLVGIEACASSHHWSRELQALGHTVRLMPPAYVKPYVKRQKNDMADAEAICEAVTRATMRFVPTKAPEQQSCLVLHRTRHLFIRQQTAVINSIRAYLAEFGIVAPVGRRGVEELLHVVADPSDKRVPEIARACLAALGAQLLSLKEQIVKFDRMIMVWHRSNETSKRLHYIPGVGPMLATALVASVADPRTFRSGRNFSAWIGLVPKQHSSGGKDRLGNISKQGDRYLRSLFVAGALAVIRYAKIHGTTHRPWLTALLARRPTKVAAIALANKIARMAWAMMAKGERYKQPVALAA

SEQ ID NO: 90413 - protein, 408 aa, unidentified
MVQVRTVGIDLAKNVFQLHGVDRNGRTVLRKRLTREKLSAFMANLPRCLVGMEACGSAHYWAREFGKLGHEVKLINPKFVKAYVKSDKSDQNDAEGICEAVTRPSMRFVPVKTPEQQDLLALHRVRAQLVKTRTALANQMRGLLAERGIVVGKGLARLRAALPLIMEDQQGLLGGLMRELVAEISERLRLHEERIKRYDGEIARRCAQDERCQRLVAVEGIGPLAATAMVAAVGDARQFNTGRELAAWLGIVPRQRQSGNREVRLGISKRGDRYLRTLLIHGARAVVNVAERRGDARGVWLSRIKHKQRGGANLAAVALANKNARVLWALLTRKERYRPATLVAGAQVATSVRLQPDNAVAPRAARKGAPAQPSRHALARLCPAQSESANTAPAPSSKVRNRRGGGKR

SEQ ID NO: 90414 - protein, 342 aa, unidentified
MFIIGCDYHPSTQQVAWVDTETGECGEQRLTHQGGEAERFYRELKKKETSVRVGMEATGHSRWFERLLGELNYELWVGDPATISAKRVRKQRNDRRDAQHILKLMLEDNFPRIWVPTPENRDVRQLVLHRHRLVGMRTRVMNQLQAIAMNEGIRRKKRLWSEKGRAQLESLSLPLWTRRRRQELLELLDRFDPSIDQLSQAIEQEAERMPEVQRLQTHPGVGPITALAFVLVLGTPHRFGCSKQVASYLGLIPCEDSSAERWRLGHISKQGNVLLRFLLGQAAHSVAHSDEQWRHQYAHIAMRRNKAIAKVAMARKLAVRLFWMWRQGWDYQQWKKFGSHVG

SEQ ID NO: 90415 - protein, 394 aa, unidentified
MKHFVGIDNSHTAHSVVIIEETGQCVKQFEITNDLAGFEKLHKLLSEFSEIFIGFEITFGPLVDFLRMSKYKIYSINPLKIKRYKESYTVSGNKTDSVDSHAIANYIRSNERNLKQMVFSSEAIETLKILGVSHDRLVKERTRNINKLTTLFRQYIPLYDGLFSENAAKTLLKLVIKYPTWGDLASQTEEELKAFFKSCKYYNPKSIHRVLEKINSYSQKISPAVEAGFSCEAVSIARMLLQLQDDISILEKKMVSLVEAHRLGKVFMSLPGAGIVLGSKLLALFGDNKTKFSKARDAQTLFGTAPVNYQSGSYHRVTMRRACDRRARSILYKFAFCSINLNKWSKVYYDEHRKKGSTHSIAVRALSNKWLNILFAMWKNEINYCPLIKVPIAA

SEQ ID NO: 90416 - protein, 320 aa, unidentified
MMSKIILGIDVSKKTLDAALIFDNRTFCKQFKNSADGFRLLAAWLESLQITRVHACLEATGAYSEAIALFLHERGHWVSIVNPLRIKGYAGANMQRNKTDRLDARLIADFCQTQEPDEWQPPSAAVKCLQSLVRRVEVLEEMRQSEENRLANAALEIKPSIERMITLIKEEILQLERQIKQHIERNPDLKEQSELLQTIPGIGERTANVLLSEIEFDRYSSARAIAAQAGVTPRRKQSGTSLKQTSLSKLGNARIRRALYFPAIVARQHNEIIKEFAERLKKRGKTPMQVICAAMRKLLHIAFGVLKHKRAFDASLAFSA

SEQ ID NO: 90417 - protein, 414 aa, unidentified
MKKRNYRAKKVNNTHWDQIKEQLAGEAAVFAIDVAKKQQFGLLSTEDNTVSVLLKWNHPEQTGELLRALKDLDCPLTMVMESTGTYGDALRYQFRQNGFEVDQISAKRVCDAREVYDGVPSLHDAKAATVITRLHRSGLSRPWRESTDDERCLDALRREYDLHQSQYQRNQNRLEAYLGRHWPEVLYLLPLDSVTLEYLLREYGTPERIVEASSEAAKNMRSWGKSGLTQDKIERVIQSAAHTLGQPCIESERQYLQALAEEMRHSRLQQKKAKHALEAIIKSDDELRPLGYILGMVTTAVLISCRLDPRQYDCARSYQKACGLNLKEKSSGQYVGQLKITKRGSSVARHYLYFTALRLIYRDPVVKIWYQHKVDPRAKNKTVIALMRKLSKALWHVARGERFDASKMLTVSTA

SEQ ID NO: 90418 - protein, 343 aa, unidentified
MDHYAGIDVSLERSSVCVVDATGRIIRETKVASEPEALVRFFRELGLPLTRVGLEAGPLSQWLHAGLTGAGLEAVLLETRHVKAALSAMIVKTDRKDARGIAQLLRMGWYRPVHRKSPPAQEVRALLVGRKLLQGKLLDVELSIRGLLRGFGLKLGEVSKGRFAVRVRELVAGQPTLERVIGPMLRAREALRSEYLALHRAVLAIVREDAVCRRLMSVPGVGALVALTFASAVDDPARFRRSRDVGAHFGLTPKRYQSGETDVTGGISKVGDAMVRAALYEAANVMLTRAGRFSTLKRWALEVAKRRGARRAKVALARKLATVLHRLWADGSEFRFGKEAAAA

SEQ ID NO: 90419 - protein, 353 aa, unidentified
MPVYVAVDFHAREQTISWCDTADGEVHRTKLRHQHDDVRKFYEQFRGEVIVAFEASGYSAWFEQMLAELGHTVWLGNAAAIRRKAPRKQKNDRRDADLMLDLMLKRDFPRVHTFSAESRTVLRQLRYRHKLVKVRTIAKNSVHAIGINAGLPWRGRLLTQTGLEQLQGLPLSPVLSQQRDEWLALIRLMNKQIGAVEESLEQRAKDDEAVALLRTHPGIGLLTALALRYTLDPIARFTSTRCVVGYAGLDCVEDQSSERRRMGSISKQGSRLLRFLLNEAGQTAARKDPQLKQFYRRLLRRRDKPKAKVAVARKLLVRSFIMLRDQIDYAEFVRRGVAARVARETHSPKVTDL

SEQ ID NO: 90420 - protein, 478 aa, unidentified
MPTMTKSRARLKTQGAAPVTALASQDRVDVPTAKRRARRRLEPTETPASPVEAKNLSENRAILPPSGRIPDGTPTRSETQLDGAQGKMTMRIVALDLGVKKTCYCELSQGHVVQRMTVSDVCSLEHLLGPNQPPAKVAIEACRDAWFVHDLLVEWGNEVVVIDTTRSKQLGIGQHGRKTDRIDAEVLARALESGRIPKAHVLTPKRRDLRRVLLVRRALVEARAQLVTTARGLVREQGVKIPTCHTSSFVSRVRAQQLPADIAQLIEPMLVLIQLIDTQLVSISERLDALCAQEPTVALLTTTPGVGTVVAACFVAVVDDAKRFHRSHQVESYVGLVPSEDSSGGKRRLGAISKRGNSYLRALLVQAAWSIVRSRDKSNPLYLWVAQLIERRGNRIAVVALARRLVGVLWAMWRDGTVYDTEHLAKQNVRGLRGAIQTLEQQSAALAQAAKKTSAKHSRTTSTATPRRKTKTPAAKAA

SEQ ID NO: 90421 - protein, 464 aa, unidentified
MHKRKGMMSPVVGEKEIEGLPVLRPNAAGGDLGSESHWVCAPNVERTGRDVEEFGAMTSELERMAEWLKERKIESIAMESTGVYWVAPLEVLERHGIEVVLVNTRELARVPGRKKTDRIDCKWIQRLHSCGLLMGCFRPKEQVCMLRTLVRDQATLVAEGGDWLRRMQKSLDQMNVRVHRAVKDIDGMTGMAILRAIAGGERDANNLAKFRDPRCKKSEKEMAEELSGHWREDHLFSLQQGLKMYDAIQQRIGEYEKELLRKLAEMEREDCQGKTAPILNNPQKAKAIKKRGEEPLRQAFYRISGVDLTSIDAIGVGALQVVLSEYGPDLSRFPTEKQFVSHVHLAPYKPTSGGKTLKKKRRGTGSSRVAAALRMAATSMRNSQSALGAYYRQTARRTGEKSVAVFATARKLATLIYRLLRYGKPYVDEGAEAYEKRTRERSIKGLTARAKQLGYQLTPKPSNA

SEQ ID NO: 90422 - protein, 404 aa, unidentified
MFYFGIDWSQDYHHLCILNEAGARVSQLRFEHSLAGFAQIEIERRKLDVPAGDCPVGIETTYNLVVDFLLEHDYPVYIVPPQATNGYRNRQRSSGAHDDDSDAALLASIMRTDRESHRGVRPNLALTQQLLAQIRLIEILRRSIQRQSNQLRAVLFRTYPQAVGLFSDLTNQIALEFLLAYPTAQDAQTLSREAFEAFLRQHGYTRSDLIPLRYAHLVEPFPAANPAVAQAYQGQVRVLAQVLLPQVRGRTQAIVQLGQLFEQHPDAFIFNSLPGTGLLLAPALLAKFGDYRDRFPTPGDVQAVAGTCPVTKRSGKRKLVQFRHGCDKEFRRITQQFARASVPQSGWAAAYWHEIRPDCQSDSHASRILANRWLVIIWKMWQDRQPYNEAYHLQQRALRRKPRA

SEQ ID NO: 90423 - protein, 430 aa, unidentified
MKANRVKNLALITPTTLLVGVDGHQENNTAGFSLANGNEPVRPVKFGNNRRGFLELLEKTNRVMSRNGLDSVVFVLEPNGPYWQLLARFLSARDYVVKVVNPLQVKMNRQTGDPSPDKNDFRDARSAADLGRQGKFNQTALLDQRYEDLRMLAGLRDSLVEERSMHKHRLRCGLVRTFPELRRCTSDLFGKGMRALLQVAPSAEAVVWLGTEAVSEVLKSATRGRLGKKKAIQIVNAAKESVGYAEATCAVRLQVESILSVAELLSEKIEQIELEMERLVSDLDEAALILSIPGIGLVTAAAILGQIGGFSQYENPGQIRKLAGLDLVGSQSGNHQGKLAISKRGRKLLRKVLYQAAVSSLACNEVSIRFYNGLIESTRPNRLKKKQALVAVMGKLIEIMFALVRTGKPFEFEHEWTRPGQAPEDLAQAA

SEQ ID NO: 90424 - protein, 426 aa, unidentified
MADLNDPIAAPHWVAIDVARYWNAVLVETASGQRHRFRMTNSAADMQRLIDFLVGLGGRCRVALEPTGDYHRPIAHRLLCAGFEVVSISSVAQSRFREAMFNSWDKNDPKDAAVILEMLKQGRTQLYIDPMLAGHHDVQEVSKTYYQISRARTKVQHAIINHHLPLYFPEMHKYWTSTRNEWWVRFMIAFPTPVHVRQHTCEEFIELASPLVGRRVRRVAKLTEIWESCADSGALPHDPQSIAVQTFVFTLRHYQHLSEMRDQLEAQAQTMLARDADYAHLMSLPGIGPIIAMTILAEAGNLRRFGHHRQFLKYCGFDLAKSQSGVHRGREQLSKRGNARLRLAFWMAAVVAIRVRENSFREKYERYVSSNPKDPDLKRKALTAVAAKMARVAYGLIKKNQPYRQFFEQSLPSGTIPLNRAVGAPT

SEQ ID NO: 90425 - protein, 356 aa, unidentified
MGGSVKHVAGVDTHKDTHSIAVIDRVGAVVAELTIAATVEGYAQAITRVTEFEGLVWGIEGTGSYGRGFVDELLRRGASVFDVPGSLTKRHRRNASRRGKSDVQDARAIAGVVLRESGRLGRCERSDEQEAVRVLYDRRDRLVHARTEAINRIRAAALRLDVRELPAKLSNGVGLRKVHEAIDFLRGSSYTADALIAEIEEAVSDVERISDRIRTLEKQIRPFVERLAANLLTLNGASLVVAAGLIGHSGSLSNIRNAAAFAMRAGVAPVPCSSGKSKAVRVNTGGNRQLNRCLHVMALVQVRTAGHAGRVYYDRKRGEGKTHRAAMRALKRQLATVVYYRLAESRRLMERPTAAA

SEQ ID NO: 90426 - protein, 354 aa, unidentified
MHSMKQQVRRVVGGVDSHADTHQAAALDERGRLLGSKSFAVSAAGYRELLAWLASFGLIERVGVESTGSYAAGLTRHLLAEGVRVLEVNQPHAHTRRRRGKTDAIDAELAARHALSRASAVTPKQTSGIVESIRQLRVARNMKSRSAAIVQLGELVRTAPSELREQLAIRSTVKGKAALCRRLRPDTDRLGEPANGAKLALRSLAGRIARLDDEIAQLDGQLAPLVATAAPRTTALLGISTGHAGQLLITAGQNIDRLHSEAAFAALCGASPIPIASGKRGRYRLNPGGDRQANRALHMIAVCRLRHCPKTRAYAHRRSSEGKTKKEIIRCLKRYIARQTYATLRDDLRSLPIG

SEQ ID NO: 90427 - protein, 454 aa, unidentified
MAQRNRNLVPKPGKTRQPPMTIEHPNAAGIDIGSASHFVAVPPDRDDEPVREFPSFTADLNALADWLKACGVDTVAMESTGVYWIPLFELLESRGFTVLLVNARSVKNVSGRKSDVLDCQWLQQLLTFGMLRGAFRPSESICVLRSLYRQRTTLLRSQGRCVQHMQKALTQMNVQLANTISDIVGETGQKILRAIVAGERNGAVLADLRHGRIQASKEDIAKSLQGNWRTEHLFALRQALNMFDFIATQLAECDAGIEQQMQGMHRHDGEPGKDKRSGRPKNAPKLDLRRQLYKMCGVDLTRIDGINVTTALAVISETGTDMTRFPTAKHFACWLGLCPGTKISGGKVLSAKTKNIVNRASQALRMAAAALRSSQSALGAYFRRMCARMDKPKAITAAAHKLARLIHTMLTKGEEYTDQGQEYYEERYRASVLRNLTKRAEKMGMKLINAEHLA

SEQ ID NO: 90428 - protein, 348 aa, unidentified
MDHYAGIDVSLESSSICVVDASGKIVREGKVASEPEALIGWFGSLGFKLTRIGLEAGPLSQWLAGAMKAAGLAIELLETRHVRDAFKAMPVKSDRNDARGIAQLMRLGWFRPVHCKSTGAQETRAMLTARKLVQSKLLDIENSLRGILRGFGLKVGKTTELRFAGRIRELVAGHPSLEVIGEAVLAVHAVLLREFKALEKRVRSMARSDIKAKLLMSAPSVGPIVALTYASAIDDPARFKSSKAAGPHFGLTPKKYQSGQTDISGRISKIGDASVRAALYQAAHIMLTKPLKGCSQLKSWGMRIARRAGMKKAKVALARKLAVILHRMLADGRPFNPAVSIKLMATAN

SEQ ID NO: 90429 - protein, 352 aa, unidentified
MKRLVKQVLGIDVAQDELVVCLGKMYDDWTPDLVAHKTFANTTKGYSTLLDWVQKLTDASIPVGYVMEATGVYHESFAYFLHDQGLGVHIILPNKISNYARTLNVKTVTDKTASEAIAMFGLERKLDNWEPPKGIYRQLQQLTRERGQLMDESTVIKNQLHAEKAGAKPNKKSIKRGTTRLELIGKQLKEIMVEVSELISTDSETQAIVLLICSITGIGLLTAATILGETNGFELIRNKKQLASYAGLDVREKQSGTSVKGKPSISKKGNKHLRKAMHLPALVAIRHDERFKAIFARLVSKHGIKMKAAVAVQRKLLEMVYTVFKTKKKYDKEHLKNEQAKKESEVMDAMEG

SEQ ID NO: 90430 - protein, 430 aa, unidentified
MHNKNYISVGIDVGSAFSFMTILAPDETVILKPFKITHNNKDSLERAVSEIKKAEELYSLESRTFLESTGIYHFPLFCYLVDCGFNASIINPIITHSTKNGNIRKVKNDKIDSKGIAKLGLSKDIPVSQFPAKLVLELRSLTRKYYDLTDERSAHINKLKGDLHTVFPQYLDIFCDVTGKTSTMILRQYGTPDKILRGHKKTMIEKISKASRKGLAKASERYEKLCAAANAAKTFGCQIDSIYFNISLTLDLVEKLDSALDSILNRIRQLITFNKNEKFIQQIKLLNTIPGVGFLTAVTIMCEIGDFSAFRNPKQLFAYFGLDPEVNESGKFVGTQLHMSKRGSRIARRAIFAVALASIRTKRNGEGINPYLRKYYELKSVQKPKMVAIGAVMHKVCNVVFAVLRDEKAFELRSPEEHCKQYQRPALAAA

SEQ ID NO: 90431 - protein, 382 aa, unidentified
MTRAARFIPRDYEVFAGLDVDKKSMSVVFTDHQGTMRALRMAGKATPLVNYVRKHFSGQRVAFAYEAGPTGFGLHDELVRQAYTCVVVAPSKVPRVPGERVKTNRLDSRKLAESLRGGQLQSIHVPVRAYRDLRHLVQLRDTHVRQLGASKLRVKALLLFEGIPFPDPAERWTARAMRELQTLPCSETVRFKLDDLLDTQQFHFQAAARVTKQIRQYCLDDPELQQSINLLLSLPGIGWIVASHLVARLGDPHQITNGKQIAGFLGIVSSEHSTGDKENRGEITRSGDSRLRNKLIQSAWTAIKKDPELRAFYRRIYQRHPKKVAARKAMVAVARKLTTRIYVVLKEQRPYVIRPDSSIAPLTAEETVGPRDRLDGAQNDQS

SEQ ID NO: 90432 - protein, 448 aa, unidentified
MNESRIKKEQVKRISQLVVINPKAAGIDVSDKEMMVAYPINSTQLEVRVFGCFTHDLHSIVRTLKANGINTVAMESTGIYWVALFLLLQEHGFEVYLVNAKHVKNVTGRKDDESDAEWIQKLHSCGLLQASFQPDNMTRTLRSIVRHRKNLVQTSSNYINRMQKALELMNIKLHTIISDIDGKTGLLIIEAILAGERNPEVLADLRDKRIKASREEIIKSLEGYWTTEHLFELRQCYHLYCTHRQMIEECEMEIEKYLIEQIASKNFGIIPEIPKSKRKVSSKHKMQFNLTTYLKEILQVDVTEVFGISEISALTIMSEVGIDMTKWKNEHHFTSWLGLAPNTKISGGKVISSRIMKKKHYAGQAFRMAANSLYKNKSPLGDYYRRIKTKAGAGKAVVATARKLAIIYYKMVANKEAFNPQALIDYQYKYKEKKINQLKKKIALLEAA

SEQ ID NO: 90433 - protein, 400 aa, unidentified
MKQIVSVGIDVSKGKSTVCAMIHPNTIIKESFEVLHTVEEMSMLADYIGSLDGAIRIVMESTGHYHLPVAQFLYQKGFFVCVENAYIIRQFSRIMLHGAKTDPLDAKKLAKYGLAYWSELKPYKFHPSCYTELSLLSKQYQTYIKLLIAAKQNVIHLMDEMLPGFKEALDTASSVQFSKVKYVDFAKEFYHVDMIKSMGKEIFRENYKQWCKEKGYRFQSEKADELFHLAEDGIPTLPTEFPSTRLCMEVATEQVSQLGYALEQILSQMQNLAKTLPEYQTIRQMGGMGEKLCVRFIADIGDVRRFHNGKALVAYAGIDAPPYQSGQYTGTKRRISKRGNSALRKTGYEVMKSLKSHPPKTDTRVYDFIIKKENEGKSKKQAKMLSISVCRSCIKHQKMN

SEQ ID NO: 90434 - protein, 403 aa, unidentified
MNSVGIDISKGRSTVAVMRPFGEVVISPFEVRHTDSELSELARQLKSLNGETRVVMEATGNYHAPVAKLLHDAGLYVSVVNAKLVHVYGNNDLRRVKTDKKDAVKLANYGLDRWLTLPRYIPEEDTRLLLKNCYRQYRQYSKVQTVLKNNLISLLDTVFPNANRLFSSPIRGDGSEKWVDFVAEFWHCRCVSEKSEKAFANKYQRWCRKYGYNFNEAKAHTIHAEASGHIGVMPMSETTKLLVEQAVAQLRATSTALAALKHEMQALTSQLPEYPAVMDLFGVGPTLGPQLIAEIGDVRRFYSKKALVAYAGLDAPPNDSGDVTGRHKSMSKIGASSLRRTLFLVMSVYLQTAPLDEPVYQFMDRKRAEGKPYRVYMMASANKFLRIYYATVKAYLESLEHTA

SEQ ID NO: 90435 - protein, 420 aa, unidentified
MRNAGIHANSLLEVRRMYNAVGIDVSKGKSTVAVLQPGGTVIRKPFDVSHTSQNLNELADYLSSLDGTTKIVMECTGRYHEPMIKALSEAGLFISIVNPHLIKNFGNNSLRKVKSDPADARKIARYTLDNWTELRQYSGMDNTRTQLKTLNSQFSFFMKQKVAAKANLIALLDNTYPGVNKLFDSPTREDGSEKWVDYAYSFWHADCVRKIGLKAFTERYKSFCKKHHYIFQQDKPEKLFNASKELVAVFPKEKTYKLLIQQSIQQSNLASEHVERLRREMNELASTLPEYSTVMGIYGVGKTYGPQLIAEIGDVSRFTHREALTAFAGVDPGVDESGQHKSKSNRASKVGSARLRKTLFQIMTTLLQNAPEADPVYRFLDKKRSQGKPYYVYMTAGANKFLRIYYGKVKECLRNLEQTE

SEQ ID NO: 90436 - protein, 327 aa, unidentified
MKDRPESKPGAEAFYVGIDVSKDKLAVYAGDLFEGEIENNRTAIGRMVRDLRRKADRGTIFRFALEETGFYSLDVHLALDRLGQGVCVLDPASVRHYAIACKVMAKTDRIDARVIRRYAEETACDPTPVPSPTRLALREAIRTRSLLVKFRVMAQTFAKIVSGTVCRTVLRDVDRFLATRILKVEQEMLDRVGEDSRLNGVVECLAKLPGVGTLTATTVAVLAPELGSLGKRRSAGLVGLAPHPRESGRYKGQRKIGGGRADLRRALYMPALVAIQHDETLKAFYKRLVTVRKKKPMVALTAVMRKLFAHMDRVVARWNETESEPAS

SEQ ID NO: 90437 - protein, 343 aa, unidentified
MKDTIYDHYIAIDWSIKNMAIARMTKKSNKITAIDVPSDIEDLQTYLKNIRGTKILAIEETTTSQWLYAELKEYADRILICDPNRNKLLNEGPKTDKIDASKLVQLLKAGLMKEVYHSTDKFLYLRRVVSGYEDLVKSGVRLKNQRHALLRACGKRGKEKIGSSIDSQGEQFVLDCLDRQIEAYEKDKEGYENEFERLARKNPEIKHQKSLPGIGVINAVKIVARVVTPHRFSDKGHYLSYTGLIKLDKISGGRSYGKKNPRFSRQLKSVYKSGVLAAIGGNNPINDYYEHLIQEKGYPEHNARQKACRRLAILSLGVFKSGRKYQPFRSNHVKGSKEGTLGL

SEQ ID NO: 90438 - protein, 366 aa, unidentified
MKKITTRSVRRVSKLQDRQLTVGLDVGDRSSCYCVLDGNGEVVLEAKVATRPETMRETFSRMPRSRIALETGTHSPWISRLLSELGHEAIVAHARDVRLIGESRRKDDKIDARTLARLARIDPQLLSPIQHRSAEAQADLSVIRARYALVRARTGLICAARGLTKSFGERIRGRNPKAFKPEMGKTLSPQLRVALTPLLNVLEAITERIRDYDDQIEKLGEEKYPEVALLKQVKGIGTLIALTYILTLEDPRRFCKSRDAACYVGLQPGRRNSGQSEPQLHITREGDSYLRMVLVQGAQHILGPFGEDSDLRRWGLKLAERGGKNAKKRAIIAVARKLAVLLHHLWISCEAYEPLHNARKRRLAAA

SEQ ID NO: 90439 - protein, 328 aa, unidentified
MKKSYVIGVDVSKLTLDAHCYGQTQCLLVGNNLTGHRSFLKWVKKQISKDVTEVLVVMEYAGMYTYSFEKFLYGQGVQYVKRSALDIKRSAGMKRGKSDRADARMISQYGWYRREELKPAKPVGKTEQQLQQLMAHRDKLVRDKASYQVRLKELHQHMGEDLPARVIESTRFIVDVLTEEIKQVEKDIEELLKSESSLKRNFELIRTVKGVGFVSAIHMLLVTENFTRFCEVRKFACYCGVAPFKNESGTSIRGKTRTSHLANKKKSLLTMAAISAINHHPELKAKYEKKLSQGKAKMVALNMIRFELIERIFAVIKRQTPYVLRAAA

SEQ ID NO: 90440 - protein, 348 aa, unidentified
MKRLSGGIDVGSEFHHITILDEEDHILYNQKVSHKINEFAESINLFKKIEKKEKGEISFALEGKNGYGAPFGQLLINQGFTLYNVDNLKLKRFRQAFAGEWRDDQRDALMLSKMLKLKDHINSQREKVFIKIEKPSPVTESLKLLSRHQQTLIDEKVRLTNRLRKKLLEVCPEILKLAKLKNKKLIVILVKYPDFSKYKRITLKSLLKTKGIGKKQAPFLLKRLNRIEYMPDLTDIYKTIILSYAKRISELQEEIKDIDKKLDEIGEKNKGVEHLKTVPGVATKLASRFIGEIGNINRFPAEKQLAVYCGIACVNNDSGKVTKAKAVYKANKICKQWKCTYRRDGKSA

SEQ ID NO: 90441 - protein, 354 aa, unidentified
MIIIGADYHPGFQQIAFVDTDTGEFQERRLQHREEAEKFYRDLAAQGMEVRVGMEASGQARWFERLLSELHFELWIGDAAVIRAKRVRKQKTDRQDAQLILQLMLEDRFPKIWVPSWENRDLRQLLWHRHRMVQARTRIMNQLQAVALNEGLRCKKRLWRKHGRQQLESFRLAPWASRRRRDLLELLDRLNPTIAELSQAIEQEAGKFPEARCLMTHPGVGALTALAFVLILGRADRFQCGKQIASYLGLVPLEDSSGNRRRLGHITKQGSSMLRFLLVEAAQVTARSIPEWRSKYFHLAMRRGRKIAKVAMARRLAIALYWMWRKGWDYERVKKFGSHAGQLEPGHGVQSNTE

SEQ ID NO: 90442 - protein, 457 aa, unidentified
MGRKKKMEMEIVNPNAAGIDIGSRSHFVAVGQSEQDVKEFGVYAQDLTDICNHLKSYGITSVAMESTGDYWQNLFTELIKHDFHVILCNGKFTKHAKGKKTDVKDARWIQKLHALGLLTSSFLPDEQTEILRTYTRQRGNIIQQAASASRKMQKYLKFLNFRLDVVVKDVCGLTGMKIIEDICKGNLDPKELAKHRHYNCKKSEEEIAKALHGNNREDFLFGLKQEFETYQFLQKQLKQCDKQIDRFIKSFFKTRPELKKLKTDAKPYKRENKNAPAIKNFNQLAFQYFGGVDLLAIEGVSHATVLSIMAEIGPEGFKKFKTSKEFVSWLRLAPNNKISGGKILSSKVPKGSNRLKIALRQAANTIGNLKDTHLADFFKRIAFRKGRQAAVSATARKLGVIIWNMITKGIQYQPPTQYLYLDQKRKLGLVKRIRKQIDKFDIKPEDVGFNNSLTASG

SEQ ID NO: 90443 - protein, 363 aa, unidentified
MKIMVGIDLHSNNALCGLMDESGQRLAHKKLPCDLTAILQLLDPYKDHIATIAVESTFNWYWLVDGLQDHGYHVVLANPAGMQPYSGMKYTDDVSDAYFLAELLRLNLLPTGHIHDRQTRPVRDLLRRRLLLVRQRTMLILSFKSLNERTLGQRVSLARVKAMKVEEAQARFTAPADQLLSGTEIELMGHLTAAITKLEQHLLGVAGKWPTYQRLQELPGIGKILGLTIALETGDAQRFADAGNFASYCRCVKSLRTSNGKKKGENNRKCGNKYLAWAFVEAAHFACRYDDPCRRFYDRKKQQTNPIIATKSLACKLAKAAWHVMKEDVPYDATRVFGPAKKTDFGETGREPAKGSGHPSQQN

SEQ ID NO: 90444 - protein, 391 aa, unidentified
MVCVGIDVAKDKHDCCILDSDGTIRADCITIPNNMDGFKQLLQTIRDCTKRSDKIKVGLEATGHYSYNILGFLLDNDLAVYVMNPLHTNLYRKSLSLRKTKTDRVDARTIATMLLSDVDLKSYTDTAYHNEELKSLTRYRFDKVQERAKLKQSVSRLATILFPELEGLVSSIHGTSIYALLSEYPGTKQISEVHLTKLTNLLVTASKGRYGKDKAIQIRDAARTSIGSVMPAKSLELKHTIKLIRELTSEIDEIEVSIQKIMDELNPPILSIPGVGIQSAAMILAEIGDFSNFESPDKVLAYAGCSPSTYQSGKLTNCYAHMEKRGSRYLRYALYNATKYVCYWNPVFAEYLAKKRAEGKHYNVALSHATKKLVRLIYALQKSGKAYLTAA

SEQ ID NO: 90445 - protein, 431 aa, unidentified
MPESTVSRQPQEPQFAAFVGIDWADQKHVWCLQAAGSTQRESGELEHKVETVEAWVAQLCQRFGERPIAIAVEQLKGALVYMLAKYECLHLFPVPSTMAASMRKALYASGAKDDPRDANLLLDFLLQHRDRLHRLAPDNEATRRVQNLVEERRKLVDEKTAQLNRLTSNLKIYFPQILDWFKDLDTELVCALLEHWPTLEELQQPSPVELRKFFHQHHCRNGELIEHRIQEIGHARPAIHDRAVIEAKRVVVKVTVQLIRSLREAIAELDGKIAEAAAAHPDFFIFDSLPGAGAVMAPRLLAVFGSQRDRYGSAEEVQIYSGIAPVLERSGKMKWVHFRWACPKFVRQSFHEWAGHSMVKSAWARAYYQQRRNQGQDHHAAVRALAFKWIRILFRCWKDRVAYDEEKYLAALAKRGSPLSALLVVPTRTTM

SEQ ID NO: 90446 - protein, 348 aa, unidentified
MAVSIVETRAITGGVDTHADVHVAAALDPVGGLLGVREFPVTAAGYAGLLGWLGGFGTVCLVGIEGTGSYGAGLARHMSAAGVRVVEVDRSDRQDRRRQGKSDPLDAVSAARAAQSGRARGAPKGRDGAVEAVRALMVAKRSARSERTQAINQARALIVTGPEDLRARFAAHATAGLVADLASLRPRPGAVVGYHTRIALRELGRRAEFLDSQIACLDALIVPLVTGHAPGLLALHGVGPDTAALLLIAAGDHPERLRSEAAWAHLCAAAPIPASSGKTKRHRLNPAGDRQANHALWRIVITRMSSHPPTRAYVERRTAEGLSKTEIIRCLKRYVARQVYPHLRAAAD

SEQ ID NO: 90447 - protein, 408 aa, unidentified
MEVLHPRCAGLDVHKDSVVACVRIAADGTVKHEVRTFGTMTTPLEELAAWLRAEGCTHAAMEATGVYWKPVWHALEDELDLVLANAAHIKNVPGRKTDVNDATWIADLLAHGLIRGSFVPEASIQDLRALTRTRKQFVREKVGHVQRIQKTLEDGNIKIASVASDIMGVSGRAILEALIAGETDPDKLADRASGRLKASRATIVESLRGRVTANHRLLLRLHFDQVKAIEEAIATVDKEVDALIEPFRTAANRLSTIPGISDVVAEVIVSEIGVDMSRFPTPGQLISWAGLCPRNDESAGKRRSTRLRKGAPWLKTALVQAAWAASRAKKSYLSAQFFRIKGRRGARKAIMAVAASMLTAVYFMLRDGVDYRDLGHDYFDRVNKAKTAERLVRRLNDLGYQVDLKAAA

SEQ ID NO: 90448 - protein, 382 aa, unidentified
MENRPLKFGAKRIFGLDLSKKTLKACRLDEDSGFEKQNIFDEKMTDDGRHHLASRLRKGDYVAMEGGSSTSFLARYLMENTEAEIFVLNPCKLHIIFESACKTDKQDCIKIAKYIRDTNPSNWCLIPVPTYEETSMRSLINSQISTKQERNRAINQMHAFFNLNGVSFLKKSDLKESGRRHDLVDHYFPDGIQGMQARLMLQDLDNIELTEEAYGELVRQALLSRPKETLIWMSIPGIGPLTALACVAYIGDGRRFSTPDQLRNYVGLVPRIDQSGIREVIYGVNHYGCMPVRRNIVQAAWSVMNLSFDCRFRQRWLELKAAGKKGQKVAVKVANDMLTIGWTLLKKGELYNGLGDFSYLKRKLRIYKMTAIDSRCFGECLK

SEQ ID NO: 90449 - protein, 405 aa, unidentified
MEIFVGIDWAEAHDDICVLDETGTVLAKRRIAEGLEGMAQLHALLADQAVEPSQVVIGIETDRGLLVGALLAGGYQVYAINPLAASRYRERHVTSGAKSDPGDAKVLADLVRTDRHNHRPVAGDSELAVSLQVLARAHQNLIWSRQRLVNQLRNNLREYYPAALAAFGTELAHPVALGVLDAAPTPAMGRSLSQSKLAAILRRAGRERGVEEKATAIQAQLRAPQLAPPALVGEAYGKSVASTVRILRGINAELARLEEELAPSFEKHPDAEIYRSLPGLGVVLGARVLSEFGDDRTRFAHPKARKNYAGSSPITKTSGTRRTVLARMARNRRLADACHQWAFCALTGSAGARDYYHVLRQRGKTHHQALRALANRLVGILHGCLDHRQAYREHIAWPNSLTVAA

SEQ ID NO: 90450 - protein, 367 aa, unidentified
MKDSMFVGLDVHKATISVAVAEGDRRGEVRDWGKLPNRPDRVRKLAEQLGSKGRQLYFCYEAGPCGYGLYRQLAELGHDCMVVAPSLIPVKAGDRVKTDRRDARMLAKLHRAGELTPVWVPDVEHEAMRDLVRARATAVRVANQARQHLQSFLLRHGRLYPGKKSWTKAYRRWLSTNRFDHPAQQIVFQDYIHAVTNAEARVEQLETEIAELLPDWSLAPVVEAIQAMRGVACIVAVTVAAEVGDFRRFATPRQLMAYLGLTPTEHSSGNTVRRSGITKVGSNLARRVLIEGAWSYRMQPRVGRKQVDRMEGLPQAVRDIAWKGQVRMCRRYKHLVACGKPTVVANTAIAREMAGFIWAIAQEVTHA

SEQ ID NO: 90451 - protein, 416 aa, unidentified
MKIVRPICCGMDVHKNIIVATIGITNKKTRITEYIQETFSTLNSDLLNLKQWLINHKCFDACMESTGKYWIPIFNILEDEINIYLTHPKYVKAIKGKKTDKKDSKWICDLFKHDLIKFSFIPPKEIRALREISRYRYKLVGMRSSERNRYQNCMTVSNIGIGSVFSDPFGKSAQAIMKEVLESDIIEDEKILKCIHGSCKNKDKILDSIKHCNIETDQRFKMNESMTHMEELQVHINNCEIEMMKRAAPMFDQFMHITQLPGISTLSAILIISEIGVDMKQFESDKQLTCWAGLAPANNESANKKKSVRISKAGQYLKPLLVQCALGAIKDKEGYFGIKYSRIKKRRGHKKAIIAIARMMLVSIYHMILTGETFNPSDYESFRNPNPPIKQQVLTEESAIEFLKKSGFDVSKLTKP

SEQ ID NO: 90452 - protein, 422 aa, unidentified
MLEETQDREEIIERVAALDIGKAEVVACVRVPSPQNPGRRAQEVTTYSTMTRSLLRLADRLRELGVTRVVMEATSDYWKPVFYLLEAQQLDPWLVNARDVKHLPGRPKTDKLDSVWLCKVAERQMLRPSFVPPPEIRQLRDLTRYRADLVAVRTAEKNRVEKLLEDAQIKLSTVVSDIFGVSGREMLAALVAGEHDPKALAQLARTRMRVKIPLLEEAFTGHVTNHHRFLLRTMLARIDQASADIAAVETQIEELITPFAHTVERLDEIPGVGATAAHVILAEVGPDMTRFPTAAHLCSWARFAPGIRESAGKKKGRGTTGHGNRYLAAVLGEAAVTAGRTDTFLGERYRRIARRRGKKKAIVAVGRSILVIVWHLLSDPEARFHDLGPDFYDTRIGPDRKKRNHIRQLEALGYKVTLEPAA

SEQ ID NO: 90453 - protein, 423 aa, unidentified
MKKRIYRGVNVKKVDEERLADAVRGKRVVFGVDVAKEAMVGSVVVERNDVKLNVKWTHPAETTELVELITGLPAASIEVAMEPSGTYGDALRYQFAMCGVPVCRVSPKRSHDAAEVYDGVPSWHDVKSAGLIARLHLDGASEPWRDRTDEERKLAASIRTMEMYDGQENNNTNRLEALLARHWPEVTQHLRLKSATLVAVIKHFGSPQKVARQASQARALMRRVGRGGIREETVGAIVRSAQTTVGVPVIEAEARMLQTLAEEILRCRKAANKARVEVERLSEAHEAAGRIGQTIGKVTAAVLVSKVGDPQEYASASSLVKSLGLNLKERSSGKHKGQLKITKRGPSVCRYYLYLAALRLIQDDPVVRAWYGKKVARDGGKMKNRAVIAVVRKLVKGLWHVARGEPFDSRLLFDTSKLDLVQA

SEQ ID NO: 90454 - protein, 344 aa, unidentified
MYFIGVDHHKQVSVMTVLDEDGRELKNGRVPPFRRYVEEFLRPYRPFVAVLEAGWASYVMVDLLRELGGEVKMANPVEVKAIAHARIKTDKRDSRTLAQLLRAGLIPEVFQREAWNRRAQRVMRLRAHWVRKQTELRNKIRALLGQQGEEIRLEVERQERSLFTLKGLEVLRTLPLEGEDRMILDDLVRGHREVASHIKQSDGLVEALYDQIEEASRIDTVPGFATTLSVLVAVEIADIRRFASPAQLHAYAGVVPSTHASGQRQFHGHITKQGSAWLRWAVLEAVYPSIKKDLGLRILYQRLARRKGPNVAKVAVARRLLTIIYRILTEGRDYLPGLGNQSAA
